United States Patent Application Publication US 2025/0018062 A1 - sequence listing, part 5

SEQ ID NO: 7287 - DNA, 3753 bp, synthetic construct
  misc_feature 1..3753: note = source = /note="Description of Artificial Sequence: Synthetic coding sequence"
  source 1..3753: mol_type = other DNA
atgagtacagagcgcgacagcgagaccacctttgatgaggattctcagcctaacgatgaagtcgtcccctactctgatgacgagaccgaggatgagctggacgatcaaggcagtgccgtggaacctgaacagaatcgtgttaatcgggaggcagaagaaaaccgcgaaccattccgcaaagagtgtacatggcaggtgaaggcgaacgacaggaagtaccacgagcagccgcattttatgaataccaaattcctgtgcatcaaggagtctaagtatgccaataacgcaataaaaacctataagtataatgcgttcacttttattcccatgaatctgttcgagcagttcaaacgcgccgctaacttgtacttcctagccctgttgattttacaagctgtccctcagattagcactctggcctggtacactacactcgtgcccctgctggtcgttctgggagtgactgcgatcaaagatctggttgacgacgtagcccgccacaaaatggacaaggaaataaacaaccgcacctgcgaggttatcaaggatggaaggtttaaagtggcgaaatggaaggaaatccaggtcggagatgtaattagactgaagaagaacgatttcgtgcctgctgatatcctcctcttgtcttcgagcgaaccgaactccctttgctacgtagaaacggccgaacttgatggggagacaaacctgaagttcaagatgagcctggaaataaccgatcagtatctgcagagggaggacactctggcaacctttgacgggttcatagagtgcgaagaacccaataacaggctggataaattcactgggactttgttctggcgcaatacatcatttcccctggacgcggacaaaattcttctgaggggctgcgttattcgcaacaccgacttctgccatgggctggtgatcttcgccggggccgatacaaagattatgaagaatagcggaaaaactcgcttcaagcggaccaagatcgattacctaatgaattacatggtgtatacaatctttgtggtcttgatactgctgtccgccggcctggccatcggccatgcttactgggaggcacaagtggggaacagcagctggtacctatacgacggtgaggacgacactcccagctatagagggttcctgatcttctggggatacattatcgtgctcaacacaatggttccgatttccctttacgtaagcgtcgaggtcatccgcttaggccagtcacattttattaattgggaccttcagatgtactatgcggaaaaagacacacccgccaaggcccgcacaaccaccctcaacgagcaactgggacagattcattacattttcagcgacaagaccggcactctcacccagaatattatgacgttcaagaaatgttgcataaatggtcaaatatatggtgatcatagagacgcgtcccagcacaaccacaataagatcgagcaggtagacttctcctggaacacatatgccgatggtaagctagctttttacgatcattatctaattgagcagatacagtcggggaaggagccagaagttcggcagttttttttccttctggccgtgtgtcacactgtgatggtcgataggacagatgggcagcttaattaccaggccgcctcaccggatgagggggccctggtgaatgctgctagaaacttcggcttcgccttcctggctcggacccagaatacgatcaccatctccgagctcggcacagagcggacctataatgttcttgccatcctcgatttcaacagcgaccggaagaggatgtccataatcgtgagaacccctgagggcaacattaaactctattgtaaaggcgctgataccgtaatttacgaacgcctgcaccgcatgaaccctactaagcaggaaacgcaggatgctctggatatctttgccaacgagaccctccgtaccctgtgtctgtgctataaggaaatcgaagagaaagagttcaccgagtggaataagaagttcatggctgcgagcgtggcatccacaaacagggacgaggccctcgacaaggtctacgaagaaattgagaaggacctaatactgctgggcgccacagccattgaggacaaacttcaggacggagtaccagagaccatcagtaagctcgccaaggcagacatcaagatctgggttttgaccggggacaagaaggaaacggccgagaatatcgggttcgcgtgtgaattgctcaccgaagatactacaatctgttacggtgaagacattaacagtctgcttcatgcaagaatggagaaccaacgcaacagaggtggcgtgtacgccaaatttgctccaccagtgcaggagagctttttccctcctgggggcaatagggccctgatcattacgggatcttggctaaatgagattctcctggagaagaagactaagaggaacaagatccttaagcttaagttcccccgaactgaagaagagcgtcgcatgcgaacacagtcgaagcgtcgactagaggccaagaaagagcagcggcagaaaaactttgttgatctggcctgtgaatgttccgccgtgatctgctgtcgagttacccccaagcaaaaggccatggtcgtggatctggtgaagagatataaaaaagccattaccctggccataggagacggcgcgaatgacgtcaacatgattaagaccgcccacatcggcgttgggatatccggtcaggaggggatgcaggccgtgatgtctagcgattattcgttcgcccagttccgctatttgcagcgtctgttattagtgcatggaagatggtcgtatatacgaatgtgtaagttcctaaggtactttttttataaaaactttgcctttacactagtgcatttctggtacagcttcttcaacggatatagcgcacagactgcgtacgaggactggttcatcacgctgtataacgttttgtacacatctttaccagtcttgttgatggggctgttggatcaggatgtgtctgacaaactttcacttcggttcccgggtctctacatcgtaggacagagagacctgctgttcaactataagcggttctttgtctccttactgcatggagtgctgaccagcatgattctcttcttcatccccctgggtgcctacctgcagactgtcggacaggacggggaagccccctccgactaccagtcttttgcggttaccatagcgtccgctctggtgatcactgtgaactttcagattggtctggacacatcttattggactttcgtcaacgcctttagtatcttcgggagtatagccctgtattttggcattatgttcgattttcatagcgcgggcatccatgtgcttttcccatcagccttccagttcacgggcaccgcatctaacgcccttagacagccatacatctggctcacaattattctagccgtggccgtttgcctgctccctgtagtcgctataaggtttctatctatgacaatatggccctcagaatctgataagattcagaaacaccgaaagagactcaaagccgaagagcagtggcagcgaagacaacaggtcttcaggaggggcgtgtccacgcgacgctcggcttatgctttcagccaccagcgggggtacgctgacctgatttcctccggtcgctcgatccgcaaaaagcgctccccacttgatgcaatcgtggccgatgggaccgccgagtatagaaggaccggtgattcc

SEQ ID NO: 7288 - DNA, 3753 bp, synthetic construct
  misc_feature 1..3753: note = source = /note="Description of Artificial Sequence: Synthetic coding sequence"
  source 1..3753: mol_type = other DNA
atgtccacggagcgggacagcgagactacatttgatgaagacagtcaaccaaatgacgaggtggtaccttactcagatgacgaaacagaggacgagctcgatgatcaagggtccgcagtcgaacctgagcaaaacagagtgaacagagaagcggaggaaaatagggagccatttagaaaggaatgcacttggcaggtgaaagcaaacgaccggaaataccacgagcaacctcatttcatgaatacaaagtttctgtgcatcaaagagtccaaatatgctaacaacgcaattaaaacctataaatataatgcctttacctttatacccatgaacctgttcgaacaatttaagagagccgccaatctctacttcctcgccctgctgatccttcaagcagttccccaaatctccacccttgcttggtacactacccttgtacccctgctggtggtcctcggcgtgactgccattaaagacttggtggacgatgtcgctcgccataaaatggacaaagagatcaacaataggacatgcgaagtgataaaggacggaaggttcaaagtggccaaatggaaggaaatccaggttggggatgttatcaggttgaagaagaacgattttgttccggcagatatcttgctgctcagcagctcagagcctaatagcctttgttatgtggagactgccgagctggacggcgagaccaatctgaaattcaagatgagcctcgaaattaccgaccaatatttgcagagagaagacacactggccactttcgacggattcatcgaatgcgaagagccaaacaacaggctggacaaatttaccggcacattgttttggcgcaacacaagcttcccactcgacgctgacaagattttgctccgggggtgcgttatccggaacacggacttttgccatggtctcgtgatattcgccggagccgacactaaaatcatgaaaaatagtggcaaaacacggttcaagaggactaagatcgactacctgatgaactatatggtgtacactatcttcgtggtgctgatcctcctgtccgccgggctggccatcggtcacgcatactgggaagcacaggtggggaactccagttggtatttgtacgatggcgaggacgacaccccctcttatcgcggtttcctcatcttttgggggtacatcatcgtgctcaacaccatggtgccgatctccttgtatgtgtctgtggaggtgatcagactcggacaatcccatttcattaactgggacttgcagatgtactacgcagaaaaggacactcctgctaaggctagaacaactacacttaatgaacagttggggcagatccactatatctttagtgataagaccggaactctgactcagaatataatgacctttaaaaagtgttgtattaacggccagatatacggagaccaccgagatgcaagccaacacaatcacaataagatcgagcaggtggacttcagctggaatacttatgccgacgggaaactggcattctatgatcattacctgattgaacaaatccaaagcggtaaggaaccagaagtgagacagttcttttttctgcttgcggtatgtcacaccgtaatggtcgacaggaccgacgggcaattgaattaccaggcggccagtccagacgaaggtgcactcgtaaatgccgctcggaacttcggctttgcctttctggctcgcacccaaaataccatcacgatcagtgagctcggaactgaacgaacgtacaacgtactggccattctggactttaattccgacagaaaaagaatgagtattatcgtcaggacccctgagggcaacatcaagttgtattgcaagggcgctgacaccgttatttacgagcgcctccaccgaatgaaccctactaagcaagagactcaagatgcgcttgatatatttgccaatgaaaccctcaggacactgtgtctttgctacaaagaaattgaggaaaaagagttcactgagtggaataaaaagttcatggcggccagcgtcgcttccacaaaccgagacgaagccctggataaggtttacgaagaaatcgaaaaagatttgatcctgctgggcgccactgcgatcgaggataaacttcaggacggcgttcctgagactatttcaaagctggctaaggctgatattaaaatttgggttttgaccggagataagaaagagaccgccgaaaacatcggttttgcgtgtgagctgctcaccgaggatacgactatatgctatggtgaagacattaactcactgctccatgctcggatggagaaccagagaaacagaggcggcgtctatgccaagtttgctccaccggtgcaggaatcattcttccccccaggtgggaatcgcgctctcattattaccggttcttggttgaacgaaattctcctcgagaagaagaccaagaggaataaaatacttaagctgaagttcccccgcaccgaagaagaaagaaggatgagaacccagtcaaaaaggagactggaagctaagaaggagcagcgccagaaaaacttcgtagatcttgcatgtgagtgttctgccgtgatttgctgtagagtgacaccgaagcagaaagccatggtggtggatttggtgaagcgctacaagaaggctataaccctcgccatcggcgatggcgcgaatgatgtgaatatgattaagaccgcacacatcggagtaggcatcagcggtcaggagggcatgcaggctgtaatgagcagtgattattcattcgcacagtttcggtacctgcaacggctccttttggtccatggtaggtggtcttatatccggatgtgcaaattcctgagatacttcttctacaagaattttgctttcacccttgtgcacttttggtatagtttcttcaacggctatagtgctcaaaccgcttatgaggattggttcatcactctgtacaacgtgctgtacacttccctccccgtactgctgatgggcctgctggatcaggatgtcagcgacaaactgagcctgagatttccaggcctgtacatcgtcggacagcgcgatctgctgttcaattacaaacgcttctttgtcagcctgctccatggagtcctgacatctatgattctgttcttcatacccctgggtgcttacctgcagactgtggggcaggacggtgaggcccccagcgactaccagagcttcgccgtcaccatagcttctgccctggttatcactgtcaactttcagattggactcgacacatcttattggacttttgtgaatgcatttagtatcttcgggtccattgcgctgtattttgggatcatgttcgacttccattcagcaggtatccacgtgctgtttccttcagcttttcagtttacaggaaccgcgagtaacgctctgcgccagccatacatttggctcacgatcattcttgccgtggcagtgtgcctgctgcccgttgtcgcgatcaggttcttgtctatgactatctggccctccgaatctgacaagatccaaaagcacaggaagcgactgaaagccgaggagcagtggcaacggcgccagcaggtgtttcgcaggggggtaagcaccagaaggtccgcatacgccttctcacatcaaagagggtacgccgaccttataagcagcgggcgcagcatacggaagaaaagaagccctttggatgcgattgtggcagatggcacagcagagtaccggagaactggcgattca

SEQ ID NO: 7289 - DNA, 3753 bp, synthetic construct
  misc_feature 1..3753: note = source = /note="Description of Artificial Sequence: Synthetic coding sequence"
  source 1..3753: mol_type = other DNA
atgagtactgagcgggacagcgagactaccttcgacgaggactctcagcctaatgacgaagtggtgccatactcagatgatgagaccgaggacgagctggatgatcagggcagtgctgtcgagcccgagcagaatagggtcaatagggaggccgaagaaaaccgggagccctttcggaaagagtgcacctggcaggtcaaggctaacgacagaaagtaccacgagcaaccacactttatgaacacgaaatttttgtgtattaaggagtctaagtatgcaaataacgcaattaaaacttacaagtacaatgctttcacatttatccccatgaacctgtttgaacaatttaaacgggcggcgaacctgtatttcctggccctcttgatcctgcaggcagttccccagatctcgactctcgcttggtatacgacgctcgtacccctgctggtggttctgggcgtcacagcaattaaggatttagtggacgatgtggctcgccataaaatggacaaagagataaataaccgaacctgtgaggttatcaaggatggacgatttaaagtggcgaagtggaaagaaatccaggtcggagacgtcattaggcttaagaagaacgactttgtgcctgccgatattctgctcctaagctcgagcgaacctaacagcctttgctacgtggagactgccgagttagatggtgaaaccaacttgaaattcaagatgtctctggaaatcactgatcagtacctccagagggaggacacactcgcaacctttgacggttttattgagtgcgaagaacctaataatcgcttggacaagttcactggaaccctgttttggagaaatacatcttttccgttggacgccgacaagatactgttgcgcggctgcgtgattaggaatacagatttctgccatggattggtgatctttgccggcgccgatactaagatcatgaagaacagtggaaagacgcgattcaagcgtactaagatcgactatcttatgaattacatggtgtacactatcttcgttgtgctcattctcctcagtgcaggcctcgctatcggacatgcttattgggaggcccaggtgggcaactcatcttggtatctttacgatggggaggacgatacccctagttacaggggattcctcatcttctggggttacataatcgtgctgaacacaatggtgcctatatccctttatgtgtccgtggaagtcattcgcctgggtcaatcacattttatcaattgggatctccagatgtactatgccgagaaggataccccggctaaagcgagaactactaccctcaatgaacaactcggacaaatccactacatctttagtgataagaccggaactctaactcaaaacataatgacttttaagaaatgttgcatcaacggacagatctatggggatcacagagatgccagtcaacacaaccacaacaagatcgagcaagttgacttttcgtggaacacgtatgctgacggcaaactggcattttacgatcactatctcatcgaacagattcagagcgggaaagaacccgaagttaggcaattcttttttcttctggccgtgtgtcacaccgttatggtggaccgcacagacggacagctgaattatcaagccgcgagccctgacgagggcgcgttggtgaatgctgcccgaaattttggcttcgcattcctggcccggacgcaaaacaccatcactatctccgagctgggcacagagaggacctataatgtccttgcaattcttgatttcaactccgaccggaagagaatgtccataattgtgaggacaccagaaggtaacattaaactgtactgcaagggggctgatacagttatttatgagcgcctgcaccgcatgaatccaaccaagcaagagacccaggatgctctggatatattcgccaacgaaaccctccgcacactgtgcttgtgctataaagagatcgaagagaaggaatttacagagtggaacaaaaagttcatggccgcttcagtggcaagtaccaatagagacgaagccctggacaaggtgtacgaggaaatcgaaaaagacttgattcttctgggagccacggcgatcgaagacaaactgcaggacggcgtccccgaaactatttcaaagctggccaaggccgacattaaaatctgggtgttaaccggagataaaaaagaaactgcggagaatatagggtttgcatgcgagctcctcaccgaggatacgactatatgttatggggaggacattaatagcctgctgcacgcaaggatggagaaccagaggaacaggggtggcgtctatgctaagtttgctcccccagtccaggaatctttctttccacccggggggaatcgagcactgataattactggctcttggttaaatgagatccttttggaaaaaaaaacaaagcgtaacaaaatcctcaaattaaaattcccacggacagaagaagaaaggcggatgcggacacagtcgaaaagacggctggaggcaaagaaggagcagaggcagaagaactttgtggaccttgcctgcgagtgttccgcggtgatctgctgtagagtaactcctaagcagaaagcaatggtggtggacctggtgaagcgatacaaaaaagccatcacacttgctatcggagacggagctaatgacgtcaatatgattaagacagcacatattggcgtggggataagtggccaggagggcatgcaagcggtcatgagctcagactactcttttgcccagttcaggtacctacagcggttactccttgttcacggccgctggtcctacataagaatgtgcaagtttcttaggtactttttttacaagaattttgcattcaccttggtgcacttctggtatagtttctttaatggatattccgcccaaactgcctatgaggactggttcatcaccctttacaacgtgctctacacctccctgccggtgctcctgatgggcctgttggatcaagatgtgtccgacaagctgtccctgcgattcccagggctgtacatcgtcggccagcgtgatctccttttcaattacaaacgattctttgtgtcccttctccatggcgtgttgacaagtatgatcttgttttttattccgctgggggcctacttacagactgtgggccaagatggcgaggctccatcagattaccagagctttgccgtgacaattgcaagcgcactagttattacagtgaatttccagatagggctggatacctcatactggacctttgtgaacgccttctctatcttcggctctattgcactttactttggcatcatgttcgactttcactctgcagggatacacgtgctattcccctccgcatttcagttcacagggactgcatccaacgcactcaggcagccatatatatggttgacgataatcttagctgtggccgtttgcttgcttcctgtggtcgccattcggtttctgtccatgacaatttggccaagcgaaagcgacaaaattcagaagcacagaaagaggctcaaggctgaggaacagtggcaacgacggcagcaggtgttccgtcggggggtgtcaaccaggaggagcgcttacgccttcagccaccaaaggggttacgcagacctcattagttctgggagatccatccgcaaaaaacgttcccctctggacgccatagtagccgacggaacagccgagtataggcggacgggagactcc

SEQ ID NO: 7290 - DNA, 3753 bp, synthetic construct
  misc_feature 1..3753: note = source = /note="Description of Artificial Sequence: Synthetic coding sequence"
  source 1..3753: mol_type = other DNA
atgagcactgaacgggatagtgaaactacgtttgatgaggacagccagccgaatgacgaggtcgtgccgtactctgacgatgaaaccgaagatgaactggatgaccagggaagcgctgtggaaccggaacaaaatagagtcaatcgcgaggcggaggaaaatcgcgagccgtttcgcaaggagtgtacctggcaggtcaaagcgaacgatcgcaagtaccatgagcagccgcactttatgaataccaagtttctgtgcatcaaagaatctaagtacgcgaataacgcaatcaaaacctacaaatacaacgccttcacctttattccgatgaacctgttcgagcaattcaagcgggccgccaacctgtacttcctggctctcctgatcctgcaggctgtccctcagattagcaccctcgcatggtacactaccctggtgcccctgctcgtggttctgggagtgactgccatcaaagatctggtggatgacgtcgcaagacacaagatggataaggagatcaacaacagaacctgcgaggtcataaaggacggcaggttcaaggtcgcgaagtggaaggagattcaggtgggcgacgtaatccgcctgaaaaagaacgatttcgtccctgctgatattctcttgcttagcagctcagagccaaatagcctctgctacgttgaaaccgccgaactcgatggagagactaacctcaaattcaagatgtcgctggaaatcactgaccagtacctgcaacgagaggacacgctggccaccttcgacggattcatcgagtgcgaggaaccaaacaacaggcttgacaagttcaccggaacccttttctggcgaaatacgagctttccgctggatgctgacaagatcctgctgcgcggctgcgtgattagaaacactgacttctgccacggtctggtcatctttgccggggcagacaccaaaatcatgaaaaactccgggaaaactcgctttaagcggacgaagatcgattacctgatgaactatatggtgtacacgatttttgtcgttctcatcctgctgagcgccggcttggcgatcggacatgcatactgggaggcacaggtgggaaacagttcgtggtacttgtatgacggagaagatgacactccgagctacagaggtttccttatcttctggggctatatcatcgtgctgaacacgatggtgcctatctcactgtacgtgtccgtggaggtgatccggctgggtcaaagccacttcatcaattgggaccttcagatgtactacgccgagaaggacaccccggccaaggcgaggaccaccactttgaacgaacagctcggtcaaattcactacatcttcagcgataagactgggaccctgacgcaaaacatcatgactttcaagaagtgttgcatcaacggacagatttatggggaccacagggacgcgtcgcaacataaccataacaagattgagcaagtggatttctcgtggaatacctacgccgatggcaagctcgcattctacgaccactacctcatcgaacaaatccagtcgggaaaggaaccagaagttcgccaattcttcttccttctcgctgtgtgccacactgtgatggtggatcgcaccgacggccaactgaattatcaggcggcatccccagatgagggcgcactggtgaacgcggcccgcaacttcggattcgcgtttctggcgaggacccagaataccattactatctcggagctggggactgaacgcacctacaatgtgctggcaatcctggacttcaacagcgatcgcaaacgaatgtccatcatagtgcgcactcccgaggggaatatcaagctgtactgtaagggcgccgacaccgtgatctacgagcgccttcaccgcatgaaccccaccaaacaggaaactcaggacgcgctggatatctttgccaatgaaaccctccgcacgctgtgtctctgctataaggagatcgaggaaaaggagtttacggaatggaacaagaagttcatggcggcgtcggtcgcctccactaaccgggatgaagctctggacaaggtctacgaagaaatcgagaaggacttgatcctcctcggagcaacggccatcgaggacaaactgcaggacggtgttccagaaaccatctcaaagctggcgaaagccgacattaagatatgggttcttactggagacaaaaaggaaaccgctgaaaacatcggattcgcatgtgagttgttgacggaagataccactatctgctacggcgaggacatcaactcgcttctgcacgctagaatggaaaatcaacgtaacagaggaggagtgtatgccaagttcgcccctccggtgcaagagagtttcttccctcctggaggcaatcgggcactgattatcaccggcagctggcttaatgagatcctcctcgaaaagaaaactaagagaaataagatcttgaagctgaaattcccacgcaccgaagaggaacgtcgtatgagaacccagagcaagcgcagactggaggccaaaaaagagcagcggcaaaagaacttcgtcgatcttgcctgcgagtgctcggccgtgatctgctgtcgtgtgactccgaagcagaaagcaatggtcgtggatctggtcaagcggtacaagaaggccatcactctcgctatcggagacggagctaacgatgtgaacatgatcaagaccgcccatatcggagttggaatcagcggacaagaaggcatgcaggccgtgatgtcgtcggactactcgtttgcgcagttcaggtacctccagcgccttctgctggtacacgggcggtggtcctatatcaggatgtgcaagttcctccgctacttcttctacaagaatttcgccttcactctggtgcatttctggtactccttcttcaacgggtacagcgcgcagacggcctacgaggactggttcattacgctgtacaacgtgttgtatacttccctgccggtgctcctgatgggcctgttggaccaggacgtgtcagacaaactgtcacttcgcttccccggattgtacattgtcggacagagggacctgctcttcaactacaaaagattcttcgtgtcgttgctgcatggagtcttgacttcgatgattctgttcttcattccgcttggcgcatacctgcaaactgttggacaggatggtgaagcaccgtccgactaccagtccttcgcggtcactatcgcctcagccctcgtcatcactgtcaattttcagatcggattggatacttcatactggacttttgtgaacgccttctcgatcttcggatcgatagccctgtactttggcatcatgttcgatttccacagcgcgggaattcacgtgctgtttccgtccgcgttccagtttaccggaactgccagcaatgccctgcggcaaccgtacatttggctcactatcatcctggccgtggcggtctgcctcctgcccgtcgtggccatccgcttcctctccatgaccatctggccttcggaatcggacaaaatccagaaacatcgcaaacggttgaaggccgaagaacaatggcagcggcgccagcaggtgttccgccgcggcgtgtccactcggagatcggcctacgccttttcgcatcaaagaggttatgcggacctcatcagcagcggaagatcaatccggaagaaacgttcgccgctggacgccatcgtggcggacggcaccgcagaataccgccgcacgggggattcc

SEQ ID NO: 7291 - DNA, 3753 bp, synthetic construct
  misc_feature 1..3753: note = source = /note="Description of Artificial Sequence: Synthetic coding sequence"
  source 1..3753: mol_type = other DNA
atgagcacggagcgcgattcggagactacgtttgatgaagatagccaaccgaacgatgaggtggtcccttactctgatgacgagacagaggacgaattggacgaccagggttcagcagtcgaaccggaacagaacagagttaatcgagaagcagaggaaaacagagaaccgtttagaaaagagtgcacgtggcaagtcaaagcgaatgatcgcaagtatcacgagcagccgcattttatgaacacgaaattcctttgtattaaggagagtaagtatgcaaacaatgcaattaagacctacaaatataatgctttcacatttattccgatgaacctatttgaacaatttaaacgcgcggcgaacttgtactttttggcactgctgattttgcaggccgttccccagattagcacattagcatggtacacgacattagttccgcttttagtcgtcctgggcgttacagccattaaggaccttgtcgacgatgtagctaggcataaaatggataaagagatcaacaatcgcacatgcgaagtcattaaagatggaagattcaaagtggcaaagtggaaggaaatacaggttggggatgtaatccgcttgaaaaaaaacgattttgtgcctgcggatattttgcttctttcgagttctgaacctaattcactgtgttatgttgaaaccgcagaattggacggagaaacaaacctgaaatttaaaatgtccttagaaattaccgaccagtatttgcagagagaggacacccttgcgacatttgacggctttatcgaatgtgaagaaccgaacaacaggctggataaatttacgggaacactgttttggcggaatacgtcatttccgctggatgccgataaaatcctgcttcgtggttgcgtaatccggaatacagatttttgccacggccttgttatttttgctggtgcggacacgaagatcatgaagaactcagggaaaacgcgttttaaacggacgaagatagattatctgatgaattacatggtatatacgatctttgtggtgcttatattgctttctgcagggttggcgatcggacatgcttattgggaagcccaagtgggcaacagcagctggtacttgtatgatggcgaagatgacacaccatcctaccggggattcctaattttttggggctatataatcgtattaaatactatggtgcctattagcctttatgtctcagttgaagtaatccgacttggccaatctcactttataaattgggaccttcagatgtattatgcggaaaaggatacaccggcaaaagctcgcacgacaactctgaacgaacagttagggcagattcattacattttttcagataaaacaggtacattaacacagaatattatgacatttaagaaatgttgtattaatggccagatctatggcgaccatcgtgacgcttcccaacataatcacaacaaaatcgagcaggttgatttttcttggaacacttacgccgatggcaaattggcgttctatgatcactaccttattgaacagattcaatctggcaaggaaccggaggttcggcaattcttctttttgttggcagtctgtcatacagttatggtcgatcgcaccgacggacagcttaactatcaggcagctagtccggacgaaggcgcgttagtgaatgcagcacggaattttgggtttgcgtttctggccaggacacaaaacacaatcacgatttccgagctgggaacagaacgcacgtataacgttttggcgattttagattttaactcggaccggaagcgcatgagcatcattgtaaggacccctgaaggaaacattaaactgtactgcaaaggcgccgacacagttatatatgaacgattgcaccgtatgaaccctacgaaacaggaaacgcaagatgcgttggatatttttgcaaacgagacacttcgaactttgtgcctgtgttataaagaaatcgaagagaaagagttcacggaatggaataaaaaatttatggctgccagcgtcgccagtactaatagagacgaggctcttgacaaggtttatgaggaaatagaaaaagatcttattcttttaggtgcaaccgcgatcgaagacaagttgcaagacggagttccggaaacaatatcgaagctggccaaagctgatattaaaatttgggtccttacaggagataagaaagaaacggcagagaatatcggtttcgcctgtgaacttcttactgaagatactacaatatgctatggcgaagatatcaatagcctgttacacgctcgtatggagaatcaaagaaacagaggaggtgtttatgccaaatttgctcctccggtgcaagaaagcttttttcccccggggggaaatcgcgcactgataatcacagggagctggcttaatgaaatactactagaaaaaaagacaaagagaaacaagattttgaaactgaaatttccgcggactgaagaagaacgtcggatgagaacccaatctaaacgcagactggaagcaaaaaaggagcaacgtcagaaaaactttgtagacctcgcatgcgagtgctctgcagttatatgttgccgtgttacacccaaacagaaagcaatggttgtagatttagtgaaaagatataaaaaagcgattactctcgcgattggagatggagctaacgacgtcaatatgatcaaaacagcacatataggagtgggaatctctggccaggagggaatgcaggcggtaatgagctccgactatagtttcgcacagttcagataccttcaacggttactgctggtacatggaagatggagctatatacgcatgtgcaaattcttaagatactttttttataagaactttgcgtttactctcgtgcacttttggtatagttttttcaacggttattccgcacaaacagcttatgaggattggtttattacgctgtataatgttttatatacgagcttaccagttttacttatgggcctcttagatcaagacgtgtcagataaactttctctgcgctttcccgggctgtacatagtaggccaacgggatttactgttcaattataaacgttttttcgtgtctctgttacatggagtgcttacatctatgattcttttttttattccgctcggagcctacttgcaaacggtcggccaagatggcgaggcgccgtctgactaccagtcatttgcagttacaattgcaagcgctttagtaattacagtgaactttcaaataggcctcgatacaagttactggacatttgtgaacgcgtttagcatttttggatcaatcgcactgtattttggcattatgtttgactttcacagtgccggcattcacgttctgtttccttctgcgtttcagttcacaggcacagcttccaatgccctgcgccaaccatatatttggttaacgatcatactagccgtcgctgtatgccttctaccggttgtagctatcagatttttatcaatgacaatctggcctagcgaaagcgacaaaattcaaaaacaccgcaagcggctcaaagctgaagaacagtggcagaggcgccagcaagttttcaggcggggcgtgtcaacacgccgttcagcatacgctttcagccatcagcgcggttacgccgacttaattagctctggacgctcaatcaggaaaaagcgttcccctttagatgctatcgtagcagatggtacagctgaatataggagaacgggagactcg

SEQ ID NO: 7292 - DNA, 3753 bp, synthetic construct
  misc_feature 1..3753: note = source = /note="Description of Artificial Sequence: Synthetic coding sequence"
  source 1..3753: mol_type = other DNA
atgtccactgaaagagactccgaaactacttttgacgaggactcgcagcctaacgatgaggtcgtgccatactcggatgacgagacggaagatgagctcgatgaccagggatcagcagtggaacccgaacagaatagagtcaatcgggaggcagaagaaaatagagagccatttaggaaagagtgcacctggcaagtcaaggcaaacgatcgtaagtatcacgaacaacctcatttcatgaacactaagtttctctgtataaaggaaagcaaatacgctaataacgcaatcaaaacttacaagtacaacgcttttaccttcattcccatgaacctgtttgaacagttcaagagagccgcaaatctttacttccttgcacttctgatccttcaagcagtcccacaaatctcaactctggcatggtataccactcttgtgccgctgctcgtggtgcttggagtcaccgcaattaaggatctggtggatgatgtcgcaaggcataagatggataaggagataaacaacagaacgtgtgaggtgataaaggacggaagatttaaggtggccaaatggaaggagatccaagtgggtgatgtgatccgactcaagaagaacgattttgttcctgccgacattttgctcctttcgtcgtcagagcccaattccttgtgctacgtggaaactgcagaacttgacggagagactaacctgaagtttaagatgtctttggaaatcaccgatcagtacctgcagcgagaggacactcttgcaacctttgacgggtttatagagtgcgaagaacccaacaacagattggacaagtttaccgggacgctcttttggagaaatacttcctttcctctggatgccgacaagatacttctgagagggtgtgtgatacgcaataccgacttttgtcacggattggtcatttttgccggcgctgatacgaagattatgaagaattccggtaagaccagattcaaacgcactaagatcgattacctgatgaactacatggtgtacacgatttttgtcgtcctgatccttctctcggcagggcttgccataggacatgcgtactgggaagcacaggtgggaaacagttcgtggtacctttacgacggggaagatgataccccctcctaccgggggttcctgattttctggggctacattattgtgttgaacactatggtacctatttcattgtacgtcagcgtcgaagtcatccggcttggacaatctcatttcatcaactgggatcttcaaatgtactacgccgagaaggataccccggctaaggcgcggactactactctgaatgaacaactcgggcagatacactacattttctcagacaagactggaactcttacccaaaacattatgacctttaagaagtgctgtattaacggtcagatttacggggaccatcgcgacgcctcacagcacaaccacaataagatagaacaggtggatttttcttggaatacctatgcagacggcaaactggcattttacgaccattaccttattgagcagatccaatccggtaaagaacctgaagtccgccagttcttttttctccttgctgtctgtcataccgtgatggttgaccggacggatggacagctgaactatcaagcagcatcgccggatgagggtgcactcgtcaacgcagcacggaattttggtttcgcgttccttgctagaacgcagaatactattaccatttcggaactcggaaccgaacggacctacaacgtcctcgctatcctcgactttaactccgacagaaagcgaatgtcgattatcgtgcgcactccagaagggaacattaagctgtactgcaaaggtgcagataccgtgatttacgagcgtctgcatcgaatgaaccccactaagcaggaaacccaagatgcactggacatctttgccaacgaaactttgagaaccctgtgcctgtgttacaaggagattgaggaaaaggagttcaccgaatggaacaagaagtttatggcggcgagcgtggcatcaaccaatagagacgaggcactggataaagtgtacgaagagattgaaaaggatttgatactccttggtgcgaccgcaattgaagataaactgcaggacggagtgccagaaactatctccaaacttgcgaaggcggacattaagatttgggttctgactggagataagaaggaaaccgcagaaaacatcggattcgcatgtgaactgctgactgaggatacgaccatttgttacggcgaggatatcaattccctccttcatgcccgcatggaaaaccaaagaaacaggggcggagtgtacgcaaagttcgcgccacccgtgcaagagtcattctttcctcccggcgggaacagagcacttatcatcactggatcctggctgaacgaaatccttctcgaaaagaaaaccaagagaaacaaaatactgaagttgaaatttccacggactgaggaggagcgccggatgagaactcagtccaagcggaggctggaagccaaaaaggaacagaggcaaaagaacttcgtcgatctggcttgtgaatgctcggcggtgatttgttgcagggtcacccctaagcagaaggcaatggtggtcgatctggtgaagagatacaaaaaggcaattacgctcgcaattggagatggcgcaaacgatgtgaatatgataaagaccgcccacattggagtgggaatatccggtcaggagggcatgcaggcagtcatgagctcggactactcgtttgcacagtttcggtatcttcaaagactcctccttgtccatggtagatggagctacattagaatgtgtaaattccttcgatacttcttctacaagaatttcgcctttaccctcgttcatttttggtacagctttttcaacggatactccgcacagaccgcctacgaagattggttcataaccctttacaatgtgctgtatacttccttgccagtgctgctgatgggacttctggatcaagacgtgtcggacaagctctctctccggttccctggtctgtacatcgtgggacagagggaccttctcttcaactataagagattcttcgtcagcctgctccatggagtgcttacctcgatgatccttttctttataccgctcggtgcctacctgcaaactgtgggtcaggatggcgaggctccctcagattaccagtcgtttgccgtgactattgcttccgcgcttgtgatcaccgtgaactttcaaatagggctggatacttcctactggacctttgtcaatgcttttagcatatttggatcgattgccctctactttggaattatgtttgattttcactcggcaggtatccatgtgcttttccccagtgcgtttcagttcaccggaaccgcatcgaacgctcttaggcagccgtacatttggttgaccattattcttgccgtggcggtgtgtcttttgccagtcgtggctattaggtttctgagcatgactatctggccctcggaatctgataagatccagaaacatcgcaagcgcttgaaggcagaagaacagtggcagcgtcggcaacaggtgtttagaaggggtgtgagcacccggcgaagcgcctacgcattcagccatcagaggggttacgctgaccttattagcagcggtagatcgatcaggaagaagcgatcccctctggacgccatcgtggctgatggtaccgccgagtacaggcgaactggtgattcg

SEQ ID NO: 7293 - DNA, 3753 bp, synthetic construct
  misc_feature 1..3753: note = source = /note="Description of Artificial Sequence: Synthetic coding sequence"
  source 1..3753: mol_type = other DNA
atgtcgaccgaacgggactcagagactactttcgatgaagattcgcagccaaacgacgaggtggtcccgtactcggatgatgaaaccgaagacgagctcgacgaccaaggttcagcagtggaaccggaacaaaaccgcgtgaaccgcgaggccgaagagaatagggaaccgttccggaaagagtgcacttggcaggtgaaagcaaatgaccggaaataccacgaacagccccatttcatgaacaccaagttcctctgcatcaaggaatcaaagtacgcaaataacgccatcaaaacctacaagtacaatgcattcaccttcatcccgatgaacttgttcgaacagttcaaacgggctgccaacttgtactttcttgcgttgctgatcttgcaagccgtgccgcagatctcgactctcgcgtggtacaccacgctcgtcccactcctcgtcgtgctgggagtgacggccatcaaggatctggtcgatgatgttgctcggcataagatggacaaggaaattaacaacaggacctgcgaggtgatcaaggatggacgcttcaaggtcgccaaatggaaggagatccaagtgggcgatgtgatccgcctcaaaaagaacgactttgtgcctgcggacatcctcctgttgtcctcatcagaaccgaactcgttgtgctacgtggagacggcagagctggatggggaaaccaacctcaagttcaagatgagcctggaaatcaccgatcaatacttgcagcgcgaagacactctggcgacctttgacggttttatcgaatgcgaagagccgaacaaccgtttggacaagtttactggaactctgttttggcggaacacctccttcccgttggacgccgacaaaattctgctgcggggatgcgtgatccggaacacggatttttgccatgggctggtcatctttgcaggagctgacaccaagatcatgaaaaactccggaaaaactcggttcaagcgcactaagatcgattacctcatgaactacatggtctacaccatctttgtggtgctgatcctcctgagcgcggggctggcaatcggacatgcgtactgggaggcccaagtgggaaattcgtcctggtacctttacgacggtgaggacgacaccccgtcctaccgcggatttctgatcttctgggggtacatcatcgtcctcaacaccatggtgcctatctcgctgtacgtcagcgtggaggtgatccggctgggccagtctcacttcatcaactgggatcttcaaatgtattacgccgaaaaagacacgcccgctaaggcgcggaccaccactctgaacgaacaattggggcaaatccactacatcttcagcgataagaccggcaccctgactcagaacatcatgaccttcaagaagtgctgtatcaatgggcagatctacggcgatcatcgagatgccagccagcacaatcacaacaagatcgaacaggtcgacttctcgtggaatacctacgcggacggtaaactggcattttacgatcactacctcatcgaacagatccagagcggaaaggagcctgaagtgaggcagttcttcttccttttggcggtgtgccatactgtcatggtcgaccgcactgacgggcagctcaattatcaggcagcgtcacccgatgagggagccctggtcaatgcggccaggaattttggtttcgccttcttggcgcggactcaaaacaccatcaccatctcggaactcggaacggaacgcacgtataacgttctcgcgatccttgatttcaattcggacaggaagagaatgagcatcatcgtgcggacgccggagggaaatatcaaactgtactgtaagggggccgacaccgtcatctacgagagactccaccggatgaacccgaccaagcaagaaacccaagacgcgctggacatcttcgccaacgagactttgaggactttgtgtctgtgttacaaggaaatcgaagaaaaggagttcaccgagtggaacaaaaagttcatggccgcttcggtcgcgagcaccaaccgcgacgaggccctggacaaagtgtacgaagagatcgagaaagatttgatcctgcttggcgcgaccgcgatcgaagataagctgcaagatggagtgcctgaaaccattagcaagctggcaaaggcggatatcaagatctgggttctgactggagacaagaaagaaactgcggagaacatcggatttgcttgcgagctccttaccgaagataccaccatctgctacggtgaggacattaatagcctcctgcatgcccgcatggaaaaccagcgcaaccgaggaggggtctacgctaaatttgctccgcctgtgcaagagtcgttctttccaccgggcggcaatcgcgcactgataatcacgggatcctggctgaacgaaattctgctggaaaagaagactaagcgcaataagatcctgaagctcaagttcccccgcaccgaggaggaacggagaatgcgcacccagtccaagagacgcctcgaggccaaaaaggagcaacggcaaaagaacttcgtggacctggcatgcgaatgttcagcggtgatctgctgccgggtgactccgaagcagaaggcaatggtggtggatctggtcaaacgctacaaaaaagccatcactcttgccatcggtgacggcgccaacgacgtgaacatgatcaaaactgcgcatatcggagtgggcatctcagggcaggaaggaatgcaggccgttatgagttcagactactccttcgcccagttccgctacttgcagagactgctgctcgtgcacgggcgctggtcgtacatacgcatgtgcaagttcctgcgctacttcttctacaagaatttcgctttcactctggtgcacttctggtactcattcttcaatggctactcggcccagactgcttacgaggattggttcatcactctgtacaacgtgctctacacctcgttgccggtactcctgatgggactgctggatcaggatgtctcggacaagctgtccctgcggttcccgggactgtacatcgtcgggcagcgtgacctgttgttcaactacaagcggttcttcgtctcgctcctgcacggggtcctcacctcgatgatcctgttcttcattcctctgggggcctacctgcagactgtgggacaggatggagaagcaccatccgattaccagagcttcgccgtgaccatcgccagcgctctggtgatcactgtgaacttccaaatcggactggacactagctactggaccttcgtcaacgccttctcgattttcggatcaatcgcgctctacttcggcatcatgttcgacttccacagcgccggaatccacgtgctcttcccttcggcattccaatttactggaaccgccagcaacgcgctcaggcagccatacatttggctcacgataatccttgccgtggctgtgtgcctgctgcctgtggtggctatacgcttcctgtccatgaccatctggccgtcagagtcggataagatccagaagcatcgcaagagactgaaggctgaagaacaatggcagcggcggcaacaggtgttccggcgcggtgtgtctacccggcggagcgcatacgcctttagccaccagaggggatacgccgacctgatctcatcgggacgcagcatccggaagaagcgctcccctctggacgccattgtcgccgacgggactgcagaatacaggcggaccggagactcg

SEQ ID NO: 7294 - DNA, 3753 bp, synthetic construct
  misc_feature 1..3753: note = source = /note="Description of Artificial Sequence: Synthetic coding sequence"
  source 1..3753: mol_type = other DNA
atgtccacggagcgcgactcggagacgactttcgatgaggattcccaacccaatgacgaagtggtcccgtactccgatgatgaaactgaggacgaactggacgaccaaggcagcgctgtggaacctgagcagaatcgcgtgaatcgggaagccgaagaaaatcgggagccattccggaaagagtgcacctggcaggtcaaagccaacgataggaagtaccacgaacagccgcacttcatgaataccaagttcctgtgtatcaaggagagcaagtatgctaacaacgccatcaagacttacaagtacaatgcatttaccttcatccctatgaacctgtttgaacaattcaagcgggcggcgaatctctacttcctggctctgcttatactgcaggcggtccctcaaatctcgactctggcctggtacactaccctcgtgccactcctggtggtcctgggcgtgactgccatcaaggacctggtggatgatgtcgcacgacacaaaatggataaggagatcaataaccgcacgtgcgaagtgatcaaggacggccgcttcaaggtggcaaaatggaaggaaatccaggtgggagatgtgatccgcctcaagaagaatgactttgttccggcggatatcttgcttttgagcagcagcgagccgaattccctgtgctacgtcgaaactgctgagctggatggcgaaactaacctgaaattcaagatgtcactggaaatcacggatcaatacttgcagcgcgaggacactctggccacgttcgacgggttcatcgaatgtgaggaaccaaacaatcggctggataagtttaccgggacgcttttctggaggaatacctcgttcccgctggacgctgacaaaatcttgctgcgcggatgcgtcatccgcaacactgacttctgccacggccttgtgattttcgccggtgccgacaccaagatcatgaaaaactccggaaaaacccggttcaagcgcactaaaatcgattatctgatgaactacatggtgtacactatcttcgtcgtcctcatcctcctgtcagccggcctggctatcggtcatgcatactgggaggcacaagtgggcaactcgtcctggtacctttacgacggtgaggacgacactccgtcataccgcggattcttgatcttctggggatacattatcgtcctgaacacgatggtgccgatctccctctacgtgagcgttgaggtgattcggctgggacaatcccactttatcaactgggacctccagatgtactacgctgagaaggacaccccagccaaagcccgtaccacgaccctgaacgaacagctgggacaaatccattacatattctcggacaagaccggcactctgacccagaacatcatgacgtttaagaaatgctgcatcaatgggcagatatacggagatcatagagacgcttcacagcacaaccataacaagatcgaacaggtggacttttcctggaatacctacgcggacggaaaactggccttctacgaccactacctgatcgaacagattcagtctggtaaagagcctgaagtccgccaattcttcttcttgctggccgtgtgccacaccgtgatggtggaccggaccgatggacagcttaactaccaggcagccagccccgatgagggagcgctggtcaatgcggcacggaatttcggttttgcattcctggcgcggactcagaacactatcactatctccgaactgggcacggagcggacttacaatgtgctggccatcctcgatttcaatagcgacagaaagcgcatgtcgatcattgtccggaccccggaagggaacatcaagctgtactgcaaaggggcagacactgtgatctacgagcggctccatcgcatgaacccgaccaagcaggaaacccaagatgctctcgatatcttcgccaacgaaaccctgcgcactttgtgtctctgctacaaagagatcgaggaaaaagagttcacggagtggaacaagaagttcatggccgcgtcggtggccagcactaacagagacgaggcgttggacaaggtgtatgaagagattgaaaaggacctgatcctgctcggagcgactgccattgaagataagttgcaggacggggtgcctgaaaccatttcgaagctcgccaaggccgacattaagatctgggtgctcactggagacaagaaggagacggcggagaacattggttttgcttgcgagctgctcactgaagataccacgatttgctacggcgaggacatcaactcacttctccacgcccgcatggaaaaccaacgcaaccggggaggcgtctacgctaagttcgccccaccggtgcaggaatccttcttcccaccgggaggtaaccgcgcacttatcatcacgggatcgtggctgaatgagatcctgctcgaaaagaaaactaagagaaacaaaatcttgaagctgaagttcccgcgcactgaggaagagagaagaatgagaactcagagcaaacgtagactcgaagccaaaaaggagcagcgccagaaaaacttcgtggatctggcatgtgaatgctcggcagtcatttgttgcagggtgactccgaagcagaaggcgatggtcgttgacctcgtcaagaggtataagaaggccataacgctcgcaatcggcgatggtgccaacgatgtgaatatgatcaagaccgcccacatcggggtcggaatctcgggacaggaaggaatgcaagcagtgatgtcaagcgactactcattcgcccagttccggtacctccaacgccttcttcttgtgcatggtaggtggtcgtacatccgcatgtgtaagtttttgcggtactttttctataagaactttgccttcactctggtgcacttttggtactccttcttcaacggctactcagcccagaccgcatatgaggactggtttatcactctttacaacgtgctgtacacctcgctgccggttctgctgatgggactgttggatcaagacgtgagcgacaagttgtcgctgcggttcccgggactgtacatcgtcggtcagcgagacttgctctttaactataaacggttcttcgtctcgctgcttcatggagtcctgacctccatgattctcttcttcatcccgctcggagcgtatctgcaaactgtgggccaggacggagaggctccttccgattaccagtcttttgccgttactatcgcctcagcactggttatcactgtgaacttccagataggcctcgacacttcctactggaccttcgtgaatgcgttcagcatcttcggcagcatcgctctgtacttcgggatcatgttcgacttccactccgcgggaatccacgtgctgtttccctcagcttttcaattcactgggactgcatcaaacgcgctgcgccagccgtacatctggctgaccatcatcctcgccgttgctgtgtgtctcctccctgtggttgccatccgcttcctttccatgactatctggccttcggagtcggataagatccagaagcatcgcaaaagactgaaggcggaagaacagtggcaaagacggcaacaggtgttccggagaggcgtgtcgactcggcgctcagcgtacgcttttagccatcaacgcggctacgccgacctgatctccagcggacgctcaatccgcaaaaagcgcagcccactcgacgctatcgtggctgatggaactgcggaataccggcggaccggagactcg

SEQ ID NO: 7295 - DNA, 3753 bp, synthetic construct
  misc_feature 1..3753: note = source = /note="Description of Artificial Sequence: Synthetic coding sequence"
  source 1..3753: mol_type = other DNA
atgagcacggaacgcgatagtgagactaccttcgacgaggactctcaacccaacgacgaggtggtgccctactctgatgacgaaactgaagatgaactcgacgatcagggcagtgccgttgaacctgagcagaacagggtgaacagagaggcagaggagaacagggagccctttaggaaagagtgtacatggcaggtcaaggccaatgaccgtaagtatcatgagcaaccacactttatgaatactaagttcctgtgcataaaggaaagtaagtacgcgaataatgctattaagacttacaagtacaacgcgttcaccttcatcccaatgaatctgttcgagcagttcaagcgagctgctaacctctactttttggcccttctgatactacaggccgtcccccagatctccaccctggcatggtacacgacattagttcctctattggtggttctgggagtaacagccataaaagacttagtagatgacgtagccagacacaagatggacaaagagattaataatcgcacatgtgaggtcatcaaagatgggcgttttaaagttgcaaaatggaaagagatacaggttggggatgtgattagactgaaaaagaatgacttcgtgcctgccgacatccttctcttatcatcatctgagcccaacagtctttgctacgtcgagactgcagagctcgacggggaaacgaatcttaaatttaaaatgtcccttgagatcacagaccagtacctgcaacgcgaggacacccttgcgacctttgacggatttattgagtgtgaggagccgaataacagactggacaaatttacaggcacgctgttttggaggaacacgtcatttccattggacgccgataaaatcctgttgagaggatgcgtgattaggaacactgatttttgtcatggtctggtcatttttgccggggccgatacaaagatcatgaagaactcaggaaaaaccagattcaagcgaacaaaaatagattatttaatgaattatatggtgtataccatttttgttgtgttgatcttgctatcagctgggctagccattggacacgcctactgggaagcccaggtgggtaacagcagctggtatctttatgacggagaagacgacactcctagctacaggggctttttgatattttgggggtacatcatcgttctgaacactatggtccccataagcttgtacgtgagcgtggaggtgataagattaggccagtctcactttatcaattgggacttgcaaatgtattacgccgaaaaggacacgcccgccaaagcgagaacaacaacactgaacgagcagctcggtcagattcactatattttcagtgataagacaggaacactcacccagaacatcatgaccttcaagaagtgctgtatcaatggacagatctatggtgaccatcgagacgcctctcagcataaccacaataaaatcgaacaggttgacttcagttggaacacttacgcagatggaaaattagcattttatgaccactatctaattgagcagatccagtcaggtaaagaaccggaggtgcgccagttctttttcttactggccgtctgtcacaccgtgatggtcgaccgtactgacggacagctaaactatcaggcggcgagccctgatgaaggcgccctcgtgaatgccgcccggaactttggattcgccttcttagcccgtacacagaacactatcacaatatccgagcttgggactgaacgcacatataacgtcctcgcaatcctggattttaattccgaccgtaaaagaatgagcataatagtgaggacccccgaggggaacatcaagctgtattgcaagggcgcagacacagttatctatgagcggctgcaccggatgaaccccaccaaacaggagacacaggatgccctagacatctttgccaatgagactcttcggaccttatgcctctgctataaagaaattgaagagaaagaattcactgaatggaacaagaaatttatggccgctagtgttgcttctaccaaccgcgatgaggccctggacaaggtgtacgaggaaatagaaaaagatctcatcctattgggggccacagctatcgaggataagcttcaggatggcgtgcccgagaccatatcaaaacttgctaaggccgacataaagatctgggtgctcaccggtgataagaaggagacagctgaaaacattgggtttgcttgcgaactgctcactgaggacactaccatttgctatggggaggatatcaacagtttgttacacgctcggatggaaaatcagagaaatcggggcggggtctatgccaagttcgccccacccgttcaggaatctttttttccacctggcggcaaccgggccttgattatcacaggaagctggcttaatgagatactgctagagaaaaaaaccaaaaggaataagatactgaagttgaagtttccgcgcactgaggaggaacggagaatgcgaacccagtccaaacgcagactagaggcaaagaaggaacaaaggcagaaaaactttgtggacctggcttgtgaatgttccgcggtgatttgttgtagggtgacccccaagcagaaagctatggtagtcgatttggtgaagagatacaagaaagcaatcacccttgccattggcgatggagccaacgacgtaaatatgatcaaaaccgcccacataggtgtcggcatctccggccaggagggcatgcaagcagttatgagttcagactactcctttgctcagtttcgctatctgcagaggctcctcctggtgcatgggagatggagctatattcgaatgtgcaagttcctccggtattttttctacaagaacttcgcattcacactggttcacttctggtactccttctttaacgggtatagcgcacagacggcctacgaggattggtttattaccctctataatgtgctttacacatcactgcctgtactcctgatgggcttactcgatcaagacgtgtccgataaattgagtctgaggtttcctggcctgtacatagtgggacagagggatctgctgtttaattataagcggtttttcgtctcgctgttgcacggcgttttgaccagcatgatcctgttttttattcctttaggcgcgtacttgcagaccgtaggccaggacggcgaggcaccctccgattatcagtctttcgcagtgacaatcgcgtccgctttagtcattacagtcaatttccagatagggctggacacaagctactggacatttgtgaacgcattttccatttttggcagtattgcactatatttcggaattatgtttgatttccatagcgccggcatccacgtgttatttccttcagcctttcaattcacaggcactgccagtaatgctctacggcagccgtacatttggctcacgataatcctggctgtggccgtttgccttctccctgttgtcgcaattcgcttcctctctatgactatatggccaagcgagtccgataagattcagaagcatcgtaagcgtctgaaggctgaggagcaatggcagcggcgtcagcaagtgtttagacgtggcgtgtccacacgacggtctgcctatgccttctctcaccaacggggttatgccgacctgatatcctcaggacgctctatacgaaaaaagaggagtcccctggatgctattgtcgccgacggcaccgccgaatatcgacgaacaggagacagt

SEQ ID NO: 7296 - DNA, 3753 bp, synthetic construct
  misc_feature 1..3753: note = source = /note="Description of Artificial Sequence: Synthetic coding sequence"
  source 1..3753: mol_type = other DNA
atgagcacagagagagattccgaaactacttttgatgaggattctcagcctaatgatgaggtggtgccatactccgacgacgagaccgaggacgaattggacgaccagggtagtgcagttgagccagagcagaatagggtgaatagggaagccgaggagaatcgcgagcccttccgcaaggagtgtacttggcaggtcaaagcaaacgataggaagtaccatgaacagccccattttatgaacacaaaattcctctgcatcaaggagagcaaatatgctaacaacgctatcaagacatacaaatacaacgctttcaccttcatcccaatgaacttgtttgagcaattcaagcgtgcagcaaacctgtactttcttgctctcctgatcctgcaggccgtacctcagatctccactctggcatggtacactacccttgtgccactgctggtcgttttgggagtgaccgccataaaggatctcgtggacgacgtggcaaggcacaagatggacaaagaaatcaacaatcgtacatgtgaagtaattaaggatggcagattcaaggttgcaaagtggaaagagattcaggttggcgacgtgatcaggctgaagaaaaatgacttcgtgcctgctgacatacttctgctctcttcatcagagcctaattctctctgctacgttgaaacagcagaactcgacggcgagacaaatctcaagttcaagatgagcctggagatcactgaccagtacttgcaacgcgaggacaccttggctactttcgacggctttatcgaatgcgaagagcctaataacaggctggataaatttaccggtacccttttctggagaaatacctcatttcccctggatgcagataagatcctgctgcgcggttgcgtgatccgtaacaccgatttctgccatggattggttatctttgccggcgccgatactaagattatgaagaacagcggcaagactaggtttaagcgcaccaaaatcgattatcttatgaactatatggtgtataccatctttgtggtgctcatccttctgtccgctggacttgccatcggacacgcctattgggaggctcaagtgggtaactcatcatggtacctgtatgatggagaggacgacactccttcctaccgcggcttcctgattttctggggctatattatcgtcctgaatactatggtgccaatctcactgtatgtgtccgtggaggtgattcgtcttggtcagtcacactttattaattgggacctgcagatgtactacgcagagaaagatacccccgccaaagcaaggactacaactttgaacgagcagctgggccagatccactatatcttctcagataagaccggaacccttacccaaaacatcatgactttcaaaaaatgctgcataaacggccagatctatggcgaccatagggacgcttcccagcacaatcataataagatcgaacaagtcgatttttcatggaatacctacgcagatggtaaattggccttctacgaccattatcttattgagcaaatccagtcaggtaaagagcctgaggtccgtcaatttttctttctcctggccgtgtgccacactgttatggtagacaggactgacggacagctgaattaccaggctgcttcccctgatgaaggtgctctggtaaatgcagcccgtaactttggatttgcattcctggctaggactcagaacaccatcaccatatctgaactgggaactgagcgcacttataacgtgctggctatcctggacttcaactctgatcgcaaacgtatgtctataatcgttcgtactcccgagggcaacataaagctgtactgcaagggtgcagacaccgtgatttatgagcgcctccatagaatgaaccctactaagcaagagacccaggacgccctggacatatttgcaaacgagaccctgaggactttgtgtttgtgttacaaggagatcgaagaaaaggagtttacagagtggaacaaaaaattcatggccgcctcagtggcatcaactaaccgtgacgaagctctggataaggtctacgaggagatcgagaaggacctcattctgcttggcgcaacagcaattgaagataagcttcaagacggtgtgcccgagaccatctccaagttggctaaggccgacattaagatatgggtgctgacaggagacaagaaagagactgccgagaacattggattcgcttgcgagcttctcacagaggacaccacaatctgttatggagaggacatcaactccctcctgcacgccagaatggaaaaccaaagaaaccgtggtggagtctatgctaaattcgctccccccgttcaggaatccttctttcctcccggcggtaacagagccctcatcatcacaggcagttggctgaacgaaatcctcttggagaaaaagacaaagagaaacaagattctgaagctcaagtttccaagaacagaagaagaaaggaggatgagaacacagagcaagcgtaggttggaggccaagaaggaacagaggcagaagaactttgtggatttggcttgtgaatgctccgccgtcatttgctgcagagttacccctaagcaaaaggctatggttgttgacctcgtgaaacgctataagaaggctatcaccctggctatcggcgacggagccaacgacgtcaacatgataaagaccgctcacatcggagtaggtatatcaggacaggagggtatgcaggccgtcatgtccagcgactattccttcgcccagtttagatatttgcagcgtctcctcctcgtccacggcagatggagctacatccgtatgtgcaagttcctgaggtacttcttctacaaaaattttgctttcaccctcgttcatttctggtatagcttctttaacggttactctgctcaaactgcttacgaggattggttcattacactctataacgtactgtacacaagcctgcctgtacttctcatgggcctgcttgaccaagacgtcagtgacaagttgtctctgcgcttccccggactttacatcgtgggtcaaagggatcttctgttcaattacaagcgcttcttcgtctctttgctgcatggtgtacttactagtatgatcctgtttttcataccactgggagcatacctccagacagttggccaggatggagaggctccctcagattaccaatccttcgctgtcacaattgccagtgcactcgttatcactgtgaactttcagatcggcctggataccagctattggacattcgttaatgcattcagcatctttggttccattgccctgtactttggcatcatgttcgatttccactctgctggaatacatgtccttttccctagcgcattccagttcactggaacagcctctaacgcactcagacaaccctacatctggctcacaatcattctggcagtggccgtatgcctcttgcccgtcgtggcaatccgttttctctccatgaccatatggccttccgaatcagacaaaatccaaaaacaccgtaagagactgaaggcagaggaacaatggcagaggaggcaacaggtgttccgtcgcggcgtgtccactcgtagatctgcatatgctttcagccaccagagaggttacgccgatttgatctcctccggtcgtagcataagaaaaaagcgtagccctctcgacgctattgtggccgatggcaccgccgaataccgtcgcacaggcgacagc

SEQ ID NO: 7297 - DNA, 3753 bp, synthetic construct
  misc_feature 1..3753: note = source = /note="Description of Artificial Sequence: Synthetic coding sequence"
  source 1..3753: mol_type = other DNA
atgtcaacggaacgagacagcgaaaccaccttcgatgaggattcacagccaaatgacgaggtggtgccgtactccgacgacgaaactgaggacgaactggacgaccaaggatcggcagtcgaacctgaacagaatcgggtgaaccgggaagccgaagaaaatagagagccatttagaaaagagtgcacctggcaggtgaaggcaaacgatcgcaaatatcatgagcagccgcatttcatgaacactaagtttctgtgcattaaagaaagcaagtatgcaaataacgcaattaagacgtacaaatacaacgcattcactttcatccctatgaatctgtttgaacagtttaagcgggctgcgaatttgtacttccttgcccttctcatcctccaggcagtgccgcagatctccactctcgcgtggtacactactcttgtgcctctgctggtggtgctgggcgtgaccgccattaaggatctggtggatgatgtcgcaagacacaaaatggataaggaaatcaacaacagaacttgtgaagtcataaaggacggccgctttaaagtggccaagtggaaggaaatccaagtgggtgatgtgatccgacttaagaaaaacgattttgtaccagcggacatcctgcttctgtccagcagtgaacctaactctttgtgttacgtggaaaccgccgaactcgatggcgagacgaaccttaagttcaaaatgtcactggaaatcaccgatcaatacctgcaacgcgaagatactcttgcgacgtttgacgggttcatcgaatgcgaggagccaaataaccgcctggacaaattcactggaactctcttctggaggaatacctcctttccactggatgcggataagattctcctccgcggctgtgtgattagaaacactgacttttgtcatgggttggtgatttttgcaggagctgatactaagattatgaagaactccgggaaaactcgctttaagaggaccaagattgattacctcatgaactacatggtgtataccattttcgtagttctgatcctcctttcagcagggctcgcaattggtcacgcgtactgggaggcacaagtcggtaactcttcgtggtacctttacgacggggaagatgataccccctcgtacaggggttttcttatcttctggggttatatcatagtgcttaatactatggtccccatttcactgtacgtgtccgtagaggtgatcagactgggtcaaagccatttcattaactgggaccttcaaatgtattacgccgaaaaggatactcctgccaaggcacggactactactttgaatgagcagctgggccaaatacattacatcttttcggataagaccgggacgctgacccagaacatcatgacgtttaagaagtgctgcataaacggtcagatctatggtgaccatcgagatgcatcacagcacaaccataacaagatagagcaagttgattttagctggaacacgtacgcagatggaaagctggcattttacgatcattaccttattgaacaaattcaatccggtaaggaacctgaggttcgccaattcttcttcttgcttgcagtctgtcataccgttatggtggatcgtaccgacggccaactgaattaccaggctgcgtcgcccgatgaaggtgcactggtgaacgcagcccggaattttggttttgcttttctcgccagaacgcaaaacaccattaccattagcgaacttggaactgaaaggacgtacaacgtgctcgcaatcctcgatttcaattccgatagaaagcggatgtccataattgtgagaacccctgaaggtaacatcaagttgtactgtaagggtgctgatacggttatctacgaaagactgcacagaatgaatcctacgaagcaagagactcaggatgcgttggacatattcgctaacgaaacgctccgtactctctgtctctgttacaaagaaatcgaagaaaaggaatttactgaatggaataagaaattcatggcagcaagcgtcgcatcgactaaccgagatgaagcacttgacaaggtctacgaagagattgaaaaagatttgatacttctgggcgcaaccgcaattgaggacaaacttcaggatggagtccctgaaactatcagcaaactggctaaggcagatatcaagatttgggtgcttactggtgacaagaaggaaactgctgagaatataggatttgcttgtgaacttcttaccgaagataccaccatctgctacggagaggacattaactcgcttctgcacgcaagaatggaaaatcaaagaaacagaggaggcgtctacgcaaagttcgcacctcccgtgcaagaatcgttcttccctccaggaggaaatcgagcactcatcattaccggatcctggctgaacgaaattctgctggagaaaaagaccaagcgaaacaagattcttaaacttaagttcccacgtactgaagaagagcggagaatgcggacccaatcgaagcggagactggaggcaaaaaaggagcagcgccagaagaacttcgtcgatttggcatgcgagtgttcggcagtgatttgctgtcgggtcacgccaaaacaaaaggcaatggtcgtggacctggtgaagaggtacaaaaaagcaatcaccctcgccattggcgatggagcgaatgatgtgaatatgatcaaaaccgcacatatcggtgtgggtatctcggggcaggaagggatgcaggctgtgatgagctcagactactcgtttgcccaatttcggtacctccaaagactgctccttgtgcacgggcggtggtcatacatccgaatgtgtaagtttctgagatacttcttttacaaaaacttcgcatttacccttgtccatttctggtacagctttttcaacggctactcggcacaaactgcatacgaggactggttcatcactctttacaacgtcttgtatactagcctccccgtgctccttatggggttgctggatcaagacgtgtcggataaactgtccttgcgcttcccaggactgtacatcgtgggacaaagagatctgctgttcaattacaagcgcttttttgtaagccttcttcacggcgtgcttaccagcatgattctgttctttattccgctcggtgcgtaccttcaaaccgtgggccaggatggagaggccccttccgactaccaatcctttgcggtcaccatcgcgagcgcactcgttatcaccgtcaacttccagatcggtctggatactagctactggactttcgtgaacgcattttccatcttcgggtccattgccctgtactttggaattatgttcgactttcattccgccggtattcacgtgctttttccctccgcatttcaatttaccggcactgcgtctaacgcactcaggcaaccatacatctggttgaccatcatcctggcagtggctgtctgtctgcttccggtggtggcgattcgttttctgtcaatgaccatttggccttcagagtcggataagatacaaaagcaccggaagcgcctgaaggcagaggaacaatggcagagacgccaacaagtctttcgcaggggagtgtccacgcgaagatcggcctatgcattttcacaccagagaggatacgcagaccttatctcgtcaggaagatcaattcgaaaaaagcggtcgccgctggatgccatagttgcagacgggaccgccgagtatcgcagaacgggtgactcg

SEQ ID NO: 7298 - DNA, 3753 bp, synthetic construct
  misc_feature 1..3753: note = source = /note="Description of Artificial Sequence: Synthetic coding sequence"
  source 1..3753: mol_type = other DNA
atgtccacggaacgggactctgagaccacctttgatgaggatagccagccaaatgatgaagtggtgccttacagcgatgatgagaccgaggatgaactcgacgaccaaggttccgcagtcgaaccagaacaaaatcgagtcaacagggaagcagaagaaaacagagagccttttagaaaggaatgcacctggcaagtcaaggccaacgataggaagtaccacgaacagccccattttatgaacactaaatttctctgtatcaaagagagcaagtatgcaaacaacgcaatcaagacatataagtacaacgcgttcacatttattccgatgaacttgtttgaacaattcaagagagccgccaatttatactttctggcactgctgatcctccaggccgtaccccagatctcaacccttgcttggtataccaccttagtaccactgctggtcgtcctgggcgttacggctattaaagacctggtcgacgatgtggcccgccataaaatggataaggagatcaataacaggacgtgcgaagtaatcaaagatggccggttcaaagtggcgaaatggaaggaaatccaagttggcgatgtgattagactgaaaaaaaacgactttgtgccagcagacatactgctgctgagctcaagcgagcctaacagcctttgttacgttgaaactgccgaactggacggagagacaaacctgaagtttaagatgagcctcgagattacagatcaataccttcaaagggaagatactcttgccaccttcgacggattcatcgaatgcgaggagcccaacaaccggcttgacaagttcaccggaacacttttctggaggaacacatcctttccgctggatgctgacaagatccttcttaggggatgcgttattagaaacacggacttttgtcacggcctggtaatctttgccggcgcagacacaaagatcatgaagaactccgggaagaccaggttcaagaggactaaaattgactatcttatgaactacatggtctacaccatcttcgtcgttcttattctcctgagtgctggcctagctatagggcatgcctactgggaggctcaggtggggaacagctcgtggtacttgtacgacggagaagatgacacacccagctatagaggattcttgattttttggggatatattattgtcctcaacacaatggtgccgatctccctttacgtgagcgtggaggtcatcagactgggccagagccatttcatcaactgggatttacagatgtactatgctgaaaaagatactcccgcgaaagctcggaccactactctgaacgagcagcttggccagatacattacatcttttcagataaaacaggaaccctgacccagaatattatgaccttcaagaagtgttgtattaacggacagatctacggtgaccacagggacgcttctcagcacaaccataacaagattgagcaggtcgatttcagttggaacacgtatgctgatggaaaactggcattctatgaccactacctcatcgaacagatacagagcggtaaagaacccgaagtgaggcagttttttttcttgctggccgtgtgccatactgtgatggtggatagaacagacgggcagcttaactatcaagccgcctcaccagacgagggagctctcgtcaacgctgccagaaactttggcttcgctttcttggctaggacacagaatacaatcacaatctctgagctaggcaccgaacggacctacaacgtccttgccatcctggacttcaactctgacagaaagaggatgagcatcatcgtgagaacacccgagggcaatattaaactgtactgcaaaggggcagatacagttatttatgaacggctgcaccggatgaacccaaccaaacaggaaacccaagatgctcttgatatcttcgcaaacgagaccctccgtaccctatgtctatgctacaaggaaattgaggaaaaggaatttacagagtggaataagaagttcatggccgcttctgtcgcctcaacaaaccgtgatgaagcactcgacaaagtgtacgaggaaatagaaaaagacttgatactgctgggggcaaccgctatcgaggacaagttgcaagatggagtccctgagacaatcagtaagcttgccaaggcggatattaaaatctgggttttgaccggcgacaagaaggagaccgctgaaaatatcggatttgcatgcgagcttctgacagaggataccaccatctgctacggagaagacatcaattccctgcttcatgccagaatggaaaaccaacggaacagaggaggagtgtacgccaagtttgcgccgcccgtgcaagagagcttctttccaccaggcgggaacagagccttgattatcaccggctcctggctgaacgagatcctgcttgaaaagaagaccaagaggaacaaaatcctgaagctgaaattcccacggactgaagaagagcgcagaatgaggacacaaagcaaacgtagacttgaagctaaaaaggagcagcgccagaagaactttgtggacctcgcctgtgaatgctccgccgtgatctgttgccgggttactcccaaacagaaagcaatggtcgtggacctcgtgaaaaggtacaagaaggctatcaccctcgccatcggggacggagccaatgacgtgaacatgattaagacagctcacatcggagtcggaattagcgggcaggaaggcatgcaggctgtcatgagtagcgattactccttcgctcagtttagatacctccaaagactgctgcttgtccatgggagatggagctacatccggatgtgtaagtttctgcgctacttcttttacaagaacttcgctttcactctggttcacttttggtattccttttttaatggctatagtgcccagacagcctacgaggattggtttattacgctgtacaacgtcctttacactagccttcccgtgcttctcatgggattgttggaccaggacgtgtccgataagctgagtctgcgcttccccggactgtacatagtgggccaacgcgatctgctttttaactacaagagattttttgtgagcctgcttcatggggtgttgacgtctatgatcttgttcttcattccattgggagcgtatcttcagacagtgggacaagatggcgaggcaccatctgattaccagagtttcgccgttaccattgcctctgcactggtgattacagtgaactttcagatcggactagatacttcatactggacattcgtcaacgctttttctatcttcggctctattgcgctgtattttggcattatgttcgatttccacagcgcaggcattcacgtgctgttcccaagcgcctttcagttcacaggcacagcctcaaacgccttgcgacagccctacatatggctgaccatcatcctggctgtcgccgtgtgcctgctgccggtagtggctataaggttcctgtcgatgacgatttggccatccgagagtgacaagattcagaaacatcgcaagaggttaaaggctgaggaacagtggcaaaggagacagcaggtctttaggaggggagtatccaccaggcgatccgcttacgctttctcccaccagcgcggatacgccgacctcataagcagcggcagatcgatacgcaaaaaaaggagtcctctggatgcgatcgtagcggacggaactgccgagtacaggcgcacaggggacagc

SEQ ID NO: 7299 - DNA, 3753 bp, synthetic construct
  misc_feature 1..3753: note = source = /note="Description of Artificial Sequence: Synthetic coding sequence"
  source 1..3753: mol_type = other DNA
atgtcaaccgagagagacagcgaaaccacattcgatgaggatagccagcctaatgatgaagtggtgccctactccgatgacgagactgaggatgagttggacgaccagggctccgccgtcgaaccagagcagaaccgagtcaacagggaagcagaggaaaatcgtgaaccttttaggaaggagtgtacatggcaagtaaaggcaaatgatcgcaagtaccacgaacagccgcatttcatgaacactaaatttctttgtatcaaagagtctaaatatgccaataacgccattaagacctataaatataatgcatttaccttcatacccatgaatcttttcgaacagttcaagcgggccgcgaacttgtatttcctggcattacttatactgcaggccgtgccccagatcagcacgctcgcctggtacacaacactggtccctctcctggtggtcctgggcgtcaccgccattaaggatctggtagatgatgtggctcggcacaaaatggataaagagatcaacaaccgcacctgtgaagtaattaaagacggccggtttaaggtggctaagtggaaggagattcaagtgggtgacgttattaggctgaagaaaaacgactttgttcctgctgacatcctcctgctgtcatccagcgaacccaacagcttatgttatgtggagactgccgagctggatggcgagactaatctcaaattcaagatgtccctcgagataaccgaccagtacctgcagagagaagatacgctggcaaccttcgacggtttcattgaatgcgaagaacctaataaccgattggacaagtttactggcactctgttctggcgcaacacgagcttcccactagacgccgacaagatccttttgcggggttgtgttatccgcaacaccgatttttgccacggtctcgtaatattcgctggagccgatactaaaatcatgaagaattcgggaaagactcgttttaagcggactaagattgattacctgatgaactacatggtgtatacaatcttcgtggtacttatcctcttgagcgcaggattggccatcggtcacgcgtactgggaggcacaggtcggcaacagcagttggtatttgtatgatggcgaagacgacaccccttcctatcgagggtttctaattttctggggatatatcatcgtccttaataccatggttccgatttcactgtacgtctccgtggaggtcatccgcctgggacagtcacacttcataaattgggatctgcagatgtactacgccgaaaaggataccccggccaaagccaggactactacacttaacgaacagctgggacagatccattacatcttcagcgacaagacaggaacactgacccagaatatcatgaccttcaagaagtgctgcatcaatgggcagatttacggggatcacagagacgcgagtcagcataatcacaacaagattgagcaagttgacttctcttggaacacgtatgccgacggcaagctcgccttttatgatcattatctcattgaacagattcagagcggcaaggaacctgaggtgaggcagttcttcttcctgttggccgtctgccatacggtaatggtggatcgaactgatgggcaactgaattaccaggcagcatctcccgacgagggagcgctcgtgaatgccgctagaaatttcggctttgcatttctggccagaacccaaaacaccatcacaatcagcgaactcggcactgaaaggacgtataatgtgctggcgatcctggactttaacagtgatcgcaaaagaatgagcattatcgtccggacgccagagggaaacatcaaactgtattgtaagggcgctgacactgtgatttacgagcggctccaccgtatgaatcctaccaaacaggaaacacaggacgccctagacatttttgctaacgaaaccctcagaacactttgtttgtgttacaaggagatagaggaaaaagaattcacggaatggaacaagaaatttatggcagcttctgtggcctccacgaacagagatgaggctctggacaaggtgtatgaggaaatcgagaaagacctaatcctgcttggggcaaccgctatcgaagacaagctgcaggacggagtgcctgaaacaatttccaagctagccaaggctgacatcaagatttgggtgttgaccggcgacaagaaagagaccgcggagaacatcggatttgcatgtgagttactgacagaggataccacgatctgctatggcgaggatattaactccctgcttcacgccaggatggagaaccagcgcaaccggggtggcgtctatgccaaatttgctcctcccgtgcaagaaagcttctttccgcccgggggaaatcgggccctgattattacagggtcctggctgaacgagatactccttgaaaagaagactaaaaggaacaagatcttgaaattgaaattcccaaggacggaagaggaacgacggatgcgaactcagtcaaagagaaggctagaggcaaagaaagaacagcgacagaaaaactttgtggacttggcctgtgagtgctctgccgtgatttgctgtcgagttaccccaaagcagaaggccatggtggtggacctggtgaagcggtacaagaaggcaatcaccctggcaataggggacggggctaatgacgtgaatatgattaaaactgcccacatcggcgtgggaattagtggacaggagggcatgcaggccgtgatgtctagcgactacagtttcgcgcagttcaggtacttgcagcggctcctgctggtgcacggtcgatggtcctatattcggatgtgcaaattcctgaggtacttcttttacaaaaatttcgcatttacgctggtgcacttctggtactcttttttcaacggctacagtgctcagacagcatatgaagactggtttattacactgtacaatgtgctgtacacatcacttcctgtgctactcatggggctgctggatcaggatgtctccgataagctctcattgcgatttcccggactctatatagttggccagagggacctcctgtttaactacaagcgattttttgtcagcctgctacatggagtcctcacttctatgatccttttttttatcccgctgggcgcatatctacagacagtgggccaggacggggaggccccttctgattatcagtcatttgcggtgacaatcgcaagcgctttggtcattaccgtgaacttccagatcggtctcgatacaagctattggaccttcgtcaacgctttctccatctttggctcgattgcgttgtacttcggtatcatgtttgatttccactcagccggtattcacgtgctcttcccctccgctttccagtttacgggcaccgccagtaatgcattgcgtcagccgtatatatggctcacgatcatattggccgttgcggtttgtctactccctgttgtggccattagattcctgagtatgactatttggcccagcgaatcggacaagatccagaaacatagaaagaggctcaaagccgaagaacagtggcagagaaggcagcaggtgtttcgtaggggagtgagtacccgtcggagtgcctatgctttctctcatcagcgcggttacgcagatttgatttccagcggcaggagcatcaggaagaaaagatctccactggacgccatcgtagccgatgggacagccgaatatcgacggactggcgattcc

SEQ ID NO: 7300 - DNA, 3753 bp, synthetic construct
  misc_feature 1..3753: note = source = /note="Description of Artificial Sequence: Synthetic coding sequence"
  source 1..3753: mol_type = other DNA
atgtcaacagaacgtgatagcgaaactaccttcgatgaagactcacaaccaaatgatgaggtcgtcccctactcagatgatgagacagaagacgagctggatgaccagggaagcgccgtggaacccgaacagaatagagtgaatagagaagccgaggagaatcgtgaaccatttcgtaaggaatgtacctggcaagtcaaagcaaacgatcggaaataccacgaacaaccacacttcatgaacacgaaattcttatgcattaaggagagcaaatatgcaaataacgctattaaaacctacaagtataatgccttcacatttatacccatgaatctgtttgaacaattcaagagagcggcaaacttgtactttctcgccttgttaattctgcaagccgttccccagatttcgactctcgcctggtacactacccttgtgccattgctggtggtccttggcgtgacagctataaaggaccttgttgacgatgtagctaggcataagatggacaaggagattaacaatagaacttgcgaagtcatcaaggatggcaggtttaaagtggctaagtggaaggaaatccaagtcggggacgttataagactgaagaagaatgattttgtgcccgcagatatccttttgttgtcttcctccgaacctaactccttgtgctatgttgagacagcagaactcgatggagagacgaatctgaagtttaaaatgagcctggagatcaccgatcagtatctccagagagaagacacactggccaccttcgatggcttcatcgagtgcgaagaacctaataatcgactggacaaatttaccggcacactgttttggagaaacaccagtttcccactagatgccgataaaatccttttaagaggatgcgtgataaggaatacagatttctgccacggcctggttattttcgctggcgccgacactaagataatgaaaaattctggaaagacaagattcaaaaggactaagattgattaccttatgaattacatggtgtacaccatcttcgtagtgttaatcctgcttagtgccgggctcgcaattggccacgcatactgggaagcacaagtagggaattcctcgtggtacctgtacgacggtgaggatgataccccatcatatcgcggcttcttgattttctggggttacataattgtcttgaataccatggtgcccattagcctttacgtgtccgtggaagtcattagactcggccaaagccacttcataaactgggacctccagatgtactatgccgagaaggacactcctgcaaaagcaaggacaacaactctgaatgaacagctgggacagatccactacatattttcagacaaaactgggactttaacccagaacatcatgactttcaagaagtgttgcatcaatggacagatatatggtgatcatcgtgacgcgtcacagcacaaccacaacaaaattgagcaggtggacttctcgtggaatacatatgccgatggcaagttggccttctatgatcattacctgatcgagcaaatacagtcgggcaaggaaccagaggtgcggcagtttttctttctcttagctgtctgtcacactgtcatggtcgataggacagacggtcagttgaattatcaggcagcttcaccagatgaaggggcacttgtcaatgccgcccggaattttggatttgcctttcttgctcgaactcagaatacgatcacaatctccgaattgggaactgagcgtacttacaatgttctggccattttagattttaatagcgacagaaagagaatgtctataattgtgcggactcccgaaggcaacattaagctgtactgtaagggagccgacaccgtgatttatgaaagactgcaccggatgaatcctacaaaacaagagacacaagatgcattagacattttcgccaacgagacactgaggactctgtgcctgtgctacaaagaaattgaagaaaaagagttcacagagtggaataaaaagttcatggcggcaagcgtggcttctaccaacagggacgaggctttggacaaggtctacgaggaaattgagaaggatttaattctactcggcgctactgccatcgaagacaaactccaggatggcgtgccagaaactatctccaagcttgcaaaggctgatatcaagatctgggtcctcactggagacaaaaaggaaactgcagagaacatcggtttcgcgtgcgagctcttgacggaagacacaacaatttgttacggagaggatattaattcattgttgcacgcgagaatggaaaaccaacgaaaccgcgggggagtttatgcaaaattcgcacctcccgtccaagagtcattcttccctccaggagggaatcgagcgctgataataaccggctcttggctgaacgagatcctccttgaaaagaagacaaaaagaaacaaaattctgaagctcaaatttccgcgtacagaagaggagagaaggatgcgcacgcaatccaaacgcaggcttgaggcgaaaaaagaacagagacagaaaaatttcgtggatcttgcgtgtgagtgtagcgccgtgatatgttgtcgagtcacacccaaacagaaagccatggtagtagatctcgttaaacgatataagaaggctattaccctggccatcggagatggcgccaatgatgtgaatatgatcaagacagcccacattggagtcggcatctctggacaggaaggaatgcaggccgtcatgtcttccgactattcgttcgcacaattccggtacctgcagaggttgttgttggtgcacggcagatggagctatattcgcatgtgtaagtttctgagatatttcttttataagaattttgcctttaccctggtccatttttggtattcgtttttcaacgggtattcagcccagaccgcctacgaagactggtttataacattgtacaatgtgttatatacatctttaccggtgttgcttatggggttgcttgatcaagatgtgtccgacaaactgtcactgcgtttcccgggcctctatatcgtggggcaacgagacttactgttcaattacaaaagattctttgtgtccctgctgcacggggtactgacttctatgattctatttttcatcccactgggagcttaccttcagaccgtgggccaggacggcgaagcccccagcgattaccagtcttttgccgtgactatcgcttccgctttggtgatcaccgtaaatttccagatcggcctggacacaagttattggacttttgtgaatgccttctctatctttggcagtatcgctctttatttcggcatcatgtttgacttccacagcgcaggcatccacgtcctttttccatccgccttccagttcactggaaccgcatctaatgccctgcgccaaccatacatctggttaaccatcatcctggccgtagcggtctgtctattgcccgtggttgctatccgatttctgtcaatgacaatctggcctagcgagagtgataaaattcagaaacataggaagagactgaaagccgaagagcagtggcaacgacgtcaacaggtctttcgaaggggagtcagcaccagacgcagtgcttacgccttttcgcatcaaagaggctacgcagacttgatctcgagcggccgatcgataaggaaaaaaagatcaccactggacgcaatcgtggctgacggtaccgccgagtatcggcgtaccggagatagt

SEQ ID NO: 7301 - DNA, 3753 bp, synthetic construct
  misc_feature 1..3753: note = source = /note="Description of Artificial Sequence: Synthetic coding sequence"
  source 1..3753: mol_type = other DNA
atgtctactgaaagagactcagaaaccactttcgacgaggattcgcagcctaatgacgaggtggtgccatactcagacgacgagactgaagatgagctggatgaccaaggaagcgcagtggaaccggaacaaaacagggtcaacagagaagccgaagaaaacagagaaccctttaggaaggaatgcacgtggcaggtgaaagcgaacgacaggaagtaccacgaacaaccgcactttatgaacactaaattcctgtgcatcaaggagagcaagtacgctaacaacgctatcaagacttacaagtacaacgccttcaccttcatcccgatgaacctctttgaacagtttaagcgcgccgcgaacctgtacttcctggcgcttctcatccttcaggcagtccctcagatttccactctggcttggtacaccactctggtgccactgctcgtggtgttgggagtgactgcaattaaggaccttgtggatgacgtcgctagacacaagatggataaggagatcaacaaccggacctgcgaagtgatcaaggacggacgcttcaaagtagctaagtggaaggaaatccaagtcggagatgtgatccgcctgaagaaaaatgacttcgtacctgctgacatcctcttgctttccagctcagagccaaattcactgtgctacgtggaaactgccgagctcgatggggaaaccaacctgaaattcaaaatgtccctggaaatcaccgaccagtacctgcagcgcgaggacaccctggccacgttcgatggattcatcgaatgcgaggagccaaataaccgccttgacaaattcactggaaccctcttctggcggaacaccagcttccctctcgatgccgacaagatccttcttaggggatgcgttatccggaatactgatttctgccatggcctggtcatctttgctggggccgacactaagatcatgaagaattcgggcaagacccggttcaaacgcaccaagatcgattacctgatgaactatatggtgtacactatcttcgtggtcctgattctgctgtcggccgggctggctatcggacacgcctattgggaagcacaagtcggcaactcgagctggtacctctacgacggagaggacgatacgccgtcgtacagaggctttttgatattctgggggtacatcatcgtgctgaacaccatggtcccaatttccctgtacgtgtcagttgaggtgatcagactcggacagtcccacttcataaactgggacttgcagatgtactacgcggaaaaagatactccggcaaaggcgcggaccaccaccctcaacgagcagttggggcagatccactacatcttctccgataaaactggtactttgacgcagaatatcatgacgttcaaaaagtgctgcatcaacggtcaaatctacggcgaccatcgtgacgcttcgcaacataatcacaataagatcgaacaagtcgacttcagctggaacacctacgccgacgggaaactggccttttacgatcattacctcattgaacagatccaatcaggaaaggaaccggaagtgcgccagttcttcttcttgttggcggtctgtcacaccgtgatggtggaccgcactgatggccagctgaattaccaggcggcgagccccgacgagggagctctcgtcaatgccgctcgcaattttggcttcgcatttctggcgcgtactcaaaacaccatcaccatttccgaactgggaaccgagcgcacgtacaacgtcttggccatcctggacttcaactcagaccggaagagaatgtcgatcatcgtccgcactccggagggaaatatcaagctctactgcaagggagcagacacggtgatctacgagcgcctgcaccggatgaacccaactaagcaggaaactcaagacgcactggatatcttcgcgaacgagactcttagaaccctgtgtctgtgctataaagagatcgaggagaaggaattcactgaatggaacaaaaagttcatggccgcttccgtggcttctacgaaccgcgacgaggcactggacaaagtgtacgaggagatcgaaaaagacctcatcctgctcggagcgaccgctattgaagataaactgcaagacggcgttcctgagactatctccaaattggcaaaggccgatatcaaaatctgggtcctgaccggtgacaagaaggaaaccgcggaaaacatcggcttcgcctgcgagttgctcactgaagataccaccatctgctacggcgaggatatcaactcgcttcttcacgcccggatggaaaatcagcggaatagaggaggggtctacgctaagttcgccccgccggtccaggaatccttttttcccccgggaggcaatagggccctcatcatcaccggatcctggctgaatgaaatactcctggaaaagaaaaccaagcgcaacaagatcttgaagctcaagttcccgcgcaccgaggaggaacggcgcatgcgcacccagagcaaaagacggcttgaggcgaagaaggaacagcggcagaagaattttgtcgacctcgcctgtgagtgctcagcggtgatctgttgccgggtgacccctaaacagaaggcaatggttgttgacctcgtcaagaggtacaaaaaggcaatcaccctcgccatcggcgatggagcgaacgatgtaaacatgatcaaaaccgcgcatatcggagtgggaatatccggtcaggaaggtatgcaggccgttatgagcagtgattactccttcgcacaatttcgatacctgcagcggctcctgctggtccatggacgatggagttacatccgaatgtgtaagttcctgcgttacttcttctataagaacttcgccttcacgctcgtccacttctggtactcgttcttcaatggctactcggcccaaacggcctacgaagattggtttatcactctttacaacgtcctgtacacttccctgcccgtgctgcttatgggactgctcgatcaggacgtgagcgataaactttcgctccgcttcccaggactgtacatagtcggtcagcgcgacctcctcttcaactacaagaggttctttgtgtccctgctgcatggggtgctgacttctatgatcctgttctttatcccgcttggagcgtacctgcagaccgtgggacaggatggagaagctccatccgactatcaatcgtttgctgtaactattgcttccgccctcgtgattaccgtcaattttcagattggactcgacacgtcctactggactttcgtgaatgccttctcaattttcggatcgatcgcattgtacttcggtatcatgttcgattttcattcagcaggtatacacgtgctctttcctagcgcgttccaatttactggcactgccagcaatgcgttgagacaaccctacatctggctgactattatcctggccgtggcagtgtgtctcctgccggtcgtcgcaatccggttcctgagcatgaccatttggccctccgaaagcgacaagattcagaagcaccgcaagaggctcaaggcagaagagcaatggcagcgtcgccaacaagtgttccgccgaggagtgtcgactcggcggtccgcttatgcgttcagccatcagcgcgggtacgccgacttgatctcgtcgggacgctcgatccgcaagaaaaggtccccactcgacgccatcgtcgcagacgggaccgcagaataccggagaacgggtgattca

SEQ ID NO: 7302 - DNA, 3753 bp, synthetic construct
  misc_feature 1..3753: note = source = /note="Description of Artificial Sequence: Synthetic coding sequence"
  source 1..3753: mol_type = other DNA
atgtccacagaaagggatagcgagaccacctttgatgaggactcccagccaaatgacgaggtcgtgccttacagcgatgacgagacggaggatgagcttgacgatcaggggagcgctgtggagcccgaacagaatagggtgaatagagaagcggaagaaaatagagagcctttccgaaaggaatgtacgtggcaagtaaaagccaatgatagaaagtaccacgaacagccgcacttcatgaacacaaaattcctttgtataaaagaatctaagtatgccaataacgccataaaaacctataaatacaacgccttcaccttcattccaatgaatctgttcgagcaattcaaaagagctgccaacctgtactttttggccctcttgatcttacaggcggttccccagatatccacactagcttggtacacaaccttagttcctctgctggtggtgctgggagtgaccgcgattaaggacctggttgatgacgtggctcgacacaagatggataaggaaataaacaacagaacgtgtgaggtgattaaggacggccgattcaaggtcgccaaatggaaggagatccaggtaggtgacgtgattaggctcaagaaaaatgattttgtgccagccgatatccttctactctcttcgagtgaacccaacagtctttgctatgtggaaactgccgaactcgacggggaaaccaatcttaagtttaagatgtcattggaaattaccgaccaatacctccagagggaagacactttggcaacatttgacggatttatcgagtgcgaggagcctaataacaggctggataagttcaccggcacccttttctggcgaaacacttctttccccttggatgcggataagattcttctaagaggttgtgtgattcgtaacactgacttctgtcacggcctcgtgatctttgctggggcagatactaaaatcatgaagaactctggaaagacccgatttaagcgcaccaaaatagactacctgatgaattacatggtttacacaatattcgtggttcttattctgttgtcagcaggcctcgccattggccatgcgtattgggaagcccaagtgggaaatagctcctggtatctttacgacggcgaggacgacaccccctcctaccgtgggttcctcatcttttggggttacataatcgtgctgaatactatggtgcccatctccctgtatgtaagcgtcgaagtgatacgcttgggccagagccattttattaattgggatcttcaaatgtactatgctgagaaagacacccctgccaaggcccggactactactctgaatgagcaactcgggcaaattcattacatctttagtgataagaccggaaccctgacacagaatatcatgacctttaagaagtgttgcattaatggacagatctatggcgaccacagagacgcttcccagcataatcataacaaaatcgagcaggttgatttctcctggaacacctacgccgacggcaaattagccttttacgaccactatcttattgaacagattcagtccggaaaagagcccgaagtacggcagttcttcttcctcctagctgtatgccatactgtgatggtagatcgcaccgatgggcagctgaattatcaggcagcatccccagacgagggagccctggtcaatgccgcacgtaacttcggattcgcctttttggcaagaacccaaaatactataactatctccgaactgggcaccgagagaacctacaatgtgcttgccattctcgactttaattctgaccgcaaacgaatgtccatcattgtgagaactcctgaggggaatattaagttatattgcaagggtgccgataccgtaatctacgagaggctgcaccgtatgaacccgacgaagcaagagacacaggatgctctcgacatttttgccaacgagaccctgcgtacgctgtgcctctgctataaagagattgaggaaaaagagtttacagaatggaacaagaagttcatggccgcatctgtcgcgtcaacaaaccgcgacgaggccttggacaaagtttacgaagagatcgaaaaggatctgattctactgggcgcgaccgcgatagaagacaagctccaggacggagtacctgaaacaatctctaagctcgccaaagcagatatcaagatttgggtgctcacgggagataagaaggaaacggcggagaacatcggcttcgcctgcgaattgcttactgaggacacaacgatttgttacggcgaagacattaactctcttctgcacgcaagaatggaaaaccagcggaaccgtggtggagtgtatgctaaatttgctccccctgttcaagagagttttttcccaccaggcgggaacagagccctgatcatcacagggtcctggctgaacgagatcctgctagaaaagaaaacaaaacggaataaaatactgaaacttaagtttcctaggactgaggaggagcgtaggatgcgcacccagagcaagcgtaggctcgaagcgaagaaagagcagcggcagaagaatttcgtggatttggcatgcgagtgttcagcagtgatttgttgtcgcgtcactcctaaacagaaggccatggtcgtggatctggtcaaaaggtacaagaaggcaatcacacttgcgataggtgacggcgcaaatgacgtgaacatgatcaagactgcgcatattggggtgggcatttctggacaagagggcatgcaggctgtgatgtccagtgactactccttcgcacaatttcggtacttgcagcgcctactgctggtgcacggcaggtggagttatatccgcatgtgcaagtttctccgctattttttttataaaaactttgcttttacgttggtacacttctggtactccttttttaacggttatagtgcacagaccgcttatgaggattggttcatcactctatataacgtcctttataccagcttacctgttctcttgatggggctactggaccaggatgtaagcgacaagctatccttgcggtttccaggactctacatagtgggacagcgggatctcctatttaattacaagaggttctttgttagcctcctgcacggggtccttacaagcatgatcctcttttttattcctttgggggcctacttgcaaacagtcggccaagacggcgaagccccttccgattatcagtctttcgctgtgacaatcgcctccgcactggtgatcaccgtaaacttccaaatcgggctggacacttcgtactggactttcgtgaacgcatttagtatcttcggttccatcgcgctgtacttcggcatcatgtttgacttccattccgctgggattcacgtgctcttcccttcagccttccagttcactggtactgcatctaacgccttgcggcaaccctacatctggcttactattattttagcagtcgccgtgtgtctattgcctgttgtagcgattagattcctgtctatgactatttggccctccgagagtgacaagattcagaaacatcgtaaaagactcaaagccgaagaacagtggcaacggagacagcaagtttttcgcaggggcgtgagcaccaggcggagcgcctatgcattttcacaccagcgtgggtatgcagatctgattagctcaggaagatctattcgaaagaagcggtctcccctcgatgcgatcgtggctgacggaactgccgagtaccgtagaaccggggactca

SEQ ID NO: 7303 - DNA, 3753 bp, synthetic construct
  misc_feature 1..3753: note = source = /note="Description of Artificial Sequence: Synthetic coding sequence"
  source 1..3753: mol_type = other DNA
atgagcactgagcgcgactctgagactactttcgatgaggacagccagccgaacgacgaggtcgtgccttactcagacgacgaaaccgaggacgagctggatgatcaaggcagcgccgttgaaccggaacaaaacagagtgaacagagaggcggaagagaacagagaaccgttcaggaaggaatgcacctggcaagtcaaggccaatgacagaaaataccatgaacagccccatttcatgaacactaagtttctctgcatcaaggaatctaagtacgccaacaacgccatcaagacttataagtacaacgcgttcaccttcatcccgatgaacctttttgaacagtttaagcgcgcggccaacctgtacttcctggcccttctcatcctccaggcggtgccacagatctcgaccctggcttggtacaccacgctcgtcccgctcctggtggtgctcggagtaaccgcgatcaaggacctggtggacgatgtggctcgccataagatggacaaggaaatcaacaaccgcacttgtgaagtgataaaagacggacggtttaaagtggccaagtggaaagaaatccaggtgggtgacgtgattagactcaagaaaaatgatttcgtgccggctgacatcctgcttctctcctcatcggagccaaattcactctgctacgtggaaaccgccgagctggacggcgagactaacctgaagtttaagatgtccctcgagatcacggatcagtacttgcagcgggaggacacgctcgccacctttgacggcttcatcgagtgcgaggaacctaataacagattggacaagttcaccgggacccttttttggcgcaacacttcattccccttggacgcagataagattctgctgaggggatgcgtgatccggaatacggatttttgccacggtctggtcatcttcgccggggccgacaccaagatcatgaaaaactccggaaagaccagattcaaacggaccaagatcgattacctcatgaattacatggtgtacactatctttgtggtcctcatcctgctgagcgccggcctcgccatcggccatgcatactgggaggcgcaggtggggaattcgagctggtacctttacgatggcgaggatgacactccatcctaccggggcttcctgatcttctgggggtacattattgtgctgaacactatggtgcctatctctctgtacgtcagcgtggaggtgatcagattgggccaatcgcacttcatcaactgggacctgcaaatgtactacgcagaaaaggatactcctgcaaaggcgcggaccaccaccttgaacgaacaactcggacagatccactacattttctccgacaagacgggcactctcacccaaaacatcatgaccttcaagaaatgctgcatcaacggacagatctacggcgaccaccgggacgcctcccaacacaatcacaacaaaatcgagcaggtggatttctcgtggaacacttacgcagacgggaagctcgctttctacgatcactaccttatcgaacagatccagtctggaaaagagcccgaagtgcgccaattcttttttcttctggccgtgtgccatactgtgatggtcgaccgcaccgatggacagctgaactaccaggcagccagcccagatgaaggagcactggtcaatgctgccagaaatttcggtttcgcttttctggctcggactcagaacactatcactatcagcgagcttggaactgagcgcacttacaacgtcctggcaatcctcgactttaacagcgatagaaagcggatgtccatcattgttcgcactccggagggcaacatcaagctgtactgcaaaggagccgataccgtcatctacgagaggctgcatcgcatgaacccgactaagcaggaaactcaggatgcgctggacatcttcgccaacgagacgctgcggactctctgcctgtgctacaaagaaatcgaagagaaggaattcactgagtggaacaaaaagtttatggctgcctctgtggcatccaccaaccgggacgaagcactggacaaagtgtacgaagaaatcgagaaggacctgattctcctcggagcgactgccatcgaagataagctgcaggatggggtgcctgaaaccatctcaaagctggcaaaagccgacatcaagatatgggtgttgaccggagataagaaggaaacggcagagaatattgggtttgcctgtgaactgctcacggaggataccaccatttgctacggagaggacatcaactcactgctgcatgctcggatggaaaatcaaagaaatcggggaggcgtttacgctaaattcgcaccgccagtgcaagagtccttcttcccacctggtggaaaccgcgcgcttatcatcaccggaagctggctcaatgagatcctgctggaaaagaaaacgaagcggaacaaaattctgaagctgaagttcccacggaccgaggaagaacgccggatgaggacgcagtcgaaacggcggctggaggccaagaaggaacaacgccagaaaaacttcgtggacctggcctgcgaatgtagcgccgtgatctgctgcagagtgacccctaaacagaaggccatggtggtggatctcgtcaagcgttacaagaaggccatcactcttgccatcggcgacggcgctaacgatgtgaacatgatcaagaccgcccacatcggcgtcggaatctcgggtcaagagggtatgcaggcagtgatgtcgagcgactactcgtttgcccagttccgctatctgcaacgcctgctcctggtgcatggtagatggtcgtacattcgcatgtgcaagtttctgcggtacttcttctacaagaatttcgctttcacgctggtgcatttctggtacagcttcttcaacggatactcagcgcaaactgcgtatgaagattggttcatcacgctgtacaatgtcctgtacacttcgctgccggtgctgctgatgggacttctggaccaggacgtttcagacaaactttcgctccgttttcctgggctgtacatcgtgggccaaagggatctcctcttcaattacaagcggttcttcgtctcgttgttgcacggagtgctcacctccatgatcttgttcttcatcccactgggagcatatctgcagactgttggacaggacggggaagctccgagcgactaccagtccttcgcggtgaccattgcgagcgctctggtgatcaccgtcaacttccagatcggacttgacacttcgtactggaccttcgtgaacgccttcagcatcttcggttccattgccctgtacttcggaatcatgttcgatttccattcggcaggaatccacgttctgtttccgagcgcattccaatttaccggcaccgcctccaatgcgctccggcaaccatacatctggctcactatcatccttgctgtggccgtgtgtctcctcccagtggttgccatcagattcctctctatgaccatctggccgagcgaatcagacaagatccaaaagcacagaaaacggttgaaggccgaggaacaatggcagcgccgccagcaggtgttccgccgaggtgtgtcgactcggcggagcgcctatgcgttcagccatcagcgcggatacgcggatctcatcagctcaggacgctcgatccgcaagaagcgcagcccgctcgacgccatcgtcgcggatggaaccgccgaataccggaggaccggagactcc

SEQ ID NO: 7304 - DNA, 3753 bp, synthetic construct
  misc_feature 1..3753: note = source = /note="Description of Artificial Sequence: Synthetic coding sequence"
  source 1..3753: mol_type = other DNA
atgagcactgagcgagattcagagaccacttttgatgaagactctcagcccaacgacgaagtcgttccttactccgatgacgagaccgaagatgagcttgatgaccagggctctgcagttgagcctgaacagaaccgagttaacagggaggctgaggagaatcgtgaaccatttaggaaggaatgtacgtggcaagttaaggcgaatgataggaagtatcatgagcagccccattttatgaatacaaaatttttatgcatcaaagagagtaagtacgctaacaatgctattaagacttacaagtacaacgctttcacatttatacctatgaacctctttgagcagttcaagagggctgctaacttgtatttccttgctctgttgattcttcaagcagtgccccaaatttccacgctggcttggtacacaaccctggtgcccttgctggtcgttttgggtgttacagctataaaggacctggtcgatgatgtcgcacgccacaagatggataaggagattaacaaccgaacctgcgaagtcattaaggacggccgcttcaaggtggcgaagtggaaggaaatccaagtgggcgatgtgatacggctgaaaaagaatgacttcgtgcccgctgacatcttgctcttatcgtcatcagaacctaattccctctgttacgtcgaaaccgccgagctggacggggagaccaacctgaaatttaagatgtcgctcgagatcaccgatcagtatctgcagcgggaagacacgctggcgaccttcgatgggtttatcgagtgcgaggagcccaataatcgtcttgacaagttcaccggaacgctgttctggaggaacaccagcttcccccttgatgccgataaaatccttctcaggggatgtgtaattcggaacactgacttctgccatggccttgtaatcttcgctggtgccgataccaaaattatgaagaactccggcaaaacacgtttcaaaaggacaaaaatagattacctgatgaactatatggtgtatacgattttcgtggtattgatcctgctgtctgccggtttagccatagggcatgcatattgggaggcacaagtggggaacagttcgtggtacctctacgacggtgaggatgatacacccagctatcgtggattcctgatcttctggggatatattattgtgctgaacacgatggtacccatctctctctacgtctccgtggaagtgatccgcctcggtcagtcgcatttcattaactgggacttgcagatgtattatgctgagaaggatacacccgccaaagcccgcaccacaaccctcaacgagcaactgggccagatccactatatattttccgacaaaaccggtaccctcacccaaaatattatgacattcaagaaatgttgcatcaacggacagatttacggcgaccatcgagatgcctcccagcacaatcacaataaaattgagcaagttgacttctcgtggaatacatatgctgatggaaaactggccttttatgatcattatctcatcgaacaaatacagagcggcaaagagccagaggtacgccaatttttcttcttgttggctgtttgccatacagtgatggtggatagaaccgacggtcagctgaactatcaagccgccagtcctgatgagggcgccttggttaacgcagccagaaattttgggttcgctttcctcgcacgcacccagaataccataactattagtgaactcggaactgaaaggacctacaatgttctcgcaatcctggactttaactccgacaggaagcggatgtccattattgtccggactcccgagggcaacataaaactgtactgtaaaggggctgatacagtcatctatgaacggctgcacagaatgaatcctaccaaacaggaaacacaagatgccctcgacatctttgccaatgagactctgcggaccctctgtctttgctacaaggagattgaagagaaggagtttacagagtggaataagaagtttatggccgcctccgtcgcatcaacgaatagagatgaggccttagataaagtgtatgaggagatcgagaaagacttgatcctgctgggggctactgccatcgaggataagctgcaagacggtgtccctgagactatctccaagctcgcgaaagcggacattaagatctgggtcctgaccggcgataagaaagagactgctgaaaacatagggttcgcctgtgagttacttacagaagacactactatatgttacggagaggatattaatagtttgctgcacgcacgcatggagaaccaaaggaatagaggtggcgtttacgcaaagtttgctccacctgtccaggaatccttcttcccacccggcggaaatcgcgcacttattataaccgggtcatggttaaatgaaattctattagaaaaaaaaacaaagagaaataagatattaaaacttaaattcccgagaacggaggaggaaagaaggatgcgaacacagtccaaacgacgtctcgaagctaaaaaggaacagagacaaaagaattttgtggacttggcttgtgaatgctcagcggtgatctgctgtagggttacacctaagcagaaggcaatggtggttgacttggtcaagcgttataaaaaggccattaccttggccatcggagatggagccaacgacgtgaatatgattaaaaccgcccatataggagtgggcatctctggacaagagggcatgcaggcagtgatgtcctccgactactccttcgcccaattcagatacctgcagagactcctgctggtgcatggtaggtggtcttatatcaggatgtgtaaatttctccggtattttttctataaaaactttgcattcactctggtgcacttttggtattcgttttttaatggctattctgcccagacggcctatgaagattggtttatcacactctataatgtgttatatacaagcctgcccgtgctcctcatggggcttctggaccaggacgtgtccgacaagctgtcactcaggtttcccggtctttatatcgtcggtcagcgcgaccttctgtttaactataaacgatttttcgtctccctgcttcatggtgtgctgacctctatgatcctattctttataccccttggcgcttaccttcaaacagttgggcaagacggtgaggccccatccgactaccagtcttttgcagtgacgatagcctctgcccttgtcataactgtaaattttcaaatcggtcttgatacctcctattggaccttcgtgaacgcattctctatcttcggcagtatcgcactgtacttcggcattatgttcgactttcactctgctggaatacacgtgttgttcccttccgcattccaattcacaggcaccgcttctaatgctctgcgccagccctacatctggctgactattatcctggccgtggccgtctgtctcctccccgtggtggcaatcaggttcttgtcaatgaccatatggccatccgagagcgataagattcaaaaacatcgcaaacgtttgaaggcggaagagcagtggcagagacgccaacaagtttttcgtaggggcgtatccaccagaagatccgcctacgcattctcacaccagaggggttacgctgatctgatctctagtgggagatcgattaggaagaagagaagtccccttgacgccatcgtcgcagatgggaccgcagaatacaggcgaacaggggactcg

SEQ ID NO: 7305 - DNA, 3753 bp, synthetic construct; identical to SEQ ID NO: 7265
  misc_feature 1..3753: note = source = /note="Description of Artificial Sequence: Synthetic coding sequence"
  source 1..3753: mol_type = other DNA

SEQ ID NO: 7306 - DNA, 3753 bp, synthetic construct
  misc_feature 1..3753: note = source = /note="Description of Artificial Sequence: Synthetic coding sequence"
  source 1..3753: mol_type = other DNA
atgagcaccgaacgcgatagcgaaaccaccttcgacgaggactcgcagcctaatgacgaggtcgtgccgtactcagacgatgagactgaggacgagcttgacgaccaggggagcgcagtggagcctgagcagaacagagtgaacagagaagcagaggagaatcgggaaccctttcggaaagaatgcacttggcaggtgaaggcgaacgacagaaaataccacgagcagcctcactttatgaacaccaaattcctctgtatcaaggagagcaagtacgcgaacaacgcaatcaagacctacaagtacaacgccttcacttttatcccgatgaatctgttcgagcagttcaagcgcgccgcaaatctctactttctggcactgttgatcctgcaggcggtcccgcagatcagcactctcgcttggtacacgaccctcgtgccactgcttgtcgtcctgggcgtgaccgcaatcaaagatcttgtggacgatgtggcccggcataagatggataaagagatcaataacaggacctgcgaagtcatcaaggacggcagattcaaagtggctaaatggaaggagatccaggtgggagacgttatcagactgaagaaaaacgatttcgtgcctgctgacattttgctgctcagctcgtcggaaccgaacagcctgtgctacgtcgagactgccgaactggacggggaaaccaacctgaagttcaagatgtcgctggaaatcactgatcagtacctgcaacgggaggatacgttggctactttcgatggttttatcgagtgcgaggaaccgaataaccgactggacaaattcaccgggactttgttctggcgaaacacttcgttcccgctggacgcggataagatccttcttcggggatgcgtcattcgcaataccgacttctgccacggactcgtgatcttcgcaggagcagatactaagataatgaagaattctgggaaaacgagatttaagcgcacgaaaatcgattacctgatgaattacatggtctacacgatctttgttgtgctgattctgctctccgccggtttggcgatcggacacgcttactgggaagcacaggtcggaaattcctcgtggtacctgtatgacggagaagatgacaccccttcataccgaggatttctcatattctggggatacatcattgtgctgaacaccatggtgccgatcagcctctacgtgtctgtggaagtgatccgcctggggcaatcacactttatcaactgggaccttcaaatgtactacgctgaaaaggacactccagccaaggctagaaccaccaccctgaacgagcagctcggacagatccactacatcttctcggataagactggtactttgacccagaacatcatgacgttcaagaaatgttgcatcaacggacaaatctacggtgaccacagggatgcctcacagcacaatcacaacaagatcgagcaggtcgacttttcatggaacacttatgccgacggcaaactcgcgttctacgaccattacctgattgaacagatccagtccgggaaggaaccggaagtccgccaattcttcttcttgctggccgtgtgtcacaccgtgatggtcgatagaactgacggtcaactcaactaccaagcagcctcgcctgacgagggagcgctggtcaacgccgcgcggaactttggatttgccttcctcgccagaactcagaacaccataaccatttccgagctggggactgaacgcacctacaacgtcctggccatcctggatttcaactcggaccgcaaacggatgtctatcatcgtgagaaccccagagggtaacatcaagctgtactgtaagggtgccgatacggtgatctacgagcgcctccacagaatgaacccgaccaagcaggagacgcaagacgcgctggatatctttgctaatgaaactctccggactctgtgcctgtgctataaagagattgaagagaaggaattcactgagtggaacaagaagttcatggcggcttcagtggcatcgaccaacagagacgaggctctggacaaggtctacgaagaaatcgaaaaggacttgatcctgttgggagccactgcgatcgaggacaagctgcaagacggagtccctgagactatctcaaagctggcaaaggcagatatcaagatctgggtgttgactggagacaagaaggaaaccgcggagaacatcgggtttgcctgtgaactcctgaccgaagatactactatctgctacggagaagatatcaattcgctgctgcacgcccggatggaaaatcaacgcaaccgcggcggcgtctacgcaaagttcgcacccccagtccaagaatccttcttcccacccggcggtaacagagccctcatcatcactggctcgtggctgaatgagatcctgctggaaaagaaaaccaagcgcaacaagattctcaagctcaaattccctcggactgaagaagagagacggatgagaactcaaagcaagcgccgcctcgaagcaaagaaggaacaaagacagaagaatttcgtggacctcgcatgtgaatgctctgcggtgatctgctgccgcgtcacgccaaaacagaaggctatggtggtggatctcgtgaaaaggtacaaaaaggccataaccctggctatcggggacggggccaatgacgtcaatatgatcaagactgcgcatattggtgtggggatctccggccaagagggaatgcaggcggtcatgtctagcgactactcctttgcccaattccggtacctgcagcgccttttgctcgtgcatggacgctggtcctacatccgaatgtgcaagttccttcggtactttttctacaaaaactttgcgttcactttggtgcatttctggtactcttttttcaatggatactcggctcagactgcatacgaggactggttcatcaccctgtacaatgttctgtatacgtcgctccctgtgctgttgatgggacttctcgaccaggacgtgtcagacaaactctcactccgcttcccgggactgtacatcgtgggacagagggacctgctctttaactacaaaagattcttcgtgtcactcctgcatggagtgctgacgagcatgatcctgtttttcatccccctgggagcttatttgcagaccgtcggacaggacggagaagccccgtcggattaccaatcctttgccgtcactatcgcctcggccctggtgatcacggtgaattttcaaatcggactcgataccagctactggacgttcgtgaacgctttttcaatcttcgggagcatcgctctgtacttcggaatcatgtttgacttccattccgccggtatccacgtcctctttccgagcgcttttcaattcactggcaccgcgagcaatgcacttcggcaaccgtacatttggctgacgatcatcttggccgtggccgtgtgcctgctgccagtggtggctatccggttcttgtccatgactatctggccttcggaatccgacaagatacagaagcaccggaagcgcttgaaggctgaagagcagtggcagagacggcagcaagtgttcaggcgcggtgtgagcacgcgtcggtcagcttatgccttctcccaccagcggggatacgcggacctgatctcctccgggcgcagcatccggaaaaagaggtcaccgctcgatgctattgtggctgatggaactgccgaatatagacggaccggagactcg

SEQ ID NO: 7307 - DNA, 3753 bp, synthetic construct
  misc_feature 1..3753: note = source = /note="Description of Artificial Sequence: Synthetic coding sequence"
  source 1..3753: mol_type = other DNA
atgtcgacggaacgagattcggaaacgacgtttgatgaagattcgcaaccgaatgatgaagtagtaccgtattcggatgatgaaacggaagatgaattagatgatcaaggttcggcggtagaaccggaacaaaatcgagtaaatcgagaagcggaagaaaatcgagaaccgtttcgtaaagaatgtacgtggcaagttaaagcgaatgatcgtaaatatcatgaacaaccgcattttatgaatacgaaatttctatgtataaaagaatcgaaatatgcgaataatgcgataaaaacgtataaatataatgcgtttacgtttataccgatgaatttatttgaacaatttaaacgagcggcgaatttatattttctagcgttattaatactacaagcggttccgcaaatatcgacgctagcgtggtatacgacgttagtaccgttattagtagttttaggtgtaacggcgataaaagatctagtagatgatgtagcgcgtcataaaatggataaagaaataaataatcgtacgtgtgaagtaataaaagatggtcgttttaaagttgcgaaatggaaagaaatacaagttggtgatgtaatacgactaaaaaaaaatgattttgtaccggcggatatattattattatcgtcgtcggaaccgaattcgttatgttatgtagaaacggcggaactagatggtgaaacgaatctaaaatttaaaatgtcgttagaaataacggatcaatatctacaacgtgaagatacgttagcgacgtttgatggttttatagaatgtgaagaaccgaataatcgattagataaatttacgggtacgctattttggcgaaatacgtcgtttccgttagatgcggataaaatattattacgtggttgtgttatacgaaatacggatttttgtcatggtttagttatatttgcgggtgcggatacgaaaataatgaaaaattcgggtaaaacgcgttttaaacgtacgaaaatagattatttaatgaattatatggtatatacgatatttgttgttctaatattactatcggcgggtttagcgataggtcatgcgtattgggaagcgcaagttggtaattcgtcgtggtatctatatgatggtgaagatgatacgccgtcgtatcgaggttttctaatattttggggttatataatagttttaaatacgatggttccgatatcgttatatgtatcggttgaagtaatacgattaggtcaatcgcattttataaattgggatttacaaatgtattatgcggaaaaagatacgccggcgaaagcgcgtacgacgacgttaaatgaacaactaggtcaaatacattatatattttcggataaaacgggtacgttaacgcaaaatataatgacgtttaaaaaatgttgtataaatggtcaaatatatggtgatcatcgtgatgcgtcgcaacataatcataataaaatagaacaagtagatttttcgtggaatacgtatgcggatggtaaattagcgttttatgatcattatttaatagaacaaatacaatcgggtaaagaaccggaagtacgtcaatttttttttctactagcggtatgtcatacggtaatggtagatcgaacggatggtcaactaaattatcaagcggcgtcgccggatgaaggtgcgttagtaaatgcggcgcgaaattttggttttgcgtttttagcgcgaacgcaaaatacgataacgatatcggaattaggtacggaacgaacgtataatgtattagcgatactagattttaattcggatcgaaaacgtatgtcgataatagtacgaacgccggaaggtaatataaaattatattgtaaaggtgcggatacggttatatatgaacgattacatcgtatgaatccgacgaaacaagaaacgcaagatgcgttagatatatttgcgaatgaaacgctacgtacgttatgtctatgttataaagaaatagaagaaaaagaatttacggaatggaataaaaaatttatggcggcgtcggttgcgtcgacgaatcgtgatgaagcgttagataaagtatatgaagaaatagaaaaagatttaatattattaggtgcgacggcgatagaagataaactacaagatggtgttccggaaacgatatcgaaattagcgaaagcggatataaaaatatgggtattaacgggtgataaaaaagaaacggcggaaaatataggttttgcgtgtgaattactaacggaagatacgacgatatgttatggtgaagatataaattcgctattacatgcgcgtatggaaaatcaacgaaatcgtggtggtgtatatgcgaaatttgcgccgccggttcaagaatcgttttttccgccgggtggtaatcgagcgttaataataacgggttcgtggttaaatgaaatactattagaaaaaaaaacgaaacgtaataaaatattaaaattaaaatttccgcgtacggaagaagaacgacgaatgcgaacgcaatcgaaacgacgtctagaagcgaaaaaagaacaacgacaaaaaaattttgtagatctagcgtgtgaatgttcggcggtaatatgttgtcgagtaacgccgaaacaaaaagcgatggtagttgatctagtaaaacgatataaaaaagcgataacgttagcgataggtgatggtgcgaatgatgtaaatatgataaaaacggcgcatataggtgttggtatatcgggtcaagaaggtatgcaagcggttatgtcgtcggattattcgtttgcgcaatttcgatatttacaacgattactattagttcatggtcgttggtcgtatatacgtatgtgtaaatttctacgttattttttttataaaaattttgcgtttacgttagtacatttttggtattcgttttttaatggttattcggcgcaaacggcgtatgaagattggtttataacgctatataatgtattatatacgtcgttaccggtactattaatgggtctattagatcaagatgtatcggataaactatcgttacgttttccgggtctatatatagttggtcaacgagatctattatttaattataaacgtttttttgtttcgctactacatggtgtattaacgtcgatgatactattttttataccgctaggtgcgtatctacaaacggttggtcaagatggtgaagcgccgtcggattatcaatcgtttgcggtaacgatagcgtcggcgttagtaataacggttaattttcaaataggtttagatacgtcgtattggacgtttgttaatgcgttttcgatatttggttcgatagcgctatattttggtataatgtttgattttcattcggcgggtatacatgtattatttccgtcggcgtttcaatttacgggtacggcgtcgaatgcgctacgacaaccgtatatatggctaacgataatattagcggttgcggtatgtttattaccggtagttgcgatacgatttctatcgatgacgatatggccgtcggaatcggataaaatacaaaaacatcgtaaacgtctaaaagcggaagaacaatggcaacgtcgtcaacaagtttttcgacgtggtgtttcgacgcgacgttcggcgtatgcgttttcgcatcaacgtggttatgcggatttaatatcgtcgggtcgatcgatacgaaaaaaacgatcgccgctagatgcgatagtagcggatggtacggcggaatatcgacgaacgggtgattcg

SEQ ID NO: 7308 - DNA, 3753 bp, synthetic construct
  misc_feature 1..3753: note = source = /note="Description of Artificial Sequence: Synthetic coding sequence"
  source 1..3753: mol_type = other DNA
atgagcacagagagggacagcgagacaactttcgatgaggactcgcagcccaacgatgaggttgttccttattcagatgacgaaacagaggatgagctggacgaccagggctcagcagtggagcccgaacagaatagggtgaaccgggaggccgaggaaaatagggagccttttaggaaagagtgcacatggcaggtcaaggcaaatgacaggaagtaccatgagcaaccccactttatgaacaccaagttcctttgcatcaaggagtctaaatatgcaaataacgccatcaaaacctataagtataacgcatttacatttatccccatgaacctgtttgaacagttcaaacgtgctgctaatctttactttttggcgctgttaatcctccaggcagtgccacagatatctacactggcctggtataccaccctggtgcccctgttggttgtgctgggggtcacagcaattaaagacttggtggatgacgtagcccgccataaaatggataaggaaatcaacaataggacgtgcgaggtgattaaggatggccgcttcaaagtggccaaatggaaagaaatccaggttggagacgtgattagactgaaaaagaatgatttcgtgccagccgatatacttctgctgtctagtagcgaaccaaattccctctgttatgttgagaccgccgagttggatggcgagaccaaccttaagttcaaaatgagccttgaaatcacagatcagtacttgcagcgggaggatacactggctactttcgacggctttatagaatgcgaagaacctaacaataggctcgacaagttcacaggcactctgttttggagaaacacctcgtttccgctggacgccgacaagatcctgttgcgtggctgtgtaatccggaatacggacttctgccatgggctggttatattcgctggcgccgacactaagatcatgaaaaattctggaaagacacggttcaaacgcactaaaattgactacctcatgaactacatggtgtacactatctttgtagtgttgatcctgctcagcgcaggattagctattgggcacgcatactgggaggctcaggtcggaaattcttcctggtacctctatgacggtgaagacgacactcctagctaccgggggtttttaatattttggggctacattatcgtcttgaacaccatggtaccaattagcctctatgtttcagtcgaggtgatacgactgggacagtctcattttataaattgggatctccagatgtactatgctgagaaggacaccccggcaaaagctaggaccactaccctaaatgaacagctaggccaaattcattacatcttttcagacaagactgggacactaacacaaaatattatgacttttaaaaagtgttgcatcaacggacagatctacggcgatcacagagacgccagtcagcataaccacaacaaaatcgaacaggtggatttctcttggaatacttatgctgacggcaagctcgccttctacgatcactatttaatagaacagattcaaagcgggaaggagcccgaggttcgccagtttttcttcctcctggccgtgtgtcataccgttatggtagatcggacagatggacaacttaattatcaggcggcctcaccggatgaaggggctctcgtaaatgctgcccgcaacttcgggtttgctttcttggcacggacacagaataccatcacgatatccgaattgggaaccgagagaacatacaatgtgctcgcaatcttagacttcaacagcgatagaaagcgtatgtccattattgttaggactcctgaaggcaacattaaactgtattgtaaaggggccgacaccgtgatctatgaacgcctacacagaatgaatccaactaagcaggagactcaggacgccctggatattttcgctaatgagacactgagaacgctctgcctttgctacaaggaaatcgaagagaaggagttcacagagtggaataagaagttcatggccgcatccgtggccagtacgaatcgagatgaggctctcgacaaagtgtacgaggagatcgagaaggacttaatactgctgggcgccactgccattgaagacaagctgcaggatggcgtcccggagacaatcagcaaactggcgaaagccgatattaaaatatgggtgctcacgggagacaaaaaagaaacagcagaaaatatcggattcgcgtgcgaattactgacggaggatacaaccatctgttatggagaagacatcaatagtttgctccatgcacgcatggagaaccagcgaaacagggggggcgtctacgctaaatttgctcccccagtacaggaaagcttctttccccccggcggcaacagagcactgattattacagggagctggctgaatgagattctgctcgaaaagaagactaaacggaacaaaatcttgaaattaaagtttccccggaccgaagaggagcgtcgaatgaggacccagtcaaaaaggcgtctggaagcaaaaaaggagcaacgccaaaagaactttgttgatctcgcatgtgagtgctccgctgttatatgctgtagggtcacgcccaagcaaaaggctatggtggtggatttggtcaagcggtacaagaaagccataactcttgcaatcggagacggcgcaaacgacgttaacatgatcaaaaccgcccatattggcgtgggaatcagtgggcaggaaggcatgcaggcggttatgagctccgactattcctttgcccagttccgatacctgcagcgcctgctgctggtccacggccgctggagctatatccgcatgtgcaagttcctccgctacttcttctacaaaaattttgccttcactttggtccacttttggtattcattcttcaatggctacagtgcccagacagcatatgaggactggttcatcactctgtacaatgtgctgtatacttctttgcccgttctattaatgggcctgttagaccaggacgtcagcgataaactatcattgcgattccccggcctgtacatcgtgggtcagagagacctgttatttaactataagcgcttcttcgtctccctactgcatggagtgcttaccagcatgattcttttcttcattcctttgggcgcctacttgcagaccgtcgggcaggacggcgaagccccctctgactatcaaagcttcgccgtgactatagccagcgcgttagttatcacagtaaattttcaaattggtctggatacatcttattggacctttgtaaatgcttttagcatcttcggatcaattgctttatacttcggcattatgtttgacttccacagcgccggtattcatgtgcttttcccatcagccttccagtttaccggtaccgcctctaacgccctcagacaaccctatatctggctaaccatcatactcgctgtggcagtgtgtttgctccctgtggtcgcgatccgctttttgagcatgaccatttggcccagcgaatctgataaaatacagaagcaccggaagcgcctcaaagcagaggagcaatggcagagacgtcaacaggtgtttcgccgtggagtgtctactcggcgcagtgcatacgccttctcccaccaacgtggctatgcagacctgatatcgagtggccgctcgattcggaagaagcgatccccactggatgcgattgtggctgatggtacagcggagtaccgacgcacgggagactcc

SEQ ID NO: 7309 - DNA, 3753 bp, synthetic construct
  misc_feature 1..3753: note = source = /note="Description of Artificial Sequence: Synthetic coding sequence"
  source 1..3753: mol_type = other DNA
atgtctaccgagcgagacagtgaaacgacattcgacgaggattcacaaccaaatgacgaggtcgtcccctatagtgatgacgagaccgaagatgagctggatgaccaggggagcgctgtggaacccgagcagaacagggtgaaccgtgaggctgaggaaaacagggaaccttttcgaaaggaatgcacgtggcaggttaaagctaacgaccgaaaataccacgaacaacctcatttcatgaacacaaagtttctctgtattaaggaatcaaaatatgctaacaacgccattaaaacttacaagtataacgcttttacgttcatcccaatgaatctgttcgaacagtttaagcgagctgccaatctgtacttccttgctctgctgatcttgcaggcggtccctcagatatctaccctcgcatggtacacaactctggtgccattgttagtggtattaggcgtgactgccattaaggacctcgtcgatgatgtagcccgccataagatggataaggaaatcaacaatcgtacatgtgaggtgataaaagatggccgattcaaagtagctaagtggaaggaaatccaggtcggtgacgtgattcggttaaagaaaaatgactttgtgcctgctgacatacttctgctgtcctcctcagaacccaactccttatgctatgtggaaacggcagagcttgacggcgagacaaacctgaagtttaaaatgagtctggaaattaccgaccaatacttacagagggaggataccctggccacttttgatggattcatcgagtgtgaagagcccaataaccgtctcgacaagttcactggcacactcttctggagaaacacatcttttcctctggacgccgacaagatactgctgcgaggatgcgtgatacgaaacacagacttctgtcatggcctcgtgattttcgcaggagccgataccaagataatgaagaacagcggcaaaactaggtttaagaggaccaaaatcgactaccttatgaattatatggtgtatactattttcgtggtgctgatactgctgtcagctggtctagccatcgggcatgcatactgggaggcgcaggtgggtaactcttcctggtatctttacgacggggaagacgacacacctagctatcgaggcttcctcatcttctgggggtacatcattgttctgaacaccatggtgcctatttcactttatgtgagcgtagaagtgatccgcttgggacagtcacacttcataaattgggacttgcagatgtactacgcagaaaaagatacgcccgcgaaagcaagaactactaccctgaacgaacagttgggccagatacactatattttttccgacaagaccggcacccttacacagaacattatgactttcaagaaatgctgcattaacggtcaaatctacggcgatcacagggatgcttctcaacataatcataacaagatcgagcaggttgacttttcatggaatacatatgctgatggtaagctggcattttatgatcattatctcatcgagcagattcagtcaggaaaagagcccgaggtccgacagttctttttcctattggccgtgtgtcacaccgttatggtcgatcgcaccgacgggcagttaaactaccaagccgcgtctccagacgaaggtgcactggtgaatgctgctagaaacttcggtttcgcctttctggccaggactcagaacacaatcacaatcagtgagctgggaacagaacggacatataacgtgctggctattctggacttcaacagtgatcgtaagcgtatgtcaattatcgtgcgtactcctgagggaaatatcaagctttattgcaaaggggcagataccgtgatctacgaacgccttcatagaatgaacccaaccaagcaagaaacacaggatgctctcgacatctttgcaaacgagacactgcggactctctgcctgtgctataaagagattgaagagaaggagtttaccgaatggaacaagaaatttatggctgcttccgtagccagcactaatagggacgaggctttggacaaagtctacgaagagatagagaaggatctcatccttctgggggccactgccatcgaagataaactacaggatggtgtgcccgaaacgatttcaaagctcgccaaggccgacatcaagatctgggtcctgactggggataagaaggaaaccgcggaaaatattgggtttgcatgtgagctgttgaccgaggataccacaatctgctacggcgaggatattaactccttgctgcacgccagaatggagaatcagaggaacagaggaggcgtgtatgcgaagttcgcgcctcctgtccaagagtcctttttccctccggggggcaaccgagccctgattatcaccggatcctggcttaacgagatcctgctagaaaagaagacaaaacgtaataaaattctgaaactgaaatttccgcgtacagaagaggaacgtcgaatgcgaacgcagagcaaacggcgactcgaagctaagaaggagcagaggcagaaaaacttcgtggacctggcttgcgagtgcagcgccgtgatttgctgccgtgtcactcctaagcagaaggccatggtcgtggacctggtcaaaagatataagaaagccatcaccctcgccataggagacggggccaatgatgttaacatgataaaaactgcccacataggcgtggggatctctggccaggaaggcatgcaagcggtcatgtccagtgactattcattcgctcagtttaggtatctgcagcgacttctgttagtgcacgggcggtggtcttacattcgcatgtgtaagtttctgagatacttcttttacaaaaatttcgcgttcaccttagtgcacttttggtacagtttctttaatggttacagtgcccagactgcgtacgaagactggtttatcaccctctataacgtgctctatacttccttacctgtcctcctgatgggcctgctggaccaggacgtgagcgacaaactgtccctgagattcccgggcctgtatattgtcggccagagggatctcttgttcaactacaagcggtttttcgtctctctgcttcacggagtgttaactagtatgatccttttcttcataccacttggggcatacttgcaaactgttgggcaggacggcgaggcaccatctgactaccaaagcttcgctgtaacaattgcctcggcacttgtgattacagtaaattttcagatcgggctcgacacatcttattggactttcgtaaatgctttctcaattttcggctcaatagccctctatttcggcataatgtttgactttcacagtgccggaatacacgtactgtttccgtccgctttccaatttaccggcacagcatccaatgccctacgtcaaccatatatttggctgactattattttagctgtagctgtatgcctgctccccgtcgtggccatacgctttctgtcgatgactatctggccgtccgagtcggacaagattcaaaaacataggaaaagactaaaagctgaagaacagtggcagaggcgacagcaagtttttagacgaggggtgtccacccgaagatcagcatacgccttctcgcaccagagggggtatgccgatctcatctcctcaggcaggtctatccggaaaaagcgtagccccctggacgccatcgtggccgatggaacagccgaatataggaggacaggcgattct

SEQ ID NO: 7310 - DNA, 3753 bp, synthetic construct
  misc_feature 1..3753: note = source = /note="Description of Artificial Sequence: Synthetic coding sequence"
  source 1..3753: mol_type = other DNA
atgtcgaccgagcgtgattcagaaaccacttttgacgaggattcccaaccaaacgatgaagtggtgccctactcagatgatgaaactgaagatgaactggatgatcagggttccgctgtggaacctgaacagaaccgagtcaatcgcgaagctgaggagaatcgggaaccctttagaaaggagtgtacctggcaagtcaaggccaatgatagaaaataccatgagcaacctcactttatgaacactaagtttctgtgtataaaggaatccaagtatgcaaacaacgccatcaaaacttacaagtacaacgcattcacttttatccctatgaatttgttcgagcaattcaagagagcagctaacctgtacttcctggcactcttgattcttcaggcagttccacaaatttcgaccctggcatggtacactaccctggtccctctgcttgtggttctgggagtgacggcgattaaggatcttgtggacgacgtggcacgccacaaaatggataaggagattaacaaccgaacttgcgaggttatcaaggacggtcgttttaaggtggcaaagtggaaggagatacaggtgggagatgtgatccggctgaagaaaaacgattttgtcccggcagacattcttcttctgtcctcctcggagccaaattcgctgtgctacgtggaaactgcagaattggatggcgaaaccaacctgaagtttaagatgtccctggagattaccgatcaatacctccagcgcgaggacactcttgccacttttgatggctttatagaatgcgaagaacctaacaataggctcgacaaattcactggaactttgttttggaggaacacttcatttccccttgacgcagacaaaatactgcttcgcggatgtgtgattcggaacaccgacttttgtcatgggctggtgatttttgccggggcagatactaagataatgaagaattcggggaaaactcggtttaagaggaccaaaatcgattacttgatgaactacatggtgtataccattttcgtggttctcattctgctgagcgccggattggccataggacacgcttattgggaggctcaggtgggaaattcctcctggtacctttacgacggggaagatgacaccccaagctatagagggtttctgatcttttggggttacattatcgtgctgaatacgatggtgccaatttcgctctacgtgtcagtggaggtgattagacttggccaatctcactttatcaactgggatctccagatgtactacgcagaaaaggataccccggcaaaagcacggactacgaccctgaacgaacagctcggacagatccattacatctttagcgacaagacgggtactcttacccagaatatcatgacttttaagaagtgttgtatcaacgggcagatctacggtgatcacagagacgcatcgcaacataaccacaataagattgaacaggtcgactttagctggaacacctacgcagatggaaagttggcgttctacgaccattacctcattgaacaaatacaatcgggaaaggaacccgaagtgaggcaattcttttttctccttgctgtgtgtcataccgtgatggtcgatagaaccgatggtcagcttaactaccaagcagcaagccctgatgaaggagcactggtgaacgccgcaagaaatttcggattcgcattccttgcccgcacccagaataccatcaccatatctgaattgggcaccgagagaacttacaacgttctggcaattttggactttaactctgatagaaagaggatgtccatcatagtcagaactccagaaggaaacattaagctgtactgtaagggagcagatactgtgatttacgaaagactgcatcgtatgaaccccactaaacaggagactcaagatgcccttgatatctttgcgaacgaaactctgaggacgctgtgtctgtgctataaagaaattgaggaaaaggaatttactgagtggaacaagaaattcatggcagcctccgtggccagtacgaatcgagatgaagccctggataaggtgtacgaagaaatcgagaaggacctgattctcctgggtgcgactgcaattgaggataaacttcaagatggtgtgccggaaaccatctcgaagctcgcaaaggcagacatcaagatttgggtgctgacgggcgacaagaaagaaactgccgaaaacataggtttcgcttgtgagctgctcaccgaagatactaccatctgctatggggaggacattaacagtctgcttcatgccagaatggaaaatcagcggaacagaggaggagtctacgcaaaattcgcacccccagtccaggagtcgttttttcctccggggggcaatcgggcgctgatcattaccgggtcgtggctcaacgaaatactccttgagaagaaaacgaaaaggaacaaaattctcaagctgaagtttccacgcacggaggaggaacggcgcatgagaacccagtccaagcggagactcgaagccaagaaggaacaaagacagaaaaacttcgtggatctggcctgcgaatgctcggcagtgatttgctgtcgagtcacgcctaaacagaaggcaatggtggtggatctggtgaagcggtacaagaaagcaatcactttggccataggtgatggtgcgaatgacgtaaacatgatcaaaactgcacatatcggggtcggaatttccggccaagagggaatgcaagccgtcatgtcctccgactactcatttgcacaatttaggtacttgcaacgtttgctcttggtgcacggtcgctggagctacattcgtatgtgtaaattcttgagatactttttctacaagaatttcgcttttactctcgtgcatttctggtactccttctttaacggctacagcgcccaaacggcctacgaggattggttcattaccttgtataatgtgctttacacgtcgctgccagtgctcctgatggggctcctcgaccaggatgtctcggacaagctgtcgttgcgctttcccggactttacattgtgggtcagcgcgatctcttgttcaattacaaacggttttttgtctcccttttgcatggggtgcttacctcgatgattctcttcttcatccctttgggagcctaccttcaaaccgtgggtcaagacggtgaagccccatcggattaccagtcgttcgcggtcaccattgcatccgcgctcgtgatcacggtgaacttccaaattgggctcgatacgagctactggacctttgtgaatgcgttctccattttcgggtcaatcgcactgtactttggcatcatgttcgacttccactcggctggtattcatgtgttgtttccctccgcctttcagttcacgggtaccgcatcgaatgcacttaggcaaccatacatttggcttaccatcattctggcagtcgcagtgtgtctgcttcctgtcgtcgcaatcagatttctctccatgaccatttggccatccgaatccgataagatccaaaaacaccgcaaaagactcaaggcagaggaacaatggcagagacgacaacaagtctttcgtagaggagtgtcaacccgtaggtcagcgtacgcatttagccatcagcgcggatacgcagacctcattagctcaggcagatcgattcgaaagaagagatcgcctttggacgcgattgtggcggacgggactgcggaataccgccgcacgggtgactcc

SEQ ID NO: 7311 - DNA, 3753 bp, synthetic construct
  misc_feature 1..3753: note = source = /note="Description of Artificial Sequence: Synthetic coding sequence"
  source 1..3753: mol_type = other DNA
atgagcactgagcgcgatagcgaaaccacttttgatgaggatagccaaccaaacgatgaggtcgtcccttacagcgatgacgaaaccgaggacgaacttgatgaccaaggatcggcagtcgaacctgaacaaaacagggtcaatcgcgaagccgaggagaatagggagccgtttcgaaaggaatgcacttggcaagtcaaagccaacgatcgcaagtatcatgaacaaccacactttatgaataccaaattcctgtgcatcaaagagtcaaagtacgccaacaacgccattaagacctataagtacaatgcgtttacctttattcccatgaaccttttcgaacaattcaagagagcagcaaacttgtactttctggcactgcttattctccaggcagtgccgcaaatcagcactcttgcctggtacactactcttgtgccactgctggtggtcctgggagtcactgcaattaaggacctggtggatgatgtggcgcgccataagatggataaggagataaacaaccgtacctgtgaggtgataaaggacggtaggtttaaggtcgcaaagtggaaggaaatccaggtgggggatgtgattaggctgaaaaagaatgactttgtgcctgcagatattctgcttctgtcctcatcagaacccaactcgctgtgctacgtcgaaaccgcagaactggatggtgaaactaacctcaaattcaagatgtcccttgagattaccgaccagtaccttcaaagagaagatacgctcgcaacttttgatggtttcatagaatgcgaagagccgaacaatagactcgataagtttactggtaccctgttttggcggaacacctcattcccacttgacgctgacaagatactgctccggggctgtgtcattagaaataccgatttttgccatgggctggtcatctttgcaggagcagataccaagattatgaaaaactcgggtaaaacccggtttaagcgtaccaaaattgattatctcatgaattacatggtgtacacgatcttcgtggtgttgattcttttgagcgccggactggccatcggtcacgcgtactgggaagcacaggttggaaattcttcctggtacttgtacgatggggaagatgataccccttcctatagggggttccttatcttttggggttacataatcgtgctgaatacgatggtgccaatctcactttacgtgtcggtggaagtgataagacttggacagagccacttcataaactgggacctgcaaatgtactacgcggaaaaggatactccagcaaaggcacgcaccactactctgaatgaacaacttggacagattcattacattttctcggataaaactggaactctgacccaaaacataatgacctttaagaagtgttgtattaacgggcagatttatggcgaccatagagatgcatcccaacataaccataacaaaattgaacaagtggacttttcctggaatacttacgccgatggtaagctcgcattttacgatcattacttgatcgaacagatccaatcaggaaaggaaccagaggtgcggcaattcttttttctcctggccgtgtgtcatactgttatggtagataggactgatggtcagctgaattaccaagcggcatctccagatgagggtgcgcttgtaaatgcggcacgtaatttcggattcgccttcctggcaaggacccagaacacgatcaccatttccgagcttggtaccgagagaacgtataacgtgcttgccattctggacttcaactctgacagaaagcgcatgtccattatcgtgcggacgccagaaggcaacataaagttgtactgtaagggcgcagataccgtaatctacgagcgcctccaccggatgaatcccactaagcaggaaacccaggatgctctggacatatttgctaacgaaacgctcagaactctgtgcctttgttacaaggagatcgaggagaaggaatttactgagtggaacaagaagtttatggctgcatcagttgcctccaccaacagagacgaagcacttgataaagtgtacgaagaaatagagaaggacctgattctgcttggtgcaaccgcaatcgaagataaacttcaagatggcgtcccagaaactatttctaaacttgcgaaggcagacattaagatttgggtacttaccggagataagaaggaaacggcagagaacatcggttttgcttgtgagcttctgacggaggacaccaccatatgttatggagaggacatcaactctctccttcatgccaggatggaaaatcagcgtaaccgtggaggtgtgtacgccaagtttgcccctcctgtccaagagtcatttttccctcctggagggaatcgagcattgattatcaccggatcctggcttaatgaaattcttcttgagaaaaagactaaacgaaataagattctgaaattgaagtttccccgaaccgaagaagaacggcgcatgcggacgcagtccaaacggaggctggaagcaaagaaagaacagcggcaaaagaacttcgtcgaccttgcctgtgaatgctcagcggtcatctgctgtagagtcacgccgaagcagaaggcaatggtggtcgatctcgttaaacgttacaagaaggcaatcactctcgcaataggagatggcgcaaatgacgtgaacatgatcaagactgcgcatataggtgttggaatttcaggccaagagggcatgcaggccgtgatgagctcggattacagttttgcccagttcagataccttcagcgccttctgctcgtgcacggtcgttggtcgtacattcgtatgtgtaagtttttgaggtatttcttttacaaaaactttgcatttactcttgtgcacttttggtactcgttcttcaatggctactctgcacaaaccgcatatgaggattggttcattacgctttacaacgtgctctacacttcgctccccgtgctgctcatggggctcctggaccaagacgtctcggacaagctgtcgctgcgttttcccggactgtacatcgtgggccagcgtgatcttcttttcaactacaaaaggttttttgtctcccttttgcacggagtgctgacctcgatgatcctcttctttatacctttgggagcctacctgcagactgtcggtcaagacggagaagccccttccgattaccaatcctttgcggtgaccatcgcctcggctctcgtcatcaccgtcaactttcaaataggtctggatacgtcatactggacctttgtcaacgcgtttagcatctttggttcaatcgcactgtacttcggcattatgttcgattttcattctgctggtatccatgtgctttttccttcagcattccaattcaccggcaccgccagcaatgcgttgcgccaaccctacatctggctcaccattatactggcagtcgctgtctgtctgctccctgtggtggcgattagatttctgtcgatgactatttggccatcggaatcggacaagattcaaaagcaccggaaacggctcaaggcagaagaacaatggcagcgacgacagcaagttttccggcgaggcgtgtccacccggagatcagcctacgcgtttagccatcagcggggatatgccgatctcatctcgtccggcagaagcattcgcaaaaagagatcgcctctcgacgctattgtggcagacggtactgcggaatataggagaactggggacagc

SEQ ID NO: 7312 - DNA, 3753 bp, synthetic construct
  misc_feature 1..3753: note = source = /note="Description of Artificial Sequence: Synthetic coding sequence"
  source 1..3753: mol_type = other DNA
atgagcaccgaaagggactcggagacgaccttcgacgaggattcgcagccaaacgatgaggtggtgccttactcggacgacgagacggaggacgagcttgacgatcaggggtcagcggtggaacctgaacagaatagagtaaaccgcgaagccgaggaaaacagggagccatttcggaaagaatgtacttggcaggtgaaggcaaacgatcgcaagtaccatgaacagcctcatttcatgaatactaaattcctgtgcatcaaggaatcaaaatacgcaaacaacgcaattaagacgtacaagtacaacgcatttacgttcatacctatgaacctctttgaacagtttaagagagcagcgaacctgtactttctggcacttcttatcctgcaagcggttccacagatctcaaccctggcctggtacactacccttgtgcctctgctcgtggtcctgggtgtgaccgcgatcaaagatttggtcgacgacgtggcaagacataagatggataaggagataaacaaccgaacttgtgaggtcattaaggacggcagattcaaggtggccaaatggaaggaaattcaggtcggagacgtgatccggctgaagaagaatgattttgtgcccgcagatattctgctcctttcatcctcagaaccaaattccctctgttacgtggaaaccgccgaacttgacggtgaaactaacctcaaattcaaaatgtcgctggaaataaccgaccaatacttgcagcgggaagatactctcgccaccttcgatggtttcattgaatgtgaggagcctaacaatagactcgacaagttcaccgggacgcttttttggcgcaatacttctttcccactggacgcagacaagatactcctgcggggttgtgtcatccgcaacaccgacttctgtcacggtctggtgatctttgcaggcgcagatacgaagatcatgaagaattcgggtaaaaccagatttaagcgcaccaaaattgattatctcatgaattacatggtttatacgatttttgtcgttcttatcctcttgagcgcaggcttggcgattggacacgcctactgggaggcccaagtgggtaactcgagctggtacctttacgacggcgaagatgacaccccctcctatagaggatttctgatcttttgggggtacatcattgtcctgaacaccatggtccctatctcgctgtacgtctccgtcgaagtgattcgtcttggccagtcacactttatcaattgggacttgcaaatgtactacgctgaaaaggatacccctgcgaaagcaaggaccaccacgttgaacgagcaactcggacaaatacattacatattctcagacaaaactggcactctcacccagaacattatgacctttaagaagtgctgcattaatggacaaatctatggtgaccatcgggacgcatctcaacataaccataacaagattgagcaagtggatttctcctggaacacctacgcggatggaaaacttgccttctacgatcattaccttatagaacagatccagtcagggaaagagccggaagtgagacaattctttttccttctggccgtgtgtcacactgtcatggtggatcgtaccgatggacaactcaattaccaggccgcctcccccgatgaaggggccttggtaaacgccgccagaaactttggtttcgctttcctcgcccgtacccaaaacacgatcaccatctcggaacttggaactgaaaggacctacaacgtgctggcaattctggatttcaactcggatcgcaagcgaatgagcattattgtccggacccctgaaggtaacatcaagctctactgtaagggagcagacactgtcatatacgaacggctgcacagaatgaacccaactaaacaggaaacccaagacgcacttgatatcttcgcgaatgagactctgcgaaccctttgcctgtgctacaaggaaattgaagagaaggagtttactgaatggaacaaaaagtttatggcagcctcagtcgcatctaccaatagagatgaagcactcgacaaagtgtacgaggaaatagagaaagatttgattcttctcggtgcgaccgctatagaagataagctccaagacggagtacctgaaactatcagtaagctcgccaaagccgacattaagatctgggtcttgaccggagacaaaaaggaaactgcggagaacattgggtttgcctgtgagcttctgaccgaagataccactatttgctacggagaggacataaacagcctgctccacgcgcgtatggaaaaccagcgcaatagaggcggggtgtacgcaaaattcgcacctcccgtccaagagtcttttttccccccaggtggaaatagagcactgatcatcaccgggagctggctcaacgagattctgcttgagaaaaagacgaagagaaacaagatccttaagttgaagtttccccggaccgaggaagaaagaagaatgcggacccagtccaaaagacgacttgaggcgaaaaaggaacagcgccagaagaacttcgtggacctggcatgtgaatgctccgcagtcatctgttgtagagtgacgcctaagcaaaaggctatggtggtcgacctcgtgaagaggtataagaaggcaataactctcgcgattggtgatggcgcgaacgatgtcaacatgattaagaccgcccatattggcgtgggaatctcaggtcaggagggaatgcaagccgtgatgtcctcagattactcattcgcacaatttcggtaccttcagaggcttctcctggttcatggaaggtggtcctacatccgcatgtgtaagttcctgagatacttcttctataagaactttgcattcacgctggtgcacttttggtacagcttctttaatggatactcggcccaaaccgcttacgaggattggttcataactctttacaacgtgctctatacttcactgccagtcctccttatggggcttctcgaccaagatgtctcggataagctcagccttagatttcctggcctttacatcgtgggtcaaagagatctccttttcaattacaagcggttttttgtgtcccttcttcatggggtgcttacctccatgattctctttttcattccacttggagcatacctccagaccgtggggcaagatggagaggcaccctcggattaccaatcgtttgccgtcactatcgcatccgctctggtgatcaccgtgaattttcagatcggtcttgacacctcctactggactttcgtcaatgccttttcgatttttgggagcatagccctctactttggaatcatgttcgattttcattccgcaggcatccatgttttgttcccttccgcttttcaatttactggcaccgccagcaacgcacttcgccagccctacatttggctgaccataattcttgccgtcgcagtgtgtttgctgcccgtcgtcgcaattagatttctttcaatgactatctggccgagcgagtccgacaagattcaaaagcacagaaagagactcaaggcagaggaacagtggcagcgcaggcaacaggtgtttagacggggtgtctcaacccggcgatccgcctacgcattttcgcatcagcgcggctacgcagatctgatttcgagcggaagaagcattaggaaaaagcggtcgccacttgatgcgattgtggcagatggtactgcagaataccgaagaacgggagatagc

SEQ ID NO: 7313 - DNA, 3753 bp, synthetic construct
  misc_feature 1..3753: note = source = /note="Description of Artificial Sequence: Synthetic coding sequence"
  source 1..3753: mol_type = other DNA
atgtccacggaacgcgattcggaaactaccttcgacgaggactcgcagccgaatgatgaagtggtgccgtacagcgacgacgaaaccgaggatgaactcgacgatcaaggaagcgcagtggaaccagaacaaaaccgcgtcaaccgggaggctgaggaaaacagggagccgttccgcaaagagtgcacctggcaggtcaaagctaacgatcgcaagtaccatgaacaaccacacttcatgaacaccaagttcttgtgtatcaaggaatccaagtacgccaacaatgcaatcaagacctacaagtacaatgcattcacgttcatccctatgaacttgttcgagcagttcaagcgcgccgctaacctgtacttcttggcactgctgatcctgcaggcggttccacagattagcactctggcgtggtacactactctggtgcccctcctggtggtcctgggcgtgactgcaatcaaagatctcgtcgacgatgtggcgcggcacaaaatggacaaggagatcaacaaccgcacttgcgaggttatcaaggacggacgctttaaagtggccaaatggaaggaaatccaggtgggtgacgtcattcgcttgaagaagaatgattttgttccagcggatatcctgctgctgagctcatccgaaccgaactcgctctgttacgtcgagactgcagagctggacggggaaactaatctgaagtttaagatgtcgctcgaaatcactgatcaatatctgcagcgggaggatactttggccacgttcgacggctttatcgaatgtgaggaaccgaacaaccgcctggacaaattcactggaacccttttctggagaaacaccagcttcccactggatgccgacaagatcctccttcggggatgcgtgatccggaacaccgacttctgccatggactggtgatcttcgccggggcagacacgaagatcatgaagaacagtggaaagactcgctttaaacgtactaagatcgactacctgatgaattacatggtgtatactatcttcgttgtgttgatcttgctcagcgcgggattggcaatagggcacgcttactgggaggcgcaggtcggcaattcgtcctggtacctgtacgatggagaagatgacactccctcgtaccggggattcctgattttctggggttacatcatcgtcctcaacactatggtgcctatctccctttacgtctcagtggaagtgatcaggctggggcagtcccatttcatcaactgggacctgcagatgtactacgccgaaaaggatactccagccaaagcacggacgactaccctcaatgagcaactcggtcaaattcattacatcttctcggataagaccgggaccctgactcaaaacatcatgaccttcaaaaagtgctgcatcaatggacagatctatggcgatcacagagatgcctcccaacacaatcacaataagatcgagcaagtggatttttcatggaacacttacgccgacgggaagctggctttctacgaccactaccttatcgaacaaatccagtcaggaaaggagccggaggtcaggcagtttttcttcctccttgcggtgtgccacaccgtgatggtcgaccgcactgatggacagctgaactaccaagccgcctcgcctgacgaaggcgctcttgtgaatgccgcccgcaacttcgggttcgctttcttggctcggactcagaataccatcactatctcggaattggggactgagagaacctacaatgtcctcgcaatcctcgactttaactcggatcgcaagcgtatgtcgatcatcgtccggacccctgagggcaacattaagctctactgcaagggggctgacaccgtcatttacgaaagactccaccgcatgaacccaaccaaacaggaaactcaggacgccctggacatctttgccaacgaaactctgcgaacgctgtgtctctgctacaaggaaatcgaagagaaagagttcaccgagtggaataagaaattcatggctgctagcgtcgcatcgaccaatcgggatgaggccctcgacaaggtctacgaggaaatcgagaaagatctgatccttctgggagccactgccatcgaagataaactgcaggacggagtgccagagactatcagcaaactggccaaagcggacatcaagatttgggtgctgaccggcgacaagaaggaaactgcggagaatatcggattcgcatgcgagctccttaccgaggataccaccatctgttacggcgaggacatcaacagcctcttgcacgcccgcatggagaatcaacggaatcgcggaggggtgtacgctaagttcgctccaccggtgcaggaatccttcttcccaccgggaggaaaccgcgcacttatcatcaccggcagctggctgaacgagatcctccttgagaaaaagactaaacggaacaagatcctcaagctgaagttcccgcggactgaagaggagagaagaatgcgcacgcagtccaaacgcagactcgaagcgaagaaggaacagcgccagaagaatttcgtggacctcgcgtgcgaatgttcagcggtgatctgttgccgcgtgactccgaagcagaaggctatggtcgtggacttggtcaagaggtacaagaaggccatcaccctggcgatcggagatggtgccaacgacgtgaacatgatcaagactgctcatattggtgtgggtatctccggccaggaaggtatgcaagccgtgatgagctccgactactccttcgcccagttcaggtacctccaacgcctgctgttggtgcacgggcgctggagctacatacggatgtgcaagttcctgcgctacttcttctacaagaatttcgccttcaccctcgtccacttctggtacagcttctttaatgggtactcggcccagactgcctatgaggactggttcattaccctctacaacgtgctgtatacttccctccccgtgttgctgatgggactgctcgatcaggacgtctcagacaaactgtcgctccgttttccaggactgtacatcgtgggtcaacgcgacctgctgttcaattacaaacggtttttcgtgtcgctcctgcatggggtgctgacctccatgatcctgttcttcatccctcttggggcatacctgcaaaccgtcggccaagacggcgaagcgccgtcggactaccaatccttcgcagttactatcgcttctgcactggtgatcaccgtgaactttcaaatcgggctggatacttcctactggactttcgtgaacgcgttttcgatcttcggatccatcgccctctactttggcattatgttcgatttccattcagcaggaatccacgtgcttttcccttcagcgttccaatttactgggactgcttccaatgctctgcgccagccatacatctggcttactatcatcttggctgtggcggtgtgcctgctcccggtggtggctatccggtttttgtcaatgaccatctggccgtcggagagcgacaagatccagaaacaccggaagcgcctgaaagcagaagaacaatggcaaaggagacagcaagtgtttagaaggggcgtgtcaactcgccgctcagcttacgccttcagccaccagcggggctacgccgacctgatctcctcgggaaggtcgatccgcaagaagcgctcgccgctggacgcaatcgtggccgacggtaccgcggagtatagacgcactggggacagc

SEQ ID NO: 7314 - DNA, 3753 bp, synthetic construct
  misc_feature 1..3753: note = source = /note="Description of Artificial Sequence: Synthetic coding sequence"
  source 1..3753: mol_type = other DNA
atgtcgaccgaacgagactctgagacgacatttgacgaagattcccagcccaatgatgaggtcgtaccgtactcggatgatgaaactgaggatgaattagatgaccaggggagcgccgtggaacctgaacagaaccgggtgaatagagaagccgaagaaaacagagaacccttcagaaaagaatgtacctggcaagtcaaagccaacgaccgaaagtatcacgaacagccgcattttatgaacacaaaattcttgtgtattaaggagtctaagtatgccaataacgctattaagacctataagtataacgcgttcacgtttattcctatgaatctttttgagcaatttaagagagcagccaacctatatttcctggcactgctgatcttgcaggccgtacctcaaatctctactctcgcgtggtacactactctggtgccgctgctggtggttcttggggtcactgcaattaaagatcttgttgatgacgtcgccagacacaagatggacaaagaaataaacaacagaacctgtgaggttatcaaagacgggcgattcaaggttgccaaatggaaggaaatccaggtgggagacgtaataaggttaaagaaaaatgacttcgtgcctgcagacatcctcctgctatcttctagtgagccaaatagcctttgttacgttgaaacagcagagctcgacggtgaaactaaccttaagttcaaaatgtccttggaaataaccgatcagtacctgcagagagaagacactctggccacatttgatgggttcatcgaatgtgaagaacctaataacaggctggataagttcactgggacactcttctggaggaatacttcattccccctggacgccgataagattctgctgaggggctgcgtgatcaggaacacggatttttgccatgggctggtgatctttgccggggcagacaccaaaataatgaaaaattctggtaaaacgagattcaaaagaacaaaaattgactatctgatgaactacatggtttataccatttttgtggtgttgattctcttaagcgccggcttagcaatcggccatgcctactgggaggcccaggttggaaattcaagctggtacctctatgacggcgaagatgatacaccatcttatcgaggtttcctgatcttttgggggtacattatcgtactgaacacaatggttcccatctcactgtacgtgtcagttgaagttataagactcggtcaatctcattttataaactgggatttgcagatgtactatgctgagaaagacacccccgctaaggcccggacaacaacactgaatgaacagctgggacaaattcactacatttttagtgacaagaccgggactctcacccagaatattatgacgtttaagaagtgttgcatcaacgggcagatatacggggaccacagagatgcatctcagcataatcacaataagatagagcaggttgacttttcatggaatacatatgctgatggcaagctggctttctacgatcactacctgatcgagcaaatacagagcgggaaggagcctgaggtaaggcaattcttctttcttctcgccgtatgtcataccgtgatggtggaccgcactgacgggcagctaaattaccaggctgccagccccgatgagggagcgctcgttaatgctgccaggaattttggatttgcatttctcgctcgcacgcaaaacaccatcaccatctctgagctgggtaccgaaaggacatataatgtgctagcgatcctcgattttaactccgaccgaaagagaatgagtatcatcgtcagaactcccgagggcaacataaaactctactgtaagggcgcggacaccgtgatttacgaacgtctgcacaggatgaacccaactaagcaggagactcaagatgcactggatatcttcgcgaacgagacccttagaactttatgtttgtgctacaaagaaatcgaagaaaaggagttcacggaatggaacaaaaaatttatggctgccagtgtggcttctaccaacagagacgaggctttggacaaggtttacgaagaaatagagaaggatcttatcctgcttggggccacggctatagaagataagttgcaagatggcgtgcctgaaaccattagcaagctcgctaaagccgatatcaagatatgggtcctcaccggggacaaaaaggaaaccgccgagaacatcgggtttgcatgcgaactattaacagaggatacaacgatctgctacggagaagacataaactctctgcttcacgcgaggatggaaaatcaaaggaacagaggaggagtgtacgccaaattcgcgccgcctgtgcaggaatccttttttcctccaggtggcaatcgagcccttatcataactggaagctggctgaacgagatactcttggagaaaaagacaaagcgaaataaaattctgaagcttaagttcccacgaaccgaagaggagcgaagaatgcggacccagagcaaaaggagactcgaagctaagaaggagcagcgacagaaaaattttgtcgacctggcatgtgaatgttccgccgtgatttgctgtcgagtcacccccaagcagaaggctatggtggtcgatctggtaaaacgctacaagaaagctataactttggcaatcggagacggagccaacgatgtgaacatgatcaagaccgcgcacatcggggtgggaatttctggacaggagggtatgcaggctgtaatgtcatcagactacagcttcgctcagttccgatatctgcagagattattgctcgtacacggccgctggtcttacatacgtatgtgcaagttcctccgttacttcttctataaaaacttcgcatttaccctcgtgcacttttggtattccttctttaatgggtattcagctcagactgcctacgaagactggttcattacactgtataacgtactctacacaagcctgccggtgttgctgatgggactgctggatcaggacgtgtcagacaagctttcactacgtttccccggcctgtacatcgtaggacagcgagacctgctgttcaattacaaaaggttttttgtgtccctgctccacggggtgctcacatccatgatactcttctttatcccgctgggagcgtaccttcagaccgtggggcaagacggcgaggcaccctcagattatcagtcatttgctgtgaccattgcctctgctttggttattaccgtcaattttcagattggcttggacactagttactggacgtttgtcaacgcattctctatcttcggctcaatcgccctctactttggaattatgttcgacttccactctgctgggattcacgtgctcttcccgagtgcctttcagtttaccggtaccgcttcaaacgctctcaggcagccttatatttggctcacaatcatcctagcagtggctgtctgtttgctgcccgttgtggctattcggttccttagcatgacgatatggccgagtgaatctgataagatccagaaacatcgaaaacggctgaaggcagaggaacagtggcagagaagacagcaggtgtttaggaggggcgtgagtacgcgaaggagcgcttacgcattttcccaccagcgagggtacgcggacctcatctcatcaggccgaagcatccgaaaaaaacgaagcccactggacgcaatcgtggctgatgggacagcagaatatcgacgaactggtgatagt

SEQ ID NO: 7315 - DNA, 3753 bp, synthetic construct
  misc_feature 1..3753: note = source = /note="Description of Artificial Sequence: Synthetic coding sequence"
  source 1..3753: mol_type = other DNA
atgtctacagaacgggacagcgaaacaactttcgacgaggattctcagccgaatgacgaagtcgttccatactctgatgatgagaccgaagacgagctggatgatcagggttccgctgttgaacccgaacagaatagggtgaatcgggaagctgaagaaaatagagaaccctttcgcaaagagtgtacatggcaggttaaagcaaacgatcgaaagtaccatgagcagccccacttcatgaacacgaagttcctgtgcatcaaggagtcgaagtatgctaacaacgcgattaagacctataaatacaacgcctttacctttattccgatgaatttattcgaacaattcaaacgcgctgcgaatctgtacttcctggccctgctgatcctgcaagcagtgccacagataagcacgttagcttggtacacaaccttggtacccctgcttgtagttttgggggtgacagctataaaggatttggtggatgacgttgctagacacaaaatggataaagagatcaataatagaacatgcgaggtcatcaaagacggacggttcaaggtggccaagtggaaagagattcaggtcggtgacgttattcgattaaaaaaaaacgatttcgtcccagccgacatcctgcttctatccagttcagagcccaattcattgtgctacgtggaaaccgcagagctggacggggaaaccaatcttaaatttaagatgtcactggagatcaccgatcagtacctgcagcgcgaggacactttggctactttcgatggctttatcgaatgtgaggagcccaataatcggctagacaagtttacggggaccctcttttggaggaatacttctttccctcttgatgctgataaaatcctgcttcggggctgtgtgattcggaatacagacttctgccacgggctggtgatcttcgctggcgctgataccaagatcatgaaaaactccggtaagacacgattcaaacgcactaagattgattaccttatgaattacatggtgtacacgatattcgtggtactcattttactttccgctgggctagcgattggacatgcgtactgggaggctcaagtggggaactccagctggtacctctatgatggcgaggatgatactccttcctatagaggttttctcattttttggggttacataattgtgctgaacacgatggtccctatttccctttacgtttctgtcgaggttatcaggcttggccagtcccacttcattaactgggaccttcagatgtattacgctgagaaggacacccctgccaaagcaagaacaaccaccctaaatgaacagctaggtcaaatccactacatcttctccgataaaactggtacattaactcagaacatcatgacctttaaaaagtgttgtataaatgggcaaatttacggagaccatagggacgcaagccagcacaatcacaacaagatcgaacaggtcgatttttcgtggaacacatacgcggacggcaagcttgctttctatgaccactaccttatcgagcagatccagagcgggaaagagcctgaggtaagacagttctttttcctgctcgccgtgtgccacaccgttatggtggaccgtacagacgggcaactgaactatcaggccgctagcccagatgagggcgcattggtgaatgcagccagaaatttcggattcgccttcctggcacgcacccagaataccattacaatcagcgagctgggaactgaacggacctacaacgtactggctatactcgacttcaattcagatagaaagcgcatgagcatcatcgtccgaacgccggaagggaacattaaactatactgcaagggcgctgacactgttatctacgagcgactgcacaggatgaacccgactaaacaagaaactcaagacgctctggatatctttgctaacgaaaccctaagaaccttgtgtctgtgctataaagagatcgaggaaaaagaattcaccgagtggaacaaaaaattcatggctgcctccgtggcgtcaactaatagggacgaagcacttgataaggtctatgaagagatcgagaaggatcttatccttttaggagcaacagcaatcgaggacaagcttcaagacggagtccccgaaacaatctctaaattagcgaaggctgatataaaaatctgggtactgacgggcgataaaaaggaaacggctgaaaatattggcttcgcctgtgagcttctgaccgaagacacaaccatctgctacggagaagacataaactcactcctgcatgctaggatggagaaccagcgcaatagaggaggtgtgtatgccaagtttgccccgcccgtacaggaaagcttcttcccgcccgggggcaacagggctcttattatcacagggtcctggctcaatgagatcctgctggagaaaaaaaccaagcgaaataagattttgaagctgaaattcccccgtaccgaagaggagagacgcatgcggacccagagcaaacggcggcttgaggctaaaaaggaacaaagacagaagaatttcgtagaccttgcctgcgagtgctccgctgtcatctgctgtagagtgacgcccaagcagaaggcgatggttgtagatctagtgaagcgctacaagaaagccattactctcgctattggcgatggcgcaaatgatgtgaatatgataaagaccgcgcatatcggcgttgggattagcggccaggagggtatgcaggcagtgatgtctagtgactacagtttcgctcagttccgctatctccagcggctgctgttggtgcacggccgatggagttatatccggatgtgtaagttcctcaggtattttttctacaaaaatttcgcgttcacattggtacacttctggtacagcttttttaatggttactccgcacagacagcatatgaagattggtttattacgctttacaatgtgctatatacctcactgccagttctcctgatgggactattagaccaggatgttagtgacaaactatccttacgcttccccgggctatatatagtaggacagagagacctgctgtttaattataagcggttttttgtatcactcctgcacggggtgctgacaagtatgatcctcttctttattcctctcggggcctatcttcaaaccgtcggccaggatggggaagccccttcggattaccagagtttcgctgtgactattgcttctgccctggtaattacagtcaatttccagattggactcgatacctcatactggactttcgtgaacgctttctccatctttggctcaatcgctctttactttgggatcatgttcgatttccatagcgctgggatccatgtgctgtttccttcagccttccagtttacggggacggcgtccaacgcactcagacaaccctatatttggctgaccatcattctcgcagtggccgtttgtctgctccctgtggtggcaatcagattcctgtcaatgaccatttggccttccgaatcagacaagatacagaagcatagaaagagactgaaggcggaggagcagtggcagcgcagacaacaagttttcaggagaggagtctcaacccgacggtctgcgtatgcttttagccatcagcgcggatatgcagatctgatttcatcgggtcgctcaattcgcaagaagcggagcccccttgatgccattgtggcggatgggactgctgaatatagaaggacaggggactcc

SEQ ID NO: 7316 - DNA, 3753 bp, synthetic construct
  misc_feature 1..3753: note = source = /note="Description of Artificial Sequence: Synthetic coding sequence"
  source 1..3753: mol_type = other DNA
atgagcaccgagcgagactcggagactacctttgatgaagattcccagccaaatgatgaggtggtgccttactcggatgatgaaacggaggatgaattggatgaccaaggatcggcagtggagcctgagcaaaatcgcgtgaacagggaggcagaagaaaacagagaaccatttcgtaaggaatgtacctggcaagtgaaggcaaatgatcggaaataccatgaacaaccacatttcatgaatactaagttcctgtgtataaaggaatctaagtatgcaaataacgcaatcaaaacttacaagtacaatgcattcaccttcattccaatgaacttgtttgaacagttcaagagagccgccaacctttactttctggcacttctcatccttcaggcagtgccccaaatttctacccttgcttggtacaccacccttgtgcctctccttgtggtgctcggtgtgactgcgattaaggatctggtcgatgacgtggcccggcacaaaatggacaaggagataaacaacaggacttgtgaagtcattaaggacgggagatttaaggtggcgaagtggaaggagatccaggtgggtgatgtgattagacttaagaagaatgatttcgtgccagcagatatcctcctgctgtcgagttcggaacctaattcactttgttacgtggaaacggcagagctggatggtgagactaacctgaagtttaagatgagcctggagatcaccgatcaatacctgcagcgagaagataccctcgcaacctttgatggctttattgaatgtgaggaacccaacaataggctcgacaagtttaccggaaccttgttctggagaaacacgtccttccccctcgatgctgacaaaatcctcctgcgaggttgtgtgattagaaacactgatttttgccatggcctcgtcatcttcgccggtgcagacactaagatcatgaaaaactcagggaaaactagattcaagagaaccaagatcgattatctgatgaactacatggtgtacactatattcgtggtgcttatcctgctgtctgcaggacttgcaatcggtcatgcgtactgggaggcgcaggtgggcaactcctcgtggtacctctacgatggtgaggacgatacgccatcgtaccgtggttttctcatcttttggggctacatcatagtgctgaacaccatggtcccaatttcgctgtatgtctcagtcgaggtgattagattggggcaatcccatttcatcaattgggaccttcagatgtactacgccgaaaaagataccccagcaaaggcccgaactaccactcttaacgaacaactgggacaaattcactacattttctccgacaaaactggtactctgacccagaacattatgacgtttaagaagtgttgcattaacggccagatttacggcgaccaccgagacgccagccaacacaatcacaataagattgaacaagtggattttagctggaacacttacgcagacggcaaacttgccttttacgatcattacttgattgaacaaattcaatccggaaaggagccagaagtgaggcaattctttttccttctcgcggtgtgccataccgtgatggtggataggaccgatggacagctgaactaccaggccgcctccccagatgaaggagcactcgtgaacgcagcacggaacttcggttttgcctttctggcaagaacccagaacaccattaccatttcggaactggggactgagagaacttacaacgtcctggcgatccttgatttcaactcggaccggaagcgaatgtcgattatcgtccggacccctgaagggaatatcaaactgtactgtaagggtgcagataccgtgatttatgaaaggcttcaccggatgaaccccaccaagcaagaaacccaagatgcacttgacatatttgcaaatgaaactcttagaactctttgcctttgttacaaggaaatcgaggaaaaggagttcactgaatggaataagaagttcatggcagcctcggtggcaagcaccaatagggatgaagcgcttgacaaggtgtacgaggagattgagaaagatcttatactcctgggagcaaccgcgatcgaggacaaactgcaagatggcgttcccgagacgattagcaaactggccaaggcagacattaagatttgggtgctcactggagacaaaaaggagactgcagaaaacatcggattcgcgtgtgaacttcttaccgaagatactaccatctgttacggcgaggacatcaattcgctgcttcatgcgagaatggagaaccagaggaataggggaggagtctacgcaaagtttgcaccccctgtgcaagaatcatttttcccacctggcggaaatcgtgcactcatcattaccggaagctggctcaatgagatcttgctggagaaaaagactaaaagaaacaagattctcaaactgaaatttccacggaccgaagaagaacgccggatgcgaactcaatcgaagcgtagacttgaagcgaagaaggaacagcgtcaaaagaacttcgtcgatctggcttgcgaatgctccgctgtgatttgttgcagggtcaccccgaagcagaaagcaatggtggtggaccttgttaaaagatacaagaaagcgatcaccctggcaatcggcgatggcgccaacgatgtcaacatgatcaagactgcacacattggagtcggcattagtggccaagaaggtatgcaggcagtcatgagctctgattattcattcgcacaatttaggtacttgcagcgcctcttgcttgtgcatggacgttggtcttacattagaatgtgtaagtttctgcggtactttttctacaaaaacttcgcctttactctggtgcacttctggtactcgttctttaacggctactccgcgcaaacggcctacgaggactggttcatcaccctttacaacgtgctgtacacctccctgccagtgcttcttatgggacttcttgatcaggatgtcagcgataaactgagcctccgttttccaggactctacatcgtgggtcagcgggatttgcttttcaactacaagcgtttctttgtgtcccttctgcatggcgtgctcactagcatgattctgtttttcatccctctgggtgcataccttcagacggtgggacaggacggcgaggcgccctcggactaccagtcctttgcagtgactattgcttcagcactcgtgattacggtgaactttcaaattggattggatacttcgtactggacctttgtgaatgcgtttagcattttcggttccatcgcactttactttggtataatgtttgatttccattcggcaggaatacatgtgctctttccatccgcatttcagtttaccggcactgcaagcaacgccctcagacaaccgtacatttggctcaccatcatcctcgcagtggcggtctgtctgctgcctgtggtggctatacgttttctgtcgatgaccatctggccaagcgagtcagataagatacagaagcaccgcaagcgccttaaggcagaagaacaatggcaacggcgtcagcaggtgtttcgccggggtgtgtcgaccaggcgaagcgcatacgcgttttcccaccaaagagggtacgccgacctcatttcgtcaggacgatcgattagaaagaagcgctcccctcttgatgcgattgtggcagacggaacggcagagtaccgccggaccggagactcc

SEQ ID NO: 7317 - DNA, 3753 bp, synthetic construct
  misc_feature 1..3753: note = source = /note="Description of Artificial Sequence: Synthetic coding sequence"
  source 1..3753: mol_type = other DNA
atgagcaccgaacgcgacagcgaaactacgttcgacgaggactcccaacccaacgatgaggttgtcccgtactctgatgatgaaactgaagatgaacttgacgatcagggatcggccgtggaaccggagcaaaatcgcgtgaatcgcgaagcagaggagaatagggaaccgttcagaaaggagtgtacgtggcaagtgaaggcaaacgaccggaagtaccatgagcagccgcactttatgaataccaagttcctctgtatcaaagagtcgaagtatgccaacaacgcgatcaaaacctacaagtacaatgcattcaccttcatccccatgaacctgtttgaacaattcaagcgggccgcaaacctgtatttcctcgcccttctgatcctgcaagctgtgccgcagattagcactctggcgtggtacaccaccctggtcccactcctggtcgtgctgggagtgaccgctatcaaggacctcgtggatgacgtggcccggcacaaaatggacaaggaaatcaacaaccgcacttgcgaagtgatcaaggatggacggttcaaagtggccaagtggaaggagatccaggtgggagatgtgatccggctcaagaagaacgacttcgtacctgcagatatactcttgctgtcaagctccgagccaaattccctctgttatgtcgaaacggccgagctggatggcgagactaacctgaagttcaagatgtccctggaaatcactgaccagtacctgcagcgagaagatactctcgcgactttcgatgggttcatcgaatgcgaagaaccgaacaatcggctcgacaagttcaccggaactttgttctggagaaacaccagctttccgctcgacgcggacaagattctgcttcgcggctgcgtgattaggaataccgacttttgccacggcctcgtgatcttcgcgggggcggacaccaagatcatgaagaacagcggaaagactagattcaagcgcaccaagatcgattacttgatgaactatatggtgtacactatcttcgtagtgctgatccttctcagtgccggactcgcaatcggacatgcctactgggaagcgcaggtcggaaattcgtcctggtacctctacgacggagaggacgacaccccgtcgtacagaggatttctgatcttctgggggtacatcatcgtgctgaatactatggtcccgatctcgctgtacgtgtcggtggaagtgatcagactcgggcaatcgcacttcatcaactgggatctgcagatgtactatgcggagaaggacaccccagccaaagcgcggaccactaccttgaatgaacaactcggacagatccactacatctttagcgacaagactggtactcttacccagaatatcatgactttcaaaaagtgttgcatcaacggccagatctacggtgaccatagagatgcctcgcagcataatcacaataagatcgaacaagttgatttttcgtggaacacctacgcagatgggaagctcgccttttacgaccactacttgatcgagcagatccaatccggtaaagagcctgaggtgcggcagtttttcttcctgctcgcagtgtgccatactgtgatggtggatcggaccgacggacagttgaactaccaggcagcctccccagacgaaggagcgcttgtcaacgcggcccggaactttggatttgcattcctggcccggacccaaaacaccatcaccatcagcgaactcgggacggagcgcacttacaacgtgctggccatcctggactttaactctgatcgcaagcgaatgtcgatcattgtgaggactcctgagggaaacatcaagctgtactgcaagggggccgacaccgtgatctacgaacggttgcacagaatgaaccctaccaaacaggaaacccaggacgccttggacatattcgccaacgaaaccctgcgcacgctgtgcttgtgctacaaggagatcgaagaaaaagagttcacggaatggaataagaagttcatggcagcctctgtggcgtcaaccaacagggacgaggccctcgacaaagtgtacgaggagatcgagaaggatctgatcctgctgggcgccaccgcgatcgaggacaagctccaggacggagtccctgaaactattagcaagctggccaaggcggatatcaagatctgggtgctgaccggggataagaaagaaactgctgagaatattggtttcgcctgcgaactgctgactgaagataccacgatctgctacggcgaagatatcaacagcctgctgcacgcccgaatggagaatcagcggaataggggtggagtctacgctaaattcgctccaccggtgcaagagtcattcttccccccaggaggaaaccgggcactgatcatcactggatcgtggctgaacgagatcctcctcgagaaaaagaccaagaggaacaagatcctgaagctcaagtttccgcggaccgaagaggaacgccggatgagaactcaatcaaagcgccggctggaagcgaagaaggagcagcggcagaagaactttgtggacctggcttgcgaatgctccgcggtgatctgttgtagagtcactccaaagcaaaaggccatggtggtggatctggtgaagaggtacaagaaagccattactctggctatcggcgatggtgctaatgacgtgaacatgatcaaaactgcgcacatcggggtgggcatctcaggacaggaaggaatgcaagcggtgatgtctagtgattactcgttcgcgcaattccgctacctgcagcgcttgctgctggtccatggacgctggtcctatattcggatgtgtaagttcctccgctactttttctacaagaatttcgccttcaccctggtgcacttctggtactcgttcttcaacggatactcggcgcagactgcttacgaggattggttcatcaccctctacaatgtgctgtacaccagccttcctgtgctcctgatgggcctgctcgatcaggacgtctcggataaactgagcttgcgctttcctggcctgtacatcgtgggtcagcgagacttgctgttcaattacaagcgcttcttcgtgtccctcctccatggtgtcctcaccagcatgattctgtttttcatcccgctcggagcctacctccagactgtgggacaagacggcgaggccccttcggactaccagtcgttcgctgtgactatagcaagcgcgctggtcataacggtcaatttccagatcggcctggacacgtcctactggactttcgtgaacgcttttagcatcttcggcagcattgccctgtatttcggcatcatgttcgacttccattcggcgggaatccacgtcctgttccctagcgctttccaatttactgggaccgcgtccaacgcgctccgccaaccgtacatttggctgactatcatcctcgcagtggcagtctgcctgcttcccgtcgtggccatacgcttcctgtcgatgactatatggccatcggaatcggacaaaatccaaaaacacaggaagaggttgaaggcagaagaacaatggcaacgccggcagcaggtctttagacgcggcgtctcgacgagacggtctgcttacgcgttctcgcaccagcgcggatacgcggacctgatctcatcaggaaggtccatcagaaagaagcggtcacccctcgacgcgatcgtggcggacggaaccgccgagtaccgccgcactggagactcg

SEQ ID NO: 7318 - DNA, 3753 bp, synthetic construct
  misc_feature 1..3753: note = source = /note="Description of Artificial Sequence: Synthetic coding sequence"
  source 1..3753: mol_type = other DNA
atgtcgactgagcgggattccgaaacgacctttgacgaggactcacagccaaatgacgaagtggtgccgtactccgacgatgagactgaggacgagcttgatgaccaggggagcgccgtcgaaccagaacaaaaccgcgtgaacagagaagcagaggaaaaccgcgaacctttccgcaaggaatgcacctggcaagtgaaggcaaatgaccggaagtaccacgagcaaccacacttcatgaacactaagtttctctgcattaaggagtccaaatatgccaataatgccattaagacttacaaatacaacgcgttcaccttcatcccgatgaacctcttcgaacagtttaaacgggccgccaatctctacttcctcgcacttttgatccttcaagccgttcctcagatcagcactcttgcttggtacactacccttgttccgctgttggtggtcttgggagtgaccgcgatcaaggacctcgtggatgacgtggcaaggcacaaaatggataaagaaatcaacaatagaacttgcgaagtgatcaaagacggcaggttcaaagtggctaaatggaaggagatccaggtcggagacgtgatcagactgaaaaagaacgacttcgtgccagccgacattctgcttctctcctcctcggagccgaactcgctgtgctacgtggaaaccgctgaactggacggcgagactaaccttaagtttaagatgagcttggaaatcaccgaccagtacttgcaaagggaagatactctcgcgaccttcgacggatttatcgagtgcgaagagccaaacaaccgcctggacaaattcaccgggacccttttctggcggaatacttcctttccactggatgccgacaagattctcctgcgcggatgcgtcatccggaatactgatttctgccacgggctggtgatcttcgctggcgctgacaccaagattatgaagaacagcggaaagacccggtttaagcggacgaagatcgactacctgatgaattacatggtctacaccatctttgtcgtgttgatcctgctctccgcgggactggctatcggtcacgcatactgggaggcacaggtgggtaactcatcctggtacctgtatgatggagaagatgacactccttcataccgcggattcctgatcttctggggttacatcatcgtcctgaacactatggttcccatctcactgtacgtgtcggtggaagtcatccgcttgggacaatcgcacttcatcaactgggacctccagatgtactatgctgaaaaagacactccggcgaaggcccggactactactctcaatgagcagctcggccagatccactacatcttctccgataagaccggcaccctgacccaaaacatcatgaccttcaaaaagtgttgcatcaacgggcagatctacggggatcatcgcgacgcctcgcagcataatcacaataagatcgagcaagtggatttttcatggaatacctatgcggacggaaagttggcgttctacgatcattatctgatcgaacaaatccagtcaggaaaagagccggaggtccgccagttcttctttctgctggccgtttgccataccgtcatggtggatagaaccgacggccagcttaactaccaggccgccagcccagatgaaggggcgctggtcaacgcggcgcgcaatttcggattcgcattcctcgctcgcacccagaacacgatcaccatctcagagctcgggactgagagaacttacaacgtgctcgccatcctcgacttcaattccgacagaaagaggatgagcatcatcgtgcgcaccccagaggggaacatcaaactttactgcaagggagcggataccgtgatctatgaacgccttcaccgcatgaacccgactaaacaagaaacgcaggatgcccttgacattttcgccaacgagacgttgagaaccctttgcctgtgttacaaagagattgaggaaaaggaattcaccgagtggaacaagaagtttatggccgcatcggtcgcttcgactaatagagatgaggcgctggataaggtgtacgaggaaatcgaaaaggacctgatcctccttggggcgaccgcgatcgaagataaactgcaggacggagtgcctgaaactatatcaaaactcgcaaaagcggatatcaagatctgggtgcttactggagacaagaaggaaactgccgaaaacattggatttgcatgcgaactgctgactgaggacaccactatttgctacggagaggacattaactctctccttcatgctaggatggaaaaccaacggaatcggggaggtgtgtatgccaagttcgccccgcctgtgcaagagagctttttcccccctggtggcaacagagccctgatcataaccggctcgtggctgaacgagatcctcctcgaaaagaaaactaagcggaacaagatcctgaagctgaaattccctcggaccgaggaagaaagacgcatgcgaactcagagcaaacgtagactggaggccaaaaaggagcagcgccagaagaattttgtcgatctggcatgcgagtgttcagctgtgatttgctgtcgggtcacccccaagcagaaagctatggttgtggacctcgtgaagcgatacaagaaggctatcacgcttgcaattggcgatggagccaatgacgtgaatatgatcaagactgcccacatcggagtgggcatcagcggccaagaaggcatgcaggccgtcatgtccagcgactactcgtttgcacagtttcggtatctccaacggttgctgctggtccacggaagatggagctatatccgtatgtgcaagtttcttcgctatttcttctacaagaacttcgccttcactctggtccacttctggtacagcttcttcaacggatattcggctcaaaccgcctacgaagattggttcatcactttgtacaacgtcctgtatacctctctgccggttctcctgatgggactgctcgatcaagacgtgtctgacaagctgtcgctccggttccccggtctttacatcgtgggacagcgggacctcctgtttaactacaagcgcttcttcgtctcactcctgcatggcgtgcttacctcaatgatcctgttcttcatcccactgggagcttacctccagacggtcgggcaagatggagaagctccttccgattaccagtcgtttgccgttactatcgcatcggcgctggtgatcacggtcaatttccaaatcggcctggatacctcatactggaccttcgtgaatgccttcagcatcttcgggtccatcgcgctctacttcggtatcatgttcgactttcacagcgctggtattcatgttctgtttccctccgccttccagtttaccgggaccgccagcaatgcactgaggcaaccatacatctggctgacgatcatacttgctgtcgcagtctgtctgctgccggtggtggctatccgcttcctgtcaatgaccatctggccgtcggagtcggacaagatccagaaacaccgcaagcggctcaaagcggaggagcagtggcagaggcgccaacaagtctttagaagaggagtgtctactcgcagatcggcctacgcattctcacaccaacggggctacgccgacctcatctcgtcagggcgaagcattagaaagaaaagaagcccgctggacgcgattgtggccgacgggaccgccgaatacaggaggaccggcgattcc

SEQ ID NO: 7319 - DNA, 3753 bp, synthetic construct
  misc_feature 1..3753: note = source = /note="Description of Artificial Sequence: Synthetic coding sequence"
  source 1..3753: mol_type = other DNA
atgtccaccgagcgggacagcgaaactactttcgacgaagattcacagcctaatgacgaggtggtgccatattcggacgacgaaacggaggacgagctggatgaccagggttccgctgtcgaacccgaacagaatcgcgtcaaccgagaagcagaggaaaaccgcgagcctttcagaaaagaatgcacatggcaggtgaaagcaaacgatcgtaaatatcacgagcaaccacatttcatgaataccaagttcttgtgcattaaggagtcaaaatacgccaacaatgccatcaagacatacaaatataacgcttttacctttatccctatgaatctgttcgaacaattcaagagagccgccaacctgtatttcctggccttgttgattttgcaggctgtgccacagatatctaccttggcatggtacactaccttagtccctcttctggtggtgctgggagttactgccattaaagacctggtagatgacgttgcacggcacaagatggacaaggagatcaataaccgcacatgcgaggtgattaaagacggtcggttcaaagtcgccaaatggaaagagatacaagtcggcgatgtgatacgcctgaagaagaatgactttgtgcccgccgatatactcctcctttcctctagtgagccaaactccctgtgctatgtggagactgccgagcttgatggggagacaaacttaaaatttaagatgtcactagaaatcaccgatcaatatcttcagcgcgaagatacccttgccacctttgacgggtttatcgaatgcgaggagcccaataatcgcctggataagttcactggtaccttgttttggaggaatacttctttccctctggatgctgataaaattctgttacgaggttgtgtgatccggaatacagacttctgccacggtctggtcatcttcgccggagccgataccaagatcatgaaaaactccggaaagacacggttcaagcgcaccaagatagattacctgatgaattatatggtgtatactatctttgtggtgctgatcctgctgtctgccggactagccatcggccatgcctattgggaggcacaagtggggaactcatcttggtatctatatgacggggaggatgacacccccagttacagagggttccttattttttggggatatataatagtccttaacaccatggttcctatcagtttatatgtgtctgtggaggtaattcggctgggccagtcccatttcatcaattgggatttgcagatgtactacgctgagaaagacacacctgctaaagccaggacaaccaccctgaatgaacaacttggccaaattcattatatattcagtgataagaccggaacactgacccaaaatatcatgaccttcaagaagtgctgtatcaacggtcagatttacggcgaccaccgggatgcatcccagcacaaccacaataaaatagaacaggtggatttcagttggaacacttatgccgatggaaagctggcattttacgaccactatctaatcgagcagattcagtccgggaaggagcccgaggtgcgtcagtttttttttttgcttgctgtgtgccatacggttatggtagaccgcactgatgggcaattaaactatcaggccgcttcacccgatgagggtgcactggtgaacgctgccagaaatttcggattcgcctttctggcgaggacgcagaacacgataacgatcagcgagttgggcactgagcggacatacaatgttctggcaattcttgactttaactcagacaggaaacgcatgtcaattattgtccggacacccgaggggaacattaagctctactgtaagggggctgacactgtgatttatgaaagattgcataggatgaatccaaccaagcaagagactcaagatgccctcgatatttttgctaacgagacacttcgtactttgtgtctgtgctacaaagaaatcgaggaaaaggagttcactgaatggaacaagaaatttatggctgcgtccgtcgcctcaaccaaccgcgacgaggccctcgataaggtctatgaagagatcgagaaagacctgatactgctgggagccaccgcaatagaggataaactccaagacggtgtccctgagaccatttctaaacttgccaaagctgacatcaagatttgggttctgacaggtgacaagaaagaaaccgccgagaacatcggatttgcctgcgaattgttaacagaggatacgacaatttgctatggcgaggatatcaacagcctcctgcatgcccgcatggagaatcagcgtaatcggggtggagtgtacgcaaaattcgccccccccgtccaggaatctttcttccctccggggggaaacagagccctgatcataaccggatcctggctcaacgaaatcctcctagaaaaaaagaccaaacgcaacaaaatcctcaaactgaagtttccgcgtaccgaagaagagcggcgaatgcgtacacagtctaaaaggcgactggaagctaagaaagaacaaaggcaaaaaaactttgtggatctcgcgtgcgaatgctccgccgtcatctgctgccgagtgacccccaagcaaaaggccatggttgtcgacctggttaaacggtacaaaaaagccattaccctggctattggcgacggcgccaacgacgttaatatgatcaaaacagcacatatcggtgtcggaattagtgggcaagaagggatgcaggcagtgatgtcatctgattatagctttgcacagtttcgctatctgcagcgcttgctgctggttcacggccgctggagctatatccgcatgtgcaagtttctgcggtatttcttctataagaacttcgctttcacgctggtccacttctggtattcatttttcaacggatattccgcccaaacggcatatgaagactggtttatcaccctgtataatgtgctttacacaagccttcccgttttgttgatggggctgctcgatcaggatgtttcagacaagctgtccctgagattccctggtttatacattgtgggacagcgagatttgctcttcaactataaacgcttcttcgtgagcctcttgcatggcgtgttgacgtcaatgatcctgttttttatcccattgggtgcctacttgcaaactgtgggacaagatggcgaagcaccatctgattaccagtctttcgcggtgaccattgccagcgctctagttattaccgtcaattttcaaattgggctggacacctcttattggaccttcgtgaatgctttttctatctttggatccatcgccctgtactttggcatcatgttcgatttccactctgctggtatccatgtgctgttcccaagcgcttttcagtttacaggaactgcatccaacgcactgcgccaaccatacatttggctaaccattatcctggcagtcgcggtctgcctgctccccgtggtggcaatcagatttctgagtatgactatttggccaagcgaaagcgacaagatccaaaagcaccggaagcggctcaaggcagaagagcaatggcagcgcaggcagcaagtgttccgccgcggcgtgtctaccagacgctcggcttacgcgttttcacaccagagaggctacgccgacctaatttccagtggtcgatctatcaggaagaaaagatcccctcttgatgccattgttgccgatgggactgctgagtatcgtaggacgggtgactca

SEQ ID NO: 7320 - DNA, 3753 bp, synthetic construct
  misc_feature 1..3753: note = source = /note="Description of Artificial Sequence: Synthetic coding sequence"
  source 1..3753: mol_type = other DNA
atgtcaacggagcgggattcagagactacctttgatgaggacagtcaaccaaatgacgaggtagtaccttactctgacgacgagacagaggacgagctggatgaccaggggagcgcagtggagcctgagcagaaccgcgtcaaccgggaagcggaggaaaaccgcgagccctttagaaaggagtgtacatggcaagtgaaggcaaatgataggaaatatcacgagcagccccacttcatgaacactaaattcttgtgcattaaagagtctaaatacgctaataatgccatcaaaacatataagtacaacgcatttacatttatccccatgaacctgtttgagcagttcaaacgagccgccaatctgtatttcctcgcactcctgattctgcaggccgttccacagatctctacgttggcctggtacacaactctggtgccactgcttgtggtgctcggagtgacagcgattaaagacctcgttgacgatgttgcccgccacaaaatggacaaggaaattaacaacagaacctgtgaggtcatcaaagacggtaggtttaaagtggctaaatggaaagagattcaggtgggcgacgtgataaggcttaagaagaatgacttcgtgcccgccgatattcttcttctgtcctccagtgaacctaatagtctctgctatgtagaaaccgccgaactggacggagagacaaacctcaaatttaagatgagcttggagatcacggaccaatacctgcagcgagaggataccttggcaacattcgacgggttcatagagtgtgaagagcctaataacaggttggacaagtttacgggtaccttgttttggaggaacacgtcctttcctttggacgcagataaaatcctgctgcgcggatgcgtcatcaggaacactgacttttgtcacggcctggtcattttcgccggagcagatacaaagatcatgaagaacagcggcaagactcggtttaaaaggactaagatcgactacctgatgaactatatggtatacactatctttgtggtgctgatattgctgagtgctggcttggccattgggcatgcttactgggaagcacaggtgggcaacagttcttggtacctttacgacggtgaagacgacaccccatcctataggggattccttatcttctggggatatattatcgtactcaataccatggttcctatttccctctatgtgtccgtagaggtcatcaggcttggtcagagtcatttcatcaactgggacctgcaaatgtactacgccgaaaaggacactccagctaaggccagaaccaccacattgaacgagcagctcggacagattcactatattttctccgacaagactggtacccttacacaaaatatcatgacattcaaaaagtgctgcatcaacgggcagatttacggcgatcaccgagatgcttcccagcacaatcataataagatcgaacaggtcgatttctcatggaacacatatgctgatggtaaacttgctttctacgaccactatctgattgagcagattcagtccgggaaggaaccagaagtcaggcaattcttttttctgttggccgtgtgtcacacagtgatggtggaccggactgatggacagctgaattaccaggccgcctctccagacgagggagccctggtcaacgccgcacgcaactttggttttgcctttctcgctagaacacaaaacacaatcacaatatctgagctggggactgaaagaacgtataatgtgctggccatactcgacttcaattctgatcggaaaaggatgtccatcatcgtaaggaccccagaaggaaacattaaactttactgtaaaggtgctgacactgtaatttacgaacgcctgcaccgaatgaaccccactaagcaggagacacaggatgccctggacatctttgccaacgagacacttcggacattgtgcctttgttacaaggagattgaagagaaagagtttacggagtggaataagaagttcatggctgcttccgtcgcgtctaccaacagagacgaggccttggacaaagtgtatgaggaaatcgagaaggaccttatccttcttggggccacagcaattgaagacaagctgcaggatggagtaccagagacaatctcaaaactggctaaggccgatattaagatatgggtgctcaccggtgataaaaaggagactgctgaaaatatcggctttgcttgcgaattgctgactgaggacactaccatctgttacggggaagacatcaactctctgcttcatgccagaatggagaatcagagaaatcgaggtggcgtttacgctaagtttgcccccccggtgcaggaatccttctttcctcctggaggaaacagagcactgataataacggggagttggcttaacgaaatacttttggagaagaaaactaagaggaacaaaattctcaaattgaaattcccacggacagaagaggagcgaagaatgcgcacccaatccaagagaaggctggaggcaaagaaagagcaaaggcagaaaaattttgttgacctggcttgtgaatgcagcgcagtgatctgttgtagggtgaccccgaagcagaaggccatggtcgtggaccttgttaaacgatataaaaaggcaattaccctggcaattggcgacggagccaatgacgttaatatgatcaaaaccgcacacatcggtgtgggaatcagtgggcaggaagggatgcaagctgtgatgagctctgattacagttttgcacagtttagataccttcagcggctgctcctggtgcatggccgctggtcttacatcaggatgtgcaaatttctgaggtacttcttttataagaacttcgcattcacgctggtacatttttggtactccttttttaacggttattccgctcaaacagcttacgaggactggttcatcaccctttataacgtgctgtacaccagcctgccggttctgctcatggggctcctggatcaggatgtgagcgacaagctgagtttgagattccccggtttgtatatcgttggccagcgagatcttctcttcaattacaaacgatttttcgtttcactcctccatggggtcctcacatccatgattttgttctttatcccactgggggcctatctccaaacggtgggccaggatggggaggctccatcagactaccagagctttgcggtgacaatagcgtccgccttggtgattacagtcaattttcagatcggactggacacatcctattggaccttcgtcaacgccttctctatctttggctcaattgcactttactttggtattatgtttgattttcactcagcaggcatccatgtgttgttccccagcgccttccagttcaccggaactgcttctaatgctcttagacaaccttatatttggctgacaatcattttggctgtggctgtgtgcctgctgccagtcgtcgcaatcaggttcctgagcatgacgatctggccctcagagagcgataagatccaaaagcacagaaagcgcctgaaagcagaagagcagtggcagcgacgccagcaggtgtttagaaggggcgtctccacgaggcggtcagcttacgccttctcccaccagaggggatacgccgatctgatctctagcggtcgctcaatccggaagaagcgaagccctcttgacgctatcgttgccgatgggaccgccgagtatagaaggactggggactct

SEQ ID NO: 7321 - DNA, 3753 bp, synthetic construct
  misc_feature 1..3753: note = source = /note="Description of Artificial Sequence: Synthetic coding sequence"
  source 1..3753: mol_type = other DNA
atgagcactgaacgagattcagagaccacctttgatgaggattcgcagcccaatgacgaggtggtgccatactccgacgatgagacagaagacgagctggatgaccagggctctgctgtagagccagaacagaatcgtgtgaaccgtgaggcagaggagaacagggaacccttcaggaaggagtgtacctggcaggtgaaggccaacgaccgcaagtatcacgagcagccacatttcatgaacaccaagtttctgtgcataaaagaaagcaagtacgccaataatgctatcaagacctataaatacaatgctttcacctttattccaatgaatctgttcgagcagtttaaacgagccgccaatctgtactttctggctctgcttatcctgcaggccgtgccccagatctccactctagcgtggtacaccacccttgtgccactgctggtggtgctgggtgtgacggccataaaggatctggtggatgacgttgcacgccataaaatggataaggagattaataataggacttgcgaagtcattaaggatggaagattcaaggtggccaaatggaaagaaatccaagtcggggacgtgatacgccttaagaagaatgactttgtgcccgcagacattttactgttaagctctagcgaacctaacagcctgtgctacgttgaaactgcagagctggatggtgaaacaaacctgaaattcaaaatgtctttggaaataaccgaccagtatctgcagagagaagacaccctggccacttttgacgggttcatcgagtgcgaagagcccaataacaggctcgataagttcacaggcacactgttttggaggaacacttctttccctctagacgcagacaaaattctgttgcgcgggtgcgtgatacggaataccgatttctgtcatgggctggtgatctttgctggggctgacaccaagatcatgaagaactcgggcaagacaagattcaaaaggacgaagatcgattacctgatgaattacatggtttatacaatctttgtggtgcttattctgctttcagcagggttggctattgggcatgcctactgggaagcacaagtgggcaactcttcatggtatctgtatgatggcgaagacgatacaccatcatatagagggttcctgatcttttggggctacataattgtgttgaatactatggtacccatttcactctatgtcagtgttgaagttatccggctggggcagagtcatttcatcaactgggacctgcagatgtactatgcagaaaaggacacccctgctaaggcacgaaccacaaccctgaacgagcagctggggcaaattcactatatcttttcggataagaccggcaccctaacacagaacatcatgacatttaagaagtgctgcatcaacggtcaaatctacggagatcatagggatgccagtcagcataaccacaacaagatcgaacaggtagatttttcctggaatacctacgccgatggaaagctggccttctacgaccactaccttatcgaacagatccagtccggcaaggagcctgaggttcgccagtttttctttttgctggcggtgtgccacaccgtcatggttgatagaaccgatggtcaattaaattaccaagccgcatcccctgacgagggggctttagtgaacgcagcacggaacttcggttttgcctttctagctaggacccagaatacgatcacaatctcagaactcggcaccgagaggacatacaacgttcttgcaatcctggatttcaactctgatcgtaagcgaatgagcataatagtgcgcacaccagaagggaatatcaaactgtattgcaagggcgccgacaccgtgatttatgagagactgcatcgcatgaatcccaccaagcaagagacccaggacgctcttgacatcttcgcaaatgaaacactgcgcaccctgtgtctttgttacaaggagatcgaggaaaaagagttcaccgagtggaataaaaagttcatggccgcctctgtggccagtacgaatcgcgatgaagccctggacaaggtttatgaggaaatcgagaaggatctgatcctgctcggagcaaccgccattgaagataagctgcaggacggagtcccagagaccatctctaaattggccaaagccgacattaagatctgggtcctgacaggcgataagaaggaaaccgcagagaatatagggttcgcttgcgagttgctgacagaggataccacaatctgttacggcgaagatataaactccctgttacacgcaagaatggagaatcagagaaatagagggggtgtgtatgccaaattcgcccccccagtgcaagagtcctttttcccgcccggtgggaaccgggctttgataatcacaggaagttggttaaatgagatcctcctggagaaaaagacaaaacgaaacaagatcctgaagctgaagttcccccgtactgaggaggagcggagaatgagaacgcaaagcaagcgtcggctggaggctaagaaggagcagagacagaagaactttgtggatctggcttgtgaatgttcagccgtaatttgctgcagggtgaccccaaaacagaaagcaatggtggtagacctcgtaaagaggtacaagaaagcgatcacactggcaattggggacggcgcaaacgacgtcaacatgattaagaccgcgcatattggagtgggcataagcggccaggagggcatgcaagccgtgatgtccagcgactatagtttcgcacagttccggtaccttcagaggcttctgttagtacatggcaggtggtcttacattcggatgtgcaagttcctacggtacttcttctataagaactttgccttcacccttgtgcatttctggtattcttttttcaacgggtatagtgcacagaccgcgtatgaggactggttcattaccctgtacaacgtcctttatactagccttcccgttctgcttatgggtttgctcgaccaggacgtaagcgataagctgtctctgagattccctggactttacatagtgggtcagcgcgatctgctgttcaactataaacgcttttttgtcagccttctccacggcgtgctgacttccatgatactattctttatacccctgggagcttacctccagactgttgggcaggacggggaagcccctagcgattaccaatcattcgcagttaccatagcatcagctttggtcataaccgtgaatttccaaattggtctggatacgagttattggacttttgtcaatgccttctcaattttcggttccattgccctatacttcggcataatgtttgatttccacagcgcaggaatacatgtactcttcccttccgcctttcaatttaccggtacagctagcaatgctctccgtcagccttacatttggctgactataattctagccgtggcagtgtgtctcctccccgttgtggccattcgattcctttccatgaccatctggccatcggagtcggacaagattcagaagcacaggaagcggctgaaagccgaggaacagtggcagaggcgtcagcaggtttttcggcgcggcgtgagcacccggaggtccgcctatgcattcagccatcagagaggatacgccgatctgataagctctggacgtagcattaggaagaagcgcagtcctttagacgcaatcgtggctgacgggaccgccgagtaccggaggaccggcgattca

SEQ ID NO: 7322 - DNA, 3753 bp, synthetic construct
  misc_feature 1..3753: note = source = /note="Description of Artificial Sequence: Synthetic coding sequence"
  source 1..3753: mol_type = other DNA
atgagcaccgaacgggattctgagactacgtttgacgaggatagccaacctaacgacgaggtcgtcccctatagcgacgatgaaaccgaggatgaactggatgatcaggggtctgccgttgagccggaacagaaccgggtcaaccgggaggcagaggagaatcgcgaaccttttcggaaggagtgcacatggcaagtaaaggccaatgacaggaagtatcacgagcagccacacttcatgaatactaaattcctgtgcatcaaggaatcaaaatatgccaacaatgcgatcaagacatataagtacaacgccttcaccttcataccaatgaacctgttcgaacagttcaagagggctgcaaatctctattttctggccttgctgattctgcaggccgtgcctcagatctccacactggcatggtacactactctggtgccgcttttggtggtactgggagtgaccgcgatcaaggatcttgtggatgacgttgcaaggcataagatggacaaagagataaacaatagaacttgcgaggtcatcaaagatggacggttcaaggttgcaaaatggaaggagattcaagtgggcgatgtaatcagactgaagaagaatgacttcgtgcctgccgacatcttactactttccagttctgaaccaaactctttgtgttatgttgagaccgccgaactggacggggaaaccaacctgaaattcaagatgtccctggagataacagaccaatatttgcagcgagaagacactttggctactttcgacggtttcatcgaatgtgaggagcccaataatcggctcgacaaattcaccggtaccctgttctggcgcaatacttcattccctctggacgcggacaagatcctgctcagggggtgcgtgatccgaaacactgatttttgtcacgggctggtaatcttcgctggtgccgacaccaagattatgaaaaacagcgggaaaacccgatttaaaagaaccaaaatcgattacctcatgaactacatggtgtataccatcttcgttgttctgattcttctttccgctggcttggcgataggacacgcttattgggaagcccaggtggggaattcctcctggtatttatacgatggggaggatgacacaccgagttacagaggtttccttatcttttggggatacatcatcgtgctcaacaccatggttcctatctccctttacgtgagtgtcgaggtgattcgtctgggacagtctcatttcatcaactgggacttacagatgtactatgctgagaaggatacgccggccaaggcgcgcacaaccaccctgaacgagcagttgggtcagatacattacattttctctgataagacaggaacccttacccagaacataatgacatttaagaaatgttgcatcaatggccagatatacggagaccacagagacgcatctcaacataatcacaacaagatcgagcaggtcgatttttcatggaacacatacgccgatgggaagctcgccttttatgatcactatctcatagaacagatccaatcaggtaaagaaccggaagtcagacagttcttcttcctcctcgccgtgtgtcacacggttatggttgatcggactgatggtcagctgaattatcaagcagcaagcccggatgaaggcgcattggttaatgccgctcggaacttcggctttgccttccttgcccggacccagaatacgatcactatttccgagctgggcaccgagcgtacctacaacgtcctagccatacttgatttcaacagcgaccgtaaacggatgagcataattgtgcgtacccctgaaggcaacatcaaattgtattgcaagggcgccgacacagtgatatatgaaaggcttcaccggatgaacccaaccaaacaggaaacccaggacgccctggatatttttgccaatgagacgttgcgaaccctgtgcctgtgttacaaggaaatcgaagaaaaggagtttaccgaatggaataaaaagttcatggcggcttcagtggcatctaccaatcgggacgaggccttagataaggtctacgaggaaatcgaaaaggacctgattctgctcggcgcaaccgccattgaggataaactgcaggacggtgtgcccgaaaccatctctaagctggccaaagccgatatcaaaatatgggttttaaccggtgacaaaaaagagacagcagaaaacatcggatttgcatgcgagctcttgaccgaagatacgaccatctgttatggggaggacataaatagtctcctgcacgctaggatggagaaccagagaaaccgcggaggtgtgtacgccaagttcgcgcctccagtacaggaatcattcttcccacccgggggcaaccgggcactcattatcactgggtcatggttgaacgagatcctgctggagaaaaaaacaaagaggaacaagatcctgaaactgaaattccccagaacagaggaggaacgccgcatgagaacacaatccaagcggaggctcgaagcgaagaaggaacagcggcagaaaaactttgtggacctggcttgcgaatgctccgcagttatctgctgccgggtgacgcccaagcagaaagctatggtcgttgacctcgttaagcgctataaaaaggccatcacactggcaatcggggatggggctaacgatgtgaatatgatcaagacagcgcacatcggagtgggtatctccggacaggagggaatgcaggcagtaatgagctctgactatagctttgcccagtttagatatctgcaacgtcttctgctggttcacggacggtggtcttatatccgtatgtgcaaattcctgcggtattttttctataaaaactttgcttttactctcgtgcacttttggtactcattctttaatggctattctgcccagacggcctacgaagactggtttattactctgtataatgttttgtacacatcattgcctgtccttctcatgggactgttggaccaggatgtgtccgacaaattgtccctccgcttccccggcttgtatatcgtgggtcaaagagacctcctattcaattacaaacggtttttcgtatctctgctccacggagtcttgacctctatgattctgttttttatcccattgggagcatacctgcagaccgtcgggcaggatggagaagcccccagcgattatcagagctttgctgtgaccatagccagtgcacttgtcataactgtcaatttccagatcggcttagacacctcttactggacattcgtgaacgctttctcaattttcggcagcatcgctttgtattttggaataatgttcgactttcactcagccggcattcacgtcctgttccccagtgcttttcagttcaccggcactgcttctaatgctttaaggcagccctacatctggttgactataatcctagcggtggctgtgtgtctcttgccagtggtagcgattagatttctttcaatgactatttggcccagtgagagcgacaaaatacagaaacaccggaaacgcttaaaagctgaagaacagtggcagaggcgacaacaggtgtttcggcgcggcgtgtctacccgacgcagcgcttacgcctttagccatcagcgggggtacgccgatctgatcagctccggcagatctatcaggaagaagagaagccccctcgacgctattgtggcggatggcactgccgagtatcgtagaactggcgattcg

SEQ ID NO: 7323 - DNA, 3753 bp, synthetic construct
  misc_feature 1..3753: note = source = /note="Description of Artificial Sequence: Synthetic coding sequence"
  source 1..3753: mol_type = other DNA
atgtcgaccgaacgcgactccgaaaccacctttgacgaagattcacaacctaacgacgaagtggtgccatactccgatgatgaaactgaggatgaacttgatgatcaaggatccgccgtcgaacctgaacagaatcgtgtgaaccgagaggcagaagaaaatagagaaccttttcggaaggaatgcacttggcaagtgaaggcgaatgatcgaaagtatcatgaacaaccacactttatgaataccaaattcctgtgcattaaggagtccaagtacgctaacaacgcgatcaaaacctacaaatacaatgcattcacgttcatccctatgaaccttttcgaacaattcaagagagcggctaacctttactttctggcactgcttattctgcaggcagtgccacaaatttcgactctcgcctggtacaccactctggtgcccctgctcgtggtgctgggtgtgaccgcaatcaaggaccttgtggatgacgtggcgagacacaaaatggataaggagatcaacaaccgcacctgcgaggtgattaaagatggaagatttaaggtcgcaaagtggaaggaaatccaagtgggtgatgtcattagattgaaaaagaacgactttgtgcccgcagatatcctgctcctcagctcgtccgaaccgaactccctttgttacgtggaaactgcagaactggatggggaaaccaatctgaagtttaagatgagcttggaaattacggaccaataccttcagagagaggataccctcgcaacctttgatgggtttattgagtgtgaagagccgaacaatagacttgataagttcactggaaccttgttctggcgcaacacctcatttcctcttgatgcagacaagatccttctgcggggttgcgtgattcgaaatacggacttttgccatggacttgtgatatttgcaggagccgataccaagattatgaagaacagcggtaaaacccgatttaagagaactaagattgattacctgatgaattacatggtatacaccatcttcgtcgtgcttattctcctctccgccgggctcgcaatcggacatgcatactgggaagcacaagtcggcaattcaagctggtacttgtatgatggagaggacgataccccttcataccggggctttctcattttctggggatacattattgtgcttaacactatggtgccaatctcgttgtacgttagcgttgaagtcatccggctcggccagtcgcacttcattaactgggacctgcaaatgtactacgccgaaaaagacaccccagcaaaggcccgcactaccactctgaacgaacaactcggacagatccattacatattctcagataaaactggaaccctcacccagaacatcatgacctttaagaagtgttgtattaacggtcaaatctacggggatcatcgtgatgcgtcccagcataaccacaataagattgaacaagtggactttagctggaacacttacgcagacggcaaacttgcattttacgaccattaccttattgagcaaattcagtcgggaaaggaacccgaagtgcgccaattcttctttcttctggccgtgtgtcataccgtgatggtggatagaaccgacggacagctgaattaccaagccgcctccccggacgagggtgctctggtcaacgccgcacgaaacttcggatttgcatttctcgccagaacccaaaatactataactatttcggaactgggaaccgagagaacttacaacgttctggctattttggatttcaactccgatagaaagaggatgtccataattgtcagaacccctgaagggaacatcaagctgtactgcaaaggggcagatactgtgatttacgagcgccttcatcgcatgaatcctactaagcaggagactcaagacgcacttgatatctttgcaaatgaaaccctcaggaccctttgtctctgctacaaggagatcgaagagaaggagtttaccgaatggaacaagaagtttatggccgcaagcgtggcctcgacgaaccgggacgaggcccttgataaagtgtacgaagaaattgaaaaggatctcattctgcttggtgcaaccgcaattgaagataagctgcaagatggagtgcctgaaactatatcaaaacttgcgaaggccgacataaagatctgggtgctgaccggggataagaaagaaaccgccgagaatattggattcgcatgcgagcttctgacggaggacaccactatttgttacggagaagatatcaactccctgcttcatgccaggatggaaaaccaacgtaatcgaggaggagtgtacgcgaagttcgctcctcccgtgcaagaatcattctttcctcctggaggcaaccgtgcgctgatcataaccggatcctggttgaacgaaatccttctcgagaaaaagactaagcggaacaagatactgaagctgaagtttcctcggacggaggaggaacgcagaatgcggactcagtcaaagcgcagactggaagcaaagaaggagcaaagacagaagaatttcgtcgatcttgcgtgcgaatgttctgcggtgatctgctgtcgagttactcctaagcaaaaggccatggttgtggatctggtgaagcgatataagaaagcgatcacgcttgccatcggcgacggtgcaaacgatgtgaatatgatcaagaccgcccatataggggtgggcatttccggacaagagggaatgcaggcagtcatgtcgtcagattacagctttgcacagttccggtacctccagcgcctgcttcttgtgcatggtcggtggtcttacatccgaatgtgtaagtttcttcggtacttcttttacaagaacttcgcatttacgctcgtccatttctggtacagcttcttcaacggttactcagcacaaacggcctacgaagattggttcattactctgtacaacgtgctttacacctcactgccggtactcctcatgggacttctggatcaggacgtgtcggataagctcagcctcaggttcccaggactgtatatcgtggggcaacgggatctgttgttcaactacaagagatttttcgtttcgctcctgcacggagtgcttacttcgatgatcctctttttcatacctctgggtgcctacctgcagaccgtgggtcaggatggcgaagccccatccgactaccagtcctttgcggtgaccatcgcgtcggcactcgtgattaccgtgaatttccagattgggttggacacttcgtactggacctttgtgaacgccttttccatctttggatccattgcgttgtacttcggaataatgtttgattttcatagcgcaggcattcatgtgctgtttccctcggcattccaattcactggaactgcgagcaatgcactgaggcaaccttatatctggctcactataatccttgcagtggctgtgtgtctccttccggtcgtggccattcggtttctgtccatgacgatttggccctctgaatccgataagattcagaagcaccgaaagcggctgaaagcagaggagcaatggcagaggcggcaacaagtctttcggcgtggcgtctcaaccagaaggtcagcatatgcgttttcgcaccaaaggggatacgccgaccttatctcttcggggcgctcaattaggaagaagcgctcgccattggacgcaatcgttgcagatggaaccgctgagtaccgacggaccggtgattcc

SEQ ID NO: 7324 - DNA, 3753 bp, synthetic construct
  misc_feature 1..3753: note = source = /note="Description of Artificial Sequence: Synthetic coding sequence"
  source 1..3753: mol_type = other DNA
atgtcaaccgaacgcgatagcgaaactacgtttgacgaggactctcagcccaatgacgaggtggttccctactcagatgacgaaaccgaggacgagctggacgatcaggggagtgccgtagagcccgagcagaatagggtgaaccgggaggccgaggagaatcgagagccatttagaaaagaatgcacttggcaagttaaagcaaatgacaggaagtatcacgagcagcctcactttatgaataccaagtttctctgcatcaaggaatcaaaatatgccaacaacgccatcaagacgtacaaatacaatgccttcacctttatacctatgaacctgttcgagcagtttaaaagggccgctaatctctacttccttgcgctacttatcctacaggcagtgccccagatctccaccctagcctggtataccactctagttccacttctggtggttctcggcgtcacagccatcaaggacctcgtcgatgacgtcgccaggcacaaaatggacaaggaaattaataatcggacgtgcgaagtcataaaagatggaaggtttaaagttgcaaagtggaaggagattcaggtaggggatgtgattcgacttaagaaaaatgactttgtaccggcggatatactcctcctctcatcctccgagcccaactcactatgctatgtcgaaacagctgagctggacggcgaaactaatctgaaatttaagatgtctctcgagataacagaccagtacctacagagggaagacactctggcaacctttgatggttttattgagtgtgaagagcccaataacagattggataaattcaccgggaccttattttggagaaatacaagcttccccttggatgctgacaagatcctgctcagaggatgcgttattcgtaatactgacttctgtcatggactggtgatttttgctggggctgacacaaagataatgaagaactcagggaagaccagatttaaaagaacaaagatcgattatctgatgaattatatggtatatactatattcgttgtgttgatcttgttgtcagcaggcctggccataggacacgcttattgggaagcccaggtcggaaattcatcctggtatctgtacgacggagaggacgatacaccatcatatcgaggttttctgatcttctgggggtacatcattgtgctgaatactatggtgccaatttctctttatgtcagcgtggaggtgatacggctgggccagtcccactttatcaattgggacctgcagatgtactatgctgagaaggacaccccagcaaaagccaggactactacccttaacgagcaacttgggcaaatccattatatattctctgataaaaccggaaccctgacccagaacattatgacatttaagaagtgttgtataaacggtcagatctacggggatcatcgggatgcctcgcagcacaaccataataagatcgaacaggtggatttttcctggaatacttatgcggacggaaagctggccttttatgatcattatctgatcgagcagatccaatccggaaaggagccggaagtgcggcagttcttcttccttcttgccgtgtgtcatacggtgatggtcgaccgaaccgatgggcagctcaattaccaagccgcatctccagacgaaggggccctggttaacgcagcccggaatttcggcttcgcattcctggcccgcacacaaaacacaatcaccatcagcgagctgggaaccgaacgcacgtacaacgtcttggccatccttgactttaactcagacagaaaaagaatgtctattatcgtcagaaccccagaagggaatatcaagttgtattgtaagggcgcagacaccgtcatctacgaaagactccacaggatgaatcctactaagcaggaaactcaggatgccctggatattttcgccaacgaaacactgcgtactctatgcttgtgctataaagagatcgaggagaaagagttcacggagtggaacaagaagttcatggcagctagtgtggcttctaccaatagagatgaggccctcgacaaggtgtatgaagaaatagagaaggacttgatcctcctgggcgcaacagcgatagaggataagctgcaagatggtgttcccgagaccatcagtaagcttgccaaggccgacataaaaatttgggtcctcacgggggacaaaaaggagaccgcggagaatatagggttcgcctgcgaactcttgactgaggacactaccatctgctatggcgaagatatcaattccttacttcacgccagaatggagaatcagaggaacaggggcggtgtgtacgccaagttcgcccctcccgttcaggagagtttctttcccccaggcggaaaccgcgccctcattattactggctcatggctcaacgaaatactccttgagaagaaaacgaagcggaacaaaatactgaagcttaagtttccccgtacagaggaggaacgtcgaatgcgcacccaatccaagcggaggctcgaggccaagaaggagcaaaggcagaaaaacttcgtcgatctggcgtgtgaatgctccgcagtgatctgctgcagggttacaccaaaacagaaggctatggtggtggacctggtgaagcgatacaagaaggcaatcactcttgccatcggggacggcgccaacgatgtgaatatgataaagaccgcgcatatcggagtcggtattagcgggcaagaggggatgcaagctgtcatgtctagtgactacagtttcgctcagtttaggtatctccagaggctgctgctggtgcacggcaggtggagctatattagaatgtgcaagttcctgcgatacttcttctacaagaatttcgccttcacactggttcacttttggtattcattctttaatggttacagtgctcaaaccgcttacgaggactggtttatcactctgtacaacgttttgtacaccagcctgcctgttctgcttatgggcctgctcgatcaggacgtatcagataagctgtctctacgttttcctggcctgtatatcgtgggccagcgggatttacttttcaattataaaagattcttcgtgagcttactccacggggttctgacttccatgattctgttctttatccctctgggagcctaccttcagaccgtaggccaagatggtgaagccccttccgattaccagtcatttgccgttacaatcgcgtcagcgctggtaattaccgtaaattttcagattggcctggatactagttactggaccttcgtaaacgcattctccatttttgggagcatcgccctctatttcggcataatgtttgattttcactcagctggaattcatgtgttgttcccaagcgcttttcagttcacagggactgcctccaacgcactgcgccagccctacatatggttgaccatcatactcgctgttgctgtctgtctgctccccgtggttgccatcaggttcctgagtatgaccatatggccttcggaatccgacaagattcagaagcacaggaagcgactcaaggccgaggaacagtggcagaggaggcagcaggtgtttcgccgaggtgtgagtacacggagaagtgcctatgcattttcccatcaacgaggatatgccgacctgatatcatccggacgcagtattcggaaaaagcggtcgccactggacgcaattgtggccgacgggaccgccgaatacagacggaccggagattca

SEQ ID NO: 7325 - DNA, 3753 bp, synthetic construct
  misc_feature 1..3753: note = source = /note="Description of Artificial Sequence: Synthetic coding sequence"
  source 1..3753: mol_type = other DNA
atgtccaccgaacgcgattcggaaactacgtttgacgaagattcgcaaccaaatgacgaagtggtgccttattcagatgatgaaactgaggacgaacttgacgatcaagggtccgcagtggagcccgagcagaatcgcgtgaaccgtgaggccgaggagaatcgcgagccatttaggaaagaatgcacttggcaggttaaggcaaatgatcgaaagtaccatgaacaacctcatttcatgaacactaagtttctgtgtattaaggagtccaagtacgccaacaatgccattaagacttacaaatacaacgcatttacctttataccaatgaacttgtttgaacaattcaagcgggctgcaaacctctattttcttgcactcctgattcttcaagccgtgccacagatttcaactttggcttggtacactacccttgtcccacttttggtggtccttggagtgaccgcgataaaagacctggtggacgatgtggcccgtcacaaaatggacaaggagataaacaacaggacttgtgaagtgattaaagatggtagatttaaggtagctaaatggaaagagattcaggtcggcgatgtgatccgccttaagaagaatgactttgtgccggcggatattctcctcctctcatcgtcagaaccaaactcgctctgttacgtcgaaaccgccgaacttgatggagaaaccaatctgaagttcaaaatgagccttgaaatcaccgaccagtacctccaacgagaggacaccctcgcgaccttcgatggctttatcgaatgtgaagagcccaataaccggctggataagttcaccggcactctgttttggcgtaacacttcctttcctctggacgccgacaagattcttttgcgtggatgcgtgattagaaacactgacttttgccatggcctggttatctttgcaggcgccgataccaagatcatgaagaattcgggcaagactagattcaaaaggaccaagatcgactaccttatgaactacatggtgtacactattttcgtagtccttatcctcctgtcagcaggtctggctataggccatgcctactgggaagcacaggtcggaaatagctcatggtacctgtacgatggtgaagatgataccccgtcgtaccgaggttttctgattttctggggctacatcatcgtcctgaacaccatggttcctatttcgctctacgtgtcggtggaagtcattagattggggcaatcacatttcattaactgggacctgcaaatgtactacgcggaaaaggatactcctgccaaggcccgtaccactaccctgaacgagcaactgggacaaatacactacatctttagcgacaagaccggaaccctgacccagaacatcatgacttttaagaagtgttgtatcaacggccagatctatggggatcaccgcgatgccagtcaacataatcataacaagatcgaacaggtggacttctcctggaatacctacgccgatggaaagctggcattttacgatcattaccttattgagcaaattcaatccggaaaggagccagaggtccgccagtttttctttctcctggcagtctgtcatacggtgatggtggataggaccgatggacaactgaattaccaagcagcctcgccagatgaaggagcgttggttaacgccgcaagaaacttcggtttcgcattccttgcacggacccaaaatactattaccatatccgaactcgggactgagcggacctacaatgttcttgccatccttgactttaacagcgatcgcaaacggatgtccattattgtgcgaactccagagggtaacattaaactttactgtaagggcgcggacaccgtgatctacgaaaggctgcatcgtatgaacccaactaaacaagaaacccaggatgctttggacatttttgccaatgaaaccctgaggactctttgtctttgttacaaggaaattgaagagaaagagtttactgagtggaacaagaagtttatggctgcatcagtcgcatcaacgaaccgggacgaggcacttgataaggtctacgaagaaatcgaaaaggatctcattctgcttggagccaccgcaattgaagataagctccaagacggggtcccagaaaccatatctaaactcgcaaaggcagatatcaagatatgggtgcttactggagataagaaggaaactgctgaaaacatcggatttgcatgcgagctgctcaccgaggataccactatttgctacggcgaagatatcaactccctccttcacgcaagaatggagaaccaacggaaccgtgggggagtgtacgctaagttcgcgcccccagtgcaggagagctttttcccaccaggaggcaatagggcactgatcattaccggatcgtggctgaatgagattttgctcgagaaaaagactaaacggaacaagattctcaagttgaagtttccacggaccgaagaggaaagaagaatgcgaacgcagagcaagcggagacttgaagcaaaaaaggagcaacggcaaaagaatttcgtggacctggcatgcgaatgcagcgcagtcatttgttgtcgagtgactccaaagcagaaagccatggtggtggatctcgtcaaaagatataagaaggcgatcacccttgccataggggatggggctaatgatgtgaacatgattaagaccgcgcacatcggtgtgggaatttcgggccaagaaggaatgcaagcagttatgagctctgactactccttcgcacagttcaggtacttgcagagacttctgctcgtccacggccgatggagttacatccgtatgtgtaagttcctcaggtacttcttctacaagaattttgctttcacgcttgtgcacttttggtactccttctttaacggctactcggcacagacggcgtacgaagattggtttatcactctgtataacgtcctttacacttccctgcctgtgctcctcatggggctcctggatcaagacgtgagcgataagctgtccctccggttcccaggactctacatcgtaggacagagagatctcctgtttaactataagagatttttcgtcagccttttgcatggggtcctgacttcgatgattctgtttttcattcctctgggcgcataccttcaaaccgtgggtcaagacggtgaagccccgtcagattatcagtcgttcgcagttaccattgcgagcgcactcgtgataactgtcaacttccaaatcggactcgacactagctactggacttttgtgaatgcattttcgatctttggaagtattgcactctactttggtattatgtttgattttcattcggctggtattcatgtgctttttccttccgcattccaatttaccggtaccgcttcgaacgcactgcgccagccttacatttggttgaccatcatcctcgcagttgcggtctgccttcttccggtggtggcaataagattcctctccatgaccatttggccgtcagagagcgataagatccaaaagcacagaaagagacttaaagcagaggagcagtggcaacggcgccagcaggtctttaggcggggagtgtccacccgcaggagcgcctacgcatttagccaccagcggggatacgccgatctgataagctcaggtaggtcaataagaaagaaacgctctccgcttgacgccattgtggcggatggcaccgctgaatacagaagaactggtgactcg

SEQ ID NO: 7326 - DNA, 3753 bp, synthetic construct
  misc_feature 1..3753: note = source = /note="Description of Artificial Sequence: Synthetic coding sequence"
  source 1..3753: mol_type = other DNA
atgagcacagagcgcgacagtgaaaccacttttgatgaagattcccagcccaacgacgaggtcgtaccttactctgacgatgagactgaagatgagctggacgatcaaggtagcgcagtggaacctgagcagaaccgcgtgaacagggaagcagaagagaacagagaaccgtttcggaaggagtgcacttggcaggtaaaagcaaacgatagaaaatatcatgagcagcctcatttcatgaacaccaaatttctttgtattaaagaaagcaagtacgccaataacgctatcaagacatataaatacaatgcatttacatttattcctatgaacctcttcgagcagtttaagcgggctgccaatttgtacttccttgcgttactaatattgcaggcggtcccccagattagcactctggcctggtatacgaccctcgtgcctctgttggttgtgctgggagttacagccattaaagatttagtcgatgacgttgccagacacaagatggataaagaaatcaataaccgcacctgtgaggttataaaagacggacggttcaaggtggccaaatggaaggagatccaggttggggacgtcattaggctgaaaaaaaatgattttgtccctgcagacatccttttactctcatctagcgagcccaactctctgtgttatgttgagactgccgagttggatggagaaactaatctcaaatttaagatgtcccttgagataactgaccagtacttgcaaagagaggacacgctggcaaccttcgatgggttcatagagtgcgaagagcccaacaaccgcttggacaagttcaccggcacgctgttttggcgtaacacatctttccctttggacgcagataaaatattactgcgcgggtgcgtcattcggaatacagacttctgccacggcctggtgatattcgccggcgccgataccaaaataatgaagaactctggcaagacccgatttaaacgcaccaaaatcgactatctgatgaattatatggtgtatacgatatttgtggtgttaatactgttgagcgctggtctagcaataggacacgcttattgggaggcccaggtcgggaattccagctggtacctctacgatggcgaggacgacacaccctcttatagaggctttttgatcttctggggctatattattgttctgaataccatggttcctatatctctgtatgtttctgtggaagtcattaggctaggtcagagtcacttcatcaattgggaccttcaaatgtactatgcagaaaaagatacacctgccaaagcacgcacgactactttaaatgaacaattggggcagatccactacattttctccgataagacagggactcttactcagaatatcatgacattcaaaaaatgttgtattaatggccagatttatggagatcatcgcgacgcctcccagcacaatcataacaagatagagcaggtggatttcagctggaatacatacgccgacggaaagctcgccttttatgatcattatctcatagagcagatccagagcgggaaagagcctgaggtccgacagttcttcttccttctggccgtgtgtcacacagtgatggtcgatagaaccgacggtcagctcaactaccaggcagcttccccggacgagggtgccctggtcaatgcagcccgaaattttggctttgcattcctcgcgagaacccagaataccatcaccattagtgaattaggcaccgagcgtacatataatgtgctggcaatcctggatttcaactccgatcggaagcgcatgagcatcattgtgcgaaccccggaaggtaacattaaactgtactgtaaaggtgccgatactgtgatctatgagcgtttgcataggatgaaccccaccaagcaagagactcaggacgccctggatatcttcgctaacgagacgctgaggaccctgtgtctttgctataaggagatcgaggagaaagagttcacagaatggaacaagaaatttatggcagcgagcgtggcgagcacaaacagggatgaagccctggataaagtgtacgaggagatcgagaaggatctcattctgctgggagccacagccattgaggacaagttgcaggacggggtgcccgaaaccataagtaagctcgcaaaggccgacatcaagatctgggtcctaactggtgacaagaaggagaccgctgagaacatcggatttgcatgtgagttgttgaccgaggacaccaccatttgctacggggaggacatcaacagcctcctccacgccagaatggagaaccagaggaacaggggaggagtgtatgccaaatttgccccgccggtgcaggagagctttttccccccggggggcaatcgggcacttattattacaggcagctggttgaacgagatcctactagaaaaaaagaccaaaagaaataaaatacttaaactgaaattcccaaggaccgaggaagaacgccgcatgcggacgcagagcaagcgccgcctggaagccaagaaggaacagcggcagaaaaattttgtggatctggcttgtgagtgcagcgcagtgatatgctgccgagttacacctaaacagaaagccatggtcgtggatcttgtcaagagatacaaaaaggctatcaccctggccattggggatggggccaatgacgtgaacatgatcaaaactgcccacattggggtgggtatctcgggacaggaaggcatgcaggcagtaatgagctccgattacagctttgcacagttccgctatctacagaggttactcctggtgcacggtcggtggagctacatccggatgtgcaagttcctgcggtatttcttctataagaattttgccttcacattggtgcatttctggtactctttttttaatggttattcagcccagaccgcctatgaggactggttcatcacactgtacaacgttctctacacctcactacctgtactgttgatgggactgttagatcaggatgtttctgacaaacttagtctgagatttccagggctttacattgttggtcaaagagatttgctgttcaattacaagcgcttcttcgtctctttgttgcatggagttctgacgtccatgattttgttcttcatcccgctgggggcatacctacaaaccgtcgggcaagacggtgaagcaccttccgactaccagtcctttgccgtgaccattgcgtctgcacttgttatcacagtgaatttccagattggtctggatacttcttattggacattcgtcaacgcattttcaatttttggcagtatcgctctctattttggaatcatgtttgatttccatagcgcgggtatccatgtcctgttcccctctgcgtttcagtttactgggacggccagtaatgcattgaggcagccctatatatggctgacaatcattctcgctgtcgccgtctgcctcctgccagtagtggcaatccgtttcctcagtatgacaatttggccatccgaatccgataagattcagaagcatcggaagaggttgaaggctgaagaacagtggcagcggcgacagcaagttttcaggcggggagtgagtactcgccggagcgcatacgctttctctcatcagagaggatatgcggacctcatcagttctgggagaagcataaggaagaagcgaagccctctggatgccattgttgctgacggcactgctgagtatcgcagaaccggggattca

SEQ ID NO: 7327 - DNA, 3753 bp, synthetic construct
  misc_feature 1..3753: note = source = /note="Description of Artificial Sequence: Synthetic coding sequence"
  source 1..3753: mol_type = other DNA
atgagtaccgagcgcgactctgagaccaccttcgatgaagactctcagccgaacgacgaagtggtcccctattctgatgatgagacggaagatgaattggacgaccagggcagcgcagtggagcccgagcagaaccgcgtgaacagagaagccgaagaaaaccgggaacccttcagaaaggagtgcacctggcaggttaaggcgaatgataggaagtaccatgaacaaccccactttatgaatactaaatttctgtgcatcaaagagtcaaagtatgcaaataatgccatcaaaacatacaagtataatgcttttactttcattccaatgaatctatttgaacagttcaaacgagccgccaatctatatttcctggctctgctcattctccaagcagttccacagataagcacgctggcttggtacactacccttgtcccccttctggtcgtccttggggtcactgcaattaaagatcttgtggatgatgtagctcggcacaagatggacaaggaaataaacaaccgcacttgtgaggtgataaaagatggaagattcaaagtggctaagtggaaagagattcaggtgggagacgtgatccgcttaaagaagaatgactttgtcccagcagacattcttcttttgtcaagctccgagccgaatagtctttgctatgtggagactgccgagctggatggggagacaaaccttaaatttaagatgagtctggagatcactgatcaatatctgcagcgggaagatacgctggccacattcgacggctttatcgaatgcgaagagcctaataacaggctggataagtttacgggcactctcttctggaggaacacctcgtttcctttggacgccgataagatcctcctgcggggctgtgtgatcagaaacaccgacttctgccacggtctcgtgatcttcgccggcgcagataccaaaataatgaaaaattcaggaaagaccaggttcaaacggacgaaaattgactatctcatgaactatatggtatacaccattttcgtggtgctcatactgctgtccgctggccttgctatcggacacgcatactgggaagcccaggtggggaactcgagttggtatctctacgacggtgaagacgatacaccctcctaccgcgggtttttaatcttctggggatacattatcgtgttgaacactatggttcccatcagtctttatgtatctgtggaagtgatccgccttgggcagtcacactttatcaattgggacctccaaatgtattatgcggagaaggatacccccgccaaggcaagaaccacaacattgaatgaacaacttggccaaatccattacatcttttctgacaaaacgggaacactgacacaaaatatcatgacatttaagaagtgctgcatcaacggacagatttacggagatcatagagacgctagccagcataaccataacaaaattgagcaggtggacttctcgtggaatacttatgcagatgggaaacttgctttctatgaccattatctcatagaacaaattcaaagtggcaaggagcccgaggttagacagttctttttcctgttagccgtgtgccacacagttatggtcgaccggaccgacgggcaactgaattaccaagccgctagccccgatgagggggccttagtcaacgcggcacgcaatttcggcttcgcgttcctggcccgcacacaaaatactatcacaatctccgagctcggcacggaaaggacgtacaacgtgttggctatccttgacttcaactccgatagaaagcgaatgagcattatagtcaggacccccgaggggaatatcaaattgtactgcaagggcgccgatacggtgatctacgagcggctacataggatgaacccaactaagcaggagacgcaggacgcattggacattttcgccaatgaaacactgcgcacgttgtgcctttgctacaaggagattgaggaaaaggaatttaccgagtggaataaaaagtttatggccgcatcagtggcttcaacgaaccgcgacgaggccctggacaaagtatatgaggagattgagaaagatctgatcttgctaggcgccacagccatagaagacaaactgcaggacggcgttcccgaaacaatttctaaactcgctaaagctgacatcaagatatgggtgttaacaggggataagaaagagacagctgaaaacattggattcgcatgtgaactgcttaccgaggacacaactatctgctacggggaagacatcaattcactcctccatgccaggatggaaaatcagcgcaatagaggcggcgtctacgctaagtttgctccccctgtgcaggagtcttttttcccacctggggggaatagggctctcattattactggaagttggcttaacgaaattcttttggaaaaaaaaactaaacgtaataagattcttaaattgaagttcccacgcacagaggaagagcgcaggatgcgaactcagagtaagcgccgtctagaagcaaaaaaagagcagaggcagaaaaacttcgtggacctcgcctgcgagtgctcagcggttatttgctgtcgggtcacgcctaaacaaaaggctatggtggtggatttggtgaaacgatacaaaaaagcaattaccttggccattggggatggcgctaatgacgttaatatgatcaagactgcccatataggtgtggggatttctggccaggagggtatgcaggctgttatgtcttcagactactcgtttgcacagtttagatacctccaaagattgttactggtgcacggacgctggagttatattaggatgtgcaagttccttcggtactttttctataagaatttcgcatttaccctggttcacttctggtatagtttcttcaacgggtacagtgcccaaaccgcttacgaggactggtttatcaccctctataacgtgctttataccagcttgccagtcctgctgatgggcctgctggaccaggacgtgagcgataaactctctctgcggtttccgggactctatattgtcggacagcgcgatctgcttttcaattataagagattttttgtgagccttctgcacggtgtgttaacctctatgattctgttctttatccccctcggggcctacctgcaaactgtcgggcaagacggggaggccccttctgactatcagtcatttgcggtgaccattgcctcagccttggtcatcacagtgaactttcagattggtctcgacaccagctattggaccttcgtgaatgccttctcaattttcggctcaatcgctctgtatttcggaataatgttcgattttcacagcgctgggatacacgttctgttcccctctgcttttcaatttacaggaaccgctagtaatgccctgaggcaaccatacatatggctcacaatcatcttggccgtcgccgtgtgtttgctgccagtggtcgctattagatttctgtctatgacaatctggccatctgaaagcgataaaattcagaagcatagaaagcgattgaaggccgaagagcagtggcaacggcgtcaacaggtcttccgccgcggtgttagcacacggcgatccgcctatgccttctcacatcagaggggatacgctgatctaatttcctccggcaggtccatccgcaaaaagcgttctcccctcgacgccatcgtcgcagacggcaccgcagaataccgacgtacaggcgattcg

SEQ ID NO: 7328 - DNA, 3753 bp, synthetic construct
  misc_feature 1..3753: note = source = /note="Description of Artificial Sequence: Synthetic coding sequence"
  source 1..3753: mol_type = other DNA
atgagcactgaacgcgattcagagaccaccttcgacgaagattcacagcctaacgatgaggtggtgccgtacagtgatgacgagacagaagatgagcttgacgaccagggcagtgcggtcgagcctgaacaaaaccgcgtgaaccgggaggcagaggagaatcgagaaccatttaggaaggagtgtacttggcaggtaaaggctaatgaccgaaagtatcacgagcagccacacttcatgaacaccaagtttttgtgtattaaggaatctaaatacgccaacaatgccattaagacttacaagtacaatgccttcacgttcatccccatgaacctgttcgaacaattcaaacgcgccgcgaacctctacttcctcgctctgctcattcttcaagcagtacctcagatatcaaccctggcctggtatacgactctggtgccactcctggtggtgctcggggtgaccgccatcaaggacctcgtcgacgacgttgcccgccacaagatggacaaagaaattaataatcggacatgcgaagttataaaggacggacgttttaaggtagctaagtggaaagaaattcaagtgggcgatgtcattcggctgaagaagaatgatttcgtccctgctgatattttacttctgagctcatctgaaccgaattcactttgctacgtcgagactgctgagctcgacggtgagactaatctgaagtttaagatgtctttggagataacggatcaatacctccagcgcgaggacacgctggcaacctttgacgggttcatcgagtgtgaagaacccaacaaccgtctcgataaattcaccgggacccttttctggcgcaacacatctttccctcttgacgccgataagatactccttcgagggtgtgttatccgtaataccgacttttgtcacggtcttgtgatctttgccggggccgacactaaaatcatgaagaacagcggtaagactaggtttaaaagaacaaaaattgactatttaatgaattatatggtgtatacaatctttgttgtgttgatattgttgagcgcagggttagccatcgggcatgcatactgggaagcacaggtgggcaactcctcttggtacctgtatgacggagaagacgatactcctagctatcgtggttttttgatcttctgggggtacatcatcgtgctcaacactatggttccaatttccctgtacgtgtccgttgaagttattaggctggggcaatcccacttcattaactgggatctacaaatgtactacgccgagaaagatactcccgctaaggcccgcacaacgaccttgaacgagcaactgggacagatacattatatttttagcgacaagacaggaaccctgacacagaacattatgacctttaaaaagtgttgtattaacggacagatttatggcgatcaccgggacgcaagccagcacaaccacaataaaatcgagcaggtggatttctcctggaatacttatgctgacggcaagctcgctttttatgatcactacctaatcgaacagatccaaagcggaaaggagcccgaggtccgccagtttttcttcctactcgctgtgtgtcacacagtcatggttgatagaacagacggccagcttaactaccaagctgcttctcctgacgagggtgctctggttaatgcagccaggaactttgggtttgccttcctagctagaactcaaaataccatcacaattagtgaattggggaccgagagaacttacaacgtgcttgccattcttgacttcaatagcgatcggaagcggatgtctattatagtgagaacacctgagggcaatatcaagttgtattgtaagggtgctgacactgtaatttatgagaggctgcaccgaatgaaccctacgaagcaggaaacccaagatgctctggatattttcgcgaatgaaacccttcgcacactctgcctctgttacaaggagatagaagagaaggagtttacagagtggaacaagaagtttatggctgcttcggtggcctccacaaaccgggacgaggccctggacaaggtttacgaggagatcgagaaggatttgatcctgctgggagctactgcgattgaggacaagctgcaagacggggtccccgaaacaatctcgaagctagcgaaagcagacatcaagatttgggtgctgactggagacaaaaaggagactgcagagaacatcggcttcgcgtgcgaactgcttacagaggatactaccatctgctacggtgaagatattaactccctgctccatgcccgcatggagaatcaaagaaaccggggaggagtgtacgccaaatttgctcctccagtgcaggagtccttcttccctccaggcggcaatagggctctgattatcaccggaagctggttgaacgagattctgctagagaaaaaaaccaagagaaataaaatcttgaaattgaaatttcctagaaccgaggaggaaaggagaatgcggacacagagcaagagaaggctggaggccaagaaggaacaacgacagaagaactttgtggatctggcctgcgaatgcagcgcggtgatctgttgtcgcgtaacaccaaaacaaaaagcgatggtggtggatctggtcaagagatacaaaaaggcaattaccctcgccataggggatggcgcaaatgatgtcaatatgataaaaactgcccacattggtgtgggcattagcggtcaggagggtatgcaggcggtcatgtcttcagactattcttttgcacaattccgatacctccagcggctgcttttggtgcacggcagatggagttacattcggatgtgcaaatttctacgatactttttttacaagaacttcgcattcactctagtgcatttctggtattccttcttcaacggatattctgctcagactgcatacgaggactggttcattacgctttacaacgtcctttacactagccttccggttcttttgatgggactcctcgatcaagatgtgtccgataagttatccctgcggttccccggattatatatagtgggtcagagagatcttttgttcaattacaagagatttttcgtgtctctactacacggggtcctgactagcatgattctctttttcattccacttggcgcctatctgcagaccgtcggccaggacggggaggccccgtctgattaccagtccttcgccgtcactatcgccagtgctctggtgattactgtcaatttccagattggcctggacactagttactggacgtttgtgaatgcgtttagcatctttggctcgattgcattgtactttggtatcatgttcgacttccattcagcaggcatacatgttcttttcccatccgccttccaatttacgggtacagcctccaacgcactgcggcaaccatacatctggttgactattattcttgccgtagccgtttgcttgctgcctgttgtggcaattagatttctcagcatgacaatatggccgagcgagagtgataaaatacagaaacatcgaaagaggttgaaggctgaagaacagtggcagcgaagacaacaggtgttccgcagaggtgtgtccacaagacgttccgcatacgctttctcacaccaacgaggctatgcggatctgattagttctggccgctccattaggaagaaaagaagtcccctggacgcaatcgtggctgacggaacggctgaatatcggaggaccggggacagc

SEQ ID NO: 7329 - DNA, 3753 bp, synthetic construct
  misc_feature 1..3753: note = source = /note="Description of Artificial Sequence: Synthetic coding sequence"
  source 1..3753: mol_type = other DNA
atgagcaccgagcgtgacagcgagacgacatttgacgaagatagccagcctaatgatgaggttgtcccatacagtgatgatgagacagaggatgaactagacgaccaaggaagcgcagttgaaccagaacagaacagggtcaatagggaggcggaggaaaatagggagccctttagaaaagaatgcacttggcaggtgaaggcgaatgacagaaaataccacgagcagccccattttatgaataccaaatttttgtgcatcaaggagagcaaatatgccaacaatgcaatcaagacttacaaatataatgcttttactttcatacctatgaatcttttcgaacagtttaagcgcgctgcaaacctctattttctcgctcttctgatcttgcaggctgtgccgcaaattagcacactcgcctggtataccaccctggtccccctcctcgtggtgcttggtgtgacagcgatcaaggatctggtcgatgatgtggccaggcacaagatggacaaggagatcaataaccgtacttgtgaggtgataaaagacggacggtttaaagtggccaagtggaaggagatacaagtgggagacgtgattcggctcaagaagaacgattttgtgccggccgacatcttgctgcttagctccagcgagcctaactctctctgttacgtggagacagccgagctcgatggcgagaccaaccttaagtttaaaatgtcccttgaaatcactgaccagtatctgcagcgggaagatacactcgctacatttgatggctttattgaatgtgaggagccgaacaaccgtctggacaaattcactggtaccctcttttggcggaatacaagtttccctttggatgccgataagatcctcctgagaggctgcgtgattcggaacacagatttttgccacggcctcgtgatcttcgccggcgccgatacaaaaatcatgaagaactcaggcaaaacaagattcaagcgtacgaagatcgactacctgatgaattacatggtctataccatttttgttgtcctgatcctgctttcagcgggactggccattgggcatgcttattgggaggcccaggttggcaactccagctggtatctttacgacggcgaagacgatacaccatcataccgtgggtttcttatcttttggggctatatcatagtactaaacaccatggttcctatatcactgtatgtaagcgtcgaggtgatccgcctgggccaatcacactttattaactgggatctgcagatgtattacgccgagaaggacactcctgccaaagcacgcactacaaccctcaatgagcaactgggccagattcattacatcttttccgataagaccggtaccttgacacagaatatcatgacctttaaaaagtgctgcataaatggtcaaatatacggcgaccaccgcgatgcgtcccagcataaccacaacaagattgagcaggtcgatttcagttggaacacatacgccgacggaaagctcgcattttacgaccattatctcattgagcagattcagtcgggtaaggaacctgaggtacgccaattctttttcctcctggcagtatgtcacacagtgatggtggatcggacagatggacagctgaattaccaggctgctagccccgatgagggcgcccttgtgaatgccgcccggaacttcggctttgcatttctcgcccgtactcaaaatactatcactattagtgagcttggcaccgaaaggacttataatgttctggcgattcttgactttaactcagataggaaaagaatgtctatcatcgtccgtactccagagggcaatattaaactctattgtaagggtgctgacaccgtgatctacgaaaggttgcacagaatgaacccaacaaaacaggaaacccaagatgccctggatatatttgctaacgagaccttgcgtactctgtgtttatgctataaagaaattgaggagaaggagttcaccgaatggaataaaaagtttatggccgctagcgtggcaagcacaaatcgggatgaagcacttgataaagtgtacgaggagatcgaaaaggatctgattttactcggcgcgacagctatcgaagacaaactgcaggacggggtgccagagaccatttcaaaactagccaaagcggacattaagatttgggtgctgactggcgataagaaggagaccgccgaaaacatcggctttgcatgtgagctacttacagaagacacgactatctgttacggcgaagatatcaactccttgctgcatgctcgtatggagaatcagaggaatcgaggaggagtttatgctaaattcgccccccccgttcaggagagcttttttcctccgggtggcaacagggctcttattattacaggctcgtggctgaatgaaattctgctcgagaagaaaaccaagcgcaataaaatactgaaactgaaattcccaaggacagaagaagagcggagaatgcgaactcagagcaagcgtcgtctggaggcaaagaaagagcagagacaaaagaacttcgtggatctcgcgtgtgaatgttcagccgtgatctgttgtcgcgttacccccaagcagaaagccatggtggtggacctggtgaaacggtataaaaaggcgattacactagccatcggggatggcgccaatgacgtcaatatgatcaagaccgcccacataggggtgggcatttctggacaggagggaatgcaggcggtgatgtcatctgactacagctttgcccagttcaggtacttgcagcggctcctgcttgtccacggaagatggtcctacatccggatgtgcaaatttctgagatatttcttttacaaaaattttgcatttactttagtgcacttttggtacagctttttcaacggttactccgcgcagacagcctacgaggattggttcatcaccctctataacgtgctttacacatcccttcccgtgctcttaatgggcttactggaccaagatgtgagcgataagctaagtcttcggttccccgggctgtatattgtgggccaacgcgaccttctgttcaactataaacgtttcttcgtcagtttgctgcacggtgtcctcacatctatgattctcttcttcatccctctcggggcttacctgcagaccgttggacaggacggcgaggctccgagtgactatcagagcttcgccgtgaccattgcttctgcactggtcatcactgtcaattttcagatcgggctggatacatcttattggaccttcgtaaacgctttcagtatattcggatcaatcgccctctatttcggcatcatgttcgattttcattcagctgggattcatgtacttttccctagtgcattccagtttactgggacagcctctaacgccctacgtcagccatacatttggctcacgatcatcctggccgtcgccgtctgcttgcttcccgttgtggccatacggttcttgtccatgaccatctggccttccgagtcagataaaatccagaagcaccgcaaacggctgaaggcggaagagcagtggcaacggaggcagcaggtgttcaggcggggcgtgtcgacgagacgaagcgcatatgctttctctcatcagagaggctacgccgacttaatcagttctggacgctctattaggaaaaaacgcagcccactggatgcaatcgtggccgatggcacagctgaataccggcggacaggcgactca

SEQ ID NO: 7330 - DNA, 3753 bp, synthetic construct
  misc_feature 1..3753: note = source = /note="Description of Artificial Sequence: Synthetic coding sequence"
  source 1..3753: mol_type = other DNA
atgtccactgaacgcgattctgaaactacttttgatgaggacagtcagccaaacgacgaagttgtcccatattctgatgatgaaactgaggatgaactggatgatcagggaagtgccgtggaaccagagcagaaccgggtgaacagagaagccgaagaaaatagagaaccattcagaaaagaatgcacatggcaggttaaggctaatgatcggaaatatcatgaacagccccacttcatgaatacaaagttcctgtgtataaaagaatcaaaatacgcaaacaacgcgattaaaacttacaaatataatgccttcactttcatcccaatgaatcttttcgaacagttcaaacgcgctgccaatctttatttccttgcactcctcatccttcaggccgtccctcagatttcaactctcgcgtggtatacaacactagtgccactcttagtagtgcttggggttacagccatcaaagatctggttgatgatgttgctaggcacaaaatggataaagaaataaataatagaacttgtgaagtcataaaggatgggcggtttaaagtcgctaaatggaaagaaatccaggttggggatgtcatccggctgaaaaaaaacgatttcgtcccagcagatatccttcttctctcttcctccgaacccaattccctctgctacgtagaaacagctgaacttgatggggagacgaaccttaagttcaaaatgtccctcgaaattacagatcagtatctgcagcgagaagatacgcttgctactttcgatggattcatagaatgcgaagaacccaataaccgcctggacaaatttacaggaacactcttctggagaaacacttcatttccactagatgctgataaaatacttctcagagggtgcgttatcagaaacacagatttttgtcatggactcgtgatattcgccggagctgatactaagataatgaaaaactcaggaaaaacaagattcaagcggactaaaatcgactatctgatgaattatatggtgtatacaattttcgtggttcttatactgctctctgcaggacttgccataggacacgcctactgggaagcccaagtagggaactcaagttggtatctatacgatggggaagatgatactccttcatatcgggggttcctaatcttctgggggtatattatagttctcaacactatggtgcccatcagtctgtacgtgtcggtggaagtcatccgactggggcagtcccacttcatcaactgggacttacagatgtattatgctgagaaggacacacccgctaaagcccgtacaactacgctcaatgaacagctaggacagatccattatattttctctgacaaaacaggaacattaacacagaacatcatgacgttcaaaaaatgctgtattaacgggcagatatacggagaccatcgcgatgcttcacagcataatcacaacaaaatagaacaagtcgatttttcttggaatacttacgctgatggaaaactggccttctacgatcattatcttatagaacagatccagtcagggaaagaacccgaagtgaggcagttcttctttctcctagcagtgtgccatactgttatggttgatagaacagatgggcagctcaactaccaggctgcctcacccgatgaaggagctttagtcaatgcagctcggaattttgggttcgctttcctcgctagaactcagaacacaatcacaatatcggaacttgggacagaacgtacatataacgtcttggctatcctagattttaatagtgatcggaagcggatgagtattatcgtgagaacacccgaaggaaacataaaactttattgcaaaggagcagatacagtgatctatgaaaggctgcaccgaatgaaccccactaaacaggagactcaggacgccctggatatattcgctaacgaaacacttcgcacattatgcctatgctataaagaaatagaagaaaaagaatttactgaatggaacaaaaaattcatggccgctagtgtggcttcaactaaccgcgacgaagcattagataaagtgtacgaagagattgaaaaagatctaatcctgcttggggccacagcgatagaagataaactccaggacggggttccagaaacaatctccaagctcgcaaaagcagatatcaagatctgggtgctcacaggagataagaaagaaactgctgaaaacatcggatttgcttgtgaattattaacagaagatactacaatatgttatggggaagatataaacagtctcctccacgcacgcatggaaaatcagaggaacagggggggggtgtacgctaaattcgccccacccgtacaggagtcgtttttcccccctggaggaaatcgcgcactcataataactgggagttggcttaacgagattctcctggaaaaaaaaactaaacggaacaaaattctgaaactcaaattcccaaggactgaggaggaaagaagaatgaggacacagtcaaaaaggagactggaagctaagaaagagcagaggcagaaaaactttgtggatctggcttgcgaatgcagtgctgttatttgctgtagggtaacgcctaagcagaaagccatggttgtggatctggttaagcgatataaaaaagcaatcacactggcaataggagacggggccaatgatgtgaacatgattaaaacagcacatataggggtggggatctcaggacaggaaggaatgcaggctgtcatgtcttccgattactccttcgctcagttcagatatctgcagcgacttctactcgttcacgggcggtggtcctatatacggatgtgtaaatttttgaggtatttcttctataaaaacttcgcttttacacttgttcatttctggtattctttcttcaacggatattcagcccagacagcttatgaagattggtttattacactatataacgtcctgtacacttccctaccagttctcctaatgggactcctagatcaggatgtatccgacaaattgagtctcaggtttcccgggctctatattgtgggacagagagatctcttattcaattataaaaggttctttgtctctcttctgcatggggtgctgacttctatgatcctcttctttattcctctaggggcctacctccaaactgtgggacaggatggagaagctccctcagattatcagtcattcgcagttacaatagcctctgccctagtcataacagtcaattttcagatagggctggatacaagttattggacttttgtaaatgctttttccatcttcggatctatcgcactgtattttgggataatgtttgatttccatagtgccgggatacacgtgctcttccccagtgccttccagttcacagggacagcgtctaacgcattgagacagccctatatctggctaacaatcatactcgctgtggcagtgtgcctcctccccgtggtagccattcgctttctgtcaatgactatatggccttctgagtccgataaaatccaaaagcatcgaaaacggttgaaagccgaagagcagtggcagagacggcagcaggtgtttaggcgcggggtatctactagacgctctgcatatgccttctctcaccagcgagggtacgctgatctaatttcctcaggaaggtcgatccgcaagaagcggtctcctttagatgcaatagtcgcagatggaactgccgagtatcggcggacaggggactct

SEQ ID NO: 7331 - DNA, 3753 bp, synthetic construct
  misc_feature 1..3753: note = source = /note="Description of Artificial Sequence: Synthetic coding sequence"
  source 1..3753: mol_type = other DNA
atgagcaccgaacgcgattccgaaactacgtttgacgaggacagccaacctaatgatgaagtcgtgccgtactcagacgacgagactgaagatgaactcgacgatcagggatccgccgtcgagcccgaacagaaccgtgtgaacagagaggcggaagaaaaccgtgagccgttccgcaaggaatgcacctggcaggtgaaggccaatgaccggaagtaccacgagcaaccccacttcatgaatactaagtttctctgcatcaaggagagcaagtacgccaacaacgccatcaagacctacaaatacaacgccttcaccttcatccccatgaacttgttcgaacagttcaaaagggcggccaacctctacttcctggccctgctcattctccaggcggtgccacaaattagcactctcgcttggtataccactctcgtgccactcctggttgtcctgggcgtgaccgccatcaaagacctggtggacgacgtggcgcggcataagatggacaaggagatcaataaccgaacttgcgaagtgatcaaggatgggagattcaaggtggcaaaatggaaggaaatccaggtgggagatgtgatccggctgaagaagaatgatttcgtcccagcggatatactgctcctgagctcctccgaaccgaactccctgtgctacgtggaaaccgcggagctggacggcgagacgaacctgaagttcaagatgtcgctggagattaccgatcagtacctccagagggaggacactctggctacctttgacggtttcatcgagtgcgaggagccaaataacaggctggataagtttactggaactctcttctggcgcaatacttcctttccattggacgcggacaagatcctcctccggggatgcgtcatccggaacaccgacttttgtcatggtttggtcatcttcgctggcgctgataccaagatcatgaaaaactctggcaagacccggtttaagcgcaccaaaattgactacctcatgaactacatggtgtacactatcttcgtcgtcctcatcctgctgtccgctggactcgccatcggacatgcatactgggaggcccaagtgggaaactccagctggtacctgtacgatggcgaagatgacaccccttcgtaccggggattcctgatcttctggggatacatcatcgtcctgaacaccatggtcccgatctcgttgtatgtctctgtggaggtgattcggctgggacaatcccatttcatcaattgggacctgcagatgtactacgccgaaaaggacaccccggcaaaggcaaggacgaccacgcttaacgaacagttgggacagattcattacatcttcagcgataaaaccggcaccctcactcagaacattatgaccttcaagaagtgctgcattaatggacagatctacggagatcaccgggatgcctctcagcacaatcacaataagatcgagcaagttgacttctcctggaacacgtacgctgatggaaagctggctttctacgatcattacctgatcgaacagatccagagcgggaaggaaccggaggtccgccagttctttttcctgctcgccgtgtgccacactgtcatggtggatcgcactgatggtcagctcaactaccaagccgccagcccagatgagggagccctggtgaacgccgcacggaatttcgggttcgcctttctggcacgcactcagaacaccatcactatctcggaactcggaaccgagcggacctataacgtgctggcaatcctcgacttcaatagcgaccgcaaaagaatgtccatcatcgtgaggaccccggaaggtaacattaagctgtactgcaagggagccgatactgtgatctacgaacgcctgcaccggatgaatcctactaagcaggaaacccaagacgccctcgatatcttcgcgaacgaaaccctgcgtaccctgtgtctctgctacaaggagatcgaagaaaaggaattcaccgagtggaataagaagtttatggcggcctccgtggcctcaaccaacagggacgaggccctggacaaagtgtacgaagaaatcgagaaggatctcatcctgctcggagccactgccatcgaagataaactgcaggatggagtgccggaaaccatcagtaaattggctaaggccgacatcaaaatctgggtcctgactggtgataagaaggaaactgcggaaaacatcggatttgcttgtgagctcctcactgaagatactaccatctgttacggggaggacatcaattccctccttcacgcccggatggagaatcagagaaaccggggaggagtctacgctaagttcgccccgccagtccaagagagcttcttccctccaggtggaaatcgcgcgctcatcattaccgggtcgtggctgaacgaaatcctgctcgagaagaaaaccaagcggaataagatcctcaaattgaagttccctcgcactgaggaggagcgtcgcatgaggacgcaaagcaagcggcgcctcgaagctaagaaagaacaacgccaaaagaactttgtcgacctggcgtgcgagtgctcagcggtgatctgctgccgggtcactccaaagcaaaaggctatggtcgtggacctggtgaaacgctacaagaaggctatcaccctcgccatcggggacggagcaaatgatgtgaacatgatcaaaactgctcacattggagtggggatctccggacaggagggaatgcaggccgtgatgtccagtgactacagcttcgcacagtttcggtacctgcagcggctgctcctggtgcacggacgctggagctacatcagaatgtgcaagttcctgcgctactttttctacaagaactttgcattcaccctggtccatttttggtactcattcttcaacgggtactcggctcaaactgcctacgaggactggttcattacgttgtataatgtcttgtacacctcgctcccggtgctccttatgggactcctggaccaagacgtgtcggacaaactgtccctgagattccctgggctgtacattgtgggacaacgggacctgcttttcaactacaaacgcttctttgtgtcgctgctgcatggagtgcttacttccatgatcttgttctttatcccactcggagcatacctgcagactgtgggccaagacggtgaagcgccatccgactaccagtcgttcgccgtgactatcgcgtcggcgctggtgatcactgtgaactttcaaattggcctggatacctcgtactggaccttcgtgaacgccttctccatctttggctcgatcgcactctactttggcattatgtttgattttcactccgccggaatacacgtcctgttcccaagcgccttccaattcacgggaaccgcctcgaatgcgttgcggcagccgtacatctggctgactatcattctggccgtggccgtttgcctgctcccggtcgtcgcgatacggtttctgagcatgaccatctggccatcagagtcagacaagatacagaagcacagaaagaggctcaaggcggaagagcaatggcagaggagacagcaggtgttccggcggggagtgtcaacgcgccggtcggcttacgccttctctcaccagcggggctacgccgacttgatctcgagcggccggtccatccgaaagaagagatcaccgctcgatgcaatcgtcgcggatggaacggcggaatatcgccgcactggggactcg

SEQ ID NO: 7332 - DNA, 3753 bp, synthetic construct
  misc_feature 1..3753: note = source = /note="Description of Artificial Sequence: Synthetic coding sequence"
  source 1..3753: mol_type = other DNA
atgtctacagaacgggactcggaaacaacgtttgacgaagactcccaaccaaatgacgaggttgtgccttatagcgacgatgagactgaggacgagcttgacgatcagggtagcgccgtagaaccagaacagaatagggtcaatcgcgaggcagaagagaatcgggagccattccggaaagaatgcacatggcaggtgaaagccaacgatcgaaagtatcatgagcaaccccactttatgaacacaaagtttctttgtataaaggaaagcaaatacgcaaataatgccatcaaaacctacaagtataatgcctttacattcataccgatgaacctgtttgaacaattcaaacgcgctgccaacctttacttcctagctttgttgattttgcaggccgtgccgcagatcagtacattagcatggtacaccacacttgtgccacttctggtcgtgttaggggtcaccgcgattaaagacctcgtggacgatgtggcacgccataaaatggataaagaaatcaacaatcggacgtgtgaggtgatcaaggatgggagattcaaggtcgctaagtggaaggagatccaggtgggcgacgtaatacgcctgaaaaagaacgactttgtgccagcagatattctgctcctgtctagttccgaaccaaacagcctgtgttacgtagaaacagctgagttggatggggaaactaatttgaagttcaaaatgtcccttgaaatcactgatcagtatctgcagcgggaggacacacttgcaactttcgatggttttatcgagtgtgaagagccaaacaataggctggacaagttcaccggaacgttgttctggaggaatacttcttttccgctggacgccgacaaaattctgctccgaggttgtgtcatccgcaacactgatttttgtcacggattggtcatcttcgctggtgctgacacaaagatcatgaaaaattctggtaagacaagatttaagagaacaaagattgactacttgatgaactacatggtgtatactatttttgtagtactcatactgctctcagctggactagccatcggtcatgcctattgggaggcgcaggtgggcaactcctcttggtacttgtatgatggcgaggacgacacgccctcctacaggggcttcctaatcttctgggggtatattatagtcttaaacacaatggttccaatcagcctgtacgtgagcgtagaggtgatcagactggggcagagccacttcatcaattgggacttacagatgtactatgctgaaaaggacacgccggctaaggcccgcaccacgaccctgaacgaacaattaggccagattcactacatcttctctgataaaactggcaccttaacacagaatatcatgacattcaagaagtgctgcataaacggacagatctacggcgaccacagggacgcttcgcaacacaatcacaataagattgaacaggtggatttttcctggaacacttatgctgatggcaagctggccttctacgatcactacctgattgaacagatccagtcaggcaaggaaccagaggtcaggcaattcttcttcctgctggctgtgtgtcatacagtgatggtggaccgcacggatggtcagctcaattaccaggccgcctctccagacgaaggtgcactggtgaacgccgccaggaatttcggttttgcctttctggccagaacgcagaataccattaccatctctgagctgggcacggaacggacttacaatgtgctagctatcctggattttaactcagaccgtaaacgcatgtctattatcgttcgaacgcccgaaggtaacattaagctgtactgtaagggcgccgacaccgtgatatatgaacgcctgcataggatgaaccccaccaagcaggagacccaagacgctctggatatattcgctaatgagactctgcggacactgtgcctgtgttacaaggagatcgaagaaaaagaatttaccgaatggaacaaaaaatttatggcagcttctgttgcctcaacaaatagagacgaagccctggataaggtttacgaagaaatcgagaaagatctcatacttttaggtgcaactgcgatcgaggacaaactccaggatggcgtgcctgaaactatatctaagctggccaaagcggatatcaagatttgggtgctgacaggagataagaaagagacagcggagaacattggcttcgcatgtgaactgctcacagaagataccacaatctgctatggcgaggatataaattcacttcttcacgcccgcatggaaaaccagagaaacaggggaggcgtttacgctaagttcgccccaccggtgcaggaatccttcttcccacctggcggtaacagggccttaattattaccggttcgtggcttaacgaaatactcttagaaaagaaaacaaagcggaacaaaatcctgaagctaaagtttcccagaactgaagaggaacgccgaatgcggacgcagtccaagagaaggttggaggctaaaaaagaacagcgccagaagaactttgttgatctggcatgcgaatgctctgctgtcatctgctgccgggtgacgccgaaacaaaaagctatggtggtggacctggtcaagcgatataagaaagctatcaccctggcgattggcgatggggcaaatgacgtgaacatgataaaaaccgcacatatcggagttggcatatccgggcaggaaggcatgcaggccgttatgagctccgactacagttttgcacagttccggtatcttcagaggctgctgcttgtgcacgggcggtggagctatatccgcatgtgtaaattcctaaggtacttcttctacaagaatttcgcctttacactcgtgcatttctggtattccttctttaatggatacagtgcacagaccgcttatgaggattggttcataacactgtataatgtgctgtatacctccctgccggtcctgctcatgggattactagatcaagacgtgtctgataagctgtccttacgtttccctggcctttatattgtaggccaaagggatttattgtttaactacaagcgttttttcgtgagtctgctgcatggagtactgacctcaatgatcctgttctttatccccttgggagcgtatttacagaccgtgggccaggacggcgaagccccttcggactatcagtccttcgcagttacgatagcctctgctctcgtgatcaccgtgaactttcagataggattggatacaagctactggacgtttgtgaatgcattcagcattttcggatccatagccctctacttcgggatcatgtttgactttcattcagccggaatccacgtcttgttcccaagtgccttccagttcacagggaccgcctctaatgccctgagacaaccttacatttggctgacaatcatcctggccgtcgctgtttgcctactccccgtagttgccattaggtttctgtctatgacaatttggccttctgaaagcgacaagattcagaaacacagaaagcgcctaaaggcagaagaacaatggcaacgccgtcaacaggtgtttcggcggggcgttagcacaaggagatctgcgtatgcctttagccaccagagaggatacgccgatcttatctccagcggcaggagtatccgcaaaaagaggtcccctttggatgcaatcgtggccgacggaacagctgagtaccgccgaaccggcgattcc

SEQ ID NO: 7333 - DNA, 3753 bp, synthetic construct
  misc_feature 1..3753: note = source = /note="Description of Artificial Sequence: Synthetic coding sequence"
  source 1..3753: mol_type = other DNA
atgagcaccgagcgggacagtgaaacaacattcgacgaggattctcagccgaacgacgaagtcgttccgtatagcgatgatgagaccgaggatgagttggatgaccaggggagtgccgtcgagccggaacagaatcgcgtcaatcgcgaggcagaggaaaacagggagccgtttcgaaaggagtgtacctggcaggtgaaagctaacgacagaaagtatcacgaacaaccgcactttatgaataccaagttcctgtgtatcaaggaaagcaaatacgccaacaatgcgattaagacctacaaatataacgctttcaccttcatcccaatgaatttgtttgagcagttcaaacgtgccgcgaatctctacttcctagccctcctcatactccaagcagtgcctcaaattagtactcttgcttggtatacaaccttggtgcccctcctagtagtcctgggcgtcactgctatcaaagatctcgtcgacgacgttgcccgccacaagatggacaaagaaattaacaatagaacatgcgaggtcatcaaggacgggagatttaaggtggccaaatggaaagaaatccaggtgggagacgtgatacggttgaagaagaatgactttgtaccagccgacatactcctacttagttcctctgaacctaacagcctgtgctacgtggagacagccgagctcgacggtgaaacgaatctgaagttcaagatgtccctcgagatcaccgaccagtacctacagagggaggatactctggctacgtttgacgggtttattgagtgtgaggagccaaataacaggctggacaaattcactggaaccctgttctggcgaaatacttccttcccactggatgctgacaagatcctgcttagggggtgcgtgatcaggaataccgatttctgtcatgggctggtgatcttcgctggggccgatactaaaattatgaagaacagtggcaagaccaggttcaagcgtacaaaaatcgactacctgatgaactatatggtgtacacgatctttgtcgtcctgattctgctcagtgcgggtttggccattggacatgcgtattgggaagcccaggttggaaactcctcatggtatctgtacgatggcgaagatgatacccccagttatcgaggatttcttatcttttggggatatattatagtgctaaacactatggtacctattagtctctacgtgagtgtggaggtgatcaggctgggccaatctcatttcattaactgggaccttcagatgtattatgcggagaaggatacacccgctaaggcacgaaccaccaccctcaacgaacagctaggccagatccattacatattcagtgacaagacgggcacccttacccagaatatcatgaccttcaagaagtgttgtatcaacggccagatatatggtgatcacagggatgcttcccagcacaaccataacaaaattgaacaggtggatttcagctggaacacatatgccgacggtaagttggccttctacgatcactatctcatagagcagatccagagtggaaaagagccagaagtgaggcagttcttcttcttgctggcggtgtgccacaccgtgatggtagataggaccgacggccagctcaattatcaggctgcttcgcccgatgagggggccctggttaacgccgccaggaactttggtttcgcattcctagctagaacccagaatacgataacaatctcggaactcggcactgagcgcacatacaatgttctcgccattctggatttcaacagcgatcgtaagaggatgagcataatcgtgcgtacccctgagggtaacataaaattgtattgcaaaggtgccgataccgttatttatgaacgtctacacagaatgaatccgacgaaacaggaaactcaagatgctctggacatctttgcaaacgaaactctgaggaccctgtgtctatgttataaggaaattgaggagaaggagtttacagagtggaacaagaaatttatggctgcatctgtggcctccaccaatagggacgaggccctggacaaagtttacgaagagatcgagaaggatctcatactcctgggcgccaccgccatcgaagataagctacaagatggtgtgcccgagaccattagcaagctggctaaggccgatattaagatctgggtcctcacaggggacaaaaaggagacagcagagaatattgggttcgcttgcgagctcctaaccgaggatacaaccatctgctatggagaagacatcaatagtctcctccatgctagaatggagaatcagaggaaccgaggtggagtatatgccaaattcgcccctcccgtgcaggagtcgttctttcctcccggcgggaatagggctctaatcatcaccgggtcatggctgaacgagatcctcttggagaagaagacaaagagaaacaagattctgaagctcaagtttcccaggaccgaagaagagcgcagaatgcggacacagtcaaaacggcgtcttgaagctaaaaaagagcagcgccagaaaaactttgttgatctggcatgtgaatgcagcgcggtgatctgttgccgcgtgacgccaaagcaaaaggcgatggttgtcgacctggttaagcgttacaagaaagctatcacactggccatcggggatggagctaatgatgttaatatgatcaaaaccgctcatatcggcgtggggatcagtggacaggaggggatgcaagccgtaatgagttctgactactccttcgcccagttccgctatctccagaggctcctgctcgtccacggccgttggtcttatataaggatgtgtaaattcctgaggtactttttctataaaaattttgctttcacgctcgttcacttctggtattcgttctttaatgggtactctgcccagactgcctatgaggactggttcatcaccctctataacgtcctctacacctcattgccggtgctcctaatgggcttgttggatcaggatgtctcagataagctaagtctgaggtttcccggcctgtatattgtcgggcagcgagacctactgttcaactacaaaaggttctttgtcagcctgcttcacggagtgttaacttccatgatactcttcttcatccctctgggagcttacttacagaccgtgggtcaagacggagaggcaccgagcgactatcaaagcttcgccgtcacaatcgccagcgccttagtgatcaccgtgaatttccagattggactagatacttcctactggaccttcgttaacgccttttccatttttggaagcatagctctctacttcggcattatgttcgacttccactccgccggaatccacgttctgttcccgtcagcctttcaattcacaggcacggcgtcgaatgctcttagacagccatacatttggctgaccattatcttagccgtggcagtgtgtcttctcccagtagtggccatccgtttcctcagtatgaccatttggccttccgagtcagacaagatacagaagcacaggaagcggctgaaggccgaggagcagtggcagcgccgccagcaggtttttcggcggggggtatcaactaggcggtctgcctatgctttctctcatcagcgtgggtatgccgaccttatatcaagtggaagatccatacggaaaaaacgtagccctctcgacgcaatcgtggcagacggcacggccgaataccgacgcaccggggattcg

SEQ ID NO: 7334 - DNA, 3753 bp, synthetic construct
  misc_feature 1..3753: note = source = /note="Description of Artificial Sequence: Synthetic coding sequence"
  source 1..3753: mol_type = other DNA
atgtctaccgaacgagactcagaaacgacttttgacgaagacagccaacctaatgacgaggttgtgccttacagtgatgatgagacggaggacgagctggacgaccagggttcagcggtcgagccggagcagaatcgggtgaacagggaagccgaagagaacagagagccgtttaggaaagagtgtacctggcaagtgaaggccaatgatcggaaatatcacgagcagccccacttcatgaacacaaagtttctatgcatcaaagagagcaaatatgcaaacaatgcgatcaagacttataagtataatgccttcaccttcatccccatgaatttgttcgaacagttcaagcgtgccgcgaacctctactttctggcacttctgattttgcaagccgtgccccagatatcaaccttggcctggtatacaaccctcgttcccctgctcgtagtgctgggagttaccgctatcaaagatctggtagatgacgtcgcacggcataaaatggataaggagattaataaccgaacttgtgaagtgattaaggatggaaggtttaaagttgcaaagtggaaagagatccaagtaggtgacgtgataagactaaaaaaaaatgactttgtccccgcggacattctcctcctgagcagctccgaaccaaattctctgtgttacgtggaaaccgctgagttggacggggagactaatctgaagtttaaaatgtcccttgagatcacggaccagtatcttcagagggaggatacattggcaaccttcgatgggttcatcgagtgtgaggagcccaacaaccgactcgataaatttaccggaacactgttttggcgtaatacgtcctttcctctcgatgctgacaagatcctgctaagaggctgcgtcatccggaatacagatttctgtcacggattggtcatctttgccggggccgatactaaaattatgaaaaactctggcaaaacacggtttaaaagaactaaaattgactatctgatgaattatatggtctacactattttcgtggtcctgatactattgagcgcgggcctggccatagggcacgcgtattgggaagctcaagtgggcaattcctcttggtacttgtatgacggtgaggacgacactccttcataccgagggtttcttattttctggggatacattatagtgcttaacactatggtccccatttctctgtatgtctctgtggaagtgataaggctgggtcagtctcatttcataaattgggacctacagatgtactatgccgaaaaggacacacctgcaaaagctagaaccacaacacttaacgaacaattagggcagattcattatatcttctcggataaaacagggaccctgacccagaacatcatgacctttaagaaatgttgcattaatggacaaatttacggtgaccacagagatgctagccagcacaaccacaacaaaatcgaacaagtcgacttctcgtggaacacatatgctgacggcaagctggcgttttacgatcattacctgatcgagcaaattcagagtggtaaagagcccgaggtcaggcaatttttttttttgctggcagtctgtcatacagttatggtagacagaaccgacgggcagttgaattatcaagctgcctctccagacgaaggggctcttgtgaacgccgcccgaaatttcgggtttgcctttctagcaaggactcagaataccatcactatttctgaactcggaaccgagcggacatacaacgtgttagctatactggacttcaatagcgacaggaaacgtatgtcaatcattgtgaggaccccagaaggaaacatcaagttgtactgtaaaggagctgataccgtgatttatgaaagactccatcggatgaaccccacaaagcaggaaactcaggatgccttggatatcttcgctaatgagacattgcgcaccctgtgtttgtgctacaaagagatcgaagaaaaagagttcacggaatggaataaaaagtttatggctgccagtgtggcaagcactaatagggatgaggcgctagacaaggtatatgaggaaatcgagaaggatctgatactactgggagctacagctatagaagataagctgcaggacggagtgcccgagacaatcagcaagttagccaaggccgacatcaagatctgggtcttaaccggggataaaaaagaaacagctgaaaacataggcttcgcatgcgaactgctcacggaggatactacaatctgttacggcgaagacataaacagtttacttcatgcgcggatggagaatcagcggaaccgaggtggagtgtatgcaaagtttgccccccctgtacaggagtcattttttcccccgggaggcaatcgggccctgatcatcactggatcctggctaaacgaaattctgctcgagaaaaagacaaagcgcaacaaaatcctgaaactcaagtttcctagaacagaggaggaacgcaggatgcggactcaaagcaagaggaggcttgaggccaaaaaggaacagcgccagaaaaactttgtggacctggcatgcgaatgcagtgctgtgatatgttgcagggtcacaccaaagcagaaggctatggtggttgacctggtcaagaggtacaaaaaagcaattactctagcaataggggacggtgctaacgatgttaatatgataaagactgcccacatcggcgtgggaattagcgggcaggagggaatgcaggccgtgatgtctagtgattacagttttgctcagtttcgctatttgcaaaggttattactggtccacggaaggtggtcttacattaggatgtgtaagttcctgaggtactttttttataagaactttgccttcacactagttcatttttggtacagcttttttaacggctatagcgcacagacggcctacgaggactggttcataactctgtataacgtattatacacatccttgccagttttgctgatggggctcctggatcaggacgtctcagacaagctgtctctaaggttcccagggctgtatatcgtgggccagcgggatcttctgtttaattataaacggttcttcgtcagtcttttgcatggcgtgctaacctcaatgattctgttctttattccgttgggcgcttacctccagactgttgggcaggacggggaggctcccagcgactaccagagctttgcagtgaccattgcctccgccttggttataacggttaactttcagatcgggctggacacgtcctactggaccttcgttaatgccttctccattttcggttctattgcactgtactttggcataatgtttgatttccacagtgcaggtatccacgtcctttttccttcagcctttcaatttacaggcacagcctccaacgccctacggcagccatatatttggttaactatcattcttgccgtggcagtctgcctgctccccgtcgtcgctattagatttctcagcatgaccatatggccaagtgaatccgacaaaattcagaaacatagaaagagacttaaggctgaggagcagtggcagaggcgacagcaggtgttccggcgcggagtgtccacccggaggtccgcttacgcctttagtcatcagcggggctacgccgacctcattagctccggccggagcatcagaaagaaacgctctcccctggacgcaattgtcgccgacgggactgccgaatatcggcggacgggtgacagc

SEQ ID NO: 7335 - DNA, 3753 bp, synthetic construct
  misc_feature 1..3753: note = source = /note="Description of Artificial Sequence: Synthetic coding sequence"
  source 1..3753: mol_type = other DNA
atgagcaccgaacgagactcagagacgacctttgatgaggacagccaacctaatgatgaggtggtgccgtactcagatgatgaaaccgaagatgagctggatgatcaaggaagcgccgtggaacccgaacagaacagggtgaacagggaagcagaggaaaacagagaaccgtttaggaaagagtgtacctggcaggtgaaagcaaatgataggaagtaccatgagcaaccacacttcatgaacaccaaattcctctgcattaaggagagcaagtacgcaaataacgctatcaagacttacaagtacaatgctttcaccttcatccctatgaacctgttcgagcagtttaaacgagcggcaaatctgtacttcctcgcgctgctgatactccaggcggtgcctcagatcagcacgctggcttggtacactactttggtgccgctgctcgtggtcctcggagtcactgccattaaggaccttgtcgacgatgtggcccggcataagatggacaaggagattaacaatcggacttgtgaagtgatcaaggacggacggtttaaggtggccaagtggaaggaaatccaggtcggggacgtgattcgcctcaagaagaacgattttgtgccggcggacatcctgctgttgagctcctcggaaccaaactcactctgttacgtggagactgccgaacttgacggcgaaaccaacctgaaattcaagatgtcccttgaaatcactgaccaatacctgcagcgagaagataccctcgctaccttcgacggattcatcgaatgtgaggaaccgaataacaggttggataagttcactggcacccttttctggagaaatacgagcttccctctggacgccgataagatccttctcagaggctgcgttatccgcaatactgatttctgccacggcctcgtgatcttcgccggggcggataccaagattatgaagaactccggaaaaactagattcaagcgcactaagatcgattacctcatgaactacatggtctacacgatctttgtggtcctgatcctgctctcagcgggtctggctatcggccacgcatactgggaggcccaagtgggaaactcctcctggtacctgtacgacggggaagatgacactcccagctatcgggggtttctgatcttctggggatacatcatagtcctgaatactatggtgccgatcagcctctacgtgagcgtcgaggttattcgccttggccaatcccacttcatcaattgggatctgcagatgtactacgctgagaaagacactccagcgaaggctcggaccaccactctgaatgagcagctcggacaaatccattacatcttttcggataagaccgggaccctgacgcagaatatcatgactttcaagaagtgctgcattaacggccagatctatggcgaccaccgcgacgcatcacagcacaaccacaacaaaatagagcaggtcgattttagctggaatacttatgctgacggaaagctggccttctacgaccactacctgatcgaacaaatacagagcggaaaagaacctgaagtgagacagttcttcttcctgctggcggtgtgccatactgtgatggtcgatcgcactgacggacagctgaattaccaagctgcatccccagacgagggcgccttggtcaacgctgcgcggaacttcggattcgccttcctggcgagaacccagaacaccatcaccatctcagagctgggaacggagcggacttacaacgtgctggcaatcctcgacttcaactccgacagaaaaagaatgtccatcattgtccggactccagaaggaaatatcaagctgtactgcaagggagcggacactgtcatttacgagcgcctgcaccgcatgaatccaacgaaacaggaaacccaggacgccttggacatcttcgctaacgaaaccctgcgcaccctctgcctttgttacaaggaaattgaggagaaagagttcacggaatggaacaagaaattcatggcggcttcggtggcctccactaatcgcgacgaggcgttggacaaggtgtacgaagaaatcgaaaaagacctgatcctgttgggagcgactgcgattgaagataaactgcaagatggggtcccagaaaccatctcaaaacttgcgaaggccgacatcaagatctgggtgctgaccggtgacaaaaaggaaaccgctgaaaacatcggctttgcgtgcgaactgcttactgaagatactacgatctgctacggggaggacatcaactcgctgctgcatgcaagaatggagaatcagcggaacaggggcggagtctacgcgaagttcgcgccgccggtgcaagaatcgtttttcccgccaggcggaaaccgggcgctcatcattaccggctcgtggctcaatgagatcctcctcgaaaagaaaaccaagcggaacaagatcctgaagctgaagttcccgcggacggaggaggaacgccggatgcgcacccagtcaaagcgccggctggaagccaaaaaagagcaacgccaaaagaacttcgtcgatctggcttgcgaatgttcggcggtgatctgttgccgagtgactccgaaacagaaggcgatggtggtggacctcgtcaagcggtacaagaaagcaatcacgttggccattggtgacggcgccaacgacgtgaacatgattaagaccgcacacatcggagtggggatctcgggacaggaggggatgcaggccgtcatgtccagcgactactcgttcgcacagtttcggtacctccagagactgctgcttgttcatgggcgctggtcctacattcggatgtgtaaattcttgaggtactttttctacaagaacttcgctttcactctcgtccacttctggtactcatttttcaatggatacagcgcccaaaccgcgtatgaggactggtttatcaccctgtataacgtgctctacacctctctgccagtcctcctgatgggacttctggatcaggatgtgagcgacaagctgtcgctgagattccctgggctgtatatcgtgggacaaagggacctgctgttcaattacaagaggttcttcgtgtcgcttctgcatggagtcctcacctccatgattctcttcttcatcccgcttggagcatatctgcagaccgtgggtcaagacggggaagcgcccagcgactaccagtcgtttgcagtgactattgcctcagccctggtgatcaccgttaactttcagatcggcctcgacacctcatactggacgttcgtcaacgcgttctccatctttggatcaatcgccctgtatttcggcatcatgtttgacttccactcggcgggaatccatgtcctcttcccttcggcattccagttcaccggcaccgcgtcgaacgcactgagacagccctacatctggcttactatcatcctcgccgtggccgtgtgcctgctcccggtggtggcgataagatttttgtcgatgaccatctggccttcagagtccgacaaaatccagaagcacagaaaacggctcaaagccgaggaacaatggcagcgccgccagcaggtgttcagaagaggtgtctcgactagaaggtcggcctacgccttctcccaccaacgaggatacgcggacctgatctccagcggacggagcatcaggaagaagcgcagcccgctcgatgctatcgtcgcagatggaactgccgagtacagaagaactggagactcc

SEQ ID NO: 7336 - DNA, 3753 bp, synthetic construct
  misc_feature 1..3753: note = source = /note="Description of Artificial Sequence: Synthetic coding sequence"
  source 1..3753: mol_type = other DNA
atgtcaaccgaaagggattcggaaaccacctttgatgaagatagtcaaccaaatgacgaggtggtaccctattcagacgacgaaactgaggatgagcttgatgatcaaggatccgccgtggaacctgagcaaaatcgcgtcaaccgagaagcagaagaaaaccgcgaaccatttcgtaaggagtgtacttggcaagtcaaagcaaacgatagaaaataccacgagcagcctcactttatgaataccaaatttctctgtattaaggaatctaaatacgcaaataacgctattaagacgtacaagtacaacgccttcactttcattccgatgaacctctttgaacagtttaaacgcgccgcgaacctgtactttctggcgctcctgatactgcaagccgtcccacaaatttccacgctggcatggtacactaccctggtgccacttctggtggttctgggggtcactgccattaaggacctcgtggatgatgtggcacggcataagatggacaaggagataaacaatcgcacctgtgaggtgattaaagacggtcgattcaaagttgcaaagtggaaagagatccaggtgggcgacgttattagactcaagaagaacgatttcgtccccgcagacattctgctcctgtcctcctcggagcctaactcactctgctacgtggaaaccgcagagctcgacggagaaactaatctcaagtttaagatgtcacttgaaatcactgatcaataccttcaacgtgaagatacgctcgcaacctttgacggattcattgaatgtgaagaacctaacaaccggctggacaaattcaccggaactctcttttggcgcaacacttctttcccactggatgccgataagatcctcctgagaggttgtgtgattagaaatactgatttttgtcacgggcttgtgattttcgcaggcgcagatactaagatcatgaaaaactcgggcaagactcgattcaagcgtaccaagatcgactacctgatgaattacatggtctacaccatctttgtggtcctgatacttctttcggcgggtctggcaattggccatgcatattgggaagcccaggtcggaaattcgtcgtggtacctgtacgatggggaggatgacaccccttcatatagaggattcctcattttctgggggtacataattgtgctgaataccatggtccccattagcctctatgtcagcgtcgaagtgatacggttgggccaatcgcatttcatcaactgggaccttcagatgtactacgccgaaaaggacaccccagccaaggcacgtaccactaccctgaatgaacagcttggtcagatccattacatctttagcgataagactgggactttgacccaaaacatcatgacgttcaaaaagtgctgcataaacggacagatttacggcgatcatagggatgctagccagcacaatcataacaagattgagcaagttgacttctcgtggaatacctacgctgacggaaagctcgctttttacgatcattacttgattgaacagattcagtccggcaaagaacctgaagtgcgacagttcttctttcttcttgcggtctgtcatactgtgatggtggatcgaacggatggacaacttaactaccaggccgcgtctcccgacgaaggagcgttggtcaacgcagcgcgaaactttgggtttgcattccttgcacgtacgcaaaatacgattactatctcggagctgggaactgaacgcacttacaatgtgttggcaattcttgatttcaacagcgaccgaaagaggatgtccatcatagtgcggacccctgagggaaacattaaactctattgtaagggcgccgatactgtgatttacgaacgtctgcacaggatgaaccccaccaagcaggagactcaagacgcacttgacatatttgcaaacgaaacccttcgtacgctttgcctttgctacaaagaaatcgaagaaaaggaattcaccgagtggaacaagaagtttatggcggcatcggtggcctccaccaaccgcgatgaggcccttgataaggtctatgaggaaattgaaaaggatttgattcttctgggtgccacggcaatcgaggataagctgcaggatggagtgcccgaaactattagcaagctcgcaaaagcagacatcaagatctgggtgctcactggggacaaaaaggagactgcagaaaacatcggttttgcatgcgaactgctgactgaagataccacgatctgctacggtgaagatatcaactccctgctgcatgcaaggatggaaaaccaaagaaaccgcggcggagtctacgcaaagtttgcccctcctgtccaagagtcgttttttccaccggggggcaacagagcactgataatcactggaagctggctgaacgagatcctcctggagaaaaagaccaagcggaacaagattctgaaacttaagttcccacgtactgaagaagaacgtagaatgcgaacgcagtccaagagacgcctggaagcaaagaaggagcaacgccagaagaattttgtggacctcgcctgtgagtgttcagctgtcatttgttgccgagtgactcccaagcaaaaggccatggtggtcgacctggtcaagcgttacaagaaggccatcactcttgcaataggcgatggtgctaatgatgtgaacatgatcaagaccgctcatatcggcgtggggatttccggtcaagagggaatgcaggccgtgatgtccagcgattactcctttgcacaattccggtaccttcagcgactgcttctcgtgcatggtcgctggagctacatcagaatgtgtaagtttctgaggtacttcttttacaagaatttcgcttttactctggtgcacttttggtactccttctttaacggatactccgcgcagactgcgtacgaggactggttcataaccctctacaatgtattgtacactagcctgcctgtccttctcatggggttgcttgatcaagacgtgtcagacaaactctctctcagatttccaggattgtacattgtgggccagcgggatctgcttttcaattacaaacgattcttcgtgagcctgctgcatggagtgttgacttcgatgatccttttctttatcccactgggtgcataccttcaaaccgtcggtcaggacggagaggcgccatcggattaccagagctttgcagtcacgattgcatccgcgctcgtgattaccgtgaattttcaaattggactcgatacgtcctactggactttcgttaacgcctttagtatattcggatcgatcgccctgtacttcggtattatgtttgactttcacagcgcaggaattcatgtgctgtttccttccgcatttcaattcacgggaaccgcctccaacgcactcagacaaccttacatttggctgaccattattctggccgtggcggtgtgtcttttgccagtcgtagctataagatttctgtcaatgactatttggccatcggagtccgataagattcaaaaacatcgtaagagacttaaggcagaggaacagtggcaacgcagacagcaggtctttcgtcggggtgtgtccacccgccggagtgcctacgcattttcacatcaaaggggctacgcagatctcataagctcgggtcgctccattagaaagaagaggtcgccactggatgcgattgtggcggatggaaccgccgaatatagacgcactggtgattcc

SEQ ID NO: 7337 - DNA, 3753 bp, synthetic construct
  misc_feature 1..3753: note = source = /note="Description of Artificial Sequence: Synthetic coding sequence"
  source 1..3753: mol_type = other DNA
atgagtaccgaacgcgacagcgagacgacctttgatgaggactcgcaacctaacgacgaggtcgtaccatattccgacgatgaaacagaggatgaactggatgaccaggggtctgcagtcgaacctgagcagaacagggtgaatagagaggccgaagaaaaccgcgaaccatttagaaaggagtgtacctggcaggtgaaagccaatgataggaaatatcatgaacagcctcactttatgaatacaaaatttctgtgcattaaagagtcaaaatatgcgaacaatgcgattaagacatacaagtacaacgctttcacgtttattcctatgaacttgttcgagcagttcaaacgcgccgccaacctttattttctagccctgctcatactccaggccgtgcctcagatctccacactcgcatggtacactactctcgtcccacttttggtggtgctaggcgttacagctattaaagacctcgtggatgatgttgccaggcataaaatggacaaggagatcaataatcggacctgtgaggtcatcaaggatggcagattcaaggtagctaaatggaaggaaatacaggtcggagacgttatccggctgaaaaaaaatgactttgtgcctgccgacatcttgctcctgtcatccagtgagcctaatagtttgtgttatgtggagactgccgagctcgacggcgagactaatctgaagttcaaaatgagtttggagataaccgatcagtacttgcaaagagaggatacgctggcaaccttcgacggatttatcgagtgtgaggagcccaacaaccggttggacaagtttactggtacccttttctggaggaacacatctttccccctcgacgctgataagattttgctgcgcggatgcgttatccggaacactgacttttgtcacggcttagtcatattcgccggcgcggacaccaagattatgaagaattcaggaaagactcggttcaaacgcaccaagatagattatctgatgaattacatggtgtatacgatctttgtagtcctaatcctgttgtcagctggcctggcaatcggacatgcatattgggaggcccaggttggaaacagctcatggtacctctatgacggcgaggatgacaccccttcttaccgcggcttcctgatcttctggggctacatcatagtactgaacactatggtacctatcagcctttacgttagtgtcgaagtcatacgattgggccagagccactttatcaactgggaccttcagatgtactatgccgagaaggatacgcccgcaaaggctcgcaccactaccctgaatgagcagctgggacagattcactacatcttctcagataagaccgggactctcacccagaatattatgacattcaaaaagtgctgcattaatggacaaatctacggggaccaccgcgatgcaagtcagcacaaccacaataaaattgagcaggtggacttctcctggaacacatacgcggatggaaaattagcgttctatgaccactacttgattgagcagattcagagcggcaaggaacctgaggtcaggcagtttttcttcctcctagccgtttgccatacagtgatggtggatcggacggacggtcagctgaactaccaggctgcgtctccggacgagggtgccctggtaaatgctgcccgaaattttggatttgcatttttggccaggactcagaataccataactatctccgagttaggaactgagaggacctacaatgtgttagccattctggatttcaattcggataggaagcgaatgtctattatcgtacgcactccggagggaaacattaaactgtactgcaagggggcagacaccgtgatctatgagcggctgcaccgtatgaatcctaccaagcaagagactcaggacgctctggacatctttgccaatgagacactccgcacgctgtgtttatgctacaaggagatcgaggaaaaggagttcactgaatggaataagaagtttatggcagcctccgtggcctcaaccaacagggatgaggccctcgataaggtatatgaggaaatcgaaaaggacctgattctgctgggggctactgccatagaagataagctgcaggacggagtgcctgagacaatcagtaagctggccaaagcggacatcaaaatctgggtgctgactggcgacaaaaaggagaccgccgagaatatcggcttcgcttgcgagttgctgactgaggacactacaatctgttatggtgaggacattaatagcctactacacgctagaatggaaaatcagcggaaccgaggtggcgtgtatgctaaattcgcccctcccgtgcaggaaagtttttttccccctgggggcaatcgtgcactgatcatcaccgggagctggctgaatgaaatcctcctggagaagaaaactaagaggaataaaattctcaagttgaagtttccacggaccgaggaagaacgccgcatgcgcacacagtctaagagaagactggaagccaaaaaagaacaacggcagaagaactttgtggacctggcctgtgagtgtagtgctgtgatctgctgccgtgtgacccccaagcagaaggcgatggtcgtggatctcgtcaaaaggtataagaaagccattacactggccattggagatggggccaacgatgtgaatatgatcaagacagcgcatatcggggtgggtataagtggacaggaaggtatgcaggccgtcatgtcctcagattattcattcgcccaatttaggtatctgcagaggctgttgcttgtgcacggaagatggtcctacattagaatgtgcaagtttctgcgttacttcttttacaaaaactttgcattcaccctggtgcacttctggtacagcttttttaacggttacagcgcgcaaactgcctatgaggattggttcatcacactatacaacgtgttatatacctccttacctgtccttttgatgggcttgttagatcaggacgtgtccgacaaactgtcattaagattccctggcctatacatcgttggccagagagatctcttattcaattataagcgatttttcgtgtccctccttcacggagtgctgacatctatgattctcttttttataccactgggtgcctacctgcagaccgttggacaagacggcgaggccccttctgattatcagtcctttgctgtgacgattgcatccgcacttgtgataaccgtgaactttcagatcggcctggacacctcatactggactttcgtaaacgcattttccatatttgggagcatagcgctgtattttggaataatgtttgattttcactctgctggcattcatgtgcttttcccttcagcctttcagtttactggaaccgcttcaaatgcgctccggcagccatatatttggctgacaataatccttgctgtcgcagtctgtcttctcccagtggtggcgattcgatttctgagcatgaccatttggccctctgagtcagataaaattcaaaaacaccggaaacgtctaaaagccgaggaacagtggcagcggagacagcaagttttcaggaggggcgtgagtaccaggaggagcgcctacgctttctctcaccaacgcgggtacgccgatttaatcagttctggtagaagcatacgtaagaaaaggtcaccactggacgcgatcgttgctgatgggaccgccgagtatcgtagaaccggcgactca

SEQ ID NO: 7338 - DNA, 3753 bp, synthetic construct
  misc_feature 1..3753: note = source = /note="Description of Artificial Sequence: Synthetic coding sequence"
  source 1..3753: mol_type = other DNA
atgtcgacggaacgcgactccgaaactacctttgacgaagatagccagccgaatgacgaagtggtgccctacagcgacgatgaaactgaggatgagcttgacgaccaaggatccgccgtcgaacctgagcaaaacagggtgaatagagaagcagaagaaaatcgagagccattcagaaaggaatgtacctggcaagtgaaggcgaacgataggaagtaccacgagcaaccacactttatgaacacgaagtttctctgcattaaggagagcaaatacgccaacaacgcaatcaagacctacaagtacaacgcttttacgtttatacctatgaacctgtttgaacagtttaagcgagccgcaaatctctactttttggcactcctgatacttcaggccgtcccgcaaattagcaccctggcatggtacactaccctcgtccccctgttggtcgttcttggagtgactgcaatcaaggatttggtggacgatgtggcacgccacaaaatggataaggaaatcaataatcggacgtgtgaagtgattaaggacgggcgttttaaggtggcaaagtggaaggagatacaagttggagatgtcattagacttaagaaaaacgatttcgtgccagcagacattctgcttctttcttccagcgaaccaaactccctgtgctacgtcgaaaccgccgaactcgatggtgagactaacctgaagttcaaaatgtcactggaaatcaccgatcaatatctgcaaagggaagatacccttgctacttttgacggctttatcgaatgtgaagaacctaataacagacttgacaaattcactggtaccctcttctggcgtaatacctccttccctctggatgcagacaagattcttcttcggggatgcgtcattcgcaataccgatttttgtcatggacttgtgatttttgccggagccgacaccaagattatgaagaactccggaaagaccagattcaagcgaactaagattgattacctcatgaattacatggtgtacacgatttttgtggtcctgattctcctgtcggcaggactggcaatcggccacgcatattgggaagcgcaggtgggaaacagctcatggtacttgtacgacggcgaggatgatacgccttcatacagaggatttctcattttctggggctacataatcgtgctgaatacgatggtcccaatttcgctttacgtctcagtggaagtgattaggcttggccaatcgcactttatcaactgggacctccaaatgtactacgcggagaaggatacccccgcgaaagccaggaccaccactctgaacgagcaactgggacagatacattacatcttttcagataaaactggaactctgacccagaatatcatgaccttcaagaagtgttgtataaacggccagatttacggtgatcatagagatgcatcacaacacaaccataacaaaattgagcaggtcgatttctcctggaacacgtatgcagatgggaagctggccttctacgatcattacttgattgagcagatacaaagcggaaaggagcctgaggtcaggcagtttttctttctgctggctgtgtgccataccgtgatggtggataggacggacggtcaacttaactaccaggccgcaagcccagatgagggagcacttgtgaacgccgccagaaatttcggttttgcgttcttggccaggactcaaaacacgatcactatctctgaactggggaccgagaggacttacaatgtcctcgccattctggacttcaacagcgatcgcaaacggatgtccattatagtcaggacgccagaaggtaacattaaactttactgtaagggagcagatactgtcatttatgaaagactgcatcggatgaatccaacgaagcaggagactcaggacgcacttgacatttttgcgaatgagactctgcggactctgtgtctctgttacaaggaaatcgaggaaaaggaattcactgaatggaataagaagtttatggcagcgtctgtggcgagcacgaacagagatgaagcgcttgataaggtgtatgaagaaatcgaaaaggatttgatcctgctgggagcgaccgcgatcgaagataaactccaagatggtgtgcctgagactatctcaaaactggcaaaagcggacataaagatttgggttctgaccggtgataagaaagaaactgctgaaaacatcggatttgcttgcgaactgctcaccgaggataccactatttgttatggtgaggatatcaactcgctgctgcacgcccgcatggaaaatcaacgtaataggggtggggtgtacgctaagttcgcacctccggtgcaggaatcgttttttccccccggaggcaatcgggcactcatcattaccggatcctggctcaacgagatcttgctggagaaaaagactaagcggaacaaaatcctcaaactgaaattccctagaactgaagaggagcgtagaatgaggacccagagcaagcgccggctggaagcaaagaaggaacagcgccaaaagaattttgtggatcttgcgtgtgaatgctctgcagtcatttgttgcagggtcaccccgaaacagaaggcaatggtcgtggatctggtgaagcggtacaaaaaggcaataactctcgcaattggtgacggtgccaacgacgtcaacatgattaagactgctcatatcggtgtggggatctcggggcaggaagggatgcaagccgtgatgtcgtcggactactcattcgcacaattcaggtacctccaaaggctgcttctggtgcatggccgctggtcctacattcgcatgtgcaagttcctgaggtactttttctataagaattttgcatttactttggtgcatttctggtactcgttctttaacgggtactcggcacaaacggcatacgaggattggtttatcaccctttacaacgtgctttacacctccctccccgtcctcctgatggggcttctggaccaggatgtctccgacaaacttagcctcaggttccctggactttacattgtgggtcaaagagacttgcttttcaactacaaaagatttttcgtctccctcctccacggtgtgctcacctcgatgatcctcttctttatacctcttggcgcttaccttcaaactgttggtcaggatggtgaagcaccaagcgactaccaatcctttgccgtgaccatcgcgtcagcactggttatcaccgtgaacttccagattggactggacacttcctactggacctttgtcaacgcatttagcattttcggatcgatcgccctgtactttggcatcatgtttgattttcactcggcgggcattcatgtgctttttccatcggcttttcagtttacgggtactgcctcaaatgcgcttagacagccatacatttggcttacgatcattttggcagtggccgtgtgtctccttcctgtggtggcaattcgatttctttcgatgaccatttggccttcagaatccgataagatccaaaagcaccgaaagcgtctgaaagcggaagaacagtggcaacgacggcagcaagtgtttagacgcggtgtgtccacgaggagatccgcttacgcattttcgcatcagagaggttatgccgatctgataagctccggtcgttccattcggaagaaaagatctcctttggacgcgattgtggcagacggcaccgcagaatacagaaggaccggagatagc

SEQ ID NO: 7339 - DNA, 3753 bp, synthetic construct
  misc_feature 1..3753: note = source = /note="Description of Artificial Sequence: Synthetic coding sequence"
  source 1..3753: mol_type = other DNA
atgtcaacagaaagagattcagagacaaccttcgatgaagacagccaacccaatgatgaggtggtaccatattctgacgatgaaacagaagatgagttggacgaccagggaagcgctgttgagccggaacagaacagagtcaatcgggaggcagaagaaaatcgcgaaccgtttcgcaaagagtgtacatggcaggtgaaagccaacgatagaaagtaccatgagcaaccgcatttcatgaatacaaagtttttatgtataaaggaaagcaagtatgctaataatgccatcaagacatataagtacaacgcgtttactttcatacctatgaatctgtttgagcaatttaaacgcgcagcaaacctttattttcttgcattgttaatcctccaagctgtgccgcaaatatccacgctggcttggtacactacgctggtaccgctccttgttgtgctgggcgttacagcgattaaggatttggtagatgatgtcgctcggcataagatggataaagagataaacaaccgcacgtgtgaagttattaaggatggacggtttaaggttgcaaagtggaaggaaattcaagttggagatgttattcggttaaaaaaaaatgacttcgtacctgcggatattttgcttttgtcctcttctgaaccgaactctctatgctatgtagaaactgcagagcttgatggggaaacgaatcttaaatttaaaatgtctttggaaattacagatcagtatctgcaacgtgaggatacacttgcaaccttcgatggtttcattgagtgcgaggaacctaacaataggctggataaatttacgggtacccttttttggcgtaatacatcattcccactagacgcagacaagatcctacttcggggctgcgtcattagaaacacagatttttgccatggcttggttatctttgcgggagcagatacgaagattatgaagaattcaggaaaaacaagatttaaacggacaaagattgattacttgatgaattatatggtatacactatttttgtagttcttatcctccttagcgcaggcctggctattggccatgcctattgggaagctcaggttggaaactcctcatggtatctctatgatggagaggatgatacaccgagttatcgtgggttcctgatcttttgggggtacattatcgttctgaacacgatggtcccaatttcactgtatgtatccgtggaagtaattcgattgggtcaatcccacttcattaattgggacttacaaatgtactacgctgagaaagacactccggctaaagctaggacaactacgcttaacgagcaactaggccagatacattatattttcagcgacaaaactggcacacttacacagaatattatgacctttaaaaaatgctgcataaacggccagatctacggggatcatagggatgcatcacaacataaccacaataaaattgagcaagtcgatttctcgtggaatacttatgctgatggcaaattagctttttatgatcattacctgattgaacagatacagagcggaaaagaaccagaggtgagacaatttttctttctgctggcagtttgtcatacagtgatggtagatcgaacagacggccaattgaattatcaagccgcgtcaccagatgaaggtgcgttagtgaatgcagctagaaactttggatttgctttcttagcgcgcacacagaatacaataacaatatctgaacttggaactgaacgaacctacaatgtacttgctatcttagatttcaattctgatagaaagcgcatgagtattatcgttaggacaccggaaggtaatattaaactttattgtaaaggcgctgacaccgttatctatgaacgtcttcaccgaatgaatccgacgaaacaggaaacgcaggacgccctcgatatattcgcgaatgagacactccgcactctgtgcttatgttataaagaaatagaggaaaaagaatttacagaatggaataaaaaatttatggctgccagtgtagcttccacgaatcgggatgaggcattagacaaagtctatgaagaaattgaaaaagatttgattttactgggcgcaacagccattgaagataagttgcaagatggtgtgcctgaaacaatctctaaattggcaaaagcggatataaaaatatgggttcttactggcgataagaaggaaactgctgaaaatattggcttcgcttgcgagttactgacagaagatacgacgatctgctatggagaagatatcaacagcttgttacacgcaaggatggaaaatcaacgcaaccggggcggagtgtacgctaaattcgcacctccagtgcaggaatctttcttcccccccggcggcaatcgtgccttaataataacaggatcctggctgaacgaaatccttttagaaaaaaaaacgaaacgtaacaagatattaaaacttaagtttccgcgaacagaagaagagcggcgaatgcgcacacagtcaaaacgacggttagaagctaagaaagaacagcgccaaaaaaatttcgttgacctggcgtgcgagtgctccgcggtgatttgctgccgcgtcaccccgaaacagaaagcgatggtggttgacttagtgaaaagatataaaaaggctatcacgcttgctatcggagatggcgcaaacgacgtgaacatgattaagaccgctcatatcggcgtgggcataagcggccaagaaggaatgcaagccgtgatgagcagcgattattctttcgcacagtttagatatttgcaaagattgttgctggtccatggccgatggtcatatattcgtatgtgcaagtttttacggtattttttttacaaaaactttgcatttacactggtacatttttggtactctttttttaatggatactcagctcaaacagcgtatgaagactggtttattacgttatataacgttttatatacttctcttccagtactgctgatgggcctgttagatcaagatgtatctgataaattgagcctgcgttttccgggcctgtatatcgttggccagagggacctgctgtttaattataaacgttttttcgtatcgctgttacatggcgtgttaacatcaatgattttattttttatcccgctgggcgcgtatttacaaacggtcggtcaagatggtgaagctcctagcgattatcagtcgttcgcagtgacgatagcgagcgccctggttattacagttaacttccaaattggattggatacgagctactggacatttgtcaatgcctttagcatctttggatctatcgctttgtattttggcatcatgtttgacttccattcagcaggcatacatgtactgttcccgagcgcttttcaatttacaggaacggcatccaacgcgcttcgacagccgtacatttggcttacaatcattcttgccgtggcagtgtgtctgcttcccgtggtggctattcgtttcctgagtatgacgatatggccgagcgaatcagacaaaatccagaagcatcgtaaacgactgaaagctgaggagcaatggcaacggcgccaacaagtttttcgaaggggcgtctctacaagacgcagtgcttacgctttttcacatcaacgaggctatgctgatctgatttcgtctggaagaagtattagaaaaaaaaggagcccgctcgatgctattgtagccgatggtactgctgaatataggcgcactggcgattcg

SEQ ID NO: 7340 - DNA, 3753 bp, synthetic construct
  misc_feature 1..3753: note = source = /note="Description of Artificial Sequence: Synthetic coding sequence"
  source 1..3753: mol_type = other DNA
atgagtactgagagggatagtgaaacaacctttgatgaggattcccagcccaacgatgaggtggtgccatacagtgacgacgagaccgaagatgagttagatgaccaggggtccgcagtggagcccgagcagaaccgggtcaatagagaagcagaggagaaccgcgagccattcagaaaggaatgcacctggcaagttaaagccaatgaccggaagtaccacgagcagccacattttatgaacaccaaattcctttgtatcaaggagtccaaatatgccaataacgcaattaaaacctataaatataatgctttcacatttatacccatgaacctgttcgagcagttcaagcgagccgctaacctttacttcctcgcactgttgattctgcaggccgtcccccagatctccaccctagcctggtatactaccctggtgcctctcctcgttgtgctgggggttacagcaattaaggacctggttgatgacgttgctcgccacaagatggacaaggagatcaacaatagaacctgcgaggtcatcaaagatggccgttttaaggtggcaaaatggaaagaaatccaggtgggcgacgtgatcaggctgaagaaaaacgattttgtgcccgctgacatcttgctattatccagttctgaaccaaactccctgtgttatgttgagaccgcagagctcgatggggagactaatcttaaatttaaaatgtccttggagatcacagaccagtatctgcagcgggaagatactctcgccacatttgacggctttattgaatgcgaggaacctaacaaccgcctcgacaagttcaccgggactttgttttggcgaaacacaagtttcccactagacgctgataagatcctgctgcgtggatgtgtgataagaaacaccgacttttgccacggattggtgatcttcgctggagccgacacaaaaatcatgaagaattccggcaaaaccaggttcaaaagaactaaaattgattatctgatgaactatatggtctatacaatcttcgtggtcctgattctgctgtccgccggcctggccatcggacacgcctattgggaagctcaggtcggcaatagtagttggtatctgtacgatggggaggacgacaccccttcttatcgggggttcctcattttttgggggtatattatcgttctcaataccatggtccccatctccttatacgttagcgtggaggtgatccggctcgggcagtcccatttcattaactgggacttgcagatgtattatgctgagaaagacactccagctaaagctagaaccaccaccttgaatgaacaactaggccagatccattacatcttttccgataaaactggcacattaacccagaatattatgacattcaagaaatgctgtattaacgggcaaatctatggcgaccatcgggatgcttctcagcataaccataacaagatagagcaagtagatttcagttggaacacctacgctgatggcaaattggccttctacgaccactacctgatcgaacaaatacagtccggcaaggaacctgaggttaggcaattcttcttcctgctggccgtatgccataccgtgatggtggaccgcaccgatggacagttaaactaccaggccgcaagcccagacgaaggggctttagtgaatgctgcaagaaattttggctttgccttcttagccagaacacagaataccatcaccattagcgagctgggcaccgagcggacctataacgtcctagccatcctggattttaactcagaccgcaaacgaatgtccataatcgttaggacccctgaagggaacatcaagctgtactgcaagggagctgacaccgtcatttacgagaggctgcatcgcatgaaccccaccaaacaggagacacaggacgccctggacatcttcgccaatgagaccctaaggaccctttgcctgtgctacaaagagattgaagaaaaagaatttaccgagtggaacaagaagtttatggctgcttccgtagcatccactaacagagatgaggcactggataaagtctatgaagagattgagaaggacctgattctcttaggcgccacagctatagaggataaactccaagatggcgtgccagagaccatttctaagcttgcaaaggccgacattaaaatatgggtgctgactggcgataagaaggagacagctgagaatataggcttcgcctgcgagttgttgacagaggacactaccatatgctatggggaggatataaactccttgctgcacgcacggatggagaaccagcgtaaccgaggcggagtgtacgctaaattcgctccccccgtacaggagtcattcttcccccctggcgggaaccgggcactgatcattacaggctcctggttaaatgaaattctcctagagaaaaagactaagaggaacaaaatcctgaaactgaagttcccaagaaccgaagaggagagaagaatgaggactcagagcaagcgccggctggaggccaaaaaggaacagcggcagaagaacttcgtagacctggcctgtgaatgttccgctgtgatctgctgtcgggtgacacctaagcagaaggctatggttgttgatctagttaaacggtataaaaaggctatcacattggccataggagatggagccaatgacgtgaacatgatcaaaaccgctcacatcggagtcggcatctctggacaggagggtatgcaggctgtcatgtcaagtgattattcctttgctcagttcaggtacctgcagcgcttactgctagttcacggtaggtggagttacattcgcatgtgcaaatttcttcggtacttcttttacaagaattttgccttcactctcgtgcatttctggtatagttttttcaatgggtacagtgcccaaacagcttacgaggactggttcataacactttacaacgtgctgtatacctctctgccagttttattaatggggctgctagaccaagatgtgtctgacaaactgtccttgaggttccccggcctttacattgtgggccagagggacctgctgttcaactataagagattttttgtaagccttttacatggagtcctgaccagcatgattctatttttcattcctctaggggcttacctgcagactgttggtcaagatggagaggctccctctgattaccagtcttttgcagtgactatagccagcgcactggtgatcactgtcaattttcagatcggactcgacaccagctattggactttcgtgaacgccttttccatcttcgggtctattgccctatacttcggcatcatgttcgactttcactccgccggtattcacgtgctgtttcccagtgcattccagtttacaggcactgcatctaacgccctccgccagccctacatctggcttacaataatcctcgctgtagctgtgtgtctgctgcctgtagtcgccatccgcttcctgtccatgactatttggccttccgaatctgacaagatacaaaagcaccggaaaagactcaaagcagaagaacagtggcaacgacgtcagcaggtgttcagacggggcgtttccacccgacgctccgcctatgccttcagtcatcaaaggggctacgctgacctaattagttcaggtaggagtatccgcaagaagaggagcccattagatgccattgtcgccgacggcaccgccgagtacaggcgcactggtgattct

SEQ ID NO: 7341 - DNA, 3753 bp, synthetic construct
  misc_feature 1..3753: note = source = /note="Description of Artificial Sequence: Synthetic coding sequence"
  source 1..3753: mol_type = other DNA
atgagcactgagcgcgacagcgagactacttttgatgaggattcccagccgaatgacgaagtcgtcccttattcagatgacgagactgaagatgagcttgacgaccaaggaagcgccgtggaacctgaacagaatagggtcaaccgcgaggcggaagaaaatagagagccattccgcaaggagtgtacttggcaagtgaaggccaacgataggaaataccatgaacagccgcatttcatgaatacgaagttcctctgcataaaagaatcgaagtacgccaacaacgcgattaagacctacaaatacaacgctttcacctttattccaatgaatctgtttgagcagtttaagagagcagcaaatttgtactttcttgccctccttatcctccaagcagtcccgcaaatctcaaccctggcctggtacaccactcttgtccccctgctggtggtgctcggagtgacggcgattaaagacctggtggacgacgtcgcccgacacaagatggacaaagagataaacaacagaacttgtgaagttatcaaagacggtagatttaaggtggcaaaatggaaggaaatccaagtcggtgacgttattcggctgaagaagaacgatttcgtgcccgccgatatactccttctcagctcgtcagaacctaacagcctgtgttacgtggaaaccgctgagcttgatggggagactaaccttaagtttaagatgagccttgaaattaccgaccagtacctgcagcgtgaggacaccctggcgacctttgatggattcatcgagtgtgaagaacctaataaccggcttgacaagttcaccgggacccttttctggcggaatacttcgtttccacttgatgcagacaagatcctgcttagaggatgtgtgatccggaacaccgacttctgtcacggactcgtgattttcgcaggagcagataccaaaatcatgaagaatagcggtaaaactagattcaagcggaccaagattgattacctgatgaattacatggtgtacactattttcgtcgtgctgattcttctgtcggctggattggcgatcggacacgcctattgggaagcacaagtcgggaacagctcatggtacctctatgatggagaagatgatacccctagctacagaggatttttgattttctgggggtacataatagtgctgaataccatggtgccaattagcctgtacgtatccgtggaagtgataaggcttggccaatcgcactttatcaactgggatctccagatgtactacgcagagaaggacactcccgcaaaggcaagaaccactacgcttaatgaacagctcggtcaaattcattacatctttagcgataaaactggtaccttgactcaaaacataatgactttcaaaaagtgttgcatcaacggacagatttacggtgaccaccgggatgcgtcgcaacacaatcataacaagattgagcaggttgatttctcatggaatacctacgcggatggcaaattggccttttacgatcactacctcattgagcaaattcaaagcggcaaggaacctgaagtgcggcagtttttctttctccttgcagtgtgtcacaccgtgatggtggatcggactgatggacaactgaactaccaagcagccagcccagatgaaggtgccctggtcaatgccgcgagaaatttcggatttgcattcttggcacgaactcaaaacaccatcaccatatcagaactgggtaccgagaggacgtacaatgtcctggcaatactggacttcaattcggatcgcaaaaggatgtcgatcatagtcagaacccctgaagggaacatcaagctctactgtaagggagcagacactgtgatttacgaaaggttgcacagaatgaatcccaccaagcaggaaactcaagatgctctggatatctttgcaaacgaaaccttgcggactctttgtttgtgttataaggaaatcgaagaaaaggagtttactgagtggaacaaaaagtttatggcggcctccgtggcctcgaccaaccgcgatgaagcactggataaggtctacgaggaaatcgagaaggatctcatccttctgggcgcaaccgcgattgaagataagttgcaagatggagtgccggaaaccatctccaagctcgccaaggccgatatcaagatctgggtgctgaccggagacaagaaggagactgcggaaaacattggatttgcttgcgaactgctgactgaggacactacgatttgttatggagaggacataaactcccttcttcatgcacggatggaaaatcagagaaatcgaggtggagtgtacgcaaagtttgcgccccccgtccaagagagcttctttccacctggagggaaccgcgcgctgatcataaccggctcgtggctgaacgaaatacttcttgaaaagaaaacgaagcgaaataagattctgaaactgaagtttccacgaactgaggaagagcggaggatgaggacccagtccaagcgtcgtctggaagcgaagaaggaacaacgccaaaagaactttgttgatctggcatgtgaatgctcagcagtcatttgttgtcgcgttactccaaagcagaaggcaatggtggtcgatctggttaaacgctacaagaaggcaattacgcttgccattggggatggcgccaatgatgtcaacatgattaagaccgcacacattggtgtgggaatctcgggccaggagggtatgcaggcggtcatgtcatcggactactcgttcgcgcagtttagatacctgcaaagactgttgcttgtgcatggcagatggagctacattaggatgtgcaagtttctgcgatactttttctacaagaattttgccttcaccctggtccatttctggtattctttctttaacgggtattccgcccagacggcatacgaagattggttcataactctttacaacgtgctgtacacctcacttccagtgctgctcatgggactgctcgatcaagacgtttccgataagctgagccttagatttccaggcctgtacatagtcggtcagcgcgaccttttgtttaactacaaacgatttttcgtcagcctgcttcatggagtgttgacttcgatgattctgtttttcattcctctcggtgcctacttgcagaccgtgggtcaagatggagaagcaccttctgactaccagagctttgccgttactattgcatcagcactggtcattaccgtgaacttccagattggattggatacttcttattggactttcgtcaacgcatttagtatctttgggtcgattgctctttactttggaattatgtttgactttcacagcgccggtattcatgttctctttccttcagcttttcagttcactggcactgcatcaaacgcgcttcggcagccttacatttggcttaccatcattttggctgtggcagtctgcctcctgcctgtggtggctattcgctttctgtcgatgaccatctggccctccgaaagtgataagattcaaaaacatcggaaacgtttgaaggccgaagagcaatggcagaggcggcaacaagtatttagaagaggagtctctactagacggtccgcttacgcattctcccaccaacggggctacgccgatctgatctcatcaggccgatccattcggaaaaaacgctcacccttggatgccatcgtggctgatgggactgcagaataccgtcggacgggtgattct

SEQ ID NO: 7342 - DNA, 3753 bp, synthetic construct
  misc_feature 1..3753: note = source = /note="Description of Artificial Sequence: Synthetic coding sequence"
  source 1..3753: mol_type = other DNA
atgtcaaccgaaagggatagtgaaactactttcgacgaggactcccaaccgaatgatgaggtggtgccctacagtgacgacgaaacagaggatgagttagacgaccaggggtccgccgttgaaccagaacagaaccgcgtgaaccgcgaggcagaggagaatcgcgaaccattccggaaggaatgcacgtggcaggtgaaggccaacgataggaagtaccatgaacagccccactttatgaacaccaaattcttgtgcataaaagagtctaagtatgccaataatgctatcaagacatataagtataacgcctttacatttatccctatgaacctatttgaacaattcaaaagggccgccaatctgtactttctcgccctcctgatactgcaggccgtgccccagatttcgaccctcgcctggtacactaccctggttcccctgctcgttgtgctgggagtcacagcgattaaggatctggtcgacgatgttgcacggcataagatggacaaagagattaacaatcggacctgcgaagtgatcaaagacggacgatttaaggtcgctaagtggaaggagatccaggtcggcgacgtgatcaggctgaaaaagaatgacttcgtgccagcggatattctgttactttcatcttcagaacccaacagcttgtgttacgtcgaaacagcagagctggacggcgaaactaacctcaagtttaagatgagcctagaaatcaccgaccaatacttacagagggaagataccttggccacctttgatgggttcatagaatgtgaagagcctaacaaccgcctggataagttcacaggtacgctgttttggaggaacacttctttccctctggacgccgacaagatcctactgcgaggctgcgtcattagaaataccgacttctgccacggactcgtgatctttgctggcgccgatactaagatcatgaagaactccgggaaaacccgcttcaagcgcactaagattgactatctcatgaattatatggtgtacacaatctttgtggttttgatcctgttgagcgcgggcctggcaataggacatgcatattgggaagctcaggtcggaaactcgtcatggtatctgtatgatggggaagacgacaccccatcctacagaggttttctgattttctggggatatattattgttctgaacaccatggtccctatttcactctacgtctcagtcgaggttattaggctcgggcaaagccacttcattaattgggacctgcagatgtactatgccgaaaaagatactccagccaaggcccgtacgaccactctaaacgaacagttaggccagatccattacattttcagtgacaagacagggacgctgacccagaatataatgacttttaagaagtgttgtatcaacggccaaatttatggggatcacagagatgcatcgcagcacaaccacaacaagattgaacaggttgactttagctggaatacctacgcagacggcaaattagccttctacgatcattacctgatcgaacagatccagtcagggaaagagcctgaggtcagacaattctttttcctcctggccgtgtgtcacactgtcatggttgatcggactgacggccagcttaattatcaggctgcatctccggatgagggagccctcgtaaacgccgctcgcaattttggctttgcatttctcgccagaactcaaaacaccataacaattagtgagctgggcaccgaacgtacctacaacgttctggccatccttgactttaactccgacagaaaaagaatgagcatcattgtgagaactcctgagggaaacatcaaattatactgtaagggcgccgatactgtgatctatgagcggctgcataggatgaaccctaccaaacaagagactcaggatgctctggacattttcgcgaacgaaaccctgagaaccttatgtctgtgttataaagaaatcgaggaaaaagaattcacggagtggaacaaaaaatttatggcggcatcggtggcaagcacaaacagagacgaggccctggacaaggtctacgaagagatcgagaaggacctgatcttgctgggtgccacagcaatcgaggacaagctccaggatggggtcccggagacgatttccaaactcgccaaggccgatattaaaatctgggtgctgaccggcgataagaaagagacagccgagaacatcgggtttgcatgtgaactgctgaccgaggacacaactatctgctatggagaagacattaattccctcctgcacgcgagaatggaaaaccagcggaatcgaggcggagtgtatgcaaagttcgccccacctgtgcaggagagcttttttccacctgggggcaatagagccttaatcataacgggcagttggctaaatgagattctacttgaaaaaaagaccaagaggaataagatactgaagctgaagttccctcgcacagaggaggaaaggcggatgcggacacaaagtaagaggagactcgaagccaagaaggagcagcgtcaaaaaaacttcgtcgacctcgcatgtgagtgcagcgccgtgatctgttgtcgcgtgacacccaagcagaaggccatggtggtggacctcgtgaagagatacaaaaaagccatcactctggccattggggatggtgccaatgatgtgaacatgatcaagacagcgcacatcggcgtcgggatctcaggccaggaaggaatgcaggccgtgatgagctctgactattctttcgctcagttccggtatctgcagcgtttactcttggtgcatggccgctggagttacattcgtatgtgtaagtttttacggtactttttctataagaattttgcatttacattggtgcacttttggtacagctttttcaatggctactctgctcaaaccgcatacgaggactggttcataaccctttataatgttctctatacaagcctgcccgtcttactgatgggccttttggaccaggacgttagtgataagttgagtttaaggttccccgggctatacatcgtgggccaacgggatctgctgttcaactataagcgcttctttgtgtctctgttacacggggtgctaacatctatgatcttgttcttcatcccactgggcgcatatctccagacagttggccaggacggagaggctccctctgattatcagtcgtttgccgtgacaatcgccagcgccctggttatcacggtcaatttccagattggcctggacacatcgtattggaccttcgtcaacgcctttagcatcttcggatccatagcactttattttggcattatgttcgacttccactcggcaggcatccatgtcttgtttccctcggctttccagtttacagggaccgcttccaatgcattgcgacagccttacatttggctaaccattatcctggccgtggccgtctgcctgctgccggtggttgccattaggttcttatctatgacaatctggccatcagaatccgataaaatccagaagcacaggaagcggctgaaagcggaggagcagtggcaacggcggcagcaggtctttcggaggggagtgtcaacgagaaggtctgcatacgccttcagccatcagcgagggtatgccgacctgataagttcaggcaggtccatacggaagaaaagatcacctctggacgctatagtcgcagacggaacagctgagtataggaggactggggatagt

SEQ ID NO: 7343 - DNA, 3753 bp, synthetic construct
  misc_feature 1..3753: note = source = /note="Description of Artificial Sequence: Synthetic coding sequence"
  source 1..3753: mol_type = other DNA
atgtcgactgagcgcgacagcgagacgactttcgatgaggactcacagcccaatgacgaggttgtcccctacagtgacgacgagaccgaggatgaactggatgatcaggggagcgccgtggaacctgaacagaatcgggtgaaccgtgaggcagaggagaatcgggagcccttccgcaaggagtgcacatggcaggtgaaagcgaacgacaggaagtaccacgagcagccccattttatgaacaccaagtttctgtgcatcaaggagtcgaaatacgctaacaacgccattaagacgtataaatacaacgcattcacatttatccctatgaacctgtttgaacagttcaagagagcagccaacctgtatttcctggctctgctgattctgcaggcagtcccccagatcagtacccttgcatggtacactacattggtcccgcttctcgtagtgctaggggtgactgcaataaaggatctcgtggacgacgtcgctagacataagatggacaaagagatcaataaccgcacctgcgaggtgattaaggatggccgcttcaaggtggcaaaatggaaggaaattcaggtgggcgatgtgattcgcctgaagaaaaacgattttgttcccgccgacatcctgctcttatctagttccgaacccaattctttgtgttacgtggagaccgccgagctcgatggggagactaatttgaagttcaagatgtcgctagagattactgaccagtatctgcagcgagaggatacactcgctaccttcgacgggttcattgagtgtgaagaaccaaacaatcgcctcgataagtttaccggaaccctattttggaggaatacttctttccccctggatgccgacaagatcctgctacggggatgtgtgattaggaacacagatttttgtcacggtctggtgatttttgccggagcagacacaaagattatgaagaatagcgggaagactcggttcaagagaaccaaaatcgactacctaatgaactacatggtgtataccatctttgtagtgttgatcctcctctccgccggtctggctatcggccacgcttattgggaggcacaggttggaaattcctcctggtatctgtacgatggcgaggatgacactccatcatacaggggatttcttattttctggggttacatcattgtcctaaacaccatggtgccaatttctttgtatgttagtgtggaagtgatccgtctcggtcagtcccacttcattaactgggatctccagatgtattacgccgagaaagacactcctgcaaaagccaggacaactaccctcaatgaacagttaggacagatccattatattttctctgacaagacaggtaccctgacacagaacatcatgactttcaagaaatgctgtatcaatggtcaaatatacggtgatcaccgggacgccagccagcacaaccataacaaaatagagcaggtcgacttctcatggaacacatacgctgatggtaagctcgccttttatgatcactatctgatcgagcaaatccagtccggaaaagagcccgaggtcaggcagttctttttcctgttggcagtgtgccacaccgttatggtggatcgtaccgacggccagctgaattatcaggctgctagtccggatgaaggggccctagtgaatgcggcaagaaacttcggattcgcgtttttagccagaacacagaatacaatcacaatttccgagctcggcacagagagaacctacaacgttctggctatcctggatttcaattccgaccgcaagagaatgagcataatcgtcagaacccctgagggaaatatcaaactctattgtaagggcgcagacaccgtcatctacgaacgactgcaccggatgaacccaacaaaacaagagacccaggatgccctcgacatatttgctaatgaaacactgagaacgctttgcctgtgctacaaagaaatagaggagaaagagttcacagagtggaacaaaaagtttatggccgctagtgtggctagcacaaatcgcgacgaagccctggataaggtctatgaggagatcgagaaagacctcattctcttgggggctaccgccatcgaagacaagttgcaggacggggtgcctgagactatttccaagctcgcaaaggccgacatcaaaatctgggtgctaacaggggacaagaaggaaactgcagaaaacatcggctttgcatgcgagcttttaactgaagacacaaccatctgctatggagaggatatcaactctctgctgcacgctcggatggaaaaccagaggaatcgcggcggcgtgtacgctaagtttgctccccctgtgcaagagtctttcttcccacctggggggaatagggccctcataatcaccgggagctggctgaatgagattttgctggagaagaagaccaaacgaaacaagattttaaaattgaaatttccccgaacggaagaagaacgacgcatgaggacccaatccaaaagacggttagaggcgaagaaagagcagcggcagaagaacttcgtggacttagcttgtgaatgctccgctgtgatatgctgtagggtgaccccaaagcaaaaggccatggtggtggacctggtgaaaagatacaagaaggcaattactctcgccattggtgatggcgccaacgacgtgaacatgattaagacagcccatatcggagtgggaatatcaggccaggaaggcatgcaggccgttatgagtagtgactacagtttcgcacagtttagatacctgcagcgcctgctgctggttcatggccggtggtcatacatcagaatgtgtaaattcctgaggtactttttctacaaaaatttcgcattcacactggttcacttttggtactcgttcttcaacggatacagtgcccagacggcctatgaggactggttcatcaccctgtataacgttctctatacatcactcccagttctgcttatgggcctgttggaccaggatgtgtctgacaagctgagcctgcgcttccccggactctatatcgtgggccagcgcgacttgttgtttaattacaaaaggttctttgtttccctcctgcatggcgtcttgactagtatgatcctattcttcatcccgctcggcgcttacttgcaaacggttggacaagatggggaggccccttccgactatcagtcattcgccgtgacgattgccagtgctctagtgatcaccgttaacttccagatcggactcgacacctcctactggacttttgtaaatgctttctctatctttggttctatcgcattgtacttcggcattatgtttgatttccattccgcagggatccatgtcctattccctagcgcttttcaatttacagggactgcatccaacgccctgcgacaaccctacatctggctcactattatcttagctgtggcggtttgcctcctccccgttgttgcaatccggttcctgtctatgacgatctggcccagcgagtcggacaaaattcaaaagcataggaaaagactgaaggcagaagaacagtggcaacgcagacagcaggtgttcaggaggggagtcagtactagacggtctgcttacgctttctcacatcagagaggttatgcggatctgatctcaagcggacgcagtattcggaagaagagatctccccttgacgctatagtcgcggatggcaccgcggagtataggaggacaggagactct

SEQ ID NO: 7344 - DNA, 3753 bp, synthetic construct
  misc_feature 1..3753: note = source = /note="Description of Artificial Sequence: Synthetic coding sequence"
  source 1..3753: mol_type = other DNA
atgtccactgagcgtgattccgagacgaccttcgacgaggacagccaaccgaacgatgaggtcgtgccgtactccgatgatgagactgaggacgagctcgacgaccaaggatccgcagttgaaccggaacagaaccgcgtaaatagggaggctgaggagaatagggaaccatttcgtaaggagtgcacctggcaagtaaaggccaacgatcgaaagtatcacgagcagccccactttatgaacacaaaatttctgtgcatcaaggagagcaaatacgctaacaacgcgattaaaacctataagtataacgcgtttactttcatccccatgaacctgttcgagcagtttaaacgcgcagccaacctgtattttctggcattgctgatactgcaggccgtgccacagatctcgacgctggcctggtacactacacttgtgccactcctcgttgtcttgggagtgacggcaatcaaggatcttgtggacgacgtggcgaggcataagatggacaaagagatcaacaatagaacttgcgaagtcataaaagacgggcggttcaaggtggcgaagtggaaggaaatacaggtgggtgacgttattcgtctgaagaagaatgatttcgtaccggccgacatcctgctgttgtcttcatcggagccaaattctttgtgctacgttgagaccgccgagcttgatggcgagacaaacctgaagttcaagatgtccttggagattactgaccagtatctgcagcgcgaggacacgctggcaaccttcgatggattcatcgagtgtgaggaacccaacaaccgtcttgataagttcaccggaacactgttctggaggaacactagttttccactcgacgcagacaagatattactccggggatgcgtgatcaggaatactgacttctgccacggcttggtcattttcgccggagctgacaccaagatcatgaaaaacagcggcaaaacccgcttcaagcgaaccaagatcgattatcttatgaactatatggtgtacacgatttttgttgtgctgatactgctcagcgcaggcttggctatcggtcacgcgtactgggaagctcaggtcggtaattcgtcttggtacctatatgatggagaagacgatacaccatcataccggggatttttgattttctggggctatattatcgtgctgaacaccatggtgccaatctccctgtatgtgagcgttgaggtcatcagacttggccagtcgcactttataaactgggacctgcagatgtactacgcggagaaggacaccccagccaaggcgaggacaactactctgaacgagcagctcggccaaatacactacatcttctccgacaagacggggacgcttacccagaacattatgacctttaagaagtgctgtattaatggacagatttacggagatcaccgcgacgcctcccaacacaatcacaacaaaatcgagcaagtcgacttctcgtggaatacatatgcggacgggaagctcgccttctacgatcattacctgattgaacagatacaatcgggcaaggaaccggaggtccgccagttcttcttcctgttagcagtgtgccataccgtgatggtagatcgaaccgacggccaacttaactatcaagcggctagcccagatgagggagctctagtaaatgctgcccgaaacttcggcttcgccttcttggctaggacccagaatacgatcacgattagtgagctgggcaccgagcggacctacaacgtattggcaatcctggatttcaatagtgaccgcaagcgaatgtcgatcatcgtgcgcacccctgagggaaacatcaagttgtactgcaaaggagccgatactgtaatttacgagagactgcaccgcatgaacccgacaaagcaagagacccaggacgcactcgatatcttcgccaatgaaactttgcgaacgctctgcctgtgctataaagagatcgaggaaaaagagttcacagagtggaataagaagttcatggctgcctctgtggcgtctacgaacagagatgaggctctcgataaagtttacgaggagattgagaaggatctgatactgctgggcgcgacggcgatcgaggacaagctccaggacggcgttcccgagacgattagcaaattggcgaaagccgatatcaagatctgggtacttactggagataagaaagagaccgccgagaacatagggttcgcctgcgagctgcttacggaggacacgacgatatgttacggagaggatatcaactctctgctacacgccaggatggaaaaccagcgaaaccgcggcggcgtgtacgccaagtttgctcccccagtgcaggagtccttcttcccaccaggaggcaatcgtgctctgattataactggatcctggctcaatgaaatcctactcgagaagaagactaagcgcaacaaaattttgaaactcaagttcccccgaaccgaagaagagcgtcgcatgagaacacagtcaaagaggcggctggaggccaagaaggagcagcgtcaaaagaacttcgtcgatctcgcatgcgaatgcagtgccgttatctgctgccgtgtcacgcccaagcagaaggccatggtggtggacttagttaagcgatataagaaggccattaccctcgcaatcggtgacggcgcgaacgatgtgaatatgatcaagacggcccatatcggtgtgggaatctccggccaggaaggtatgcaagcagtcatgtcaagcgattattcgttcgctcagtttcgctacctccaacggctgctcctggtccatggcagatggtcctatatccgtatgtgcaagtttcttagatatttcttctacaaaaatttcgcctttaccttggtgcatttttggtactcctttttcaacggatacagcgctcaaaccgcctacgaagattggttcattactctgtataacgtgctttatactagtttgcccgttttgttgatgggactattggaccaagacgtgagcgataaactctccttaagatttccaggtttatacatcgtcggccagcgagacctcctgtttaattacaagagattttttgtcagcctgttacacggtgtgctcacgtctatgatcctattcttcattccgttgggcgcatatctgcagacggttggccaggatggtgaggctccatcagattaccagtccttcgcagttaccatcgcgagcgcccttgtgataaccgtcaattttcagataggcctcgacacgtcgtactggaccttcgtcaatgccttctcaatcttcggcagtatcgccctttacttcggcatcatgttcgatttccattcagctggaatccacgtgttgtttccgtcggctttccagttcaccgggacagcctctaatgcgctgaggcagccatatatctggctcaccattatcctcgccgtggcggtgtgcctgctccccgtggtcgcaattcgtttcctcagcatgacgatatggcccagcgaatccgataagattcagaaacaccgcaagcgactcaaagccgaggagcaatggcagcgccgacagcaggtgtttcgacgcggagtctcaaccagaaggtctgcctacgccttctcgcatcagagaggctacgccgacctgattagttcgggaaggtctattcggaaaaagcgtagccccctggatgctatcgtggcggatggcacggccgagtaccgtcgaacaggcgattcg

SEQ ID NO: 7345 - DNA, 3753 bp, synthetic construct
  misc_feature 1..3753: note = source = /note="Description of Artificial Sequence: Synthetic coding sequence"
  source 1..3753: mol_type = other DNA
atgtctaccgaacgtgattcagaaacaacatttgacgaggattcccaaccaaatgacgaggtggtgccgtactcagacgatgagactgaagacgagttggacgaccagggtagcgcggttgagcctgaacagaatcgcgtaaaccgggaggccgaggagaatcgcgagccatttcgtaaggagtgtacctggcaggttaaagctaatgaccgcaagtatcatgaacagccccatttcatgaacacgaagtttctgtgcattaaggagtcaaagtatgccaacaacgccatcaagacctataaatataacgcattcacatttatcccaatgaacctgttcgagcagtttaagagggctgctaacctctattttttggccctgctcattctccaggccgtgccccagattagcacgctggcttggtacacaactttagttccgttgctagtggtccttggtgtgaccgccatcaaagatttggtcgacgatgtggcacgtcacaaaatggataaggaaatcaataaccgaacatgtgaagtcatcaaggatggacggttcaaggtggctaagtggaaagagatccaggtaggtgacgtgatccgcctaaagaaaaatgactttgtacctgccgacatcctcctactgtcttcatccgagcccaattcactgtgctatgtcgaaaccgctgaactcgacggcgaaactaacttaaagtttaaaatgtccttggaaattacggaccaatacctgcagcgggaggacaccctggcaacatttgatggattcatcgaatgtgaagaaccaaacaatcgcttggacaaatttactggtaccttattttggcggaatacaagctttccgctagatgctgataaaatcctgcttagaggatgcgtaatcaggaacaccgacttctgccacggacttgtgattttcgcaggtgcagatacaaagatcatgaaaaattcaggcaaaaccagatttaaacggactaagattgactatcttatgaactatatggtgtacactatcttcgtggtcttgattttattgtccgccgggcttgccattggccacgcctactgggaggcacaggtcggcaatagcagctggtatttgtatgacggtgaagatgacacaccctcttatcgcggatttctgatcttttggggctatattattgtgcttaacaccatggtgcccatcagtctgtacgtatccgttgaagtgattcggttaggtcagtcccacttcatcaactgggatcttcagatgtactatgccgaaaaagatacccctgctaaagcgcggacaaccactctaaatgagcagctgggtcaaattcactatatcttctcagataaaaccggcacactgactcagaacattatgacattcaagaagtgttgcataaatggacaaatatacggcgaccatcgagacgcttcccaacacaatcacaacaagattgaacaggtagacttctcctggaatacatacgccgacggcaaactcgcattctacgaccactatttgattgaacaaattcagtcagggaaggaaccggaggttaggcagtttttctttctccttgcggtgtgtcatactgtgatggttgaccgcaccgatggacagctcaattaccaggctgcctcacccgatgagggagctctcgttaatgccgcccggaatttcgggtttgcctttctggccaggactcaaaacactattactatttccgagttagggacagagcgtacctataacgtgctggcaatccttgacttcaactctgataggaagcggatgtcaatcatagtccgcacccccgaaggaaacatcaaattatattgtaagggggctgataccgtaatatacgaacgcctgcaccggatgaaccccaccaaacaggagacgcaggatgcactcgatatctttgctaacgaaacacttcggacactatgcctctgctacaaggaaattgaggagaaagaatttactgaatggaataagaagtttatggccgcttccgtagccagcaccaaccgagatgaggccctggacaaggtgtatgaagagatcgagaaggatttgattctgctaggcgcaaccgctatcgaggacaaactacaggatggggtcccagaaactatatcaaagctagcaaaggccgacatcaagatctgggttttgaccggtgataagaaagagaccgcagaaaacatcgggtttgcgtgcgaattactgaccgaggacacaaccatctgctacggcgaagacataaactccctgttgcatgcccgaatggagaaccaaaggaaccggggtggagtgtacgcgaagtttgcaccgcctgtccaggaaagtttcttcccccccggtgggaacagggctctgatcataacagggagctggctgaatgagatcctattggaaaagaaaaccaaacgcaacaagatccttaagctgaaatttccgagaacagaggaggagcggcgaatgagaactcagtccaaaaggcggctggaagcgaagaaggagcagcgccagaaaaacttcgtggacctggcatgcgaatgcagtgctgtgatctgttgccgagtgaccccgaaacagaaagctatggtggtggacttagtgaaaagatataagaaggccatcactctggctattggagatggcgcaaacgacgttaacatgattaagacggcacacatcggagtgggcatctctggccaggaaggcatgcaggcggtgatgtcaagcgattattcgttcgcccagttccgatacttacaaaggcttctgctcgtgcacggcagatggtcgtacattcgcatgtgtaagtttctgcgttactttttctataagaacttcgctttcacacttgtccacttttggtattccttttttaatggctattctgcccagacagcatatgaggactggtttataacactatataacgtgctgtatacatctttacctgtcctattgatgggactgctggatcaggacgttagtgataagctgtcgttacggttcccaggactctacatcgtgggccagagagatctgttgtttaattacaagagattttttgtgtccctgctgcacggagttctgacgtctatgatattgttctttattccgctcggcgcatacctgcagaccgtgggacaggatggggaggctcctagcgactaccagtcattcgcagttacaattgcaagtgctctcgtgattacagttaactttcagataggccttgatactagctactggacctttgttaatgccttcagtatcttcgggagcatcgccctttatttcggcataatgtttgacttccactctgcgggcatccatgtgcttttcccctctgcctttcagttcacggggaccgcgtctaatgcgttgcggcaaccatatatatggctgaccatcattctggcggtggccgtatgcctgctgcccgtggtcgccatcaggttcttgagtatgacaatatggccatctgagagtgacaaaatccagaagcatagaaaaagactaaaggccgaggagcagtggcagcggcgccagcaggtgttccggcgaggcgtgagcaccaggcggagtgcatacgccttttcacaccagaggggatacgccgatctcatatctagcggtcgaagtattaggaagaagcggtcacctctggatgccatcgtggccgatgggacagctgagtaccgacggacaggagattct

SEQ ID NO: 7346 - DNA, 3753 bp, synthetic construct
  misc_feature 1..3753: note = source = /note="Description of Artificial Sequence: Synthetic coding sequence"
  source 1..3753: mol_type = other DNA
atgtcaaccgagcgggatagcgagacaaccttcgatgaggattctcagcctaatgatgaggtggttccgtattccgatgacgaaacagaggatgaactagacgaccagggatcagccgtggagcccgagcaaaacagagtgaaccgcgaagcggaagagaaccgggagccgtttcgaaaggagtgtacatggcaggtcaaagctaacgatagaaaataccatgagcagccccactttatgaataccaagttcctgtgtatcaaggagtcaaagtacgccaacaatgcaattaagacttataagtataacgcattcaccttcattccgatgaatctgttcgaacaattcaagagggctgccaacctctactttctcgcgctgctgattctgcaagctgtcccccagattagtacactcgcctggtataccacattagtacctctgctcgtggtcctgggcgtgacagcaatcaaagacttggttgacgacgtggcaaggcacaaaatggataaggagataaacaaccgcacctgcgaggtgatcaaggacggaaggtttaaagttgctaagtggaaagaaattcaggtgggcgacgttattagactgaagaagaacgatttcgtgccagccgatatcctgcttttgagcagcagcgaacctaacagtctgtgttacgtggagacagcggagctggacggcgagacaaatttgaagtttaagatgtctctcgagatcaccgaccagtacctccagagggaggacactctggctacgtttgacggtttcattgagtgcgaagaaccgaataaccgcttggacaaattcactggcacactcttttggaggaacacatctttcccactggacgctgacaagattctgttacgtggctgtgtaatcaggaataccgatttctgtcacggcctggtaatcttcgccggtgcagacaccaagattatgaaaaactctggaaaaacgcgattcaaacgcacaaaaatcgactacttaatgaattatatggtctacaccattttcgtcgtgttaatacttctgagtgccggcctggcgataggccatgcttactgggaggctcaggttggtaattcctcttggtatttatatgacggcgaggacgacactcccagctatagggggtttctgatcttttgggggtatatcattgtgttgaatacaatggttcccatttcactgtatgtgtctgtcgaggtgattcgactcgggcagtcacatttcataaattgggacctacaaatgtattacgctgaaaaagacactcccgcaaaggctcggactaccaccctgaatgagcagttgggacaaatccattacatcttctccgacaagaccggcaccctgactcaaaacatcatgacatttaagaaatgctgcattaacggtcaaatctacggggatcaccgcgacgcttctcagcacaatcataataagatcgagcaggtggacttcagttggaatacgtacgccgatggcaagctggcattctacgatcactatctcatcgaacaaatacaatcagggaaagagccagaggtccgccagtttttctttctgcttgctgtgtgtcacaccgtgatggtggaccggacggacggtcagctcaactaccaggctgcatcgccagacgaaggggcgctggtgaacgcagctagaaacttcggctttgcattcctggcccgtacccagaacaccattaccattagcgaactgggaaccgaacgtacttataacgtactggctatcttggactttaacagcgaccgaaagcgaatgagcatcatcgtgagaactcccgaaggcaatataaagctgtattgcaagggcgctgataccgtgatttacgagaggttgcatcgcatgaaccccaccaaacaggagactcaggacgccctggatatttttgcgaacgagacactgcgcaccctctgcctgtgctacaaggaaatcgaggagaaagaatttaccgagtggaataagaaattcatggcggcaagtgttgcttcaactaatagagatgaagccctggacaaggtatatgaggaaattgagaaagacttgattttgcttggagcgaccgctattgaagataaacttcaggacggcgtgccagagacaatttccaagctggccaaggccgatattaagatttgggtgttaacaggcgacaagaaggagaccgcagagaatattggattcgcatgcgagttgctgactgaggataccaccatctgttatggtgaagacattaactctctgttacatgcacgtatggaaaaccagcggaaccgcggcggcgtgtatgcaaaattcgccccacctgtgcaggagtctttcttcccacctgggggcaatcgggctctgattattactggttcctggctgaatgaaatcctgcttgagaaaaagaccaagcgcaacaagatcctcaaattgaagtttccacggactgaagaagaacgtaggatgcgtacccagtccaaaagacgactggaggccaagaaggaacagcgccagaaaaacttcgtggatcttgcatgtgagtgctctgcggtgatttgctgccgcgtaactccaaaacagaaggcaatggtagtagatctggtaaagaggtacaagaaggcaattacgctggccatcggtgatggagctaatgatgttaatatgattaagaccgcccacatcggtgtcggtatctccgggcaagagggaatgcaagcggtgatgtcgagtgattattcattcgcacagttccgctacctgcagaggctactgctcgttcacggacgttggtcgtatattcgcatgtgcaagttcctacgctactttttttataagaacttcgctttcacactggtgcacttctggtactcatttttcaatggttactctgctcagacagcatacgaggactggtttatcacactgtacaacgttctttatacatctctcccagttcttctgatgggcctgctagatcaggacgtttccgataagctgagcctgcgttttccggggctctatatagtgggccagagggatctgctttttaattacaagcgtttctttgtctcactgctgcatggagtgctcacttccatgattctgtttttcatccctctgggggcttacctgcagacggtcggtcaagatggcgaggctccatccgactatcagtccttcgctgttacaattgcgagtgccctggtgatcacagtcaatttccagatcggcctggacacctcttattggacattcgtgaacgccttttccattttcggctcaatcgctttgtactttggtattatgtttgatttccattccgctggaatccatgtgttgtttccctcagccttccagttcacagggaccgctagcaatgccttgcgacagccttacatctggttgaccattatactggcagtcgccgtgtgtctgctgcccgtggtcgctattaggttcctgtccatgacaatctggccttccgagtcagacaaaatccaaaagcacagaaaacggcttaaggccgaggaacaatggcagaggagacaacaggtgttccgaaggggtgtgagcaccaggcgctccgcttatgcgttctctcaccagcgaggctacgcagatcttatctcgagtgggcgtagcatccggaaaaaacggtccccactggacgccattgtggcggacggaactgcagagtaccgtagaactggggacagc

SEQ ID NO: 7347 - DNA, 3753 bp, synthetic construct
  misc_feature 1..3753: note = source = /note="Description of Artificial Sequence: Synthetic coding sequence"
  source 1..3753: mol_type = other DNA
atgtccactgaaagagactcggagacgaccttcgatgaagattcgcaaccaaacgacgaggtggtcccctactccgacgacgaaaccgaggacgagctcgatgatcagggatccgccgtggaacctgaacagaacagagtgaaccgggaagcggaagaaaaccgcgaacctttcagaaaggaatgcacctggcaagtgaaggccaatgacaggaaataccatgagcagcctcacttcatgaacaccaaatttctgtgcatcaaggaatcgaagtatgctaacaatgccattaagacctacaaatacaacgccttcacctttatcccgatgaacctgtttgaacagttcaagcgcgccgccaatctctacttcctcgccctgttgatcttgcaggccgtgccgcagatctcaaccctggcttggtacactaccctggtcccactgttggtcgtcctcggagttacggccatcaaagatctggtggacgatgttgccagacataagatggataaggaaatcaacaatcggacttgcgaggtcatcaaggatggcaggttcaaagtggcgaaatggaaagaaatccaagtcggagatgtcatccgcctgaagaaaaacgattttgtcccggccgacatacttctgctgtcctccagtgaacctaacagcctgtgctacgtggagactgccgagctcgatggtgaaaccaacttgaagtttaagatgagcctggaaatcactgatcaatatctccaaagagaggacaccctcgctaccttcgatggattcatcgaatgcgaggaacctaacaaccggctggacaaattcacggggactctgttctggagaaacacttccttcccgttggatgcagacaagattctcttgcgcgggtgcgtgatccgcaacaccgatttctgccacggacttgtgattttcgccggggctgataccaagatcatgaagaattcgggcaagaccagattcaaaaggaccaaaatcgactacctgatgaattacatggtgtacacgatcttcgtggttctgatcctcctgtccgcgggcctcgccattggacacgcctactgggaagcccaggtgggaaattccagctggtacctttacgacggggaggatgatactccgtcataccgtggatttctcatcttttggggttacatcatcgtgttgaacaccatggtgccaatctcgctgtacgtctccgtggaagtgatcagactcgggcaatctcacttcataaactgggatttgcaaatgtactatgccgagaaggacaccccggccaaggctcgtaccaccaccctgaatgaacagttgggccagatccactacatcttcagcgataagaccggcactctgactcagaatatcatgacctttaagaagtgttgtatcaacggccagatttacggagatcatcgcgatgccagccagcataaccataacaagatcgagcaggtcgatttttcctggaacacctatgctgacggaaagctggcattctacgaccattatctgatcgaacagatccaatccggaaaagaaccggaagtgcgccagttcttcttcttgctcgccgtgtgtcacactgtgatggtggaccgaaccgatgggcagttgaattaccaggcagcctcgccagacgagggcgccctggtcaacgcggcccgcaacttcggatttgcgtttctggcacggacgcagaacaccatcactatctctgaattgggaactgagcgcacgtacaatgttctggccatcctcgactttaacagtgaccggaagaggatgagcattatcgtgcggaccccggaaggtaacattaagctctactgcaaaggagctgataccgtgatttacgaacgactccaccgcatgaaccccaccaagcaagaaactcaagacgccctggacatcttcgcgaacgaaactctgagaactctctgtctgtgctacaaggagatcgaggaaaaggagtttactgaatggaataagaagttcatggcggcctccgtggcatccactaatcgcgatgaagcgctcgataaagtgtacgaagaaattgaaaaggacctgatcctgctcggggcaaccgccattgaggacaagctgcaggacggggtgccagaaaccatctcaaagctggcaaaggcggacatcaaaatctgggtcctgactggagataagaaggagactgcggagaacatcgggtttgcctgcgaactgctgaccgaggacaccaccatctgttacggagaggacataaacagcctcctgcatgcccgcatggagaaccagcggaatcggggcggagtttacgcgaaattcgcaccgccagtgcaggaatccttcttccctccgggcggtaatagggctctcatcatcactggtagctggttgaacgaaatcctgctcgaaaagaaaacgaaacgcaataagatcctcaagttgaagttcccgcgcactgaagaagaacggaggatgcggacccagtccaagcggcggttggaagccaagaaagagcaaagacagaagaattttgtcgacctggcgtgcgagtgctcggccgtgatctgctgtcgcgtgacccctaaacaaaaagccatggttgtggatctcgtgaagcgctacaagaaggcaattactctggcgatcggcgatggagctaacgacgtcaacatgatcaagaccgcgcacattggtgtcggaatttcgggtcaagagggaatgcaggcggtcatgtcgtccgactactcgttcgcccagttccgctacctgcaacgccttctgctcgtgcacggaagatggtcatacatccgcatgtgcaagtttcttagatacttcttctacaaaaactttgccttcaccctcgtccacttttggtacagctttttcaacggttacagcgcgcagaccgcctacgaggactggttcatcactctctacaatgtcttgtacacgagccttcctgtcctgctgatgggactgctggaccaggatgtgagcgacaaattgtcgctgaggtttccaggtctgtacatcgtcggacagcgcgacctcctgttcaactacaagaggttcttcgtctcactgctgcatggcgtgctcacttccatgatcctctttttcatccctctcggagcttacttgcaaacggtcggacaagacggagaggccccatccgattaccagtcatttgccgtgactatcgcatcggccttggtgattactgtgaacttccagatcggccttgatacgtcgtactggacctttgtgaacgcattcagcattttcggctcgatcgcgctgtacttcggtatcatgttcgatttccatagcgctgggattcatgtgctcttcccgtcggcattccagttcaccggaaccgcctcgaatgctcttcgacaaccatacatctggctgactattatcctcgccgtggccgtgtgcctcctcccggtggttgcgatccgcttcttgtcgatgactatctggccgtcggagtcggacaagatccagaagcatcggaagcgcctcaaagctgaagaacaatggcaacgtcggcaacaagttttccgcagaggagtgagcactcgccgcagcgcgtacgcattctcgcaccagcgcggatacgccgacctgatctcctcaggacgctccattcgcaaaaagcgttccccgctcgatgcgatcgtcgccgatggaacggctgaataccgccggaccggtgactcg

SEQ ID NO: 7348 - DNA, 3753 bp, synthetic construct
  misc_feature 1..3753: note = source = /note="Description of Artificial Sequence: Synthetic coding sequence"
  source 1..3753: mol_type = other DNA
atgtcaacggagagggattcagaaaccactttcgatgaggatagccagccgaacgacgaagtggtgccttactccgacgatgaaaccgaagatgaacttgacgatcaaggatcggctgtggaacctgagcagaaccgcgtcaaccgggaggctgaagaaaacagagagccttttagaaaggaatgtacgtggcaggtcaaggctaacgaccgcaagtaccacgaacagcctcatttcatgaacaccaaattcctgtgcattaaagaatccaagtacgcgaacaacgcaatcaaaacctacaagtacaacgccttcaccttcatcccaatgaacctttttgaacaattcaagagggccgccaacttgtacttcctcgcgctgttgatcctgcaggccgttccgcaaatctcgactctggcctggtacaccaccctcgtgccgctgctcgtggtgctgggcgtcaccgccatcaaggacctcgtcgacgatgtggcccgccataagatggataaagaaatcaacaaccgcacctgcgaggtgatcaaggacggacggtttaaggtggccaagtggaaagaaatccaagtgggagatgtcattagactgaagaagaacgatttcgtcccggcagacatcctgctgctgtcatcgtctgaaccgaactccctgtgttacgtcgagactgcggagctggacggagaaaccaacctcaagttcaagatgtctcttgaaatcactgaccaatatctccagcgcgaagatacgcttgctactttcgacggctttattgaatgcgaagaaccgaacaaccggctcgataagttcaccgggaccctcttttggcgcaacacttcttttccactcgatgccgacaaaattcttttgcggggatgcgtgataagaaacactgatttctgccacggactggtgattttcgcaggagctgatactaaaatcatgaagaatagcggaaaaactaggttcaagcgcaccaagatcgattaccttatgaactacatggtgtacactatcttcgtggtgctgatcctgctgtcggcagggttggcaatcggacacgcatactgggaggctcaggtgggaaacagctcgtggtacctgtacgatggcgaagatgacactccgtcataccgggggtttctgatcttttggggctacattatcgtgctcaacaccatggtcccgatctcgctctacgtgagcgtggaagtgatcaggttgggacagtcgcactttatcaattgggaccttcaaatgtactacgccgaaaaggacacccctgccaaagccagaaccaccaccctcaacgagcagctcggtcagattcattacatcttcagcgacaagaccggcactctgacccagaacatcatgactttcaaaaagtgctgcattaatggccaaatctacggtgatcatcgcgacgcgtcacagcataaccataacaagatcgaacaagtggacttctcctggaacacctacgccgacgggaagttggccttctatgatcactacctgatcgaacaaatccagtcgggaaaggaacctgaggtgagacaattcttcttccttctcgcggtgtgccataccgtcatggtggaccgtaccgacggtcagctcaactaccaggctgcgtcgcccgacgaaggtgccctggtcaatgccgcacgcaacttcggattcgcattcctggccagaacccaaaacactattacgatatcagagctgggcaccgagagaacgtacaatgtcctcgctatcctcgatttcaactccgaccggaagcgcatgtccatcatcgtgcgcaccccggaagggaacattaagctgtactgtaagggcgccgacaccgtcatctacgaacggctgcaccggatgaatccaactaagcaggagactcaggacgccctcgacatcttcgcgaacgagactctgaggaccctgtgcctgtgttacaaggagatcgaagaaaaagagttcaccgagtggaataagaagttcatggccgcgtcggtcgcgagcaccaatcgggatgaggcgctggataaggtgtacgaggaaatagagaaagatctgatcctcctgggcgcgactgcgatcgaggacaagctgcaggacggggtccccgagactatctccaaactggccaaggccgacatcaagatctgggtgctgacgggagataagaaggagacggcggagaatatcggatttgcctgcgagctcctgactgaggataccaccatctgctacggtgaggacataaactccctcctgcacgcccgcatggagaatcaacggaatcggggaggggtgtacgcaaaattcgcgccaccggtgcaggagagcttctttccgccaggaggtaaccgagcccttatcatcaccggatcctggctgaacgaaattctcctcgagaaaaagacgaagcgcaataagatccttaaactcaagttccctcggactgaagaggagaggcgcatgcggacccagtcaaaacgccgcttggaggccaagaaagagcaaagacagaagaatttcgtggacctggcatgtgaatgctccgctgtgatctgttgccgggtgactccgaagcagaaggcaatggtggtggatcttgtgaagaggtacaaaaaggcaattacgctggcaatcggcgatggagcgaacgatgtgaacatgatcaagaccgcacacatcggagtgggcatcagcgggcaagagggaatgcaggccgtcatgtccagcgactactctttcgcccagttcagatacctgcaacgtctgctgctggtccacgggcgctggagctacattcgcatgtgcaagttcctccggtacttcttctacaagaatttcgcattcactctggtgcacttctggtactcctttttcaacggctattcggcgcagaccgcctacgaggactggttcattaccctctacaatgtgctgtatacctccctgccggtgctcttgatgggactcctggaccaggacgtgtcagacaagctctcactgcggtttccaggtctgtacatcgtcggccaacgggatctgctcttcaactacaaaagatttttcgtgtcactgctgcacggagtgctgacttcgatgatcctgtttttcattccactgggtgcatacctgcaaaccgtgggccaggacggagaagccccgtcagactaccagagctttgctgtcactattgcaagcgcgctggtgatcacggtgaacttccaaatcggactcgacacgtcatactggactttcgtgaatgcattctcgatatttggtagcattgcgctgtatttcggtatcatgttcgatttccactcggccggaatccacgtgctgttcccgtcagctttccaattcaccggcactgcatcgaacgcgctgagacagccatacatctggctcaccatcatcttggcagtggcggtgtgcttgctccccgtggtcgcgattcgcttcctgtcgatgaccatttggccctcggagtcggataagatacaaaaacaccgcaagcggctcaaagccgaagaacagtggcagcgcaggcagcaggtgtttagaagaggcgtgtcaactaggagatcagcctacgcattctctcaccaacgggggtacgctgacctgatctcaagcggccgctccatccgtaaaaagaggtcccctctggatgcaattgtggccgacgggactgccgaataccgccggacgggggacagc

SEQ ID NO: 7349 - DNA, 3753 bp, synthetic construct
  misc_feature 1..3753: note = source = /note="Description of Artificial Sequence: Synthetic coding sequence"
  source 1..3753: mol_type = other DNA
atgtctactgagagagactctgagacaacctttgacgaagactctcaacccaacgatgaggtggtcccctacagtgacgacgaaactgaggacgaactagatgaccaagggtccgccgtcgagcctgagcaaaaccgcgtgaacagggaagcggaggagaatagagagcctttcaggaaagaatgcacctggcaggtcaaggccaacgaccgcaagtatcatgagcagcctcatttcatgaataccaaatttttatgcattaaagaatccaagtacgctaacaacgctataaagacctacaaatacaacgcattcacatttatccctatgaacctttttgagcaattcaaaagagctgcaaatctttatttcctcgcactcctgattttgcaagcggtgccacagatctcgacacttgcttggtatactactctggtccctctgctcgttgtgctgggcgtgaccgcaatcaaagaccttgttgacgacgtggcaagacacaagatggacaaagaaatcaacaacagaacatgtgaggttattaaggatgggcgctttaaagttgctaagtggaaagagatccaggtcggggacgtgataaggttgaagaagaacgactttgtccctgcagatatcctccttctttctagttcagaacccaacagcctttgctatgtggaaacagcagagcttgacggggagacaaacctcaaattcaaaatgtccctggagattacagatcaatacctgcagagggaggataccctcgcaactttcgacggatttatagaatgtgaggagcccaataacaggcttgataagttcactggcactctcttctggcggaacacaagcttccccttggatgcagataagatacttctgaggggctgtgtaattagaaacaccgatttttgtcatggactcgtgatcttcgccggagctgacaccaaaatcatgaaaaacagcggcaagacccgctttaaaaggaccaaaatcgattaccttatgaactacatggtgtacacaatctttgtggtgctcatcctgcttagcgcgggcctggccatcggtcacgcatattgggaagctcaggttggtaatagcagctggtacctgtacgatggagaggatgacacaccgtcttaccggggtttcctcattttttgggggtatatcatcgtacttaacacaatggtgcctatcagcctgtatgttagcgtggaggtcatccgccttgggcagtcacatttcatcaactgggatcttcagatgtactacgccgagaaagatacaccggcgaaggcacggactaccacactgaacgagcagctgggccaaattcactatatattttctgacaagacaggcaccttaacacagaacatcatgacttttaagaaatgttgcatcaatgggcaaatctacggagaccacagggatgcaagccagcacaaccacaacaagatcgaacaggtggatttcagctggaacacttatgccgacggcaagctggccttctatgatcactatctgatcgagcaaattcaatctgggaaagagccagaagtcaggcaatttttcttccttctggctgtgtgccacaccgtgatggtggatcgcacagacggccaactgaattaccaggctgctagccccgacgaaggcgcgcttgttaacgcagcaagaaactttggcttcgcctttttggcaagaacacaaaacaccatcactatcagcgaattagggacggaaagaacatataacgtactggccatcctagattttaacagtgaccgcaagcggatgagcatcattgtgcgtacacccgaaggtaacataaagttgtattgtaagggtgctgatacagtcatttatgaaaggctgcaccgcatgaacccaaccaaacaggagactcaggatgcccttgacatctttgctaacgaaaccttaagaaccctgtgcctgtgctacaaggaaattgaggagaaggagttcaccgaatggaataagaaattcatggctgccagcgttgctagtaccaacagggatgaagcgctcgacaaagtgtacgaggaaattgaaaaagacttaatccttctgggcgccactgcaatagaggacaaactgcaggatggcgtaccagaaacaatcagcaaactagcgaaggctgatattaaaatctgggtcttgactggtgacaaaaaggagacagctgagaatatcggattcgcatgtgaattgctcaccgaagatactacaatctgctacggggaagatattaactctctgctgcacgcaagaatggaaaaccaaagaaaccggggcggagtctacgccaagtttgcgccacctgtccaggagtctttttttcctccaggcggcaatagggctctgattataaccggctcttggctcaacgagattctgcttgagaagaaaacgaaaagaaacaaaattttaaaactgaagttcccgcgtaccgaggaggagaggcggatgcggactcagtcaaagcggaggcttgaggcgaagaaagagcaaagacaaaagaattttgtcgacctggcgtgcgaatgcagcgcagttatctgctgcagggttacccccaaacagaaagccatggtcgtcgacttagtcaaacgttacaagaaagccatcactctcgcgatcggcgatggtgcgaatgatgtgaacatgatcaagaccgctcatatcggcgtggggattagcggccaggagggtatgcaagcggtgatgtcatcagattattctttcgcccagtttaggtaccttcaacggttactgctcgtgcacggacgctggtcatacatccggatgtgcaaatttcttcgctactttttttacaaaaatttcgctttcactctggtgcatttctggtacagcttctttaacggctactctgcccaaacagcctacgaagattggtttatcacactgtataacgtgctgtatacaagcctgcctgttctgctgatgggcttgctggaccaggacgtgagcgataaactgagcctgagatttccaggactgtacatcgtgggtcaacgtgaccttctgttcaactacaagaggttctttgtgagtctgctgcatggggtgttgaccagtatgatattgttctttatcccgcttggtgcatacctgcagacagttggccaggatggcgaggctcctagcgattaccagagttttgctgttaccattgcctctgctctagtcatcactgtgaacttccaaatcgggctcgacaccagctactggacattcgtgaacgcttttagtatttttgggtctattgccctgtacttcggaatcatgtttgatttccactctgctggtatacacgtgctgttcccttctgcatttcagttcaccggcactgcaagtaatgctctgcggcagccgtatatctggctgacaataattctggccgtggcagtatgtctcctgcctgtggtagcgattagatttttgagcatgaccatatggccatccgaaagcgacaagatccaaaagcatcgcaagaggttgaaggcagaagaacagtggcagagacgccaacaagttttcaggcggggagtgagcacacgccgtagcgcctacgcctttagccatcagcgaggctacgcagatctgatcagtagcggaagatcgattagaaagaaaaggtcaccgctggacgctattgtcgctgacggcaccgctgaataccgccgtaccggcgactcc

SEQ ID NO: 7350 - DNA, 3753 bp, synthetic construct
  misc_feature 1..3753: note = source = /note="Description of Artificial Sequence: Synthetic coding sequence"
  source 1..3753: mol_type = other DNA
atgtccacagagcgcgatagtgaaacaacctttgatgaggattctcagcctaatgatgaagtggtgccatactcagacgacgagacggaggacgagctggacgatcagggttccgcagtggaaccggaacagaatagggtaaatcgcgaggccgaagagaatcgcgaaccatttcgcaaagagtgcacatggcaagttaaagctaatgacaggaagtaccatgagcagccccatttcatgaacacaaagttcctgtgtataaaggaatctaaatatgcaaataatgctatcaaaacttataagtataatgcttttactttcatcccaatgaaccttttcgaacagtttaaacgggccgcaaacctgtattttttagcactcctcatactgcaggctgtgccgcaaatctcaaccctcgcctggtatactacactggtacccctcctggtggtcctcggcgtaaccgccatcaaggatctagtcgatgatgtggcaagacacaaaatggataaagagatcaataacagaacctgcgaagtgatcaaggatggaagatttaaggtggctaagtggaaagagatccaggtcggcgatgtgattagactaaaaaaaaacgattttgtgccagcagatatcttgctgctctcttcctctgaacctaattccctatgctatgtggagaccgccgaactggatggggagaccaacctcaaatttaagatgagcctggaaataacagatcagtatctccagagggaggataccctcgccacattcgacggcttcatcgaatgcgaggagcctaacaatcgcctcgacaaattcactggcacgctgttctggcggaatacctctttccccttggatgccgataagattctgctgagagggtgtgtcatcagaaacacagacttttgccacgggttggtaatattcgcgggcgctgatacgaagatcatgaagaatagtgggaagactaggttcaagcggactaagatcgattacttaatgaattacatggtctacaccatttttgtggtgctaatactgttatcggctggacttgccatcggtcacgcctactgggaggcccaggtgggaaatagctcatggtatctgtacgatggggaagacgacacgccctcttaccgcggttttcttatcttttgggggtatattattgtgctcaacaccatggtccccatctccctctacgtgagtgtcgaggtgatcagattgggacagtcacacttcataaactgggatctgcagatgtactacgctgaaaaggacactcctgccaaggcaagaacaacaacattgaatgaacaattgggacagatacactacatattcagcgataagactggcacactgacacagaatattatgacctttaagaagtgctgcataaatggacagatctatggcgaccacagggacgcgagccagcacaaccataacaagatcgaacaggtcgacttttcgtggaatacctatgccgatggcaagcttgcattttatgaccactatctgatcgaacagattcaatcagggaaagaaccagaggtgcgacagttcttctttctattggccgtctgtcatacagtgatggtggataggacagatggtcaactgaactaccaggcagcctcccctgacgagggggccctggtcaatgcggccaggaacttcggatttgcctttctcgccagaacccagaatacgatcaccatttccgagttgggcacagagagaacgtacaatgtcctcgccattctggattttaactccgatcgcaagcgcatgagcattatcgtacggacacccgaggggaatataaaactctactgcaagggcgcagacaccgttatttatgagaggttgcaccgcatgaatcccactaaacaggagacccaagacgcactggatatattcgctaatgagacacttcggacgctgtgtttatgctataaagagattgaagaaaaggaattcacggagtggaacaagaaattcatggccgctagcgtggcatctaccaaccgggatgaggcccttgataaggtgtatgaagaaatcgaaaaggatctgatcctgctcggggccacagcaattgaagacaaactgcaggacggcgtgccggaaaccatttcgaagctggccaaggccgacatcaaaatatgggttctgacgggggacaaaaaggaaacggcagagaatataggattcgcatgcgaactgctgactgaagacaccaccatatgctatggcgaagacattaacagcctcctacacgccagaatggaaaatcagcgtaaccgggggggcgtgtacgctaaatttgcaccccccgtgcaggagtccttcttcccaccaggagggaatcgggcactgatcatcaccggcagttggctcaatgaaattctcctcgagaagaaaaccaagagaaacaagattctgaaattaaaatttcctaggacagaggaagagagacgtatgcggactcagagtaaaaggaggctagaagcaaagaaggaacagagacagaagaattttgtggacctggcctgtgaatgcagcgccgtgatctgctgcagggtcacaccaaagcagaaagcgatggtggtcgacttagttaaacgatacaagaaagccatcaccctggcaatcggggacggtgccaatgatgtgaatatgataaagacagctcacatcggagttggcatatctgggcaagagggcatgcaggctgtgatgagcagcgattattcattcgcgcagttccgatatttgcagcggcttttactcgtgcacggacggtggtcttatatcaggatgtgtaagtttttgaggtatttcttttacaagaattttgcgtttacgctagtccacttctggtactctttcttcaatggctacagtgcacagacggcctatgaagactggttcattactctctataatgtgttatatacctctctacccgtcctgctgatggggctgctggatcaggatgtctctgacaagttatcgttacgttttccaggcttgtacatcgtgggccagagggacctgctgtttaactataaacggttcttcgtgtctctccttcacggcgtacttacctcaatgattctcttcttcattcctctgggcgcctatttacagacagtcggtcaagacggcgaagccccaagtgattaccagtcctttgccgtcaccatcgcgagcgctctggtcataactgttaacttccagattggcttggatacgtcttattggaccttcgtcaacgcctttagcatctttggtagcatagcactctacttcggtatcatgttcgactttcactctgcaggaatccatgtactctttccgagtgcatttcagtttactggaactgcatcgaacgctctgcgacaaccttacatctggctcaccatcattctcgctgttgcggtgtgcttactcccggtggtggcgatcaggttcctctccatgaccatctggccctccgagtcagacaaaatccagaagcaccggaaaagattgaaggctgaggagcagtggcagcgtaggcagcaggtgtttcggagaggcgtatcgacacgtcggtcggcctatgcgttttcccaccaacggggatatgcagacttgattagtagcgggcgctccattcgcaagaaacgctctccactcgacgctatcgtcgccgacggtactgccgaatacagacgcacaggcgactct

SEQ ID NO: 7351 - DNA, 3753 bp, synthetic construct
  misc_feature 1..3753: note = source = /note="Description of Artificial Sequence: Synthetic coding sequence"
  source 1..3753: mol_type = other DNA
atgtctaccgaacgggatagcgaaactaccttcgacgaggattcccaaccaaacgacgaggtggtgccgtactccgatgacgagactgaggacgagctcgacgaccaaggatcagccgtggaaccagaacagaacagagttaaccgagaagctgaagagaatcgggaaccgtttaggaaggaatgcacttggcaagtcaaagccaatgatcgcaaataccatgaacagccccacttcatgaacactaagtttttgtgcatcaaagaaagcaagtacgctaacaatgctatcaagacgtacaagtacaacgcgttcaccttcatcccgatgaacctgtttgagcagttcaagagagccgccaatctttacttcctcgccctcctgatactgcaggcggtgccacaaatctccactctggcctggtacactactttggtgccgctcctggttgtcctgggcgtcacggctatcaaagaccttgtcgacgatgtggctagacacaagatggataaggagattaacaaccgcacgtgtgaagtgatcaaggacggccggttcaaagttgcgaagtggaaagaaattcaggttggagacgtgatccgcctcaagaagaacgacttcgtgccagctgacattctcctgctgagctcaagcgaacctaattccctctgctatgtggaaaccgccgaactggacggcgagacgaacctcaagttcaagatgtcccttgagattaccgaccagtacctgcagcgcgaggatactttggcaacttttgacggtttcatcgaatgcgaagaacccaacaacagactggacaagtttaccgggacgctcttttggagaaatacctctttcccgctggacgcagacaaaatcctgctccgcggatgtgtgatcagaaacacggacttctgccacggccttgttatcttcgctggagccgacaccaagattatgaagaattcaggaaagacgcgctttaaacgcacgaagatcgactacttgatgaattacatggtgtacactattttcgtggtgctcatcctgctgtctgcgggacttgccatcggccacgcgtactgggaagcccaagtgggcaattcgagctggtacctctacgatggggaagatgataccccatcataccgcgggttcctcattttctggggatacatcatcgtgcttaacaccatggtccccatctccctgtacgtgagcgtggaggtcatcaggctcggtcagtcgcacttcatcaactgggatttgcaaatgtactacgcggagaaagacaccccggccaaggcgagaactaccaccttgaatgagcagctcggacaaatccattacatcttcagcgataaaactggcactctcactcaaaacatcatgacttttaagaagtgctgcatcaatggacaaatctacggcgaccaccgtgacgcttcgcaacacaatcacaacaagatcgagcaagtggatttctcatggaacacctacgcagatggaaagctggctttctatgaccactacctgattgaacaaatccagagcgggaaagaaccggaagttcgccaattcttcttcctgctcgcagtgtgccataccgtgatggtggatcggactgacggccaactcaactaccaggctgcgtcaccagatgaaggtgcattggtgaatgcagcgcgcaatttcggcttcgccttcctggcgagaacccagaataccatcaccatttccgaacttggaaccgaacggacttacaacgtgctggcgatcctggactttaactccgatcgcaaacggatgtccataatcgtgagaaccccggaagggaatatcaagctgtactgcaaaggagcagatacggtcatctatgaacggctgcacaggatgaacccgaccaagcaagagactcaggatgcactggacattttcgccaatgagacgctcagaaccctctgtctgtgttacaaagagatcgaggaaaaggaattcacggaatggaacaagaagtttatggcggcttcggtcgcctccaccaatcgggacgaagcactggacaaagtgtatgaggaaatcgagaaggacctgatcctgctgggagcgacggccatcgaagataaactgcaagacggcgtgccagaaactatctccaaactggccaaggcagacatcaaaatctgggtcctcactggagataagaaagaaactgctgagaatatcggattcgcatgcgagctgctcactgaagataccactatctgctacggagaggatatcaacagcctcctgcacgccaggatggagaaccagcgcaacagaggcggcgtgtatgccaagttcgctccgccggtgcaagaatcattcttccctcctggtggcaatagagcactgattatcactggctcgtggctcaacgagatcctgctcgagaagaaaaccaaaagaaacaagatcctgaagttgaagtttccgcgcaccgaggaagaaaggcgcatgcgcactcaatccaaaagaaggctggaagccaagaaagaacaacgacaaaagaacttcgtggatctggcttgcgagtgttccgctgtgatctgctgccgggtgacgccgaagcagaaggcaatggtagtggatctcgttaagagatataagaaagcaatcactctggcaattggagacggagcaaacgatgtcaacatgatcaagaccgcccatatcggagtgggaatcagcggacaagaagggatgcaggctgtcatgagctccgactactcctttgcgcagttcagatatttgcagagactcctcctcgtgcacggaaggtggtcgtacattcgcatgtgcaagtttctcagatacttcttctacaagaatttcgcgtttaccctggtgcatttctggtactcctttttcaatggttactctgcccaaactgcctacgaggactggtttatcactctgtacaacgtcctgtacacctctttgcctgtgctgctgatgggactcctggaccaggacgtgtctgataaactctccctgagatttccgggactgtacatcgtggggcaacgggacctgctgttcaattacaaacgcttcttcgtgtcgcttctgcatggcgtgctgacctcgatgatcctcttcttcatcccgctgggggcctacctgcagactgtggggcaggatggtgaggctccgtcagactaccagtccttcgcagtgaccatcgcctcggcgctcgtcatcactgtgaatttccaaatcggactcgatacttcctattggaccttcgtgaacgccttctccatctttggatcgatcgcgctctactttggaatcatgttcgatttccacagcgccggaatccatgtgctcttcccttcagcctttcagtttaccggtactgcctccaacgctctccgccagccgtacatctggctgaccatcatcctggccgtcgccgtgtgtctgcttccggtggtggccatccgattcctgtcaatgactatctggccatcggaatccgacaagatccagaaacacagaaagagactcaaggctgaggaacagtggcagaggagacagcaggtctttcgtcggggagtctccacgcggcgctcggcgtacgccttctcacaccagcgcggctacgcagacctgatctcgtcgggacggagcatccgcaagaagagatcgccactcgatgccatcgtcgcagatggaaccgccgaataccggcgcactggagacagc

SEQ ID NO: 7352 - DNA, 3753 bp, synthetic construct
  misc_feature 1..3753: note = source = /note="Description of Artificial Sequence: Synthetic coding sequence"
  source 1..3753: mol_type = other DNA
atgagcactgaaagggatagtgagacaacgttcgatgaggattctcagccgaacgatgaggtggtaccctattctgatgatgagacagaagatgagttggacgatcaggggtcggctgtggagcctgaacagaaccgggtgaaccgtgaagctgaggagaatcgagaacctttcaggaaggaatgtacttggcaggtcaaagcaaatgacaggaagtaccacgagcaaccccacttcatgaataccaaatttctatgcattaaagagtcaaagtacgccaacaacgcgattaaaacgtataagtacaacgcctttacattcataccgatgaacctgtttgagcagttcaagagagccgcgaatctttatttcctggctttgcttatactgcaggccgtgccccagatcagcacactcgcctggtacaccaccttggtcccactcctcgttgttctgggagtgacagccattaaggacttagtggacgatgtcgcaaggcataaaatggataaggaaatcaacaaccgcacatgtgaggtgatcaaagacggcaggttcaaggtggctaagtggaaagagatccaggtgggggatgttattaggctgaagaagaatgactttgtgcctgctgatattttgctgctttcctcttcggagccaaactctctctgttatgttgagaccgccgaattggatggagagaccaacctgaagttcaagatgtccttggaaattactgaccaatacctccagcgcgaggacacattggcaacctttgatggctttatcgagtgcgaggagccaaataataggcttgataagtttacaggcacgttgttttggcgaaacacatcatttccgctggacgccgacaagatcttgctacgtgggtgcgtgatccggaacactgatttctgtcacggacttgtcatattcgccggtgcggacacaaagatcatgaaaaatagcgggaagacgaggttcaagcgcactaagatcgattatctaatgaattacatggtctacacaatcttcgtggtacttattctgctttcggcaggtttggcgattggccatgcttattgggaagcccaggttggcaattccagctggtacttgtatgacggagaggacgacactccttcatacagaggatttcttatcttctggggctacatcatcgtcttaaataccatggtacccatcagtctttatgtgtcagtggaagttataagactggggcagtctcatttcatcaattgggatcttcaaatgtattacgccgaaaaagacacccctgcaaaagcacgtaccaccacactgaacgaacagctggggcaaatccattacatattctccgataagacgggcactttaacccagaatatcatgacttttaaaaaatgctgcatcaacggccaaatctacggtgaccaccgcgacgcctctcagcataatcacaacaagatcgaacaggtggatttttcctggaatacgtacgcggatggcaaattagctttctacgatcactatctgatcgagcaaatccaaagcggtaaagagcccgaggtacgccagttcttctttctcctggccgtgtgccataccgtgatggtggaccgtaccgacggccaactcaactatcaggccgctagtcccgacgagggggccctggtgaacgctgccaggaatttcgggttcgcattcctggctcggacgcagaacacgatcacaatctccgaacttgggactgaacggacttacaatgtgctggccatcctggattttaattcagaccgtaagaggatgagcattattgtcaggacacccgagggcaacatcaagctgtattgtaagggcgccgatacagtgatctacgaacggctgcaccggatgaacccaacaaagcaggagacacaagatgcattggacatttttgctaacgaaacactgcggacactgtgtctgtgctataaggaaattgaggagaaggagttcacagagtggaacaaaaaatttatggcggcgagtgtcgccagcacgaatcgggacgaagccctggacaaggtgtatgaagagatcgaaaaggacctgatcttgctgggcgctacagccattgaggacaagctgcaggacggagtccccgaaactataagcaaactggcgaaagcagacattaagatctgggtgctgactggggacaagaaagagacagctgagaatatagggtttgcctgtgaactgctcactgaagacacgactatttgctacggcgaggatatcaactctctactgcacgccagaatggagaatcagagaaatcgtggcggcgtgtacgcaaaattcgctccgcccgttcaggagagcttcttcccacccggaggcaatagggcactgataatcaccggaagttggctcaatgaaattttgttagaaaaaaagacaaaaaggaataaaattttgaagctaaaatttccccgtactgaagaagagaggagaatgagaacccagagtaagcgacgcctggaagctaagaaagaacagcggcagaaaaactttgtagacttagcctgtgagtgttccgcggttatttgttgccgggtgacgccgaagcagaaggctatggtggttgatctggtaaagaggtataagaaggccattacattggccatcggcgacggggctaatgacgtgaacatgattaagaccgcccacatcggggtcggcataagcggacaagaaggaatgcaggcagtgatgagcagtgactatagcttcgctcagttccgctatctgcaacgtctactccttgttcacggacgttggagctatattagaatgtgtaagtttctcagatattttttctacaagaactttgcatttaccctcgtccatttttggtacagcttctttaatggctattccgcacaaaccgcgtacgaggactggtttattaccctctacaacgttctctacacatctcttccagtcctgttgatgggcctgctggatcaggatgtgagcgataagctctcccttcggtttccaggtctttatatcgttggacaaagggatctgcttttcaattataaaagatttttcgtcagcctgttgcacggtgtgctgacctccatgattctgttctttatcccacttggcgcatatctgcagactgtcggccaagatggagaagctccgtccgattaccagagcttcgcggtgaccattgcatccgcgctggtgataaccgtgaactttcagatagggctggacacaagctactggactttcgttaatgccttttccatcttcggcagtattgctctttactttgggattatgttcgacttccacagtgccggaatccacgttctcttcccaagcgcttttcaatttactggtaccgcaagtaatgcactgcggcaaccctacatatggttgactatcatccttgctgtcgcagtatgcctcctgccagtcgtggcaattcgttttctgtctatgacaatctggccatccgaatccgataagattcagaaacaccgcaaaagactgaaagccgaagagcaatggcagagacgtcagcaggtgttcaggcgaggagttagtacaaggcgctcggcgtatgcgttctcgcaccagagaggctacgcagatctgatttcctccggccggtccatcaggaaaaagcgatctcctcttgacgccatcgtggcggacggcacagctgagtacaggaggaccggtgactcc

SEQ ID NO: 7353 - DNA, 3753 bp, synthetic construct
  misc_feature 1..3753: note = source = /note="Description of Artificial Sequence: Synthetic coding sequence"
  source 1..3753: mol_type = other DNA
atgtccaccgaacgggattccgaaaccacctttgacgaagattcccagcctaatgatgaggtggtcccgtactccgacgacgagactgaggacgaactggatgatcaaggaagcgccgtcgagccagaacaaaatagagttaatagagaagccgaggagaacagagaaccgttccggaaagagtgcacctggcaagtcaaggcaaacgaccgcaagtaccacgaacagccgcacttcatgaacactaaattcctgtgcattaaagagtccaaatacgccaataatgccattaagacctacaagtataatgccttcactttcatcccgatgaatttgtttgaacagttcaagcgcgccgccaacttgtacttcctggcgctgcttattcttcaggctgtgccacaaatcagcacgctggcttggtataccactctggtcccgctcctggtggtcttgggagtgaccgcaatcaaggacctcgtggacgacgttgcgagacataagatggacaaagagattaacaacagaacctgcgaggtgatcaaggatggacgctttaaagtggcgaaatggaaagagatccaagtgggagacgtgatccgcctgaagaaaaacgattttgtcccggcagacatcttgctgttgtcctcttccgagccaaattctctctgctacgtggaaaccgctgagttggatggagagacgaatctgaagttcaagatgtccctcgagattaccgaccaatacttgcagagggaagataccctggccaccttcgatggctttatcgaatgcgaggaaccgaacaaccggcttgataagttcaccggaactctgttctggagaaacacgtccttcccactggatgccgacaaaattctgctccggggctgcgtgatccggaacaccgatttctgccacggactggttatcttcgcgggagcagacactaagatcatgaagaattccgggaaaactcgctttaagaggacgaagatagattacctgatgaactacatggtgtacactatctttgtggtgctcatcctgctgagcgctgggcttgccatcggtcacgcctactgggaagcccaagtgggtaacagctcgtggtacctttacgatggagaggacgacactccaagctatcgcggctttctgatcttttggggatacatcattgtgctcaacaccatggtgcccattagcctttatgtgtccgtggaagtgatcagactgggccagagccacttcattaactgggatctgcaaatgtattacgcagagaaggatacgccagccaaagcgaggacgactaccctgaatgaacaactcgggcagatccactatatcttctcggataagactggaaccctcactcagaatatcatgacttttaagaaatgctgcatcaacggacagatctatggcgaccatcgcgacgcgtctcaacacaaccacaataagatcgagcaagtggatttttcgtggaacacgtacgcggacggtaaattggccttctatgaccactacctcatcgagcagatccaaagtggcaaggagccggaggtcaggcagttcttttttctcctcgcggtatgccatacggtcatggtcgatcgaaccgacggccagctgaattaccaggcggccagcccggatgaaggagccctggttaacgcggcccgcaactttggttttgctttcctggccagaactcagaacactatcaccatttccgagctgggaaccgagagaacctacaacgtgttggctatcctggacttcaattcggatcgcaaacgcatgagcatcattgtcagaactcctgaggggaatatcaagctgtactgcaagggggcagacacggtgatctacgaacggctgcataggatgaacccgactaagcaggagacgcaagacgctctggatatctttgccaacgaaactctccggactctgtgcctgtgctacaaggaaatcgaagagaaggaattcactgagtggaacaaaaagttcatggccgcttcggttgcgtcaactaaccgggatgaagcgctggacaaggtgtacgaggaaattgaaaaggatctcatcctgcttggggccaccgccatcgaagataagctgcaggatggagtgccggaaaccatttccaagctcgcgaaggccgacattaagatctgggtcctgacgggcgacaaaaaggaaaccgccgaaaacatcggattcgcgtgcgagctgctcactgaggatactactatctgttacggagaagatatcaactccctcctgcacgctcgcatggaaaaccagcgcaatagaggaggagtgtacgccaagtttgcccctcctgtccaggaatccttcttcccgcctggggggaacagggcgttgatcatcaccggttcgtggctgaacgagatcctgctcgaaaagaaaaccaaacggaataagatcctgaagctgaaattccctcggacggaagaagaaaggaggatgcggactcagagcaagcgccggttggaagcaaagaaagaacagcgccagaagaatttcgttgacttggcctgcgagtgttcagcggtgatttgctgtcgggtgaccccgaagcagaaagcaatggtcgtggatttggtgaaacggtacaagaaagcgatcacccttgcgatcggagacggtgcaaacgacgtgaacatgataaagaccgcccacatcggcgtgggcatctcgggtcaggagggaatgcaggcggtgatgtcgtccgactacagcttcgcgcaattccgctacctgcagaggctcttgctggtccatgggcggtggtcctacattagaatgtgcaaattcctgcgctatttcttctataagaactttgcgttcaccctggtccatttttggtactcattctttaacggctacagcgcacaaactgcatacgaagattggttcatcaccctttacaacgtgctttacacttccctccctgtgctgctcatgggactcttggaccaagatgtctcggacaagctgtcactccgcttcccgggactctacattgtgggtcagcgcgacctgctctttaactacaagcgatttttcgtgtcgctgctccacggagtgctgacctcgatgattctcttctttatcccgctgggtgcctacctgcagaccgtgggccaagacggagaggctccgtccgattaccagtcgttcgccgtgaccatcgcttctgcactggtgatcactgtgaacttccagatcgggctggacacctcctactggactttcgtcaatgccttctcgatcttcggatccatcgctctctactttggcatcatgttcgacttccattccgcagggattcacgtgttgttcccgtccgcattccagttcactggaaccgcatccaacgcactgcgccagccttacatctggctgaccatcatcttggcggtcgcagtgtgcctgctgcctgtggttgcaatccgcttcctctctatgaccatctggccgtcagaatctgacaagatccagaagcatagaaaacgactcaaggcggaagagcaatggcaacggcggcaacaagtattcaggcggggagtgagcacgcgccgctcagcgtacgcttttagccaccagcgcggttacgccgacctcatcagctccggacgcagcatcagaaaaaagaggtccccgctggacgccatcgttgcagatggaactgctgaataccgtcggaccggagactca

SEQ ID NO: 7354 - DNA, 3753 bp, synthetic construct
  misc_feature 1..3753: note = source = /note="Description of Artificial Sequence: Synthetic coding sequence"
  source 1..3753: mol_type = other DNA
atgtccaccgaacgagattccgagactaccttcgacgaagattcccagccaaatgatgaggtcgtgccttactcggatgacgaaactgaagatgaactggatgatcagggctccgcagtcgagcctgagcagaacagagtcaaccgggaggcagaagaaaaccgtgaaccattccgaaaggaatgtacttggcaggtcaaagcaaacgacaggaagtaccatgagcagccacatttcatgaacactaagttcctgtgtattaaggaatcaaagtacgcaaacaatgccatcaaaacgtataagtacaacgcctttaccttcattcccatgaacctttttgaacagtttaagagagcagctaatctttactttctggctctcctcatcttgcaggctgtcccccaaatctctacccttgcatggtacaccactttggtgccactgctggtggtcctgggcgttaccgccatcaaggatcttgtggacgacgtggcaagacataagatggataaagaaatcaacaacagaacttgtgaagtcatcaaggatggtagattcaaagtcgccaaatggaaggaaattcaggtcggagatgtcatcagacttaagaagaacgactttgtgcctgctgatatcctgcttctcagctcctcggaaccaaactctctgtgttacgtggagactgccgaactggacggcgaaaccaatctgaagtttaagatgtctcttgagattaccgatcagtacctgcaaagagaggatactcttgcaacctttgatggattcatcgaatgcgaggagccaaacaacaggctcgataagtttaccggcactcttttttggcggaacacctcgttcccactggatgccgacaaaattcttctgcgtgggtgcgtgatccgcaacaccgatttttgtcacggactggtgatttttgccggcgcagatacgaaaatcatgaagaattccgggaaaactcggtttaagagaactaagattgactaccttatgaactacatggtctacaccattttcgttgtgttgatcctgctgtccgccggactggcaatcggacacgcatactgggaagctcaagtcggaaattcatcatggtacctgtacgatggagaggacgatacccctagctatcgaggtttccttatcttttggggatacataattgtgcttaacactatggtgccaatctcgctctacgtgtcagtggaagtgatacgtcttggacagtcgcactttatcaactgggatctgcagatgtactatgcggaaaaggatactcctgcgaaagccagaactaccacccttaacgagcagcttggacaaattcactacattttctctgataagactggcactcttactcagaatatcatgaccttcaagaaatgctgtatcaacggtcagatttacggcgaccatagagatgcaagccaacataaccacaacaagatcgaacaagtggatttctcatggaacacctatgctgatggaaaacttgccttttacgatcattacctcatcgaacaaatacagagcggaaaggaacctgaggtgagacagttcttttttctgctggcagtgtgtcatactgtgatggtggaccgcactgatggacaactgaattaccaggccgcgagccccgacgaaggagcactcgtgaatgcagcccgcaactttgggttcgcgtttcttgcgagaactcagaacactattactatctcggagctcggtactgaaagaacttacaatgtgctcgcaattctggatttcaactcggatagaaagcgaatgtccattattgttaggactcctgaaggcaatatcaaactttactgtaagggagcagataccgtgatctacgagcgacttcatagaatgaacccaactaagcaagagactcaggacgcccttgatatcttcgcaaatgaaactcttaggaccctttgcctgtgttacaaggaaatcgaagagaaggaatttaccgagtggaacaagaagtttatggcagcatcggtggcatcgactaaccgggacgaagcacttgataaggtgtacgaagagatcgaaaaggatctcatacttctgggggcaactgcaattgaagataagctccaagacggtgtcccagaaactatttcgaagctcgcaaaagccgacataaagatatgggtgctcaccggagataagaaggaaacggcagagaatatcggtttcgcatgtgaacttcttactgaagatactactatttgctacggggaggacattaactccttgcttcacgcgcggatggagaaccaaaggaaccgcggcggggtctacgctaagtttgcacctccagtccaggaatcattctttccacctggcggcaatcgggcactgatcataactggcagctggctgaacgaaattctgctggagaagaaaaccaaacgtaacaagatacttaaacttaagttccccagaactgaagaagaacgaagaatgagaacccaaagcaaaaggcgccttgaagccaagaaggaacagcggcaaaagaattttgtggacttggcatgtgaatgttcggcagtgatctgttgtcgggttaccccgaagcagaaagccatggtcgtggatctcgtgaagcggtacaagaaggctatcaccctcgcaattggtgacggagcaaatgatgtgaatatgataaagaccgcgcatataggtgtgggtatttccggtcaggaaggtatgcaagctgtcatgtcctccgattactcatttgcacagttccggtatttgcaacgactccttttggtgcatggtcgctggtcgtacattaggatgtgtaagtttctgcgctactttttctacaagaattttgcattcaccttggtgcacttttggtattccttctttaatggatacagcgcccagaccgcgtacgaagattggttcatcactctctataatgtgctgtacacttcgcttccagtgcttctgatgggcctcctggatcaagacgtctcagataagctgtccctgcggttccctggactctacatcgtggggcagcgagatctgctgttcaattacaaaaggttctttgtgtccttgctccatggtgtgcttactagcatgatcctgtttttcattccacttggggcatacttgcagaccgtgggtcaagacggcgaggcgccatcggattaccaatcatttgcagtgaccatcgcgtcagcacttgtgattaccgtgaactttcaaattggtctggatacttcgtactggactttcgtgaatgcattttctatctttggctcgatcgcattgtactttggaattatgtttgattttcatagcgccggaattcatgtgctgtttccttccgccttccaatttactggcaccgcatccaatgcactgagacagccttatatctggctcaccatcatccttgcagtggcggtctgtctccttcctgtggtggccattcggtttctctcgatgaccatctggccgagcgagagcgacaagatccagaagcacaggaagaggctgaaagcagaagaacaatggcaaaggcgccaacaagtgtttcgcaggggggtgtcaacccggcggtcggcatacgcattttcccatcaaagaggctacgcagacctgatttcgagcggaaggtccatcagaaagaagcggagccccctggacgccatcgtggcagacggaaccgcggagtatagacggaccggagattcg

SEQ ID NO: 7355 - DNA, 3753 bp, synthetic construct
  misc_feature 1..3753: note = source = /note="Description of Artificial Sequence: Synthetic coding sequence"
  source 1..3753: mol_type = other DNA
atgagcaccgaacgtgactcggagactactttcgacgaagattcgcagcccaatgatgaagtggtgccttattccgacgatgaaaccgaagatgaactggacgatcagggtagcgccgtcgaaccagaacagaaccgggtcaacagggaagccgaagaaaatcgtgagccctttcggaaagagtgcacttggcaagtgaaggcgaacgacaggaagtatcacgaacaaccacactttatgaacaccaaattcctctgcataaaggagtcgaagtacgcaaacaacgcaattaagacctacaaatacaacgccttcacgtttatccctatgaaccttttcgaacagttcaaacgtgccgcaaacctgtactttcttgcccttctcattctgcaggcagtgccccaaatttccactctcgcatggtacaccaccctcgtgcctctgctggtcgtgctgggagtgactgcaatcaaggacctggtggatgatgtggcacggcacaaaatggataaagagatcaataatcgtacttgcgaagtgatcaaggacggacggtttaaagtggctaagtggaaggaaattcaggtcggggatgtgatccggctcaaaaagaacgactttgtgcctgcagatatcctccttctgtcctcatcggaaccaaattcgctttgctacgtggagactgcagaactggatggcgaaaccaacctgaaattcaaaatgtcgcttgaaatcactgaccagtacctgcaaagagaagatactctggccaccttcgatggttttatcgagtgtgaggaacctaataacagactcgacaagttcaccggaacccttttttggagaaacacctcgttccctctcgacgccgataagatccttttgcgcggttgtgtcatccgtaacactgacttttgtcatggactggtgattttcgcaggagcagatactaagattatgaagaattccggaaagacccgctttaagagaactaagattgactatctgatgaattacatggtgtacacgatttttgtcgtgcttattcttctttcggcgggcctggccattggccatgcatactgggaggcccaggtgggtaattcctcctggtacctctatgatggagaagatgacactccttcctataggggttttttgatcttttggggatacattatagtgctgaacactatggtgccaatcagcctgtacgtctcagttgaagtgattagacttggacaatcccactttatcaactgggatttgcagatgtactacgcagagaaggatactccagcaaaggcaagaactaccaccctgaatgaacagctgggacaaattcattacattttctcagacaagaccggtaccctgacgcagaacataatgactttcaagaagtgctgtattaacggccagatttacggggaccatcgtgatgcctcgcaacataaccataacaaaatagaacaggtggatttcagctggaatacctacgcagacggaaagctggccttctacgatcattaccttattgagcagattcaatcgggtaaggaaccggaagtgagacagtttttctttttgcttgccgtgtgccacaccgtgatggtggacagaacggacggacaacttaactaccaggcagcgagccctgacgaaggtgctttggttaatgcagcaagaaactttggttttgcattcctggcccgcacccagaacactattaccatttccgagttggggaccgaaagaacttacaacgtgctggccatacttgacttcaattccgatagaaagaggatgagcatcattgtcagaactcccgaaggtaatatcaaactgtactgtaagggtgcagatactgtgatatacgagaggcttcaccgcatgaacccgactaagcaagaaacccaggatgcacttgatatctttgccaatgaaactttgagaacgctttgtctttgttacaaagagattgaagagaaagaattcactgaatggaataagaagtttatggctgcgtcggtcgcatcaactaatcgagatgaagcattggacaaagtgtatgaagagattgaaaaggacctgatccttctcggtgcaaccgccattgaggacaagctgcaggacggagtcccagaaactatatcaaaacttgcaaaggcggatatcaagatatgggtgctcaccggagacaaaaaggaaaccgcagagaacatcggatttgcctgtgaacttctcaccgaggataccaccatctgttacggggaggacattaactcattgctccatgcaagaatggaaaatcaacgaaatcgtgggggtgtgtacgcaaagttcgctccgcctgtccaggagtcgttttttccccccggcggaaaccgcgctcttatcattaccggatcctggttgaatgaaattctcctggaaaagaaaactaagagaaacaagattctcaaattgaaatttcctcggactgaggaggagagacgaatgcgaactcaatcgaaacggagactcgaggcaaagaaggagcagcggcagaaaaactttgtcgatcttgcatgtgagtgttcggccgtcatttgttgtcgggtgacccctaagcagaaagcaatggtcgtggatctggtgaagaggtacaaaaaggccatcacccttgcaattggagatggagctaatgatgtgaacatgattaagactgcacacataggagtgggtatttcgggtcaagagggaatgcaagcagtgatgtcgtcagattacagctttgcacaatttagatacctgcagagattgcttcttgtgcacggacggtggtcatacatcagaatgtgtaaattcctgcgctactttttctacaagaattttgcattcaccctcgtgcatttctggtacagcttcttcaacggttactcggcccaaaccgcatacgaagattggttcattactttgtacaatgtcttgtacacttcgctgccagtgctccttatggggcttctggaccaagatgtgtcagataagctctcgctgagattcccaggtctgtacattgtcggtcaaagagatcttcttttcaactataagcgctttttcgtgtcacttctgcatggagtcctgaccagcatgattctcttctttattccacttggcgcatatctgcaaacggtggggcaagatggagaggcaccttccgactaccaatccttcgcagtgactattgcatcggcacttgtgatcactgtcaacttccagataggcctggacacttcgtactggacctttgtgaacgcattttccatatttggtagcatcgctctttactttggcatcatgttcgacttccactccgcaggtatccacgtcctttttccttccgctttccaatttactggcactgcctcaaatgcactgaggcagccttacatatggctcaccattatcctggcagttgcagtgtgtctcctgcctgtcgtagcgatcagatttctctccatgaccatctggccaagcgaatccgataagattcagaaacatagaaagcgactcaaagcagaggaacagtggcagagaaggcagcaagtgtttcgtcgtggcgtctcgactagaaggagcgcatacgcattctcacaccaaaggggttacgcagacttgatctcgagcggccgtagcattagaaagaagaggagcccactcgatgctattgtggcggatggcacggcagaatacaggagaactggagattcc

SEQ ID NO: 7356 - DNA, 3753 bp, synthetic construct
  misc_feature 1..3753: note = source = /note="Description of Artificial Sequence: Synthetic coding sequence"
  source 1..3753: mol_type = other DNA
atgtctaccgaacgggacagcgagaccacatttgacgaggactcccagccaaacgacgaggtggtgccttattctgatgatgaaacagaggatgaactggacgaccagggatctgctgtggaacccgaacagaatagagtgaatcgggaggcagaagagaatagggaaccatttcgcaaagagtgcacctggcaggtgaaggccaacgatagaaagtaccacgaacagccccatttcatgaatactaaattcctgtgcattaaggagagcaagtatgccaataacgccattaaaacctataagtacaatgcatttacctttatccccatgaacttgttcgaacaattcaaacgggccgccaacctgtattttctcgcgcttctgattttgcaggctgtccctcagattagtacgctggcctggtatactacattagtgccattgttagtcgtactcggcgtgaccgccattaaagacttggtagatgatgtagcgaggcataagatggacaaagagataaacaatcggacttgtgaagtaattaaagacggaagatttaaagtcgccaaatggaaagaaatccaggtcggggacgtcatccggctcaagaagaacgacttcgtgcctgccgatattctcttacttagtagtagcgagccgaactctttgtgttatgtcgaaaccgctgagctagatggagagacaaaccttaaattcaaaatgtcgctcgagattacagatcaatacctgcagagagaggataccctggccacatttgacggctttatagagtgcgaagagcctaataataggttagacaagttcactggtaccctattttggagaaacacttcattccccctggacgctgacaagatattgttgcgggggtgcgtgatccggaacacggacttctgccacggccttgtcatcttcgccggagccgacactaaaataatgaaaaactctgggaaaaccagatttaagaggacgaagatagattacttgatgaactatatggtatacaccatcttcgtcgtcttgatcctgttgagcgcaggcctcgccattgggcacgcctactgggaggcccaggttggaaattctagctggtatctgtacgacggcgaggacgataccccgtcttaccgcggatttctaatattctggggttatattattgtgctgaacactatggtgcccatatcactgtatgtgagcgttgaagtgatcaggttggggcagtcccatttcatcaattgggatttgcaaatgtactatgccgagaaggatacacctgcaaaagctcgcaccactactctgaatgagcagctgggtcagatccattacatcttctccgacaagacaggaacactgacacagaatatcatgacctttaaaaagtgctgcattaatggccagatctatggagatcaccgggatgcgagccaacataaccacaacaaaatcgagcaagtcgatttctcctggaatacatatgcagatggaaagctcgctttctacgaccattacttgatagagcaaatccaatccgggaaggaaccagaggtgcgccaattctttttcttgctggctgtatgccataccgtcatggtggatagaacggacggtcaactgaattaccaagccgctagccctgatgagggcgccttggtcaatgccgcccgcaactttggattcgccttcctcgccaggacgcaaaacaccattaccatctctgagctgggaactgagcgaacatataatgtgcttgccatcttggattttaactccgacagaaaaaggatgtcgatcatcgttcggacccccgagggaaacataaagctgtattgcaagggcgctgacacagttatatatgagaggctccacagaatgaatcccaccaagcaagaaacccaggacgccctggacatcttcgccaacgaaaccttacgcactctgtgcctctgttacaaggaaatagaagagaaggagtttaccgaatggaacaagaaattcatggcagcatccgttgcctccactaacagggacgaggctctggacaaagtttatgaggaaattgaaaaagatttgatcttgctaggtgctactgcaatcgaggataagcttcaggatggtgtgccggagaccatttccaagctggccaaagccgacataaagatctgggtgctcacaggggacaaaaaggagaccgccgaaaatataggattcgcttgcgagttactgacagaagatacaaccatctgctacggcgaggatataaactctttgttgcacgcgagaatggagaatcaacgtaacagaggcggcgtgtatgccaaatttgccccccccgtgcaggaaagtttttttcccccggggggcaaccgagccctgatcattaccggttcatggctgaacgaaattctcttagaaaaaaaaacaaaacgcaacaaaatcctgaaacttaagtttcctagaactgaggaggagagacggatgcggacccagtccaagagacgccttgaggctaaaaaggaacagaggcagaagaatttcgtcgacctcgcttgcgagtgttcagcagtgatatgctgtcgcgtgacacctaagcaaaaagccatggtggtggacttggtaaagagatacaagaaagccatcaccttagctattggcgacggcgctaacgacgtcaacatgatcaagacagcccacatcggcgtcggaatctctggccaggagggcatgcaggccgtaatgtccagtgactactcttttgcgcagttcaggtatctacagagactgctgctggtacacggtcggtggtcttacatccggatgtgcaaatttttgcgatatttcttttacaagaactttgctttcacacttgtgcatttctggtacagcttctttaacggctactcagctcaaaccgcatacgaggactggttcatcaccctgtacaatgtgctgtatacatctctgccagtgctcctaatgggcctcctagaccaggatgtttccgacaagttgtccctgagattccctgggttatatatcgtgggccagcgcgatttgttgttcaattataaaagatttttcgtttctcttctgcacggcgtcttgacctctatgatcctcttcttcatccccttgggtgcctacctgcagacagtggggcaggacggagaggcaccatcagattaccagagtttcgccgtgacaatcgcatcggccttggttattacagtgaatttccagattggattggatacctcatattggactttcgtcaatgcgttctccatcttcgggtccatcgctctgtacttcggtataatgttcgattttcacagtgccggaatccacgtgctgttcccctctgccttccagttcaccggaacggcctctaatgccctcagacaaccctacatctggctgaccattatactcgctgtggccgtgtgtctcctgcctgtagttgccattcgcttcctatccatgaccatatggccttccgagagcgataagatacagaagcaccgcaaaagactcaaggctgaagagcagtggcagcgccggcagcaggtgttcagacggggggtcagcaccagacgctccgcttacgcattctctcaccagaggggctacgccgatctgattagtagtggccgcagcatccggaaaaaacgcagccctctggacgcaattgtagccgacgggacggcagagtatcggcggaccggcgattca

SEQ ID NO: 7357 - DNA, 3753 bp, synthetic construct
  misc_feature 1..3753: note = source = /note="Description of Artificial Sequence: Synthetic coding sequence"
  source 1..3753: mol_type = other DNA
atgtcaactgaaagagatagtgaaacaacttttgacgaagatagtcaaccaaacgatgaagtagtaccttattctgatgatgaaactgaagatgaattagatgatcaaggatctgcagttgaaccagaacaaaatagagttaatagagaagcagaagaaaacagagaaccatttagaaaagagtgtacttggcaagtaaaagctaatgatagaaaatatcatgaacaacctcatttcatgaatacaaaatttctttgtattaaagaatcaaaatatgcaaataatgctattaaaacatacaaatataatgcatttacttttataccaatgaacttatttgaacaattcaagagggctgcaaatctttatttccttgctttattaattttacaagcagttccacaaatttctactcttgcttggtatactacacttgttcctttattagtagtcttaggagttacagctattaaagatttggttgatgatgttgctagacataagatggacaaagaaataaataatagaacatgtgaagttattaaggatggtagatttaaagtagctaaatggaaagaaattcaagttggtgatgttattagattaaagaaaaatgatttcgttccagcagatattcttttattgtcttctagtgaaccaaatagtttatgttatgttgaaactgctgaattagatggtgaaacaaatcttaaatttaagatgtctttagaaatcactgaccagtatcttcaaagagaagatacattagcaactttcgatggatttatagaatgcgaggaaccaaataacagattagataaatttacaggaactttattttggagaaatacatctttcccattagacgcagacaagattttattaagagggtgtgttattcgtaatacggatttttgtcatggtttagttatttttgcaggagctgatacaaaaattatgaagaatagtggtaaaacaagatttaaaaggactaaaattgattatttgatgaactatatggtttatacaattttcgtcgttcttattctcttatcagcaggtttagcaatagggcatgcatattgggaagcacaagttggaaactctagttggtatttatatgatggagaagatgacactccatcttatcgaggttttttaattttttggggatatataattgttctaaatactatggttcctattagtttgtacgtttcagtcgaagttattagattaggtcaatctcatttcattaattgggatttacaaatgtattatgctgaaaaagatacaccagctaaagcaagaactacaactttaaatgaacaattgggacagattcactatattttttctgataaaacaggaactttaacacaaaatatcatgacatttaagaaatgttgtatcaatggacaaatttatggggatcatagagatgcatcacagcataatcataataaaattgaacaagtcgacttctcttggaatacttatgcagatggaaaattagctttttatgatcattatttaattgaacaaattcaatctggtaaagaaccagaagtccgacaattttttttcttattggctgtctgtcatacagttatggtcgataggactgatggtcaacttaattatcaagctgcttctccagatgagggagcattagttaatgccgcacgaaatttcggatttgcttttcttgcaaggactcaaaacactattacaattagtgaacttggtacagaaagaacttataatgttttagcaattttagattttaattcagatagaaaaagaatgtcgattattgttcgtacacctgaaggtaatataaagttgtattgtaagggagcagatacagtaatttatgaaagattacacagaatgaatccaactaaacaagaaactcaagatgcacttgatatttttgcaaatgaaactttaagaacattatgtttatgttataaagaaatagaagaaaaagaatttactgaatggaacaagaaatttatggctgcttcagttgcttcaacaaatagagacgaagctttagataaagtctatgaagaaattgaaaaagatttaattcttttaggggcaacagcaattgaagataaattacaagatggagtacctgaaactatttccaaacttgcaaaagctgatatcaagatttgggttttaaccggggataaaaaggaaacggcagaaaatattggattcgcatgtgaattattaactgaagatactacaatatgttatggagaagatattaattctcttttacatgctagaatggaaaatcaaagaaatcgaggaggagtttatgcaaaattcgcaccacctgttcaagaatcattttttccaccaggaggaaatagagcattaattattactggatcttggttaaatgaaatccttcttgagaagaaaactaaacgaaataagattttaaaattaaagtttccaagaactgaagaagaacgtagaatgagaacacaatcaaaaagaagacttgaagctaaaaaagaacaacgacaaaagaactttgttgatcttgcttgtgaatgttcagctgtaatatgttgtagagttactccaaaacaaaaggcaatggtagttgatttagttaaaagatataaaaaggctattactttagcaattggagatggagctaatgatgttaatatgattaaaactgcacatattggagttgggatatctggacaagaaggtatgcaagctgtaatgtcatcagactattcatttgctcaatttagatatttacaacgtttactcttagtgcacgggagatggtcatatattagaatgtgtaagtttttaagatacttcttttataaaaactttgcttttactcttgtacatttctggtactcattttttaatggatatagtgctcaaactgcatatgaagattggtttattactttatacaatgttctttatacatcattaccagttttattaatgggtcttttagaccaagacgtgtcagataagttatctttaagattcccaggtttatatattgttggacagcgagatcttctttttaattataaacgattttttgtttcacttcttcacggagttttaacttcaatgatccttttctttattccactaggagcttatttacaaactgttggacaagatggagaagctccatccgattatcagtcatttgcagttacaatagctagtgcattagttattacagttaactttcaaattgggttagatacatcttattggacttttgttaatgcatttagtatctttggttcaattgcactttacttcggaattatgttcgattttcattctgctggaattcatgttttatttccatcagcttttcaattcacaggaacagcatctaatgctcttagacaaccatatatttggttaacaattattcttgctgtagctgtttgtcttttacctgtagttgctattcgatttttatcaatgacaatatggccttctgagagtgataaaattcaaaaacatcgtaaaagacttaaagcagaagaacaatggcaaagacgtcaacaagtttttcgtagaggagttagtactagaagatctgcttatgctttttctcatcaacgtggttatgctgatcttatttcatcaggaagatcaatacgaaaaaaacgtagtccattagacgctattgttgctgatggaacagctgaatatagaagaactggtgatagt

SEQ ID NO: 7358 - DNA, 3753 bp, synthetic construct
  misc_feature 1..3753: note = source = /note="Description of Artificial Sequence: Synthetic coding sequence"
  source 1..3753: mol_type = other DNA
atgagtactgaaagggactccgaaacaaccttcgacgaggactcccagcccaacgatgaagtcgtgccatattccgatgacgaaactgaggacgagctcgacgaccagggctccgcggttgagccagaacagaatagagtgaaccgcgaggcggaggaaaatcgtgagccttttagaaaggagtgtacctggcaggttaaagcaaatgataggaagtaccatgaacaaccgcatttcatgaacaccaaattcctctgtattaaggagagcaaatatgctaataacgcaattaaaacctacaaatacaatgccttcactttcattcctatgaatctgtttgagcagtttaagcgtgccgccaacttgtattttttggcactgttgatactgcaagcagtgccccaaatcagcacattggcgtggtatacaaccctggttcccctgcttgtcgtacttggtgtgaccgccataaaggatctcgtagacgacgttgcaaggcataaaatggacaaggaaatcaacaacaggacctgtgaggtcattaaggacggccggttcaaggtggctaaatggaaggaaattcaggtgggtgatgtcatcaggctgaagaagaatgactttgtgccggcagacattctgttactgtccagttcagagcccaactccttatgttatgtcgaaaccgccgaattggacggggagacaaacttgaagttcaaaatgtccctcgagatcacggatcagtacctgcagcgtgaagacactctggcaacctttgatggcttcatcgaatgcgaggagccaaataatcgcttggataagttcactggtaccctgttctggcgcaataccagttttcccctggatgcggacaaaattctactgaggggatgcgtcatccgcaacacggacttctgtcacgggctagtcatctttgctggcgccgacacaaaaattatgaaaaattcaggaaagacccggtttaagcgaacaaaaattgattacctgatgaactatatggtgtacacaattttcgtcgtgctcatcctgttaagcgccggcttggccatagggcatgcttactgggaagcccaagtaggcaactcatcttggtacctatacgatggcgaagatgatacgcctagttaccgtggcttcttaatcttttgggggtatattatcgtactgaacactatggttccaatttcattgtacgtgtcggtggaggtgatcagattgggacagagtcactttatcaactgggacctccagatgtattacgcagagaaagatacacccgccaaggcgcggaccacaaccctgaacgagcaattgggacagatacattatatattctcagataagacgggcacactgactcagaacatcatgacgttcaagaagtgctgtataaacggacagatttacggcgaccatcgcgatgcatcccagcataaccacaataaaatagagcaagtagacttttcctggaacacatacgcggatgggaaactggcattctacgatcattaccttatcgagcaaattcagagcggcaaggagccagaggtgaggcagttcttcttcctactcgccgtctgtcataccgttatggtagatagaactgacggccagctgaactatcaggctgcatcccccgacgaaggcgccctcgtgaatgcagcgcggaactttggctttgcatttcttgctcgaactcagaataccatcaccatttcagaactcggaacagagagaacatataacgttctagccatcctggactttaactccgatcgcaagcgcatgtccattatagttcgcacgcctgaaggcaatatcaagctctattgcaaaggggcggataccgttatatacgagcgcctgcacagaatgaaccccacaaaacaagagacccaggatgccctggatattttcgcaaatgaaaccctgagaaccctgtgtctgtgctacaaggaaatcgaagagaaagaatttactgaatggaataaaaagttcatggcagcaagcgtggcgtccaccaacagagatgaggcactggataaggtgtacgaagaaattgagaaggacctgattctgttaggagctacagccattgaggacaagctacaggacggggtacctgaaactattagtaagttagccaaggcagacattaagatatgggttctgaccggagataaaaaggagactgcggaaaacattggattcgcctgtgagctgctaacagaagatacaactatctgttacggcgaggatatcaactcccttcttcatgctcggatggagaaccagcgtaacagagggggcgtttacgctaagttcgctcctcccgtccaggagagctttttcccccctgggggaaatcgcgccctaattataacaggctcttggctgaatgaaatactgctggaaaagaagaccaagcgaaacaagatactcaagctgaaattcccgaggacggaggaagaacgcagaatgaggacccagtccaagcgccgcttagaagctaaaaaggaacaaagacagaaaaatttcgtggatctcgcctgtgagtgtagcgctgtgatctgctgtcgcgtcacacccaagcaaaaagcgatggtggtggatctcgttaagcgatataagaaggcgattaccctggcaattggagacggagcgaacgacgtaaacatgatcaaaaccgcgcatatcggtgtgggcattagtggacaggaagggatgcaggctgttatgtcatccgattactcttttgcacagttcagatacctgcagcgtcttctattggtccatggcaggtggtcatatattcggatgtgtaaattcctgcggtatttcttctataagaattttgccttcactttggtccatttctggtactcgttttttaacggttatagcgcgcagactgcttacgaagattggtttatcacactgtataacgtcctgtacacctccctgcctgtgttgctgatggggctcctggaccaggatgtgtctgacaagttaagcctgaggtttccaggcttatacattgttggacaacgggaccttctcttcaactacaagagatttttcgtcagtctgctccacggcgtgttaaccagcatgatcctcttctttattcctttaggcgcgtacctgcagactgttggccaggacggcgaagcccccagcgactatcagtcattcgcggtaacgattgcaagcgccttggtgatcaccgttaacttccaaattggactggatactagctactggacttttgtcaatgcctttagcattttcgggtccatcgcactgtacttcggcataatgttcgacttccattctgccggaatccacgtgctctttcctagtgcgtttcagttcacgggaaccgctagtaatgccctacggcagccctatatttggttaaccatcatcttagctgtggccgtttgtttactgccagtagtggctatcagattcctatctatgacgatttggccaagtgaatccgataagatacagaaacaccgcaaacgactgaaggccgaggagcagtggcagcgcagacagcaggtgtttcgccgtggggtgtcaacaaggagatctgcatatgcctttagccaccagcgaggatacgccgatctaatttcatccgggcgctcaatcagaaaaaaacggtcacccctggacgcaatcgtggccgatgggacagctgaatatagaaggacaggtgactct

SEQ ID NO: 7359 - DNA, 3753 bp, synthetic construct
  misc_feature 1..3753: note = source = /note="Description of Artificial Sequence: Synthetic coding sequence"
  source 1..3753: mol_type = other DNA
atgtctacagagcgggatagtgagacaacattcgatgaggattctcagcccaatgatgaagttgtcccctatagtgatgatgaaactgaagatgaactcgatgaccaagggtctgctgtagagcccgaacagaatcgggtaaatcgggaagctgaagaaaaccgtgaacccttcagaaaggaatgtacttggcaggtcaaagcaaatgataggaaatatcatgagcagccccactttatgaacactaaatttctttgcattaaagaatcaaagtatgctaataatgccattaaaacatataagtacaatgcattcacttttatccccatgaacttattcgagcagttcaaacgggccgccaatttgtattttcttgctctgcttatcctgcaggccgtgccacagatctctactttagcctggtacacaacactagtccccctcttggtggttctcggagtgactgcaatcaaggatctcgtagatgatgtggccaggcataaaatggataaagaaatcaataaccgaacttgtgaagtgatcaaagatggaaggtttaaggtggctaagtggaaagaaatccaggtcggagacgtgataagactgaagaaaaatgactttgtccccgctgatatattgctgctaagtagttcggaacctaactccctctgctacgtcgaaacagctgaactagatggggaaactaatctgaaattcaagatgtctctggaaataacagatcagtacttgcagagagaagatactctggccactttcgacgggtttattgaatgcgaggaacccaacaaccgacttgataaatttacaggaactctgttctggcggaatacatcatttcctctcgacgctgataaaattcttctccgagggtgtgttataaggaacactgacttctgccacggactcgttatatttgcaggagctgatacaaaaattatgaagaattctgggaaaactcgctttaaacgtacaaaaatagattatcttatgaattatatggtctatacaatattcgtggtccttatactgctctccgccggactcgcaatagggcacgcgtattgggaagctcaggtgggaaattctagttggtacctctatgatggggaggatgatactccttcataccggggattcctgatattttgggggtatataatagtgctcaacactatggtgccaatctcactgtatgtgtcagtcgaggttatcagactcggacagtcacacttcataaactgggatctacagatgtattatgctgagaaggatactcctgccaaagctcggactacaacactcaatgaacagctcggacagattcactatatattctcagataagacagggactctaacacagaacatcatgacatttaaaaaatgctgtattaacgggcagatatacggagaccatagggatgcctcacagcataatcataataagattgagcaggtcgatttcagttggaacacgtatgcagatgggaaactcgccttctacgatcattaccttattgaacagatacagtccgggaaagaacctgaagtcaggcagtttttttttctccttgcggtttgccacacggtcatggttgatcggacagatggacaacttaattaccaggccgcgtcacctgatgaaggggctctagtcaatgcagcaaggaacttcggatttgccttcttggcacggactcagaatacaatcactatctctgaactgggaacggaacggacttacaacgtgctcgccatccttgattttaactctgataggaaacgaatgtctattatcgtccggactcctgaaggaaatataaagctatattgcaagggagccgatacagttatctatgaaagactccaccggatgaaccccactaaacaggaaactcaggatgcactggatatctttgccaacgaaacacttcggacactatgtctttgttataaggaaatcgaagaaaaagaatttacagaatggaataaaaaattcatggccgcatccgtagcatccactaacagggatgaagccttggacaaagtgtatgaagagatagaaaaagatctcatattgctcggggctacagctatagaagataagctgcaggacggggtccccgaaacaatttctaaactagccaaggctgacattaaaatctgggttctcactggggataaaaaagaaactgccgaaaatatcgggttcgcttgtgagcttttgacagaggatacaactatttgttatggggaagatatcaatagtcttttgcacgcaaggatggaaaaccagaggaaccgggggggggtctacgccaagttcgcaccacccgttcaggagtctttctttccaccggggggaaacagggccctgatcataacagggtcttggctcaatgaaattctgttagaaaaaaagacaaaaagaaacaaaatactaaaattaaaatttcccagaactgaagaagaacgacgaatgagaactcagagtaaaagaaggctcgaagccaaaaaagagcagagacagaagaattttgtggatttagcttgtgaatgttccgcagtcatatgttgccgggtaactccgaaacagaaagccatggtggttgatctcgtcaagcggtataaaaaagcaataactctcgccattggagatggagccaatgacgtcaatatgattaagacagctcacatcggggtcgggatatccgggcaggaaggaatgcaggccgtcatgtcttctgattactcttttgcccagtttagatacttgcaaaggttgctgctcgtgcatgggcgatggagttatattaggatgtgtaaatttctcaggtatttcttctataaaaattttgcgttcactctcgtgcatttctggtattctttctttaatggatactctgcacagacagcctatgaagattggttcatcactctttataatgtactctatacatctctccctgttctgttaatgggactcctggatcaggatgtgtctgataagctttccctccgctttcctggactgtatattgtcggacaaagggatctgctctttaattataaacggttcttcgtttctctccttcacggggtactgacatctatgatcctcttctttatccctctcggagcatatctccagacagtcgggcaggatggagaagcgccgtcagattatcagtcctttgcagtcacaatagcaagtgcattagtgatcacagtgaatttccagatcgggttggatacttcttattggacattcgtgaatgctttctcaatatttgggtccattgccctttattttggaattatgttcgatttccattccgcaggaatccatgttttatttccctcggccttccaatttactggaacagccagtaacgcgcttcggcagccatatatttggctaacaatcatcctcgctgtagctgtatgtcttctgccagtcgttgcaataagatttttatccatgacaatatggccatctgagagtgataaaatacagaaacataggaaaaggcttaaggccgaagagcagtggcagcggcgccagcaggtattcagacggggggtatctactagaagaagtgcctatgccttttcccatcagcgagggtatgcagatttgatctcctcaggaagatcaattcgcaagaagaggtctcccctcgatgctatagtagctgatggaactgccgagtatcgaaggacaggagacagt

SEQ ID NO: 7360 - DNA, 3753 bp, synthetic construct
  misc_feature 1..3753: note = source = /note="Description of Artificial Sequence: Synthetic coding sequence"
  source 1..3753: mol_type = other DNA
atgtccactgagcgggactctgagaccacctttgacgaggacagtcagccaaacgacgaggtggttccatactcggatgacgaaactgaagacgaactggacgaccagggctctgctgtcgaaccggagcagaaccgtgtcaatagggaggctgaagaaaatagggaacctttccggaaggagtgcacctggcaagtgaaagcaaacgaccgaaagtaccacgaacagccccactttatgaacacgaagttcctctgtatcaaagaatccaagtatgcaaataacgccattaaaacttataagtataacgcttttacatttatcccgatgaatctcttcgagcagtttaaacgcgcagccaacttgtatttcctcgcgctgctaatactgcaggctgtgcctcagatatcaactctggcctggtacaccacgcttgtgccattgcttgtcgtcttgggagtgaccgcaattaaggatctcgtggacgacgtggcccgccataagatggacaaggagataaacaacagaacttgcgaagtcattaaggatggtcgattcaaggtcgcaaaatggaaggagatccaggtgggggatgtgatccggctgaagaaaaacgacttcgtcccagccgacattttgcttctgtcatcgtcagagcccaatagcctgtgctacgtggaaaccgccgaattggatggtgagaccaatctgaaattcaagatgtccttagagatcacagaccaatatctgcagcgtgaggacactctggctactttcgacggatttatcgagtgcgaggaacctaacaatcgactggacaagttcacaggaacactgttttggcgcaacaccagcttccccctggacgccgataagatacttttacgagggtgtgtgatccggaataccgatttctgccatgggctggtaatttttgcaggcgccgacactaagataatgaaaaattcaggaaaaactcggttcaaaaggactaagattgactatctgatgaattacatggtgtacacaatctttgtggtcctgatcctgctcagcgccggtttggccatcggccatgcctactgggaagcccaggtgggcaattcgtcttggtatctctacgacggcgaggatgataccccttcgtatcggggatttcttatattctggggttacatcattgtgctaaacacaatggttccaatctctttatacgtaagcgtcgaagtgatccgactggggcagtcccacttcattaactgggatctccaaatgtactacgcagaaaaagacactccagccaaggcgagaaccactactcttaacgaacagctgggccagatccattacatatttagtgataagacgggcactctgacccagaacatcatgactttcaagaagtgctgcattaacggtcagatttatggtgatcaccgcgacgcctctcagcacaatcacaataagatcgagcaggttgacttcagctggaacacctatgccgatggaaagctggctttctacgaccattatctgattgagcagatccaaagcggtaaagagcccgaggttcgacagtttttcttcctgctggcggtctgccacaccgtgatggtggaccggacagatggacaattgaactaccaagcagcatcgcccgatgaaggcgccctcgtcaatgctgcacggaactttggttttgcctttctggcgagaactcagaacacgattaccatctccgagctgggaacggagcgaacgtataacgtgcttgctatcctggacttcaacagcgatcgaaagcgcatgtcaattatcgtgcgtactcccgaagggaacataaagctttactgcaagggtgccgacaccgttatctacgagagactgcaccgaatgaatccaactaagcaggaaacacaggacgctttggatatatttgctaatgagaccctccggaccttatgcctttgttacaaggaaatcgaagaaaaggaatttactgagtggaacaagaagtttatggcagccagcgtggccagtactaacagagacgaggccctcgacaaagtgtacgaagaaattgagaaggaccttatccttcttggcgctacagctatcgaagacaaactgcaggatggcgttcctgaaaccatctccaagctggctaaggccgatataaagatttgggtgctgactggtgataaaaaggagactgcagagaacatcggattcgcgtgcgagctgctgacagaggatacaacaatctgttacggcgaagatataaactcccttcttcacgccaggatggaaaaccagaggaatcggggcggtgtgtacgccaagttcgctccccccgtccaggagagcttctttcccccaggtggaaatcgtgctctgattatcactgggagttggctgaacgagatcctgctggagaagaagactaagcggaacaagattctgaaattaaaatttcccaggaccgaggaagagcgccggatgcggacgcagtctaagcggcgactggaagcaaagaaggaacagaggcagaagaacttcgtggaccttgcttgtgaatgctccgcagtgatctgctgtcgagtgacaccaaagcagaaagcaatggtagtcgacctggtcaaaaggtacaagaaagccatcacattggctatcggggatggggctaatgacgtgaacatgattaagacagcccatatcggggtgggcatctcaggccaggagggaatgcaggctgtcatgtccagtgactatagtttcgcccagttcaggtacctgcagaggctgctgctcgttcacggcagatggtcttatatccgcatgtgcaagttccttagatatttcttttacaagaacttcgccttcacacttgtccacttttggtactcgttcttcaacggatactccgcccagaccgcgtacgaagattggtttataaccttgtacaatgtgctgtacacatctctgccggtactgctgatggggctgctggaccaagatgtgtcggataaactcagccttcggttccctggcctgtatatcgtcggacagcgggatttattatttaattataagcgtttcttcgtgtccctgctgcacggcgtgctgacctccatgatccttttttttatcccactgggcgcctacctgcagaccgttggccaggatggggaggccccctccgactaccaatcttttgctgtgacgatcgcttcagccctggtcataaccgtcaactttcagatcggtcttgacacctcttactggacatttgtgaatgctttttccatcttcggatctattgccctttactttggtatcatgtttgatttccacagcgccggaatccacgttctgttcccctccgcctttcagtttaccggaacagctagcaacgcactgagacagccttacatctggctgaccataattcttgccgttgccgtgtgcctgctccccgtagtcgctatcaggttcctctccatgaccatttggccctccgagtcggacaagattcaaaagcataggaaaaggctgaaggccgaggagcagtggcagagacgtcaacaggtgtttcgacggggcgtaagtacaaggcgcagtgcttacgctttctctcaccagcgcggttacgcggacttgatctcatctgggaggagcatcagaaaaaaacggtcacctctagatgccattgtagctgatgggacggcggagtacagacgcacaggagactcc

SEQ ID NO: 7361 - DNA, 3753 bp, synthetic construct
  misc_feature 1..3753: note = source = /note="Description of Artificial Sequence: Synthetic coding sequence"
  source 1..3753: mol_type = other DNA
atgagcacggaacgtgactccgaaacgacctttgatgaagattcgcagccaaacgatgaagtcgtcccatactcggatgatgaaaccgaggacgagctcgacgatcagggttcggcagtggagcccgaacagaaccgcgtgaacagggaagctgaggaaaacagagaaccctttcgcaaagaatgtacttggcaggttaaggcaaacgatagaaagtaccatgaacagcctcatttcatgaacacgaaatttctttgcattaaagaatctaagtacgcaaacaatgctatcaagacttacaagtacaacgcattcacctttatacccatgaacttgtttgaacagttcaaacgcgccgcaaatctgtactttctggcactgcttatactccaggctgtgcctcagatttcgaccctcgcttggtacaccaccctggtgcctcttcttgtggtcttgggcgtgaccgccataaaggacctggtcgatgatgtcgcaaggcataagatggataaggagatcaataaccgcacttgcgaagtcatcaaggacggtaggtttaaggtggcaaagtggaaggagatccaagtgggagacgtcatcagactgaagaagaatgactttgtgcctgccgatattcttctgctttcgtcctcagaaccaaatagcctttgctacgtggaaaccgcagaattggacggagaaactaacctgaaattcaaaatgtcgcttgaaatcaccgaccaatacctgcaacgggaagatactttggccacttttgacggatttatcgaatgtgaggaacctaacaaccggctggataagtttactggtaccctcttttggagaaacaccagctttccgctggatgcggacaaaattcttctgagaggctgcgtgataaggaacaccgacttttgtcatggtcttgtgatcttcgccggtgcagatactaagatcatgaaaaacagcggcaaaactagatttaagcgcacgaagattgattaccttatgaactacatggtctacacgatcttcgtggtgttgattctgctttcggcaggtctggcgattggacatgcatactgggaagcacaggtgggaaattcttcctggtacctgtacgatggggaggatgacactccatcctaccgcggcttccttatcttttggggttacataatcgtgttgaatactatggtgcctatctcactgtacgtgagcgttgaagttataagactggggcagtcccactttatcaactgggatctgcagatgtactacgctgagaaggatacgccagcaaaggcaagaaccaccactctgaacgaacagctcggacagattcactacattttctcagataagaccggaaccctgactcaaaacatcatgactttcaaaaagtgttgtattaacggccagatatacggagatcaccgtgatgcatcgcaacataaccataacaaaatcgaacaggtcgatttctcctggaacacttatgctgacggaaagctcgcattctacgaccactatctcattgaacagatacaatccggcaaggagcccgaggtccgacagttctttttcttgctcgcagtgtgccatactgtgatggtcgatagaactgatggacaactgaattatcaagccgccagccccgatgagggagcgttggtgaatgcagcacggaatttcggattcgccttcctcgcaagaactcagaataccattaccatttcggaacttgggaccgaaagaacctataatgtcctggccatactcgacttcaattccgacaggaagagaatgtccattattgtccggacgcccgagggaaacattaagctctactgtaagggagcggacaccgtgatttacgagcgactccatcggatgaatccaactaagcaggaaactcaagacgcactggatatcttcgccaacgaaaccctccgaactctgtgcctctgttataaggagatcgaagagaaggagttcaccgaatggaataagaagtttatggcggcttccgtcgcctcgactaacagagacgaagcgcttgacaaggtgtacgaagaaatagagaaggatttgatcctgctcggcgcaactgcaatcgaagataagctgcaagatggggtgccagagactatcagcaagctggccaaggccgacatcaaaatctgggtcctgactggggacaaaaaagagactgcagagaacataggatttgcatgcgaactgctcaccgaagatactacgatatgctacggcgaggacattaacagcctgctgcatgcgagaatggaaaatcaaagaaacaggggcggagtgtacgctaaattcgcacctcctgtgcaagaatcattctttccgccagggggcaatagagcgttgatcattactggatcttggctcaacgaaatcctgcttgagaaaaagactaaacggaacaagatccttaagctcaagtttccccgaacggaagaagagagacgcatgagaactcaatcgaaaagacgtcttgaagcgaagaaagagcagagacagaagaactttgtggacctggcttgtgaatgttcggcagtgatatgttgtcgcgtcacccccaaacagaaggctatggtcgtcgatcttgtgaagcggtacaaaaaggcaattactcttgccataggagatggcgcaaatgatgtcaatatgatcaagactgcacacatcggtgtgggaatatcaggtcaagaaggtatgcaggcagttatgtcatctgactactcgtttgcacaatttagatacctgcagcgacttctcctggtgcacggtcggtggagctacattcgcatgtgtaagtttcttcggtacttcttttacaagaacttcgcctttactctcgtgcatttttggtacagcttctttaacggctactcagcccaaaccgcatacgaagattggtttatcaccctgtacaacgtgctctatacgtcgcttcccgtccttctgatgggattgctggaccaagatgtctcggataaactttcgttgagatttcctggtctgtacattgtgggtcaacgtgatcttctctttaactacaagagatttttcgtgtccctccttcacggggtcctcacctccatgatattgttcttcatccctcttggggcgtatttgcagacggtgggtcaagacggcgaagcgccttccgattaccaatcatttgcggtgacgatagcctctgcacttgtcataaccgtgaattttcaaattggtcttgatacttcgtactggacctttgtcaatgcattctccatttttggaagcatcgccctttactttggaattatgtttgatttccattccgctggcatccatgtcctctttccaagcgcattccagtttaccggtactgcgagcaatgcactccgccagccatacatttggcttaccattatactggcagtggctgtttgtctgcttcctgtggtggcaatacgttttctttcgatgaccatctggccgtcggagtcagataagattcagaaacacaggaaacgtctgaaggcagaggaacagtggcagcggcggcaacaagtgttccgccggggagtgagcactcggcgctcggcatacgctttttcccatcaacgagggtatgcagatcttattagctccggacgaagcattaggaagaagcgctctcctctggacgcaattgtggcagacggaaccgctgaataccgccgcaccggggattcg

SEQ ID NO: 7362 - DNA, 3753 bp, synthetic construct
  misc_feature 1..3753: note = source = /note="Description of Artificial Sequence: Synthetic coding sequence"
  source 1..3753: mol_type = other DNA
atgagcacggagagagacagcgagactaccttcgatgaagatagccaacctaacgatgaggtggtgccttactcggatgacgagactgaagatgagcttgatgatcagggatcagccgtcgaaccggaacaaaatagagtgaacagagaagctgaagaaaaccgagagccttttagaaaagaatgtacttggcaagtgaaagcaaacgacaggaaataccacgaacagcctcatttcatgaacactaagtttctttgtattaaggagtctaagtacgcaaacaatgccattaagacgtacaagtacaacgcatttacttttatccctatgaatctctttgaacagttcaagagagcagccaatctctactttctcgctcttctgattttgcaagcggttccacaaatctcgactcttgcatggtacactaccttggtccctcttctggtcgtgctgggtgtgactgcaataaaggatctggtggacgatgtggcacggcataagatggataaggagataaacaacaggacttgcgaagtcatcaaggacgggagatttaaggtggcgaaatggaaggaaattcaggtgggtgatgtgatcaggttgaagaaaaacgacttcgtaccagctgacattctgctcctgtcgagctcggaacccaactcactgtgctacgtggaaaccgccgagctcgatggcgaaaccaaccttaagttcaagatgagcctggaaataactgatcaatacctgcagcgggaggacactctggcgaccttcgacgggtttatcgaatgcgaagaaccaaacaacagactggataagttcaccggtaccctgttctggagaaatacttcctttccgcttgacgccgataagatactgctgagaggctgcgtcattcggaatactgacttttgtcatggacttgtgatcttcgcaggagcagatactaagattatgaagaattcgggaaaaacgaggtttaagaggactaagattgattaccttatgaactacatggtgtacacgatattcgtggtgcttattctgctgtcggccggattggccatcggccatgcgtattgggaggcacaagtcggaaacagcagctggtacctgtacgacggagaagatgataccccatcctaccgcggatttcttatcttctggggatacattatcgtgcttaacaccatggtgccaatatcactgtatgtctcagtggaggtgatcagactcggacaatcccacttcattaactgggacctgcaaatgtactacgctgagaaggataccccagctaaggccagaactactactcttaatgagcagctggggcaaatccattacatcttttcagataagactgggactcttacccaaaacataatgacttttaagaagtgttgcatcaacggtcagatttatggtgaccacagagacgcctcacagcataaccacaacaagattgaacaagttgatttcagctggaacacgtacgcagacggcaaacttgcattctatgatcattacctgatagaacagattcaatccggcaaggagccagaagtgagacaattcttcttcctgctggccgtgtgtcatacggtcatggttgatcgaacggacgggcagctgaactatcaagcagcaagccccgacgaaggagcccttgtcaacgccgcacgcaacttcggttttgctttccttgcacgcactcagaacaccattaccatttctgagttgggaactgaaagaacttacaatgtgctggccattctggatttcaactccgatcgcaagcgtatgtccattatagtcaggacgccagagggtaatatcaaactttactgtaagggggccgataccgtgatttacgagagactccaccgcatgaatcccaccaaacaagaaactcaggatgccctggacatatttgcgaatgaaactctgagaactctttgtctctgctacaaagagatcgaggagaaggagttcacggagtggaacaagaagttcatggcggcaagcgtggcttcgaccaaccgagatgaagcccttgataaggtgtacgaagagattgagaaggatcttatcttgcttggtgcaacggcaattgaagataagctgcaagatggagtgcctgaaaccataagtaaacttgcaaaggcagacattaagatttgggtgcttaccggggataagaaggaaaccgcagagaatatcggctttgcttgcgagctccttaccgaagataccactatatgttacggagaggatatcaactctttgcttcatgctcggatggaaaatcaaagaaacaggggaggtgtgtacgcaaagtttgcaccaccagtccaggagtcgttttttcccccaggtggaaatcgtgctctgatcattactggatcgtggctgaatgaaatcctgctggagaaaaagacgaagcgaaacaagatccttaaactcaagtttcctcgtacggaagaggaacgtcggatgcggacgcaatccaagcggcggcttgaggcaaagaaggagcagcgtcagaagaattttgtggatctcgcctgtgaatgctcagcagtcatctgctgtcgggtgacccctaaacaaaaggccatggtcgtggaccttgtgaagagatacaagaaggccataaccctcgcaattggagatggtgccaatgatgtgaacatgattaagaccgcgcatattggcgtgggtatttcggggcaggagggtatgcaggcagttatgtctagtgactacagctttgcacaatttagatacctgcagaggctcctgttggtgcacgggcggtggtcgtacattcgcatgtgcaagtttctcagatactttttctacaagaacttcgcatttacccttgttcatttttggtactcattcttcaatggttactcggcacagaccgcctacgaggactggtttatcactctttacaacgtcctttacaccagcctccccgtgctgctgatgggactcttggaccaggacgtgtcggataaactcagcctcagatttcccggtctgtacatagtgggccaaagagatctgctgtttaactacaagaggttttttgtgtcactgctccatggcgtgctgacctcgatgattttgtttttcatacctctgggtgcgtacctgcagaccgtaggacaagacggagaagcaccatccgactaccagtcatttgcagtgaccatagcgagcgcgcttgtgatcaccgtcaattttcaaatcggtctggatacctcatactggacctttgtcaatgccttttcgatttttggatccattgcattgtactttgggataatgttcgatttccattcggcaggaatccatgtcctcttcccatccgcctttcaatttaccggcacggcatcaaatgcattgcggcaaccatatatctggcttaccattatcctcgcagtggctgtgtgtctgcttccagtcgtggcaatccgcttccttagcatgactatttggccttctgaaagcgacaagattcaaaagcataggaagaggttgaaagccgaggaacaatggcaacgtcgccagcaagtgttccgacgcggagtgagcacgagacgcagcgcatacgccttttcacatcaacggggatacgccgatttgatctcctccggacggtcgatcaggaagaagcgatccccactggatgcaattgtggccgacggcactgccgaataccgaaggaccggcgattcc

SEQ ID NO: 7363 - DNA, 3753 bp, synthetic construct
  misc_feature 1..3753: note = source = /note="Description of Artificial Sequence: Synthetic coding sequence"
  source 1..3753: mol_type = other DNA
atgtccactgagcgcgacagcgaaaccactttcgatgaggacagccaacctaacgacgaagtggtcccgtattcagatgacgagactgaggacgagctggatgaccagggatcagcagtggagcccgaacaaaaccgagtgaatagggaagccgaagaaaacagggagccattccgcaaggaatgcacctggcaggtcaaggctaacgaccgcaagtatcacgagcagccacactttatgaatacgaagtttctctgcatcaaggagtccaagtacgcgaacaacgccatcaagacctacaagtacaacgccttcaccttcattccgatgaatctgtttgaacagttcaagcgggcggccaacctttacttccttgctttgttgatcctgcaggctgtgccacaaatctcaacgctggcctggtataccactctggtgccgcttctggtggtgctgggtgtcactgcgattaaagatctcgtcgacgacgtcgcccggcacaagatggataaagaaatcaacaaccgcacttgtgaggtcattaaggacggaaggttcaaagtggcgaaatggaaagaaatccaggtcggggacgtgatccggctcaagaagaatgacttcgtgccagcggacattctcctgctgtcatcatcagaaccgaattcgctctgctacgtggagactgccgagctcgatggggagacgaatctgaagtttaagatgtcactcgaaatcaccgatcaatacctgcaacgcgaagatactctggctaccttcgacggcttcatcgagtgtgaagagcctaacaatcgcctggacaagttcactggaactcttttctggcggaacacgtccttcccgctggatgcagataagatcctcctcagagggtgcgtgatcaggaacaccgacttctgccacggcctcgtgatcttcgccggagccgataccaagatcatgaagaacagcggaaagaccagattcaagcggactaagatcgattacctgatgaattacatggtgtacactatcttcgtagtgctcatcctgctgtctgccggactggccatcggtcatgcgtactgggaagcccaggtcggcaactcctcgtggtacctgtacgacggggaggacgatactccttcgtaccgcggattcttgatcttctggggatacataatagtgcttaatactatggtgcctatctccctgtacgtttccgtcgaagtgatccggctgggccagtcccatttcatcaactgggacttgcaaatgtactacgccgagaaggacacgccggccaaggcacggactaccactctgaatgaacagcttggacaaatccattacatctttagcgataagactggaaccctgacccagaacatcatgacttttaagaaatgttgtatcaacggacagatctacggcgaccaccgcgacgcgtcccagcacaatcacaacaagattgaacaggtggatttctcgtggaatacctacgctgacggtaagctggccttttacgatcactacctcatcgagcagatccagtcgggcaaggagcctgaagtgagacagtttttcttcctgctggcagtctgtcacactgtcatggtggatcggactgatggccagttgaactaccaggcagcgtccccggatgaaggagccctcgtgaatgcggcccgcaactttgggttcgctttcttggcgagaacccagaatactatcacgatctcggaacttggcactgaacgtacttacaatgttctggccatccttgatttcaattcagacagaaagcggatgagcatcatcgtccgcaccccagaaggcaacatcaaactgtactgcaagggagcagatactgtgatctacgagcgcctgcacagaatgaacccgacgaagcaggagactcaagacgcgttggacattttcgctaatgagactctgagaaccctctgcctgtgctacaaagaaatcgaagaaaaggaatttactgagtggaacaagaagtttatggcggcatctgttgcgagcactaacagggacgaggctctcgacaaagtgtatgaggagattgagaaagatctgatcctcctgggcgccacggcaatcgaggacaaattgcaggacggagtgccggagactataagcaagctggccaaagccgacatcaagatctgggtcctgaccggcgacaagaaggagactgcggagaacatcgggtttgcgtgcgaactcttgaccgaggacaccaccatttgttacggcgaggatatcaacagcctgttgcacgcccgcatggaaaaccagcggaataggggaggagtttacgctaagttcgctcctccagtgcaggaatcgttcttcccgcctggaggaaaccgggcattgatcatcactggcagctggcttaacgaaatcctgctggaaaagaaaaccaaaagaaataagattttgaagctgaagttcccgaggaccgaagaggaacggcggatgcgcacccaaagcaagcgccgcctcgaggccaaaaaagaacaacggcagaagaatttcgtggacctggcctgtgaatgctccgccgttatctgttgcagggtcacccctaaacagaaggcgatggtcgtcgatctggtgaagcgctacaagaaggcaatcacgctcgctataggcgacggagctaacgacgtgaacatgatcaaaactgcacatatcggagtgggaatctccggacaagaaggcatgcaggccgtgatgtcatccgactacagcttcgcccagtttagatacttgcagagacttctcctggtccatggccgctggtcgtacatcagaatgtgtaaattcctgagatacttcttctacaagaacttcgcgtttaccctggtccacttctggtactcgtttttcaacggatactcggcgcagaccgcatacgaggactggttcatcactctgtacaacgtgttgtacaccagcctgccggtgctcctcatgggcctgcttgatcaagacgtgagcgataagttgtcacttagatttcctggcctgtacattgtgggacagcgggatctccttttcaactacaaaagattctttgtgtccttgctgcacggagtcctgacctcgatgatcctcttcttcatcccgctgggagcttacttgcagactgtgggacaagacggtgaagcgccgtccgactatcaatcgttcgccgtgaccatcgcaagcgccctggtgatcactgtgaatttccagatcggcctggatacttcctactggactttcgtcaacgcatttagcattttcggcagcatcgccctgtacttcggcatcatgttcgatttccacagcgcaggaatccatgtgcttttcccttccgctttccagtttaccgggaccgcatccaacgccctgcgccagccgtacatctggctcaccatcatcctcgcggtcgcggtgtgtctgctgccggtggtcgctatccgcttcttgtcgatgaccatctggcctagcgaatcggataagattcagaagcatcggaagagactgaaggctgaggaacagtggcaacgaaggcagcaggtctttagaaggggggtgagcacgaggagaagtgcctacgccttcagccaccagagaggatacgctgaccttatctcgtcaggtaggtcgatcagaaagaaacggtcgcctctggacgcgattgtggcggacggaaccgctgagtaccgccgcactggtgatagc

SEQ ID NO: 7364 - DNA, 3753 bp, synthetic construct
  misc_feature 1..3753: note = source = /note="Description of Artificial Sequence: Synthetic coding sequence"
  source 1..3753: mol_type = other DNA
atgtcgacggaacgtgattcggaaacgacgtttgatgaagattcgcaaccgaatgatgaagttgtaccgtattcggatgatgaaacggaagatgaactagatgatcaaggttcggcggtagaaccggaacaaaatcgagtaaatcgtgaagcggaagaaaatcgagaaccgtttcgaaaagaatgtacgtggcaagtaaaagcgaatgatcgaaaatatcatgaacaaccgcattttatgaatacgaaatttctatgtataaaagaatcgaaatatgcgaataatgcgataaaaacgtataaatataatgcgtttacgtttataccgatgaatttatttgaacaatttaaacgagcggcgaatctatattttttagcgttattaatattacaagcggtaccgcaaatatcgacgttagcgtggtatacgacgttagttccgttactagttgtactaggtgtaacggcgataaaagatttagtagatgatgtagcgcgtcataaaatggataaagaaataaataatcgtacgtgtgaagtaataaaagatggtcgttttaaagtagcgaaatggaaagaaatacaagtaggtgatgtaatacgtttaaaaaaaaatgattttgtaccggcggatatattattattatcgtcgtcggaaccgaattcgttatgttatgtagaaacggcggaattagatggtgaaacgaatttaaaatttaaaatgtcgttagaaataacggatcaatatctacaacgtgaagatacgttagcgacgtttgatggttttatagaatgtgaagaaccgaataatcgtctagataaatttacgggtacgttattttggcgtaatacgtcgtttccgctagatgcggataaaatactactacgtggttgtgttatacgtaatacggatttttgtcatggtttagtaatatttgcgggtgcggatacgaaaataatgaaaaattcgggtaaaacgcgttttaaacgaacgaaaatagattatctaatgaattatatggtatatacgatatttgttgttttaatactactatcggcgggtctagcgataggtcatgcgtattgggaagcgcaagtaggtaattcgtcgtggtatctatatgatggtgaagatgatacgccgtcgtatcgaggttttttaatattttggggttatataatagtattaaatacgatggttccgatatcgttatatgtatcggtagaagtaatacgtttaggtcaatcgcattttataaattgggatttacaaatgtattatgcggaaaaagatacgccggcgaaagcgcgtacgacgacgttaaatgaacaattaggtcaaatacattatatattttcggataaaacgggtacgctaacgcaaaatataatgacgtttaaaaaatgttgtataaatggtcaaatatatggtgatcatcgtgatgcgtcgcaacataatcataataaaatagaacaagtagatttttcgtggaatacgtatgcggatggtaaactagcgttttatgatcattatttaatagaacaaatacaatcgggtaaagaaccggaagtacgtcaatttttttttctattagcggtttgtcatacggtaatggttgatcgtacggatggtcaactaaattatcaagcggcgtcgccggatgaaggtgcgttagtaaatgcggcgcgaaattttggttttgcgtttttagcgcgtacgcaaaatacgataacgatatcggaattaggtacggaacgtacgtataatgtactagcgatactagattttaattcggatcgaaaacgtatgtcgataatagtacgtacgccggaaggtaatataaaattatattgtaaaggtgcggatacggttatatatgaacgattacatcgtatgaatccgacgaaacaagaaacgcaagatgcgttagatatatttgcgaatgaaacgttacgaacgctatgtctatgttataaagaaatagaagaaaaagaatttacggaatggaataaaaaatttatggcggcgtcggttgcgtcgacgaatcgtgatgaagcgctagataaagtttatgaagaaatagaaaaagatttaatattattaggtgcgacggcgatagaagataaactacaagatggtgttccggaaacgatatcgaaactagcgaaagcggatataaaaatatgggttttaacgggtgataaaaaagaaacggcggaaaatataggttttgcgtgtgaactattaacggaagatacgacgatatgttatggtgaagatataaattcgttattacatgcgcgtatggaaaatcaacgaaatcgtggtggtgtatatgcgaaatttgcgccgccggtacaagaatcgttttttccgccgggtggtaatcgtgcgctaataataacgggttcgtggttaaatgaaatactattagaaaaaaaaacgaaacgaaataaaatattaaaattaaaatttccgcgtacggaagaagaacgtcgaatgcgtacgcaatcgaaacgtcgtctagaagcgaaaaaagaacaacgacaaaaaaattttgtagatttagcgtgtgaatgttcggcggtaatatgttgtcgtgtaacgccgaaacaaaaagcgatggtagttgatctagtaaaacgttataaaaaagcgataacgttagcgataggtgatggtgcgaatgatgttaatatgataaaaacggcgcatataggtgtaggtatatcgggtcaagaaggtatgcaagcggtaatgtcgtcggattattcgtttgcgcaatttcgttatctacaacgtttactattagttcatggtcgatggtcgtatatacgtatgtgtaaatttttacgatattttttttataaaaattttgcgtttacgctagtacatttttggtattcgttttttaatggttattcggcgcaaacggcgtatgaagattggtttataacgctatataatgttctatatacgtcgttaccggtactattaatgggtttattagatcaagatgtatcggataaactatcgttacgatttccgggtctatatatagttggtcaacgtgatctattatttaattataaacgtttttttgtatcgctactacatggtgtactaacgtcgatgatactattttttataccgttaggtgcgtatttacaaacggttggtcaagatggtgaagcgccgtcggattatcaatcgtttgcggtaacgatagcgtcggcgctagttataacggtaaattttcaaataggtctagatacgtcgtattggacgtttgtaaatgcgttttcgatatttggttcgatagcgttatattttggtataatgtttgattttcattcggcgggtatacatgtactatttccgtcggcgtttcaatttacgggtacggcgtcgaatgcgctacgtcaaccgtatatatggctaacgataatattagcggttgcggtatgtctattaccggtagtagcgatacgttttttatcgatgacgatatggccgtcggaatcggataaaatacaaaaacatcgtaaacgattaaaagcggaagaacaatggcaacgacgtcaacaagtttttcgtcgtggtgtatcgacgcgtcgttcggcgtatgcgttttcgcatcaacgtggttatgcggatctaatatcgtcgggtcgttcgatacgtaaaaaacgatcgccgttagatgcgatagtagcggatggtacggcggaatatcgacgtacgggtgattcg

SEQ ID NO: 7365 - DNA, 3753 bp, synthetic construct
  misc_feature 1..3753: note = source = /note="Description of Artificial Sequence: Synthetic coding sequence"
  source 1..3753: mol_type = other DNA
atgtctactgaacgcgatagcgaaactaccttcgatgaggacagccaaccaaacgacgaggtcgtgccgtacagcgacgacgaaaccgaggatgaactcgatgaccaaggctcggccgttgaaccggaacagaaccgcgtcaacagagaggctgaggagaaccgggaaccattccgaaaagagtgcacctggcaagtgaaggcaaacgaccgcaagtaccacgagcaaccgcactttatgaatactaagttcctttgcatcaaagaatccaaatatgccaacaacgcaatcaagacgtacaaatacaatgcgttcacctttatcccaatgaatctgttcgaacaattcaagagggccgcgaatctgtacttcctcgctttgctgatcctgcaagcggtgccacagatctcaactctcgcctggtacactactctggtgccacttctggtggtgctcggggtgaccgcgatcaaggatctggtggacgacgtcgcccggcacaagatggacaaggagatcaacaaccggacctgcgaggttatcaaagacggcagatttaaggtggcgaagtggaaggagatccaggtcggcgatgttatccgcctcaagaaaaatgattttgtccctgcggacatcctgctgctgtcctcctcagaaccgaattcgctgtgctacgtggagacggcggaattggacggggaaaccaacttgaaattcaagatgtccctcgagatcaccgaccagtacctgcaaagagaagataccctggctacctttgatggattcatcgagtgcgaggaaccaaacaataggcttgataagtttaccggaaccctcttctggcggaacacttcgttccctctggatgcggataagatcttgctgcgggggtgtgtcatcaggaatacggacttttgccacggattggtcatttttgcaggggcagacaccaaaatcatgaagaactcaggaaagaccaggtttaagcgcactaaaatcgattacctgatgaattacatggtgtacactatcttcgttgtgctcattctcctcagtgctgggctcgcaatcggtcatgcctactgggaggcccaagtgggaaactcgagctggtacctctacgacggagaagatgacaccccgtcctaccggggttttctgatcttttggggctacatcatcgtcctgaacactatggttcctatctccctgtacgtgtcggttgaggtgatacgcctggggcagtcccatttcatcaactgggacctgcagatgtactacgctgagaaggacaccccggcgaaggcccgcactactactttgaacgagcaactgggacagattcactacattttctcagacaagaccggaactctcactcaaaacatcatgactttcaagaagtgttgcatcaatgggcagatttacggcgaccaccgcgacgcgtcccagcataatcataacaagatagagcaagtggacttcagctggaatacctacgcagacgggaaactggctttttacgaccattacctgatcgagcagatccaaagcggtaaagaaccggaggtgagacaattctttttcctgttggccgtgtgccacactgtcatggtcgatagaactgacggacaattgaattaccaggccgctagcccagacgaaggagcccttgtgaatgccgcgcggaactttggattcgctttcctcgcgagaacgcaaaacaccattaccatcagcgaactgggaactgagcggacctataacgtgctggccatcttggacttcaactccgaccgaaagcgcatgtccatcatcgtgaggacgcccgaaggaaacatcaagttgtactgcaagggagcggataccgtgatttacgagcgcctgcatcgcatgaatcccaccaaacaggaaacccaggatgcactggacatctttgctaatgaaaccctccggactttgtgcttgtgttacaaggaaatcgaagaaaaggagtttactgaatggaacaaaaagttcatggctgcgagcgtggcttcgactaacagagatgaggctcttgacaaggtctacgaggagatcgaaaaagatttgatcctgcttggggccaccgctatcgaggataagctgcaagacggggtcccagaaacgatctcaaaactggcgaaggcagacataaagatctgggtccttaccggggacaaaaaggagactgcggaaaacatcggattcgcatgtgagctgctgaccgaagatactaccatctgctacggagaggacatcaacagcctcctccacgcacgcatggaaaatcagcggaacagaggaggcgtgtacgcaaagttcgcgccgcccgtccaggagtcgttctttccgccgggcgggaatagggctctgatcattaccggaagctggctgaacgagattctgctggaaaagaaaaccaagcgcaacaagattctcaagctgaaatttccccggaccgaggaggaaagaagaatgcgcacgcagagcaagcggcggctcgaggcgaaaaaggagcagcggcagaaaaactttgtcgatctggcatgcgaatgctctgctgtgatctgttgtcgggtgactccgaagcagaaggccatggtcgtcgacctcgtgaagagatacaagaaagccatcactctggcaatcggggatggtgcgaacgacgtgaatatgattaagactgcccacatcggcgtgggcatttccggacaggagggtatgcaagctgtaatgtcatcggattactcatttgcacagttccgatacctgcagaggctgctgctggtgcacggacgatggtcgtatatccgcatgtgcaagtttttgagatacttcttctacaagaatttcgcattcactctcgtgcatttttggtacagcttcttcaacggatactcggctcagactgcatacgaggattggttcattaccctctacaatgtgctgtacacctcgctcccagtcctcctgatgggattgcttgatcaggacgtgtccgataaactctccctgcggtttccagggctctatatcgtgggccaacgggacctgctctttaactataagaggttcttcgtgtcgctcctccacggcgtgctgacttcaatgatcctgttcttcattccacttggagcctacctccagaccgtgggccaagatggcgaggccccatcggactaccagtcattcgcggtgaccatcgcgtccgcactggtgatcactgtgaacttccagatcggactggacacttcctactggacttttgtgaatgcgttttccatctttggttccatcgccctctatttcggaatcatgtttgactttcattcagccggaatccacgtgctgttcccctccgctttccagtttaccggtactgcctcgaatgcactccgacaaccgtacatctggctgaccatcattcttgctgtggcagtttgcctcctgcctgtggtcgcgatccgctttttgtctatgaccatttggccgtcagagtcggacaagattcaaaaacaccgcaagcgactgaaggcggaggaacagtggcagcggcggcaacaagtgttccggcgcggagtctccacgagacgctcagcatacgctttctcacaccagcgggggtacgccgaccttatcagctctggccgctcgatccgcaagaagcgctccccgctcgacgcaatagtggcagacgggaccgcagaataccggcggactggcgattca

SEQ ID NO: 7366 - DNA, 3753 bp, synthetic construct
  misc_feature 1..3753: note = source = /note="Description of Artificial Sequence: Synthetic coding sequence"
  source 1..3753: mol_type = other DNA
atgtctaccgaacgggattcggagactacctttgacgaggattcccaaccgaacgatgaagtcgtgccatacagcgacgatgagactgaggacgaactcgacgaccaaggatcagctgtagaaccggaacagaaccgtgtgaatagggaggcggaagaaaaccgcgagccattccgtaaagaatgcacttggcaggtgaaggcaaacgacagaaagtaccatgaacagccgcacttcatgaataccaagttcctttgcattaaggaatccaagtacgcaaacaatgccattaagacttacaagtataacgccttcactttcatcccgatgaatctgtttgaacagttcaaacgggccgccaatctttacttccttgctctgctgatcctgcaagcagtgccccaaatctccaccctggcgtggtacaccacccttgtgccacttctcgtggtcctgggcgtcactgcgattaaagacctcgtggatgacgtggccagacacaaaatggataaagaaatcaacaatcggacttgcgaggtgatcaaggacggacgattcaaggtggccaagtggaaggagatccaggttggggacgtgatccggttgaaaaagaatgacttcgtcccggccgatatacttctgttgtcatcctcggagcctaattcgctctgctacgtcgaaactgcggagctcgacggagaaactaatctcaagttcaagatgtcgctggagatcacggatcagtatctgcagagagaagatacgctggcaaccttcgacggattcatcgaatgtgaagaaccgaacaatcgcctggataagttcactggaactctcttctggcgcaacacttcgttcccgctggatgccgacaaaatactgcttcgggggtgtgtgatccgcaatactgatttctgccacggactcgtgatctttgcgggtgccgataccaagatcatgaaaaactccggcaagacccggttcaagcgcactaagattgactacttgatgaactacatggtttacaccatcttcgtggtgctcatcctgctcagcgccggactggccatcggtcacgcttactgggaagcccaagtgggcaactcgagctggtacctgtacgacggagaggacgacactccttcctaccgaggtttcctgatcttttggggctatatcatcgtcttgaacacgatggtgccaatctcgctctacgtgtccgtggaggtcattcgcttgggtcagagccacttcatcaactgggacttgcagatgtactacgccgaaaaagacacccctgcaaaggcaaggactactaccctgaacgaacaactcggtcaaatacactatatcttcagcgataagactggtaccctgacccagaatatcatgaccttcaaaaagtgctgtatcaacggacaaatttatggggaccacagagacgcttctcagcataaccataacaaaatcgagcaggtggatttttcatggaacacctacgcagacggaaagctggcattctacgaccattatctgatcgagcagatccaatccggtaaggaacccgaggtgcgccagttctttttcctgctcgcagtgtgccatactgtcatggtggatcgcactgatggacaattgaactaccaagcggcgtcccctgacgaaggcgcgctggtgaatgcggctcggaacttcggattcgcctttctggctagaactcaaaacaccattacgattagcgaactggggactgagcggacgtacaatgtgctcgcaatccttgactttaactcggaccggaagcgcatgtcgatcattgttcgcaccccagaggggaatattaagctgtactgcaagggcgctgataccgtgatctacgagaggctgcatagaatgaacccaaccaagcaggaaactcaagacgccctggacatcttcgcaaatgaaaccctgaggacgctgtgcctctgctacaaggagatcgaagagaaggagttcaccgaatggaacaaaaagttcatggccgcctcagtggcgtccactaatcgcgatgaagccctcgataaggtgtacgaggaaatcgaaaaagatctgatccttctcggtgccactgccatcgaggacaagctccaggacggagtgccagagactatcagcaagctggccaaggccgatattaagatctgggtcctcaccggagataagaaggaaactgctgagaacattggcttcgcctgcgagctgctcaccgaagataccaccatctgctacggcgaggacattaattcgctgctccacgcgagaatggaaaaccagcgcaaccggggaggcgtctacgccaagttcgctccaccagttcaggagtcgttcttccccccgggaggtaaccgggccctgatcatcacgggcagctggcttaatgagatcctgctcgagaaaaagactaagcgcaacaagatcctgaaactcaaattcccgcgcacggaggaagaacgcagaatgagaactcaatcgaaacgccgactggaagccaagaaggaacaacggcagaaaaacttcgtggacctggcctgcgagtgttccgcggtgatctgctgccgggtcaccccgaaacagaaggcgatggtggtcgatctggtgaagagatacaagaaggctatcactctcgcgatcggggacggcgccaacgatgtcaacatgatcaaaaccgcccatattggcgtcggaatctcaggccaagagggaatgcaggcggtgatgtcgtcagactactcctttgctcagttccgctacctgcagcggttgctcttggtccacggaaggtggtcctacatcagaatgtgtaaatttctgcggtacttcttttacaaaaattttgcgttcaccttggttcatttttggtactcgtttttcaatggatacagcgcacagaccgcgtacgaggattggttcatcacgctgtacaacgtcctgtacaccagccttcctgtgcttctgatgggattgctcgaccaagacgtgtccgacaaactcagtctccgcttccctggactgtacatcgtggggcaaagggacctcctgttcaactacaagaggttctttgtctcgctgctgcacggagtgctcacctcaatgatcctgtttttcatccccctgggagcctaccttcagaccgtgggacaggacggggaagcacctagcgattaccagtcgttcgcagtcaccatcgcgtcagctctggtgatcactgtgaacttccaaatcggactcgatacctcctactggacctttgtgaatgcctttagcatctttgggagcatcgcactgtattttggaatcatgttcgacttccattctgccggcatccacgtcctcttcccgtcggctttccagtttaccggaaccgcctccaacgcactgagacagccgtacatctggttgactatcatcctggctgtggcggtctgtctgttgccggtcgtcgccatcaggttcctctcaatgacgatctggccgtcagaatccgataaaatccagaagcaccgcaagcgcctgaaagcggaagaacagtggcagcggagacaacaggtattccggcgaggcgtgagcacccggcgctcggcatacgccttcagccaccagcggggatacgctgacctgatctcatcaggacggtccattcgcaagaagagaagtcccctggacgctattgtggcagacggcactgcggaataccgcaggaccggagactcg

SEQ ID NO: 7367 - DNA, 3753 bp, synthetic construct
  misc_feature 1..3753: note = source = /note="Description of Artificial Sequence: Synthetic coding sequence"
  source 1..3753: mol_type = other DNA
atgtctactgagcgggactcggagacgactttcgacgaagattcccagccaaacgatgaggtggtgccgtactccgatgacgaaactgaggatgaactcgacgaccaaggctcagccgttgaaccggaacaaaacagggtgaaccgcgaagccgaggagaacagagaacctttccgtaaggagtgcacttggcaggtgaaagcgaatgacagaaagtaccatgaacagcctcacttcatgaacacgaagttcctttgtatcaaggaatcaaagtacgctaataacgcgatcaagacgtacaagtacaacgccttcaccttcattccaatgaacctgttcgagcaattcaagcgggcagccaatctgtattttctcgcactgttgatcctgcaagctgtgccgcagatttccaccttggcgtggtacactactttggtgcccttgctcgtggtcctgggagtcaccgccattaaagacctcgtggacgacgtggcacgacacaaaatggataaggagatcaataatcggacgtgcgaggtgatcaaagacggtcgcttcaaggtggcgaagtggaaggaaatccaggtgggagacgtgatcagactgaagaagaatgatttcgtccctgccgatattcttctgctgtcaagctccgaacctaacagcctgtgctacgtggagactgctgagctggatggggaaaccaatttgaagttcaaaatgagcctggaaatcactgaccagtacctccaacgcgaggatacgctggccactttcgatggattcatcgagtgtgaagagccgaacaacaggctggacaagtttaccggaacgctgttctggagaaacacctcctttcccctggatgctgacaagatcttgctgcgcgggtgcgtgattcgcaacactgatttctgccatggcctcgtgattttcgcaggcgccgatactaaaatcatgaaaaactcaggaaagactcgcttcaagcgcaccaagatcgactaccttatgaactacatggtgtatactatcttcgtcgtgctgatcctgctgtcggctggccttgcaatcggccacgcctactgggaggcccaagtgggaaactcaagctggtacctttacgatggagaggacgataccccatcgtaccgcggcttcttgattttctggggatacattatcgtcctcaataccatggtgccgatctcgttgtacgtgtccgtggaagtcatccggcttggacagtcgcacttcattaactgggacctgcaaatgtactacgccgagaaagatacccctgcaaaggcccgcaccacgactttgaacgagcagctcggacaaatccattacattttcagcgacaagactggaactctcactcagaatatcatgaccttcaaaaagtgctgtatcaatggacaaatctacggagatcaccgcgacgcttcgcagcacaaccacaacaagatcgagcaggtcgatttttcttggaacacctacgccgacggtaagttggcgttctacgatcactatctgatcgaacagatccagtctgggaaggaaccagaggtgcggcagttcttttttctgttggcagtctgtcacaccgtgatggtcgacagaactgacggacagctgaactaccaagcggcatctccggacgagggggctttggtcaatgcagctcgtaatttcggtttcgccttccttgcccgcactcaaaacacgattactatctccgagctgggaacggagcgcacctacaatgtgctcgcaatcttggactttaactcggatcgaaagaggatgtcgatcattgtgcggaccccggaaggcaacatcaagctctactgcaaaggagccgacaccgtgatctacgaaagattgcataggatgaatcctaccaagcaggaaacccaggatgcattggacatcttcgctaacgagactctcagaaccctttgcctctgttataaggaaatcgaagaaaaggaatttaccgagtggaacaagaaattcatggccgcatccgtcgccagcactaaccgggatgaagccctggacaaggtgtacgaggagattgagaaggatttgatcttgctcggcgccactgccatagaagataagctccaggacggcgtcccggaaactatatcgaaactggcgaaagctgatatcaagatctgggtcctgacgggagacaaaaaggaaactgccgaaaacatcggattcgcgtgcgaattgctgactgaagataccactatctgctatggagaagatatcaactccctcctccatgcccggatggagaaccagaggaatcgcggcggagtttatgccaagttcgcgccgccggtgcaggagagctttttccctccaggagggaatcgtgcgctgattatcaccggcagctggctgaacgagatactgctcgaaaagaaaaccaagcgcaataagattctgaagctgaagttccccaggaccgaagaggaaaggcgcatgcgtacgcaatcgaagcggcggctggaagccaagaaggaacagcgccagaaaaacttcgtggacctggcatgcgagtgctcagcggtgatctgctgtagagtgaccccgaaacaaaaagcaatggtcgtggacctcgtgaagaggtacaaaaaagctatcacgcttgcgatcggcgacggagcaaatgatgtcaatatgatcaaaactgcgcacatcggcgtcggaatctctggacaggaagggatgcaggccgtcatgtcgtccgactattcgtttgcccaatttagatacttgcaacggctcctgctcgtgcatggccgctggtcctacatccgcatgtgcaaattcctgcggtacttcttctacaagaatttcgcattcactctggtgcacttttggtattcatttttcaacggatattccgcccagactgcctacgaagattggttcatcacgctgtacaacgtgctgtacactagcctccctgtgctgctcatggggctgctcgaccaggacgtcagcgataaactgtcgctgcgcttcccaggcctgtacatcgtgggccagcgggacctgctgttcaactacaaacgctttttcgtcagcctgctgcacggggtgctgacctcgatgatcctgttcttcatccccctgggagcttacctgcagactgttggacaggatggagaagcgccttcggactaccaatcgtttgctgtaactatcgcgtccgccctggtgatcactgtgaacttccagatcgggctggacacctcctactggacttttgtgaacgcattctcgatctttggatccatcgccctttacttcggcattatgttcgacttccactcagccggcatccacgtgctgtttcctagcgcctttcaattcactggcaccgcatccaatgcgctgcggcaaccgtacatctggcttaccatcatcctggcggtcgcggtgtgtctgctgcctgtcgttgccatccgcttcctttctatgactatttggccatccgaatcagataagatccagaagcatcggaaacggctgaaggccgaagaacagtggcagcgcaggcaacaggtatttagacggggcgtctcgactaggagatccgcttacgcgtttagccaccagcggggatacgcggacctgatcagctccggtcggtccattcggaaaaagcgctcgcctcttgacgccatcgtggcagacggaactgcagagtaccggcggactggagacagc

SEQ ID NO: 7368 - DNA, 3753 bp, synthetic construct
  misc_feature 1..3753: note = source = /note="Description of Artificial Sequence: Synthetic coding sequence"
  source 1..3753: mol_type = other DNA
atgtcgaccgaaagagactctgaaaccacgtttgacgaggattctcagccaaacgatgaggtcgtgccctacagcgatgatgaaaccgaggacgagttggatgatcagggaagtgcagtcgagcctgaacaaaacagagtcaacagagaggcagaagagaaccgggaaccctttcgtaaggagtgtacttggcaggtgaaagcaaatgatcgtaagtaccatgagcaacctcatttcatgaacaccaagtttctttgcattaaggaaagcaagtacgctaacaacgcaattaagacttacaagtacaatgcattcacctttatccccatgaatcttttcgagcagtttaaacgcgctgcaaatctgtactttcttgcactgttgatcctgcaagcagtgccccaaatttcaacccttgcatggtacaccacgctggtgcctctccttgtcgtgcttggtgtgacggcgattaaagatctcgtcgacgacgtggccagacacaaaatggataaggaaatcaacaacaggacctgcgaagtgattaaggatggtagattcaaggtggcaaagtggaaggaaattcaagtcggtgatgtgatacgcctgaagaagaacgacttcgtgcccgcagatatcctgctgctctcttcgtcagagccaaacagcctttgttatgtggaaactgctgagctggacggagaaactaatctgaagttcaagatgtcccttgagataaccgaccagtacctccaacgggaagatacccttgcaacgttcgacggtttcatcgaatgtgaggaacctaataacagacttgacaagtttacgggcaccttgttctggaggaacacctcctttccactcgatgcagataagattctgctccgtggatgtgtgatacggaataccgatttctgtcatggactggtgatattcgcaggcgcagataccaagattatgaagaatagcggaaagactcggttcaagcgaaccaaaatcgattacctcatgaactacatggtctacaccatttttgtcgtgcttatccttctctcggccgggctggccattgggcacgcatactgggaggcccaagttggtaactcgtcatggtacctctacgatggagaggacgacaccccaagctacagaggctttctgatcttttgggggtacattatcgtgctgaacactatggtgcctatctccctgtacgtcagcgtcgaagtgattcggctcggacagtcccatttcataaactgggatctgcagatgtactatgcagaaaaggataccccggcaaaggctcgaaccactactcttaatgaacaacttggccagatccattacattttctcagacaagactggaactctcacccagaatatcatgactttcaagaaatgctgcattaatggccagatttacggcgaccatcgggatgcatcacaacataatcataacaagattgagcaagtggatttttcatggaacacttacgcggatggaaaacttgcattctacgatcattaccttattgaacagattcaatccggaaaggagccagaagtgcggcaattctttttcttgcttgccgtctgtcacaccgtcatggtggatcgcactgacgggcaactgaattatcaagctgcatcgccagatgaaggagcgctcgtgaatgccgcacgaaactttggatttgcttttctggcacgaacccaaaatacgattactatatcagaactcgggaccgaaagaacctacaatgtcctggcaatcttggatttcaattcggacagaaagcgaatgtccattatagtgcgcacccctgaggggaatatcaagctgtactgtaaaggagcggataccgtcatatacgaaagacttcataggatgaatccaactaaacaggaaacccaagacgcactggacatctttgcgaacgaaactctgagaactctttgtctttgttataaggaaattgaagagaaggaatttactgaatggaataagaagtttatggcagcctccgtcgcatcaactaatcgagacgaagccctggataaagtgtacgaagagattgaaaaggatcttattctgctgggagcgactgcaattgaggacaagctgcaagatggagtcccagaaactattagcaaactcgctaaagcagatatcaagatctgggtcctcactggtgataagaaggaaaccgcagagaatataggttttgcatgcgagctgcttactgaggacactaccatttgttacggcgaggacataaactcactgctgcacgctcgcatggaaaaccaacgtaacagaggtggtgtgtacgcgaagtttgcaccccctgtgcaggaatcgtttttcccaccggggggaaatcgggccttgataatcactggctcgtggctcaacgaaatccttttggagaaaaagaccaaacgtaacaagattttgaaacttaagttcccaagaaccgaagaagagcgtagaatgcgaactcagtcgaagcgaaggctggaggccaaaaaagagcagcggcaaaagaactttgtggacctcgcttgcgagtgtagcgcagttatttgttgtcgtgtgacccctaaacagaaggcaatggtcgtggatcttgtgaagcgatataagaaggcaatcactctcgcaataggcgatggcgcaaatgatgtgaacatgataaagaccgcacacattggagttggaatttcgggacaggaagggatgcaggcagtgatgtccagcgactattcgtttgcgcaattccggtacctccagcggctgctgcttgtgcacggtagatggtcgtacattagaatgtgtaagttccttcggtacttcttttacaagaattttgcgtttaccctggtgcacttttggtatagcttctttaacggatactcagctcaaaccgcgtacgaagattggttcatcaccctctataatgtgttgtatacctccctccccgtgcttcttatgggactgctggaccaggacgttagcgataagctcagcctgcgtttccccggcctgtacatcgttggtcagagagatctcctctttaactacaaacggtttttcgtctcgctcttgcacggagtgctcacgtcgatgattctgttcttcatccctcttggagcgtaccttcaaaccgtcggacaggatggcgaggcaccttcggattaccagtcgtttgcagtcaccattgcatcggcacttgtgatcaccgtcaacttccaaatcggtctggacacttcatactggacctttgtcaacgctttttctatattcggttcaatcgccctgtacttcggaatcatgtttgactttcattcggcagggattcacgtgcttttcccctcggcctttcagttcactggaaccgcaagcaacgcattgcggcagccctacatctggcttaccattatccttgcggtggctgtgtgtctgctcccagtggttgccatccggtttttgtccatgaccatttggccatccgaatctgataagattcagaagcatcgcaagcgcctcaaggcagaagaacagtggcaaagacgccagcaggtgtttcgcaggggagtgtccactcgaaggtcagcttacgcattctcgcatcagcgcggctatgctgatcttatcagctcagggcgttccattaggaagaagcgctccccgctggatgcgatagtggcagatggaactgcagagtaccgtaggaccggtgatagc

SEQ ID NO: 7369 - DNA, 3753 bp, synthetic construct
  misc_feature 1..3753: note = source = /note="Description of Artificial Sequence: Synthetic coding sequence"
  source 1..3753: mol_type = other DNA
atgagcaccgaacgcgatagcgaaaccacgttcgatgaggactcacagcccaatgatgaagtcgtgccatactccgatgacgagactgaagatgaacttgatgaccaaggttccgccgtcgaaccagaacagaaccgggtcaatagagaagcagaagaaaatagggaaccttttcggaaagaatgtacttggcaggtgaaggcgaacgaccgcaagtaccacgaacaacctcactttatgaacactaagttcctctgcattaaagaaagcaagtacgcaaataacgccattaagacctacaagtataacgcatttactttcatcccaatgaatctgtttgaacagtttaagcgagccgcgaatctttactttctggcgcttctgattctgcaagccgtgccccagatcagcactctggcgtggtacaccactcttgtccccctgcttgtcgtcctgggcgtgacggctataaaggatctcgtggatgatgtcgcgagacacaaaatggacaaggagattaacaatcgcacctgcgaggtcatcaaggatggacgattcaaggttgcaaagtggaaagaaattcaggtcggtgatgtcattcgcctcaaaaagaacgactttgtgccagccgacatcctccttctttcaagctcggagcctaactctctttgctacgtggagacggctgaactcgatggagaaaccaatctgaaattcaaaatgtctcttgagattactgatcaataccttcagcgcgaagatacgcttgcaacctttgatggatttatcgagtgcgaggagcctaacaatcgcctggataagtttactggaaccctgttttggcggaacacttcctttccactcgacgcagacaaaattcttctcagagggtgtgtcattagaaacactgatttttgccatggcctggtcatttttgcaggtgcagataccaagattatgaaaaactcaggaaagactcgattcaagagaactaagatcgactaccttatgaactacatggtgtacactatctttgtcgttcttattctgctttcagctggtctggccattggacatgcatactgggaagcgcaagtgggaaattcgtcgtggtacctttacgacggagaggacgatacgccttcatacagaggtttccttatcttttggggatacatcatcgtgttgaatacgatggtgccaatttctctgtatgtttcggtggaagtgatccggctgggacagtcgcactttatcaactgggacctccaaatgtactatgccgagaaggatactcctgcaaaggctagaaccaccactctgaacgagcagttgggccagattcattacatcttttcagataaaactgggacccttactcaaaacattatgacctttaagaagtgctgtattaacggtcagatctacggcgatcacagagatgcgagccagcataatcataacaaaatcgaacaggtggacttctcatggaatacgtacgcagacggcaagttggcgttttacgatcactacttgatcgagcaaatccagagcggaaaagagccggaagtgaggcagtttttctttcttcttgcagtctgtcacaccgtgatggtggaccggacggacggacaactgaattatcaggcggcatcccctgatgagggagcgctggttaacgcagctagaaactttggctttgcctttttggcaaggacccagaataccataactattagcgaactcggtaccgaaaggacctacaatgtcctggccatactggatttcaattccgatagaaagagaatgtcaatcattgtccgcactcctgaagggaacatcaaactgtactgtaaaggagctgatactgtcatttacgaaagattgcataggatgaacccaactaagcaggagactcaggatgccttggatatctttgcgaatgaaaccttgcgtaccctgtgtttgtgctacaaagaaattgaagaaaaggagtttaccgagtggaataagaaattcatggcggcgtcagtggcatccaccaaccgcgatgaggcgcttgataaagtgtacgaagaaattgaaaaggatctgatacttctcggagcaactgcaatcgaggacaagctgcaagacggagtgccggagactataagcaagctcgcgaaggccgacatcaagatctgggtgctcactggagacaaaaaagaaaccgcagaaaacatcggctttgcctgtgaacttctgaccgaagatactactatttgttacggagaagatatcaactcgctgctgcatgccagaatggaaaaccaacgcaaccggggtggtgtgtacgcaaagtttgcccctcctgtgcaagaatcgttttttccaccaggaggcaatagggcactcatcatcactggttcatggctgaacgaaattctcttggaaaagaaaaccaagaggaataagatactgaaacttaagttccctagaactgaagaggaacggagaatgagaacgcagagcaagaggcgcctggaggcaaaaaaggagcaaagacaaaagaacttcgtggatcttgcctgtgagtgctcggcagtgatttgctgccgggtgacgcccaagcaaaaggccatggtcgttgatcttgtgaagagatacaagaaggcaatcacccttgcaattggagatggtgctaacgacgtgaacatgattaagactgcgcatatcggagtcggaatttcgggtcaagaggggatgcaggccgtgatgtcgtcggactactccttcgcccagtttcgttacctccagagactgctgcttgtgcacgggaggtggtcatatatcagaatgtgcaaattcttgagatactttttctacaagaacttcgcatttactctcgtccacttttggtacagcttctttaacggctactccgcccaaacggcatacgaagattggttcataactttgtacaatgtgctttacacgagtctgccagtgctcctgatggggctgctggatcaagatgtgtccgacaagttgagcctgagattccctggactgtatattgtgggtcagcgggacctgctgttcaattacaaaagatttttcgtgagccttctccacggggtgcttactagcatgattctctttttcatccctctcggtgcatacctccagactgtgggtcaggacggggaagcaccctcggattaccagagctttgcagtcaccatcgcatcagctttggtcattaccgtgaattttcagattggacttgatacctcctactggacttttgtcaatgcgttttcgattttcggttccattgcgctgtactttggaatcatgttcgatttccactcagcaggcattcacgtcctgtttccatccgcatttcagtttaccggaactgcttcaaatgccctgcgtcaaccatacatttggctcaccattattctggcagtggcagtgtgtctgctgcccgtggtggcaatacggtttctgtccatgaccatctggccatcagaatccgacaaaatacaaaagcacagaaagagactgaaggctgaagaacagtggcagagacgacagcaggtgtttcgccgtggtgtctcgacccgcaggagcgcttacgcatttagccatcaacgaggttacgcagacctgatatcgtccggcagatctatcagaaagaagcggtcccctctcgatgcgatagtggccgatgggaccgccgaatacagacgtaccggagattct

SEQ ID NO: 7370 - DNA, 3753 bp, synthetic construct
  misc_feature 1..3753: note = source = /note="Description of Artificial Sequence: Synthetic coding sequence"
  source 1..3753: mol_type = other DNA
atgtctactgagagagatagtgagaccacatttgacgaggattcacagcctaacgacgaggttgtaccttacagcgacgatgaaaccgaagatgaactggacgaccagggatccgcagtggaacctgaacagaacagagtgaacagggaggcagaggaaaacagagagccttttaggaaggaatgcacgtggcaggttaaagccaacgacaggaagtatcatgaacaaccgcatttcatgaataccaaattcctgtgtattaaagaaagtaagtacgccaataacgcgattaagacttacaaatataatgccttcactttcatccccatgaacctgttcgagcaatttaaaagggcagcgaacctgtatttcctggctctcctcattcttcaagcggtgccacaaatatcaactttggcttggtacaccacgctggtcccactgctggtggtccttggcgttactgccatcaaagatctcgtcgacgatgtcgccagacacaaaatggacaaggaaattaacaataggacatgtgaggtcataaaggacggcaggtttaaagtagctaagtggaaggaaattcaggttggtgacgtgataaggctcaagaagaacgacttcgtgccagctgacatcttgctgttgagctcttctgagcccaatagcctctgttatgttgagaccgcggagcttgacggtgagaccaatttgaagttcaaaatgtccctcgaaattaccgaccagtacctgcagcgcgaagatactctcgcaacattcgacggattcattgagtgtgaagaacccaataaccgcctcgataagttcactggtaccctcttctggaggaacacatcatttcccctggacgctgacaagattttgctgcgcggttgcgtgatcagaaacaccgacttctgtcacggcctggtgatcttcgccggcgcggacacaaagataatgaagaactccggcaaaactcgctttaaaaggaccaagattgactaccttatgaactatatggtctacaccatatttgtggttctcattctgttgtcagcaggtcttgctatcggtcacgcctattgggaggctcaagtgggcaattcttcttggtatctgtacgacggcgaggatgacacaccttcctacaggggctttttgattttttggggatacatcattgtgctcaataccatggtgccgatctcactgtacgtaagcgttgaggttatcaggttgggacagtctcattttatcaactgggacctgcagatgtattatgccgaaaaggacacacccgctaaggctcgcaccaccacattgaacgaacagctgggacaaattcactacatcttctcagataagacaggtaccttgacgcagaatatcatgaccttcaagaagtgctgtattaacggccagatctatggtgaccaccgcgatgccagtcagcacaaccataacaaaattgaacaagtagacttttcttggaacacatatgccgatggcaaattggccttctacgatcattacttgatagagcagatacagtcaggtaaagagccagaagtccgccagtttttcttcctgttggcagtatgtcacacggtgatggttgatagaacagacggacagcttaactatcaagcagcgtcccccgatgaaggtgcattggttaatgcagctagaaatttcggttttgcttttttggccagaacccagaatacaatcacgatctccgagctgggtacggagaggacatacaacgtcctcgctattttggactttaacagtgatcgcaagcgcatgagcatcatcgtgagaacgcctgaaggtaacatcaagctgtactgtaaaggagcggatactgtgatatacgagaggcttcacagaatgaatcccaccaagcaggagacccaggatgccctcgatatttttgcgaacgaaacgctgagaaccctgtgtctttgctacaaggagatagaggaaaaggaattcacggagtggaacaaaaagttcatggctgcgagtgtggcgtctacgaatcgcgatgaggcactcgataaagtttacgaagagatcgagaaagacctgatccttcttggagctaccgctatcgaagataaactccaggacggagtgcccgaaactatatctaaactcgccaaagccgatatcaagatctgggtactgactggcgataagaaagagaccgctgaaaatatcggtttcgcctgcgagttgttgactgaagataccactatttgttacggagaggatatcaattctctcttgcatgctaggatggaaaatcagcgcaataggggcggtgtgtatgcaaaatttgcgcctccagtacaggaatctttttttcccccaggcggcaatagggcgctcatcatcaccggcagttggctgaacgagatcttgcttgagaaaaagactaaaaggaacaagatcctgaagctgaagttcccgagaactgaggaggaacgccgcatgaggactcagtccaagcgcaggttggaagctaaaaaggaacagaggcaaaagaacttcgtagatctggcctgcgagtgttctgctgtgatctgttgccgcgtcactcctaagcagaaggccatggtagttgacctggtcaagaggtataaaaaagctattacactggccattggtgatggtgcgaacgacgttaatatgattaagaccgctcacatcggcgtcggcatatctggtcaagaaggcatgcaagccgtcatgtcttccgactacagctttgcacagttcagataccttcagcgcctgctgctggtgcacggcaggtggagctatataagaatgtgcaagttcctgcgctatttcttctataaaaacttcgcgtttacgctggtccacttctggtactccttcttcaatggatactctgctcagactgcatacgaagactggttcataaccctctacaacgtgttgtacacatcactcccagtgctcctgatgggactccttgatcaggacgtaagtgacaagctgtcactgagattcccaggtctctacatcgtcggacagagggaccttctctttaactataaaaggttcttcgtttctctgcttcacggagtcctcacttccatgatccttttcttcataccactcggtgcctacctgcagaccgttggacaggacggcgaagcaccctccgattatcagagttttgctgtcacaatcgcgtccgccctcgtgattacagttaacttccaaattggattggacaccagttactggaccttcgtaaacgcctttagcatctttggctccattgctctttactttggtatcatgttcgacttccacagcgctggaatacacgtactgttccctagtgcttttcaatttacaggtacggcatcaaatgcattgcgccagccgtacatctggttgactatcatcttggccgtcgccgtctgcctgcttccggttgttgccattcgcttcttgagcatgacgatctggcccagcgaaagcgacaaaatacagaaacatagaaagagactcaaggccgaagaacaatggcaaagaaggcagcaggtgttcaggagaggcgtgtcaactcgccgcagtgcctacgccttttcccaccagcgcggctacgccgatctgatctcatccggtagatctattagaaagaaaaggagtccattggacgcaatagttgccgacggcacagctgagtatcgccgcaccggtgacagc

SEQ ID NO: 7371 - DNA, 3753 bp, synthetic construct
  misc_feature 1..3753: note = source = /note="Description of Artificial Sequence: Synthetic coding sequence"
  source 1..3753: mol_type = other DNA
atgtcgacggaacgcgactctgaaactaccttcgacgaggacagccagcccaacgacgaggtcgtgccatactctgatgacgagacggaggacgagctagatgaccaaggatccgcagtggagccagaacagaaccgtgtgaatagagaagccgaggagaaccgagagccattccgcaaagagtgcacttggcaagtgaaagcgaacgaccgtaaatatcatgaacagcctcattttatgaataccaagttcttgtgtattaaagagtcgaagtacgccaataatgcaatcaagacttacaagtacaacgcattcacatttattcctatgaatctctttgagcagtttaaaagggccgccaatctctatttccttgcgttgcttattttacaagctgttcctcagatctctaccctcgcgtggtacaccacgcttgttccacttttggtggtgctgggcgtgaccgccatcaaagacctggtcgacgacgtcgcacgtcataagatggataaggaaatcaacaacaggacatgcgaagttatcaaagatggacggtttaaggttgctaagtggaaggagattcaagttggggacgtgatccgcctcaaaaagaacgactttgtaccagctgacattcttttactttcttctagtgaacccaatagtctttgctacgtggagacggcggagctagacggcgagacgaacctgaaattcaaaatgtcactcgaaatcacggatcagtacttgcagcgcgaagacacacttgcaaccttcgacggcttcattgaatgtgaggaaccaaataacagactggacaagtttaccggcacgctcttctggcgcaacacatccttccctctagatgccgacaagatactcctgaggggctgcgttatccgcaatacggatttttgtcacggacttgtgattttcgctggtgcggacaccaagatcatgaagaatagcggtaaaactcgcttcaaacgtactaagatcgattatctaatgaattacatggtgtataccatattcgttgtccttatcctgctgagtgccggactggccattggacacgcttattgggaagctcaggttggcaattcctcatggtatctttacgatggagaagatgatacgccgtcgtaccgtggctttcttattttttggggctacataattgtgttgaataccatggtccctatctctttgtacgtctcagttgaggtaatcagacttggtcaatcgcacttcatcaattgggatctgcaaatgtactacgcggagaaggacactccggcaaaggccagaacgacgactctcaatgaacagctcggccaaatacactacatcttctctgataagactggtacgctgacccagaatatcatgactttcaagaagtgttgcattaacggtcagatctatggggatcatagggacgccagccagcataatcataataaaattgaacaggttgacttttcctggaatacttacgccgatggtaaactagcattttacgatcattacctgattgagcagatccagtccggaaaggaaccagaagtgcgccagttctttttcttacttgcagtctgccatacggtaatggtagatcggaccgatggtcagttgaactaccaggcagccagcccggacgaaggagctctcgttaacgctgccagaaattttggcttcgcttttctagcacgtacacagaacacgattactatttctgaattggggacggagcgcacctacaacgtgctcgccatccttgattttaactcggaccgtaaacgtatgtcaataatagtccgaaccccagaggggaacattaagctttactgtaagggggcagatacagtcatctacgaacgcttgcaccgtatgaatcccacaaagcaggagacgcaggatgccttagatatttttgccaatgaaacgctgcgaactctgtgcttgtgttacaaggaaattgaagaaaaggagttcaccgaatggaacaaaaagttcatggccgccagcgtagcctcgaccaatagggacgaggctttagataaggtttatgaagagatcgaaaaggacttaatcctgttgggcgcgaccgctatcgaggacaaactccaggatggcgtgcctgagactataagcaagctcgctaaggcagacattaagatttgggtccttactggggacaagaaggagaccgctgagaacattgggtttgcttgcgagctgcttacagaagatactacgatttgttatggcgaggacatcaactccttgctacatgctagaatggagaaccaacgcaatcgagggggtgtctacgcaaagtttgcgccccccgtgcaagagagtttctttccacctggtggtaatcgagcgttgatcatcaccggaagttggttgaatgaaattcttcttgagaagaagacgaagcggaataagatccttaaactaaaattcccgcggactgaggaggagcggcgcatgcgcacccagtccaaacgacgattagaagcaaagaaagagcagcggcagaagaatttcgtagatctcgcctgcgaatgctccgccgtgatctgttgccgcgtcacgcctaaacaaaaggcaatggtggtagatttggttaagcgttacaagaaagccatcacgctcgctattggtgacggtgcaaatgacgtaaacatgatcaagaccgctcatatcggcgtcggtatttccggtcaagaagggatgcaggcagtcatgtctagcgattacagctttgcccagttccgatatttgcagcgtcttctcttggtgcatggtagatggtcctatatccgcatgtgcaaattccttcggtacttcttctataagaactttgcttttaccctcgtgcacttttggtactccttcttcaacggctactctgcacagaccgcttatgaggactggtttattaccctatacaacgtgttgtacacctctctcccagtactgttaatgggcttactcgaccaggacgtttctgacaagttaagcctccgattccccggcttgtacattgtaggtcagcgtgatctgctgttcaattataaacgattctttgtgagtttgctgcacggggtactcacgtcgatgattctattttttattccattgggcgcgtacctccagactgtagggcaagacggagaagctccaagcgattatcaatcattcgccgtcacaatcgcctcagctctcgtcatcaccgtcaacttccaaatcggcctggatacaagctactggacattcgtcaacgctttttcgattttcggcagcatcgccctttatttcggcatcatgtttgacttccattccgcgggaattcatgtcctgttcccttccgcgtttcaatttacgggcaccgcctcgaacgccctgcggcagccgtatatttggctaacgataatacttgcagtagctgtttgcctattacctgttgtcgctatcagatttctttctatgaccatatggccctctgaatctgataagatacaaaagcaccgtaagcgccttaaggcagaggagcaatggcagcgccgccaacaggtttttcgaaggggtgtcagcacgaggagaagtgcttacgctttttctcaccagcgcgggtacgctgatctgattagcagtgggcggtccattcgaaagaagcggtcacctcttgatgcaatcgtcgccgacggtaccgctgaatatcgccgtaccggagattct

SEQ ID NO: 7372 - DNA, 3753 bp, synthetic construct
  misc_feature 1..3753: note = source = /note="Description of Artificial Sequence: Synthetic coding sequence"
  source 1..3753: mol_type = other DNA
atgtctaccgaacgagattcggagacaacttttgatgaagatagccagcccaacgacgaagtggtgccatactccgacgacgagaccgaggatgagttggacgaccagggttccgccgtcgagcccgagcagaatcgggtcaacagagaggctgaggagaacagggagccattccgcaaagaatgcacttggcaagtgaaggccaacgataggaagtaccatgagcagccacacttcatgaataccaagtttctttgtatcaaggagagcaaatatgcaaacaatgcaataaagacgtacaaatacaacgccttcacctttatacccatgaatctgtttgagcagtttaagagagccgctaacctgtactttctggctctcctgatcctgcaagcagttccccagatcagcacactggcctggtacactaccctggtgccactccttgtggtcctcggtgtaactgccataaaagatcttgtcgatgacgtggctcggcataagatggacaaagagattaataaccgtacttgcgaggtaatcaaagatggaaggtttaaagttgccaaatggaaagagattcaggtcggagacgttattagactcaagaagaacgattttgtgcccgcagatatattgctcctgagtagcagcgagccaaacagcctgtgctatgtggagaccgccgagctggatggagaaacgaaccttaagtttaaaatgtccctcgaaatcaccgaccagtacttgcagagggaagacacactggcaacctttgatggctttattgagtgcgaagagcctaacaaccgactggacaaattcacaggaacactgttttggaggaacacatccttccccctggatgcagataagattctgctgagaggttgcgtgatacgaaacaccgacttttgccatgggctcgtgatttttgcaggcgcagatactaagatcatgaaaaactcgggcaaaacgagatttaaaagaacaaaaattgattatcttatgaattacatggtttacaccatatttgtggtcctgatactgctctctgccgggctcgctatcgggcatgcttactgggaagctcaggtgggaaacagtagctggtatttgtacgacggtgaagacgacaccccttcttacagggggttcttaattttctgggggtatatcatcgtgctgaacacaatggtcccaatcagtctctacgtcagcgtagaagtgattcggctgggacagtctcacttcatcaactgggatctgcagatgtattatgccgagaaggatacccctgccaaggcacgtaccacaaccctgaacgagcagttgggacagattcactatattttctcagataaaaccggtacattgactcaaaacataatgactttcaaaaagtgttgtattaacggtcagatttacggggatcatcgggacgcctcccagcataaccataacaaaatcgaacaagtggactttagttggaacacatacgcggacggcaaattggccttctacgatcattacttaatcgaacagattcaaagtggaaaggaacccgaggtcaggcagtttttcttccttctggccgtgtgtcacaccgtgatggtggatcgcactgacggccagctcaattaccaggctgcatctcccgatgagggagcactggtcaacgctgcccggaactttgggttcgcttttttggcccggacccagaacaccatcacgatttccgaactgggaaccgagcgtacttacaatgtgctcgccatcctggactttaacagtgacaggaagagaatgagcatcattgtccggacaccggaaggcaacattaagctctactgcaagggggcagacacggtgatatatgagcggctgcatcggatgaacccaaccaaacaggagacgcaagatgcactggacattttcgctaatgagaccctccgcacactttgcctgtgttataaagaaatcgaggagaaggaattcacagaatggaataaaaaatttatggccgcaagtgtggcctctaccaacagggatgaggcattggataaggtttacgaggaaatagaaaaagatctcatccttttaggcgcaacagcaatcgaggataagctacaggacggagtgccggaaactatttcaaagctcgctaaggcggatattaagatctgggtcctgacaggggacaaaaaagagacagcggagaacattgggttcgcttgcgaactcttaactgaggacactaccatctgttatggcgaggacattaattctttgttgcacgcacgaatggaaaaccaacggaacagaggcggcgtgtatgcaaagtttgctccccccgttcaggaatcgttttttccgccaggtggtaatagggccttgataatcaccgggtcatggttgaatgagatcctgctggaaaagaagacgaaacggaacaagatcctaaagcttaagtttcctaggacagaagaggagcggcggatgagaacacagtcaaagaggcggctggaagccaagaaagaacaacgtcagaagaatttcgtcgacctagcatgcgaatgctcagcggtgatctgttgccgagtaacccctaagcagaaggccatggtagtggaccttgtgaagagatacaagaaggccattaccctcgccatcggtgatggcgccaatgatgtgaacatgatcaagaccgctcacatcggcgtgggcattagcggtcaggaaggcatgcaggctgttatgtcctctgattattcctttgcacagttcaggtaccttcaacgactactgctcgtacacggacgttggtcgtatatccggatgtgcaagtttttgaggtactttttttacaagaactttgcattcacactggtccacttctggtacagcttcttcaatgggtattccgctcagacagcttatgaggactggtttataactttgtacaatgtcttgtacacgtccctcccggtgttgctcatgggtctgctggatcaagatgtgtccgataagctcagtctgcggttccctggcctatatattgtgggccaaagagatctgttgtttaactacaaaagattttttgtctctttactgcacggggtactcacctccatgatcttattcttcattccactgggcgcttatctccagacagtcgggcaagacggcgaagcccccagtgattatcagtcctttgccgtcacaattgccagtgctctggtaattactgtgaacttccagatcggcctcgacacatcttactggacattcgtgaatgccttctccatcttcgggtccatcgctctgtatttcggaattatgtttgactttcattcagcaggcattcatgtactgttcccctccgcctttcagttcacagggaccgcatctaacgcgttacggcagccttatatttggttaactataatactggcggtggccgtctgcctcctacccgtggtcgctattcggttcctttcgatgactatctggccaagcgaaagtgataagatccaaaaacatcgaaaaagactgaaagcagaagaacagtggcaacgccggcagcaggtgttccggcgcggggtttccacccgaaggtcagcttatgccttctctcaccagcgcgggtacgccgatctgatttcttccgggagatccatccgcaaaaagcggtcaccactagatgcaattgtggccgatggcactgcagagtacaggcgtaccggcgacagt

SEQ ID NO: 7373 - DNA, 3753 bp, synthetic construct
  misc_feature 1..3753: note = source = /note="Description of Artificial Sequence: Synthetic coding sequence"
  source 1..3753: mol_type = other DNA
atgtccacagagcgtgactccgagacaaccttcgacgaggacagccagccaaacgacgaggtggtgccttacagcgacgatgaaactgaggacgagctggatgatcagggctctgctgtggagccagagcagaaccgtgttaatcgcgaggctgaggagaacagagagcctttcaggaaagagtgtacctggcaggtaaaagccaacgaccgcaagtatcacgagcagccacacttcatgaacaccaagttcctttgtattaaagagtcaaagtacgctaataatgccatcaaaacatataaatataatgccttcacattcatccctatgaacctgttcgaacaattcaaacgcgccgctaatctgtacttcctggcactgcttattctgcaggccgttccacagattagcaccttggcttggtacaccaccctcgtgcctctgttggtggtgcttggtgtcaccgccatcaaagacctggtagacgacgtcgctaggcataagatggacaaggaaattaataataggacctgcgaggttatcaaggacggacgtttcaaggttgccaagtggaaagagatccaggtgggcgatgtcattcgcttgaagaagaacgatttcgtaccagccgacatactgctcttgagttctagtgagccaaactccctgtgttacgtcgagaccgccgagttggacggcgaaacaaacttgaagtttaagatgagtctggagattaccgatcagtaccttcagcgcgaggataccctggctacattcgatggatttatcgaatgcgaggaacccaacaatcgcctggataagttcacaggtactctgttttggagaaacacctctttccctctcgacgctgacaaaattctcctgagaggatgcgtgatccgcaataccgatttctgccacggtctggtcatcttcgcaggagccgacaccaagatcatgaaaaactcaggcaagaccaggttcaagaggactaagattgactacctgatgaactacatggtatacactattttcgtggtgctgatcctgctctccgctggcttggccataggtcacgcatactgggaggctcaggtgggaaattcttcttggtacctctacgacggcgaggatgacaccccctcttaccgcggcttcctcatcttctggggatatattattgtcctgaacaccatggtgcccatttcactgtacgtgtccgttgaagtgatcaggctgggtcaatctcatttcatcaactgggatttgcagatgtactacgctgagaaagatacacctgccaaagctcgcactacaaccctgaacgaacagttgggccaaatccactacatcttcagcgataagactggaactctgactcagaacattatgacattcaaaaagtgctgcattaacggtcagatttacggtgatcacagggatgcttcccagcacaatcataacaaaatcgaacaggtggatttctcttggaatacctatgccgacggcaagttggctttctatgaccactacctgattgaacagatccagagcggtaaggagcccgaggtgcgccaattctttttcttgcttgctgtctgccataccgtgatggttgaccgcaccgacggccaactgaactaccaagctgcttctcctgacgagggagccctggtcaacgctgctcgcaatttcggctttgctttcctggccagaacccagaacaccatcacaattagcgagcttggaaccgaacgtacttataacgtgctggcaatcctggatttcaattctgataggaagagaatgtctatcatagtgcgtactcccgagggtaacatcaagctctactgcaagggcgccgatacagtcatttacgaacgcctgcacagaatgaaccccaccaaacaagaaacccaagacgccctggacattttcgccaatgaaaccctccgcactctgtgtctgtgctacaaggaaattgaggagaaagaatttactgagtggaataaaaaattcatggctgctagcgttgcttcaactaatagggacgaggcactcgacaaggtgtacgaggagatcgagaaggacctgattctgctgggcgcaaccgcaatcgaagacaagcttcaggatggagttcccgagaccatttcaaagcttgccaaagctgacatcaaaatctgggtcctcaccggagacaagaaggagactgctgagaatataggcttcgcatgcgaactgctgaccgaggacactaccatctgctacggagaagacattaactcactcttgcacgcaaggatggagaaccagcgtaacagaggaggagtgtacgccaaattcgccccacctgtccaggaatctttcttcccccctggaggcaatcgcgctctgattattaccggatcctggctcaacgaaatcctgctggagaagaagactaaacgcaacaagatcctcaagcttaagttccctcgcaccgaggaagagaggcgtatgcgtactcagtcaaagcgtaggctggaggccaagaaggagcaacgccagaagaattttgtggacctcgcatgcgaatgttctgctgtgatctgttgtagggtgacaccaaagcagaaggccatggtggtagacttggtgaagaggtacaaaaaggcaatcactctcgctatcggcgatggcgccaacgacgttaacatgatcaagaccgctcacattggcgtgggaatcagtggccaggagggaatgcaggcagtgatgagctcagattattcctttgcccaattcagatacttgcaacgccttttgctggttcacggaaggtggtcctacatcaggatgtgtaagttcctgcgttacttcttttacaagaacttcgcatttacactggtccacttctggtatagtttcttcaacggttactcagctcagactgcttacgaagattggtttattactctgtacaacgtcctgtatacatctcttcccgtgttgctgatgggactgctggaccaggatgtgagcgataagttgagcctgcgtttccccggactctacattgtcggtcagagagaccttctgtttaactacaagagattttttgtctctctcctccatggagtgctgacctctatgatccttttcttcatccctcttggtgcctatctgcagactgtcggtcaggatggagaggcacctagtgactaccagtcttttgctgtcacaatcgcttcagctcttgtcatcacagtgaacttccagatcggattggacacaagttactggacattcgtaaatgccttctctatttttggttcaattgccctctatttcggcatcatgtttgattttcactcagccggtattcatgtgcttttccctagcgccttccaatttacaggcactgcttcaaacgccctgcgtcagccatatatttggctcaccatcatcctggctgtggccgtttgcctcttgccagtggtggcaatacgcttcttgtccatgaccatctggccctctgagtcagacaagatacaaaagcacaggaaacgcctgaaggctgaggagcagtggcaacgtagacaacaggtttttaggcgtggtgtgtccaccaggcgcagcgcttacgctttcagccatcagcgtggatatgctgaccttatcagttcaggtagatccatacgtaaaaaaagatctccccttgacgccatagtcgccgatggcacagctgagtacagacgcactggtgactcc

SEQ ID NO: 7374 - DNA, 3753 bp, synthetic construct
  misc_feature 1..3753: note = source = /note="Description of Artificial Sequence: Synthetic coding sequence"
  source 1..3753: mol_type = other DNA
atgtctactgagcgtgactcggagacgacgttcgatgaagacagccagccaaatgatgaggtcgttccctactccgatgacgagaccgaggacgagctcgacgatcaggggtcggcagtcgagcctgagcagaaccgcgtcaatcgcgaggctgaagaaaaccgtgagccttttcgtaaggagtgcacgtggcaagtgaaggccaacgatcgtaaataccacgagcagccgcacttcatgaacacgaagttcttgtgcatcaaggagtccaagtacgcaaacaatgctatcaaaacatataagtacaacgcgttcacgttcatccctatgaacctgttcgagcagttcaagcgagccgccaacctgtacttcctcgcattgcttattttgcaggccgtgcctcagatctccaccttggcctggtacaccacgctggtgccgctcctggtcgtcctgggtgtcacggctatcaaggatctcgtcgacgacgttgcccgccacaagatggacaaagagatcaacaaccgcacctgcgaggtcatcaaggatggacgcttcaaagtggcaaagtggaaggaaatacaggtcggtgacgtcatccgtttaaagaagaatgacttcgtgcctgctgatatccttctgttatcttcatccgagcctaactcgttgtgctacgttgagaccgccgaactggacggtgagacaaacctcaagtttaagatgtccctggaaattaccgatcaatacctccaacgagaggacacgctggccacatttgacggtttcatcgaatgtgaggagcctaacaaccgtctcgacaagttcactggtacgctgttttggaggaatacgtctttccctctggatgccgataagatcctgctacgtggctgtgtcatcaggaacaccgacttctgccacggcctagttatcttcgctggtgcagacacgaagattatgaagaacagcggcaagactcgctttaagcgtaccaagatcgactacctcatgaactatatggtgtacacgatattcgtcgtgctcattctgctgtccgccggcctcgcaattgggcatgcctactgggaagcccaggtcggtaactcgtcttggtacttatatgatggcgaggatgataccccctcgtaccgtggttttctcatcttctggggttacatcatcgtcctgaacacgatggtccccatctcactttacgtgagcgtggaggtcatccggctcggccagtcccatttcatcaactgggatctgcagatgtactatgcagaaaaggacactcccgccaaggccaggaccaccacattgaatgagcagctggggcagatacattatattttttctgacaagactggtactctcacccagaacattatgactttcaaaaagtgctgcatcaacgggcagatatacggagaccaccgtgacgcctcccagcataaccataataaaatcgaacaggttgatttttcctggaatacttacgccgatggaaagttggcgttctacgatcattacctgattgagcagattcagagcggcaaggagcctgaggtgagacagttcttcttcctcctggctgtatgtcacactgttatggttgaccgtacggatggacaattaaactatcaggccgcgtctcccgacgagggagccttggtcaacgccgctcgtaactttggttttgcgttcttagcccgtacacagaacacgatcacgattagcgagctcggtactgagcggacctataatgtcctcgccatcctcgacttcaactccgaccgcaagcggatgtctatcattgttcgcacccctgagggcaacataaagctttactgtaaaggtgccgacaccgtcatatatgaacgcctgcaccgcatgaacccaacgaagcaggagactcaagacgcgctcgatattttcgctaacgagactctgcgcaccctctgtctgtgctataaagagattgaggagaaggaatttaccgagtggaacaagaagtttatggcagcctccgttgcctccactaaccgtgatgaagccctcgacaaggtttacgaagagattgaaaaggaccttattctgctgggcgcgaccgccatcgaagataagctccaagacggggtccccgagactattagcaagctggcgaaggcagatatcaagatctgggttcttactggtgacaagaaggaaaccgcggagaatatcggcttcgcctgcgaattgctgaccgaggataccaccatttgctacggagaggacattaatagtctgctccacgctcggatggagaaccagcgtaacagaggaggcgtctacgcgaaattcgctccccccgtccaggaaagcttcttcccccccggtggtaacagggccctgattatcaccggatcctggctgaatgagattctattggagaagaagacaaaacgtaacaagattcttaagctcaagttcccccgcacagaagaggagcgtcgaatgagaacccagagtaagcgtcgccttgaggctaagaaggagcaacgacagaagaacttcgtcgacctggcgtgcgagtgttcagcagtaatctgttgccgggtgacccccaagcaaaaggcgatggtcgttgacttggtcaagcgttacaagaaagctatcacccttgcgattggcgatggcgcgaacgacgtgaacatgattaagacggcccatatcggcgtgggtatctctggtcaggaaggcatgcaagccgtcatgtcctccgactactctttcgcccaatttcgctacttgcaaagactcctcttggtgcatggcaggtggtcttacatccgtatgtgcaagttcctgcgttattttttctacaagaacttcgccttcacgctcgtccacttttggtattccttcttcaacggttacagcgcccagactgcttacgaagactggttcatcactctctacaacgtgctgtacacatccctgccagtcttgcttatgggtctcctggaccaggacgtttctgataagctgtcactgcgcttccctggtctttacattgtggggcagagagaccttctgtttaactacaaacgattcttcgtgagcctcttgcatggagttctcacctccatgatcctcttcttcatccccttgggagcctacctccagacggtcggccaggacggtgaggcaccctcggactatcagtccttcgctgtcacgattgccagcgccctcgttatcaccgttaactttcagattggtctggacacctcctattggacctttgttaacgcgttctctatctttggatccatcgcgttgtactttggtatcatgttcgatttccattcagccggcatccacgtcctgttccctagcgccttccagttcactggcactgcctccaacgcactgaggcagccgtacatctggttgacgatcatcctcgccgtggccgtgtgcctgctgcccgtggtggcaattcgttttctctccatgactatctggccttctgagagtgacaagatccaaaagcaccgtaagcgtctaaaggccgaagaacagtggcagaggcgccagcaggtctttcggcgtggtgtctcgacccgccgttcggcctacgctttttcgcaccaacgtggctacgctgacctaatctccagtggccgatctatacgcaagaagcgtagccctttggacgcgatcgtcgcggatggaaccgccgagtaccgacggacgggtgacagc

SEQ ID NO: 7375 - DNA, 3753 bp, synthetic construct
  misc_feature 1..3753: note = source = /note="Description of Artificial Sequence: Synthetic coding sequence"
  source 1..3753: mol_type = other DNA
atgtcgactgagagggacagcgagactactttcgatgaggattcacagcctaatgatgaagtcgtgccatactccgatgacgaaaccgaggatgaactggatgatcaaggcagcgcagtggagcctgaacaaaatagggtgaatcgagaagcagaggaaaaccgggaaccatttaggaaagagtgcacctggcaggtgaaggcaaacgatagaaaataccatgaacaacctcactttatgaacaccaagtttctttgtatcaaggagtccaagtatgcaaacaatgccatcaaaacctacaaatacaacgcattcacctttattccaatgaacctctttgagcagttcaagcgcgcagcaaacctttactttttggcactgcttatactccaggcagtgccacaaatctccaccctcgcttggtacaccactttggtgcctcttctggtcgttctcggagttactgcaatcaaggatctggtcgacgacgtggcccgacacaaaatggataaggagatcaacaataggacgtgtgaagtgataaaggatggaagatttaaggtggcgaagtggaaagaaatccaggtgggggatgttattcgtttgaagaaaaacgactttgtgccggcagacatccttctcctgtcctcgtccgaaccaaactccctctgctacgtagaaactgcagagctggatggcgaaaccaacctcaagtttaagatgtccctcgaaattaccgaccaataccttcaacgagaagatactctggcaacttttgatggatttatcgagtgcgaagaaccaaacaatagacttgacaagttcacgggtacccttttctggcgtaatacctcatttccacttgatgcagacaagattttgcttagaggatgcgtgatccgaaacactgacttttgtcatggtttggtcatttttgcaggcgcagataccaagatcatgaagaattcgggaaagactcggttcaaacgtacgaagatagattacctgatgaactacatggtgtatactatattcgtggtcttgattctcctgtcggcaggcctggcaattggtcatgcgtactgggaagctcaggtgggcaactcatcgtggtacctgtacgatggagaagatgacacgccatcctacaggggctttctgattttctgggggtacataatagtccttaacacgatggtgcctatatcactttacgtgtccgtggaagtgattcggcttggtcaatcccacttcataaactgggatctccaaatgtactacgcagaaaaagatacccccgccaaagcacgcacgactactcttaatgagcaactgggtcaaattcactacattttcagcgataagaccgggactcttactcagaatatcatgacttttaagaagtgttgcatcaacggtcagatttacggcgatcatcgcgacgcctcccagcataatcataacaagattgaacaggtcgacttttcctggaacacttacgccgatggcaaacttgcattttacgatcactaccttattgagcagatacagagcggaaaggaaccggaagtgaggcagttctttttccttctggcagtgtgccacacggtcatggtggataggaccgatggacaacttaactaccaagcagcaagcccggacgaaggggccttggtgaacgcggcaaggaactttggttttgcattcctggcccgaacccagaataccattaccatttctgagctcggtaccgaaagaacctacaacgtccttgcgattcttgacttcaattcggatcgaaaacgcatgtccatcatcgtcagaaccccagaaggaaacatcaaactttactgcaagggcgccgataccgtgatttacgaacgcctccatcggatgaacccgaccaagcaagaaactcaggacgcccttgatatctttgcaaacgaaaccctgagaactctctgcctttgttacaaggaaattgaggagaaagagtttactgaatggaacaaaaagtttatggcagccagcgtcgcgagcacgaacagagatgaggctctggacaaagtgtatgaagaaatcgaaaaggatctgatcctccttggtgcgaccgctatagaggataaacttcaagatggcgtgccagaaacgattagcaagctcgcaaaggcagacatcaagatctgggtgctgaccggcgacaaaaaggaaaccgcggagaatatcggctttgcgtgtgaactgctgacggaggataccaccatttgctacggtgaggacataaactccctgctccatgccagaatggaaaaccagcgcaaccgaggaggggtctacgctaagtttgcccctcccgtgcaggaatccttttttcctcctgggggaaacagggcgttgattatcactggttcgtggcttaacgagatcctcctggaaaagaaaaccaaaagaaacaaaattctgaagctgaagtttccacggactgaggaagaacggcgtatgagaactcaatcgaagaggagacttgaggcaaagaaggaacagcgtcaaaagaacttcgtcgatctggcctgcgagtgctcggcagtgatttgttgtagagtgacccccaaacagaaagcgatggtggtggacttggtgaagagatacaagaaggccattacgctcgccattggtgatggtgcaaacgatgtgaacatgatcaaaaccgcacatatcggtgtcggtataagcggacaggaagggatgcaagcagtcatgtcgtccgattacagcttcgcccaatttcggtacctccagcgcctgctccttgtccacgggcgctggtcgtacatacggatgtgtaagtttcttaggtactttttctacaagaactttgccttcactcttgtgcacttctggtactcctttttcaacgggtactctgcccaaaccgcatacgaagattggttcatcactctgtacaacgtcctgtacacgtctctgcctgtgctccttatgggcctgctcgatcaagatgtcagcgataagctctctctccgatttcccggcctgtacatcgtcggccagcgagacttgcttttcaactataagcggttttttgtgtccctcctccatggtgtgctgacctccatgattctcttcttcatcccacttggtgcatacctgcagaccgtgggacaggatggagaagcaccatcggattaccagtcatttgcagtgactattgcgtctgcactggtgatcacggtcaatttccagataggccttgacacgagctattggacctttgttaacgcatttagtatattcggatccattgcactctactttggaataatgtttgattttcattccgcagggatccacgtgctgtttccttccgcatttcaatttaccggaaccgcctcgaacgcactgagacaaccctacatttggttgactatcattctggcagtggccgtgtgtctgctgcctgtcgtcgccattagatttctgtcgatgactatctggccctcggagtccgataagattcagaaacatcgcaaacgcctgaaggcagaagagcaatggcaacgccgccagcaagtttttaggcgcggtgtgtcaacccgaagatcggcatacgccttttcccatcaaagaggatacgccgatctcatttcctcaggaagatccataagaaaaaagagatccccccttgatgcgatagtcgctgatggaactgccgaataccggaggacgggagattca

SEQ ID NO: 7376 - DNA, 3753 bp, synthetic construct
  misc_feature 1..3753: note = source = /note="Description of Artificial Sequence: Synthetic coding sequence"
  source 1..3753: mol_type = other DNA
atgtctacagagcgggacagcgaaacaacctttgatgaggatagccagcctaacgacgaggtagtgccatacagcgatgatgagaccgaagacgagcttgacgaccagggctctgctgtcgagcctgagcaaaaccgtgttaaccgcgaagctgaggaaaatagagaacctttccgcaaagagtgcacatggcaagtaaaggcaaatgaccgcaaatatcacgaacagccccatttcatgaatacaaaattcctgtgcattaaggaatcaaaatacgcgaacaatgcaattaaaacctacaaatataatgcgttcactttcattcctatgaatttgttcgagcagttcaaacgcgcggctaacttgtattttttagccctgcttattctgcaagctgttcctcagatttccaccttggcttggtataccaccttggtgccattactggtggttctgggagtaactgcaatcaaagacctcgttgatgatgtggcaagacataagatggacaaggagattaacaatcggacctgtgaggttatcaaagacgggcgatttaaagtcgccaaatggaaggagatacaggtaggcgatgtgatccggttgaagaagaatgacttcgtgcctgcagacatcttgttgcttagttcaagtgaacctaattccctatgttacgtggagacggcagagctggacggcgagaccaatctgaagtttaagatgagcctcgaaattactgatcagtatcttcagagggaagataccctggccacctttgatggtttcatagagtgtgaggagcccaataatcgtctggacaagtttaccggtaccctgttttggagaaacacgtccttcccactcgacgccgacaagatcttactgcgaggatgtgtaattcggaacaccgacttctgccacggtttggtcatttttgccggcgccgacaccaagattatgaaaaactccgggaaaaccaggtttaagaggactaagatcgattacctaatgaactatatggtgtacaccatctttgtggttttgattttgctgagcgccgggctggcaataggccacgcctattgggaggctcaagtaggaaatagcagttggtacttgtacgacggtgaggacgacacaccaagctatcgggggtttctgatattctggggctatatcattgtgttgaataccatggtacctatcagtctgtatgtttccgtcgaggtgatcaggcttggccaatctcacttcattaactgggacctgcagatgtactatgccgagaaagacacccccgccaaggctaggacaactacactgaatgaacagttaggtcagattcactacatcttctcagataagaccggtactctgacacagaacattatgacattcaagaagtgttgtatcaacggccagatctatggagatcacagagacgcaagtcagcacaaccacaacaaaatcgagcaggttgacttctcatggaatacatacgcggacggaaagctggcattttacgatcattaccttatcgaacagatccagtcaggcaaggaaccggaggtccgtcagtttttcttcctgctagcagtgtgccacaccgtgatggttgaccgcactgacggacagttaaactaccaggcggcatcacccgatgaaggagctctggtaaacgccgctaggaactttgggttcgcttttcttgccaggactcagaataccatcacaatatcagagctcggtaccgagaggacatacaatgttttggctatacttgacttcaactccgatcgaaagcgtatgagcattatcgtgagaacgcctgagggaaacataaaactttactgcaaaggcgccgatacggtcatttatgagagactccaccgcatgaaccctactaagcaggaaacacaagacgcgctcgacatcttcgccaacgagacactgcggaccctctgcctgtgctataaggagatcgaggaaaaggaattcactgagtggaacaagaagtttatggcagcaagcgtcgctagcaccaatcgcgatgaagctctagacaaagtgtacgaagaaatcgaaaaggatctgatccttttgggagccaccgctatcgaggacaaattgcaggatggggttcccgaaaccatctcaaaacttgccaaggccgacataaaaatctgggtgcttacaggagataagaaagaaactgctgagaacattggtttcgcctgcgaactgttaactgaggatactaccatatgttatggagaggatatcaatagcctgctgcacgcccgcatggaaaatcagagaaatagaggcggggtgtacgccaagtttgcccctccagtccaggaatctttcttcccccccgggggaaacagagcgttgatcattacgggatcctggctcaatgagatccttctggagaagaagaccaaacggaataaaatcttgaaacttaaatttcccaggaccgaagaggaacgaagaatgcgcacccagtctaagaggcgcctggaggctaagaaggagcagaggcagaagaacttcgttgacctggcctgcgaatgttcagccgtgatttgctgcagggtcaccccaaaacagaaggctatggtggtggatttagtgaaaaggtacaagaaggctattacactggctattggggatggagccaatgacgtcaacatgatcaagacagctcacatcggtgtcgggatttcaggccaggagggcatgcaagctgtgatgagtagtgactattcatttgctcagttccggtatctgcaacgcctgttgctagtccatgggagatggtcatacatcaggatgtgtaagtttcttcgctattttttttacaagaattttgcatttaccttggtgcacttttggtacagtttttttaacggctactccgctcaaaccgcctatgaggactggttcatcactctgtataatgttctgtacacatcactcccagttctgctgatggggttgctggaccaggacgtttctgacaaactgtcactacggttcccaggactctacatcgtcgggcagagagacctgctgtttaattacaagcgctttttcgtgtccctgctccatggcgtgcttacctccatgatcttgttttttatccctctgggtgcgtacttacagacagttgggcaggacggagaagcgccttccgactaccagtcatttgctgtaaccatcgccagcgcactggtcattactgtgaactttcagatcgggttagacactagctattggaccttcgtgaacgctttttcaatctttggctcgatcgcactgtatttcggcataatgtttgacttccactccgctggaatccacgtgctgtttccatcagcgttccaattcaccggcaccgcctctaacgctcttcggcaaccatacatctggctcacaatcatcctggccgtcgctgtctgcttgctgccggtagttgctatacgcttcctctccatgacaatatggccctctgagtctgataagattcagaaacaccgaaagagactgaaggccgaggagcagtggcagcggcggcagcaagttttccgtcgcggggtgagcactagaaggtcagcctacgcattctcccatcagagaggttacgccgacctgataagctccggacgctcaatcaggaagaaacgatcgccactggacgcgatagtggccgacgggaccgcagaataccgccgcaccggggatagt

SEQ ID NO: 7377 - DNA, 3753 bp, synthetic construct
  misc_feature 1..3753: note = source = /note="Description of Artificial Sequence: Synthetic coding sequence"
  source 1..3753: mol_type = other DNA
atgtcgacggagcgggattccgaaactaccttcgacgaggattcgcaaccaaatgatgaggtcgtgccgtactcggatgatgagactgaagatgaactggacgaccagggatccgctgtggaaccagagcaaaaccgcgtgaatagggaggcggaagaaaatcgggaaccttttcggaaggagtgtacgtggcaggtcaaggcgaacgaccgaaagtaccacgaacagccacacttcatgaacaccaagtttctttgcatcaaggagtccaagtacgccaataatgctattaagacttataagtacaacgccttcaccttcatcccgatgaatctcttcgagcaattcaagcgcgcggcgaacttgtacttcctggcactgctgattctgcaggccgtgccgcagatttcgacgcttgcctggtacaccactctcgtgccgttgttggtggtgctcggcgtgaccgcgatcaaagacctcgtggacgatgtggctcgccataagatggacaaagagatcaataaccgcacttgtgaggtgatcaaagacggaagattcaaggtggccaaatggaaggaaatccaagtgggagatgtcatccgactcaagaagaatgatttcgtgcctgcggacatcctgctcctgagctcgtccgaacctaactcactgtgctatgtggaaaccgctgagctggatggcgagactaacctgaagtttaagatgtctctggagatcacggaccaatacctccagcgcgaggacaccctggctacctttgacggcttcatcgaatgcgaggagcctaacaaccgcctggacaagttcacgggcaccctcttctggagaaacaccagcttcccattggatgctgataagatcctcctcaggggatgcgttattagaaacactgacttttgtcacggactggttatctttgccggagcagatactaagatcatgaagaactctggcaaaactagattcaaacgcaccaagatcgattacctgatgaattacatggtttacactattttcgtcgtgctcatccttctctccgccggacttgccatcggacacgcttactgggaggcacaagtgggcaattcgtcgtggtacctgtacgacggagaagatgatactccatcctaccgcggattcctgatcttttggggatacatcatcgtacttaacacgatggtgccgatcagcctgtacgtgtctgtggaggtgattcggttgggacagtcgcacttcatcaactgggacctgcagatgtactacgctgagaaagatactccggcgaaagcgcggaccactaccctcaacgagcagctgggccagatccactacatcttcagcgataaaaccgggaccctcacccagaatatcatgacctttaagaagtgttgtatcaacggtcaaatctatggcgaccatcgcgacgcgtcccagcacaaccataacaaaatcgaacaggtcgacttttcatggaacacttacgccgatggaaaactggcgttctatgaccactacctcatcgaacagatccagtcaggaaaggagcccgaagtgcggcagttcttcttcctgctggctgtgtgccacaccgtgatggttgacaggaccgatggacaattgaactaccaagctgcgtcccccgatgaaggggccctcgtgaatgcagcccgcaacttcggattcgcgttcctcgcccgcacgcagaacaccatcacgatctcagaattggggactgaacgcacctacaacgtcctggctattttggacttcaactccgaccggaagcgcatgtcgatcatcgtccggacccctgaggggaacatcaagctctactgtaagggggcagacactgtcatttacgaaagactccataggatgaatcctaccaagcaggaaactcaggatgcactggatatctttgcgaacgagactttgcgcaccctctgcctctgctacaaggaaatcgaagaaaaagaattcactgaatggaacaagaagttcatggcagcatccgtagcatccactaatcgggacgaggcgctcgacaaagtctacgaagagatcgagaaggacctgatcctgctgggagccactgccatcgaggataaactgcaagacggagtgccggaaacgatttccaaactcgccaaggccgacatcaagatatgggtgctgacgggggacaagaaagagactgcagagaacattgggtttgcctgcgagctcctgacggaggacactacgatttgctacggagaagatatcaactccctgctgcacgcccggatggaaaaccagagaaaccgcggcggagtgtacgccaaatttgccccaccagtgcaggaatcgttcttcccccctggtggaaatcgcgccttgatcatcaccggatcatggctcaatgaaatcctgctggagaagaaaaccaagcggaataagatcctcaaactgaagttcccccggactgaggaagaacgcagaatgcggacccagtcaaaaagaagattggaggcgaaaaaagagcagcgccaaaagaatttcgtggatttggcctgtgaatgttcggccgtcatctgttgtcgggttactcctaagcaaaaggccatggtcgtggacctggtcaaacgctacaaaaaggccatcactctcgccattggcgatggcgcaaacgatgtgaacatgatcaagaccgcacacattggagtgggcatctccggtcaagaaggcatgcaagccgtcatgtctagcgactactccttcgcgcagtttagataccttcaacgactcctgctggtgcacggaagatggtcgtacatcagaatgtgcaagtttctgagatacttcttctacaagaacttcgcgttcaccttggtccatttctggtacagcttcttcaacggctattccgcccagactgcttacgaggactggtttatcacgctctataatgtcctgtacaccagcctccccgtgctcctcatgggattgctcgaccaagatgtgtcggacaaactttcactccgctttccggggctgtacatcgttggacagagggatcttttgttcaattacaaacgattcttcgtgtccctgctccatggggtgctgacctcgatgatcctgttctttatccccctgggagcgtacctgcagactgtgggtcaggatggtgaggcgccgtcggactaccagtcttttgctgtgaccatcgcctccgccctggtcatcactgtcaactttcagattggactggacacctcctactggaccttcgtcaacgcattctcaattttcggatccattgcattgtacttcggaatcatgttcgactttcattcagcgggtatccatgtcctcttccctagcgccttccagttcaccggtaccgcctccaacgccttgagacagccgtacatctggctgaccatcatcctggccgtggccgtttgcttgttgcctgtggtggcaattcgcttcctctcaatgactatctggccctcagagtcagataagatccagaaacatcgcaaaaggctgaaggccgaagaacaatggcaacgccgccaacaggtgttcagaagaggagtgtcgacccgcagatctgcctacgccttctcgcaccagcggggctacgcagatctcatctcatcgggccgctcaatcagaaagaagagaagcccgctggacgcgattgtcgccgacggcaccgcggaataccggcgcactggagacagc

SEQ ID NO: 7378 - DNA, 3753 bp, synthetic construct
  misc_feature 1..3753: note = source = /note="Description of Artificial Sequence: Synthetic coding sequence"
  source 1..3753: mol_type = other DNA
atgtccactgagcgcgactcggagactaccttcgatgaagactcgcagcctaacgacgaagtggtgccctattccgatgacgaaaccgaggacgagctggacgatcaaggctccgccgttgagccggaacagaatcgcgtcaacagggaagccgaagaaaatcgcgaaccgtttcgcaaggaatgcacctggcaagtcaaggcaaacgatcgcaagtaccatgaacaaccccatttcatgaacactaaattcctttgcatcaaagaatccaagtacgccaataacgccatcaagacttacaagtacaatgctttcactttcattccaatgaaccttttcgaacaatttaagcgcgctgccaacctttacttcctcgccctgctgatacttcaagccgttccacagatttcgaccctcgcctggtacaccactttggtgcctttgctcgtcgtgctcggtgttaccgcgatcaaggacctggtggatgacgtggcacgccacaagatggataaggagataaacaacaggacctgcgaagtgatcaaggatggtaggttcaaggtggccaagtggaaagaaatccaggtgggagacgttatccggctgaagaagaacgatttcgtgccagcagatatccttctgttgagctcttctgagccaaactcactgtgctacgtcgaaactgcggaactcgacggagagacgaacctgaaattcaagatgagcctggagataaccgaccagtatcttcaacgcgaagacactctcgccacttttgacggatttatcgagtgcgaagaacccaacaaccgtctggataagttcactggcactctcttctggcggaatacctccttcccgctggacgccgacaaaatccttctcaggggatgcgtcatcaggaacaccgacttttgccatggattggtcatattcgctggagccgatactaagattatgaaaaactcagggaagacccgcttcaaacggacgaagattgactaccttatgaattacatggtctataccatcttcgtggtgctgatcctcctcagcgcaggactggctatcggacacgcgtactgggaggcgcaggtgggcaactcgagctggtacttgtacgatggggaggatgacaccccttcttaccggggattcctcattttttggggctacatcatcgtcctcaacacgatggtccctatctccctgtacgtgtcggtggaagtcattagactgggtcaatctcacttcatcaattgggacctgcagatgtactacgcagaaaaggatacgccagctaaagcgagaaccaccactctgaatgagcaactgggccagatccactatatcttctctgacaagacgggaaccctgactcagaacattatgactttcaagaagtgttgtatcaacggccagatctacggcgatcatcgggacgcgagccaacataatcataacaagatcgagcaggtggacttttcctggaatacttacgccgacggaaagctggccttctacgaccactacctgatagaacagatccagagcgggaaagaacccgaagtgagacaatttttcttccttctggccgtgtgtcacaccgtgatggtggaccgcactgatggacaacttaattaccaggccgcgtcaccagacgagggcgctctggtcaatgccgcgcgcaatttcggtttcgcgtttctcgcccggacccagaacacgatcactatctctgagctgggcactgaacgcacctacaatgtcttggcaatcttggatttcaatagcgatagaaagcgcatgtcaatcatcgtcaggaccccagagggcaacatcaaactgtactgcaagggagcggacaccgtgatttatgagcggctccatcggatgaatccgaccaagcaagaaactcaagacgctcttgacatctttgcaaacgaaacgctccgcaccctgtgtctctgctacaaggaaatcgaagagaaggagtttaccgaatggaacaaaaagtttatggccgcctccgtggctagcacgaacagagacgaagcactcgacaaggtctacgaggaaattgaaaaggacctcatcctccttggcgcgactgcgatcgaagataaactgcaagacggggtgccggaaacgatctcgaagctggcgaaggccgatatcaagatttgggtgttgactggtgataagaaagaaaccgccgagaacattggattcgcttgcgaactcctgactgaagacaccaccatctgctacggagaagatatcaacagcttgttgcacgcgagaatggagaatcagagaaaccgcgggggcgtgtacgctaaattcgcaccgcccgtccaggagagctttttcccgccgggaggaaaccgcgctcttataatcacgggctcgtggctgaatgagatcctgttggagaaaaagacgaagagaaacaagattttgaaactgaaattccctcgaaccgaagaagagaggcggatgcgcacccaatctaagcgtcggctggaagcaaagaaggaacagcggcagaagaacttcgtggacctcgcttgcgaatgttcggcggtcatttgttgccgggtgactccgaagcagaaggctatggtcgtggatctggtgaagcgatacaagaaagccatcactctggccatcggagatggagccaatgacgtcaacatgattaaaaccgctcatatcggggttggaatatccggccaggagggaatgcaggccgtcatgtcctccgattacagcttcgcccaattccgctacctgcagcgcctcctgctggtccacggaagatggtcctacatcagaatgtgcaagttcctgagatacttcttttacaagaatttcgcgttcaccctggttcacttttggtactcgtttttcaatggttactcagctcagaccgcctacgaagattggtttatcactctgtacaacgtgctgtacacctcgcttccggtgttgcttatgggccttctcgaccaggatgtgtcggacaagttgagcctgcgcttccccggcctgtacattgtggggcagagagatctgctctttaactacaagagattcttcgtctccctccttcatggagtgctcacctcgatgatcttgttcttcatcccgctcggagcctacctgcagaccgtgggacaggacggcgaggcgccatctgactaccagtcatttgcagtgactatcgctagcgccctggtcattaccgtgaacttccagatcgggctcgacacttcctactggactttcgtgaacgcgttctcgatcttcggctcaatcgcgctctatttcggaatcatgtttgattttcactccgctgggatccacgtactgttcccgtcagccttccagttcaccggaactgccagcaatgcactgcggcagccatacatctggctgactatcatccttgcagtggccgtgtgcttgctgccggtggtcgcaatcagattcctgtcgatgactatctggccttcggagtccgataaaatccaaaagcacaggaaacggctgaaagccgaggagcagtggcagcggagacaacaagtgttccgccgcggagtctcgactcggcggagcgcttacgccttctcacaccaacgcgggtacgcggacctgatttcaagtggaaggagcatccggaagaaacgctcgccgctggacgctatcgtggcggacggaactgctgagtacaggcggactggggactcg

SEQ ID NO: 7379 - DNA, 3753 bp, synthetic construct
  misc_feature 1..3753: note = source = /note="Description of Artificial Sequence: Synthetic coding sequence"
  source 1..3753: mol_type = other DNA
atgtctaccgagagggattcggagactaccttcgatgaggacagccagccaaacgacgaagtggtgccttactcagacgacgaaaccgaagatgaactcgacgaccagggcagcgcggtcgagccggagcagaatcgcgttaaccgggaagccgaggagaatcgggagccatttcggaaggagtgcacctggcaggtcaaggctaacgaccggaagtaccatgaacaaccccactttatgaacacgaaattcctgtgcatcaaggaatcgaaatacgcaaacaacgcaattaagacctacaagtacaatgcgtttactttcatccctatgaatctcttcgaacaattcaaaagggcagctaacctttacttcctggccctgctcatcctccaagccgtgccacagatctcaacgctggcctggtacactaccctcgtccccctgcttgtggtgctgggagtgactgccattaaggacctggtggatgatgtggcgcgccataagatggacaaggaaatcaataatcggacctgcgaggttatcaaggatggacggtttaaagtggccaagtggaaagaaatccaggtgggagacgtgattaggttgaagaagaatgacttcgtcccggccgatatcctgcttctgtcgagctccgaaccgaacagcctctgttacgtggaaaccgctgagcttgacggcgaaaccaaccttaagttcaagatgtccttggaaatcacggaccagtatctgcaacgggaggacacgctggccaccttcgacggattcatcgaatgcgaggagcccaacaaccgcctggacaagtttaccggaaccttgttctggcgaaacacgtccttccccctcgacgctgataagattctcttgcggggatgtgtgatccggaataccgacttttgtcacggcctggtcatcttcgccggagccgataccaagatcatgaaaaactctggaaagacccgcttcaagagaactaaaatcgactacctgatgaattacatggtgtatactatcttcgtggtgctgatcctcctttcggcgggactggccatcgggcatgcctactgggaggcgcaagtggggaactcgtcatggtatctgtacgatggagaggacgacactccgagctacaggggcttcctcatcttctggggatacatcatcgtcctcaataccatggtgccgatctcactctacgtgtccgtggaagtgatacgcctcgggcaatcccacttcatcaactgggacctgcaaatgtactacgctgaaaaagatactccagccaaggccagaaccactactctcaacgaacaattgggacaaatccactacatcttctcagacaagacgggaacgctgactcagaacattatgaccttcaagaagtgctgtattaacggacaaatctacggtgaccatcgcgatgccagccagcacaatcacaacaagatcgaacaggtggatttttcgtggaatacttacgcggacggaaagctcgccttctacgaccactacctgatcgagcagattcagtcaggaaaggagcctgaggtgcggcagttctttttccttcttgcggtttgccacactgtgatggtagacagaactgacggacagctgaactaccaagctgcgtcgcctgacgaaggagccctggtgaatgcagcaaggaactttgggttcgccttccttgcacggacccaaaacactatcaccatcagcgagctcggaaccgagcgcacttataacgtgctcgcaattcttgacttcaattccgatagaaaaaggatgtcgatcatcgtccggaccccggaaggaaatatcaaactctactgtaaaggagcagatactgtgatttacgagcggctccataggatgaacccgactaaacaggaaacccaagacgccctggatatcttcgcaaacgaaaccctgagaactctgtgcctctgttacaaagaaatcgaggaaaaggagttcactgaatggaacaagaaattcatggcggcctcggtggccagcactaaccgggatgaagcattggataaagtgtacgaggagatcgagaaagacctgatcttgctgggtgccacggcgatcgaagataagctccaggatggagtcccggaaactatctctaagctggccaaagcggacatcaagatctgggtcctgaccggagataagaaagaaactgctgagaatatcggtttcgcttgcgagctgctgactgaggacacgaccatctgctacggggaggacatcaactcgctcctgcacgcacggatggaaaaccagcgcaatagaggaggagtctacgcgaagttcgccccgcctgtgcaggaatccttcttcccgccgggaggcaatcgcgccctgatcatcaccggctcctggctgaatgaaatcctgctggagaagaaaactaagcgcaacaagatcctgaaactgaaattccctcgaactgaagaagaacggcgcatgcgcacccagtccaagcgcaggctcgaagccaagaaagagcagcgccagaagaatttcgtggacctcgcctgcgaatgtagcgcggtgatctgctgccgcgtcactccgaagcagaaggccatggtggtggacctggtcaagcggtacaagaaggctatcaccctggccattggagacggggctaatgatgtgaacatgatcaaaactgcccacatcggggtgggtatcagcggacaggagggcatgcaagcggttatgtccagcgactactcatttgcacagttccgctacctgcaaagattgctgctggtgcatggaagatggtcgtacatcaggatgtgtaagttcctgaggtactttttctacaaaaacttcgccttcaccctggtccacttctggtactcgtttttcaacgggtattccgctcagactgcctatgaggactggttcatcactctctacaatgtcctctacacctcgctgcctgtgctcctcatgggtttgctcgaccaggacgtctcggacaagctgtcgctgcggttccccggactctacatcgtgggacaacgggacctgctctttaactacaagcggttctttgtgagcctgctgcatggtgtcctgacctccatgattttgttctttatcccgcttggtgcatacctgcagactgtcggccaagacggagaagcgccttcagactaccagtctttcgcggtgactatcgcatcggcgctcgtcattactgtcaatttccagatcgggctggacaccagctactggaccttcgtgaatgccttctccattttcggctcaattgctctctacttcggcattatgttcgatttccatagcgcgggaatccacgtgctctttccaagcgcattccagttcactggtaccgcgtccaatgccctgagacagccttacatctggctgaccatcatcctcgctgtcgccgtctgcctgcttccagtggtcgccatccggttcctgtcgatgactatctggccttcggaatccgacaagatccaaaaacatcggaaacggctgaaagccgaagagcagtggcaacgccgccagcaggtgttccgcaggggagtgtcaactcgacggtcggcctacgctttctcacaccagaggggatatgccgatctgatcagctccggacgatcgatcagaaagaaacgttcaccactggacgccatcgtggccgacggaactgccgaatacaggagaaccggagattcc

SEQ ID NO: 7380 - DNA, 3753 bp, synthetic construct
  misc_feature 1..3753: note = source = /note="Description of Artificial Sequence: Synthetic coding sequence"
  source 1..3753: mol_type = other DNA
atgtcaaccgaacgcgactctgaaacaacctttgatgaagactctcagccgaatgatgaggtggttccatacagtgatgatgaaaccgaagatgagcttgacgatcagggcagcgccgtcgagcctgagcagaaccgcgtgaatcgcgaggcagaagaaaacagagaaccatttcggaaggagtgcacatggcaggtaaaagctaacgaccggaaataccatgaacagccacatttcatgaacacaaaatttctctgcatcaaagagtcaaaatacgcaaacaacgctattaagacctacaagtacaatgcgttcacatttattcccatgaacctctttgaacagttcaagcgtgccgctaacctttactttctggccctattgatccttcaggcagtcccccagatcagcacgttggcatggtacacaaccctagtcccccttctcgtcgtgctgggcgtgacagctatcaaggatttggtggacgacgttgcccggcacaagatggacaaggagatcaataaccgcacatgcgaagtgatcaaggatggccgtttcaaggtcgcaaaatggaaagaaatccaagtgggcgatgtcatccgtctcaaaaagaatgattttgtacctgcagatattctcctgctctcctccagcgaacctaacagcttgtgctatgttgagacagctgaacttgacggcgaaaccaacctcaagttcaaaatgtctcttgagattaccgaccaatacctgcagagagaggatactttggccacatttgatgggttcatcgaatgtgaagaacccaataacagattagataagttcactggcacactgttctggagaaacacctcatttcccctggacgctgataagatcctcctgaggggatgtgtgatccgtaacacagacttttgtcacggactcgtgatctttgctggagcggatacgaaaattatgaagaatagcggaaagactcggttcaagcgcactaagattgattatctgatgaactacatggtgtacactatctttgtcgtgttaatattactttcagcaggcctggctatcgggcatgcttactgggaggcacaggtgggaaacagcagctggtacctgtatgacggcgaggacgacacaccgtcgtacagaggctttctgattttctggggatacattatagtgctcaacaccatggttccaatttctctctacgtttcagtggaggtgattcggcttggacagtctcattttataaattgggacctgcagatgtattacgcagagaaggatacccctgccaaggccaggaccacaactctcaacgaacaattgggccagatacattatattttttcagataaaactggcacccttactcagaacataatgacatttaagaagtgctgcattaacggtcagatttacggtgaccacagggatgcttctcaacacaaccataataagatcgaacaggtcgacttttcctggaatacatacgcagacggaaagctggccttctacgatcactatctgatcgagcaaatccaaagtggcaaagagcctgaggtgcggcagttctttttcctgctggccgtctgtcacacagtgatggttgataggacagatggacagctgaactaccaggctgcaagcccggatgagggcgctctcgtgaatgcagctaggaatttcggctttgcatttctcgcacgcacccagaacacaatcacgattagcgagctcggaactgaacggacatacaacgtgctggctatcttggacttcaatagcgatcggaaacggatgagcattatcgttaggaccccagagggaaacatcaagctgtactgcaagggagctgacacagttatctacgagaggctgcatcgcatgaacccaaccaaacaagagacacaggacgcattagatatcttcgcaaatgagacgctcaggacgctctgtttgtgttacaaagagatcgaagaaaaagagtttacagagtggaacaaaaaatttatggccgcttctgtggcatcaaccaacagggacgaagcattagataaggtctacgaggaaatcgaaaaagatctcatcctgctgggcgctacagccattgaagacaaactgcaggacggtgtccctgagaccataagcaaactggctaaggctgatattaagatttgggtgcttaccggggataaaaaagaaacagctgaaaatattggctttgcgtgcgaattactgaccgaggacacaaccatctgctacggagaagacatcaattcactgcttcacgccaggatggaaaaccaaagaaaccgtggcggtgtatacgccaaatttgctcctcccgttcaagagagtttcttcccacctggaggaaacagagcgctgataatcaccggatcttggcttaatgaaatcctcctggaaaagaaaaccaagaggaataaaatacttaaactgaaatttccccgtaccgaagaagagcggcgtatgcggacacagagcaagcgtagacttgaagctaaaaaagaacaaaggcaaaaaaattttgttgatctggcgtgcgagtgctccgcagtaatctgttgtagggtcactcctaagcaaaaggctatggttgtggacctggtcaagagatataagaaagccatcactctcgccatcggagacggcgccaatgatgtcaacatgatcaagacggcccatatcggagtgggtatctccggccaagaaggtatgcaagctgtcatgtccagcgattactcttttgcccaattccgttatctgcaacgtctgctgctggtgcacggccgttggtcctacatccgcatgtgtaaatttctgagatactttttttataagaactttgcatttacactggtgcatttttggtattcttttttcaacggctacagtgcacagactgcttacgaggactggtttatcaccctgtacaacgttctctacacttctctgcccgttctcctgatgggactcctggatcaagacgtgagcgacaaactttccctcagatttccaggactctatatcgtcgggcagcgcgatttgctctttaactacaaaagattctttgtctctctgctccatggagtgctgactagcatgatccttttttttattcctctcggtgcatatctgcaaacggtgggccaggacggcgaagcacctagcgactaccagagtttcgctgtgaccatcgccagcgctctcgtaattacagttaacttccagattggacttgatacatcttactggacctttgtgaatgccttctctatcttcggaagtatcgctctttactttggaatcatgttcgattttcacagcgccggtattcacgtgctgttccccagcgcatttcagtttactggcaccgcatccaacgctttgagacagccttacatctggctgacaattatcctcgcggtcgcagtgtgcttgctgcctgttgtggctatcagatttctttctatgacaatctggccttccgaaagtgataaaatccaaaagcatcggaaacggctgaaagccgaagaacagtggcagaggaggcagcaagtatttcggcgcggcgtctctactcgccgaagtgcctacgcattcagccatcaacgtgggtatgcggacctcatcagcagcgggcgctccattagaaaaaagcgcagtcccctcgacgccatagtggctgacgggacagctgaatataggaggaccggcgattca

SEQ ID NO: 7381 - DNA, 3753 bp, synthetic construct
  misc_feature 1..3753: note = source = /note="Description of Artificial Sequence: Synthetic coding sequence"
  source 1..3753: mol_type = other DNA
atgagcactgagcgggacagcgagaccacgtttgacgaggattcccagcctaatgacgaagttgtcccatactccgacgacgaaacagaggatgagcttgatgatcaggggtctgctgtggagccagaacagaatcgggttaatcgggaggccgaggagaacagggaaccctttaggaaagaatgcacctggcaggtgaaagcaaacgacagaaagtatcacgaacagccacactttatgaataccaaatttttgtgtataaaggagtccaagtacgctaacaacgcaattaaaacatacaaatacaacgcttttacatttatccctatgaacctgttcgagcagttcaagcgagctgcgaacctgtattttctcgcccttctgattcttcaggcagtgccccagattagcacgcttgcatggtacacaactctggtccccctgctggtggttctgggtgtgactgcaatcaaggatctggtggacgacgtggcgcggcacaaaatggacaaggaaattaacaatcgcacatgtgaggttattaaggacggacgcttcaaagtcgccaagtggaaggagatacaggtgggggacgtcattcgcttgaagaaaaatgattttgtgccagccgacatacttctgctttccagctctgaacctaattccttgtgttatgtagaaaccgccgagcttgatggcgagaccaacctgaagtttaagatgtcacttgagattactgatcaatatttgcagagagaggacaccctggcgacatttgatggattcattgagtgcgaagagcccaacaaccgcctggacaaatttaccggtaccctgttctggagaaatacctccttccccctcgatgccgacaagatcttgctgagaggttgtgttatcaggaatacagacttttgtcacggactggtgattttcgctggagcagatactaagataatgaagaatagcgggaagactcgattcaagaggaccaaaattgattacttgatgaattacatggtatatactatctttgttgttctgattctgctttccgccggattggcaattggccatgcttactgggaagcccaggtgggaaactctagctggtacttgtatgacggcgaggacgatacaccctcctacaggggatttttgattttttggggttatattattgttttgaatacaatggtgccaatctcactgtatgtgtctgtcgaagtcatcaggttggggcagagtcattttattaattgggacttgcagatgtactacgccgaaaaggatacgcccgcgaaggccaggaccactaccctcaacgagcaactggggcaaatccattatatatttagcgacaagacgggaacactcacacagaatatcatgacatttaagaagtgctgcatcaatggacaaatatatggcgaccaccgggatgcctctcaacacaaccacaataaaattgagcaggttgatttcagctggaatacatacgctgatggtaagctggcattctacgaccactacctcatcgagcagatccagtcaggaaaggagcccgaggttagacaattttttttcctgctggctgtgtgccacactgtgatggtcgatagaacggacggtcaactgaattatcaggcagccagtcccgacgagggggcactggtcaacgctgcccgcaatttcggctttgctttcctggcgcgcacccaaaacacaatcactatttccgaattgggtaccgagcggacatacaatgtcctggccatcttggatttcaactccgaccgcaagcggatgagtattatcgtgcggaccccggagggcaacataaagctttattgcaaaggggcagatacagtcatttacgagcggctccataggatgaacccgacgaagcaggagactcaggacgcactggacattttcgccaacgagaccctgcgcacactctgtctttgttacaaagagatcgaagagaaggagttcaccgagtggaacaaaaagttcatggccgccagtgttgcaagtacaaaccgagacgaggcactggataaggtgtacgaggagattgagaaggatctgatcctgctcggcgccaccgcgatcgaggataagctccaggacggcgtgccagaaaccatttccaagctggcgaaagcggacattaagatatgggttcttacaggcgataaaaaggaaaccgctgaaaatatagggttcgcgtgcgaactcctcactgaagacactactatatgttacggcgaggacataaacagcctgcttcacgcaaggatggagaaccagagaaacagaggcggcgtctatgccaagtttgcaccccctgtgcaggaatctttttttccccctgggggtaatagagctttgatcatcaccggcagctggctgaatgagatcctgctcgaaaagaaaacaaagcggaataagatcttgaagctcaaattccctcggaccgaggaggaacgccggatgagaacacagtccaaaagacgactggaggccaagaaagaacagagacagaagaacttcgtggacctggcgtgcgagtgctctgctgtaatttgctgtagagtgacccctaagcaaaaggccatggtggtcgatctggtcaagagatacaagaaggcgatcacccttgcaattggtgatggagccaatgacgtaaacatgatcaaaacggcacacatcggggtgggaataagtgggcaagaagggatgcaggctgttatgtcctcagattactcattcgcacagttcaggtatctccagagacttctgttggtacacggccggtggagttacatccggatgtgtaagttcctgcggtactttttttacaagaacttcgccttcacgctggtgcatttctggtacagcttttttaacggctatagcgcccagaccgcctacgaagactggttcatcactctctataacgtgctttacaccagcctgccagtgctgctcatggggcttcttgatcaggatgtgtccgacaaattgtctctcaggtttccaggtctttacatagttggacagagagatttgctgttcaattataaaagatttttcgtaagtctgttgcatggcgtgctcacttctatgatcttgttcttcattccgctgggggcatatctgcaaacggttggtcaggatggcgaagcgcctagcgattatcaatccttcgcagttactattgcaagcgcactggtcattaccgtaaacttccaaattgggctggacacctcctactggactttcgttaacgctttcagcatctttgggagcatcgctctctattttggcatcatgttcgactttcattcagccgggatccacgtcctttttccctccgcattccagtttacaggcacagcaagcaacgccctgcgccagccctacatatggctgacaataatactggccgttgccgtctgcctgctgcctgtggtggccatccgatttttgagcatgaccatctggccctctgagtccgacaagatccaaaagcaccggaaaagactgaaagccgaggaacaatggcagcgccgccaacaggtattccgacgcggagtgagtacaagacggtccgcttatgcattctctcaccagagaggatacgccgatctgatctcctcaggccgctctataaggaagaagagatctcccctggacgccatcgttgcggatggaaccgcagagtaccgcaggacaggtgactct

SEQ ID NO: 7382 - DNA, 3753 bp, synthetic construct
  misc_feature 1..3753: note = source = /note="Description of Artificial Sequence: Synthetic coding sequence"
  source 1..3753: mol_type = other DNA
atgagcactgaacgagattctgagaccacttttgacgaggatagccagcctaacgatgaagttgtcccctatagcgatgacgagacggaggacgaactagacgaccagggaagtgctgtggagccagagcagaatcgagtgaaccgagaagctgaagagaaccgcgaaccttttcgtaaggaatgcacatggcaggtcaaggcaaatgataggaagtatcacgagcagccacacttcatgaatacgaagttcctatgcataaaggaatccaagtatgcaaacaacgctattaagacttacaaatataacgcgttcacatttattcccatgaacctgtttgagcagttcaagcgcgcagccaacctctatttcttagctctgctgatcctccaggctgttccccaaataagcaccctggcgtggtacaccaccctcgtgcctttactcgtggtgctgggcgttacagccattaaggatcttgtggacgacgtggcaagacataaaatggataaagagatcaataatagaacttgtgaggttatcaaagatggaagattcaaggtggcaaagtggaaggaaatacaggtgggtgatgtaatacggctgaaaaaaaatgattttgtgcccgccgatatattgttgctgtctagctcagaaccaaacagcctatgttatgtagagacggctgagctggacggcgagacaaacctgaagttcaagatgtctctcgaaataacagaccagtacctacagcgtgaagatacactggcaactttcgatggtttcatagaatgcgaagagcccaacaacaggctggataagttcacgggcacactcttttggcgaaacacctctttccctttagatgccgataaaatacttttgagggggtgtgtaatcaggaacactgatttctgccatggccttgtcatttttgccggggcggacactaagataatgaagaacagtggtaaaacaagattcaaaaggactaagattgattatctgatgaattacatggtttatacaatcttcgtagtgttgattctgctcagtgccggactcgccattggccacgcctattgggaagcgcaggtcggcaactcaagctggtacctatacgacggagaggatgacaccccatcataccgtgggttcctgatattttggggctacataatcgttctgaataccatggtgcccatatcactctatgtatctgtggaggtgatacgcctaggacaatcccacttcatcaactgggatctgcaaatgtattacgccgagaaagataccccagcaaaggcccggactacaacgctgaatgaacaattgggccagatccattatatcttttcagacaaaacaggcacgcttacccaaaatatcatgacgttcaagaaatgttgcatcaatggccaaatttacggagaccacagagacgcctcgcagcacaaccataacaagatcgaacaggttgatttttcctggaacacatatgccgacggaaaattggctttctacgatcattatctgattgagcagatccagagcggtaaggagcctgaggtacgacagtttttcttcctgctcgcagtgtgtcacactgtgatggtggaccgcacagatgggcagctcaactaccaagcagcaagtcctgatgaaggagctctggttaacgccgctagaaatttcggattcgcatttcttgcacggactcagaatacgattacaatcagtgaactggggaccgagaggacctataacgtgcttgcgatattagactttaacagtgaccgaaagaggatgtcgatcatagtgaggacaccagaaggcaacataaagctctactgcaagggggctgatacagttatctatgaaaggctgcataggatgaaccccacaaagcaggaaacccaagacgctctcgacatcttcgcgaatgaaacgctaaggacactttgtctgtgttacaaagaaatcgaggaaaaggagttcaccgagtggaataagaaattcatggcggccagcgtggcttcaacaaatagagacgaggccttggacaaagtgtacgaagagatcgagaaggatcttattctcctgggtgctacagccattgaggacaagctacaggacggagtccctgagacgattagcaaactggctaaggccgacatcaaaatctgggttctgactggcgacaaaaaagaaaccgcagagaatataggctttgcctgtgaacttcttacagaggacaccaccatctgttacggggaagacatcaacagcctgcttcacgccagaatggaaaatcagagaaacaggggaggggtatatgctaaattcgctcctcctgtgcaggaaagctttttcccccctggaggaaaccgggcgcttatcattacaggttcttggctcaatgaaattttgctagagaaaaagaccaagcgtaacaagatattgaaactcaagttccctcgaacagaagaagagaggaggatgagaacccagtctaagcgacgcttggaagctaagaaagagcagaggcagaaaaacttcgttgatctggcatgcgagtgctctgcggttatctgctgcagggtaaccccaaaacagaaagccatggtagtcgacctcgttaagcgatacaaaaaagctatcaccctggctattggtgatggcgcaaacgacgtaaatatgatcaaaacagctcacatcggcgtcggaatcagcggccaggagggcatgcaagccgtaatgtcgtctgattactcatttgcgcaattcaggtaccttcaaaggttactgctggtccatggaagatggagttacatccgaatgtgtaaattcctgaggtacttcttttataaaaacttcgccttcacactggtgcacttttggtacagcttttttaatgggtatagcgctcagacggcctatgaggactggttcattacactttataacgttctgtacacatccttaccagtcctcctaatgggactgctggaccaggacgtgtctgataaactgtcactacgattccctggcctgtacattgtcggccagagagacttgttgtttaactacaagaggtttttcgtctcactgcttcatggcgtcctgacaagcatgattctattcttcattccgctgggggcctaccttcagaccgttggacaggacggggaagccccatccgactaccagagcttcgctgttactattgcatctgctctggttatcactgtcaacttccagatcggcctagacacttcatactggactttcgtgaatgcattttccatattcgggtcaatcgctttgtactttggcatcatgtttgattttcattccgccggcatccatgttctctttccgagcgcgttccagtttactggtaccgcaagcaacgcgctgaggcagccatacatatggctgacaattattctggctgtggccgtctgtctcctgcctgttgtggccattcgatttctctctatgaccatctggcccagcgagtccgacaagatccagaaacaccgtaaacgacttaaagcggaagagcaatggcagcggcgacagcaggtgtttaggaggggggtttcgacaagacgatcagcctacgccttcagccaccagcgtggctacgccgatctcatcagttctggacgatctatacgaaaaaagagatctcccctggacgccatcgtagctgatggaacagctgaatatagacgaactggcgattcc

SEQ ID NO: 7383 - DNA, 3753 bp, synthetic construct; identical to SEQ ID NO: 7356
  misc_feature 1..3753: note = source = /note="Description of Artificial Sequence: Synthetic coding sequence"
  source 1..3753: mol_type = other DNA

SEQ ID NO: 7384 - DNA, 3753 bp, synthetic construct
  misc_feature 1..3753: note = source = /note="Description of Artificial Sequence: Synthetic coding sequence"
  source 1..3753: mol_type = other DNA
atgagtactgaacgggattcggagaccacgttcgatgaagactcgcagcctaatgatgaggtcgtcccgtacagcgacgatgagactgaagatgaacttgatgatcaaggtagtgccgtcgagcccgaacaaaaccgtgtgaatcgagaggctgaggagaatagagaaccgtttcgaaaagagtgtacatggcaagtgaaggccaacgatcgtaaatatcacgaacagccacatttcatgaacaccaagtttctttgcatcaaagaaagcaaatatgctaataatgccattaagacatataaatataacgcttttacattcattccaatgaatttgtttgaacagtttaaacgggcggctaatttgtattttctggcgttgctgatcctacaagcagtgccacagatttctactctagcttggtacacaaccctggttcccctactcgtcgtcttaggagttacagctatcaaagatctcgttgatgatgtcgcgcgtcacaagatggataaggagatcaacaatcggacctgcgaagttattaaggatggaagatttaaagtggcgaaatggaaagaaatccaagttggcgacgtgatcagactaaagaagaatgatttcgtaccagctgacatccttcttctgagctcatctgaaccaaacagcttatgttatgttgagacagctgaactcgatggggagacaaatcttaaattcaagatgtctctggagatcactgaccagtacctccagcgggaagatactttggcaacatttgacggttttattgaatgtgaggaaccaaataatcggcttgacaagtttaccggaactttgttttggaggaatacgtcatttccgctggatgccgacaagattctattgcgcggatgcgttattcgtaatacagacttctgtcatgggttggtcatttttgctggagcagatactaagattatgaagaactcaggaaaaacccgattcaaacgtacaaagatagattaccttatgaattacatggtgtatacgattttcgtggttctcattctgctctcggcaggtttagccattggtcatgcctattgggaggcacaggttggaaattcttcttggtatctgtatgatggtgaagatgatactccatcctatcgaggtttccttattttttggggatacattattgtcctcaacactatggttccaataagtctatatgtatcggtggaagtcattcgcctcggacaatcgcactttatcaattgggatcttcagatgtactacgctgaaaaagatacgccagctaaggctagaaccaccactcttaacgagcagcttggacaaattcactacattttttccgacaagacgggtaccctaacacagaacattatgacatttaagaaatgctgtattaatggacaaatttatggtgaccatcgagatgcttcacaacataaccataataaaattgagcaagtcgacttttcgtggaacacttacgccgatggtaaactcgctttttacgaccactatcttatcgagcaaattcaatcaggaaaagagccagaggtgcgtcagttcttcttccttttggctgtttgtcatactgttatggttgatcgaacggacggacaacttaattatcaagcagcctctccagacgaaggagcgctagttaacgctgcacgaaattttggctttgcatttttagcaagaacacaaaacaccatcacaatttcagaattgggaacggagagaacatacaatgtactagctatccttgatttcaattccgatcgaaaacgaatgagcataatcgtacgaacaccagaaggaaatattaagctttattgtaagggtgcagacacggtaatctatgaaagattgcatcgaatgaacccaacgaagcaggaaacgcaggacgcattagacatattcgcgaacgaaactttgaggactttgtgtctttgttataaggaaatcgaggagaaagagtttactgaatggaacaaaaaattcatggctgcttctgtagcttccacgaatcgcgacgaggctttggataaagtttacgaagaaatcgaaaaggacttgattttattaggagcaacagctattgaagacaaactgcaagatggagttccagaaactataagtaaactcgcaaaggcagacatcaaaatttgggtcctaacaggagacaagaaagaaacagcagagaatattggcttcgcctgtgagctattgactgaagacaccacgatttgctatggggaggacatcaactcccttctccatgcacgtatggaaaaccaacgaaatagaggaggtgtttacgctaaattcgctccaccagtgcaagagtcatttttcccacccggaggaaaccgtgcacttattattaccggatcttggcttaatgaaattctgttggagaaaaaaaccaagcgcaataaaatcttgaaactcaagtttccgaggacggaggaagaaaggcgaatgcgaactcagtccaagcggcgattagaagctaaaaaagaacagcgacaaaagaattttgtcgatcttgcatgcgagtgttcggcggtcatatgctgcagagtaacccctaagcaaaaggcaatggttgtcgatttggttaaacgttacaagaaggctattacacttgccatcggggacggtgctaatgatgtgaacatgatcaaaaccgcacatattggagtcggaatatctggacaggagggtatgcaagccgtaatgagttcggattattcctttgctcaattccgttatctgcagagattgctgctagttcatggccgttggtcgtatattagaatgtgcaaattcttgaggtattttttctacaaaaatttcgcattcactctggttcatttctggtactcattcttcaatggatattctgcacaaactgcttatgaggattggttcattactctgtacaacgtcctctatacgtcacttccagttcttctcatgggactgttggatcaagatgtctcagataaactttctctacgttttccaggattatatattgttggacagagggatttgctgttcaattataagcgtttttttgttagtcttctgcatggtgttctaacgagtatgatcttgttcttcataccattgggagcatatctccaaactgtgggacaggatggagaggctccgtcagattaccagtcgttcgcagtaacgattgcgtctgcacttgttatcacagtgaatttccagatcggcctcgacacgtcttactggaccttcgtcaacgcgttctccatttttggatcaatagcactgtatttcggaatcatgtttgattttcatagtgctggaatacatgtgttatttccatcagccttccagtttacgggaaccgcgagcaatgctcttagacagccatatatttggttaacaataatcttagctgttgcagtttgcttgctgccagtggtggccatacgctttctttcgatgacaatatggccatcagagtctgataagatccaaaaacatagaaaacggttaaaggctgaggagcaatggcaaagaagacagcaagtttttagacgaggagttagtacacgacgttccgcttacgctttctcacatcaacgcggatacgccgatttgatatcaagcggccgatcgattagaaaaaagaggtcaccgttggatgcaattgtcgcggacggtactgcagaatatcgacgcactggagattct

SEQ ID NO: 7385 - DNA, 3753 bp, synthetic construct
  misc_feature 1..3753: note = source = /note="Description of Artificial Sequence: Synthetic coding sequence"
  source 1..3753: mol_type = other DNA
atgtcgaccgaacgtgactcggaaaccacctttgatgaagattctcaacccaacgatgaggtggtgccttacagcgacgatgaaactgaagatgagcttgatgaccagggatccgcggtggagccagagcaaaacagagtcaaccgggaggccgaagaaaatagagagccttttaggaaggagtgcacgtggcaggtgaaagcaaacgatcggaagtaccacgagcagccccatttcatgaacactaagttcctttgcattaaagaatcgaaatacgcaaacaacgccatcaagacgtacaagtacaatgcattcacctttattccgatgaaccttttcgaacagtttaagcgggcagctaacctctactttctggcactcctgatcctgcaggcggttcctcaaatttcaacgctggcttggtacaccaccctggtccctctgctggtcgtgctgggtgttaccgcaatcaaggatctggtggacgatgtggccaggcacaagatggataaggaaatcaataatcgcacctgtgaagttatcaaagatggcaggtttaaggtcgccaagtggaaagagatacaagtgggagatgtgatacgacttaagaaaaacgactttgtgcctgcagacattctgttgctctcctcctcagagccaaattctctgtgttacgtggaaactgcagagctggacggggaaaccaatctgaagtttaagatgtccctggaaattaccgatcaataccttcagcgtgaggacactctcgcgacgtttgatggctttatagaatgtgaagaacctaataaccggctcgataagttcaccggaacccttttctggagaaacaccagctttcctctcgatgcagacaaaatccttctcaggggttgtgtgattagaaacactgatttctgccacggtctggtgattttcgcaggagctgacacgaagataatgaagaattcaggaaaaacccggtttaaacggaccaagatcgattaccttatgaattacatggtgtacacgatatttgtggtactcatcctgctttccgcaggactggcaatagggcatgcatactgggaggcacaagtgggcaactccagctggtacctgtacgacggagaagatgataccccttcgtatagagggtttctgatcttttggggctacatcatcgtgctcaacaccatggtcccaattagcctttacgtatccgtggaagtgattcggctgggacagtcacatttcatcaactgggatctgcaaatgtactacgcagagaaggatacgcctgccaaggcacggaccaccactctcaatgaacaacttggtcaaattcactacatcttttcggacaaaactggaacccttacccagaatatcatgacgtttaagaagtgctgcatcaatggacagatatacggagatcacagagatgcatcacaacataaccataacaaaatcgaacaagtcgacttctcatggaacacgtacgccgacggtaaacttgctttttacgaccattaccttattgaacaaatccaaagcggtaaggaacccgaagtgcggcaattcttctttctgctggctgtgtgtcacaccgtgatggtggatagaacggacggacagctcaactatcaggcagcctcgccagacgagggagcactcgtaaacgccgctcgcaactttggattcgcatttctcgcgcgcacgcaaaacactatcaccatttccgaattgggtactgaacgcacctacaatgtgctggcaattttggacttcaattccgaccggaagaggatgtcgattatcgtgcgaacccccgaaggcaacatcaagctgtactgtaaaggtgcagacaccgtgatttatgagcgcctgcataggatgaatccaactaaacaggaaacgcaggatgccctcgacatctttgcaaacgaaactttgcgaactctgtgtctttgttacaaggaaatagaggaaaaagaattcaccgaatggaacaagaagtttatggcagcaagcgttgcatccaccaaccgtgacgaagctcttgataaagtgtatgaggaaatagaaaaggacctcatcctccttggagcaacggcaattgaagataaacttcaagatggggtccctgaaaccatatcaaagttggcgaaggccgatatcaagatttgggtcctgaccggagataagaaagaaaccgcagagaatatagggttcgcctgcgaattgctgaccgaggacacgactatatgctacggcgaggacatcaactctctgctccatgcaaggatggaaaaccagcggaatcgtggtggtgtgtacgcgaagttcgcacctccagtccaagagtcattctttccaccgggaggtaatagggccctcatcattactggatcgtggcttaacgaaatcctgctggagaaaaagaccaagcgtaacaaaattcttaaacttaagttcccacgaaccgaggaagaaagacggatgcggacccagtccaagcgcaggcttgaagcgaaaaaggaacaacggcaaaagaattttgtggacctggcgtgtgaatgtagcgcagttatttgttgtcgtgtgacgcccaagcaaaaagcaatggtagtggatctggtgaagcggtacaaaaaggccattaccctggccattggagacggcgccaatgacgtcaacatgattaagactgcacatattggggtcggaatctccggacaagagggtatgcaagcggttatgtcatcagattactcgtttgcacagtttcgctacctccaacggctccttctggtgcacggtcgatggtcatacatcaggatgtgtaagttcctgagatactttttctacaagaattttgccttcaccctcgtccatttttggtacagcttctttaatggctactctgcacagacggcatacgaggattggttcatcaccttgtacaatgtgctctacacttcgcttcctgtgcttttgatgggtcttttggatcaggacgtgtccgacaagctgtcgctgagatttccaggtctttacattgtgggacagagagatctgcttttcaactacaagagatttttcgtctcactgctgcatggggtgcttacctccatgatactgttcttcatccctctgggagcctatcttcaaactgtgggacaggatggcgaggcaccttcggattaccagtcctttgcagttactattgcatcggctttggtgattaccgtgaacttccaaatcggacttgacactagctactggaccttcgtgaacgccttttcgatctttggttccatcgccctgtattttggaattatgtttgatttccattcggcagggattcacgtcttgtttccttccgcctttcaatttactggcaccgcatcaaacgctctgcgtcagccatacatctggcttaccattattctcgcagtcgccgtctgcttgctcccagtcgtggctattagatttctcagcatgaccatctggcccagcgaatccgacaagattcagaagcatcgcaagagactcaaggcggaggaacagtggcagcggcgacaacaggtctttcggcgcggcgtctctaccagacgcagcgcctatgcgttttcacatcagcgaggatacgcagatctgatttcgagcggaagatcaattaggaaaaagcgttcacctctggatgcaattgtggcagatgggactgccgaatacagacgaacgggtgattcg

SEQ ID NO: 7386 - DNA, 3753 bp, synthetic construct
  misc_feature 1..3753: note = source = /note="Description of Artificial Sequence: Synthetic coding sequence"
  source 1..3753: mol_type = other DNA
atgagcactgagcgtgattccgaaacaacgttcgacgaggacagccaacccaatgacgaggtggtgccctacagcgatgatgagaccgaggatgaactggacgatcagggaagcgccgtggagcctgaacaaaatagggtcaatcgtgaggccgaagagaatcgcgaaccctttagaaaggaatgtacatggcaggtgaaggccaacgatcggaaatatcacgagcagccccactttatgaacaccaaatttctgtgtatcaaggagagtaaatatgccaataacgcgatcaagacttataagtacaacgccttcactttcattcctatgaacctgttcgagcagttcaaaagggcagcgaatttgtactttctggcactactgatcctgcaggcggttcctcagatcagtaccctggcatggtacacaaccctggtgcccctgctggtggtgttaggtgtgactgctatcaaggacctcgtggacgatgtcgcccgtcataaaatggataaagagatcaacaaccgcacatgtgaagttatcaaggatggccggtttaaagtggccaagtggaaggagatacaggtcggggacgttatccgtttgaaaaagaacgacttcgtaccggccgacattttgctgctaagcagctcagagcccaatagtctctgctacgtcgaaacagccgagctggatggagagactaatctgaagttcaaaatgtctttagagatcactgaccagtatcttcagcgagaagatacactcgccacattcgatggttttatcgaatgtgaagaacccaacaaccggctggataagtttacgggaaccttgttttggcggaatacatcattccccttggatgccgacaagatcctgctccgaggatgtgtcatcaggaacaccgatttctgccacgggttggtcatctttgccggtgccgatacaaagattatgaagaacagcggaaagacccggtttaaacggaccaaaattgattatctaatgaattacatggtttacacgatctttgtggtcctgattcttctatccgccgggctggcgatcggacacgcttactgggaggcgcaggtcggcaattcctcatggtatctgtatgacggcgaggacgacaccccctcctaccgaggtttccttatcttttgggggtatatcattgtgttgaataccatggtgcctatcagtctctacgtgagcgtcgaggtgatccggctgggtcagtcccacttcatcaactgggacctgcagatgtactacgcggagaaggatacccccgccaaagctcggactaccactctgaatgagcagctgggccagattcactacatcttttctgataaaacgggcacattgactcagaacatcatgacgttcaagaagtgctgcatcaatggccagatatatggagaccacagagacgcttcccagcacaatcataataagatcgagcaggtggacttctcttggaacacgtacgcagacggcaagttggccttttatgatcactatcttatagagcaaatccaaagtggcaaagagccagaagtcaggcagttcttcttcctactcgcagtttgccataccgtaatggtggatcggacagatggccagctgaactaccaggctgcttctcccgatgaaggggcgctggtcaatgcagccaggaactttggctttgcattcctggctcggacccaaaatacaatcactatctccgagttgggtaccgagcgaacatacaatgtccttgctattttggatttcaatagcgatcggaaacgcatgagtataatcgtacggactccggagggcaatattaagctatattgcaaaggcgccgataccgttatctatgagaggctgcataggatgaatcccacgaagcaggaaactcaggacgccttagatatctttgccaacgagactctcagaaccctgtgtctgtgctataaggagatcgaagagaaggagtttacagagtggaataagaagtttatggccgcttccgtggcttctactaacagggacgaggcactagataaagtgtacgaggagattgagaaagatctgattttactcggtgcaaccgcgatagaggataaactccaagacggtgtacctgagacaatctcgaaactcgcaaaggcagatattaagatttgggtactgacgggtgacaaaaaggaaacagcggaaaacattgggttcgcttgtgaattattgaccgaagataccacaatttgttacggtgaagacattaactcgctcctccacgctcggatggagaaccagcgcaatcgcgggggtgtctacgccaagtttgcccctccagtccaagagtccttttttcctcccgggggaaatcgcgcactcattataaccggttcatggctcaacgaaatcttgttggagaagaagacaaagaggaacaagatccttaagctcaaattccctcgcacagaggaagagcggcgcatgcgcacgcagagtaagagacggctagaggctaagaaagaacaacgccagaagaatttcgtggatctcgcttgtgaatgctcagctgttatttgttgcagagtgactcccaaacagaaagccatggtcgtcgatttggtgaaacggtacaagaaggccataactttggctataggagatggcgcaaatgatgtcaatatgatcaaaacagcccacatcggcgtcggaatatcgggacaagaaggcatgcaggctgtcatgagctctgactactccttcgcacagttccgctacttacagcggctgctgctggtgcacgggcggtggagttatatcagaatgtgcaaattccttagatattttttctataaaaattttgcttttactctggtgcacttttggtactcttttttcaatggctattctgcccaaaccgcctatgaagactggttcatcaccctgtataacgtgctgtacacttccctcccagtgcttctcatgggtttgcttgaccaggatgtctccgataagctgtcactcaggtttcccggtctgtacatcgtggggcagcgggacctgttattcaactacaagagattcttcgtaagcctcctacatggcgtgctcacctctatgattctgttttttataccccttggcgcatatcttcagacggttggccaagatggcgaggcaccaagtgattaccagagctttgccgtcaccatcgcttctgccttggtgatcaccgtcaatttccaaatcgggttggacacatcttactggacctttgtgaatgccttctccatattcgggtctatcgctctttactttgggattatgttcgattttcatagtgctggtatccatgttctgtttccctcagctttccaattcacgggcaccgccagtaatgcactcaggcagccatacatctggcttacaatcatcttggctgtcgccgtgtgtctgcttccggtagtggccattcgcttcctgagtatgacgatctggccctccgagtcagacaagatccagaaacatagaaagcggctcaaggcagaggagcagtggcagaggcgccagcaggtatttagacgaggcgtgtctaccaggcggagtgcctacgctttttcacatcagcgcggctatgcagatttgatctcgtccgggcgatcgatccgcaagaagagatctcccctggacgcaatagttgcagatgggactgccgagtatagaagaacaggagatagt

SEQ ID NO: 7387 - DNA, 3753 bp, synthetic construct
  misc_feature 1..3753: note = source = /note="Description of Artificial Sequence: Synthetic coding sequence"
  source 1..3753: mol_type = other DNA
atgtctactgaaagagattccgagactacctttgacgaggattcgcaaccgaacgatgaagtggtcccatactctgatgacgagactgaggacgaactcgatgatcaaggatccgccgtcgaacccgagcaaaatcgggtcaacagggaagccgaggaaaacagagagccattcaggaaagaatgcacctggcaagtgaaagcaaatgaccggaaataccatgagcaacctcatttcatgaatactaagtttctctgtattaaggaatccaaatacgcaaataacgcaatcaagacctacaagtataacgcctttacctttatacctatgaaccttttcgaacagtttaagcgagcagcaaatctgtactttttggcgctgctgattttgcaagccgtgccccagattagtacgctggcatggtacactacccttgtgcccttgctggtcgtgcttggagtcactgcaatcaaggatcttgttgatgacgtggcgcgccataagatggataaagagattaacaaccggacttgtgaagtgattaaggacggaaggtttaaagtggccaagtggaaggagattcaagttggagatgtgattagacttaagaaaaacgattttgtccctgcagacatcctgcttctgtcatcctcagaaccaaatagcctttgttacgtggagactgccgaactggatggagagactaatctgaagtttaagatgtcattggaaataactgatcaatacctgcagagagaagatacccttgccacctttgatggctttattgagtgtgaagaacctaacaacagactggacaaattcacgggtacccttttctggcggaacacgtcgtttcctctggatgcagacaaaatacttctgcgcggttgtgtgattcgaaataccgatttttgtcatggactggtgattttcgcaggcgccgatactaagattatgaagaattcgggaaaaacccgctttaagcgtaccaagattgattacttgatgaactacatggtgtacacgatttttgtggtgctcatcctcctgtccgccgggttggccattggtcacgcatattgggaagcacaggtcggaaattctagctggtatctttacgatggtgaggatgacaccccatcgtaccggggttttctgattttctggggctacatcattgtgctgaacacgatggtgccgatctccctgtacgtgtcggtggaagtgattagactgggtcaatcacacttcattaactgggatcttcaaatgtactacgctgaaaaggacactccggcaaaggctagaactaccacgctgaacgaacagcttgggcaaattcactacatcttcagcgacaaaactggcaccctgacgcaaaacattatgacttttaagaaatgctgcatcaacggacagatatacggagatcaccgtgatgcgtctcaacacaatcacaataagattgaacaagtggatttttcatggaacacctacgccgatggtaaactggcgttttacgatcattacttgattgagcagatacaatcaggtaaggaacctgaggtgaggcagtttttctttctgctggccgtgtgtcatactgttatggtggaccggaccgatggccagttgaattaccaagcagccagccctgacgaaggcgctttggtgaacgcggcacgtaatttcggatttgcctttcttgctagaactcagaacaccattaccatatccgaacttggaaccgaaaggacctacaatgtccttgccattcttgactttaacagcgaccgaaagcgaatgtcaatcatagtgcgcactcctgagggaaacatcaagctgtactgtaagggtgcagacacggtgatttacgagcgtttgcatcgaatgaatcccaccaagcaggaaacgcaggacgcacttgacattttcgcgaacgaaacccttagaaccctgtgcctctgttacaaagaaattgaagaaaaggagtttaccgaatggaacaagaaattcatggcagcgtctgtggcgagcactaatagagacgaggcacttgataaggtctacgaagaaatcgagaaagacctcattcttttgggagcaaccgccattgaagataagctccaagacggagtccctgaaaccatttcaaagctggctaaagcagacattaagatttgggttctgaccggtgacaagaaggaaacggcagaaaacatcgggtttgcctgcgagctcctgactgaagataccaccatctgttacggagaagatatcaattcacttctccatgccagaatggagaaccagagaaatagaggaggcgtgtacgcgaagtttgccccgccagtgcaagaatccttcttcccacccggtggcaaccgggcactgatcataactggaagctggctcaacgaaatactgctcgagaaaaagaccaaacgcaacaagatactgaagctcaaattccctcggacggaggaggagcgcaggatgcgcacgcagtcaaaaaggcgcctggaagcaaagaaggagcaaaggcagaaaaactttgtcgatctggcatgcgaatgctctgcggtgatctgttgtcgtgtgactccaaagcaaaaggcaatggtggtggaccttgtcaagagatacaagaaggcaattactctggcaattggagatggggcgaacgatgtgaacatgatcaagacggcacacatcggggttgggatcagcggccaggaaggtatgcaggcggtgatgtcctctgattactcgtttgcccaattcagatacctgcaacgcttgctccttgtccatggccggtggtcctatatccgaatgtgtaagttccttaggtactttttctataagaattttgcttttacgctcgttcatttttggtactcgttcttcaacggatatagtgcccaaactgcatacgaggactggtttatcaccctctacaacgtcctttacacttcgcttccagtccttctcatgggattgctcgaccaagatgtctcagataaactgagcctcagattccctgggttgtacatcgtaggtcagcgcgatctcctcttcaattacaaacgcttttttgtctcgttgctgcatggggtgctgacgtccatgattctctttttcatcccgctgggtgcatacctgcaaacggtgggacaggatggtgaagccccctctgattaccaatcattcgcagtgaccatcgcctcggcactggtgataaccgtgaactttcaaatcggacttgatacttcctattggacctttgtgaacgcattttctatctttggttccatcgcactgtattttgggatcatgtttgattttcattcggctggcattcacgtgctgttcccatcagcattccagttcaccggaaccgcaagcaacgcgctgcgccagccatacatttggcttaccatcatcttggctgtcgcagtgtgccttctgcctgtggtggccattagatttctgtcgatgactatctggccgtccgaatcggataagatacagaagcatcggaaaaggcttaaggcagaggagcaatggcagaggcgacaacaggtctttagaaggggagtgtcgacgagacggagcgcatacgcattctcgcatcaaagaggttacgccgatcttatttcgtcggggcgctccatacgaaagaagcgaagcccacttgatgcgatcgttgcagatggaaccgctgagtacagaagaaccggagactcg

SEQ ID NO: 7388 - DNA, 3753 bp, synthetic construct
  misc_feature 1..3753: note = source = /note="Description of Artificial Sequence: Synthetic coding sequence"
  source 1..3753: mol_type = other DNA
atgtcaacggaaagagacagcgagactacttttgatgaggattcccagccaaacgatgaagtggtaccctactccgacgatgaaactgaggatgagttggacgatcaggggtctgccgtagaacccgagcagaatagggtcaacagggaagctgaagagaatcgggaaccatttcggaaggagtgcacatggcaggtgaaagcaaatgacaggaaataccatgaacaacctcactttatgaacacaaaattcctgtgtattaaagaatcgaagtacgccaacaatgccatcaagacctataagtataatgccttcacttttatccctatgaacctgtttgagcaattcaagcgagctgctaacttgtactttctggcactcctaatcctccaggcagtaccccagatctcaactctagcctggtacacaactttagttcccctgctcgtcgtcctgggggtgaccgccataaaggatctggtcgacgatgtggcccgccataaaatggataaggaaatcaataatcgcacttgcgaggtcattaaggacgggaggttcaaggtcgccaaatggaaggagatccaggtcggtgacgtgattcgcctcaaaaaaaatgattttgtgcccgcagacatacttctactgagctcctctgaaccaaactcattgtgctatgttgagacggccgaattggacggggaaacgaatctcaagttcaaaatgagtttagagatcaccgaccagtatctccagagagaggataccctcgcgacatttgacggattcattgaatgtgaagaacccaacaacaggcttgacaagttcacgggaaccctgttctggcggaacacttcctttcccctggacgccgacaagatacttctgcgaggctgtgtgatccggaatactgacttctgtcacggcctggtgatttttgccggtgccgacactaagattatgaagaactccgggaagacccgtttcaaacgaactaaaatcgactacttgatgaactacatggtctacacaatctttgtggtgctcattctcctgtctgctggtctagccatcggccacgcctactgggaagcccaggtaggaaattctagctggtatctgtacgatggtgaagacgatactccctcttatcgaggattcctgatattctggggttacatcatcgtacttaacacgatggtgcccatttccctgtatgtgtctgtggaggtcattaggctgggccagtcccattttatcaattgggacctgcagatgtactatgctgaaaaagatacccccgccaaagctcgcacgaccacgctgaacgaacagctggggcaaattcactatatcttctccgacaaaacgggcactcttacccagaatatcatgaccttcaaaaaatgctgcatcaatggccagatctacggcgaccatcgggacgcctctcagcataaccataacaaaatcgaacaagttgatttctcttggaatacctatgcagatgggaagttggctttctacgaccattacctgatcgagcagatccagtctggcaaggagccggaggtgagacagttcttctttctgctggccgtgtgccatactgtgatggtggacaggacggatggccagctcaactatcaggcagccagcccagatgagggggcactagtaaacgccgcgcggaactttggattcgcttttcttgcaaggacccagaataccattacaatcagtgaactgggcaccgaacgaacttacaatgtgctggcaatccttgactttaacagcgacaggaaacgcatgtcgataatcgtcaggaccccagaagggaatatcaagctgtactgtaaaggggccgacacagtcatttatgaaagactgcatcggatgaatccgactaagcaggaaacccaggatgccctggatatcttcgccaatgagacgctgcgcacactctgtctctgctataaggagattgaagagaaggaattcaccgagtggaataagaagttcatggcggcatctgtggcctccacaaatcgagatgaagccctggataaagtttatgaagaaatcgagaaggatctgattctgttgggcgccacggccatcgaagacaagttgcaggacggggtgccagaaaccatctctaaactggcgaaagcagacattaagatatgggtgctcaccggggacaagaaagagacagctgagaacatcggctttgcatgtgagttgctgaccgaggacacaacgatttgctatggcgaggatatcaactctctcctgcacgcgaggatggagaaccaacggaaccggggaggtgtgtatgccaagtttgctcccccagtccaggagtccttcttccctcccggcgggaatagagcgttgataatcacggggagttggctgaatgaaatcctgctggagaagaaaaccaaaaggaacaagatccttaaactcaaattccctagaaccgaagaggaacgcaggatgcgtacccagagtaagagacgactggaagcgaaaaaggaacaaagacagaagaattttgttgatctggcttgcgaatgttctgcagtgatctgctgtagggtcacccccaagcaaaaggctatggtcgtggatctagttaaaaggtacaagaaggccatcacactagccataggggacggggcgaacgacgttaacatgatcaagactgcacacataggagttggcatcagcgggcaagaggggatgcaagctgtgatgagttccgattatagttttgctcagttcagatatctgcaacggctgttgctcgtgcatggtcgatggagctatattcgaatgtgcaagttcctgaggtactttttctataagaattttgccttcactctggtacatttctggtattcattctttaatggttattccgcccagacagcgtatgaagattggttcatcactctgtataacgtgctctataccagcttacctgtgctcctgatggggctgctggatcaggatgtgagtgacaaactatccctcagatttcctggtctttacatagtcggccagcgcgaccttctgttcaactataaacgatttttcgtgagtcttctgcatggagtgttgactagtatgatactgtttttcatccccctgggcgcctatcttcagaccgtggggcaagatggcgaagcgccctctgactatcagagctttgcagtcaccattgcgagcgccttggttatcacagtgaacttccaaattggcttagacactagttactggacctttgtaaatgccttttcgatatttggttctatcgcattgtatttcggtattatgtttgattttcactccgctggcatccatgtgctgtttccctcggcctttcaatttactgggacagctagcaacgccctgaggcagccgtatatctggctgacgatcatcctggccgttgcggtttgcctgctgccagtagtcgctatcagatttttgtcaatgacaatctggccctccgagagcgataagatccagaagcaccgaaagcgcctcaaagccgaagaacaatggcaaaggagacagcaagtattcaggcggggtgtctccacacggcggtccgcatacgccttttctcatcaacgagggtacgcagacctgatcagctcgggcagatctattcgaaagaagaggtccccactcgatgccattgtcgccgatggcaccgcggaataccgcaggactggggacagt

SEQ ID NO: 7389 - DNA, 3753 bp, synthetic construct
  misc_feature 1..3753: note = source = /note="Description of Artificial Sequence: Synthetic coding sequence"
  source 1..3753: mol_type = other DNA
atgtctacagaacgagactctgaaactaccttcgatgaggactctcaaccgaatgatgaggtggtcccgtactccgacgatgagacagaggacgagctggacgatcagggaagcgctgtcgagccggaacaaaacagggtcaatagggaggcagaggagaacagggaaccattcaggaaggagtgtacttggcaggttaaggctaatgatcgcaagtaccacgagcagcctcatttcatgaacacgaagtttttgtgtatcaaagagagcaagtacgccaataatgcaataaagacctataagtacaacgccttcaccttcatcccaatgaatctgttcgaacaattcaaaagagccgctaatctctacttccttgccctgctgattcttcaggcagtaccgcagattagcacgttggcatggtataccaccctggtccctctgctcgtcgttcttggagtgaccgcaataaaggacttggtggatgacgtggctcgacacaaaatggataaggagatcaataaccgaacctgtgaggtgattaaagacgggaggtttaaggttgccaagtggaaggagatccaggtgggtgacgttattagactcaagaagaatgactttgtgcctgccgacatccttctcctctcatcatctgagccaaatagcctgtgttacgtcgaaaccgctgagttggatggtgagacgaacctgaagtttaaaatgagtctggaaattacggaccagtatctgcagagggaggacacgctggctacttttgacgggttcattgagtgcgaggagcccaacaaccgactcgacaagtttaccggcactctgttctggaggaatacttccttccccctcgacgccgacaagattcttctgaggggctgtgtgattcgaaacacagacttctgtcatggacttgtgatctttgccggcgccgataccaagatcatgaagaactcaggcaaaacacggttcaagcggacaaagatagactacttgatgaattatatggtgtacaccatttttgtcgtgctgattttgctctcagcaggccttgctataggccatgcttactgggaggcccaggtgggtaacagcagctggtatctctacgacggtgaagacgacaccccgagctaccgcggcttcctgatcttctgggggtatatcatcgtacttaataccatggttcccattagcttgtatgtcagcgtggaggtgatcaggctgggccaatcccactttatcaactgggatctccaaatgtactacgccgagaaagacacacctgctaaggccaggaccactacgctgaacgaacagctgggccagatccattacatcttctccgacaaaacaggcacccttacgcagaatatcatgactttcaagaaatgttgcattaatgggcagatctacggagatcacagagatgcatcacagcataatcacaacaaaatcgagcaggtcgacttttcctggaatacatatgcagatggaaagctggcattctacgaccattacctcattgaacagattcagtcaggcaaggagccagaagtgcggcagttcttttttttgctggcagtttgccacacggtgatggtggatcgcaccgacggacagttgaactaccaggccgcgtcacctgacgagggagcactcgtcaacgctgccagaaactttgggttcgcgttcctggcaaggacccagaatacaataacaattagtgagctcggaacagagagaacctataatgtcttggccatccttgacttcaactcagacaggaagcgcatgtcaattatcgttaggactccggaggggaacatcaaactgtattgcaaaggggctgatacagtgatctatgaaaggttgcaccggatgaatccaacaaagcaagaaacccaggacgccttggatatcttcgccaatgagactttgcggaccctgtgtctctgctataaggaaattgaggagaaggaatttactgaatggaataaaaagttcatggccgccagcgtggcttcaactaacagggatgaggctctggacaaagtgtatgaggagattgaaaaggatctgatcctgttgggtgctactgcaattgaggacaaattgcaagatggtgtgcctgagacaatttccaagcttgctaaagccgatatcaagatctgggtcctcaccggcgataagaaggagaccgcagagaatatcgggttcgcctgcgagcttctgacagaggacactaccatctgctacggggaggatatcaacagtctcctgcacgctagaatggagaaccagcgcaataggggaggcgtctacgctaagtttgcaccgcccgtgcaggagagtttttttccccccgggggcaacagggctctgatcatcacgggcagctggcttaatgaaattttgctcgagaagaagaccaagcgaaacaagatcctgaaactgaagttcccgcgaacagaagaggagagacggatgcgcacacaaagcaaaaggcgactcgaggcaaaaaaagaacaacggcagaagaattttgtggacctggcttgcgaatgctcagcggtgatttgttgccgagtgactcctaaacagaaagctatggtcgttgacctggtaaagagatacaaaaaggccatcacgctcgctattggagacggagctaacgacgttaacatgataaaaacagcccacatcggtgttggcattagcggccaggaggggatgcaggcagtgatgtctagtgattactccttcgcccagttccggtacctccagagacttttgctggtccatggacggtggagttacattcggatgtgcaagttcttgcggtactttttttataaaaattttgcttttacactggtgcacttctggtactccttcttcaacgggtactctgcacagaccgcttacgaagattggtttattactctgtataatgtactgtacacaagcttgcccgtgctgcttatgggacttttggatcaggatgtctcagacaagctgtccctgcggtttcctggcctgtacatagtgggacagcgggaccttttgtttaactacaaacggttctttgtaagtctcttgcacggggtgcttaccagcatgatcctgttttttattccattgggggcctatctccaaaccgttggccaggacggagaggcaccttcagactaccaatcattcgccgtgaccatcgctagcgccctggtgatcactgtaaatttccagatcgggctggacacaagctattggacatttgtgaatgctttctccatcttcggctcaatcgcactttactttggaatcatgtttgacttccacagtgccggtatccacgtgctctttcccagcgccttccagttcaccggcaccgccagtaatgccctgcggcagccttacatctggctgacgattattctggctgtggcagtctgtttgctccctgtggtcgcaattcggttcctctccatgaccatttggccttcagaatccgacaaaatccagaagcaccgcaaaaggcttaaagccgaggagcagtggcagcggcgacaacaggtgtttagacgcggtgtaagcaccagacggagcgcctatgccttctcacaccaacgggggtacgccgacctcatcagcagtgggcgctctatcagaaagaagagatcaccgctcgatgcgatcgtcgccgatgggacggccgagtatcggaggacaggagacagt

SEQ ID NO: 7390 - DNA, 3753 bp, synthetic construct
  misc_feature 1..3753: note = source = /note="Description of Artificial Sequence: Synthetic coding sequence"
  source 1..3753: mol_type = other DNA
atgtcgaccgagcgcgatagcgagacgacctttgacgaggattcccagccgaatgatgaagtcgtgccttactctgacgatgagactgaggacgaattggatgaccaaggctcggccgtggagcctgagcagaaccgcgtcaatagagaagccgaagagaatcgcgagccgttcagaaaggaatgcacttggcaggtgaaggcgaatgatcgcaagtaccatgagcagccgcactttatgaacactaagttcctgtgcatcaaggaatcgaagtacgcgaacaacgccatcaagacttacaagtacaatgcatttaccttcataccgatgaacttgtttgagcaattcaagcgcgcagccaatctttacttcctggcgcttctgatcctgcaggcggttccgcaaatcagcactctcgcgtggtacaccacccttgtgccgttgctggtcgtgctgggcgtcaccgcgattaaggacctggtggatgacgtcgcccgccacaagatggacaaagaaatcaataatcggacttgtgaggtcatcaaggacggtagattcaaggtggccaagtggaaggaaatccaggtcggtgatgttattaggctcaagaaaaatgatttcgtgccagcagacatcctgctgctgtcctcctccgagcctaactccctgtgctacgtggaaactgctgagctcgacggcgaaactaatctgaaattcaagatgtcgcttgagatcacggaccagtatctgcaacgcgaagatacccttgcgacgttcgacggctttatagaatgcgaggaacctaacaatcggctcgacaaattcactgggacgctcttttggcggaacactagtttccctctcgatgccgacaagatcttgctgcgcggctgcgtgatccggaatactgacttttgtcacggactggtgatcttcgctggagcagacacgaagatcatgaagaacagcggaaaaactcgctttaaacgcactaagatcgactacctgatgaactacatggtctacacgatcttcgtggtgctcatcttgctgtcggcaggattggcgatcggacacgcctactgggaagcccaagtcggtaactcctcgtggtacctttacgacggcgaggacgataccccttcttacaggggattcctgatcttctggggatacatcattgtgcttaacaccatggtgcctatttcactgtacgtgtccgtggaagtgatccggctgggccagtctcacttcattaactgggatcttcagatgtactacgcagaaaaggacactccggcaaaggcacgcaccaccaccctgaacgagcagcttggacaaatccattacatcttctcagataaaaccggaaccctgactcagaacatcatgaccttcaagaaatgctgcatcaacggacagatctacggcgaccacagagacgcctcacaacacaaccacaacaaaatcgaacaggtggatttctcctggaatacctacgctgatggaaagctcgccttctatgatcattatctcatcgaacagatccaaagcggcaaggagcctgaggtgcgacagttcttctttctcttggccgtctgccacactgtgatggtggaccggaccgatgggcaactgaactaccaagctgcgtcgccggatgaaggagcgctggtgaacgctgccagaaatttcgggtttgctttcctggcgcggacccagaacaccatcaccatctccgagctcgggactgagcgcacttacaatgtgctcgcaatcttggatttcaattcggatcggaagcgcatgagcattatcgtccgtactccggagggcaacatcaagctctactgcaagggtgcagatacggtcatctacgaaaggctgcaccgcatgaacccgactaaacaagagacgcaagatgcgctggacatcttcgccaacgaaactctgcgcaccctctgtctgtgctacaaagaaatcgaggagaaggagtttaccgagtggaacaagaaattcatggcggcatccgtggcatcgaccaatagagatgaggccctcgacaaggtctacgaggaaattgaaaaggatctgatcctgttgggcgctaccgccatcgaagataagctccaagacggagtgccggaaaccatctcgaagctggcaaaggcagatatcaaaatctgggttctcactggggataagaaggaaactgcggaaaacattggattcgcctgtgagcttctgactgaggacactactatctgctatggagaggacatcaatagcctgctgcacgcgcgcatggagaatcaaagaaaccggggaggagtgtacgctaaattcgctccacccgtgcaggagtccttcttcccgcccggcggaaatcgggccctgatcatcactggatcatggctgaacgagatcctcttggaaaagaaaaccaagcgcaacaaaatcttgaagctgaagtttccaagaaccgaggaggagcgcagaatgcgcacccagtccaaacggagactggaagccaagaaggaacagcgccaaaagaacttcgtggacttggcctgcgagtgcagcgccgtgatctgctgtcgcgtcaccccgaagcagaaggccatggtcgtggatctggtgaagcggtacaagaaagccatcactttggcaatcggagacggggccaacgatgtgaatatgatcaaaaccgctcacatcggcgtgggaatctccggccaagaaggcatgcaagcggtgatgtcgtccgattactcgtttgcacagttccgctatctgcaaagattgctgctggtgcacgggcgctggtcgtatatcaggatgtgcaaatttctgagatacttcttctacaagaactttgccttcactctggttcatttctggtactcgtttttcaacggctactccgcccagactgcctacgaggactggtttatcacgctctacaacgtgctctacacgagtctcccagtgttgctgatgggactcctcgaccaagatgtttctgacaaactcagcctgcgctttccaggcctgtacatcgtgggacagcgcgacctgctgtttaactacaaaagattctttgtctcactcctgcatggggtgcttacctcaatgatcttgttcttcatcccgttgggagcatacctccaaactgtgggccaagatggcgaagctccgtcagactaccagtcgttcgccgtgaccatcgcttctgccctggtgatcacggtcaatttccagattgggctggacacctcatactggaccttcgtgaacgcattctcgatcttcggctcgattgccctctacttcggaattatgttcgacttccattccgccggcattcacgtcttgtttccgagcgccttccagttcactggcacggcctcaaatgcgctgcggcagccgtacatctggctcaccattatcctggccgtcgcggtgtgtcttttgccagtggtggcgatcagattcttgagcatgaccatctggccatccgagtcggacaagatccagaagcatcgcaagcgcctcaaggccgaagaacagtggcaacggagacagcaagtctttagacgaggggtcagcaccagacgaagcgcatatgccttctcgcaccagcggggatacgcggacttgatctcgtccggccggagcatccgcaagaaacggagcccccttgacgccatcgtcgcggatggtaccgctgagtaccggagaaccggcgacagc

SEQ ID NO: 7391 - DNA, 3753 bp, synthetic construct
  misc_feature 1..3753: note = source = /note="Description of Artificial Sequence: Synthetic coding sequence"
  source 1..3753: mol_type = other DNA
atgtctacggagcgtgactcagagaccacatttgatgaggatagccaaccaaacgatgaagtggtgccttactcggacgacgaaacagaggatgagctggatgaccaggggtcagccgtcgagccagagcagaacagagtcaatcgggaagcagaggaaaacagggagccctttcggaaagagtgcacatggcaagttaaagcaaatgaccgcaaatatcatgaacagcctcacttcatgaataccaagtttttgtgtatcaaggaatctaaatatgcaaacaacgccattaagacctataagtataacgcgttcacatttattccaatgaacctctttgaacagtttaagcgggcggcaaacctgtatttcctggccctgctgattttacaggcggtgcctcagattagcacactggcttggtacaccaccctggttcctctgttggtggtcctgggcgttacagccataaaagatcttgtggacgacgtcgcaaggcataaaatggacaaagaaatcaataatagaacgtgcgaagtgatcaaagatggaaggtttaaggttgctaagtggaaagaaatacaggtgggggatgtcattagactaaagaaaaatgatttcgttccagcggatatcctgctactgtcttctagtgagcccaattctctgtgttatgtcgagaccgccgaactggacggcgagacaaatttgaagttcaagatgtctttggagatcaccgaccagtatttgcaacgcgaagatacactggcaacctttgacggcttcatcgaatgcgaggagccgaacaatagactggataaattcacaggcaccttgttttggcggaatacgtccttccccctggatgcagacaagatcctgctgagagggtgtgtgattcgtaacacggacttttgccacggcctagtgattttcgccggcgcagacacgaaaattatgaagaatagtgggaaaaccagattcaagagaactaaaatcgattatctgatgaattacatggtgtacacaatcttcgtggtgctgatacttctaagcgcaggtcttgccattggccacgcctactgggaagcacaggtgggaaactccagctggtacctatacgatggagaggatgacacaccctcttaccgtggctttttgatattttggggctacattatcgtgctgaacaccatggtccctatctctctgtacgttagtgtggaggttatcaggttgggtcagtcacattttattaattgggatctgcagatgtactacgctgagaaagatacgcctgccaaggctcgcacaaccacgctgaatgaacagctcggtcaaatccattatatcttctccgacaagaccggcaccctcacacagaacatcatgacgtttaagaagtgttgcatcaacggccagatctatggagatcatcgggacgcttctcagcataatcacaacaaaatcgaacaggtggatttctcatggaatacatacgcagatggtaaattggcgttctacgatcattatttaattgagcaaattcaaagcggtaaggaacctgaggtgcggcaattcttctttctgttggctgtgtgccacacagttatggtggacaggactgatgggcagcttaactaccaggccgcctctccggatgaaggcgccctcgtaaatgcggctcggaacttcgggtttgcctttctcgcacgaactcaaaacaccattacgatatccgaactggggaccgagcggacatataatgtgttggccattctggatttcaacagcgacagaaagagaatgtccatcattgtccgcacacctgaaggaaacatcaagctgtactgtaaaggggcggataccgtcatttacgagagactgcaccggatgaatccaaccaagcaggagacacaggatgctttggatatcttcgccaacgaaactctgcgtacactgtgcctctgctataaggagattgaggagaaagagtttacggagtggaacaaaaaatttatggctgctagcgtcgcctctaccaatcgcgacgaggcgctcgacaaggtctacgaggagatcgagaaagacttgatcctgctgggtgccaccgcaattgaggataaactccaggacggagtgccggaaaccataagcaagcttgcaaaggctgatatcaagatctgggtactgactggtgataaaaaggagaccgctgagaacatcggatttgcatgtgaactgctgaccgaggatacaaccatctgttacggagaggatattaactctctactacacgctagaatggaaaaccaacgcaacagggggggagtgtacgctaagttcgctccaccggtccaggagtcattttttccccccggcggaaacagggccctcattattaccggcagttggcttaacgaaatactactggagaagaagacaaagaggaacaaaattctgaagcttaaattcccaagaaccgaggaggaacggcggatgcgaacgcagagcaagaggagactggaggccaagaaggagcagaggcagaaaaacttcgtggacctcgcatgcgaatgcagcgccgtgatatgttgtagggtgactccaaagcagaaggccatggtggtcgatctcgttaaacgctacaaaaaggccattaccctggcgattggcgatggtgctaatgacgtgaatatgatcaagactgcgcacatcggtgtggggatcagcgggcaggagggaatgcaggcagtgatgtcttctgactattcgtttgctcagttcagatacctgcagagactcctgttggtgcacggcagatggtcttatatcagaatgtgtaagtttctacggtacttcttttacaagaattttgctttcacattggtccatttctggtactccttcttcaacggttatagcgctcagacggcttacgaggactggtttattaccctgtacaatgtgctgtacacctcccttcctgtcctcttgatgggcctcctggatcaagacgtgagcgataagttgagcttgagattcccaggcctgtatattgttgggcagagagacctgttgttcaattacaagaggttttttgtgagtctgctccatggagtgttgacatccatgatacttttttttatccccctgggggcatacctccagacggtaggtcaggatggggaggccccgagcgattatcagagctttgccgtcaccatcgctagcgctttggtcattacagtcaattttcagataggcctggacacctcttactggacctttgtgaacgcattttctatctttggcagcatcgccttgtatttcgggatcatgtttgatttccactccgctggtatacacgttctgtttccctctgcctttcagttcacgggaactgcatcaaacgcactgcggcaaccatatatctggcttacaattatcttggctgtcgctgtgtgcttattacccgtcgtggcaatcagatttctgagcatgacgatttggccatcagaatccgataagatccagaaacaccgcaaacgcttgaaagcagaagagcagtggcaacgtcggcagcaggtcttccgcaggggggtgagtactcgcagatctgcctatgccttttctcaccagcggggttatgcagacttgatttcaagtgggcgctccattcggaagaagaggtcacccctggatgccatagtcgctgacgggaccgccgagtaccggcgcaccggagactca

SEQ ID NO: 7392 - DNA, 3753 bp, synthetic construct
  misc_feature 1..3753: note = source = /note="Description of Artificial Sequence: Synthetic coding sequence"
  source 1..3753: mol_type = other DNA
atgtcgaccgaaagagactcggagactacctttgacgaggattcgcagccgaacgatgaagtggtgccctacagcgacgatgaaactgaagatgaacttgatgatcaaggatccgcggtggagcccgaacaaaaccgagtgaatcgggaggctgaagagaatagagaacctttcaggaaggaatgtacctggcaagtgaaggcaaacgatcggaaataccacgaacaacctcatttcatgaacaccaagtttctttgcatcaaagaatcgaaatacgcaaataacgcaattaagacttacaaatacaatgcattcacctttattcctatgaacctgtttgagcagtttaaacgggcagccaatctttactttttggcactgttgatactgcaagcagtgccacaaatttcgacccttgcctggtacaccactttggtcccactgctggtggtgcttggcgtgactgcgattaaggaccttgtcgatgatgtggccaggcataagatggacaaggagatcaacaacagaacctgcgaagtgattaaggatggacgctttaaagtcgcgaagtggaaggaaattcaagtgggcgacgtgattcgcctgaagaagaacgattttgtgcccgccgacattcttctcctctcgagctccgagcccaatagtctgtgctacgtcgagactgcagaacttgatggagaaaccaacttgaaattcaagatgagcctcgagatcactgatcagtaccttcaacgggaagataccctcgcaactttcgacgggttcatcgagtgcgaagaacccaataacagactggacaagtttaccggaacgctgttttggagaaacacgtccttcccgctggacgcagataagattctgttgagagggtgtgtcattcggaacactgatttctgccacggattggtcatttttgcaggcgccgataccaagattatgaagaattccggtaagacccgttttaagaggaccaagattgattacctcatgaattacatggtctacaccatattcgtggttctgattcttctgtcagcaggacttgccataggacatgcttactgggaggcacaggttggaaactcctcctggtacctttacgacggtgaggatgataccccttcataccgcgggtttctgattttctggggatacattattgtgctgaacacgatggtgccaatttcgctctacgtctcagttgaagtgatacgtcttggtcagtcgcatttcatcaactgggacttgcaaatgtactacgctgagaaagacacccctgcaaaagcacgaactaccacgcttaatgaacagctgggacagattcactacattttctcagataaaacgggaactttgacccagaacattatgacttttaagaagtgttgtattaacggtcagatttacggtgaccatcgggatgcttctcaacacaaccataacaagattgaacaggttgattttagctggaacacttatgccgatgggaagctggccttctacgatcactacctgattgagcagatccagtcgggtaaggaaccggaagtaaggcagtttttcttccttctcgcggtgtgtcacaccgtgatggtggatcggaccgatggccagcttaactaccaggcggcgtcccctgatgagggtgcactcgtgaacgccgcgcgtaactttggatttgcgtttttggcccgcacccaaaatacgattactatctccgaacttggtaccgagcgcacttacaatgtgctggcgatccttgatttcaattcggatagaaagcggatgtccatcattgtgcgaacccctgaaggcaatatcaaactttattgtaagggagcggatactgtgatctacgagcggcttcatagaatgaaccctactaaacaggagacgcaagatgcactcgatatcttcgcaaatgagactctgagaaccctttgtttgtgctataaagaaattgaagaaaaagagtttactgagtggaacaaaaagtttatggcagcatctgtcgcgtcaaccaatcgcgacgaagcactggacaaggtgtacgaagaaatcgaaaaggatttgattctcctgggagcaaccgcgattgaggacaagctccaggatggagtgcccgaaactatatcgaaactggcaaaggcagatatcaagatctgggtccttacgggtgacaaaaaagaaactgcagaaaacataggttttgcatgtgagctgcttactgaagatactactatttgttatggcgaggacattaactcgctccttcatgcccgaatggagaaccagcggaatcgcgggggcgtgtacgcaaagtttgcccctcctgtgcaggagtcatttttccctccgggcggcaatcgggcactcatcattacgggttcgtggcttaacgagattctccttgagaaaaagactaaacgcaataagatcctgaaactcaagtttccacgtaccgaagaagaacgccgcatgagaacccaatccaagcgaaggcttgaagcgaagaaagaacagcgccaaaagaactttgtggacctcgcatgtgaatgtagcgccgtgatttgctgtcgagtgaccccaaaacaaaaggccatggtcgtcgacctcgtgaagagatacaaaaaggcaattactctcgcaattggggatggcgccaacgatgtgaacatgattaagaccgcgcatataggcgtcggaatatcgggtcaggaaggtatgcaagccgtgatgtcgtcagactactccttcgcccagtttagataccttcagcgtctgttgctggtgcatggccggtggagctatattcgaatgtgtaaattcctgcgttatttcttctataagaattttgcgtttactctggtgcacttttggtacagcttcttcaacggttactcggcacagaccgcctatgaggactggttcataaccctttacaacgttttgtacacgtccctgcctgtgcttctgatgggcctgcttgaccaagatgtgtcagacaagctgtcacttcggttccctggtctgtacatagtgggtcaacgggacctgctgttcaactacaagcgtttctttgtcagcctgctgcatggggtgctcacctcaatgattctgttctttataccacttggcgcttacctccaaacggtgggacaagatggagaagcgccgtcagattaccagtcctttgcagtgaccattgcgtcggcacttgtgattacggtgaattttcaaataggactggacacctcgtactggacctttgtcaatgcattttcgatatttggatcaatagcactttactttggtattatgtttgatttccattccgcgggaattcacgtgctctttcctagcgcatttcaatttactggtactgcttccaacgcacttcggcaaccatacatttggcttactatcattttggcggttgccgtttgcctcctccctgtcgtagcaatcagatttctgagcatgaccatttggccttcggaatcggataagatccagaagcatagaaagagactgaaggccgaggagcaatggcaaagaaggcaacaagttttccgacgcggtgtctcaactcggagatcagcatacgccttcagtcatcaacgcgggtatgccgatctcatctcaagcggaagatcgattcgcaagaaaagatcacctcttgatgcgattgtggccgatggaaccgccgagtataggcgtactggcgattcg

SEQ ID NO: 7393 - DNA, 3753 bp, synthetic construct
  misc_feature 1..3753: note = source = /note="Description of Artificial Sequence: Synthetic coding sequence"
  source 1..3753: mol_type = other DNA
atgagcacagaacgggatagcgagacgactttcgatgaggactctcagccaaacgatgaggtggttccttactctgacgacgagacagaagacgaactggacgatcagggctcagccgtcgaacccgagcaaaaccgggtgaatcgagaagcagaagagaacagggagcctttccgtaaagagtgtacttggcaggtgaaagctaatgatcggaagtaccatgaacaaccccacttcatgaacaccaaatttctctgcataaaagagagcaaatatgcaaataacgccatcaagacctacaaatacaatgccttcacatttatccccatgaacttgttcgaacagttcaaaagggccgccaatttatattttctggcactgctgatcctgcaggccgtgcctcagatctctacactggcctggtatacgaccctggtgcccctcctggtggtgctaggcgtgacagctatcaaggatttggtggacgacgtggctcggcataagatggataaagaaatcaacaatcggacttgcgaggtgataaaggatgggcggtttaaagtggcgaaatggaaggagatccaggtgggtgacgttatacgcctcaagaagaatgattttgtgcctgcggatattctgctgctaagctcctcagagcccaattccctgtgctatgtggagacagccgagctcgatggtgagaccaacctgaagttcaagatgagcctcgaaataacggatcagtacctccagcgcgaagatactctggccacattcgacggattcatagaatgtgaagaaccaaataacagacttgataagtttaccggaaccttgttctggcgaaacacgagctttcctctcgacgcagataagattctgctacggggttgtgttattcgaaacaccgacttttgccatggtctggttatcttcgccggagccgataccaagataatgaaaaactcaggaaagaccagattcaagcggacaaaaatcgactacctcatgaattatatggtgtataccatctttgtagtgcttatactgctgagcgccggactggcaatcggtcatgcatactgggaagcacaggtcggtaactcaagctggtacctctacgatggcgaagatgatactccatcttatcgcggattcttaatcttttgggggtacatcatcgtgctcaataccatggtcccaatcagtttgtatgtcagtgtagaagttatcaggttgggccagtcccatttcatcaattgggacctccagatgtattacgctgaaaaggacacccctgctaaagcccggaccaccacccttaatgaacaacttggtcagattcattacatattttccgataagactggtactctaactcagaatattatgacgttcaaaaaatgctgtattaatggacagatttatggagaccaccgggatgcaagtcagcataatcacaacaaaatcgaacaggtggacttttcgtggaatacttatgcggatggtaaactcgctttttatgatcactatctgatcgaacaaatccagagtggaaaagaacccgaagtccggcagttcttttttctgctggctgtttgccacactgtgatggttgatcgaaccgatggccagctgaactatcaggccgcttcccccgatgaaggagcactcgtcaatgccgcaaggaactttggttttgcatttttagcacgaacacaaaataccatcaccatttcggaactggggaccgaaaggacttacaacgtgctggccatcttggattttaactcagatcggaagcggatgtctatcatcgtcagaacgcctgagggtaacattaaactttattgcaagggagccgatactgtgatctacgagcgactgcaccggatgaatcccacgaagcaggagacacaggatgcactcgacatcttcgccaatgagactcttagaaccctgtgcttgtgttacaaggaaattgaggagaaggagttcacggaatggaacaagaaattcatggccgctagtgtcgcatcgaccaatcgggacgaggcactggacaaagtttacgaggagattgagaaggacctgatcctcctgggcgctacagccatcgaagataaactccaggacggggtgcccgagactataagcaagctggctaaagcagatattaaaatatgggtccttacaggcgataagaaggagactgcagaaaacatcggcttcgcctgcgaattactcacagaagacaccaccatctgctatggcgaggacatcaactctctgctgcacgcccgaatggagaaccagcgcaataggggcggagtgtacgcaaagtttgccccaccagttcaggagtctttctttccacccggcggaaatcgtgccctgataataacagggtcatggctaaatgagattttgctcgagaagaagaccaaaagaaacaaaattctgaagttgaaatttcccagaaccgaggaggaaaggcgcatgcggacacagagcaaacggcgccttgaagccaagaaggagcagcgccaaaaaaacttcgtggatctggcgtgtgagtgctccgcagtcatctgttgccgcgtgacccctaagcagaaggccatggtagtcgacctggtaaagcgctataaaaaagctatcacactcgcaatcggcgacggagccaacgatgtaaatatgattaaaactgcacacataggcgtgggtataagcggccaggagggcatgcaggccgtgatgtctagtgactattctttcgcacaattcagatatttacagcgcctgttgctggtccatggtcggtggagctacatccgcatgtgcaagttcttgcgctatttcttctacaagaattttgcctttaccttggtccacttctggtattcgttcttcaatggctattcggcccaaacggcctatgaagattggtttataactctgtacaatgtgttgtacactagcttgcctgtgctgctgatggggctgttggatcaggacgtatcagacaaactttcgctcaggttccccggcctgtatatagtcggccaacgtgaccttctcttcaattacaaaaggttctttgttagcctcctacacggagtgttgaccagtatgattttgttcttcattccactgggggcgtacctacaaaccgttgggcaagacggagaagctccgtccgattatcagagctttgcggtgacaatcgcatcagccctcgtaattacagttaactttcagatagggttggacacctcctactggacttttgttaacgcttttagcatctttggctccatagccctgtactttgggattatgttcgactttcattctgccggcatccacgtgctgttcccttccgcgtttcaattcacaggcactgcgagcaacgccctgcgacaaccatacatctggctgactataattttggcagtggccgtgtgcctgctgcccgtggtagctattagatttctgagcatgaccatttggcccagtgagtctgataagatacaaaagcatagaaaaagactaaaggccgaagagcagtggcagaggaggcagcaggtcttccggaggggcgtgtccactaggaggtctgcttacgccttttctcatcagagaggctatgccgacctcatctcctccggccgatcaatccgcaaaaaacgatcccctttggatgccatcgtcgccgacggaacagccgagtatcgccggacaggtgacagc

SEQ ID NO: 7394 - DNA, 3753 bp, synthetic construct
  misc_feature 1..3753: note = source = /note="Description of Artificial Sequence: Synthetic coding sequence"
  source 1..3753: mol_type = other DNA
atgagcaccgaaagggattccgagacaaccttcgacgaagactcccagccaaacgacgaggttgtgccttacagcgatgacgagacagaagatgagctggacgatcagggtagcgcagtcgagccggaacagaatcgcgtgaatcgtgaggccgaggagaaccgcgaacctttcagaaaagagtgcacctggcaggtgaaggctaatgatcgcaagtaccatgaacagccgcacttcatgaataccaaatttttgtgcatcaaagaatcaaaatatgcaaacaatgcaattaaaacctataaatataacgcatttacgttcataccgatgaatctgttcgagcagttcaaacgcgccgcaaacttgtactttttagctctgttgattttgcaggccgtgccgcagatcagcactctggcgtggtatacgactctggtgcctctgctggttgtcctgggtgttacggcaatcaaagaccttgtcgatgacgtcgcccgtcacaagatggacaaggagatcaataatcgcacgtgtgaggttatcaaagatggtcgctttaaagtcgccaaatggaaagagatccaggttggcgatgtcattcggctgaaaaaaaacgattttgtccctgcagacattctgctgctgagcagcagcgagccaaatagcttatgctacgtcgaaacggcggagctagacggcgaaacaaatctaaaatttaagatgagcctggagataacggaccagtatctgcagagggaggataccctggccactttcgatggtttcatcgagtgcgaggaaccaaataaccgtctggacaagttcaccggtacccttttttggcgtaataccagctttccgctggatgcagataagatattgctccgcggatgcgttattagaaatactgatttctgtcacggtctggtgatctttgccggtgcggatacgaagataatgaaaaattctggtaaaaccagattcaagcgaaccaagattgactacttgatgaactacatggtttatacaattttcgtggtgttgatcttactgagcgcgggcttggctatcggtcatgcctactgggaggcacaggtgggcaattcatcttggtacttgtatgacggtgaggacgatacccctagctatcgtggatttctgattttttggggttatatcattgtcctcaataccatggtccctattagcttgtacgttagcgtggaggtgattcgtctgggccagtcccacttcattaattgggatctgcaaatgtactatgctgagaaagataccccggcgaaggcacgcaccactacgcttaatgagcaactaggccagattcactacattttcagcgataaaaccggtacgctgacccaaaatattatgacgtttaaaaagtgctgcataaacggccagatttacggcgaccatagggatgcatctcagcacaatcacaacaagatcgagcaggtcgacttctcgtggaatacctatgcggacggaaaattagccttttatgaccattaccttatcgagcaaatccagtctggtaaagagcctgaggtgcgccaattcttttttctgctcgcagtgtgccacacagttatggtggatcgcaccgacggacaactgaactatcaggctgcttccccagatgaaggcgccctggtcaatgcggccaggaactttgggtttgcgttcctggcacgcacccaaaacaccatcactatctctgagttgggcaccgagcgcacttacaatgtgctggcgatcctggattttaacagcgaccgtaaacgtatgagcatcattgtcagaacgccagagggtaatatcaagctttattgcaagggtgccgacactgtcatctacgagcgcttgcataggatgaatccaactaagcaggagacccaagatgctctggatatctttgctaacgaaaccctcaggaccctgtgtctctgctataaagaaattgaagagaaagagttcactgagtggaacaagaagtttatggctgcaagcgtggctagtacgaatagagatgaggcgctggataaggtctatgaggaaattgaaaaggatctgatcttactgggcgcgaccgctatagaggataaactgcaagatggcgtgccagagaccattagcaagttggccaaagctgacattaagatttgggtgctgaccggtgataaaaaggagactgcggagaacattggcttcgcttgcgaactgctgactgaggacaccacgatctgctatggtgaagatattaattccctcctgcacgcacggatggagaaccagcgaaaccgtggtggtgtgtatgcgaagtttgcgcctcctgtgcaagagtcgtttttcccgccaggaggcaatcgtgccctgattatcaccggcagctggttgaacgaaattctgctcgagaagaaaactaagaggaacaaaatcctgaagcttaaattcccgcgcacggaggaggagcgccgcatgagaactcaatcaaagcgccgtctggaggccaaaaaggagcagaggcagaagaattttgtcgacctggcgtgtgaatgtagcgctgtgatctgctgccgtgtcacgccaaagcaaaaagcgatggtggttgatctggtgaagcgctacaagaaggccattacactggccataggcgatggtgccaacgacgtgaacatgatcaaaactgctcacatcggtgtcggcattagcggacaggagggtatgcaagctgtcatgagcagcgactactccttcgctcagttccgctatctgcaaagactgctgctggttcacggccgctggtcctacatccgcatgtgcaagttcctgcgctacttcttctataaaaacttcgctttcaccctggttcatttctggtactcattctttaacggctactctgcgcaaaccgcgtacgaggactggtttatcactctatataatgtgttatacacatctctgcctgtcctgcttatggggttgctggaccaggacgtctctgataagttgagtcttcgattcccaggtctgtacatcgttggccaacgcgatctcctcttcaattataagcggtttttcgtgagcttgttacacggtgtcctgacctccatgattctgttctttataccactgggtgcctacctgcagaccgtgggtcaggatggcgaagcccctagcgactatcagtcctttgcagtaacgatcgcatctgcgctggttatcaccgtcaattttcagattggactcgatactagctattggacgtttgtgaacgcattttctatttttggctctattgcgctgtactttgggatcatgttcgattttcattctgcaggcattcacgtcctgttccccagcgcatttcagttcaccggcaccgcgtcaaacgcgctccgccaaccgtacatttggctgactatcattctcgcggtcgcggtgtgtttgctgccagtggtcgctatccgctttctgtccatgaccatctggccgagcgaatcggataagatacagaagcatcgcaaacggctgaaggctgaggaacaatggcaacgtcggcaacaagtgttccggcgcggggtgtccactcgccgttcggcatacgctttcagccaccagaggggctatgcagatctgatttcgagcggccggagcattcgcaagaaacggtcacctttggacgcaattgtggctgatggtacggcggagtataggcgcactggcgattct

SEQ ID NO: 7395 - DNA, 3753 bp, synthetic construct
  misc_feature 1..3753: note = source = /note="Description of Artificial Sequence: Synthetic coding sequence"
  source 1..3753: mol_type = other DNA
atgtcaactgagcgggactccgaaacgacgtttgatgaggacagtcagccaaacgacgaagtggtgccgtactctgatgacgaaaccgaagatgagctggatgaccagggaagcgccgtggagccggagcagaatcgggtcaatcgggaggcggaggagaacagagaaccgttcagaaaggagtgcacctggcaggtgaaggcaaacgaccgcaaataccacgaacagccacactttatgaacactaagttcctgtgcatcaaagagtcgaagtacgcgaacaatgccatcaaaacttacaagtataacgccttcactttcatcccgatgaatctctttgaacagttcaagcgcgcagcgaacttgtactttctcgcgctcctgatactgcaggcggtgccgcagatctcaaccctcgcttggtacaccactctggtgccattgctcgtggtgttgggagtgaccgcaatcaaggacctggtcgacgacgtcgcccgccacaagatggataaggagatcaataaccgcacttgtgaggtcattaaggacggccgtttcaaggtcgccaagtggaaggagatccaggtcggagacgtgatacgcttgaagaagaacgatttcgtccctgcagacatccttctcttgagctcgtcagaaccaaatagtctgtgttacgtggaaaccgcggaactcgatggggaaactaacttgaagtttaagatgagccttgaaattactgatcaatacctgcaacgcgaggacactctcgccacctttgacggattcattgagtgcgaagaacctaataaccgcctcgataagttcacgggaactctgttttggcggaataccagctttccgctcgacgcggataagatccttctgagaggatgtgtgatccgcaatactgacttctgccacggactggtgatctttgccggcgctgatactaagatcatgaagaattcaggaaagaccaggttcaaacgcacgaagatagactacctgatgaactacatggtgtacactatcttcgtggtcctgattctgctttccgctgggctggccatcggccatgcctattgggaggcccaagtcggaaactcgtcctggtacctctacgatggtgaggacgatactccgtcgtatagaggattcctcatcttctggggctacattatcgtgctgaataccatggtcccgatctcgttgtacgtcagcgtcgaagtgatccgcctcggccagtcgcatttcattaactgggacttgcagatgtactacgctgaaaaagacaccccagcgaaggcacggaccactaccctgaacgaacagctcggtcaaatccactacatcttctccgataaaaccggaactcttacccagaatatcatgacgttcaaaaagtgttgtatcaacggacaaatctacggagatcatagggatgccagtcagcataatcacaacaaaatcgagcaggtggatttctcatggaacacctacgctgatggcaagctggccttctacgaccactacttgatagaacagatccaatccggaaaagaaccggaagtgagacaattcttcttcctcctggctgtgtgccataccgtgatggtggatcggaccgacggacagctgaactaccaagccgccagcccggacgagggagcgcttgtgaatgctgccaggaacttcggattcgccttcttggcgaggacccaaaataccatcactatctcggaactcggcaccgaacggacctacaatgttttggccattctcgacttcaattcggaccgcaagcggatgtccatcatcgtgcgcacgcctgaaggtaacatcaagctgtactgcaaaggcgcggataccgtcatctacgaaagacttcacagaatgaatccgactaagcaggaaactcaggatgcgctcgacatcttcgccaatgaaaccctccggaccttgtgcctgtgctacaaggagatcgaagaaaaagaattcaccgagtggaacaaaaagttcatggcagcttcagtggcgagcactaacagagatgaggctctggacaaggtctacgaggaaattgaaaaggacctcatcttgttgggagcaaccgctatcgaggacaagctgcaagacggagtgccggaaactatctctaaacttgccaaggccgacatcaagatctgggtcctgaccggcgataagaaggagactgcagagaatattggatttgcctgcgaactgctcaccgaggacactactatctgctacggtgaggatatcaactcactcctgcatgcccggatggaaaatcaacgcaaccgcggaggcgtgtacgcaaaattcgcacctccggtccaggagtccttcttccccccgggtggaaatcgggcactgatcatcaccggatcctggctgaacgaaatcctcctcgaaaagaaaaccaagagaaacaagattctgaaactgaagtttccacggaccgaagaagagcggagaatgagaactcagtccaagcggagactcgaagcaaagaaggagcagagacagaagaacttcgtggatctggcgtgcgagtgttcggctgtgatctgttgtcgggtcactccgaagcagaaagcaatggtggtggatctcgtgaagcgctacaagaaggctattactcttgcgatcggagatggtgccaacgacgtcaacatgattaagactgcccacataggagtggggatctccggacaagagggtatgcaagcggtgatgtcgagcgattatagcttcgcccaattccggtatctgcaaagactgctcctcgtgcatggacgctggtcgtacatcagaatgtgcaagtttctcaggtacttcttctataagaattttgccttcactttggtgcatttctggtattcattctttaacgggtacagcgctcagaccgcctacgaggactggttcattacgctgtacaacgtgctgtacacgtcactgccggtactgctcatgggtttgctggatcaagacgtgtccgacaagctctccttgcgctttccgggactctacatcgtgggccaaagagatcttctgtttaactacaaacggttcttcgtgtcgctgcttcatggcgtgcttacttcgatgattctgttcttcatcccactgggagcctatctgcaaaccgtggggcaggacggcgaggccccatccgactaccagtcattcgcggtgaccatcgcctccgcgctggtgatcactgtcaattttcagatcggtttggacacgtcgtactggacctttgtgaacgccttctcaattttcggttccattgcgctgtacttcggcatcatgttcgacttccatagcgccggaattcacgtgctgttcccttccgctttccaattcaccggtactgcaagcaacgcgctccgacagccttacatttggcttaccattatcctggccgtcgccgtctgccttctgccggtggtcgctatccgctttttgtcgatgactatctggccaagcgaatccgataagatccagaagcaccggaaacggctcaaggccgaagagcagtggcagaggagacaacaggtttttagaaggggcgtctcgactcgccgctcggcgtacgcgttctcacatcagcgcggatacgccgacctgatctcgtcaggtcggtccatccgcaaaaagcgctcgccgctcgacgccatcgtggcggacggaactgctgagtaccgacgtaccggggactcg

SEQ ID NO: 7396 - DNA, 3753 bp, synthetic construct
  misc_feature 1..3753: note = source = /note="Description of Artificial Sequence: Synthetic coding sequence"
  source 1..3753: mol_type = other DNA
atgtctacagagcgtgactctgaaacaacttttgatgaagattctcaacctaacgatgaagtggtaccttattctgatgatgaaacagaagatgaattggatgatcaaggaagcgccgttgagcctgaacaaaacagggttaatcgggaggctgaagagaaccgtgaaccatttcgcaaggaatgcacatggcaggtaaaggcgaatgacaggaagtatcatgagcaacctcattttatgaatactaagttcctgtgcattaaggagtcaaagtacgcaaacaacgcaattaaaacctataagtataatgcttttacttttatccctatgaatcttttcgagcaatttaagagggctgccaatctgtacttcctggcactcttaatccttcaggcagttccacagataagcactctcgcttggtacactacactcgttccactcttggttgttcttggcgttaccgccattaaagatctagtggatgatgttgcacgtcataaaatggacaaagagattaacaaccgtacatgtgaagttattaaggatggcagatttaaagtcgcgaaatggaaggagattcaagtaggtgatgtaattcgtctaaaaaaaaacgatttcgtacctgctgatattttgttactgtcatcatccgagccaaactctttatgctatgtcgaaactgctgaactcgatggggagactaaccttaagttcaaaatgtccctagaaattacagaccaatacctgcagagggaagatactctcgcaactttcgacggtttcattgaatgtgaagagccaaacaaccgattagacaagttcaccgggactctgttttggaggaacacttcatttcctttggatgctgataaaattctgctccgaggatgtgttatacgcaatactgacttctgccacggtttggttatttttgcaggtgcggatacaaaaatcatgaaaaatagtggtaaaacaagattcaagaggaccaaaattgattatttgatgaattatatggtctatacaatattcgtggttcttatattgctatcagcaggtcttgctatcggacatgcttactgggaagcacaagttggaaattctagctggtacttgtacgacggtgaagatgacaccccgagctatcgagggtttctcatcttttggggatatataattgtgcttaatacaatggttccgatatcattgtatgtgtctgttgaggttataagacttggccagtctcatttcattaattgggatcttcaaatgtattatgctgagaaggatacaccagctaaagctcgtactacaactcttaacgagcaactgggccaaattcactacatcttctccgataagacaggaactttgacccaaaatattatgactttcaaaaagtgctgtataaatggtcagatatatggtgatcatagagatgcatcacagcacaaccataacaagatcgaacaggttgacttctcttggaacacgtacgcagacggtaaactcgctttctatgatcattacttgattgagcagatccaatcaggtaaggaaccggaggtgcgtcaatttttcttcttgcttgcagtttgtcataccgttatggtcgacaggaccgacggtcaactgaactatcaagccgcatcacctgatgagggagcattggtaaatgctgctaggaattttggattcgcttttcttgcccgaacccaaaatacaattacaatttccgaacttggtactgagagaacttataatgttttagctatcttagattttaacagcgacaggaagaggatgtccatcatcgttcggacgcctgagggaaacattaaactttactgcaaaggagcagatacagtaatctacgagaggcttcaccgtatgaatcccactaaacaggaaacacaggatgctcttgatatcttcgcaaatgagactttacgcactctgtgcctatgctacaaggagatcgaggagaaggaattcacagaatggaataaaaaattcatggcagcaagcgtagcttccaccaatagagatgaagctctggataaagtttacgaagaaatagagaaagatttgattttgctcggcgctactgccatcgaggacaaattgcaagatggtgtacctgagactatttccaaactcgcaaaagcagatatcaaaatttgggtacttactggggataaaaaggaaacagcagagaacatcggattcgcatgtgaattacttacggaggacaccactatttgttacggtgaagatattaacagtttgctgcatgcacgtatggagaatcagaggaatcgtggaggtgtgtatgccaagtttgctccacctgtgcaagagtcattcttccctcctggtggtaatagggcgctaataattactggaagctggcttaacgagatcctgttggagaaaaagacaaagcggaacaagattcttaagctaaagtttcctcgtacagaagaggaacgacgtatgcgtacacaatccaaaaggaggctggaggctaaaaaggagcagcgacagaagaactttgtcgatctcgcttgcgaatgtagcgctgtgatttgttgccgagtgactcctaagcagaaagcgatggtcgtggatttagtcaagaggtacaagaaggctatcacattggcaattggcgatggagctaacgatgtcaatatgataaaaacagcccatatcggtgtcggtatatctggtcaagaaggaatgcaagctgtgatgtcatcagattattcattcgcacagttcagatacttgcagaggttgctgctcgttcatggtcgttggagctacattcgtatgtgtaaattccttcgttactttttctacaagaattttgcattcactctggttcacttttggtactcctttttcaacggctattccgcacaaacagcctatgaagattggtttataacgctttacaacgtcttatacaccagcttaccggttcttcttatgggccttttggatcaggatgtaagtgacaagctttcacttagatttccagggttgtatattgttgggcaaagggatctgctttttaactacaagcgattcttcgtttccctattacacggtgtgcttacttcaatgatcctgttttttattccgctgggagcctatttgcaaacagtaggccaggacggagaagccccctccgattaccagtcattcgctgtaactattgcttcagcattggtgataacagttaactttcagatcgggcttgacacctcctactggactttcgtgaatgctttttccattttcggttccatagctctctattttgggatcatgttcgactttcattcagcagggatacatgtgttgttcccaagtgccttccaatttaccggtactgcctcaaatgcccttagacaaccttatatctggttgacaataattctggcagtggctgtctgtttgcttcctgtggtcgctattcgtttcttgtctatgaccatatggccctctgaatcggacaagatccaaaagcataggaaaagacttaaggccgaggagcagtggcaacgaaggcaacaagtgttccgtaggggggtttcaaccagaagaagcgcatatgcgttttctcaccagcgtggctatgccgatctcatctccagtggtcgttctataaggaaaaagcgttcaccccttgatgctattgtcgccgatggaactgcagagtacagacggacaggagattcc

SEQ ID NO: 7397 - DNA, 3753 bp, synthetic construct
  misc_feature 1..3753: note = source = /note="Description of Artificial Sequence: Synthetic coding sequence"
  source 1..3753: mol_type = other DNA
atgtcaacagaaagagactctgagaccacatttgatgaggactcacagccaaatgacgaggtagtgccatactcggacgatgaaaccgaggacgaactggacgaccaggggtcggcagtggaaccggagcagaaccgcgtcaatcgggaggctgaagagaatcgcgaaccgttccgtaaagagtgtacctggcaagtgaaggctaatgacagaaagtatcacgaacaaccgcattttatgaacacaaagttcttatgcattaaggagtcgaagtatgcaaacaatgctatcaaaacatacaaatacaatgcatttacattcatccctatgaatttgttcgagcaattcaagcgagcagcgaacctttacttcctggccctccttatcctgcaggcagtccctcaaatctccactttggcttggtacacaaccctcgtgcctctgctggtagttcttggagtgacagctataaaagacctcgtggacgacgtggcccgacacaagatggataaagaaataaataatcgcacctgtgaagttatcaaggacggtaggttcaaagtggcaaagtggaaagagattcaggtgggagatgtgatccggctgaagaaaaatgattttgtgccagccgatatactgctcttgtccagcagtgagcccaactcgctgtgctatgtggagaccgcagaactggatggtgagacgaacctcaagttcaagatgtcattagaaataacagatcaatatttgcagcgagaggacacactggccacgtttgacgggtttatagaatgcgaggagccgaacaaccgactggacaaattcaccggcacgctcttttggcgtaacacttcatttcctcttgatgctgataaaatcctgctcagaggctgcgtgattaggaacacagacttctgtcacggactggtcatctttgcgggggctgatacaaagattatgaagaatagtggcaagactagatttaaacgcacgaaaatcgattacctaatgaactacatggtgtacaccatcttcgttgttttgattctgctttctgccggcctggccataggacatgcatattgggaagcgcaggttggcaactcatcatggtacctgtacgacggggaggacgataccccctcatatagaggattcctgatcttttggggctacattatcgtactgaacacaatggtgcctatctcattgtacgtgtcagtggaagttatcaggctgggccagagtcatttcatcaactgggacctccagatgtattatgccgagaaagatactccagccaaggcccggacgaccaccttgaatgaacagctggggcagattcattacatcttttccgacaaaactggcacgctgacacagaacataatgacattcaaaaagtgctgcatcaacgggcaaatctacggcgaccatcgcgatgcctcacagcataatcataacaaaatcgagcaggtggattttagttggaacacatatgctgatggcaagctggcgttctacgatcactaccttattgaacagatccagagcggtaaagaaccagaggttcggcagttcttttttctgctggcggtttgtcacactgtgatggtggatcgtacggacggccaacttaactaccaggcggcctccccggatgagggagctctggtgaatgcagctcggaacttcggctttgcgtttttggcacgcactcagaatactattacaatcagcgagctcggcactgagcggacttataacgttctggccatcttggattttaattctgatcgcaagagaatgtctataattgtccgtacccccgaggggaatatcaagttgtactgcaagggcgctgataccgtgatctacgaacgcttacacagaatgaaccccacaaaacaggagacacaagacgccttggacatctttgcaaatgaaaccctgagaaccctttgcctctgctacaaagaaatcgaggagaaggaatttaccgaatggaacaagaagttcatggctgcatcagtcgcttccactaatcgggacgaagccctcgacaaggtgtacgaggaaatcgagaaggacctgatactgctgggagcaacagctattgaggataaactgcaggacggggtgcccgaaactatcagtaagttggccaaagccgacatcaagatatgggtactcactggtgacaaaaaagagacagcagagaacatcggatttgcctgtgagctcctgactgaggacactaccatttgttacggagaagatataaactctcttctccatgctcgaatggagaaccaaaggaaccgcggcggagtgtatgcgaagttcgccccccctgttcaggagtccttcttcccccccggagggaaccgtgctctgattataaccgggtcctggttgaacgagatcctgcttgagaagaaaacaaaacgaaataagattcttaagttaaagttccctaggactgaagaggagcggagaatgcgtactcaatctaagcggcgactagaagcaaagaaggaacaacggcagaaaaactttgtcgacctggcgtgtgaatgttctgcggtcatatgctgccgagtgacacccaaacagaaagcgatggtcgtggacctcgtgaaaaggtataaaaaagctatcacattagccatcggcgatggggctaatgacgtaaacatgatcaagactgctcacatcggagtgggcatatccggacaggaggggatgcaggccgtaatgtcttctgactacagcttcgctcagttcagatacctccagcgcctcctgctcgtccacggacggtggtcatacatacggatgtgcaagtttctaagatacttcttctataagaacttcgccttcacgctggttcacttttggtactcctttttcaacgggtatagcgcccagaccgcatacgaagattggtttattacgctttataatgtcttgtacactagcttaccggttctcctgatgggtctgctcgaccaagatgtgagcgataaactgtctttgagattcccgggactgtatatcgtcggacaaagggacctactgttcaattataagcggttctttgtctccctgcttcatggtgtcctgaccagcatgatactgttctttatcccgctgggtgcctatctgcagacagtcgggcaggacggggaggcgcccagcgattatcaaagcttcgccgtcaccattgcttccgccttagtgataacggtgaatttccagattggactggatactagctactggacttttgtgaatgctttttccatctttggatcgatcgcattgtactttggtataatgtttgatttccatagcgccggaatccacgtgctgtttccctctgcctttcagttcaccggaaccgcaagtaatgccctgcgtcagccatatatctggctaactatcattctggcagtagcagtctgtctcttgccagtcgttgctattcggttcttgagcatgacaatatggccgtcagagtccgataagatccagaaacacaggaagcggctaaaagctgaggagcagtggcagcggcgtcaacaggtgtttagaaggggggtcagcacccggcgcagcgcgtacgctttcagccaccagaggggttatgcagatctgatctcgtccggccgctcaatccggaaaaagaggtcccctcttgacgctatcgtggctgacggcactgcggaataccggcgcactggggacagc

SEQ ID NO: 7398 - DNA, 3753 bp, synthetic construct
  misc_feature 1..3753: note = source = /note="Description of Artificial Sequence: Synthetic coding sequence"
  source 1..3753: mol_type = other DNA
atgtccacggagcgcgatagcgaaactaccttcgatgaagattcgcaacctaacgatgaagtggtcccatactcggacgatgaaaccgaggatgaactggacgaccagggatcggccgtcgagccagaacaaaaccgggtcaatcgggaagctgaagaaaatagggagccgttcagaaaggaatgtacctggcaggtaaaagctaacgacaggaaataccacgagcagccgcatttcatgaacactaagtttctgtgtatcaaggagagcaagtacgcgaacaacgcgataaagacttacaagtacaacgccttcactttcatccctatgaacctcttcgaacaattcaagcgggcagccaacctgtacttcctggcgttgctcatccttcaagcggtgccacaaatcagcacgcttgcctggtacactaccctggtgccgctcttggtcgtgctgggggtgacggcaataaaggatctcgtcgacgatgtggcacggcacaagatggataaagagatcaataacaggacttgcgaagtgatcaaggatggccggtttaaggtcgctaaatggaaggaaatccaggtcggtgatgtgatccggctgaagaaaaatgatttcgttccagcagatatcctgcttctgtcgtcgtccgaacctaattcactgtgctacgtggaaacggcggagcttgacggagagactaacttgaagtttaagatgtcactcgagatcacggaccagtacctgcagcgggaggacactttggctacctttgacggcttcatcgagtgtgaggaacccaataaccggctggacaagttcaccggaaccctcttctggagaaacacctccttccccctggacgcggataagatcctccttcggggatgcgtgatccggaacactgacttctgtcacggacttgtgatcttcgccggtgcagacaccaagatcatgaagaactccggcaaaaccagattcaaaagaactaagatcgactaccttatgaattacatggtatacaccatattcgtcgtccttatcctcctgtctgctggactcgccattgggcatgcgtattgggaggcacaagtgggtaactcgtcttggtatttgtacgacggagaggatgacaccccgtcctaccgtggatttctgatcttctggggctacatcatcgtcctcaacacgatggtgcctattagcctttacgttagcgtggaagtgatccgcctggggcaatcacatttcattaactgggacctgcagatgtattacgcggaaaaggacaccccagccaaggcgagaactactactctgaatgagcaactcggccaaatccactacatattcagtgacaaaactgggacgctgacccagaatatcatgactttcaaaaagtgctgcattaatggacagatctatggtgatcatagggacgctagccaacataaccacaacaaaattgaacaggtggacttctcctggaatacttacgctgatgggaagctggcattctacgaccactacctgatcgagcagatccaatcgggtaaggagccggaagtgcgccagtttttctttctcctggcagtgtgccacaccgtcatggtcgaccgcacggatggtcagctcaactaccaggcggcctcgccggatgaaggagccttggtgaacgctgcccggaacttcgggtttgctttcctcgctcggacccagaacaccatcactatatcggagctcggaactgagaggacctacaatgtgttggcaatcctggatttcaattctgaccgcaagcggatgtcgatcattgttcgcacccccgagggaaacattaagctctactgcaagggagccgacacggtgatttacgagcgcttgcatcgcatgaatcctactaagcaggaaacccaggacgcactggacatttttgctaacgagactctcagaaccctttgcctttgctacaaagagatcgaagaaaaagaattcaccgagtggaacaagaaattcatggcggcctcggtggcatcgaccaacagagacgaagcgcttgacaaagtctacgaggaaatcgaaaaggacctgatcctgctgggggcgactgccatcgaagataaactccaggacggagtgccggaaactatttccaaactggccaaggctgatatcaagatctgggtgcttactggtgacaagaaggagactgcggaaaacatcggattcgcttgtgaactgctgaccgaggataccactatctgctacggagaagatatcaactcgctgttgcacgcccgcatggaaaaccagcggaaccggggaggagtgtacgcgaagttcgcccctccagtgcaagaatctttcttcccaccgggaggaaatcgcgctctcatcatcaccggcagctggctgaatgagatcttgctggagaagaaaaccaaaagaaataagatcctgaagttgaagttccctcgaactgaagaagagcggcggatgaggacccagagcaagcgccgcctggaggcaaagaaggaacagcggcaaaagaacttcgtggatctggcatgtgaatgcagcgccgtgatttgctgcagggtgaccccgaagcagaaagccatggtggtcgatctggtcaaaagatacaaaaaggccatcaccctggctattggcgacggagcaaatgacgtcaacatgatcaagaccgcccatattggtgtgggcatctcaggacaagaagggatgcaggcagtgatgtcctccgactattcgttcgcccagttcaggtacctgcaacgcctcctcctggtgcacgggagatggtcatacattagaatgtgcaagtttctcagatactttttctacaagaacttcgcgttcacgctggtccatttttggtacagcttcttcaatggatactccgcccagaccgcctacgaggactggttcatcaccctttacaacgtgctgtacacttcgttgccagtgctcctgatgggcctcttggatcaggatgtaagcgacaagttgtctctgcgctttccgggtttgtacattgtgggtcagcgggacctgctcttcaattacaagcggttcttcgtgagcctgctgcacggtgtgctgacttcaatgatcctgttcttcattccgctcggagcatacctgcagacggttggccaagacggagaagccccatccgattaccagagcttcgccgttacgatcgcatccgccctggtcatcaccgtcaattttcaaatcggtttggacacttcatactggactttcgtgaacgccttttcaatcttcggaagcattgcactgtactttggaatcatgtttgacttccatagcgctggcatccacgtgctgttcccgtccgcattccagtttactggaaccgcctcaaatgctctgaggcaaccctacatctggctgactataatcttggcagtggccgtctgcttgctgccggtcgtggcaatccgcttcctgtcaatgactatctggccgagcgagagcgacaagatccagaaacacaggaaaagactgaaagccgaagagcaatggcagcgccgtcaacaagtgtttcgcagaggggtgtcaactcgccgcagcgcgtacgccttttcccaccagcgcggttatgccgatctgatctcctccggacggtccatccgcaagaaacggtcccctcttgatgctatcgtggcggatggaaccgcggaatatcgacggaccggagactcc

SEQ ID NO: 7399 - DNA, 4395 bp, synthetic construct
  misc_feature 1..4395: note = source = /note="Description of Artificial Sequence: Synthetic coding sequence"
  source 1..4395: mol_type = other DNA
atgcctgaacaagaacgacaaattaccgccagagagggcgcgtcacggaagatcctctctaagctttccctcccgacgagggcctgggaaccggccatgaaaaagtccttcgccttcgacaacgtcggctatgaaggagggctcgacggactgggaccctcctcacaagtcgccaccagtaccgtccgtattctcggaatgacatgtcagtcttgtgtcaagagtatcgaggatcggatctcaaacctgaaggggattatctccatgaaagtatccctggaacagggttccgccacagtgaagtatgtgccttcagtggtttgcctacagcaggtatgtcatcagatcggggatatgggctttgaagcatccatcgccgagggcaaggcggcatcgtggccgagccgctcactcccagcccaggaggctgtggtgaaacttcgcgtggaggggatgacctgccaaagctgtgtttcttctatcgagggaaaggtgcgaaagttacagggagtcgtccgtgtgaaggtgtcactgagcaatcaggaggctgtgatcacataccagccctacctcatccagccagaagacctgcgggaccacgttaatgacatggggtttgaggccgccataaagtcaaaggtggcaccactgtcacttggaccaatcgacatcgaacgcctgcaaagtaccaaccctaaacgacctctctcctcggccaatcagaatttcaataattcggagaccctgggacatcaggggagccatgtggtgacactacaactgcggatcgacgggatgcactgcaagagttgtgtactcaatatcgaggaaaacatagggcagctgctgggagtgcagagcatccaagtatctctggaaaacaaaacagcccaggtaaaatatgaccccagttgcacaagccccgtggcgttgcagagggctattgaggcacttcccccgggcaatttcaaggtctccttaccagacggcgccgaaggatcagggactgatcacagatccagtagtagtcatagccctggtagccccccacgcaatcaggtccaaggcacgtgctctacgaccttgatcgctattgccggaatgacctgtgcaagctgtgtacacagtattgaagggatgatctcccagcttgaaggagttcagcaaatctcggtttctcttgccgaaggcactgctacggtgctgtataatcccagcgtgatatctcccgaagagttgcgagccgctatcgaggacatggggttcgaagctagcgttgtcagcgaaagctgtagtactaaccccctgggcaaccacagcgccggaaatagtatggtgcagacgaccgatggtacaccaacctcagtgcaggaagtggctccccacactggtcggctgccggctaatcacgctcctgatattctggccaagtcccctcagagcaccagagccgtggctccccagaagtgtttcctccagatcaaaggcatgacgtgtgcgtcctgcgtctcaaatattgaaagaaatttgcaaaaagaggccggtgtgctgtctgtgctggtggctcttatggctgggaaagctgagattaaatacgatcctgaggtcatccagcctttggagattgctcagtttattcaggacttaggattcgaggcggcagtgatggaagattacgctgggagcgacgggaatatagaacttactattactgggatgacgtgtgcaagctgtgttcacaacattgagagtaagctgacccggaccaacggcatcacctatgcttccgtagccttggccaccagcaaagccctggttaagtttgacccggaaattatcggacccagagatatcatcaaaattatcgaggagatcggattccatgctagcctggctcagcggaacccgaacgcacaccatcttgaccacaagatggaaattaagcagtggaagaaatcatttttatgttcactggttttcgggattccagttatggcactcatgatctacatgttgataccttcaaatgagccccatcaaagtatggtccttgaccacaacatcatacctggtctgagcatcctcaacttgatttttttcattctttgtacctttgtgcagctcttaggcggatggtacttctatgtccaagcctacaaatcactgaggcacagatcagctaacatggatgtcctgattgtcctcgccacgagtatcgcatacgtgtacagcctggtgattcttgttgttgctgtcgcggaaaaggcagagagatcacccgttaccttctttgacacacctccgatgttgttcgtgttcatcgcattgggaagatggttagagcatctggccaagagtaaaacctccgaggccctagctaaactcatgagtctgcaggcgacggaggctactgttgtgaccttgggcgaagataacctgattattcgagaggaacaggtgcccatggagctggtgcagcgaggcgatatcgtgaaagtcgtcccagggggcaaattcccggttgatggaaaagtgttggagggaaacacaatggctgatgagtctctgattaccggcgaggctatgccagttacaaagaaaccgggtagtacggttattgctggatcgatcaacgcgcatggctccgtgctgatcaaggctacacacgttgggaatgacacaacattggcgcagatagtgaaactcgtggaagaagcacagatgagtaaggcacccattcagcagttggccgaccgcttttccggctatttcgtcccctttatcatcatcatgagtactctcaccctagtagtgtggatcgtgattggatttatcgactttggcgtcgtgcagcgatacttcccgaacccgaacaagcacatttcacagactgaagtaatcatcagatttgcttttcagaccagcatcacggtgctgtgcattgcttgcccatgtagtctgggccttgcgacccccactgctgtgatggtcggcaccggtgttgccgcccagaacggtatcttgatcaaaggggggaagcctctcgaaatggctcataaaattaaaaccgtgatgttcgataaaactgggaccataacccatggcgttccccgggtaatgcgggtcctcctgctcggggatgtggccacactgcccctgaggaaagtactggcggtggttgggacagccgaggcctcgagcgagcatcccctcggcgtcgccgtcactaaatactgcaaagaagagctgggtacggagacactgggttactgtaccgattttcaagctgtcccaggctgcgggataggatgtaaggtgagcaacgtggaggggatccttgcgcacagtgagcgcccactgtccgcacccgcctcacatttaaacgaggccggcagtctgcccgcagaaaaagatgcagtgcctcaaacttttagcgtgttgattggtaacagagagtggctgcgccggaatggattaactattagcagcgacgttagtgatgctatgactgaccatgagatgaaaggacagaccgccattttagttgcaatcgatggcgtgctgtgtggcatgatcgcgattgctgacgccgtcaagcaggaggccgcactggccgtgcacaccctgcagtcaatgggggtggatgtggtcctgattactggcgacaacaggaagacggcccgcgccatcgccactcaagttggaatcaataaggtctttgccgaagtgctgccatctcacaaagtggcgaaagtccaggagctgcagaataaaggcaagaaggtggctatggtcggtgacggtgtgaacgacagccctgccctggcccaggcagacatgggcgtcgccattggtacaggaacggatgttgcaatcgaggccgctgatgtagtgctgatacggaatgacttgttggacgtggtggcttctatccacctcagtaagcggacggtgcgccgcatcaggatcaatctggtcctggcgttgatttataatctggttgggatccctatcgccgcaggtgtgtttatgcccataggcatagtcctccagccatggatgggatctgctgcaatggccgccagctcagtgtctgtggttctttcatctctgcagcttaagtgctacaagaagccagacttggagaggtatgaagcacaggcccacggtcatatgaagcctctgactgccagccaggtgagcgtgcatatcggtatggacgaccgctggcgcgatagtcctcgcgcgacaccctgggaccaggttagttatgtcagccaagtcagcctctcttcactgactagcgacaagccttcaagacacagcgccgcagccgacgacgacggcgacaagtggtcactgctattgaacgggcgcgacgaggagcagtacatt

SEQ ID NO: 7400 - DNA, 4395 bp, synthetic construct
  misc_feature 1..4395: note = source = /note="Description of Artificial Sequence: Synthetic coding sequence"
  source 1..4395: mol_type = other DNA
atgccagaacaggaaaggcagatcaccgcgagagagggggccagccggaagatcctttccaagctgtcgcttccgacccgcgcatgggaaccggcgatgaagaagtcatttgctttcgataacgtggggtacgaaggaggactggacggccttggaccctcttcacaagtcgctacctccactgtgcgcattctcggaatgacgtgtcaatcgtgcgtgaagtcgattgaagatagaatttcaaaccttaaaggcatcatatctatgaaagtgtcgcttgagcagggctcagccactgtgaaatacgttccgtctgtggtgtgcctgcaacaagtgtgccatcaaatcggagacatgggcttcgaggcctccattgcggaagggaaggctgcttcatggccgtcgcgcagcctgcctgcccaagaagctgtggtgaagctgcgcgtggaagggatgacttgtcaatcctgcgtgtcgtctatcgagggaaaggtgaggaagctgcaaggggtcgtgagagtcaaggtgtccctgagcaaccaggaggccgtcatcacttaccaaccttacttgatccagccggaggacctgcgggaccacgtcaatgacatgggattcgaggcggcgatcaaatccaaggtggcaccactctccctgggaccgatcgacatcgagcgccttcagtcgaccaaccctaaacggccgttgtcgtctgctaaccaaaactttaacaatagcgaaacgctgggacaccaaggatcacacgttgtgaccctccagctcagaatcgacggcatgcattgcaagagctgtgtgcttaacattgaagaaaacatcggtcaattgctgggagtccagtccatccaggtcagtctggagaataagacggctcaggtcaagtacgacccatcatgcacctcccctgtcgcgctgcaaagagcaatcgaggctctccccccgggtaatttcaaagtgtccttgccagatggcgctgaaggctccggaaccgatcatcggtcaagctcctcacactcgcccggatcgccgccaagaaaccaagtgcagggaacctgctcgaccaccctgattgctattgcgggaatgacgtgcgcctcatgcgttcactccatcgaagggatgatctcacagctggaaggggtccagcagatcagcgtgtcactggccgagggcactgcgaccgtgctgtataacccgtcggtcatctcacctgaagaacttcgggctgctatcgaggacatgggatttgaagcatcagttgtctcagaatcctgctcaactaacccactgggaaaccattcagcagggaattccatggtccagactacggacggaaccccgacctcagtgcaggaagtggccccgcataccggcagactgcccgctaaccatgcaccggacatcctggcaaagtcaccacagtcaactagagcggtggcgccgcagaagtgttttctccaaatcaaaggcatgacttgcgcaagctgcgtgtccaatatcgagcgcaacctgcagaaggaggcgggagtgctgtcggtgctcgtggccctgatggcgggcaaggccgagatcaaatacgacccggaggtgatccagcccttggaaatcgcgcagttcattcaggaccttgggttcgaagcggctgtgatggaggactacgccggctccgacggaaacatcgaactgactatcacggggatgacctgcgcgtcgtgcgtgcataacattgaatccaagctcaccagaactaacggaatcacctacgcctccgtggcgcttgccacttcaaaggccctggtgaagttcgacccggagatcataggcccccgcgacatcatcaagattatcgaagagattggcttccacgcttctttggcgcagcgcaaccctaacgcgcatcacctggaccataagatggaaatcaagcagtggaagaaatcgttcctctgctcgcttgtgttcggaatcccggtgatggcattgatgatctacatgctgatcccgtctaatgagccgcatcaaagcatggttctcgaccacaatatcatccctgggctctcgatcctgaatctcatcttcttcatcctgtgcacgttcgtgcagcttctgggaggatggtacttctacgtgcaggcttacaaaagcctccggcacagatcggcaaatatggatgtgctgatagtgctggccacttcgattgcctatgtgtattcactggtgatcctggtcgtggcggtggcagagaaggcagagaggagcccggtgacgttcttcgacaccccgccaatgctgtttgttttcatcgctctgggacggtggttggaacatctggccaagtccaagacttccgaagctctggcaaagctcatgtcactccaggccaccgaagcgaccgtggtcactctcggagaagataacctcattatccgagaagaacaagtgcctatggagttggtccagagaggggacattgtgaaggtggtgccgggcgggaagtttccggtggatgggaaggtgctggagggcaacaccatggcggacgaatctctgatcacgggagaagcaatgcctgtgactaagaagccagggtcgaccgtcatcgccggaagcatcaacgcacacggttcggtcctcattaaggcaacccacgtcggaaacgacaccactttggcacagattgtgaagctcgtggaagaagcccagatgtcgaaggccccaatccagcagctggccgatcggttctccggatacttcgtgccgtttatcatcataatgtcaaccctcactctggtcgtgtggatcgtcatcggttttatcgacttcggagtggtgcagcggtacttcccgaatcccaataagcacatctcccagactgaagtgattattcgctttgccttccaaactagcattaccgtcctgtgcatcgcctgcccatgctcgctgggattggctacgccgaccgccgtcatggtgggcactggtgtggccgcccagaacggcatcctcattaaaggaggcaagccactggaaatggcccacaaaatcaagactgtgatgtttgataaaaccgggacgatcacccacggagtcccacgcgtgatgcgcgtgctgctcctcggagatgtggctactctccctctccggaaggtgctcgctgtggtcggcacggcggaagccagcagcgaacatccgctgggagtggctgtcactaaatactgcaaagaagagctggggaccgaaaccctggggtactgcaccgacttccaagcggtgccgggctgcggaatcggatgcaaggtgtccaacgtggaaggaattctggcacattcagaacgcccgctgtcggcccccgcctcgcacctgaatgaggcaggatccctcccggccgagaaggatgccgtgccgcagactttctcagtactcatcggcaacagggaatggctccgccggaatggactcactatctcaagcgacgtgtcggacgcgatgaccgaccatgaaatgaagggtcagaccgcgatcctcgtggctatcgatggagtgttgtgtggcatgatcgcaatcgctgatgccgtgaagcaggaagcggcgttggcggtccacaccctccagtcgatgggagttgatgtggtcctcatcaccggagacaacaggaaaaccgcccgcgccatcgctactcaagtcgggatcaacaaggtgttcgctgaagtcctcccctcacataaagtcgctaaagtccaggagctgcaaaacaagggaaagaaggttgcgatggtgggcgatggagtcaacgactcgccggcgttggcccaagccgatatgggagtggccatcggaaccggaacggatgtggccattgaagccgccgacgtggtgctcattagaaatgatctcctggacgtggtcgcgtcaatccacctctcaaaacgtactgtgcggcggatccgaatcaatctcgtgctcgcactcatctacaacctcgtcggaattccaatcgccgccggagtgttcatgccgatcggaattgtgctgcaaccgtggatggggtcggcggctatggccgcctcaagcgtctcggtcgtcctgtccagcctgcagctgaagtgctacaagaaaccggatctggagagatacgaagcgcaggcccacgggcacatgaagcctctgacggcgtcgcaagtgtccgtccacatcggaatggacgaccgctggcgggattcaccgcgggcaactccgtgggaccaagtttcctacgtgtcacaagtgagcctgtcctccctcacctcggataagccatcacgccatagcgcagccgcggacgatgatggggataagtggtcgctgctgctgaacggacgtgatgaagagcaatacatt

SEQ ID NO: 7401 - DNA, 4395 bp, synthetic construct
  misc_feature 1..4395: note = source = /note="Description of Artificial Sequence: Synthetic coding sequence"
  source 1..4395: mol_type = other DNA
atgcctgagcaagagcgccagatcaccgcaagagaaggagccagcagaaagatactttcaaaacttagccttcctactcgtgcctgggagcccgcgatgaaaaagagctttgcctttgataatgtgggatacgaaggggggttggacgggctgggtccctccagccaagtggcaacctctaccgtgagaattcttggtatgacctgccaatcctgtgtgaaatcgattgaagatcgaatatccaaccttaagggtatcattagcatgaaggtatcactggaacagggctcagcaactgtgaagtacgtccctagcgtggtgtgtttgcagcaggtatgtcatcagatcggagatatggggttcgaagcatccattgcggagggaaaggcggcttcctggccaagcagatccctcccggcacaagaggccgtggtgaaactgcgggtcgaggggatgacctgccagtcgtgtgtgtcgagcatcgaaggaaaggtcagaaagctccaaggcgtcgtgcgagttaaggtgtcactgtcaaaccaggaagccgtcatcacttaccaaccttacctcatccagccagaagatttgcgggatcacgttaacgatatgggatttgaagctgcaatcaagtctaaagtcgctcccctctccctgggacctattgatatcgaacggcttcaatcaactaaccctaagcgccctctgtcgtcagctaatcagaatttcaataacagcgaaactcttggacatcaggggtcccatgtcgtgactctgcagctgagaatagacggaatgcattgtaagtcatgcgttcttaacatcgaagaaaacattggacagcttctgggtgtccagagcatccaagtgtcacttgagaacaagactgcccaggtgaaatacgatccctcatgtacttcccctgtggcactgcaaagggccattgaagcacttccccccggaaacttcaaggtgtccctgcctgatggagcggaaggctccggaactgatcatcggtcatcgtcgtcccactcgcccggctccccaccacggaatcaagtccaaggtacttgcagcaccactctgattgcaattgcaggtatgacctgtgcgtcgtgcgtgcattccatcgaaggtatgatctcccaacttgagggggtgcagcaaatctccgtttcgcttgccgaaggtaccgctacggtcctgtacaatccaagcgtgatttccccagaagagcttcgggcagcgattgaagatatgggcttcgaagcgtctgtcgtgtcggagtcatgctcgacgaacccactggggaaccacagcgccggaaactcgatggtgcaaactactgacgggacccccacctcagtgcaagaagtcgcccctcataccgggagactcccagcaaaccacgcgcctgacatcctggcaaagtcaccccagtcgacgagggcagtggcgccacaaaagtgtttcttgcaaatcaagggaatgacctgtgccagctgcgtgagcaacatagaaagaaatctgcaaaaggaagcgggggtgctctccgtcctcgtcgcacttatggcagggaaagctgagattaagtatgacccagaagtgattcaaccgcttgaaattgcccaattcattcaagaccttggttttgaagcagcagtcatggaagattacgctggatcagatggcaacatcgagctgaccatcactggaatgacctgcgcatcgtgtgtgcataacattgagtcgaagctgactcgaaccaacggtataacttacgcatcagtggccctggcaacttccaaggcacttgtgaaatttgatccggagattatcggtcctcgggatatcatcaagataatagaagaaattggatttcatgcctcgcttgcgcagcgaaaccctaacgcacatcacctcgaccacaagatggagattaaacagtggaagaagtcattcctttgtagcttggtgtttggaatcccggtgatggctctgatgatttacatgcttattccctccaacgaacctcaccaatccatggtgctggatcataacatcatacccggcctgtcgatcttgaatttgatctttttcatactgtgcactttcgtgcagcttcttggcggctggtacttttacgtgcaggcatacaaaagcctcagacaccggtcagcaaacatggatgtgctgattgtgcttgcaacttccatcgcgtacgtctattcacttgtgatccttgtcgtggcggtggccgagaaggcagaaagatcgccagtgactttctttgatacgccccctatgctttttgtgttcatagcacttggaagatggcttgaacaccttgccaagtccaagacctcggaagccctggcgaaacttatgtcacttcaggccaccgaagcaaccgtggtgactctgggtgaggataatctcattatccgagaagaacaagtgcctatggaactcgtgcagaggggggatatcgtcaaggtggtgccaggaggcaagttcccagtggacggtaaagtgctggaaggaaatactatggcagacgaatccttgattaccggagaagcaatgcccgtcactaagaagcctgggtccacggtgattgcaggttccattaatgcccatggtagcgttttgattaaagcaactcatgtgggaaatgacaccactttggcccaaattgtcaaacttgtggaagaagcgcaaatgtcaaaggcgcctattcagcaactggctgaccgtttttccgggtactttgtgccctttatcatcattatgtccactctcaccttggtggtgtggatcgtcattggctttattgacttcggcgtggtccaacgatactttccaaacccgaataaacatatttcacaaacggaagtgattattcggttcgcattccagaccagcatcactgtcctttgcatcgcatgcccttgttcgcttggcctcgcaaccccgactgcagtgatggtcggaactggagtcgccgcgcagaacggaattctgatcaaagggggtaaacctttggaaatggcacacaaaatcaagactgtcatgttcgataagactggcaccattactcacggcgttccaagagtcatgagggttctgcttcttggtgatgttgcgaccctgcctttgaggaaggtccttgcagtggtgggaacggcagaagcgagttcggagcacccgttgggcgtggccgtgaccaaatactgtaaagaagaactgggaaccgaaactttgggttactgtactgattttcaggcggtcccaggttgtggtatcggttgtaaagtctccaacgtggagggcatcctggcgcatagcgagcgccctcttagcgcacctgcgagccacctcaacgaagcaggctcgcttccagcagagaaggatgcagtcccacaaactttttcagtgcttatcggcaatagagaatggcttcgccgtaacgggcttaccatctcaagtgacgtctcggatgctatgaccgaccatgagatgaagggccaaaccgcaattctcgtcgccatcgacggggtcctttgtggcatgatagcgatcgccgacgcagtgaaacaggaggcagcactggctgttcatacgctccaatcgatgggagtcgatgtggtgctgattaccggggataaccggaaaaccgcacgagcgatagcaactcaagtgggtataaacaaggtattcgcagaggtcctgccaagccacaaggttgcgaaggtccaagaactgcagaacaagggtaagaaagttgcaatggtcggagacggcgtgaacgattcaccagcactcgcacaagcagatatgggagtggcaattggaaccgggactgatgtggccatagaagcagccgatgttgtgctcattcggaacgacctgctcgatgtcgtggccagcattcacctgtcgaaaagaaccgtccgcagaattaggatcaatctcgtgctggccttgatttacaatctcgtgggaattccaattgcagctggtgtattcatgccaatcgggatcgtgcttcagccatggatggggtccgccgccatggcagcgtcctcggtgagcgtggtgctttcgtctctgcaacttaaatgttataagaaaccggatctggaaagatacgaggctcaagcacacggacacatgaaacctcttactgccagccaagtctcggtccatataggcatggatgataggtggcgtgactcacctcgagccactccgtgggatcaagttagctacgtgtcgcaagtctcccttagctcacttacctcagacaagccatccagacatagtgccgcagcagatgatgacggtgataaatggtcgctccttctcaacggaagagatgaggaacagtacatc

SEQ ID NO: 7402 - DNA, 4395 bp, synthetic construct
  misc_feature 1..4395: note = source = /note="Description of Artificial Sequence: Synthetic coding sequence"
  source 1..4395: mol_type = other DNA
atgccggaacaggaacggcagattaccgcgcgggagggggcctcgcgcaaaatcctgtctaagctgagccttccgacgcgggcgtgggagcctgcaatgaaaaagtcattcgcctttgacaacgtgggctacgaagggggcctggatggtctgggaccgtctagccaagtggcaaccagcaccgtccgcatcttgggcatgacttgtcagtcatgtgtcaagtcaatcgaggatcgaatttcaaacctgaagggaattatctccatgaaggtgtcgctggagcagggtagcgcgaccgtcaagtacgtgccatccgttgtctgcctccagcaggtctgtcatcagatcggagacatgggattcgaagctagcatcgccgaaggcaaggcggcttcctggccgtccagatcgctgcccgcgcaagaggccgtggtgaaacttagagtggaaggcatgacctgtcagagctgcgtgtcatcgatagaaggtaaggtcagaaagctgcaaggagtggtgagagtcaaagtcagcctctcaaaccaggaagctgtgatcacctaccagccgtacctgatccagcctgaggacctgagggaccatgtcaacgatatgggtttcgaagctgctatcaaaagcaaggtggcaccgctgtcactgggacctattgacatcgaaaggctgcaatcgaccaacccaaagcggccgctgtcgtccgcgaaccagaacttcaataactcggagactctgggtcatcagggatcgcacgtggtcactctccagctgcgcatagatggcatgcactgcaagtcgtgtgtgctgaacatcgaagagaatatcggccaactgctgggagtgcaaagcatccaagtgtcactcgaaaacaagactgcgcaggtgaaatacgacccatcgtgcacctcgcccgtggcgcttcaacgggcgatcgaggcgctgccgcccggcaacttcaaggtgtcgctcccagatggagcggaaggttcaggaaccgaccatcgctcgtcctccagccactcaccgggaagcccacctagaaatcaggtgcagggtacttgctccactaccctgattgccatcgccggaatgacgtgcgcgagctgcgtccattccatcgagggcatgatctcgcaactcgagggagttcagcaaatctctgtgtcgcttgctgaagggaccgcgactgtgctgtacaatccgtcagtgatctccccggaagagctgagagccgctatcgaggacatggggtttgaagcatcggtggtgtcggaatcctgctccaccaatccactgggaaaccatagcgcgggcaattcgatggtccagaccactgacggaacgcctacctcggtccaagaagtggctccgcataccggaaggttgccagctaaccacgcccctgacatcctggcgaaatcgcctcagagcacccgggcggtggccccgcagaagtgctttctccaaatcaagggcatgacgtgtgcttcgtgcgtctcgaatatcgaaagaaacttgcagaaggaggctggcgtgctgagcgtcctggtggcgctgatggccggtaaagctgagatcaaatacgaccctgaagtgatccagccactggaaatcgcgcagttcattcaggaccttggctttgaagccgcggtcatggaagattacgcagggtcagacggaaacattgagctgactatcactggaatgacttgtgcctcctgcgtgcataacatcgagagcaagctgacccgaaccaacggaatcacgtacgcctcggtcgcgctggcaacttccaaagctctggtcaaattcgaccccgaaatcatcggtcctcgggacatcataaagatcatcgaggagatcggatttcatgcttccctcgctcagagaaatccgaacgcccaccacctcgaccacaaaatggaaatcaagcagtggaagaagtccttcttgtgctccttggtgtttggcatcccagtgatggctctcatgatctacatgctgattccatcgaacgagccgcaccaatcaatggtgctggatcataacatcatcccaggcttgtcaatcctcaatctcatcttcttcattctgtgcactttcgtgcagttgctgggagggtggtacttttatgtgcaagcctacaagtccttgcggcaccggtccgcaaacatggacgtgcttatcgtcctggcgaccagcattgcgtatgtgtactcgctggtgatcttggtggtggcagtggcggaaaaggccgagagaagcccggtgaccttctttgatactccgccgatgttgttcgtgttcatcgccctgggacggtggctggagcatttggcaaagtccaagacgtctgaggctttggccaaactgatgtcactgcaagctacggaagccacggtcgtcactctgggtgaggacaacctgattatccgcgaagaacaagtgcctatggaactcgtccagagaggagacatcgtgaaggtcgtcccgggaggaaaattcccagtggacggaaaggtgttggaaggtaacactatggcagacgaaagcctcatcactggtgaggcaatgccggtgactaaaaagccgggctcgactgtgattgccggatcgatcaatgctcacggctcagttctgatcaaggcgacccacgtggggaatgatacgacccttgcacaaatcgtgaagctcgtggaagaagcgcagatgtccaaggcaccgatccaacaactggcagatcgcttctcaggatacttcgtgccgttcataatcatcatgtcgactctcaccctggtggtgtggattgttatcggctttatagacttcggagtcgtccagcgctactttccaaatcccaacaagcacatctcgcaaaccgaagtgatcatcagatttgccttccagacttccatcaccgtgctctgcatcgcctgcccgtgttcactcggtcttgcaacgccaacggcggtgatggtgggaacgggagtcgccgcgcaaaacggcatcctcatcaagggcggtaagccgctggagatggcgcacaaaatcaagactgtgatgttcgataagaccggtactatcacccatggcgtgccccgggtgatgagagtgttgctcctcggagatgtcgctactctgccactgcggaaggtcctggcggtcgtcggaacggccgaagcctcgtcagaacacccgcttggcgtcgccgtcactaagtactgtaaggaagaacttggaactgagacgttgggatattgcaccgacttccaggcagtgccagggtgcggaatcggatgcaaagtgtcgaatgttgaaggcatcctggcgcattcggagcggccgctgagcgcacctgcctcccacttgaacgaggcgggaagcctccctgctgaaaaggacgcggtgccacagaccttctcggtgctgatcggaaatcgggagtggctgcgccgcaacggactcaccatctcgtccgacgtgagcgacgccatgaccgatcacgaaatgaagggacaaaccgccattctcgtggccatcgacggcgtcttgtgcggcatgatcgccattgccgatgcggtgaagcaggaggcggctttggccgtgcatactcttcagtccatgggagtggacgtggtccttatcaccggtgacaataggaaaaccgctcgggcgattgctactcaagtgggcattaacaaagtgttcgcagaggtgctgccgagccacaaagtggctaaggtgcaggagctccaaaacaaaggaaagaaggtggcgatggttggggatggagtgaatgattcaccagcattggctcaggcggacatgggagtcgccatcggaaccggtaccgacgtggctatcgaggccgcggatgtggtcctcattcggaacgacctcctggatgtggtcgcttccatccacctgtcgaaaaggactgtgaggaggattagaatcaatctcgtgctggccctcatctacaatctggtgggaatcccaattgctgccggagttttcatgccgatcggtatcgtgctgcagccttggatgggctcggcagccatggccgcgtccagcgtgtcggtggtgctgtccagcctgcaactgaaatgctacaagaaaccggatctggaacgttacgaagcccaagcccatggacatatgaaacctctgaccgcctcacaggtcagcgtccacattgggatggacgatagatggcgcgattcaccacgtgcaaccccatgggaccaagtgagctacgtgtcccaagtctcgctctcatccctgaccagcgataaaccttcgcggcacagcgccgccgccgacgatgacggagacaaatggtcgctcctcctgaatggccgcgacgaagaacaatacatc

SEQ ID NO: 7403 - DNA, 4395 bp, synthetic construct
  misc_feature 1..4395: note = source = /note="Description of Artificial Sequence: Synthetic coding sequence"
  source 1..4395: mol_type = other DNA
atgcctgaacaagagcgtcagatcactgcaagggaaggagcatccagaaagatactctcgaagttgtctcttccaaccagggcctgggagcctgccatgaagaagtcgtttgcatttgacaacgttggctacgaaggaggactggatggactgggaccttcgtcacaggtggctacttcaaccgtgaggatcctgggaatgacttgtcagtcatgcgtgaaatcgatcgaagataggatctcaaacctgaaagggatcattagcatgaaggtcagccttgaacaaggatccgcaacggtgaaatacgtgccttccgtggtgtgcctccaacaggtctgtcatcagattggtgacatgggtttcgaggcatccattgcagaaggcaaagccgcatcatggccatcgagatcactgccggctcaagaggcagttgtgaagctccgcgtggaaggaatgacctgtcagtcatgtgtgtcctcgatagagggaaaggtgcgtaagctccaaggggttgtgagagtgaaggtgtcactttcgaaccaggaagcagtgataacctaccagccttacctgattcagcctgaagatctccgggatcacgtgaatgatatggggttcgaagcggccattaagtccaaagtggcacctctgagcctgggaccgatagatattgagagactccagtccaccaatcctaagcgcccactttcctccgcgaaccagaatttcaacaacagcgaaacccttggccatcagggatctcatgtggtgactcttcaactcagaattgacggaatgcactgtaagtcatgtgtgctgaatattgaggagaatattggacaacttctgggtgtccaatcgatccaggtgtcactggagaacaagacggcacaagtcaagtatgatccaagctgcacgtcgcctgttgcacttcaaagagccatagaagcactgcctccaggaaactttaaggtgtccctcccggatggggccgaaggaagcggtaccgaccatcggtctagcagctcacattcgcctgggtcaccccctcgcaatcaggtgcaaggaacttgcagcactaccctgattgcaattgcgggaatgacctgcgcatcttgcgtgcattccatcgaaggtatgatctcccagctcgaaggggtccagcagatttcggtttcgctcgccgagggaaccgcgaccgtgctctacaatccgtcggtcatctcccctgaggagctcagggcggcaatcgaggacatgggatttgaggcaagcgtggtatccgaatcgtgtagcactaatccgcttgggaatcactccgcaggaaactccatggtccaaaccactgacgggaccccgaccagcgttcaagaagtggcaccacataccggcagactccctgccaaccatgcccctgacatccttgccaagtcgccacagagcaccagggcagttgccccacagaaatgctttctccagataaagggcatgacttgcgcgtcgtgcgtcagcaatatcgagcgaaacctccagaaagaagccggagtcctgtctgtgcttgtggctctgatggccgggaaggctgagattaagtacgatccagaggtcattcagccccttgagattgcccagtttatccaggatctgggattcgaggccgccgtgatggaagattatgcaggatcggacggaaacatcgagcttacgataactgggatgacgtgtgcgtcatgtgtgcacaatattgagtcgaagctgacgagaactaacgggattacttacgcatcggtggcactggcaactagcaaggccctcgtcaagtttgaccccgagataatagggcctcgggacattatcaagatcattgaggaaatcggatttcatgcatcgctcgcccaaagaaacccgaatgcacaccatcttgaccacaagatggagataaagcagtggaagaaatcgtttctgtgtagcctcgtgtttggaatacctgtgatggcacttatgatttacatgctcatcccttcgaatgaacctcatcagtcgatggtgctggatcataacatcatccctggactttccattcttaacttgattttctttatcctttgcactttcgtgcaactcctggggggttggtacttctacgtgcaggcctacaagtcccttcgtcatcgctcggcaaatatggacgtccttattgtgctggcaacgtccattgcttacgtgtactcgttggtgattcttgtcgttgccgtggctgaaaaggctgagaggtcccctgttacttttttcgacactccaccaatgcttttcgtgttcatagccctgggaagatggcttgaacacctggcaaaaagcaagacctccgaggctctcgcgaagctcatgtccctgcaggcgaccgaagccacggtagtgactcttggtgaagataatctcataattcgtgaggaacaggtgcctatggaactcgtgcaacgtggagatatcgtgaaagtggtccccgggggaaagttcccagtcgacgggaaagtcctcgaaggtaacaccatggcagacgaatccttgataaccggtgaggctatgccagtgactaagaagccaggatccactgtcatcgcgggttctattaacgcacatggcagcgtgctgatcaaggcaactcacgtgggcaatgataccaccctggcacaaatcgtgaaacttgtggaagaggcacagatgtccaaagccccaattcaacaactggcagatcgcttttccggttactttgtcccttttatcatcataatgtccactctgaccttggtggtgtggatcgtcattggtttcattgactttggtgtcgtccaaagatactttcctaaccctaacaagcatatttcacaaactgaggttatcattcgctttgccttccagacgtcaattacggtgttgtgtattgcttgtccctgttcgcttggtcttgccacgcctaccgcagtgatggtgggaacgggcgtggcagctcaaaacggtatcctcataaaagggggcaaaccccttgaaatggcacataagataaagacggttatgtttgataagaccggaactatcacccatggtgtgcccagagtgatgcgcgtcctgcttctgggagacgtggccactctgccactgagaaaagtgctggcagtggtcggcactgccgaggcatcatcagaacacccactcggtgtcgcagtgaccaagtactgcaaagaagagctcggtaccgaaaccttgggatactgtaccgactttcaggcagttccaggttgtggtattggatgtaaggtgagcaacgtcgaaggtattctggcacattcggaacggcccctgtccgcccccgcgtcgcatcttaatgaagcaggttccctgccagcggagaaagacgctgttccacagaccttcagcgtgcttattggcaaccgggaatggcttcgtaggaatgggctgactattagctcagacgtctcggacgcaatgactgatcatgaaatgaagggccaaaccgcaatcctcgtggccattgacggagtcctgtgtggtatgattgcaatcgctgatgccgtcaagcaggaagctgcgcttgcggtgcacaccctccaatccatgggtgtagatgttgtgctcatcactggtgataaccgaaagactgcacgggccattgcaacccaagtgggcatcaataaagttttcgcagaagtgcttcccagccacaaagtcgcaaaggtgcaagaattgcagaacaagggtaagaaggtggcaatggttggagatggcgtcaatgatagcccagcactggcgcaggcggatatgggtgtggcaataggcactggcaccgatgtggcgatagaggcagcagatgtggtgctgattcgaaacgacctcctggatgtagtggcatcgattcatctctccaaaaggaccgtcagaagaatccggattaatctcgtgcttgcgctcatctataacctggtcggtatcccgatcgcagcaggagtctttatgccaatcggcattgtcctgcaaccttggatgggaagcgcggccatggctgcgtccagcgtcagcgttgtcctgagctccctgcaacttaagtgttacaagaagcccgaccttgagagatacgaggcccaggcacatggacatatgaagccgctgactgcaagtcaggtgagcgtgcatatcggaatggatgataggtggagggacagccctcgggcgactccatgggatcaggtgagctacgtgtcccaggtgagcctgtcgtcattgacttccgataaaccttcaaggcactcggcagcggcagatgatgatggcgataagtggtcgctgctgcttaacggacgtgatgaagaacaatacata

SEQ ID NO: 7404 - DNA, 4395 bp, synthetic construct
  misc_feature 1..4395: note = source = /note="Description of Artificial Sequence: Synthetic coding sequence"
  source 1..4395: mol_type = other DNA
atgcctgaacaggaaaggcagatcactgcaagagaaggcgcctcccggaaaatcctgtccaagctctcgttgccgactcgcgcctgggaaccagccatgaagaagtcattcgcattcgataacgtggggtacgaaggcggactcgatggcttgggtccttcgtcccaagttgccacttccaccgtgcgcatccttgggatgacttgtcaatcgtgtgtcaagtccatcgaagataggatctcaaatctcaaaggaatcatctccatgaaggtgtcactggaacagggctccgctaccgtgaagtacgtgccttctgtggtctgcctgcagcaagtgtgccaccagattggggatatgggatttgaggcatccatcgctgagggtaaagcggcgagctggccatccaggtcgctcccggcgcaggaagcagtggtcaaactccgggtggaagggatgacctgccaatcgtgcgtgtcctcgatcgaaggcaaggtgcgcaagttgcaaggagtcgtgagagtgaaagtatctctgtcgaaccaagaggcggtcattacctaccaaccttacctgatccagcccgaggatctgcgggaccatgtgaacgacatggggttcgaagcagccattaagagcaaggtcgcgccgctgagcctcggtcccatcgatattgagcggctccaaagcaccaaccccaagcgcccactgagctccgctaaccagaatttcaataacagcgagacgcttggtcaccagggtagccatgtcgttacgctgcagctcagaatcgacggaatgcattgtaagtcgtgcgtactgaacattgaagagaatataggtcaactgctcggagtccagtcaattcaagtgtccctggaaaacaagaccgcccaagtcaagtacgacccaagctgcacttcgcctgtcgccctccaaagggccatcgaggcgctcccaccgggcaacttcaaagtctcgctgccagatggagctgaaggctcgggcaccgaccaccgtagctcatcatcccatagcccaggtagccccccgcggaatcaggtgcaaggaacttgctcaaccactctgatcgccattgccggtatgacttgtgcatcgtgtgtgcattcgatcgagggaatgattagccaactcgagggagtgcagcagatctccgtgtccctcgctgaaggtacggccacggtcctttacaacccttctgtcatcagcccggaggaattgagagctgctatcgaggacatgggtttcgaggcttcagtggtttccgaatcgtgcagcaccaatccgctcgggaaccacagcgctgggaactcaatggtccagaccaccgacggaactccgactagcgtccaggaagtggcgccgcacacgggcagattgcctgcgaatcatgctccagatatccttgccaaatcccctcagtccacccgcgcagtggcaccacagaagtgcttcctgcaaatcaaaggaatgacctgcgctagctgcgtttccaacatcgaacggaacctgcaaaaggaggccggagtgctttcagttctcgtggccttgatggcaggaaaggccgagatcaagtacgatccggaggtcattcagccactcgaaatagcgcagttcatccaggatctgggattcgaggcggccgtgatggaggactacgcgggatcggacggaaatatcgaactgaccatcaccggcatgacttgcgcgtcctgcgtgcacaatattgaatcgaagctgactcgaaccaatggaattacttatgcctcggtggcgctggctacctccaaggccctggttaagtttgacccggagatcatcggcccgcgggacatcataaagatcatagaggaaattggatttcacgcatcactggcgcaaagaaacccgaacgcccaccacctcgaccacaaaatggagatcaagcagtggaaaaagagtttcctctgcagtctggtgttcggaatcccggtcatggccctgatgatttacatgctcatcccgtctaacgaaccgcatcaatcgatggtacttgaccataacattatcccgggactctccatcctgaacttgatcttctttatcctttgcaccttcgttcaactcctgggaggttggtatttctacgtccaagcctataagtccctgaggcaccgcagcgccaacatggacgtgctgatcgttctcgccaccagcatcgcgtacgtctactcgcttgtcatcctggtggtggccgtggcagaaaaggcagagcggtccccggtaacgttttttgacactccgccgatgctctttgtgtttattgctttgggacgctggctcgaacacctggcaaagtctaagacctcggaagcgcttgccaaattgatgagtctgcaagccactgaggccactgtcgtgactctgggcgaggacaacttgattatccgggaggaacaggtcccgatggaactggtgcagcgcggagacatcgtgaaagtggtgccgggaggtaagttcccggtggatggaaaagtgctggaaggcaatactatggcggatgaatcacttatcaccggggaagcgatgcctgtgactaagaagcctggatccaccgtaatcgcaggatcaatcaacgctcacggatcagtgttgattaaagccacccacgtcgggaacgatactactttggctcagatcgtgaaattggtcgaggaggcacaaatgtcaaaagcccccatccagcagctggcggatcgcttctctggatactttgtccccttcataatcatcatgagcaccttgaccctcgttgtgtggatcgtgattggattcatagacttcggcgtcgtgcagcgatacttcccaaaccctaacaagcacatttcacagaccgaagtcatcatccggttcgcatttcagacctcgatcaccgtcttgtgtatcgcctgcccctgctcgttggggcttgcgacccctaccgcggtaatggtcggcactggcgtggccgcccaaaatggaatcctcatcaagggagggaagccactggagatggcccacaagatcaaaaccgtgatgttcgacaagactggtaccattactcacggagtcccccgggtcatgagggtgctcctcctgggagatgtggcaacgctgccactgcgtaaggtcttggcagtggtcggaactgccgaagcctcctcagaacaccctctgggcgtggcggtgactaagtactgcaaggaagaactcggcaccgagacgctggggtactgtactgatttccaggccgtcccgggatgcgggatcggctgcaaagtctcgaatgtggaaggtatcttggcccattccgaaagaccgctctcggctccagcaagccatctgaacgaagctgggtcgctgccggcagagaaggatgctgtgccacagactttctccgtcctcattggaaacagagagtggctgaggcgcaatggactgacgatctcttcggacgtgtctgacgcgatgactgaccacgagatgaagggccagaccgctatcctggtggccatcgatggagtgctgtgcggtatgatcgcgatcgcagacgccgtgaagcaagaggcggcccttgcagtgcataccttgcagtcaatgggagtcgacgttgtgctcatcacgggggataatcggaaaactgcacgagcgatcgctactcaggtgggaatcaacaaggtgttcgcggaggtcctgccgtctcataaggtggccaaggtgcaggaacttcagaacaaaggcaaaaaagtcgcaatggtcggggacggcgtgaacgactcaccggcactggctcaggcggacatgggagtggccatcggcaccggtactgatgtcgccatcgaagccgcggacgtcgtgctgatcagaaacgatttgctggatgtggtggcctctatccacctctcaaagcgcaccgtgagaagaatccggatcaatctggtgctggcgctcatctacaatcttgtgggcatcccaatcgcagcaggtgtgttcatgccaatcggaatcgtgctgcagccgtggatgggatccgccgccatggcagcgtcatccgtgtccgtggtgctgagctcactccaactgaaatgttacaagaagccagatctggaacgctacgaggctcaagcgcacggacacatgaagccgctgaccgctagccaggtgtccgtccatatcggaatggacgatcggtggcgggactcgccccgcgcgactccatgggaccaggtgtcgtacgtttcacaggtgtccctctcgtcgcttacctccgacaagcccagtcgccatagcgctgcggccgacgacgacggcgacaagtggagtctgctgctcaatggaagggacgaggagcagtacatc

SEQ ID NO: 7405 - DNA, 4395 bp, synthetic construct
  misc_feature 1..4395: note = source = /note="Description of Artificial Sequence: Synthetic coding sequence"
  source 1..4395: mol_type = other DNA
atgccagaacaggagcgccaaatcactgcccgcgaaggtgcgtctcgaaagattctgtcgaagttgtctctgcccacgcgcgcctgggaaccagcgatgaagaaatcgttcgccttcgacaatgtgggatacgaaggcggcttggacgggcttggaccgtcgtcccaagtggcgacgtccaccgtcaggattcttggaatgacttgccagtcatgcgtgaagtccatcgaggacagaatatcgaacctcaagggcatcatcagcatgaaagtgagtttggaacaaggctcagctaccgtgaagtatgtcccatccgtcgtgtgcttgcagcaagtgtgtcaccagataggcgacatgggtttcgaggcctccatcgcggaaggaaaggcagcgagctggccgtcgcgctccctgcctgcccaagaagcggtggtgaagttgcgggtggagggaatgacttgtcagtcttgtgtcagcagcatcgaagggaaagtgagaaagctccagggggtggtgagggttaaagtgagcctgagcaatcaggaagcagtcatcacgtaccaaccgtacctgatccagccggaggacctgcgcgaccacgttaacgacatggggttcgaagcggccatcaagagcaaggtggccccgttgtcactggggccgatcgacatcgaacggcttcagtccactaacccaaaacggccgctgagcagcgctaatcagaacttcaacaattctgaaacgctcggccaccaaggatcccatgtggtgaccctgcagctgcggatcgacggcatgcattgcaagagctgtgtcttgaatatcgaagagaacatcggccaactgctcggcgtccagtcgatccaagtgtccctggagaataagaccgcccaggttaagtacgacccctcctgtacctccccagtcgccctccaaagagccattgaagcccttcctccaggaaactttaaggtgagcctgccggacggagcagagggatccggaaccgatcatcgctcctcctcgtcgcattctcctggaagtccgccccggaaccaggtccagggaacgtgctcgactacgctgatcgccatcgccggcatgacgtgcgcgtcctgtgtgcatagcatcgagggcatgattagccaactcgagggtgtgcagcagatctcggtatcgctggcggagggcactgcaacggttctgtacaacccgtctgtgatctcgcctgaggagcttcgcgccgctatcgaagatatgggattcgaagcgtcggtagtctcggaaagctgctcgaccaatccgcttggcaaccattccgcgggtaactcaatggtccagaccaccgatggaaccccaacttcagtgcaggaagtggccccgcatactggcagactgccagccaatcatgcacctgatatcctggcgaagtccccgcaatcgacccgcgcagtggccccccaaaagtgcttcctccaaatcaaaggtatgacgtgtgcatcatgcgtgagcaacattgagcgaaacttgcaaaaggaagctggcgtgctgagcgtgctggtggcactgatggctggcaaagctgagataaagtatgacccagaagtcatccagcctctggaaatcgcccagttcattcaggatctggggttcgaggctgcggtcatggaagattacgccggatcggatggaaatatcgaactgactatcactggtatgacctgcgctagctgcgttcacaatatcgagtccaagttgactcgcactaacggcatcacctacgccagcgtggcacttgcgacctccaaggccctcgtcaagtttgaccctgagatcatcgggccacgggacattatcaagatcattgaagagatcggcttccatgcgtctctggcccaaagaaacccaaacgcccaccacctggaccacaaaatggagattaaacaatggaagaagtcttttctctgttccctcgtgttcggaatccctgtcatggcactcatgatttacatgctgatcccatcgaacgaaccgcatcagagcatggtgctggaccataacatcatcccgggtctgtcaatcctgaacctcatcttcttcatcctgtgcacttttgtccaattgctggggggatggtacttttacgtgcaggcttataagtccctccgccacaggtccgcaaatatggatgtgctgatcgtcctcgcaactagcatcgcctatgtgtactcactggttatcctggtcgttgccgtcgccgagaaagccgaacggtcacctgtgactttctttgataccccacccatgctcttcgtgttcatcgctctggggcgctggctcgagcacctcgctaagtcaaagaccagcgaagcccttgccaaacttatgagcctccaagccacggaagcgaccgtggtgacgttgggagaggacaatctgatcatccgggaagaacaggttcctatggagcttgtgcaaagaggagacatcgtgaaggtggtgccaggtggaaagttcccggtcgacggaaaagtgctggaaggaaacaccatggcggatgagagccttataacgggagaggcgatgccggtgactaagaagcctgggtccactgtgatagctggatccatcaacgcccatggatccgttctcatcaaggccactcacgtcggaaacgacaccaccctcgcacaaatcgtgaagctggtggaggaggcgcagatgtcgaaagcacctatccagcaactcgcagatcgcttctccgggtactttgtgcctttcatcatcatcatgtcaacccttaccctcgtggtgtggatcgtgatcggattcattgacttcggtgttgtgcagagatacttcccgaacccgaacaaacatatctcacagaccgaggtcatcatccggtttgccttccagacttccattaccgtcttgtgcatcgcgtgcccttgctcactcggcctcgcgaccccgacggccgtcatggtgggaactggtgtggccgcccagaatggcatactgatcaagggaggaaaaccactggaaatggcacacaaaatcaagaccgtgatgtttgacaagaccggaactatcacgcacggggtgccccgggttatgagggtgctgctgttgggcgatgtcgccactctgccacttcggaaagtcctcgcggttgtgggaactgcggaggcttcctcggagcacccgctgggagtcgcagtaaccaagtactgcaaagaagaactgggcaccgaaaccttgggatactgcaccgatttccaagcagtcccgggttgcggaatcgggtgcaaggtgagcaatgtcgagggaatcctggcacactccgagcgcccgctgagcgccccggcctcgcacctgaatgaagctggttcgcttcctgcagaaaaggacgccgtcccccaaactttctcggtgctgatcggaaatcgcgagtggcttcggagaaacggactgaccatctcgtccgacgtgtcggatgccatgactgatcacgaaatgaaaggacagaccgcaattctcgtcgcgattgatggagtgctgtgcggaatgattgccattgcggacgcggtgaaacaagaagccgccctggcggtgcacaccttgcagtcgatgggagtggatgtggtcctgatcaccggagacaacaggaaaactgctagggcgatcgccactcaggtgggcatcaataaggtgtttgccgaggtgctgccatcacacaaggtggctaaggtgcaagagctgcagaacaaaggaaaaaaggtcgccatggttggtgatggggtcaacgactccccggcactcgcgcaagccgacatgggcgtggcgatcggcactggaaccgatgttgccattgaggccgccgacgtagtcctgatccgcaatgatcttctggacgtcgtcgcctccatccatctctcgaagcgaactgtgagacggatccgtatcaacctggtgcttgcgctgatctacaacctcgtgggcattccgatcgccgctggagtgttcatgcccatcggcatcgtcttgcaaccatggatgggatcggcagcaatggctgcgagctcagtgtccgtagtactcagctcgctgcagctgaaatgttacaagaagccagatctcgagagatacgaagcacaagcacacggtcacatgaagccgctgactgcttcccaggtgtccgtccacattggtatggatgacagatggcgcgacagcccacgcgcaaccccctgggaccaggtgtcgtacgtgtcgcaagtgagcctgtccagcctgactagcgataagccctccagacattcggcggcagctgatgacgacggggacaagtggtcactgctgctgaatggaagagatgaagaacagtacatc

SEQ ID NO: 7406 - DNA, 4395 bp, synthetic construct
  misc_feature 1..4395: note = source = /note="Description of Artificial Sequence: Synthetic coding sequence"
  source 1..4395: mol_type = other DNA
atgcccgaacaagagagacagatcaccgcgagagagggagcctcaaggaaaatcctctcgaagcttagtctgcccactagggcctgggaacctgcaatgaagaaaagctttgcctttgacaacgttggctatgagggtggattggatggactggggccaagtagccaggtggctactagtaccgtgcggatcctaggaatgacctgtcagtcctgcgtgaagtcgatagaggatcggatttcgaatctgaaaggaatcatttcaatgaaggtatcacttgaacaaggttcagccactgttaagtatgttcccagcgtggtgtgcctgcaacaggtatgccatcagatcggggatatgggcttcgaggcttccatagctgaggggaaggctgcatcatggccttcacggtccttgcccgcacaggaagctgtcgtgaagctgagggtagagggcatgacatgccagtcttgtgtgagctccatagagggcaaagtgcgaaagttacagggtgttgtgcgagtgaaggtgtcgttgtcaaaccaggaagccgttataacataccaaccttatcttatccaacccgaggatctacgggatcatgtgaatgatatggggttcgaggccgcaattaagtcaaaggtagcacctcttagcttggggcctattgacatcgagcgtctccaatccaccaacccaaaacgcccgctgtcaagcgcaaaccagaactttaataacagtgagacactgggccatcagggctctcacgttgttaccttacagcttcgaatcgacggcatgcactgcaagagttgtgtgctcaacatcgaggaaaatatcggccagctgctgggcgtgcagtcgatccaggtaagtctggagaataaaaccgcacaggtgaaatacgatcctagctgcacatcaccagtcgcccttcagagagctatagaggctctcccgcccgggaatttcaaggtgtccttgcctgacggggcagaggggagtggaacagatcaccgtagctcgagctctcactctcctggctccccacctcggaaccaagttcaggggacttgttcaacaaccctcatcgcaattgctggcatgacttgcgcaagctgcgtgcatagcatagaagggatgatttcccagctcgagggcgtccagcaaatcagtgtttctctcgcagaagggactgctaccgtgctctacaatcccagcgttatatcaccagaagaactgcgggcagcaattgaggatatggggtttgaggcaagcgtagtgagtgaatcatgttcgacgaacccattgggcaaccatagcgctggcaatagtatggtccagacaacagatggaacccctaccagcgtgcaagaggtggcaccacacaccggtcggttgcccgccaaccatgcccccgacatattggccaagtctccccaaagcacaagagccgttgctccccaaaaatgttttctacagatcaagggtatgacctgcgcgtcttgtgtatcaaatatcgaaagaaacctgcagaaggaagccggcgtgctgtctgtgctggtcgctctgatggccggcaaagctgaaataaaatacgaccctgaggttatacagcctcttgaaatcgctcagttcattcaggacctggggttcgaggcagcagtgatggaggattacgccggctcggatggcaatattgagttgactattactgggatgacatgcgcttcttgcgtgcacaacattgagtctaaacttacgagaacaaatggaatcacatacgcttcagtggcgctggctacctccaaggcattggtgaagttcgatcccgaaattataggcccacgggacattatcaagatcattgaagagatcggctttcacgcaagtcttgcgcaaagaaacccaaacgcgcatcatcttgaccacaagatggaaatcaaacagtggaaaaaatccttcctgtgctccctagtcttcggtatacccgttatggcgctgatgatttacatgctcatcccttctaatgagcctcaccagtccatggtgctagatcataatatcattccaggcctgtccatccttaacctcatctttttcattctgtgcactttcgtgcagttgctcggtgggtggtatttttatgtgcaagcctacaagtccttgcggcataggagtgcgaacatggatgtgctgattgtgcttgccacaagtattgcctatgtgtatagtctggtgatcttggtcgttgccgtggccgagaaggctgagagatcccccgttaccttcttcgacacacctcccatgcttttcgtgttcatagccctcggccgatggctagaacacctggccaaaagtaaaacatccgaagccctggctaagctcatgagcctgcaggcaactgaagccaccgtggtgacattaggagaagataaccttatcatccgtgaggaacaggtacctatggagctggtgcagcgcggagatatcgtcaaggtggtgccgggcgggaagtttcccgtcgatggtaaagtcctcgagggtaatactatggcagatgagtctcttattaccggcgaagccatgccagtgacgaaaaaacctggatcaactgttattgctgggagcattaacgctcacggatctgttttgatcaaggcaactcacgtcggcaacgacacaactctagcacaaatcgttaaactggtggaagaggcacagatgtccaaagctccaatacagcagctggccgaccggttcagtgggtactttgttccctttataattatcatgtccacccttacactcgtggtctggattgtgatcgggttcatcgattttggagtggtgcaacgctactttccaaaccccaataagcacatcagccagaccgaggtgatcatcagatttgcattccagacatcgatcactgtcttgtgcatcgcttgtccatgtagtctggggctagccacacccacagctgtgatggtgggcaccggcgttgcagcccaaaatggtatcctgattaagggaggaaaaccgcttgagatggcacacaaaataaagacagtaatgttcgataagaccgggacgatcacccacggagttccgcgagtcatgcgggttcttctcctcggagacgtagccaccttgcccttacgcaaagtgttggccgtggtgggcacagctgaagcctcgagtgagcatcccctcggcgtcgctgtcacaaagtactgcaaggaagaactcggcacagagacgctaggttactgcacagacttccaagctgtccccggatgtgggattgggtgcaaggtcagcaacgtggaaggtatcctcgctcactcagagaggcctctctctgcccccgccagccacctgaatgaggccggctctctgccagccgagaaagacgctgttccacaaacttttagtgtattgattggaaatagagagtggctgcggaggaacgggctcactatcagttcagacgtgtcggacgctatgacggaccatgaaatgaagggccaaactgcaattcttgtggcaattgacggggtcctatgcggaatgatcgccatagcagatgccgtcaagcaggaggcggcgcttgctgtacacacacttcagagcatgggagtggacgttgtgctgataaccggcgacaaccgtaagaccgctagggctatcgctactcaggtgggtatcaataaggttttcgctgaggtactgccgtcccataaggtagctaaggtccaggagctgcagaataaggggaaaaaagtcgcgatggtgggcgacggggtgaacgactcccctgccctggcgcaggctgatatgggcgtggccattggaaccggcactgacgtggccatcgaagccgctgacgtggtcctaatacgaaacgatcttttagacgtggtggcgagtatccatctgtccaagcgaactgtgaggagaattcgcatcaatctggtcctggccctgatctataacctggtgggaatccccatcgctgcaggggttttcatgcctatcggaatagtgttgcagccttggatggggtccgcagccatggcagcgtcctctgtgtccgtcgtcctcagttcactgcagctgaaatgctacaagaagcccgacctagagcgctatgaggctcaagctcacggtcacatgaaaccactgaccgctagccaggtgtctgtccacatcgggatggacgatcggtggagggattcgccccgggccaccccttgggatcaggtttcttacgtctcgcaggtaagtctatcctctctgacttcagacaagccaagcagacactctgcagccgctgacgacgatggtgataagtggtctttgctgctgaacggcagagacgaggagcaatatata

SEQ ID NO: 7407 - DNA, 4395 bp, synthetic construct
  misc_feature 1..4395: note = source = /note="Description of Artificial Sequence: Synthetic coding sequence"
  source 1..4395: mol_type = other DNA
atgcccgaacaggagaggcaaatcaccgcgcgggaaggcgcaagtcgaaagatcttgagcaaattgagtctgccaacgagggcatgggagcccgcaatgaagaaatccttcgcatttgacaacgtgggttatgagggcggattagacgggttaggcccatctagccaggttgcgacgagcacagtgagaattcttgggatgacatgtcaatcatgtgtgaaatctatagaagacaggatctctaatctgaagggcatcatctccatgaaagtctccttggaacagggttcagccaccgtcaaatatgttccatctgtagtctgcctgcaacaggtgtgccaccagatcggggatatggggtttgaagccagcattgccgagggcaaagcagcctcttggccgtcgagaagtctgcccgcccaggaggccgtggtgaaactgcgcgtcgaaggtatgacttgtcaatcatgcgtaagttccattgaggggaaggtgaggaaactgcagggcgtggtgagagtcaaagtcagcctctctaatcaggaggccgttattacttaccagccatatctgattcagccagaggacctgcgagaccatgtcaacgatatgggctttgaagccgccattaagtcgaaggtggcccctctgagccttggccccatcgatattgagcggttgcagtctactaatcctaagaggcctctgagctcagcaaaccaaaacttcaataattccgaaaccttggggcatcagggttcccatgtggtcactcttcaactgcgaatcgatgggatgcactgtaaatcgtgtgtcctcaatattgaagagaacatcggccaactgctgggtgtgcagtccatccaggtttccctggagaacaaaactgcccaggtgaagtatgatccatcatgcaccagcccagtggcactgcagcgggcaattgaggccctccctcccggtaactttaaggtgtctttacccgacggagcggagggttcgggcactgaccaccgcagtagttcctctcactcacccggttcgccaccccgcaaccaggtccaggggacgtgttcaaccacccttatcgcaatagccggaatgacttgcgcctcttgcgtgcattccatagaaggtatgatctctcaactggagggcgttcaacagatatctgtgtccctcgccgagggcactgcaaccgtcctctataatcccagtgtgatatcacccgaggagctcagagcagccattgaagatatggggtttgaggctagtgtcgtgtctgagagttgtagtactaaccccctgggcaaccactctgcaggcaatagcatggtacagacaactgacggcacacctacaagtgttcaagaggttgccccgcacactggcaggctcccggccaaccacgcacctgatattcttgcaaaaagcccacaaagtacgagggcggtggctccgcagaaatgctttctgcaaatcaaaggaatgacatgtgccagctgtgtgtcgaacattgagaggaacctgcagaaagaagccggtgtactcagcgtgctcgttgccttaatggctgggaaggcagaaattaagtacgaccctgaggtgattcaacccctggagatagcccagtttatccaggatcttgggttcgaggccgccgtgatggaggactatgcagggtcggatggcaacatcgaactcactattactggaatgacttgtgcgagttgcgtgcataatatcgagtcaaagctgacgcgcactaacggcattacctatgcctcagtcgcgcttgccacgtccaaggctcttgtcaaattcgatccagaaatcatcggtccccgtgacattatcaagatcattgaagaaattggtttccatgcgtccctggctcagcgaaatccgaacgcccatcacctggaccataaaatggagataaaacagtggaaaaaaagttttctgtgtagtcttgtgtttggcatccctgtaatggcactgatgatctatatgttaattccgagcaacgaacctcaccaaagtatggtcctggatcacaatataatcccagggctcagcatactgaacttgatcttcttcatcctgtgtacattcgtgcagctgttagggggatggtacttttatgttcaggcttataagtccctaagacaccggtctgctaatatggatgtcctgattgttctggctacctctatcgcttatgtttacagtctggtaatactggtggtcgcagtggcggaaaaggccgaacgtagccctgttactttcttcgataccccccccatgctcttcgtgttcatcgcgttagggcgctggctggaacacttagcaaaaagcaagacttccgaggcattggccaagttaatgtccctgcaggcgacagaagcaaccgtggtgacgctcggtgaagataatttgattatcagggaagagcaggttccgatggagttggttcagcggggagatatcgtcaaagtggtgccgggtggaaaatttcccgtggatggcaaagtactagagggcaatactatggccgatgagtccctcatcaccggagaagcaatgccagtgacaaagaagccaggcagcaccgtgatagctggtagtattaacgcgcatggatccgtgctgatcaaggctacccacgtcggaaatgacacaactctcgctcaaattgttaaacttgtagaagaggcccagatgagcaaagcccctatccagcagcttgctgataggttctctgggtatttcgtaccctttattattatcatgtcgaccttgaccctcgtcgtctggattgtgatcggatttatcgacttcggggtggtgcagcggtatttccccaacccaaataagcacatttcccagactgaagtcattattcggttcgcctttcagacttccatcaccgtgctgtgtatcgcttgcccatgctccctgggtctggcaacccctactgccgtgatggtgggcacaggtgtggctgcccaaaatggaattctgatcaaaggaggaaaaccactagaaatggcacataaaatcaaaacggtaatgttcgataaaactgggactattactcacggagtgccgcgcgttatgagggtccttttgttaggcgatgttgccacgctgcccttgagaaaggtgctggccgttgttggaacagcagaggccagttccgaacatccacttggtgtggccgtgactaagtactgtaaggaagagcttggaaccgagactctggggtactgcacagatttccaggctgtaccggggtgtgggatagggtgcaaagtaagcaacgtagagggcatcctcgctcattccgagaggccactgagcgcccccgctagtcacctgaatgaggccggatccctgccagccgagaaggacgccgtaccccagaccttttccgtgctgattggcaaccgagagtggctcagaaggaacggtctgactattagcagcgatgtatctgacgcaatgacggaccacgaaatgaagggccagacagctatccttgtggccatcgacggagtgctctgtggcatgatcgcgatcgcggatgccgtgaagcaggaggcagctcttgcggtccacactctccagtccatgggtgttgacgtcgtcctgatcactggggacaatagaaaaactgcacgcgccattgccacgcaggttgggataaacaaggtgtttgcggaagtcttgccctctcacaaagttgctaaagtgcaggagcttcagaataaggggaagaaagtggccatggtgggggacggggtcaacgacagccctgcactggcacaggcagacatgggggttgccattggaacaggaaccgacgttgcgatcgaggctgcagacgtggtgttgattaggaatgacctgttggacgtggttgcctcaatccacctgagtaagcgtaccgttagaagaatccgtataaatctggtacttgcactgatctacaacctagtcggtatccccattgctgctggcgtattcatgcccatagggattgttttgcagccatggatgggtagtgccgctatggccgcctcatctgtctctgtggtgcttagcagtcttcaactgaagtgctataagaagcccgatttggaaagatacgaagcacaggctcacggacatatgaagcccttgacagccagtcaggtatccgtgcatatcggtatggacgataggtggagagactccccgagagccacaccgtgggaccaggtgagctacgtgtcacaggtctctctatcttccttgacatctgataaaccgtcacgacatagtgctgcagctgacgatgatggtgataaatggagcttactgctgaatggcagggatgaggaacagtatatc

SEQ ID NO: 7408 - DNA, 4395 bp, synthetic construct
  misc_feature 1..4395: note = source = /note="Description of Artificial Sequence: Synthetic coding sequence"
  source 1..4395: mol_type = other DNA
atgcccgaacaagaacgccagatcacggcaagggaaggggcaagcagaaagattctcagcaaactgtccctgccaactcgcgcatgggagcccgcgatgaagaaatcctttgcatttgataacgtcggctacgagggtggcctggatggactgggaccttcctcgcaagtggccacctcgacggtgcgaatactgggcatgacctgtcaatcgtgcgtgaaatctattgaagatcggatttctaacttgaagggaatcatatcaatgaaggtgtcacttgagcaggggtcagcgactgtgaagtacgtgccatccgtggtgtgtctgcagcaagtgtgccaccaaattggtgatatgggttttgaggcatccatagccgaaggtaaggcggcctcatggccatcgcgttcgttgccggcgcaagaagccgtggtgaagctgcgtgttgaaggcatgacctgccaatcttgcgttagctccattgagggaaaggttagaaaactgcagggagtggtaagggttaaagtgtcgctttcgaaccaagaagcagtcatcacctaccagccctatctgattcagcctgaagatctccgggaccatgtcaatgatatgggatttgaggcggcaattaagagcaaggtggcccccctgtcacttggtccaatcgatattgagagactccaatcgactaaccctaaacgccctctttcatccgccaatcaaaacttcaataactcagagacgcttggacatcagggaagccacgtggtgactttgcaactccgcattgatggaatgcactgtaagtcatgtgtgcttaacatagaagagaacataggccagctgcttggggtgcaatcaatccaggtcagccttgagaacaagaccgcccaggtcaaatacgacccttcatgtactagcccggtggcacttcaacgcgccatcgaggcgctgccacctggcaactttaaggtgtcccttccagacggcgcagaagggtcgggaacggaccacagatccagcagctcgcattcgcctggttcaccacctagaaaccaagtgcaagggacttgtagcactacgctgatcgccattgcggggatgacttgcgcttcgtgcgtccactcaatcgagggaatgatcagccagctcgaaggtgtccagcaaatcagcgtgtcgcttgctgagggaacggcaaccgtgctttacaacccttcggtcatctccccagaagaactgcgcgccgcaattgaagatatgggctttgaagcctcggtcgtctcggaatcttgttcaaccaacccactgggaaatcactcggcgggcaacagtatggtgcaaaccactgatggaacccctaccagcgtgcaagaagtcgcaccccacactgggagactgccggccaatcatgcgccagacattcttgcgaaatcgcctcaatccacccgagccgtcgcacctcaaaaatgttttctccaaatcaaaggaatgacctgcgcgtcgtgtgttagcaacatagaacgtaaccttcaaaaggaagccggagtgctctccgtgctggttgcacttatggcaggtaaggccgagatcaagtacgaccctgaagtgatacagcccttggagattgcacaattcattcaagaccttggatttgaagcggcggttatggaagattacgcaggttcggatggtaatatcgaactgactatcaccggaatgacttgcgcatcctgtgtgcacaatattgaatccaagctcacgaggaccaacggaatcacctacgcatcggttgcattggcaacctctaaagcactggtgaaattcgatccggagataattggaccacgggacatcattaagatcatagaggagattggatttcatgcatcgcttgcacaacgcaatcccaatgctcatcatctggaccataagatggagattaagcaatggaagaagagctttctgtgtagcctcgtgtttggtataccagtgatggccctgatgatttacatgctcatcccaagcaacgaaccacatcagtcgatggttctcgatcacaacattatccctgggctctccattctcaatctgattttcttcatcctctgtacttttgtccagcttcttggtggatggtacttttacgtgcaagcatacaagtccctccgacatcggtccgcaaacatggacgtgttgattgtgctcgcaacttcaattgcatatgtgtatagcctggttattctcgtcgttgcggtcgcagaaaaagcagaacgttctcccgtcaccttcttcgacaccccacctatgttgtttgtctttattgcactcggcagatggctcgaacatctcgcaaagtccaaaaccagcgaagcacttgcaaagctgatgtccctgcaagcaactgaggctaccgtggtgactcttggagaagataatctgatcattagggaggagcaggtgccgatggaacttgttcagaggggagacatcgtgaaagtagtgcctggaggcaagttccctgtcgatggaaaagttctcgaaggtaatactatggcagacgaatcactgattaccggagaggcaatgccagtaaccaagaagccaggatcgactgtgattgcgggcagcatcaacgcacatggatctgtgctgatcaaagcaacccatgtcggaaatgacactactcttgctcagatcgtgaagctggtggaagaagcccaaatgagcaaggcaccgatccaacagcttgcagatagattttcagggtatttcgtgccctttatcataatcatgtccacgctgactctggtggtctggattgtgataggcttcatcgattttggcgtcgtgcaaaggtactttccgaaccctaataagcatattagccaaactgaagtgatcattcggttcgcattccaaacgtcaatcaccgtgctctgcattgcctgtccctgttcgcttggactcgcaacccctactgccgtcatggtcggaactggtgtcgcagctcagaacggaatactcataaaaggtggcaagccactggagatggcacacaagataaagaccgtcatgtttgataagaccggaaccatcactcatggtgtgcctcgcgtgatgcgcgtcctgctcctcggggacgtggcgacgcttcctcttagaaaggtcctggcagtggtgggcactgcagaagccagctcggaacaccccctcggagtggccgtgaccaagtattgtaaggaagagcttggcaccgaaactctgggatactgcaccgatttccaggctgtcccagggtgtggaattggttgtaaagtgtcgaacgtggagggaattttggcacactccgaacggccgctgagcgcgcccgccagccatctgaacgaagcaggatcgctgcctgctgagaaggatgctgtgcctcagacctttagcgtgctcatcggaaaccgagaatggcttcgccgtaatgggctcactatttccagtgacgtgtcagatgccatgaccgatcatgaaatgaaaggacagaccgcaattctggtcgcaatcgacggagtcctgtgcggtatgattgccattgctgatgccgtgaagcaagaagcggcacttgccgtgcacaccctgcagagcatgggagtcgatgtcgtgctgataactggagacaatcgtaagactgccagagcaattgcgacccaagtggggatcaacaaggtgttcgcagaagtgcttccatcgcataaagttgctaaagtgcaagagcttcagaataagggaaagaaggtcgctatggtgggggatggtgtcaatgactcccctgcccttgcacaggcagacatgggtgtggctattggcaccggaaccgatgttgcaatcgaagcagcggatgtggtgctgattcggaacgatcttcttgatgtggtcgcatccattcatctgtcaaaacggaccgtcagaagaattagaattaacctggtactggcactgatctataacctcgttgggatccctattgctgcgggagtctttatgccaataggtatcgtactgcagccttggatgggatctgcagccatggccgcatccagcgtgagcgtggtcttgagttccctgcagctgaagtgttacaaaaagcccgatcttgaacggtacgaagcccaagcgcatggtcacatgaagccacttacggcaagccaggtgtcggtccatattggtatggacgatagatggcgggattctccaagagcgacgccttgggaccaggtttcatacgtgagtcaagtgtcgctcagctctcttacctccgataaaccaagcagacattccgctgcagcagacgacgatggagataagtggtccctccttttgaacggccgcgacgaagaacagtacatt

SEQ ID NO: 7409 - DNA, 4395 bp, synthetic construct
  misc_feature 1..4395: note = source = /note="Description of Artificial Sequence: Synthetic coding sequence"
  source 1..4395: mol_type = other DNA
atgccagaacaggagcggcagattactgcgcgggaaggcgcctcccgcaaaatcctttcgaagctgagcctgccgactcgcgcttgggaacctgccatgaagaagtcatttgcgttcgacaatgtcggttatgaaggaggactcgacggtttgggtccgagctcccaggtggctacttccaccgtgcgcatcctgggcatgacttgccagtcctgcgtcaagtcaatcgaagatcgcatctcgaacctcaagggtatcatatccatgaaggtttcactggaacagggctcagcgaccgtgaagtacgtaccttcagtagtgtgcctccagcaggtctgccatcagatcggcgatatgggcttcgaggcttcgatcgccgagggaaaggcggcgtcatggccgtcacggagcttgccggcgcaagaggctgtcgtcaagctgagggtggaaggaatgacgtgccagagctgtgtgagctcaatcgagggcaaggttcgcaaattgcaaggtgtcgtccgtgtaaaggtgtccctgtccaaccaagaagccgtgatcacttaccagccatacctgatccaaccagaggatctcagagatcacgtcaacgacatgggttttgaagcagccatcaagtcgaaggtggcccccctctcgctggggccaatcgatatcgagcggttgcaatcgaccaaccccaagcggcctctgagctctgccaaccaaaatttcaacaactcagaaaccctcggtcaccaggggtcccacgtggtcactctgcaactgcggatcgacggcatgcactgtaagtcctgtgtcctcaacatcgaggagaacattggacaactcctgggagtgcagtcgatccaggtgtcgctcgagaacaagaccgcccaggtgaagtatgacccctcgtgtactagtccggtggccctgcaaagggcaatcgaggccctgccgcccgggaactttaaagtctcgctgccggacggcgcagaagggagcgggacggaccaccggtccagctcatcgcacagccctggatctcccccgagaaaccaggtccagggcacttgttcgacgactttgatcgcgatcgcgggtatgacgtgcgcttcgtgtgtgcactcgattgagggcatgatctcacagctggaaggagtgcagcagatatcagtgagtctggcggaaggaaccgcaaccgtcctctacaaccctagcgttatcagccctgaagaactgcgtgctgctatcgaagatatgggattcgaggcgtcggtggtgtccgagtcgtgtagcaccaatccactgggaaatcattcggcgggaaattccatggtccagactaccgacggcaccccaacttcagtgcaagaggtcgccccacacaccgggagacttcctgcaaaccatgcgcctgatatcttggccaagtccccgcagtccaccagggcagtggctccgcaaaaatgtttcttgcaaattaagggtatgacttgcgccagctgcgtgtccaatattgaacgaaatctgcagaaggaagccggagtgctgtccgtgcttgtggcactcatggcaggtaaagcagaaatcaagtacgatccggaagtgattcagccactcgagatcgctcagttcatccaagatctggggttcgaggccgccgttatggaggattacgcaggatccgacggaaatatagaattgaccatcaccggaatgacctgcgcctcgtgcgtccataatatcgagtcaaaacttactcgcaccaatggaatcacttacgcatcggtcgctcttgctacctcgaaagcgttggtgaagtttgacccagaaatcatcggtccacgcgacattatcaaaatcatcgaagagatcggctttcacgcctcactggcccaacggaatccaaacgcccaccacctcgaccacaaaatggagatcaagcagtggaagaaatccttcctgtgctcgctggtcttcgggatcccggtgatggcactcatgatctacatgctcatcccttccaatgaaccacatcagagcatggtgctcgaccacaacatcatcccgggattgtcgatcctcaacttgatctttttcattctctgcacttttgtgcaacttctgggaggatggtacttttacgtccaagcgtacaaatcacttaggcacagatcagctaacatggacgtcctgatcgtgctcgccacctccattgcctacgtctactcgctcgtgattctggtggtcgctgtagcagaaaaagccgaacgcagcccggtcactttcttcgacacccctccaatgctgtttgtgttcatagcgctcggacggtggctggagcacctggccaagtcgaaaacgagcgaggctctcgctaaactcatgagccttcaggccaccgaggcgactgtggtgacgctcggagaggacaacctgatcatccgcgaggaacaggtgccaatggagctggttcagagaggcgacatcgtaaaagtggtgcccggaggaaagttccctgtggacggaaaggtcctggagggaaacaccatggctgacgagtccctgatcactggggaagctatgccggtgaccaagaagcccgggtctaccgtgatcgcaggctcaatcaacgcccatggcagcgtgctgattaaggccacccacgttggcaatgatacgactctggcgcagattgtcaagctggtagaggaagcccagatgtcaaaggcacccatacaacaacttgcagaccgcttctccggctacttcgtgccgttcattatcatcatgagcaccctgactcttgtggtgtggatcgttatcgggttcatcgatttcggagtggtgcagagatacttcccgaacccgaacaagcacatctcgcaaaccgaagtcatcataagattcgcattccaaacgtcgatcactgtgctgtgcattgcatgcccgtgctcccttggccttgctaccccgactgccgtgatggtcgggactggcgtggcagctcagaatggaatccttatcaaaggaggcaagcccttggagatggctcataagatcaaaaccgtgatgttcgataaaaccggaaccatcactcatggagttccgagggtgatgcgcgtcctccttctcggagacgttgcgactctccccttgagaaaggtgctggcggtcgtcgggaccgcggaggctagctccgaacatccgctgggagtcgcggtgaccaagtactgcaaggaagagctgggaaccgaaaccctgggctactgcactgatttccaggccgtccctggctgcggaatcggatgcaaagtgtcaaatgtcgaaggaatcctggcccatagcgaacgcccactgtccgccccggcctcccatctcaatgaggccggatcactgccggcggaaaaggacgcggtacctcaaactttctctgtgctgattggaaatagagaatggctccgccgaaatggactgactatctccagcgacgtttctgacgccatgaccgaccatgagatgaaggggcagacggcgatcctggtggcaatcgacggagtgctgtgcggaatgatcgcgattgccgacgccgtgaaacaggaggccgcccttgcagtccacacgctgcaatcaatgggtgtggatgtggtgctcatcaccggagacaacagaaagactgcgcgcgccatcgccactcaggtgggaatcaacaaggtgttcgcggaagtgctgccgagccacaaggtggccaaagtgcaggagctccagaacaagggcaagaaagtcgccatggtgggcgatggggtgaacgattcgccggcgcttgcccaggcggacatgggagtggctatcggaactggtaccgacgtggcaatcgaagccgcagacgtggttctcatccgaaacgacctgcttgatgtggtggcctcgattcacctgtctaagcgaaccgtgagacgcatccgcatcaatcttgtcttggctcttatttacaacctcgtgggcattccgatcgccgcgggtgtgtttatgccgatcggaatcgtcctgcaaccgtggatgggatcggcggccatggcagcctcttcggtgagtgtcgtcctctcctctctccagctgaagtgctacaaaaagcccgatctggaaaggtacgaagcccaggcacatggacatatgaagccacttaccgcgagccaagtctccgtgcacatcgggatggacgatcggtggcgggattcacctcgggccacgccgtgggaccaagtcagctacgtgagccaggtgagcttgtcgtccctgacttcggacaagccatcccggcattccgcagcggcggacgacgacggagataagtggtcgctgctgctgaacggacgcgatgaagaacagtatatt

SEQ ID NO: 7410 - DNA, 4395 bp, synthetic construct
  misc_feature 1..4395: note = source = /note="Description of Artificial Sequence: Synthetic coding sequence"
  source 1..4395: mol_type = other DNA
atgcctgagcaggaaaggcagatcactgccagagagggtgcctcccgtaaaatactcagcaaactgagcctcccaacaagggcatgggagccggcaatgaagaagtcattcgccttcgacaatgtgggctatgaggggggtcttgacgggctcggcccttctagccaggtggccacgagcactgtcaggattttgggtatgacctgccagagttgcgtcaaaagtatagaagatcggatcagcaaccttaaagggattattagcatgaaagtgagtctagaacaggggagtgctaccgtaaagtacgtcccatcagtcgtgtgcttgcagcaagtgtgtcaccagatcggagatatggggtttgaggcttctatcgcagagggcaaagccgcctcctggccatcacgaagtctccccgcccaggaggccgttgtgaagctgagagttgaagggatgacctgccagtcttgcgtgagcagtatagagggaaaagtgcgaaaactccaaggtgtggttagggtgaaggtgtctctcagtaaccaggaagctgtaattacttaccagccgtacctcattcaacccgaagacttaagggatcacgttaacgacatgggatttgaggctgccatcaaatcgaaggttgctccgctgtcactgggcccgatagacatcgagagactgcagtctacaaaccccaaacgacctctttcaagcgcgaatcagaacttcaacaacagcgagacactcggccatcaggggagtcacgtggtgacactgcagctgcgtatcgacgggatgcattgcaaatcatgtgtcctaaacatcgaagaaaacattggtcagctgcttggggttcagtcaatccaggtttccctggaaaacaaaacggcccaggtaaagtacgacccttcgtgcaccagtcctgtggctctccagcgagctatagaggcacttccaccaggcaattttaaagtgagcctgccagacggggccgagggaagtggcaccgaccatcggagctccagctcccattcacccggcagccctccacggaatcaagttcagggtacgtgttctacgacactgatcgcaatcgcgggaatgacatgcgcctcatgtgtacacagcattgaaggcatgatcagccagttggaaggagtgcagcagatctccgtgtctctcgccgagggcacagccacagttctgtataacccatctgtaatctcacctgaggagctgcgcgccgcgatcgaagatatggggttcgaggcatccgtcgtgtcggagtcttgtagcacaaatcccctgggaaatcacagtgctggcaatagcatggtccagaccaccgacggcacccccacaagcgtacaggaggttgccccccacaccggaagactgcctgccaatcatgcacccgacatcctagctaagagtccacaaagtacacgggccgtagctcctcagaaatgctttctacagattaaagggatgacatgcgccagctgtgtctcaaatatagaaagaaaccttcaaaaggaagccggcgtcctgtccgtgctggtggctcttatggcgggaaaggctgagataaagtacgaccctgaagtcattcagcctctggaaatcgcacagttcatccaagacctgggctttgaagccgccgtcatggaggattatgccggaagtgacggcaatattgagcttaccatcacagggatgacttgcgcctcctgtgtgcataacatagaatccaaactgacacggaccaacgggatcacctacgcatccgtggctcttgccacatctaaggccctggttaaatttgacccggaaatcataggcccacgggacatcatcaaaattatcgaggaaataggatttcatgcctctctcgctcagaggaaccccaatgcccatcatctggatcataagatggagatcaagcagtggaaaaagtccttcctgtgcagtctagtttttggaattcccgtgatggcgcttatgatttacatgttgattccatccaatgaaccacatcaaagcatggtcctggatcataatataattcctggccttagcatcctcaacctgatttttttcattttatgtaccttcgtccagctgcttggtgggtggtacttctacgtccaggcctacaagtcactgaggcatcgcagcgcaaacatggacgttttaattgttctggcgacatcaatagcatatgtctacagtctggtcatcctggtagtggctgtcgcagagaaagcagagagaagtcccgtgactttttttgatactccacctatgctcttcgtgtttattgctctcggccgatggctggagcacctggccaagtcaaaaacctcggaagctttagcgaaattaatgtcactgcaggccactgaggctaccgttgttacattaggtgaagataacctgattatacgtgaagaacaggtgccaatggagctggtgcagaggggtgatatagtcaaggtggtgcccgggggaaaatttcccgtggatggcaaggttctagagggaaacacgatggctgacgagtcactcatcaccggagaggcgatgccggtgaccaaaaaacctggcagcacagtaatagctggcagcatcaacgcccatggatccgtgctgattaaggccacacatgtgggaaatgatactactctggcgcaaattgttaagttagtggaagaggcccagatgagtaaagcccccatacagcaacttgcagaccggttctcaggctattttgttccgtttatcattattatgtctacattgaccctggtggtgtggattgtcatcggatttattgatttcggcgtcgttcagcgctacttcccgaatcctaataagcacatctctcaaaccgaggtgattattaggtttgcatttcagacgagtatcacggtcctgtgcatcgcgtgcccctgttctctgggcctggccacccctacagctgtgatggtgggaaccggcgtggcggcacaaaatggaatattgattaaggggggtaagccactagagatggcccacaaaatcaagacagtcatgttcgacaaaacaggaacaataacccacggagtaccccgggtcatgcgcgtgctgctactgggcgacgtcgccacgttaccgctccggaaggtgctggccgtcgtgggcactgccgaggcatcctcagagcacccactgggagtcgcggttaccaaatactgcaaggaggaactcgggaccgagaccctcggatattgtaccgacttccaagccgtcccgggatgtggcatcggctgtaaagtgtcaaatgtggaagggatcctggcccactccgagcgtccccttagcgcccctgcttcgcatttgaatgaagctggctctctgccagcagaaaaggatgcagttcctcaaaccttttcagtgttaattggaaaccgcgagtggctgcgaaggaacggactgaccataagtagtgatgtttctgatgctatgacggatcatgagatgaagggacagaccgctattctagtagccattgacggagttctgtgcggtatgatcgccatcgcggacgcggttaaacaggaggcggcgctagctgtccatacacttcagagtatgggtgtagacgtggtgcttatcaccggggacaacagaaaaacggcgcgcgctatagcaacccaggtgggaataaataaggtgttcgctgaggtgttgccgtcacataaagtggcaaaagtgcaggaactgcagaacaagggcaaaaaggtagccatggtgggggatggggtgaacgattcgcccgcactcgcacaggccgacatgggcgttgcgatcgggacaggaaccgacgttgcgattgaggcagcggatgtagtgctaattcgaaacgatctcctggacgtggtcgccagcatccacctatcaaagcggactgttagacggatccggattaacctcgttctggctctgatatacaaccttgtggggattccgatcgccgcgggcgtgttcatgcccattggaatagttctgcaaccatggatgggcagtgccgcaatggctgcttcgtccgtgtcagttgtgctctcctccctgcaactgaagtgctataagaaacccgacctcgagcgatacgaggcacaggcccacgggcatatgaagcccttgacagcttctcaggtgtctgtgcacatcggcatggacgataggtggagagatagtccccgtgctaccccctgggaccaggtgtcttatgtatcgcaagtgagtctgagctcactgacaagtgataagccaagtcggcacagcgctgcggctgacgacgatggggacaagtggagcttactcctaaacggaagggatgaggagcagtacata

SEQ ID NO: 7411 - DNA, 4395 bp, synthetic construct
  misc_feature 1..4395: note = source = /note="Description of Artificial Sequence: Synthetic coding sequence"
  source 1..4395: mol_type = other DNA
atgccagaacaagaaagacagatcaccgctagagagggggcttcgcggaagattctctcaaagctgagcctgcctacgcgggcctgggaaccagctatgaaaaagtccttcgcctttgacaatgtgggttacgaaggaggactggacggcttgggaccctcgtcgcaggtggcaacttctactgttagaatcctcggtatgacctgccagagctgcgtgaagagcatcgaagatcgcatctctaatcttaaaggaatcatctccatgaaagtctctttggaacagggatcagccactgtgaaatacgtgccaagcgtggtgtgtctgcagcaagtgtgccatcaaatcggagatatgggcttcgaggcttccattgcggaaggaaaggctgcctcgtggccaagccgctcactgcctgctcaggaagccgtcgtgaagctgagagtggaaggaatgacctgccaatcctgtgtcagctcgatcgaaggcaaggtgagaaagctgcagggggttgtgcgcgtgaaggtgtccctgtccaaccaggaagccgtgatcacttatcagccgtacttgatccaaccggaggatctgcgggatcacgtgaacgacatgggctttgaagccgcgatcaaaagcaaggttgcaccactctccctggggccaatcgacatagaaaggctgcagtcgaccaacccgaaacgcccgctgagctcggccaatcaaaactttaacaactccgagacgttgggacaccagggatctcacgtcgtgaccctgcaactgcgcatcgacggaatgcactgcaagtcgtgtgtgttgaacatcgaggaaaacatcggccagcttctcggtgttcagagcatccaagtctccctggagaacaaaactgcccaagtgaaatacgacccgtcctgcacctcacctgtggccttgcagagggcgatcgaggcactgccccccggtaatttcaaagtgtcactgccggacggcgccgaaggatccggaactgatcatagatcgagctcctcccactctcccggctcgccgccacggaaccaggtgcagggtacttgctcaactactcttatcgccattgctggaatgacgtgtgcgagctgtgtgcacagcattgagggaatgatctcccaactggaaggtgtgcagcaaatctccgtgtcgctggccgagggcaccgccaccgtcctctacaacccatcagtgatttccccggaggagttgagggcagccatcgaggacatgggattcgaagcctccgtcgtgagcgaatcctgctccactaacccactcggtaaccactctgccggtaattccatggtccaaacgactgacggcaccccgacttcggtgcaagaagtggcgccgcacaccggacggctgccggccaatcacgcaccggacatcctggcgaagtccccacagtcgaccagagcggtcgcaccgcaaaagtgctttctccagatcaagggcatgacctgtgcgagctgcgtctcgaatatcgaacggaatttgcagaaagaagctggcgtgctgagcgtcctggtggcgctgatggcggggaaggcggagatcaagtatgaccctgaggtgatccagccactggagatcgcacaattcatccaggaccttggtttcgaagcggcggtaatggaggattacgctggatcagatgggaacatcgaactgacgatcaccggcatgacttgcgcgagctgcgttcacaacatcgaatcaaagttgaccagaaccaatgggatcacttacgcgtcagtcgcgctggccacttcgaaagccctcgtcaaattcgacccagagattattggacctagggacatcatcaagattatcgaagagatcggtttccatgcttcgctggctcagcggaacccgaacgcgcatcatctggatcacaaaatggaaatcaagcagtggaagaagtcgttcctgtgcagcctggttttcggaatcccggtcatggccttgatgatttacatgctcatcccgtcaaacgagccgcatcagtcaatggtcttggaccacaatatcattccaggtttgtcgatcctcaatctgatcttcttcatcctgtgcactttcgtccaactcttgggagggtggtacttctatgtgcaggcctacaaaagcctgcgacaccgctcagcgaatatggacgtgctcattgtgctcgccacttccatcgcctacgtctactcacttgtcatcctggtcgtggccgtggcggagaaagcagagcgcagccctgtgacttttttcgacactccaccaatgctgttcgtgtttatcgctcttggaaggtggctggaacacttggcaaagagcaagacctccgaggcgctcgcgaagctgatgagcctccaggcgacggaagcgaccgtcgtcacgctgggtgaggacaatctgatcatacgcgaggaacaagtgccgatggaactcgtgcagcggggcgacattgtcaaggtggtgccggggggtaagtttccggtcgacggcaaagtgctcgaaggaaacaccatggccgatgaaagcctcatcactggagaggccatgcctgtcactaagaagccaggatcgactgtcatcgccggcagcatcaatgcacatggatcggtgctcattaaggcgactcatgtgggaaacgacactaccctggcccagattgtgaagctggtggaggaagcccaaatgtccaaggctccgatccagcagctggccgaccgtttctcaggatacttcgtgccattcatcatcatcatgagcacgctcacgctggtggtgtggatcgtcattgggtttattgatttcggcgtcgtgcagagatacttcccaaacccaaataagcacatttcgcagactgaagtgatcatccggttcgctttccagacttccatcactgtcctgtgcatagcatgtccctgctccctcggcctcgcaacgccaaccgcggtgatggtgggcactggcgtggctgcgcaaaacggaatcctgattaaagggggcaagccgctggagatggcgcacaagatcaaaaccgttatgttcgacaaaaccggaactattacccacggcgtcccgagagttatgagagtgctgctgcttggagacgtggctaccctcccgctcagaaaggtcctggcagttgtgggcaccgctgaggcgtcctcagaacaccccctgggagtcgcggtcactaagtactgtaaggaagagctcggaaccgaaacgcttggctactgcacggacttccaggcagtgccgggatgcggtatcggttgcaaggtgtcaaacgtcgaaggcatcctcgctcattccgaaagaccgctgagcgcaccggcgtcacatctcaatgaagcggggtcgctccctgccgaaaaagacgcggtgccacagacgttctccgtcctcatcggcaaccgcgagtggctgagacggaacggcctgactatctcatccgacgtgtcagatgccatgacggaccacgagatgaagggacagactgcgattctggtggccatcgacggagtcctctgcggaatgatcgccatcgcggacgcagtgaaacaagaggcggctctcgctgtccatactctgcagagcatgggagtcgatgtggtcctcattactggggacaaccgaaaaactgcgcgggctatcgctacccaggtgggcatcaacaaggtctttgccgaggttctgcctagccacaaagtggcgaaagttcaggagctgcagaataaaggcaagaaggtggccatggtgggagatggagtgaacgatagccctgcgctcgcacaagccgatatgggagtggctatcggaaccggaaccgacgtcgcgatcgaggctgcagatgtcgtgctcatccgcaatgacctgctggatgtggtcgcttcaatccatttgtccaagcggacggtgcgccggattcgaatcaacctggtgctggctcttatctacaaccttgtgggaatcccaatagctgccggtgtctttatgcctattggaatcgttctgcagccatggatgggctcggccgcaatggccgcctccagcgtgtcggtggtcttgtcgtctctgcagcttaaatgctacaagaaaccggaccttgaaagatacgaggcccaggcgcatgggcacatgaaaccccttaccgcgtcgcaggtttccgtccacattgggatggacgatagatggagagatagcccacgggcaactccgtgggatcaggtcagctacgtgagccaggtgagcctgtcctctctgactagcgacaagccctcgcgccattccgccgctgccgacgatgatggagacaagtggtcccttctcctgaatggtcgggacgaagagcaatacatc

SEQ ID NO: 7412 - DNA, 4395 bp, synthetic construct
  misc_feature 1..4395: note = source = /note="Description of Artificial Sequence: Synthetic coding sequence"
  source 1..4395: mol_type = other DNA
atgcctgaacaggaaaggcagataactgccagggaaggagcatctcgcaaaatcctatctaaactgagtttacctacacgagcatgggaacccgccatgaagaaatcattcgccttcgataacgtcggatatgaaggagggctcgacgggctgggaccttccagtcaggttgccacttccactgtccggatccttgggatgacatgccagtcctgtgtgaaatctatagaagatagaatctctaacttaaaaggaatcatctctatgaaggtgtctttggaacaggggtccgctacagtcaagtacgtgccttccgtggtgtgcctacagcaggtgtgccatcagataggagacatgggattcgaggcaagtatagccgaggggaaagcggcgtcttggccatcgaggagtctccccgcccaggaagcggtggtaaagctgcgggtggaggggatgacttgccaatcttgcgtttcatctatagaaggaaaggtaagaaaattacagggggtggttagagtgaaagtttccctctcaaaccaggaagctgtgatcacttatcagccttacttaatacagcccgaagatctgagggatcacgtaaacgatatggggtttgaagcggcaattaaatctaaagtggcccccttatctctaggacctatcgatatcgaacgcctgcagtctacaaatcctaaaagacccctttctagtgctaaccagaacttcaacaattcagaaacactcgggcatcaggggagtcatgtggtgacactgcaactacggatcgatggaatgcactgcaagagttgtgttctaaacatcgaagagaacatagggcagcttcttggagttcagtctatacaggtgagtctggaaaacaaaactgcccaggttaaatacgatcccagttgtacttctccagtagctctacagcgggcaatcgaagccctcccgcccgggaatttcaaagtgagtctcccagatggggccgaaggatccggaactgatcataggtcaagttcctctcactctcctggaagtcctcctcggaatcaggtccagggaacatgttctactacactaatagccatcgctggaatgacatgtgcatcttgtgtgcactcaattgaagggatgatctcgcagctcgaaggagtacagcagatctctgtgtcgctcgccgaagggacagccactgtgctctacaacccgtccgtgatcagtcctgaagaacttcgagccgcaatagaggacatgggattcgaggcctccgttgtctctgaatcctgctccactaaccccctaggaaaccactctgccggaaattccatggtgcaaactacagacggaacacctacttccgtacaagaagtggccccacacacaggacggttaccagcaaaccacgctcccgatatcttggcaaaatcccctcagtcgacacgtgcagtagcaccacagaaatgctttcttcagatcaaaggaatgacatgcgcttcatgtgtgtccaacatagaacgaaacctccagaaggaagcgggagttttgtctgtgctcgtagccttaatggctggaaaagccgaaataaaatatgatcctgaagtcatccagcctctcgagatagcccagttcatacaggatctcggattcgaagcagccgtaatggaagactacgcgggatccgatggaaacatcgaactcactatcacaggaatgacatgcgcctcctgcgtgcacaacatagaatctaaacttacacggacaaatggaatcacatacgcttccgtggccttagccacaagtaaagctttggtgaagtttgacccagagattatcggacctcgcgatattataaaaataatagaagagatcgggtttcatgcaagtcttgcccagaggaatccaaatgcccaccatctggaccataaaatggaaatcaagcagtggaaaaaatctttcctctgttccttagtgttcggaattcccgttatggctctcatgatttacatgctcataccgtctaatgaaccacatcagagtatggtcctcgaccataatataatacccggattatccatcctcaacctcatattttttatcctgtgtactttcgtgcagcttctcggagggtggtacttttatgtgcaggcatataaatcccttagacaccggtcagcgaacatggacgtcctaattgtgctcgcaacatctatcgcatacgtctattcactcgtgatcttggtggtcgcagtggcagaaaaggcggaaagatcacctgtgacttttttcgatactccacccatgctctttgtgtttattgctctggggaggtggctcgaacatctcgccaaatcaaaaacatctgaagccttagcaaaattgatgtctttacaggccactgaggcaacagtggtaacactgggagaagataaccttataatcagagaagaacaggtaccaatggaactagtccagcgaggagatattgtgaaagtcgtccctggaggaaagtttcctgttgatgggaaagtactggaagggaatactatggcagatgaatcactgatcacaggggaagccatgcctgtaacaaaaaaacctggatctactgtaatcgctgggtccataaatgctcatggaagtgtgctgataaaggccacacacgtaggaaatgacacgactttagcgcagatagtcaagctagttgaagaggcacagatgtcaaaagcaccaatacagcagctggcagatagattttccgggtatttcgtgccctttataatcataatgtctacattgactttagtcgtttggatagtgatcggatttatcgattttggagtggtgcagagatacttccccaatcccaataaacatatttctcagactgaggttataattcgattcgcttttcagactagtatcactgttctctgcattgcctgtccatgctccctcggactcgctactcccacagccgttatggtcgggactggggtagccgcacagaacggaattcttatcaaagggggaaaaccccttgaaatggctcataaaataaaaacagtgatgttcgataaaactgggacgatcacacacggagttcccagagtgatgagagtcctcctactcggagatgtcgctactctccctttgagaaaagtcctcgccgtggtcgggacagccgaagcctcttccgaacaccctctcggggtcgccgtcactaaatattgcaaagaagaactcggaactgaaactctcggatattgcactgatttccaggcagtgcccgggtgcgggataggatgtaaagtatctaatgtagaagggattcttgctcactcagaacggccactttccgctcccgcatcccatctcaatgaagccgggagtctccctgccgaaaaagatgctgtgccccagacttttagtgttctcatagggaacagggaatggctccggaggaatgggctgactataagttccgatgttagtgatgctatgacagatcacgaaatgaaaggacagacagctatcctggtagccattgatggagtgttatgcggaatgattgccatagctgatgctgtaaaacaggaggctgccctcgctgttcacacactacagagtatgggagtcgatgtggtacttataactggagataatcggaaaactgcacgggctatcgctacacaggtcgggattaacaaagtgtttgcagaagtgctgccatcacacaaagtcgccaaggtacaggaacttcagaataagggaaaaaaagtggccatggtcggggatggggtaaatgatagtccagctctcgcacaggccgatatgggggtggctattggaacaggaactgatgtcgccatagaagccgctgatgtggtgctcatccggaacgacttactagatgtcgtcgcctctatacaccttagtaaacgaactgtcagaagaatccggattaatctggtgttagccctgatctacaatctggtaggaatacccatcgcagccggggtctttatgcccatagggatagttctgcagccctggatggggtcagccgccatggctgcaagttctgtttccgttgtgctgtcctcactgcagcttaaatgttataagaagccagacctcgaaaggtatgaagcacaggcgcacgggcacatgaagcccctaactgccagtcaggtttccgtccacatcgggatggacgaccgctggcgagattctccccgagcaacaccatgggatcaggtgagttatgtctcacaagtgtcattaagttctctgacatcagataaaccatcccggcactctgctgccgctgatgacgatggggataagtggagtttactgctaaatgggcgcgatgaagaacagtatatc

SEQ ID NO: 7413 - DNA, 4395 bp, synthetic construct
  misc_feature 1..4395: note = source = /note="Description of Artificial Sequence: Synthetic coding sequence"
  source 1..4395: mol_type = other DNA
atgcctgagcaggagaggcagattaccgcacgcgaaggggcatccaggaagatcctcagcaaactttctctccccacccgtgcttgggagccggctatgaagaagagcttcgcctttgataacgtagggtacgagggaggactggacggactaggaccaagctctcaggtggccactagcacggtacgcatcctgggcatgacatgtcagtcatgcgttaaatcgatcgaggatcgcatctccaacttgaaagggattatctccatgaaggtatccttggaacaaggttctgcaacagttaagtatgttccttccgtcgtgtgcctacaacaagtttgtcatcagataggagatatgggttttgaagcctctatcgccgaaggcaaggcggcgagctggccctctcggagtctgcctgcacaggaggccgtggtgaagctgcgggtcgaaggcatgacgtgccaatcttgtgtgagtagtatcgaaggtaaagtgaggaaactgcagggtgtggttcgcgtgaaggtttcactttccaatcaggaggcagtgatcacctaccagccttacctgatccaaccggaagatctccgggatcacgttaacgacatgggcttcgaagccgcaatcaagtcaaaagtcgcccccctgtctttaggacccattgacattgagcgtctgcagagtacgaacccgaagcggcccctgtcgtccgctaatcagaattttaataattccgaaacactgggccatcagggcagccatgttgtgacacttcaacttcgaattgacgggatgcattgtaagtcatgcgtgctcaatatagaggagaatatcggtcagctcctgggcgtgcaaagcatccaagtctcactggaaaataagaccgcccaggtgaagtacgatccaagttgtacctcccctgttgcccttcaaagagccatcgaagccctgccacccggtaattttaaggtgagcctacccgatggggccgaggggtctgggacagaccacaggtcctctagctctcattcgcccggttcccccccccgaaatcaggtgcagggaacctgctccactacactgattgctattgctggcatgacttgtgcctcctgcgtccactctatcgaggggatgataagtcagttagagggggtgcagcaaatatcagtgtccctggctgagggaaccgcaacggtgctgtacaacccctccgtaatctcccctgaagagctacgggccgcaatcgaagacatggggtttgaagcctccgtggtttcagaatcctgttccaccaacccgcttggaaaccacagtgctggcaacagtatggtacagacaacagacggcacccccacttcagtgcaggaagtggccccccacactggccgactacccgcaaatcacgctccagacatcctggccaaaagcccccagtctacacgggctgtcgctccgcagaaatgtttcctccaaattaagggtatgacctgcgcctcatgcgtgagtaacatagaacggaatcttcagaaggaggccggagttctgagtgttctggttgccctcatggccggaaaggcagaaatcaagtatgaccctgaagtgatacaaccactcgaaattgcgcagttcattcaggatctgggctttgaagccgccgtgatggaggactacgccggctcagacggcaacatcgaactcaccatcacaggaatgacctgtgcgtcttgcgtgcacaacatcgaatctaaactcactaggactaatggcataacttacgcctccgtggctctggcaaccagtaaggctctcgtaaagtttgaccccgaaatcattgggcctagggatatcattaagatcattgaagagatcggctttcatgctagtttggctcagcgcaatccgaacgcacaccacctcgaccataagatggagatcaagcaatggaagaaatcattcctatgtagtttagtgttcgggattcccgtgatggctctcatgatatatatgctgattccttccaatgagcctcaccagtctatggtcctggaccacaatattattccagggctgtctatattaaacctgatttttttcatcttatgcacttttgtacagctgcttggcggctggtatttttacgtacaggcctacaaaagtctgagacatagatccgctaacatggatgttctgatagtgctggctacttccatcgcttacgtgtattcactggtgatactcgttgtcgccgttgcagagaaagccgaacgatctcccgtgacctttttcgacacccctcctatgctatttgtgtttatcgcccttgggcgctggctggagcaccttgccaagtctaagacgtcagaagccctcgccaagttgatgtccctccaggctacagaagcaactgtcgtgacactaggggaggacaacttgattataagagaagagcaggtaccaatggaactggtccagaggggcgacatcgtaaaggtggtacccgggggcaaattccctgttgatgggaaggtgcttgaaggcaataccatggccgatgagtctttaatcactggggaggcaatgccggttacgaaaaaaccggggtctacggtcatcgctggctcgatcaacgcccacggctccgtgctgattaaggccacccacgtcgggaacgacaccaccctggcccaaatcgtcaaactggtcgaggaggctcagatgtcaaaagcccctatccagcagttggccgacagattcagtggatacttcgttcccttcataattatcatgagcaccctgactttagtcgtctggatagtcatcgggttcattgacttcggtgtggtccagaggtatttccctaaccccaataaacacatatcccagacggaagtaatcatccgttttgcttttcagacgtccattacggtcctctgcattgcctgtccctgctctctgggcttggctacccctactgccgtcatggtaggcactggagtggcagcgcagaacggcatcctgatcaagggggggaagcccctggaaatggctcacaagattaagactgtgatgtttgacaaaacggggactatcactcatggcgtgccgcgcgtgatgcgtgtgctgctccttggtgatgtcgccactctgcctttgcgaaaggtccttgccgtagttggaactgcggaagcttcaagtgaacacccacttggcgtcgctgtgaccaaatactgcaaagaggagcttggcactgagacactcggctactgtacagactttcaagccgtaccaggttgcggaatcggttgtaaggtttcgaatgtggaaggaatactcgcccactctgagaggccattaagcgccccagcctctcacctgaacgaagccggaagtctacccgccgagaaggatgcagtgcctcagaccttttccgtgctaatcgggaaccgggagtggctgcgcaggaatggcttgacaatctcctccgacgtcagcgatgcaatgacagaccacgaaatgaaagggcaaaccgccattcttgtagcgatagatggagtgttgtgtggtatgattgcaattgcagacgctgtgaagcaggaagcggctctagcggtgcacactctgcagtcaatgggtgtcgatgtggtattaattaccggtgacaataggaaaactgcacgggctattgccacacaggttggcataaacaaggtttttgctgaggttctccctagccacaaagttgccaaggtacaggaactccagaacaaaggaaagaaggttgccatggtaggagatggggtaaatgacagtcctgctctggctcaagcggatatgggagtggcaatcgggacaggtacggatgtcgcaatcgaagcggctgacgtggtcttgattcgtaacgacctgctggacgttgtggcctcaattcacctgtcaaagagaactgtgcgtagaattcgcataaatctggtactggctctaatctataacctggttggtatccccattgccgcaggggttttcatgcctattggaattgtgctccagccctggatgggctccgctgctatggctgccagctcagtgtccgttgtgctgtcttctctgcaactgaagtgctacaagaaaccggatctggagaggtacgaggcacaggcgcacggccacatgaagcctctcaccgcttcccaggtaagcgtgcatattggcatggatgatagatggcgcgacagccccagagcaaccccatgggaccaggttagctacgtgtctcaggtttctctcagctctctcactagcgacaaaccatcccggcacagcgccgcagccgatgatgatggcgataagtggagcctgctgctgaatggccgggatgaggaacagtacatc

SEQ ID NO: 7414 - DNA, 4395 bp, synthetic construct
  misc_feature 1..4395: note = source = /note="Description of Artificial Sequence: Synthetic coding sequence"
  source 1..4395: mol_type = other DNA
atgcctgaacaggagaggcagatcactgctcgcgagggagccagcagaaagatcctttcgaagctgtcactcccaacccgcgcctgggaaccggccatgaagaagtcattcgcatttgacaacgtgggatacgagggtggcctggacggcctcggaccgtcgagtcaggtcgccaccagtaccgtgcgcattctgggtatgacctgtcagtcatgcgtgaagtcgattgaagatcggatcagcaacctgaagggtatcatttccatgaaggtcagtctcgaacagggatcagccaccgtcaagtacgtgccatcggtggtgtgccttcagcaagtgtgccaccaaattggcgacatggggttcgaggctagcatcgctgagggtaaggcggcgagctggccatcgcgctcgctgccagcccaagaggcagtggtgaaactgagagtagagggcatgacttgccaatcctgtgtgagctcgatcgagggaaaggtccggaagctgcaaggtgtcgtccgagtaaaggtgtcactgtccaaccaggaagctgtgatcacttaccagccgtatctgatccaaccggaggacctgcgcgaccatgtcaatgatatgggattcgaagctgcaatcaagtccaaagtggccccactgtctctgggaccgatcgacatcgagcgcctccagtcaactaatccgaaaaggcccctctcctcagcgaaccagaatttcaataactccgagactctgggccaccagggctcacacgtcgtgactcttcagcttcgcatcgacggcatgcattgtaagtcctgcgtcttgaacatcgaggaaaacatcggacaattgctgggagtgcaatcgatccaggtgtccctggagaacaagactgcgcaagtcaagtatgatccatcctgcacctcaccggtcgctctccaacgggcgatcgaagcactgcctccaggcaactttaaggtgtccctgccggacggagccgaaggcagcggaactgaccaccggagcagctcatcgcactccccggggtcgcccccgcggaatcaggtgcaaggaacctgtagtactacgctgatcgcaatcgctggaatgacctgtgctagctgcgtccacagcatcgaaggcatgatttctcaacttgagggggtgcagcagatctcagtgtccttggccgaaggtaccgccacggtgctgtataacccttcagtgatctccccagaagagcttagagccgccatcgaagatatgggatttgaagcctcggtggtgtcggagtcctgttcgacgaatccactcggcaaccactccgcgggaaattccatggtccagaccactgatggcactccgacgtcagtccaggaagttgcccctcataccggacggctgccggctaatcatgctccagacatcctcgccaagagcccgcaatcgactcgcgcggtcgccccccaaaaatgtttccttcagatcaaaggcatgacgtgcgctagctgcgtgtcgaatattgaacggaatctgcagaaggaagcaggggtgctctcggtgctcgtggcactcatggccggaaaagctgaaatcaaatacgatccagaagtaatccaacctctcgaaatagcgcagttcatccaagatctcggcttcgaagcggcagtgatggaggactacgcgggaagcgatgggaacattgagctgaccatcacgggaatgacgtgtgcgtcgtgtgtgcacaacatcgaaagtaagctgacgcggaccaatggcatcacctacgcctcggtcgctctggctacctccaaggcgcttgtgaaatttgatcccgagattatcgggccgagagacatcatcaaaatcatcgaggaaatcggattccacgcatcattggcccagagaaacccaaatgcacaccacctggatcataagatggaaatcaagcaatggaaaaagagctttctttgttccctcgtgttcggaatcccggtgatggcgcttatgatctacatgctgatcccgtcgaacgagccgcaccagtccatggtcctcgaccataacatcatcccaggactgtcgatcctgaacctcatcttcttcatcctgtgcaccttcgtgcagttgctcggcgggtggtacttctacgtgcaggcctacaagagccttcgccacagatcagcgaacatggacgtgctgattgtcttggcgacttccatagcgtacgtctactccctggtgatcctggtggtcgctgtggcggagaaagcggagagatcaccggtgacttttttcgacactcctccaatgctgtttgtgttcatcgccctgggccgctggcttgagcacttggccaagagcaaaacgtccgaggcgctcgcgaagctgatgtcactgcaggcgaccgaagccaccgtggttactcttggggaagataacctgattatccgcgaggagcaggtgccaatggaactcgtgcagcgtggcgacatagtgaaggttgtgccgggaggaaagttcccggtggatggtaaggtgctggagggcaataccatggctgacgaatccctgatcaccggagaagcgatgccagtcactaagaagcccgggtcgaccgtgatcgccggttcgatcaacgctcatggctcggtgctgatcaaggctacccatgtcgggaacgatacgactctcgcgcagatcgtcaagttggtggaagaagcgcagatgtccaaagctccgatccaacagctggctgatcgattctccggttactttgtccctttcatcatcatcatgtcaacccttaccctggtggtttggatcgttattggattcatcgatttcggagtggttcagagatactttccgaacccaaataagcacatcagccagactgaggtcatcatccgcttcgccttccaaacttcaatcacggtgctctgcatcgcatgcccatgctctcttggactggcgaccccgactgcagtcatggtggggactggagtcgccgcccaaaacggaattctcatcaagggaggaaagccgttggaaatggcccacaagatcaaaaccgtgatgtttgacaaaactggcacgatcacgcacggtgtgccgcgcgtgatgagagtcctgctgctgggagatgtggccacgttgcctctccggaaagtcctcgcagtggtcggcaccgcggaggcctcgtcagaacacccgctgggagttgcagtgactaagtactgtaaggaagagctgggcaccgaaactctgggctactgtactgattttcaggcggtgccaggatgcggcatcgggtgtaaggtttcgaatgtcgaaggcattctcgcccatagcgaaagaccgctgtcggccccggcttcgcatctgaacgaagcgggaagcctcccagccgaaaaggacgccgttccgcagacgttctccgtgctgatcggaaatcgggagtggctgcggcggaacggactgaccattagcagcgacgtctcggacgcaatgactgaccacgaaatgaaaggccagaccgcaatcctcgtggcgattgacggggtgctctgcgggatgatcgcgatcgcagatgctgtcaagcaagaggcggccctggccgtgcatactctccagtcaatgggtgtcgacgtggtgcttattaccggtgacaaccgcaaaacggcgcgcgctatcgctacccaagtgggtatcaataaagtgttcgcagaggtcctgccctcgcacaaggtcgcgaaggtgcaagaactgcagaacaaaggaaagaaggtggcgatggtcggagatggagtcaacgattcacctgcattggcacaggcagacatgggtgtggccatcggaactggaaccgatgtcgcgattgaagcagccgacgtcgtgctcatccgcaatgacctgctggacgtggtcgcctcgatccatctctctaaacgcactgtgagaagaattcgcatcaacctggtgctggcgctgatctacaacctggtgggcatcccgatcgctgctggagtgttcatgccaattggaatcgtgttgcagccttggatgggatcggccgcaatggcagcatcttcagtgtccgtggtactttccagcttgcagctcaagtgctacaagaagccagacttggagcgctacgaagcccaggctcacggacacatgaagccgttgaccgcctcacaggttagcgtgcatatcgggatggacgacaggtggcgcgactcgccacgggcaacgccgtgggatcaagtctcctacgtgagccaagtgagcctgtcatcactcacctcggataaaccatcccgccactccgcagccgctgatgacgacggagacaagtggtccctcctgttgaatggccgggacgaggagcaatacatc

SEQ ID NO: 7415 - DNA, 4395 bp, synthetic construct
  misc_feature 1..4395: note = source = /note="Description of Artificial Sequence: Synthetic coding sequence"
  source 1..4395: mol_type = other DNA
atgcctgaacaagaaaggcaaatcaccgctagagaaggtgcctcgcgcaagatcctgagcaagctctccctgccgacgcgcgcctgggaaccggcaatgaaaaagagcttcgccttcgataacgtgggatacgagggaggattggatggactcggtccgtcatcccaggtcgctacttcaactgtcagaatcctcgggatgacgtgtcaaagctgtgtgaagagcattgaggacaggatctccaacctgaaagggatcatctcgatgaaggtgtcgctggagcaaggctcggccactgtgaaatacgtgccgtcggtcgtgtgcctgcagcaagtatgccaccagatcggagacatgggctttgaagcgtcgatcgcagaaggaaaggccgcttcctggccatcccggtcgctccctgcacaggaggccgtggtcaaattgcgcgtggaaggcatgacctgtcagtcgtgcgttagctccatcgaagggaaggtgcgcaaactccagggtgtggtgcgcgtcaaggtgtccctgtcaaatcaggaagcagtgatcacgtaccaaccttacttgattcaacctgaggacctcagggatcacgtgaacgacatgggatttgaggcggcgataaagtccaaggtggcgccactgtctctgggaccgatcgacatcgaacgcctccagagcactaatccgaaacgcccgctgtcatccgcgaaccagaatttcaacaactccgaaaccctgggtcaccaaggctcccatgtcgtcaccctgcagctgcgaattgacgggatgcattgcaaatcatgtgtgctgaatatcgaggaaaacatcggtcagcttctcggcgttcaatccatccaggtcagccttgagaataagaccgcccaggtgaagtatgatccttcctgtacttccccagtggccttgcaaagagccattgaagctctgccacctgggaactttaaggtgagcctgccggacggcgctgagggttctggaacggaccacaggtctagctcctcacatagccccggttcacccccgcggaaccaggtgcaaggaacctgctcgactaccttgatcgcgatcgcgggaatgacctgcgcgagctgcgtgcattcaatcgaaggaatgatcagccagctcgaaggagtgcagcaaatcagcgtgtccctggcggaaggtaccgccactgtcctctacaacccgtcggtgatctccccggaagagctgagagcagcaatcgaggacatggggtttgaggcatcggtcgtgagcgaatcctgcagcactaatcccctgggtaatcacagcgcgggaaacagtatggtgcagaccaccgacggcactccgacttccgtccaggaggtggctcctcacactggtcgccttcccgcaaatcacgccccagacatcctggcgaagtcgccgcaaagcaccagagcggtcgcgcctcaaaagtgcttccttcaaatcaagggaatgacgtgtgcctcgtgtgtgtcgaacattgagcgcaatctccagaaggaggccggagtgctcagcgtgctggtggccctgatggcgggaaaggctgagatcaaatacgatcccgaggtgatccagcccctggagatcgcccaattcatccaggatctgggtttcgaagccgctgtcatggaagattacgctgggtcggacggcaacatcgagctcacgatcactggcatgacgtgtgcgtcatgcgtccacaacatcgaatccaaactgactcgcactaatgggatcacctacgcatccgtggccctggccacctccaaggccctggtgaagttcgacccggaaatcatcgggccgcgggacatcatcaagatcattgaggaaattggctttcacgcttcgctcgctcagagaaacccaaatgcacatcatctggatcataagatggagatcaaacaatggaagaaatcgttcctctgtagcctggtgttcgggatcccagtcatggccctgatgatctacatgcttatcccgtccaatgaaccgcaccagtcaatggtgctggaccataacatcatcccaggactctcgatcctcaatctcatcttcttcatcctgtgtacgttcgtccagctgctcggcggctggtacttttacgtccaggcgtacaaaagcctccgccatcgcagcgccaacatggatgtgctgatcgtgctggccacttccatcgcctacgtgtacagcctggtgattttggtggtggcggtggcggagaaggccgagcgctctccagtgaccttttttgatactcctccaatgctcttcgtctttattgccctcggaagatggctcgagcatctggcaaagtccaaaacttcggaggcactcgccaaactcatgtccctgcaggcaaccgaggccactgtcgtcacgctgggagaggacaacttgataatcagagaagagcaggtcccgatggaactcgtccagaggggtgacatcgtcaaagtggtgccgggaggcaagttcccggtggatgggaaggtgcttgagggcaatactatggctgatgaatcactgatcaccggagaagcgatgccggtcaccaagaaacctggttcaactgtgatcgcaggtagcattaatgcccacggttccgtcctgatcaaagccacccatgtgggtaacgacactacgctggctcagatcgtcaagctcgtggaggaggcacagatgtcaaaggcgccaatccagcaactggccgataggttctcgggctacttcgtgccgttcatcatcatcatgtcgaccctgactcttgtggtgtggattgtgatcggcttcattgactttggagtggtccaaagatactttccgaaccccaacaagcacatctctcagactgaagtcattattcgcttcgccttccaaacttcaattacggtcctgtgcatcgcctgcccatgttcgctgggattggcgacgccaaccgcagtgatggtgggaaccggagtggccgctcagaatgggattctgatcaagggaggtaagccgctggaaatggcccacaaaatcaagactgtgatgttcgacaagactggaaccatcactcacggcgtgccccgcgtgatgcgggtgctgctgctgggagacgtggccactctgccgctgaggaaagtgttggcggtagtggggactgccgaagcatcgagcgaacacccgctcggggtggcagtgactaagtactgtaaggaagaactgggtactgaaaccctgggctactgcactgattttcaagcggtgccaggctgcggaatcggctgcaaagtctctaacgtggaaggaatcttggcccactccgaaagacctctgtccgccccagcaagccacctgaatgaggcggggtcgctgccagcggagaaagacgcagtcccccaaaccttttcggtgctgatcggaaaccgggagtggctgcgcaggaatggactgactatcagcagcgacgtgtcggatgccatgactgaccatgaaatgaagggccagacggcaatacttgttgccatcgacggggtgctctgcggcatgattgccatcgcggacgccgtcaaacaagaagctgcgctggcggtgcacactctgcagtccatgggagtggatgtcgtcctcatcaccggagacaaccgcaagaccgctagagcaatcgccactcaggtcggcatcaacaaggttttcgccgaagtgctcccgtcccataaggtcgcaaaggtccaggaactgcagaacaaggggaagaaggtggcgatggtgggggacggagtgaacgactcaccggcccttgcacaggccgacatgggagtggcaattggaaccggaaccgatgtcgctattgaggcggccgatgtggtcttgatccgcaacgacctgttggatgtggttgcctcgatccatctgtccaaacggactgtccgcaggattagaatcaacctcgtgctcgccctgatctacaacctcgtcggtatcccgatcgcagcgggcgtgttcatgcctattggaatcgtgttgcagccgtggatgggatcagctgccatggccgccagcagtgtatccgtggtgctgtcaagcctgcagctcaagtgttacaagaagccggacctcgagcgctacgaggcccaggcgcacggacatatgaagccgttgactgcctcccaagtgagcgtgcatatcggcatggacgatcgctggcgggactcgccgcgggcgaccccgtgggaccaggtgtcctacgtgtcacaggtgtcgctgtcctccctgacctcagataagccatcgcgccatagcgccgctgccgacgatgacggtgacaaatggtcgctgctgctgaacggacgcgacgaggagcaatacatc

SEQ ID NO: 7416 - DNA, 4395 bp, synthetic construct
  misc_feature 1..4395: note = source = /note="Description of Artificial Sequence: Synthetic coding sequence"
  source 1..4395: mol_type = other DNA
atgccagaacaagagcgccagatcactgcacgtgagggagcgtcgaggaagatcctgtcgaagctgagccttcccacccgagcctgggaaccggccatgaagaagtcgtttgcatttgataacgtgggatatgaaggagggcttgacggacttggacctagctcgcaagtggcgacttccactgtccgcatccttggaatgacctgtcagtcgtgtgtgaagtccatcgaagataggatttccaatttgaaaggtattatcagcatgaaagtgtcactggagcagggctcggcaaccgtgaagtacgtgccttccgtggtgtgcctgcaacaggtgtgtcatcagataggtgatatgggatttgaggcctcgattgcagagggtaaggcagcatcgtggccaagtcggtcgctgccagcacaggaagcagtcgtgaagctgcgcgtggaaggcatgacgtgtcaatcctgtgtgagctcgattgaaggcaaggtccgcaaacttcaaggtgttgtgcgagtgaaagtgtcccttagcaatcaagaagcggtcattacctaccaaccatacctgattcagccagaagatcttagagatcatgtgaatgacatggggttcgaagcggcgatcaagtcgaaagtggcacctctgtcgctgggacctattgatattgaacggcttcaaagcactaaccctaagcgtcctctttcatcagcaaatcagaacttcaataactccgaaaccttgggccatcaaggatctcatgtcgtcaccctccaacttagaatcgatggaatgcactgtaaatcctgcgtccttaacatagaggaaaacattgggcaactcctgggcgtgcaatcgatccaggtgtcgctggaaaacaagaccgcacaggttaagtacgacccatcctgcactagccctgtcgcccttcagagggcaattgaagctcttccgccaggaaactttaaggtgtcgctgcccgatggtgctgaggggtccggaacggaccataggtcctccagctcacatagccccggctcgcctcccagaaaccaagtgcaagggacttgctccaccactcttattgccattgccggtatgacttgtgcaagctgtgtgcactctatcgaaggtatgatttcccaactggaaggtgtgcagcaaatctccgtcagcctggcggagggcaccgccactgtgctgtacaatccgtccgtgatttcgcctgaagaactcagagcagcaattgaggacatgggctttgaggcatcagtggttagtgaatcatgttcgaccaacccgcttggaaaccattcggctggaaactctatggtgcaaactactgatggaaccccaacttccgtccaggaggtcgcaccgcataccggaagattgcccgcaaaccatgcacctgacatcctggcaaagtcaccgcaatcaactagagccgtcgcccctcagaagtgttttctccagattaaaggcatgacctgtgcttcatgcgtctcgaacatcgaaagaaatctccaaaaagaagcaggtgtgttgagcgtcctggtcgccttgatggcaggcaaggcagagataaagtacgaccctgaagtgattcaacctcttgaaatcgcacaattcattcaggatcttggttttgaggcagcagtcatggaggactacgccggtagcgatggaaacatcgagctcaccataaccggtatgacctgcgcttcgtgcgttcacaacatcgaatcaaaactgacccggaccaacgggatcacttacgcatcagtggcactggcgacttcaaaagccctggtcaagtttgatcctgagatcatcggtcctagagatatcattaagatcatcgaagaaattggatttcatgcatcgctggcacaacggaatcctaacgcacaccatctcgaccacaaaatggagattaagcagtggaagaaatctttcctgtgttccctcgtgtttgggatcccggtgatggccctgatgatctacatgctgatccctagcaatgaaccccatcagtcaatggtcctcgaccacaatatcatccctggactgtcgatactcaatctcattttctttatcctctgtacctttgtccagctgttgggagggtggtacttctacgtgcaggcatacaaatccctcagacatcggagcgccaacatggacgtgcttatcgtgctcgcaacctccattgcatacgtctattcgcttgtgattcttgtcgtggcagtggcggagaaggcagaacgttcgccagtgaccttcttcgacactcctcccatgcttttcgtgttcatcgccctcggtcggtggcttgaacatctcgcaaagagcaaaaccagcgaagccctcgccaaactgatgtcccttcaagcgacggaggccacggtggtgactcttggcgaagataatctgattatccgcgaagaacaagtccccatggagttggtgcaacgaggtgatattgtgaaggtcgtccctggtgggaagtttccagtggatggcaaagtcttggaaggtaatacgatggcagatgagtccctgattactggtgaagcaatgcccgtgactaagaagcctggttcgaccgtcatcgcaggttccatcaacgcacacggcagcgtgcttatcaaagccacccatgtgggtaacgataccacccttgcccaaattgtgaagctcgtcgaagaggcacagatgtcaaaagccccaatccaacagctggcagataggttctcgggatactttgtgcccttcattatcatcatgtcaactctgactttggtggtgtggattgtcattggctttattgatttcggagtggtgcagagatactttccaaacccgaataaacatatctcacagactgaagtgattattcgatttgcattccaaaccagcattaccgtgctctgtattgcgtgtccttgttccctgggcctggccacccctactgcagttatggtgggaactggcgtggccgcccaaaacggaattctgattaagggtggtaaaccactggaaatggcgcataagataaagactgtgatgtttgataagactggcactatcactcacggggtgccacgcgtgatgagagtgcttcttctgggtgatgtcgcaacgctgcccctgcgtaaggtgctcgccgtggtgggaacggcagaggcctcctcagaacacccactgggcgtggccgtcactaaatactgcaaggaagaacttgggactgaaaccctcggatattgtactgactttcaagccgtaccagggtgcggaattggatgtaaggtgtcaaacgtggagggaatccttgcacattccgagaggcccctgtccgcccctgcatcacatctgaatgaagcgggctctttgcccgcagaaaaagacgcagtgccgcagacctttagcgtcctcattggtaatcgtgaatggctgcgacgcaacggtcttacgatttccagcgacgtgtctgacgcaatgaccgaccatgaaatgaagggacaaaccgctatcctcgtcgccatcgacggtgtgctgtgtgggatgatcgctatagcggacgcagtgaaacaagaggcagcacttgccgtccatactctgcaatctatgggggtggatgtggtgttgatcactggggataaccgtaagaccgccagggcaattgctacccaggtgggtattaacaaggtctttgcagaagtgctgccatcccataaggtcgcaaaggtgcaggaactgcaaaacaaaggaaagaaagtcgcaatggtgggggatggggtgaacgatagcccagccctcgcccaggccgatatgggagtggcaataggaactgggactgacgtggccatcgaagcagcagacgtggtgctgattcgcaacgacttgctggatgtggtggcttcgatccatctctcgaaacgtaccgtcaggaggatccgcatcaacctcgtcttggcactcatctacaacctcgtcggtattccgattgctgcgggtgtctttatgcctattggaatagtcctgcagccgtggatgggaagcgcagctatggctgcaagctcggtgagcgtggtgctctcctccctccaactcaagtgttataagaagcctgatctcgaaagatacgaagcccaagcacatggtcatatgaagcctcttactgcatcccaggtgtcagtgcacattggaatggatgatcgctggagagacagccctcgggcgaccccatgggatcaagtctcatacgtgtcgcaagtctccctcagctcccttacctccgacaagccgtctcgtcattccgcagcagcagacgatgatggggataagtggagccttcttttgaacggtcgggacgaagagcaatacatt

SEQ ID NO: 7417 - DNA, 4395 bp, synthetic construct
  misc_feature 1..4395: note = source = /note="Description of Artificial Sequence: Synthetic coding sequence"
  source 1..4395: mol_type = other DNA
atgccagagcaggagcggcagatcacagcacgtgagggcgctagtagaaagatcctgagtaaattgtctttaccaaccagggcttgggagcccgccatgaaaaaaagctttgcgtttgataacgttggttacgaaggagggcttgacgggctggggccgtcaagtcaggtggccacctctactgttcgcatcctcggcatgacttgccaatcctgtgtcaaaagcatcgaggatcgcatttccaaccttaagggaatcatctcaatgaaggtttctctggagcagggatcagccaccgttaagtacgtgccgtccgttgtgtgcctgcagcaagtctgccaccagattggcgatatggggtttgaggccagtatcgccgaaggcaaggccgccagctggccatcccggagcttaccagctcaggaagccgtggtgaaactgcgcgtcgagggtatgacatgccagagttgcgtttctagcattgagggcaaggtcaggaaactccaaggagtggtgcgagtaaaagtgagcctgagcaatcaggaggcagtcataacctatcagccttacctgatccagcctgaagatctgcgcgatcacgtgaatgacatgggattcgaggcagcgatcaaatctaaggtcgccccactgagtctgggccctattgacattgaacggctgcagagtaccaatcccaaaagacctctgtcctcagctaaccagaactttaataactccgaaaccttgggccaccaggggtcccacgtcgtgactcttcagctgcggatcgatggaatgcactgcaagtcttgtgtcctcaacattgaggagaacatcggccaactccttggagtgcagagcatccaagtgtcattggaaaacaagaccgcacaagtgaaatatgacccatcttgtacaagtcccgtagcccttcagcgggctatcgaggccttgccacccggaaattttaaggtttccctgccagatggagcggagggcagcggcaccgaccacaggagcagctcctcccactcacccggcagcccacctaggaatcaagtgcaagggacatgctcaactactctgatcgctattgccggtatgacttgcgcgagctgcgtgcacagtattgagggcatgatctctcagctggaaggcgttcagcaaatttcagtgtccttggctgaaggcacagcaaccgtgctgtacaatccgtccgttatctcccctgaggaattgagagccgccatcgaggacatggggtttgaggcgtcagtagtctccgaatcctgttccaccaaccctttggggaatcatagcgccggcaacagtatggttcaaactacagatgggacaccgacctcggtccaggaagtcgctccgcatactggacgattgccagccaaccacgcaccggatatattggctaagtcaccccagtccactcgggcggtggccccccagaagtgtttcctgcaaatcaaggggatgacgtgtgctagctgtgtttccaacatcgagcggaacctgcaaaaggaggccggcgtactgagcgtgttagtagctctgatggctggaaaagctgaaatcaagtacgaccccgaagtcatacagcccctggaaattgctcagttcatccaggatctcgggtttgaggccgcggtgatggaggactatgccggctctgacggcaatatcgaactcaccataacaggtatgacatgtgctagctgcgtgcataacattgagagtaagctgacaagaactaacggcataacatacgccagcgtcgcactggctacctccaaagcactggtcaagttcgatccagagataattggaccacgagatataattaaaattattgaagagattggctttcacgctagcttggcccaacggaacccaaacgcccatcatctcgaccataaaatggagatcaaacagtggaagaagtcctttctttgttctcttgtgtttggcatcccagttatggcgctcatgatctatatgctcattccttccaatgaaccgcatcagtccatggtgctggaccataacataataccaggtctctcaatcctgaacttgatattttttattctgtgtacctttgtgcaactgctgggagggtggtacttctatgtacaggcttataagtccctgcgccataggagcgcgaatatggacgtcctcatcgttctggctaccagcatagcctatgtttattctctggtaatcctcgtcgtggccgtggctgaaaaggcggagaggagccctgtgacattcttcgacaccccaccaatgctcttcgtcttcattgccttgggtcggtggctggagcatctcgccaaaagcaagacatcagaagctctagccaagctcatgtctctacaagcgactgaagccactgtggtcacccttggcgaggacaacctcattattcgagaagagcaggtgccaatggaactggtgcaacgaggtgacatcgtaaaggttgtacctggcgggaaattccccgtggacgggaaggttctcgagggcaacaccatggctgatgagagcctcatcactggagaggcaatgccagttaccaaaaaacccggatccacagtgattgccgggtcaattaacgcccatggcagtgtgctgataaaagcgacccacgtgggtaatgacacaacactcgcccagatcgttaaattggtagaagaagcccagatgagcaaagcacccatccaacagcttgctgatagattcagtgggtattttgtgccgtttatcattattatgagtactttgactcttgtagtttggatcgtgatcggctttattgactttggggttgtgcagcgttatttcccaaacccaaacaaacatattagtcagactgaagttataattaggttcgcttttcagacatcaattacggtcctctgtatcgcatgcccctgtagcctcgggctagccaccccaacagccgtaatggtgggcactggcgtagcggcccagaatggtatcttgatcaaaggcgggaaaccactggagatggctcacaagatcaagaccgtaatgttcgacaaaacaggaactattacccacggggtaccccgggtcatgcgcgtcctcttactgggcgacgttgctaccctgcctctccggaaagtcctcgcagtggtgggcacggcagaagcaagctcagaacatccattaggtgtcgccgtgactaagtattgtaaagaggagttggggacagagaccctcggctactgcacagatttccaggcagtgccagggtgcgggattggatgtaaagtgagcaacgtagagggaatactggcccattcagagcgaccgctatcagcacctgcatcccatctcaacgaggccggcagtctgccagctgaaaaggacgctgtgccacagacgttttctgtgctgattggcaatagagagtggcttcgtagaaacggtctcacaattagtagcgatgtctcagatgctatgaccgaccatgagatgaaggggcagacagctattttggtggccatcgatggcgtgctctgtggaatgatcgctatcgcagacgcagtcaagcaggaagcagcactggcagttcataccctccagtcaatgggggtcgacgttgtcctcatcacaggggacaatcggaagactgccagggcaatcgccacacaggtaggcatcaataaggtctttgccgaggtgctccctagccacaaggtggcaaaagtacaggaactgcaaaataagggaaagaaggttgccatggtgggtgacggggtgaacgacagtccagctttagctcaggctgacatgggagttgcaatcggaacgggtaccgacgtcgcaatcgaggccgcagacgtcgtgctgatccgcaacgatctgttggatgtggtggctagtatacatctctcgaagagaacagtgcgacgcatccggattaacctggttttagctctgatctacaatctggtgggaattccaatagccgccggcgtgttcatgcctatcggcatagtgctccaaccttggatgggaagtgctgcgatggccgcgtctagcgtaagcgtcgtcctgagctctctgcagctaaagtgctacaagaagccggacctggaacgctatgaggctcaagctcacggccatatgaagcctttgactgcttcccaggtttcagtgcatataggcatggatgaccgctggagggacagccctagggctacgccttgggaccaggtgagttatgtgagtcaggtctcactgtcaagcttgacaagcgataaaccctctcggcacagcgccgctgcagacgatgatggcgataagtggtctttgctcctgaacggtcgtgatgaggagcagtacatc

SEQ ID NO: 7418 - DNA, 4395 bp, synthetic construct
  misc_feature 1..4395: note = source = /note="Description of Artificial Sequence: Synthetic coding sequence"
  source 1..4395: mol_type = other DNA
atgccggaacaagaacggcagattaccgcacgtgaaggggcaagcagaaagattcttagcaaactgtcacttccaaccagagcctgggagcccgccatgaaaaagtccttcgcgtttgacaatgtgggctacgagggaggacttgatggacttggtccttccagccaagtcgcaacttccactgtccgcattcttggaatgacctgccaatcgtgtgtgaagagcattgaagataggatttccaaccttaaaggcattatctcaatgaaagtgtcccttgaacaagggagcgcaaccgtgaagtacgtgccttcagtggtctgtctgcaacaagtgtgtcaccagattggagatatggggtttgaagcatccatcgcagaaggaaaggctgcctcctggccgtcgcggtccctgccagcacaagaggcagtggtgaagctgcgggtggaaggtatgacgtgccagtcgtgtgtgtcatcgattgagggcaaagtgagaaagctgcagggagtggtccgggtgaaggtgtcgcttagcaatcaagaggctgttatcacctaccagccataccttatccaaccagaggacttgagagatcatgtcaatgatatggggttcgaggcagcaatcaagtcgaaggtggccccactgtcgctggggcctatcgacattgaacgccttcaaagcactaaccctaaacggcccctttcctcggcaaaccagaactttaacaactcggaaaccctgggccatcagggctcccatgtggtcactctgcaactgcggattgatggcatgcactgtaagtcctgtgtgctgaacatcgaagagaacattggtcaacttctgggcgtccagagcatccaggtgtccctcgaaaacaagacggcccaggtgaaatacgatcctagctgtacttcacctgtggctctccagcgcgcaatagaagcactgcctccgggcaactttaaagtgtcgctgcctgatggcgccgaaggatccggcactgaccatcgctcctccagctcccatagccctggttctccacctcggaatcaagtgcaagggacttgttcaactactctgattgcaattgcagggatgacgtgtgcatcatgcgtccattcaatcgaaggtatgatcagccaacttgaaggtgtccaacaaatctcagtgtccctggcagagggtactgccaccgtgctgtacaatccgtccgtgatctcacctgaggagctgcgggcagcaattgaagatatgggcttcgaagcatcggtcgtgtccgaaagctgtagcaccaaccctctcgggaaccatagcgcaggaaactccatggtccaaaccaccgatggaactcctacttcggtgcaggaagtcgcaccacataccggacgcttgccagcaaatcatgccccggatatcctggctaagtcaccccagtcgacccgcgccgtggccccacagaagtgcttccttcagattaagggaatgacttgcgcttcatgtgtgtcgaatatagaacgaaaccttcaaaaagaggcgggagtcctctcagtcctcgtcgccctcatggcaggaaaggcagagataaagtacgaccctgaagtcattcaaccgttggagatagcccaattcatccaagatttgggatttgaagccgcagtcatggaggactacgcagggtcggacggaaacattgagcttactataactgggatgacctgtgcctcttgcgtgcataacattgaatcgaaacttaccagaaccaatggaatcacctacgcttctgtggcccttgcgactagcaaggcacttgtcaagtttgatccagagattattggtcccagagacattatcaagattattgaggagatcggatttcatgccagcctggcacaaaggaatcctaacgcacaccacctggatcacaagatggaaatcaagcaatggaagaagtcatttctttgttccctggtgtttggtataccagtgatggccctcatgatttacatgcttattccatccaacgagcctcatcagtcaatggtgctggatcacaacattattcctggcctttccatactgaacctgatcttctttattctgtgtacgtttgtccagctccttggtggttggtacttctacgtccaagcctacaagtccctccgtcatcggtcggcaaacatggatgtgctgatagtgctggcaacttccatcgcatacgtctatagcctcgtcatactggtggtggcagtggctgaaaaggcagaacgatcccccgtcactttctttgatactcctcccatgttgttcgtgttcatcgcgcttggtcgatggttggaacatctcgcgaagtccaagactagcgaggcattggcaaaactcatgtcacttcaagctactgaagccactgtggtgacgctcggagaagataatctgatcataagagaggagcaagtgccaatggaactggtgcagcggggggacatcgtgaaggtggtgccgggtgggaagtttccagtggatgggaaagtgctggaaggaaatacgatggcagatgaaagcctgattactggtgaagcgatgcctgtgaccaagaaacccgggtcaactgtgattgcaggtagcatcaacgcccatggatcggtgttgataaaagcaacccatgtgggaaatgataccaccctggcgcaaattgtgaaactggtcgaggaggcacagatgtcgaaggcaccaatccaacagctggctgatagattcagcgggtactttgtcccatttatcattatcatgtcgaccctgaccctggtggtgtggatagtgattgggttcattgactttggcgtggttcagaggtacttccctaaccccaacaaacacatttcccaaaccgaggtcatcatacgctttgcgtttcagacctccataaccgtcctgtgcattgcatgtccttgctcgctgggactggcaacccctactgccgtgatggtgggaactggagtcgcagcacaaaacggtatcctgattaaaggaggtaagccacttgagatggctcacaaaatcaagaccgtgatgtttgacaaaaccggcactatcacccatggcgtgcctcgcgtgatgagggtcctgttgctgggtgacgtcgctaccctgcctctgcgcaaggtcctggcagtggtcggtaccgcagaagcctcctcagagcatccactgggagtggcagtcactaagtactgtaaggaggaacttggaaccgaaactttgggatattgtaccgatttccaagccgtgcccgggtgtggaattggttgtaaagttagcaatgtggaaggaattctggcccacagcgaacggccactgtcggcgccagcatcgcatcttaacgaagccggcagcctgccggcggagaaagacgcagtgcctcagaccttctcggtgcttattggcaacagagagtggctgaggcgcaacggtctgactatctcatcggatgtctccgatgcaatgactgatcatgagatgaagggacaaacggcaatccttgttgcaattgacggtgtcctttgtggaatgatcgccattgctgacgccgtcaagcaggaagcagcacttgctgtgcatacccttcaatccatgggagtcgatgtcgtcttgattactggagataacagaaaaaccgcccgcgcaatcgcaacgcaagtcggtataaacaaggtgttcgcggaggtgctcccatcccataaagtcgcaaaagtgcaggagcttcaaaacaagggaaaaaaggttgcaatggtgggtgatggtgtgaacgacagcccagcgctggctcaggccgatatgggagtcgccattggaaccggaaccgatgtggcgatcgaagctgcagatgtggtgctgattaggaacgaccttcttgatgtggtggcatcgattcatttgtcaaaaagaaccgtccgtagaatcaggattaatctcgtactcgccctgatttacaacctggtcggtatccccatcgctgctggagtgtttatgcctatcggtattgtgctgcaaccctggatgggctcggcagcaatggccgcaagcagcgttagcgtcgtcctttcgagcctgcaactgaagtgctacaaaaaacctgacctggagagatacgaagcacaagcgcatggtcacatgaaacctttgaccgcatcccaggtgtccgtgcacataggcatggatgaccggtggagagattcgcctcgtgcaactccctgggaccaagtgtcctacgtgtcccaagtgagcttgtcctcacttacttcggataagcccagcagacactccgcggcagcggatgacgacggagacaagtggtcacttcttcttaacgggagagatgaagagcagtatatc

SEQ ID NO: 7419 - DNA, 4395 bp, synthetic construct
  misc_feature 1..4395: note = source = /note="Description of Artificial Sequence: Synthetic coding sequence"
  source 1..4395: mol_type = other DNA
atgccagagcaggaaaggcagattacagcaagagagggcgcaagtcggaagatactcagcaagctttcactgcccacaagggcgtgggagcctgctatgaagaaaagctttgctttcgataatgtgggctatgaaggaggcctggacggtctcggccccagttctcaggttgcgacgagtacagttcggatcctggggatgacctgccagagctgtgtgaagtctattgaggatagaatcagcaacctaaagggcataatttccatgaaggttagtctggagcaaggatccgccaccgttaaatacgtgccctccgtcgtctgccttcagcaagtgtgtcatcaaattggggacatgggtttcgaagcgagtattgccgaggggaaagccgcctcgtggccgtcgcgcagcctgcctgctcaggaggcggtggttaagctcagggtggagggtatgacttgccagtcttgcgtgtccagtatagaaggaaaggtgcgaaagctgcagggtgtggttagggtgaaggtgtctttgtcaaaccaagaagcggtgataacctaccaaccatacctcatccagcctgaggacctccgggatcatgttaacgatatgggcttcgaggccgcgatcaaatccaaggtggcacctctaagtctgggccccatcgatattgaaagactccaaagtacgaatcctaaacgccctctgtctagtgcgaaccagaacttcaacaatagcgaaaccctgggccaccaaggatcccatgtagttacgttgcaactgcgcattgatggaatgcactgcaaaagctgtgtcctcaacatcgaggagaacatcggccagctcctgggggttcagagtatacaggtgtccctcgagaataagacagcacaggttaagtacgatccctcctgtacttccccagtcgcactccagagagccattgaggccctgcctccggggaactttaaggtgtcccttccagatggagccgagggctccgggacagaccacagatcctcctcatctcattcaccagggtctcctccccggaatcaggtccaggggacatgctctacgactttgatagcgattgccggaatgacctgtgctagttgcgtccacagtatcgagggcatgattagccaattggaaggcgtgcagcagatatctgtgtctttggcagaaggcaccgctaccgtgctttataacccgagcgtgatcagcccggaagaacttcgcgcagccatcgaggatatggggtttgaggcctctgtagtttccgaatcctgttcgacaaacccattggggaaccattcagctgggaactcgatggtccagactacggacggaactcccacctccgttcaggaggttgctccacatacaggcagactccccgctaaccacgcgcctgacattcttgcaaagtcccctcagagtacccgggccgtagcccctcagaagtgctttttacagatcaaaggcatgacttgcgcgtcatgcgtaagcaatatagagcggaatctacagaaggaggccggggtgctgtctgtgctcgtagcactaatggccgggaaagcggagattaagtacgaccccgaagtcattcagcctttggaaatagctcagttcatccaggacctcggatttgaggccgccgtaatggaagactacgccggaagcgacggcaatattgagctcacgatcacagggatgacctgcgcctcatgtgtgcacaacattgaatccaaactgacacgaactaacgggattacatacgcttccgttgccctggcgacatccaaagccctggtcaagtttgaccctgagattattgggccccgcgatatcattaagataatagaagaaattggcttccacgcgagcctggctcagaggaacccaaacgcgcaccatctggaccacaaaatggagatcaagcagtggaaaaaaagtttcctgtgctccttggtgttcggcatccccgtgatggcgcttatgatctacatgttgattcccagcaatgagccccatcaatctatggtgctggaccataatattatccctggattatccattctgaatctaatattttttatcctgtgtaccttcgtccaactgcttggaggttggtatttctacgttcaggcctacaagagcctccgacataggagcgccaatatggacgtgttaattgtcttggccacatccattgcgtatgtctactccctggtcatcctggtggtcgccgtagccgagaaagccgaacgcagtcccgtgacgtttttcgacacacctcccatgctgtttgtgtttattgccctaggtaggtggctcgagcacctcgccaagtccaaaacctccgaagccttagctaaactgatgtccctgcaggccactgaagctacggtggtgaccctgggcgaggataatctcataatccgggaggagcaggtacccatggagctcgttcaacgaggtgatattgtaaaggtggtccctgggggaaagtttcccgtagacgggaaagtgctggaaggtaacacgatggcggatgaaagcttgatcacgggcgaagcaatgccggtgaccaagaaaccaggcagcaccgtaatcgcggggtcaattaatgcacatggtagtgttctgatcaaagctactcacgttggcaacgacacgactcttgcccaaatcgtcaagctcgttgaagaggcccagatgagtaaagctcctatacagcagttggccgatcgattcagcgggtactttgtgcccttcatcattatcatgtcaacgcttacccttgtggtgtggatcgttatcggctttatcgattttggcgttgtccaacgttacttcccaaaccccaacaaacacatcagccagactgaggtgatcatcaggtttgcgttccagacttctatcacggtgctgtgtatcgcctgtccctgtagcctggggctcgcaacacccacagcagtcatggtcggaacgggagtagctgcccagaacggcatccttattaagggcggtaaacccctggagatggcacacaagattaaaaccgttatgtttgataagaccggaacgattactcatggtgtccccagggtgatgcgagtactgctgctgggagatgtagcgacattgcctctgcgcaaggttctcgccgtcgtggggacggcagaggcttctagtgagcacccactcggggtggctgtcaccaagtactgcaaagaagagctgggtaccgaaactctgggatattgtaccgactttcaagccgtgcccggttgcggcatcggctgcaaggtctccaacgtcgaaggaatactggcccactctgagcgtccgctgtcggctccagcatctcatctcaatgaagccggctcattgcctgcagaaaaagatgccgtcccccagaccttctcagtgttaattggcaacagagagtggctgcggcggaatggcctaaccatcagcagcgatgtcagtgacgctatgaccgatcacgagatgaaagggcaaactgctatcctagtagccattgacggggtgctttgcggtatgatcgccatcgctgacgccgtgaaacaagaggccgcgctggcagtgcacaccttacagtcaatgggcgtggacgtcgtgctgattaccggagataatcgcaagactgcgagggcaatagcaacgcaggtggggataaacaaggtttttgccgaagtgctgcctagccacaaagttgccaaggtccaggaactgcagaacaaagggaaaaaggtagccatggtcggtgatggcgtgaacgactctccggctcttgcacaggccgacatgggtgtggccattggcaccgggacagatgtggctattgaagccgctgacgtggtgctcatacgcaatgatctcctggatgtggtggccagcatacatctctctaaacggacagttcggaggatcagaataaatctcgtgctagccttgatctacaacctggtcggcatcccgatcgcagccggagtattcatgccaatcggcatcgtgctacagccatggatgggatcggcagccatggccgcctcttcagtcagtgtggtgttgtcctcactgcagctgaaatgctacaaaaagcccgacctggagagatacgaggcacaagcccacggtcacatgaagcccttgacagcgagccaggtcagtgtccacatcggcatggacgatagatggcgcgactccccccgggccacaccatgggatcaggtgtcttatgtttcacaagtgtccttgtccagcctcacatctgataaaccttcccggcattccgcagctgcggatgacgatggcgacaaatggtcattactgcttaatggaagagacgaggagcagtacatc

SEQ ID NO: 7420 - DNA, 4395 bp, synthetic construct
  misc_feature 1..4395: note = source = /note="Description of Artificial Sequence: Synthetic coding sequence"
  source 1..4395: mol_type = other DNA
atgcccgaacaggagcggcagatcacggcccgagagggggcttcccgcaaaattcttagtaaattaagccttcctactcgcgcatgggaacccgcaatgaagaagtcattcgccttcgataatgtcggatatgaaggcggtttggatggcctgggtccaagctctcaagtggccacatccacagtgcgcattctcgggatgacatgccaatcctgtgtcaagagcatcgaggacaggatttccaatctcaagggcattatttctatgaaagtgtcccttgagcagggctccgccaccgtgaagtatgtgccttccgtcgtctgcctccagcaagtgtgccaccagatcggcgacatgggtttcgaggcatcaatcgcagaggggaaagcagcgagctggccgagtcgcagtctgccggcacaagaggctgtggtgaaactgagagtggagggcatgacttgccagagttgtgtaagttctatcgaggggaaggttcgaaagttgcagggtgtggtgagggtgaaagtgagcctttcaaatcaggaggcagttatcacctaccaaccatatctgattcagcccgaggacctgagagaccatgttaacgatatggggtttgaagccgcgattaagagcaaggtcgctcccctgtctctggggcctatcgacattgagcgactgcagagtacaaaccccaagcgtccgctgtctagcgcaaatcagaattttaacaacagcgagacgctaggccaccagggaagtcatgtggtgactctgcaattacggatagacgggatgcattgcaaaagctgcgtgctgaatatcgaggaaaacattggccaattgctaggtgtgcagtcaattcaggtgtctctcgagaacaagaccgctcaagtcaagtatgacccgagctgcacctctcctgtggctctccagagagcgattgaagccctgccccccggtaacttcaaagtcagcttgccggatggcgccgaagggagcggaacggatcatcgctctagtagcagccatagcccaggaagcccaccccgaaaccaggtgcagggaacttgctctacaaccttgatcgcaattgctggcatgacctgtgcatcctgtgtacacagtatcgaggggatgatcagtcaattggagggggtacagcagattagcgtgtcactcgcagaagggacagctactgtattatacaacccttctgtcatctcccctgaggaactccgtgctgccatagaggacatggggtttgaagcctcagtggttagcgaatcttgcagcactaatcccctcggaaaccatagcgccggaaactccatggtgcagacaacagatggaacaccgactagtgtgcaggaggtggccccacacacaggaaggctgcccgccaaccacgcaccggacatcttggcaaagtcccctcaatccacgcgtgccgtcgcgccacagaagtgttttttgcagatcaaaggaatgacttgtgcctcctgtgtgtccaatattgaaagaaatcttcagaaagaggcaggggtgctgtccgtcttggttgcactgatggcaggtaaggccgaaattaaatacgaccctgaggtgatacaacccctggagattgcacagtttatacaggacctcggctttgaagccgctgtaatggaggattatgctgggtccgatggaaatatcgagttgactatcacagggatgacatgcgccagttgcgtgcataacatagaaagtaagctaacccgcaccaacggtataacgtatgccagcgtggcccttgccacaagcaaggctttagtcaagttcgatcctgagatcataggcccgagggatataattaagatcattgaggagatcggatttcatgcgtccctggctcagcggaatcccaacgctcaccacctggaccacaagatggaaatcaaacagtggaagaagtcgtttctctgtagcctcgtgttcggaatccccgttatggccttgatgatttatatgttgatcccgagcaatgagccccaccaatccatggtgctcgaccacaatatcatccctgggctgtctatcctgaatctgatcttcttcattttatgcactttcgtgcagctgctgggcggatggtacttttacgtgcaagcctacaagtcccttcggcaccgtagtgccaacatggacgttctcattgtgctggccacatcaattgcgtatgtgtactccctggtgatcttggtggtagctgtcgctgaaaaagccgaacgttccccagtcaccttttttgatacccccccaatgttatttgtatttatcgccctaggccgatggcttgagcatctggccaaatctaaaacatcagaggctctcgcaaaactcatgagcctacaggccacagaggccactgtcgtgaccttaggggaagacaacctgattatccgcgaagagcaggtaccgatggaactggttcaaagaggagacatagtcaaggtggtcccagggggtaagtttcctgttgacggcaaagtgttggagggaaacacgatggccgatgaatccctcattacaggggaggccatgcctgtaaccaagaagccaggctctaccgtgatcgccggaagtataaacgcacacggctcagtgcttatcaaggccactcacgtcggaaatgacactacacttgcccaaattgtcaagctcgtcgaagaagctcagatgtcgaaggcccccatccagcagctggccgatcggttttcaggttattttgtgccatttattatcattatgtctacgctgaccctggtcgtatggatcgttataggcttcattgatttcggagtggtgcagcgatactttcccaaccctaataagcacatctcacaaaccgaagttatcatccggttcgccttccagacctccatcaccgttctgtgcatagcctgcccttgcagtctggggctcgctactcctacggccgtcatggtgggcaccggcgttgctgcacagaatgggatcttgatcaagggaggtaagcctctggagatggcgcataaaataaagaccgtgatgttcgacaaaacaggaaccatcactcatggcgtgcctagagtgatgcgagtactgttgctcggcgacgtggcaacacttcccctccgaaaggtgctggcagtggtgggaaccgccgaggcgagttccgaacatccactcggagtagccgtgaccaagtactgcaaggaggaactgggcacagaaacgctaggctattgcaccgactttcaggccgtgccaggttgtggtatcggctgtaaagtctctaacgttgaaggaatattggcacacagcgagcgaccattgagcgcacccgcgagccatctaaacgaggcgggatctcttccggcagaaaaagatgcagtacctcagactttctcagtcctgattggaaaccgcgagtggctgagaagaaacggactaactatttctagcgacgtcagtgatgccatgacggatcatgaaatgaagggccagactgctattctagtggccatagatggtgttctgtgtgggatgattgcaatagctgatgcagtgaagcaggaagcagccctcgcggttcacacccttcagagcatgggagtcgatgtggtactgattacaggggacaacaggaagaccgcgcgggcgattgctacccaagttggcataaataaggtgtttgccgaagttctgccaagccataaagtggccaaggtgcaggagctgcaaaacaaaggtaagaaggtagctatggtaggagatggtgtgaacgactcaccggcccttgcccaggcagatatgggtgtggctatcggcaccggtaccgatgtcgcgattgaggcggcagacgtagttcttatacggaacgacctgctggatgtcgtcgcttccatccatctctctaaacgaacagtgcgtcgcatcaggattaacttagtactggcactgatctataacctggtgggaattcccattgctgccggagtttttatgcccatcggaattgttttacagccatggatgggttcggcggccatggcagcatcttctgtaagcgttgtactgtcctccttgcagctcaagtgctataagaagccggatctggagcggtatgaagcgcaggcccacggacacatgaagcccttgacggcaagccaggttagtgtgcacatcggcatggatgatcgatggagagatagcccccgcgccacaccatgggatcaggtatcgtatgtgtcacaggtaagcctgtcctctctgacctccgacaagcctagtagacactcagccgccgccgatgatgatggggacaaatggtccctcctcctcaatggacgggacgaggaacagtacatc

SEQ ID NO: 7421 - DNA, 4395 bp, synthetic construct
  misc_feature 1..4395: note = source = /note="Description of Artificial Sequence: Synthetic coding sequence"
  source 1..4395: mol_type = other DNA
atgccagaacaagagcggcagattacggccagagagggcgcgtcgagaaagatcctgtcgaagctgtcgctgcccactcgagcgtgggaacccgcaatgaagaaatcatttgccttcgacaatgtgggttacgagggcggactggatggactcgggccgtcatcgcaagtggccacctcaactgtccgcatcctcgggatgacttgccagtcctgtgtgaagtctatcgaggacagaatcagcaatctcaaaggcatcatttcaatgaaagtctccctcgagcagggatccgctactgtgaaatacgttccgtcagtcgtttgcctgcaacaggtgtgtcaccagatcggggacatggggtttgaagcgagcatcgcagagggcaaagccgcgtcgtggccttcccgatcgctcccagctcaggaagctgtggtcaagctgcgggtggaaggcatgacgtgccagtcgtgcgtgtcaagcatcgagggaaaggtgaggaaattgcagggagtggtccgggtcaaggtgagcttgtcgaaccaggaggcagtgatcacctaccaaccgtatctgatccagccggaggacctgcgcgatcatgtgaatgacatgggctttgaggcggcgatcaagtcgaaggtcgcaccgttgtcccttggtccaatcgatatcgaacggctgcagtcgaccaacccaaaacggccgctgagctcggcgaatcagaacttcaacaactcggaaactctgggacaccaggggtcccatgtggtgaccctccaactgcgcatcgacggaatgcattgcaaaagctgtgtgctcaacatagaagaaaacatcgggcagctgcttggagttcagagcatccaggtgtcactcgagaacaagactgcccaggtgaagtacgacccgtcctgcacttccccggtcgcgctgcaaagggctatcgaggctctcccgcccggaaactttaaagtcagcttgccggacggagcggaaggatccgggaccgatcacagatccagctcatcccacagccctggctcaccgccgcgtaatcaggtgcagggcacctgttctactaccctcatcgctatcgcgggtatgacgtgcgcttcctgcgtgcattcgatcgaggggatgatttcccaactcgaaggggtgcaacagatctcggtatccctggccgaagggaccgcaactgttctgtacaacccctcagtgatttcgccggaggaactgcgggctgccatcgaagatatgggatttgaagcgtccgtggtttccgaatcatgttcgactaatccattgggaaaccattcagcggggaactcgatggtgcagactactgatggaacccctacttccgtgcaagaggtggccccgcacactggtcggttgccagctaaccatgcaccggacatcctggccaagtcaccgcagtcgacccgcgccgtggcaccccaaaagtgcttcctgcagatcaaaggtatgacctgtgcgtcatgcgtgtcaaacattgaacggaacttgcaaaaggaagcgggagtcctgtcagtgctggtggcactcatggccgggaaggcagaaatcaagtatgatccggaagtcatccagccactggagattgcgcagttcatccaagacctgggattcgaggccgcagttatggaagattacgcaggcagcgatggaaacatcgagctcactatcacgggcatgacttgcgcctcatgcgtccacaacatcgagtccaagctgactcgcaccaatggaatcacctacgcctcagtcgccctcgctacctcaaaggcgttggtgaagttcgaccccgagatcatcggacctcgcgacattatcaaaatcatcgaggaaatcggtttccatgcgagcctggcacagagaaacccgaatgctcaccacctggaccacaaaatggaaatcaagcagtggaagaagtccttcctgtgctcgttggtctttggaatcccagtgatggccctgatgatctacatgcttattccgtcaaacgaaccccatcaatccatggtgcttgatcataacatcattcctggactgtctatcctgaatctcattttctttattctgtgtaccttcgtccaacttcttgggggatggtacttttacgtgcaggcctacaagagcctgagacatcggagcgctaacatggacgtgctgatcgtgctggcgacctctatcgcatacgtgtactcgctggtgatcctggttgtcgccgttgccgagaaggctgagagaagcccagtcaccttcttcgacactcctccgatgctgttcgtgttcatcgccctgggaaggtggctggagcacctggccaagagcaagacctccgaagccctggccaagctgatgtcgctgcaggccactgaggcgaccgttgttactcttggagaggataatcttatcatcagagaagagcaggtgccaatggagctggtccaaaggggtgacattgtgaaagtcgtgccgggaggcaagtttccggtggatggcaaggtcctggaaggaaacaccatggccgacgaatcgctgattactggtgaagccatgcctgtcaccaagaagcctggatccactgttatcgcagggtcgatcaacgcgcacggtagtgtgctcattaaagctacccacgtgggaaatgatactactctcgcccagatcgtgaaactggtggaagaggcccagatgtccaaagcacctatccaacaactcgcggatcggttttccggttactttgtgccatttatcatcattatgtccaccctgactctcgtcgtgtggatcgtgattggattcattgattttggagtggtccagcggtacttccctaacccgaacaagcacatcagccagactgaagtgattatccggttcgctttccaaacttcgatcaccgtcctgtgcatcgcttgcccatgtagcttgggactcgccaccccaacggccgtaatggttggcactggagtggcagcgcaaaacggcatcctcatcaagggaggcaaaccgctcgagatggcacacaagatcaagactgtgatgttcgacaagacgggcaccatcacccacggagtgccgagagtgatgcgggtgctgttgctcggcgacgttgctaccctcccattgcggaaggtgttggccgttgtcggcactgctgaggctagcagtgaacatccgctgggggtcgccgtgaccaagtactgcaaggaagagctgggtaccgagactcttggatactgcaccgacttccaagccgtaccgggttgtgggatcggctgtaaggtatcaaacgtcgaaggaattctggcccactcggagcgtccactgtccgctcctgctagccacctcaatgaggcaggaagtttgccagcagaaaaagacgccgtcccacagaccttctccgtgctgatcggaaacagggagtggctgcgcagaaacggactgaccatctcgtctgacgtctcagacgccatgactgatcacgaaatgaaggggcagactgcaattctggtggcgatcgacggagtcctctgcggaatgatagcgatcgcggatgcggttaaacaggaagccgctctggcggtgcacactctccagagcatgggcgtggatgtggtgttgatcacgggagacaacagaaagaccgctagagcaattgcaacgcaggtcgggatcaataaagtgtttgccgaagtgctgccttcacataaggtggcgaaagtgcaggagctgcaaaacaagggaaagaaggtggcgatggtgggagatggagtgaacgattccccggcgttggcccaggctgacatgggtgtcgccatcggcaccggtacggacgttgcaatcgaagccgccgatgtcgtactgatccggaatgacctgctcgatgtggtcgcatcgatccacctttccaaacgcacggtcaggaggatccgcatcaacctggtcctcgcactgatctataatctcgtgggaatcccgatcgccgccggtgtgttcatgccgattggcatcgttctgcaaccatggatgggatccgcggcgatggcagcgtcctcggtgtccgtggtgctcagctcactccagctgaagtgctacaagaagccggacctggagcggtacgaggcacaagcacacgggcatatgaagccgctgactgcgtcccaggtgtcagtgcatatcggtatggacgacagatggcgggattcaccgcgcgcgactccctgggaccaagtcagctacgtgagccaggtttcgctctcgtcgctcacctcggacaagccgtccagacacagcgcggcggcagatgacgacggggacaagtggagcctgctcctcaacggccgggatgaagaacagtacatc

SEQ ID NO: 7422 - DNA, 4395 bp, synthetic construct
  misc_feature 1..4395: note = source = /note="Description of Artificial Sequence: Synthetic coding sequence"
  source 1..4395: mol_type = other DNA
atgcctgagcaggagagacaaatcaccgcacgcgaaggggccagccgcaaaatcctgagcaagctctcgctcccgaccagggcatgggagcctgcgatgaaaaagtcctttgccttcgataacgtggggtacgaagggggacttgatggtctgggaccttcaagccaggtggctaccagcactgtgcggatccttggaatgacctgtcagagctgcgtcaagagcattgaagatcgcatttcgaatctgaaggggatcatctccatgaaggtgtcacttgaacagggttccgcaacggtcaaatacgtgccttcggtcgtgtgccttcagcaagtgtgtcatcagataggagacatgggtttcgaagcaagcatcgcagaaggaaaggccgcatcgtggccatcaagatctctccccgcacaagaagcagtcgtcaagttgcgtgtggagggaatgacttgtcaaagctgtgtgagctccatcgaaggtaaggtgagaaagctccagggcgtggtgcgcgtgaaagtgagcctgagcaaccaagaggctgtgatcacctaccaaccttacctgatccaacccgaagatcttagggaccatgtgaatgatatgggttttgaggcagcaattaagagcaaggttgcccccctctccctcggtccgattgatatcgaacggctgcaatccactaatcccaaacgtccattgtcgagcgcaaaccaaaacttcaataacagcgaaaccctgggtcatcagggatcccacgttgtgaccctgcaactcagaattgatggaatgcattgtaagtcgtgcgtgctgaatattgaagagaacattggtcaactcctgggtgtgcaatccattcaggtgtcccttgagaacaaaaccgcgcaggttaagtacgatccttcctgtacgtcgccagtcgctctgcagcgtgccattgaagcacttccaccaggtaacttcaaagtgtcgttgccagatggcgcagaaggttcgggaaccgaccacagatcaagctcatcgcattcgccaggctcacctcccagaaatcaggtgcaagggacttgttccaccacgcttatcgcaattgccggaatgacctgcgcttcgtgtgtgcattcaattgaaggtatgatcagccaacttgaaggtgtccagcaaatttccgtgtccctcgccgagggaactgccactgtgctttacaatccttcagtgatttcccctgaagaactgagagcggcaattgaggacatgggattcgaggcctccgtggtgtccgagtcgtgctccactaatcctctggggaaccattcagccggcaactccatggtccagaccaccgatgggacccctacctccgtccaggaggtggcccctcatactggtcgccttcctgccaatcacgcacctgatattctggcaaagtcgcctcagtcgactagagccgtggcaccgcagaagtgttttcttcagatcaaaggtatgacttgcgcatcgtgcgttagcaacattgaacgcaacctgcaaaaggaagcgggagtgctctccgtgctggtcgctctgatggcaggtaaggcagaaatcaagtacgacccagaagtcatacaacctcttgaaatcgcccagtttatacaggatcttggttttgaagcggcggtgatggaagattacgcaggatccgatggtaacatcgaactcaccatcactggaatgacttgcgccagctgtgtgcataacatcgaatccaaacttacgcgcactaacggtattacttacgcaagcgtcgcactggcaacctcgaaggcactcgtgaagtttgacccagagattatcggtccccgggacatcattaagataattgaggaaattgggttccacgcatcgctggcacaacggaatcctaatgcacaccatctggaccacaaaatggagatcaaacaatggaaaaagtcattcctctgtagcctcgtctttggcataccggtgatggcacttatgatctacatgctgattccttcgaatgagcctcaccagtcaatggtgctggatcataacataattccaggacttagcattctcaatctgattttctttattctttgcaccttcgtgcagctgctgggaggttggtatttctacgtccaagcatacaaaagcctgaggcaccgaagcgcaaatatggatgtgctcatagtcctggctacttcaatcgcatacgtgtatagcctggtgatcctggtggtggccgtcgcagagaaggcagaaaggtcacctgtgactttctttgacactccaccgatgcttttcgttttcattgcacttggtcgctggctggagcaccttgccaagagcaaaacctccgaggcacttgcgaaacttatgtcgcttcaggccactgaagcaactgtggtaacccttggtgaagataatctgattattcgggaggaacaagtgccgatggaacttgtgcagcgcggagacatagttaaggtcgtcccaggtggcaagtttcctgtggatggaaaggtgttggaaggtaacactatggcagatgaatcgcttattaccggagaagccatgcctgtcaccaagaaacccggctcgactgtgattgcgggttcgatcaacgcacacggttccgtcctgattaaggcaacccatgtcggtaacgacaccacccttgctcaaattgtgaagctggtcgaagaagcacaaatgtccaaggcgcccatacaacagctggctgatagattctccgggtacttcgtgccattcatcataatcatgtcgactcttactctggtggtgtggattgtgataggattcatcgactttggcgtcgtgcaaaggtactttcctaacccaaacaaacacattagccaaactgaagtgattatcagatttgcctttcagacctcaatcacggtgctgtgtattgcctgcccttgtagcctgggactcgcaactcctaccgcagtgatggtcggtaccggtgtggcagcacaaaacgggatactcattaaaggtggaaagcctctcgaaatggcacataagattaagaccgtgatgttcgataaaaccggtactataactcatggcgtccctcgggttatgagagtccttctccttggtgacgtggcaacgctgcctctccgcaaggtgctcgccgtcgtgggtacggcagaggcatcatctgagcatcccctcggagtggctgtgaccaagtactgtaaggaggagctgggtaccgaaacccttggatactgtactgatttccaggctgtgcccggatgtggaatcgggtgcaaagtctcgaatgtcgagggaatccttgcacactccgagaggccactgtccgcaccggcctcccacctcaacgaagccggttcacttcccgccgaaaaggacgctgtgccccagaccttctcggtgcttattggaaatagagagtggctcagacgaaacggactcaccatcagcagcgatgtgtcagacgcaatgactgatcatgagatgaaaggacaaactgccattttggtcgctatcgacggtgttctgtgcgggatgatcgctatcgcagacgccgtcaaacaagaagcagcactggcagttcatacccttcaatcgatgggtgtggacgtggtcctgattaccggggataatagaaaaaccgctagagcgatagcaacccaggtcggtattaacaaagtgtttgcagaagtgctcccctcacacaaggtggccaaggtgcaggaactccagaataaaggaaagaaggtggccatggtcggcgatggagtgaacgattcacctgcccttgcccaagccgacatgggagtggcgattggtacgggcaccgacgtggctattgaggcagcagatgtcgtgctgatacggaacgacttgctggacgtggtcgcatcgattcatttgtcgaagagaactgttagacggattcgcatcaatctggtgcttgcgctgatttacaatcttgtgggaattcctatagcagcaggagtgtttatgccgatcggaattgtgctccaaccctggatgggctccgcggcgatggcagcaagctctgtctcagtggtgctctcttcgttgcagctcaagtgctacaagaagcctgatcttgaaaggtacgaggcacaggctcatggtcacatgaaacctcttactgcctcacaagtctcggtccatatcggtatggatgatcgttggcgcgactcgccaagagcaaccccgtgggaccaagtcagctacgtctcgcaagtctcgctgtcctcgctgacctctgacaagccttcgagacactccgctgcggcagatgacgatggagacaagtggagcctgctcttgaacggtcgggacgaggagcagtatatt

SEQ ID NO: 7423 - DNA, 4395 bp, synthetic construct
  misc_feature 1..4395: note = source = /note="Description of Artificial Sequence: Synthetic coding sequence"
  source 1..4395: mol_type = other DNA
atgccagaacaggagcgccagattaccgccagagagggagccagccgcaaaattctgtctaagctgtcgctgcctacccgggcttgggagccagcaatgaagaaatctttcgcatttgataacgtgggctacgagggcggcctggacggattaggaccaagcagccaagttgctactagcacggttcgcattttgggcatgacttgtcaatcgtgtgtgaaaagcatcgaggaccgtatctccaacctgaagggaattatcagcatgaaggtgagcctggagcaaggctcggcaaccgtgaaatatgttccgtctgttgtgtgtcttcagcaggtctgccatcaaattggcgatatgggcttcgaagcctctatcgccgaaggcaaagccgcatcatggccatcacggagcctcccggcccaggaggccgttgtcaaactgcgcgtagagggaatgacctgtcaaagctgtgtgtcctccatcgaaggtaaagtacgtaaactgcagggtgtggtcagggttaaggtaagcctgtcaaaccaggaggccgtgatcacgtatcagccttatttgatacaacctgaagatctgcgcgatcacgtgaacgatatgggcttcgaagcagccatcaaatctaaggttgcaccactgtcgctcggtccgatcgatattgagcgacttcagtctacgaatcctaagcgacctctgtcgtctgctaatcagaacttcaataattccgaaaccctcggacaccaaggtagccatgtggtcaccctgcagctgcgcatcgatggaatgcattgcaaaagctgtgtgttgaacatcgaagagaatatcggccagctgctgggtgttcaatctatccaggtctcgctggagaataaaaccgcgcaggttaaatatgaccctagctgtaccagcccggtggcgctgcaacgcgccatcgaagccctgcctcctggtaattttaaggtgagcctgcctgacggagcagagggttctggtaccgatcacagatccagcagctcccacagcccgggttctccgccgcgtaaccaggtacaaggtacctgtagcacaaccctgatcgccatcgctggcatgacttgcgcctcatgtgttcattccatcgaaggcatgatctctcagctggagggggtccagcaaattagcgtttctctggcggagggcaccgcgaccgttctgtataatccgagcgtgatcagccccgaggaactgcgcgcagcgatcgaagacatgggctttgaggcctctgtggtgtcggaatcctgcagcactaacccgctgggcaatcactctgcgggtaatagcatggtacagaccacggacggtacccctacgtccgttcaggaggtggcgccgcacacaggtcgcctgccagcaaaccatgccccggatatcctggctaagagccctcaatccacgcgcgccgtcgcgccgcagaagtgctttctgcaaattaaagggatgacttgcgctagttgcgtgtctaacatagagcgaaatctgcagaaggaagcaggcgtgctgtcagtcctggtggctctgatggcgggaaaagctgagattaagtacgatcccgaggtgatccagccgttagagatcgctcagtttatccaagatctgggcttcgaggccgcggtgatggaggactacgcgggttctgacgggaacatcgaacttacgattacggggatgacatgtgcatcctgtgtccataacatcgagtcgaagctgactcgcaccaatggtattacatacgcgagcgtggcactggcgacgagtaaggcgctggttaagtttgatccagaaatcattgggccgcgagatattataaagattatcgaggaaattggttttcacgcttccctggcacaaaggaatcccaacgcgcaccacttggaccataaaatggaaattaaacaatggaagaagtccttcctgtgctccctggtgttcggtatcccggtgatggcactgatgatctatatgctgatccctagcaatgagcctcaccagtcgatggttctggatcataatatcatcccggggttgtcaattctcaacctgatcttttttatcctgtgcaccttcgtccagctgctggggggctggtatttctatgtgcaagcttacaagagtctgcgccaccgctcagcaaatatggacgttctgatcgtactagccactagtattgcgtacgtgtacagcctggtgatcctggttgtcgcggtagccgaaaaagcagaaaggtccccagtaactttcttcgacaccccaccaatgctatttgtcttcattgcactgggacgctggctggagcatctggccaagagcaagacctcagaagcgctggcaaaactgatgtctctgcaggcaaccgaagccaccgtggtgacgctgggtgaggacaacctcattattcgcgaggaacaggtcccaatggagttggttcaaaggggcgacattgtcaaagtcgtcccaggcggcaaattccctgtcgatggtaaagtcctcgaggggaacactatggcagacgagagtctgattaccggcgaagctatgccggtcacaaagaagccgggatccacggtgattgctggcagcattaacgcccacggtagcgtgttgatcaaggccactcacgtgggcaatgatacgaccctggcacaaattgttaagctggtcgaagaagctcagatgagcaaggcgcctattcagcaattggcggaccgtttcagcgggtatttcgtgccgtttatcataattatgagtactctaacattggtcgtgtggatcgttatcggttttatcgatttcggtgtcgtgcagcgttacttccccaacccgaataaacacattagccagaccgaagttattatccgcttcgcgtttcaaaccagcattaccgtgctgtgtatcgcgtgtccttgctcactgggtttggccactccgactgccgttatggtaggcaccggcgtcgcagcgcagaatgggattttgattaagggtggcaagcctctggaaatggcacataaaataaaaacggtcatgttcgacaagacgggtactattacccatggtgtcccacgcgtgatgcgcgtgttgctgttgggcgacgtggccaccctgccactgcgcaaggttctcgctgttgttggcaccgccgaagccagctctgagcatccgctgggtgttgctgtcaccaaatattgcaaggaggagttgggtacggaaactttgggttactgcacagattttcaggcagtcccaggttgtggcatcggctgcaaggtgagcaacgtggagggtattctcgcccacagcgagcgcccattgtcggcgccggcgtcccatctgaatgaagccggcagccttcctgctgagaaggatgccgtgccccagacgtttagcgttctaatcggtaaccgcgagtggctacgccgtaatggactgaccatcagctctgacgtttcggacgccatgactgaccatgagatgaaaggtcaaaccgctatcctcgtggctatagacggagtgctgtgtggcatgattgccattgccgacgctgtgaaacaagaggctgccctagcagttcacacgttgcaatccatgggcgtcgatgtcgtcctgatcacgggcgataaccggaagaccgcacgtgcgattgcaactcaagtgggcataaataaggtctttgcagaagtgctgccatctcacaaagtggctaaggtccaagagctccagaataaaggcaagaaggtggcaatggtgggtgatggcgtgaacgactccccagcgctggcgcaggcggacatgggcgttgccattggtaccgggacggacgtcgcaattgaggcggctgacgttgttctcattcgaaatgacctgctggatgtggtggcaagcatacacctgagcaaaaggacggtacgacgcatccgcatcaacctggtactggctctcatatataatcttgtaggtatcccgatagctgcaggggtcttcatgccaattggcattgtgctgcagccgtggatgggctcggccgcaatggcggcatcatctgtcagcgtagtcctctccagcctgcaattgaaatgctacaaaaagccagacctggagcgctacgaggctcaggcccatggccatatgaagcctctgaccgccagccaggtatccgtacatatcggcatggatgatcgctggcgcgactcgccgcgggcgactccttgggaccaagtgagctacgtgtctcaagtgtctctgagcagtctgactagcgacaagcctagcagacattccgctgccgcagacgatgacggtgataagtggtcccttctgctgaacgggcgtgatgaggaacaatatatt

SEQ ID NO: 7424 - DNA, 4395 bp, synthetic construct
  misc_feature 1..4395: note = source = /note="Description of Artificial Sequence: Synthetic coding sequence"
  source 1..4395: mol_type = other DNA
atgcctgaacaagagcggcagattactgcccgagagggagcctcacgcaagatcctctctaaactcagcctccccacgagagcatgggagccagctatgaaaaagagctttgccttcgacaacgtggggtacgaaggtggtctggatggtctggggccatctagccaagttgcaaccagtactgtgcgaattttggggatgacatgccagtcttgtgtaaagtctatcgaagatagaatctccaatttgaaaggcattattagtatgaaagtttctcttgagcaagggagtgcaaccgtcaagtacgtgcccagcgtcgtttgcctgcagcaggtgtgtcatcagatcggcgatatgggctttgaggcttctatagcggaaggcaaggctgcatcatggccttctaggagcctccccgcccaagaagccgtcgtgaagttgcgggtggagggtatgacatgtcagagctgcgtgagctctatcgaaggaaaggtccgcaaactgcagggagttgttcgcgtgaaggtgtccctgtccaatcaagaagccgttataacgtaccaaccctatttgatccaacctgaggacttgagagaccacgtgaatgacatgggcttcgaggcagctatcaagtctaaggtggcccctctcagcctgggtcccatcgatatcgagcggctgcaatctaccaatcccaaacgccccctgagctccgcaaatcagaacttcaacaacagtgaaacccttggacaccaaggctcacacgtagtgacgctccaactccggattgacggtatgcattgcaagtcatgcgtgctgaacatcgaggagaatattggtcaactcttgggtgtccagtctatacaggtgtcactggagaacaaaacagcacaggtgaaatatgacccgtcatgcacgtcccctgtcgcccttcagagggctattgaggccttgccacctggtaactttaaggtgtccctcccagacggcgctgaaggttctggaactgatcaccgctcaagctccagtcacagcccaggttcacctccccgaaaccaggtacaggggacgtgttcaacgacactcattgctatagcaggtatgacatgtgctagttgtgtgcactctatcgaaggaatgatctcccagctggagggtgtgcagcagatctccgtgtcactggccgagggaacagcgaccgtgctgtataatccatcagtgatcagcccagaagagctgcgcgcagccattgaagacatgggatttgaggcctctgtcgtctccgaaagctgctctaccaaccctttgggcaaccacagcgccggcaacagcatggtgcagactactgacggaacgccaacatccgtgcaggaggtcgctccgcatacaggtcgactccccgccaatcatgcccctgacatactggcgaagtcccctcagtcaacgagagccgtcgctccccaaaaatgtttcctgcagattaagggcatgacctgtgcatcctgtgtatcaaacatcgaacggaacctgcagaaggaggcaggagttctgtccgtgctcgtggccctgatggccgggaaggcagagatcaagtacgatcctgaagtgattcagccgttggagatcgcacagttcatccaggatctgggatttgaagctgccgtaatggaagactacgccgggtcagacggcaatattgaactgactattactggaatgacctgtgcttcttgtgttcacaacatcgaatctaagctgacgaggactaacggtattacctacgctagcgtggcattggcaacttctaaagccctcgttaagttcgacccagagattatcggcccaagagatatcataaaaatcattgaagagattggttttcatgcgagcctggcccaaaggaatcccaatgcccatcacctggaccataaaatggagatcaagcagtggaagaagtctttcctgtgctcactggtattcgggatcccagtgatggctctgatgatctatatgttgatcccatctaacgagccgcaccaatccatggtacttgatcacaacatcattcccggtttgtctatcctgaatctgatattcttcattctttgcacctttgttcagctccttggcggatggtacttctacgtgcaagcctacaagtcactgaggcacagaagtgcaaatatggacgtgttgattgttctggcgacgtctattgcctacgtttattcactcgtgattctggtggttgctgtggcagagaaagctgagcgcagtcccgtgacgttctttgatacacctcctatgctgttcgtctttatagctctggggagatggctggagcatttggcgaaaagcaaaacctccgaagcgttggctaaacttatgtcactgcaggctacggaggcaactgtcgtgaccttgggcgaggacaaccttattattcgagaagagcaggtgcctatggaattggttcagcgcggagatatagtgaaagtcgtaccgggcggcaagttcccggtggatggtaaagtgctggagggcaatacaatggccgacgagtctctgattactggcgaagctatgcctgtgactaagaagcccgggtctaccgtaatcgctggctctattaacgcccatggttctgtgcttattaaggccacacacgttggaaatgacaccacactggcgcagattgtgaaattggttgaggaggcccagatgtccaaagcccctattcagcagttggccgataggttctccggatactttgtccctttcattattataatgtcaacgctcactctcgtggtttggatcgtaatcgggtttatcgattttggcgtggttcagaggtacttccctaacccaaacaagcatatctctcaaactgaagtcattattcggtttgccttccagacctctataaccgtgctctgtatagcatgtccctgtagcctggggctggccaccccgacggcagtgatggtagggacgggagtggctgcccagaacggcattcttattaaagggggcaaaccacttgagatggctcacaagataaaaacagttatgttcgacaaaacagggaccattacccatggggtgcctcgcgtgatgcgcgtcctcctgttgggggacgtcgctacactgcctctccgaaaggtgctggctgtggtggggaccgcggaggcgtctagcgaacaccctctgggggttgccgtcaccaagtattgtaaagaagagctgggcactgaaaccctcgggtactgtacagatttccaagccgtgccaggatgtggcattgggtgtaaagtgtccaatgtcgaaggcatcctcgcgcacagcgagcgaccgctgtcagctccagcaagtcatctgaacgaggccggctccttgccagccgaaaaagacgccgtgccacagactttctcagttttgattgggaatcgagagtggttgaggcgcaatggcctcacaataagctctgatgtaagtgacgccatgacggatcatgagatgaaaggacagaccgctatccttgtcgcgattgacggggttttgtgcggaatgatagctatagccgatgcagttaaacaggaagccgctctggcagtccacacattgcagagcatgggtgtggacgtggtgcttataacaggggataataggaaaacagccagagccattgccacacaggtgggtatcaacaaagtcttcgcagaggtgctcccttcccacaaggtggctaaggtgcaggagctgcagaataagggaaagaaggtggcaatggtcggcgacggcgtcaatgattcaccagccctggcgcaggccgacatgggggtggccatcggtaccgggacggacgtggccatcgaggccgctgacgtcgttctcatcaggaatgatctgttggacgtcgtggcgtccatccacctgtccaagaggacagtcaggaggatccgcattaatttggtgctggcccttatatacaaccttgttggcatcccaatagccgcaggagtgtttatgccgatcggtatagtattgcagccctggatggggtcagccgcaatggcagcatcatccgtctccgtagtattgtcttccctgcaactgaaatgttacaaaaagcccgatctcgagagatatgaggctcaggcacacggccacatgaagcccctgacagcctcccaggtgagcgtccatatcggaatggatgatcgctggagagatagccctcgagctacgccatgggatcaggtgtcttacgttagccaggtgtcattgtccagcctcaccagcgacaagcccagcaggcatagtgctgccgccgacgatgatggggacaaatggtccctgttgctgaacggaagggatgaagagcagtacatc

SEQ ID NO: 7425 - DNA, 4395 bp, synthetic construct
  misc_feature 1..4395: note = source = /note="Description of Artificial Sequence: Synthetic coding sequence"
  source 1..4395: mol_type = other DNA
atgccggagcaggagagacagatcactgcacgagaaggcgcgtcacggaaaatcctgtccaagctgtccctgcctactagagcctgggagcctgcgatgaagaagagcttcgccttcgataatgtgggatacgagggagggctcgatgggctgggcccgtcatctcaagtggcgacctcaaccgtgcgcatcctgggcatgacgtgccagtcatgcgtgaagtcgatcgaggacagaatatcgaacctgaaagggattatctcgatgaaggtgtctctcgagcagggcagcgctacggtgaaatacgtcccaagcgtggtctgcttgcagcaggtgtgtcatcagatcggtgatatgggctttgaagcatccatcgccgaaggcaaagcagcctcatggccgtcccgcagcctgcccgcacaagaggctgtggtcaagctgcgggtggaaggcatgacgtgtcaatcatgcgtgtcctccattgaaggaaaggtccggaagctccaaggagtcgtgcgggtgaaggtgtcgctctctaaccaggaggcggttatcacctaccaaccgtacctgattcaaccggaagatctgagggatcacgtgaacgacatggggtttgaagcagctattaagtcaaaagtggctccactctcgctggggccgatcgatatcgaacggctgcagtcgacgaacccgaagcggccactgtcctcggccaaccagaatttcaacaattcggaaactttgggacaccaaggaagccatgtggtgactcttcaactcagaattgatggaatgcattgcaagtcgtgcgtcctcaatatcgaagagaatatcggacaactgctcggagtccagagcattcaggtatctttggagaacaagactgcacaggtcaagtacgatccgtcgtgcacctccccggtcgccctccaacgcgccatcgaagccctgccacctggtaactttaaggtttccctgcctgacggagccgaaggttccggaactgatcacagatcatctagctcgcatagccctggctccccgcctcggaaccaagtccaggggacctgcagcactactctcattgctattgcaggaatgacgtgcgcttcgtgcgtgcactccatcgagggtatgatctcacagctcgaaggagtgcagcagatttctgtgtcccttgcggagggcaccgcgactgtgctctacaacccgtcggttatttcgccggaagagctccgggccgctatcgaagatatgggatttgaagccagcgtggtttcagaatcgtgttcgaccaacccgcttggcaaccattcggcgggaaattcgatggtgcaaacgacggacggtactccgacttcggtgcaggaggtggctcctcacactggtaggctgccggccaaccatgcacctgacatcttggctaagtcgcctcagtcaactcgcgcagtggcgccgcaaaagtgtttcctgcagatcaagggcatgacctgtgcctcctgcgtgtcgaatatcgagcggaacctgcagaaagaggccggagttctgtcggtgctggtggcactcatggcaggaaaagccgaaatcaagtacgacccggaggtcatccagcccctcgagatcgcacaattcatccaagacctcgggttcgaagctgcagtgatggaagattacgctggatccgacggaaacatcgaactcacgattaccggtatgacctgcgcctcatgcgtgcacaacatcgaatcgaagctcacccggactaacggcatcacctacgctagcgtcgccctggcgacttcaaaggccctggtcaagttcgaccctgagatcatcggccctagggatatcattaagatcatcgaagagattggctttcacgcaagcctcgcgcaacggaatccaaatgcccaccatctggaccataagatggaaatcaagcagtggaagaagtcctttctctgctcgcttgtgttcggaatcccggtgatggccttgatgatctacatgcttatcccttcgaatgaaccgcatcagtccatggtgctggaccacaatatcatcccgggtctgtccattctgaacctcatctttttcatcctgtgcaccttcgtgcagctgttgggaggatggtacttctacgtgcaggcgtacaagtcactgcggcacagatctgctaacatggatgtcctgatcgtcctcgcgacttccatcgcttacgtgtactctctcgtgatcttggtggtagcggtcgcggaaaaagcggagcgctcgccagtgactttcttcgacactccgccaatgctcttcgttttcatcgcgctgggacgctggttggaacatctggcgaaaagcaaaacctcggaagcgctggccaaactgatgtcgctgcaagcaactgaagccaccgtcgtgacgctgggagaggataacctcatcatccgcgaagagcaggtgccgatggaactggtccaaagaggagacatcgtgaaagtggtgcccggaggaaagttccccgtggacggcaaggtcttggagggcaacactatggcagacgagtcgctgatcaccggtgaagccatgccggtgaccaagaagccggggtcgacggtgatcgccggctcaatcaacgcacacggatccgttctgatcaaggccactcatgtgggaaacgatacgaccttggcacaaatcgtcaagctcgtcgaggaagcacaaatgtccaaggcaccaatccagcagctcgccgatcgcttcagcggctacttcgtgccgttcatcattatcatgtccactctgactctggtggtgtggatcgtgattggcttcatcgatttcggagtggttcagcgctacttcccgaacccgaataaacacatctcgcagaccgaggtcatcatccggttcgccttccagacctcaatcaccgtgctgtgcatcgcgtgtccctgctcacttggcctcgctacgccgaccgccgtcatggtgggcaccggggtagcagcgcaaaatggcatcctcatcaagggcggaaaaccgttggagatggcgcacaagattaagaccgtcatgtttgacaaaactggcaccatcactcatggagtgcctcgggtgatgagggttctcctgctgggcgatgtcgcgactctccctcttagaaaggttctggccgtggtgggaaccgcagaagcgtccagcgaacatcctttgggagtggctgtgaccaagtactgcaaggaggaactcggaactgaaaccctgggctattgcaccgactttcaggcagtgccgggctgcggaattggttgcaaagtgagcaacgtggaaggaatcctggcgcactcggagcggccactgagtgctccggcatcccacctgaacgaagccggatccctcccggccgagaaggacgccgtgcctcaaactttcagcgtgctcatcggtaacagagagtggctgcgccggaacggccttacgatctcatccgacgtgtcagatgccatgaccgaccacgaaatgaagggccaaaccgcgatcttggtggcgatcgatggtgtgttgtgtgggatgatcgcgatcgccgatgcagtcaaacaagaagcagctctggccgtccatactctgcaatcgatgggcgtcgacgtcgtcctgatcaccggcgacaaccgcaagaccgcccgcgcaattgccacccaggtcggaatcaacaaggtctttgcagaggtgctcccatcgcacaaggtggccaaggtgcaggaacttcagaataaaggcaaaaaggtggccatggtgggagatggagtgaatgactccccggctctcgcccaggcagacatgggagtggccatcggaacggggactgacgtggctatcgaggcggcggacgtggtgctgatccgcaacgatttgctggacgtggtggcctcgatccacctctcgaagagaaccgtgcgcaggatccggatcaatctggttctcgcactcatctacaacttggtgggaatcccaatcgctgcgggcgtgttcatgcctatcggaattgttctgcaaccatggatgggctcggccgcaatggccgcctcgtcagtgtcagtcgtgctgtcaagcctgcaactgaaatgttacaagaagccggatttggagcgctacgaagcgcaggctcacggacatatgaagccactcaccgcttcgcaagtgtctgtgcatatcggcatggacgacaggtggcgggatagcccgagagcgaccccgtgggatcaagtctcctacgtgtcccaagtctccctttcatcccttacttcggacaagccctcgaggcattcggctgcggccgacgacgacggggacaaatggagcctcctgctgaacggacgggatgaagagcaatacatt

SEQ ID NO: 7426 - DNA, 4395 bp, synthetic construct
  misc_feature 1..4395: note = source = /note="Description of Artificial Sequence: Synthetic coding sequence"
  source 1..4395: mol_type = other DNA
atgccggaacaagagcgccaaatcaccgcccgcgagggcgcatcccgcaagatcctgtcgaagctgtcgctgcctacgcgcgcctgggaacccgccatgaaaaagtcgttcgcctttgacaacgtgggctacgagggcggcctggatggattgggaccgtctagccaagtcgccacttcgactgtcagaatcctcggaatgacctgccagtcgtgcgtgaaatccatagaggatcgaataagcaacttgaagggaatcatctcgatgaaggtgtcattggaacagggatccgcgaccgtgaagtacgtgccgtcagtcgtctgcctgcaacaggtttgccatcagatcggggacatgggctttgaggcgagcatcgcggaaggcaaggccgcctcgtggccaagccgctccctgccggcacaggaagccgtcgtgaagctccgggtcgagggcatgacctgccaatcgtgcgtctcgtcaatcgaagggaaggtgcggaagctccagggagtggtgcgcgtgaaagtgtcactgtcgaaccaagaggcggttatcacttaccaaccctaccttatccagccagaagatctgagggatcacgtcaacgatatgggatttgaggccgcgatcaagagcaaggtcgcccctctctcgcttggaccgatcgacatcgaacggctccagagcaccaacccgaaacgccccctctcctcggccaaccagaactttaacaactcagagactctgggccaccaaggatcccacgtggtcaccctgcaacttagaatcgatggaatgcactgcaagagctgcgtgctcaatatcgaggagaatatcggtcagctccttggagtccaatcgatccaggtttcactggagaacaagaccgcccaggtcaaatatgacccgagctgcacctcaccggtcgctctgcagcgggcgatagaagccctgccaccaggcaactttaaagtgtccctcccggacggggccgagggatcaggaactgaccaccggagctcgtcctcgcactctccgggaagcccaccgcggaaccaggtgcaggggacttgctcgaccaccctgatcgctatcgcagggatgacgtgcgcatcgtgcgtgcactcgattgagggaatgatttcacaactggaaggagtccaacagatcagcgtgtcgctcgcggaggggacggcgaccgttctttacaatccatccgtcatctccccggaggaacttagagctgccatcgaagatatgggattcgaggcgtcggtggtgtcggagtcatgctcaactaatccgctgggcaatcattctgcgggtaactccatggtgcaaaccaccgacggaacccccacctctgtgcaggaggtggccccgcacactggaagattgccggcaaaccacgcccctgacatcctggcgaagtcaccgcagagcacccgcgcagtggcgccgcagaaatgcttccttcagataaaaggcatgacgtgtgccagctgcgtgagcaacatcgagcggaatctccaaaaagaggcaggcgtgctgtctgtcctggtcgcactgatggcggggaaggcggaaatcaagtacgacccggaggttattcagccgttggagatcgctcagtttatccaggatctgggctttgaagcggctgtcatggaagattacgcaggctccgatggcaacatagaactgaccatcactggtatgacttgtgctagttgcgtccacaacattgaatccaaactgactaggactaacggaatcacttacgctagcgtggccctcgccacctccaaggcactggtgaagttcgacccggagattattgggccacgcgacattatcaagatcattgaagaaatcgggttccacgcttcgctggctcagagaaatccaaatgcgcatcacctggaccataagatggaaatcaaacagtggaagaagtccttcctttgctcactcgtgttcggaatccctgtgatggcgctgatgatctacatgttgatcccatcgaacgaaccgcaccagtcgatggtcctggaccacaacattatcccaggattgtccattctgaatctcatcttcttcatcttgtgcactttcgtgcagctgctgggtggttggtacttctacgtgcaggcctacaaatcgctccggcatcggtccgcaaacatggatgtcctgattgtgctggctacctcgatcgcttacgtctactcactggtgatcctggtggtggcggtggccgagaaggccgaaagatcccccgtgacttttttcgatactccgccgatgctcttcgtgttcatcgctctgggacgctggctcgaacatttggctaagagcaaaacctccgaagcgttggcgaagttgatgtccctgcaggctaccgaagccaccgtggtgactctgggcgaggacaacctgatcatccgagaggaacaagtgcctatggaactggtgcagaggggagatatcgtgaaggtcgtgccgggaggcaaattcccggtggatggaaaggtccttgagggaaacactatggctgatgagtcgctgatcactggagaggccatgccagtgactaagaagcctggaagcactgtgatcgccggttccatcaatgcccacggatcggtgctcattaaagctactcacgttggaaatgataccaccctcgcccagatcgtgaagctcgtcgaagaggcgcaaatgtcgaaagcgccgatccagcaactggcagatcgcttctcgggatacttcgtgccgttcatcatcattatgtcaaccctgactttggtggtgtggatcgtgatcggattcattgacttcggcgtggtgcagcggtacttccctaacccgaacaagcacatttcacagaccgaggtcatcattaggttcgcgttccagacctcgatcaccgtgctctgcatcgcctgtccatgttccctggggctggcgactccaactgcggtcatggtaggaaccggcgtggctgcacaaaacggaattctgatcaagggcggaaaaccgctggaaatggcgcacaagatcaaaaccgtcatgttcgataagactggaactatcacgcatggcgtgccccgcgtcatgagggtcttgctgctgggcgacgtggcaactctcccactgcggaaggtcctggccgtggtgggaactgccgaagccagcagcgaacatccgttgggagtggccgtgaccaagtattgtaaggaggaactgggaaccgaaacgctgggctactgcaccgattttcaggcggtcccggggtgtggaatcggatgcaaggtgtcgaacgtcgaaggcattctggctcattccgaacgccctctctcggcgcctgcctcacatctcaacgaagcaggctccttgccggccgagaaggatgcggttccgcagaccttttcggtgctgatcggaaaccgggaatggctgcggagaaatggactgaccatcagctccgacgtctcggacgcgatgaccgatcatgaaatgaagggccagaccgcgattctcgtcgcgatagacggagtgctgtgtggaatgatcgcgattgcggatgcagtgaagcaggaagctgccctggccgtgcatactctccaatccatgggagtcgatgtcgtgctgatcaccggagataataggaaaactgcaagagccatcgcgacgcaggttggaatcaacaaggtctttgcagaggtgctgcccagtcacaaggtggcaaaagtgcaagaactgcaaaacaagggaaagaaggtggcaatggtgggtgacggcgtgaatgactcgcctgccctggcccaagccgacatgggggtggcgatcggcactggaactgatgtggcgatcgaagccgctgatgtggtgctgatcagaaacgacctgctcgatgtggtggcttccatccacctcagcaagcggaccgtccggcgcatcagaatcaatcttgtgctcgccctgatctacaacctggtgggcatcccaatcgcggccggagtgttcatgccgatcggaatcgtgctgcagccgtggatgggttcagcagcaatggctgcttcatcggtgtcagtcgtcctgtcctcactgcagctgaaatgctacaagaagcctgacctggagcggtacgaagcccaggcccatggtcacatgaagccactgaccgcctcccaagtgagcgtgcacattggaatggacgacaggtggcgggattcgccacgggctactccatgggatcaggtcagctacgtgtcgcaggtgtccctgagctccctcacctcagataagccatcccggcactcggcagcggcagatgacgatggagacaagtggagcctcctgctcaacggacgcgacgaagagcagtacatc

SEQ ID NO: 7427 - DNA, 4395 bp, synthetic construct
  misc_feature 1..4395: note = source = /note="Description of Artificial Sequence: Synthetic coding sequence"
  source 1..4395: mol_type = other DNA
atgcctgagcaagagaggcagatcacggcccgggagggggccagccggaagattctctctaaacttagtctgccgactcgggcgtgggaaccagccatgaagaagtcattcgctttcgacaatgtcggatacgaaggaggcctggatggtctgggaccgtcctctcaggtcgccacctcgacggtgcgcatcctggggatgacctgccaaagctgtgtcaaatccatcgaggatcggatcagcaatttgaagggaatcatcagcatgaaggtgtcacttgagcagggctccgcgaccgtcaagtacgtcccatccgtggtctgcctccaacaggtgtgtcaccagatcggagacatgggattcgaggcctcaattgcggagggcaaggccgccagctggccaagcagatccctcccagcgcaagaagctgttgtgaaactccgcgtggagggcatgacttgccagtcgtgcgtctcctcgatcgaaggaaaggtccggaagctccagggggttgtgcgcgtgaaggtgagcttgtccaaccaagaagccgtcatcacctaccagccatacctcatccagcctgaagatctgagagatcatgtgaacgacatgggctttgaggccgctatcaagtcaaaggtcgccccactgtcgctgggaccaattgatatcgaaagactgcagtcaactaaccccaaacgcccgcttagctccgccaatcaaaacttcaacaactcggaaactctgggccaccaaggctcccacgtcgtgactctgcagctccggatcgatggaatgcattgtaaatcctgcgttctcaacatcgaggagaatatcggtcagctgctcggcgtgcaatcgatccaggtcagccttgagaacaaaaccgcacaagtgaaatacgacccgtcctgcacttcaccagtcgcactgcagcgagcaatcgaggcgctcccgccgggaaacttcaaagtctcactcccagatggggccgaaggatccggtacggaccataggagcagctcgtcgcactccccggggtcgcccccgcggaaccaagtgcaaggaacttgttccactaccctcatcgcgatagccggaatgacctgcgcatcctgcgtccattcaatcgaaggaatgatctcgcaactcgaaggagttcaacagatcagtgtgtcgttggcggagggaaccgctaccgtgctgtacaatccatccgtgatcagcccggaagagctccgggccgccattgaagatatgggattcgaagcctcggttgtgtcagaatcctgcagcaccaaccccctgggaaaccactccgccggcaactccatggtccaaactaccgacggcacccccacctcggtgcaggaagtagccccgcacacggggcgcctgcccgccaatcatgcaccggacatcctggcgaaatcaccgcagtcgacccgcgcggtggcgccgcagaagtgcttcctccagatcaagggaatgacctgtgctagctgcgtgagcaacatcgagcggaatctgcagaaggaggccggagtgctctccgtgctcgtggcattgatggctggaaaggcagaaatcaaatacgaccctgaagtgattcaaccactggaaatcgcgcaattcatccaggacctggggttcgaggctgctgtcatggaggactacgcggggtcggatggaaatatcgaactgaccattaccggaatgacttgcgcttcatgtgttcacaacatcgaaagtaaactgactcggactaacggaatcacctatgctagcgtcgctctcgccacgagcaaggctcttgtgaagttcgacccggagatcatcggaccaagggacatcatcaagattatcgaggaaatcggctttcatgcgtcactggcccaacgcaacccgaacgctcaccacctggaccataagatggagatcaagcaatggaagaagtcgtttctctgtagcctcgtgtttggtatccccgtgatggcactcatgatctacatgcttattccgtcgaatgaaccgcaccagtcaatggtcctcgatcacaatatcatccccggcctgagcatcctgaatctcatcttcttcatcctgtgcacttttgtgcagctcctcggaggttggtatttctacgtgcaggcgtacaagtcgctgagacacaggtctgcgaacatggacgtactgatcgtgcttgccaccagcatcgcatacgtctactcactggtcattctggtggtcgctgtggcggaaaaggccgagagatcgcctgtgactttctttgacactcctcctatgttgtttgtgttcattgctctgggtcgctggctcgagcacctggctaaatcaaagacttcagaagccctggccaaactgatgtcgctgcaggcgactgaggccaccgtcgtcactctgggagaggacaacctgattatacgggaagaacaagtgcctatggaactggtgcaacgaggcgacatcgtgaaggtcgtgcctgggggaaagttcccggtggacggaaaggtcctggaaggaaacaccatggccgacgagtccctgattactggcgaggcaatgccggtgactaagaagccgggatcgactgtcatcgctggatccattaatgctcatgggagcgtcctgatcaaagccactcacgtcggtaatgacactaccctggctcagattgtgaagctcgtggaagaagcacaaatgtcgaaggcgcctatccagcagcttgctgacagattttcaggctacttcgtgccgttcatcatcatcatgtcgaccttgacccttgtagtgtggatcgtgatcggattcatcgacttcggagtcgtccagcgttacttcccgaatccgaacaagcacatcagccagaccgaagtgatcattcggttcgcgttccaaacctcaatcacggtgctgtgcatcgcatgcccgtgctcgctcggccttgcgacccctacggccgtgatggtgggaaccggggtagcggcccagaatgggatactgatcaagggcggtaagccgctggaaatggcccataagataaagaccgtgatgttcgataaaaccggcaccatcactcacggagtgccgcgcgtgatgcgcgtgctgctgcttggagacgtggctaccctcccactgaggaaggtgctggcggtggttgggactgcagaagcatcctccgagcaccccctgggcgtcgccgtgaccaagtactgcaaggaagaactgggaaccgagactctgggatactgcactgatttccaagcagtgccgggctgcggcatcggttgcaaggtgtccaacgtggaaggaatccttgcacactccgaaagacctctgtcagcacctgcctcacatcttaacgaagccggatcactgcccgccgagaaggacgccgtgccacagaccttttccgtgctgatcggcaatcgcgagtggctgcgccgcaatggtcttactatttcgtccgacgtatctgatgccatgactgatcacgagatgaaggggcagaccgccatcctcgttgccatcgatggagtcttgtgcggaatgatcgcgatcgcggatgcagtgaagcaggaagcagcactggccgtgcatacgttgcaaagcatgggagtcgatgtcgtgctgatcaccggagataatcgcaagaccgcccgcgctatcgcgactcaggtgggaatcaacaaggtgtttgccgaggtcttgccatcccacaaggtggcgaaagtgcaggaactccagaacaaggggaaaaaagtggcgatggtgggcgacggcgtcaacgactcgccagccttggcccaggccgacatgggtgtggccattggaactggtactgacgtggccatcgaggctgcggacgtcgtgttgattaggaacgacttgctggatgtagtagcgagtattcatctttcgaaaagaaccgttcggcgcatccggattaacctggtgctggccctcatctacaacctcgtaggaatcccgatcgcagcgggagtgttcatgccaatcggcatcgtcttgcaaccttggatgggttcagcggcaatggcagcctcatctgtctccgtggtgctgtccagccttcagctcaagtgttacaaaaaaccagatctggaacggtatgaagcgcaggcacacggccatatgaaaccgctcaccgcttcgcaagtttcggtgcatatcggcatggacgaccgatggcgcgactcgcctagagcaacgccatgggaccaggtgtcctacgtgtctcaggtgtcgttgtcgagcctcacgagtgataagccgtctcgtcactccgccgcagccgacgatgatggggacaaatggtcactgctgctcaacggtagagatgaggaacagtacatt

SEQ ID NO: 7428 - DNA, 4395 bp, synthetic construct
  misc_feature 1..4395: note = source = /note="Description of Artificial Sequence: Synthetic coding sequence"
  source 1..4395: mol_type = other DNA
atgcccgagcaggaacggcaaatcaccgccagggaaggggccagtcgtaagatcctaagtaaactaagcttgccaacccgcgcttgggagcctgcgatgaaaaagagctttgccttcgacaacgtgggatatgagggcggcttggacggacttggaccaagcagccaggttgctaccagcaccgttaggatattgggaatgacttgccaatcatgcgttaaaagcatcgaagacaggatttctaatctaaaggggattatctcgatgaaggtctcactggaacaggggtctgctactgtgaaatatgtcccgtctgtggtctgcctgcaacaggtttgtcatcagataggggacatgggcttcgaagcatccatcgcagagggaaaggctgcttcttggccaagtcggtctctgccggctcaagaagcagtcgtgaaactgcgggtggagggcatgacttgtcagagctgcgtgagttctattgaaggcaaggtgcgcaaactgcaaggcgtggtgagggttaaggtgtccctgtctaatcaggaggctgtgatcacctaccagccatatctgattcaacccgaagatctgcgcgatcatgtaaatgatatgggattcgaagccgctatcaaatcgaaggtggcgcctttgtcccttggccctatcgacatcgagcgactacagtccactaacccaaaacggccactcagttctgctaatcagaacttcaataattcagaaacattggggcaccaaggcagccacgtcgtaacgttgcagcttcgcattgacggtatgcattgtaagagctgtgtcttaaatatcgaagagaacatcggccaactcctgggtgtgcagagtattcaggtctccctcgagaacaagacagcccaggttaaatatgacccctcctgcactagccctgtcgcgctacagcgggctatagaggctctccccccagggaactttaaggtttctctgcccgacggcgctgaaggctctgggacggaccatcgctcttcatcttcacatagccctggatctccccctagaaatcaggtccaggggacttgtagtactactttgatcgctatagctggaatgacctgtgcatcttgtgtccactccattgaggggatgatctctcagctggagggcgtgcagcagattagcgtctctctagcagagggaacagcgacggttctgtataaccccagcgtgatcagcccggaggaactgagagcagctatcgaggacatgggctttgaggcttctgtggtgagtgagtcatgttccaccaatccactgggcaaccattccgctgggaatagtatggtccaaacaaccgacggaacaccaacaagcgtgcaggaagtggcccctcatacaggccgacttcctgctaatcacgcaccagatatcctcgcgaagagtccacagtctacacgggcagttgccccccagaagtgttttctgcagataaaagggatgacctgcgcgtcatgcgtgagcaatatcgagcggaacctgcaaaaagaggcaggagtactgagcgtgttagtggcactgatggcaggtaaggcagagatcaagtatgatcccgaagtgatccagcccctcgaaatcgcccagtttattcaagacctcggctttgaagccgcggtaatggaggactacgccgggtccgacggaaatatcgagctgacaatcaccggcatgacttgtgcctcctgtgtgcataacatagaaagtaaactgacacgtactaacgggataacctatgcgtccgtggctctagcaacaagcaaagctctggtgaagtttgatccagaaatcatcggaccgagggatataataaagattattgaggagattggattccacgcaagtttagcacagcggaacccaaacgcacaccacctagatcacaagatggagatcaagcaatggaagaagtccttcctctgttctcttgtcttcggcattcccgtgatggctctcatgatatacatgttgatcccgagcaacgagccccaccaatccatggtccttgaccacaacatcattccgggcctcagcatcctcaacctcatattcttcattctgtgcacctttgtgcagcttctaggtggatggtatttctacgtgcaggcttataaatccctgcgtcaccgctctgcgaatatggatgtgctgatcgtgttggccacctctatagcctatgtctatagtctggttatccttgtcgtggccgttgctgaaaaagcggagcgctcacccgtcactttcttcgatacacctcccatgctgtttgtgttcatagcattgggccgttggctggagcacctagcaaaatccaaaaccagcgaagctttggcaaagctgatgagcctgcaagctacagaagcaaccgttgttactctcggcgaggataacctaatcatcagggaggaacaggtaccaatggagctggttcaaaggggtgatatagttaaggtggttccgggcgggaagtttcccgtggatgggaaagtgctggaaggtaacaccatggccgacgagagtttgatcaccggggaggctatgcccgttacaaagaagccgggaagcacagtcatcgctgggagcatcaacgctcatggtagtgttctgattaaggctactcacgtcggcaatgacaccacgcttgctcagatcgtgaaactcgtcgaggaagcccaaatgtcgaaagccccaatccagcagctggctgacaggtttagcggatacttcgtcccatttatcataatcatgtctacattaacactcgtggtttggatcgtgattggctttatcgacttcggggttgtacaaaggtattttcccaaccctaataagcatatatcccaaaccgaggttatcatcaggtttgctttccaaacttcaatcaccgtcttatgtatcgcctgcccatgttcactcggactagccacaccaacagctgtgatggttgggacgggggttgcagcccaaaatggtatcctgatcaaaggcggcaaaccactcgagatggcacataagatcaaaactgtgatgttcgataaaacaggcacgatcacccacggcgtgcctcgcgtaatgagagtattgctgctgggcgacgtggccactctccctttgaggaaagtgctagccgttgtgggtaccgcggaggcttcatctgaacaccccctcggggtggctgttaccaaatactgcaaagaggagctcggtaccgagaccttaggctactgtacagattttcaggccgttcccggttgcggaatcggctgcaaggttagcaatgtagaggggatcctggcccatagcgagcgtcccttgtctgctccagcctctcatctgaatgaggctggcagtctgccagctgagaaagacgctgtgccccaaacctttagcgtgctcattggcaatcgagagtggctgcgccggaacgggcttactattagctccgacgtgagcgacgcaatgacggaccatgaaatgaagggccagacggcaattctcgttgccattgatggggttctgtgcggcatgattgccatagccgacgctgtgaaacaggaagccgctcttgccgttcacaccttgcagagcatgggggtcgatgtagtgttgatcacaggagacaatcgcaagactgcacgggccattgccacccaggtgggaatcaacaaggtctttgccgaagtcctgccctcacataaggtggccaaggtccaggagctccagaataagggcaagaaggtggccatggtgggcgatggcgtaaatgatagtcctgccttggctcaggctgatatgggtgtagctatcggcacgggcaccgatgtggcaatcgaagcagccgatgtcgttttgatccgaaatgacttactggacgtggttgcaagcatccacctgtctaaacgaacagtaaggagaatccgaataaatctggtacttgccctcatttataatctagtgggtattcctatcgcagcgggcgtttttatgcccattggaatcgtcctgcagccttggatgggctctgctgcaatggctgcatcttccgttagcgtagtgttgtcatccctacagctgaagtgctataagaaacccgacttggaaagatacgaggcacaagcccatgggcatatgaaaccgctcacagcaagccaggtcagtgttcacattgggatggacgataggtggagagactccccaagggcaactccatgggatcaggtctcttacgtttcccaggtaagcctcagctccctgacttcggacaagcccagtcggcacagtgccgcggctgatgatgacggggacaaatggtcgcttctgctcaacgggcgtgacgaagagcagtatatc

SEQ ID NO: 7429 - DNA, 4395 bp, synthetic construct
  misc_feature 1..4395: note = source = /note="Description of Artificial Sequence: Synthetic coding sequence"
  source 1..4395: mol_type = other DNA
atgccagaacaggaacggcaaattaccgcgagagaaggggcatcgcgcaagattctgagcaaactttcccttcctaccagagcctgggagccagcgatgaaaaagagctttgcattcgacaacgtggggtacgaaggtggacttgatgggctgggcccttcctcccaagtggcgacctccaccgtgcgcattcttggcatgacttgtcaaagctgtgtcaagtcgattgaagatcggatctcaaacctgaagggaattatctcaatgaaagtgagcctcgagcaaggatccgccaccgtgaagtacgtacctagcgtcgtgtgcctgcaacaggtgtgtcatcagattggtgacatgggttttgaggcatcaattgccgaaggtaaggctgcatcgtggccatcccgctctctgcccgcacaggaggcggtggtgaagctccgagtcgagggaatgacgtgtcaatcatgcgtgtcatccattgagggaaaagtgagaaagctccaaggtgtcgtcagggtcaaggtgtcacttagcaatcaggaggccgtgatcacctaccaaccatacctgattcaaccggaagatcttagagatcacgtgaatgacatgggctttgaagcagcaattaagagcaaggtcgcaccgctgagcttgggtcctatcgacatagagcgcctccaatcaacgaatcctaagcggcccctcagctctgcgaaccagaatttcaacaactccgaaacccttggtcaccagggttctcatgtcgtgaccctgcagcttagaatagacggcatgcattgcaagtcgtgtgtactgaacatagaagaaaacattggacagctgctcggagtgcaatcgatccaagtgtcacttgaaaacaagactgcccaagtgaagtacgatccaagctgtacctcccctgtggcgcttcagcgagcaattgaagctctcccccctggtaatttcaaggtcagccttcctgacggcgcagaaggaagcggcactgatcatcgctcgtcctcgtcgcatagcccagggtcgcctcctcgaaaccaagtgcagggaacctgttcgaccacccttatagctatcgcgggaatgacttgtgcttcgtgtgtgcattcgattgaaggcatgatcagccagcttgaaggagtccagcagatctccgtctcacttgcggaggggactgcaactgtcctttacaacccttcagtgatatctcctgaagaacttcgggcagcaatcgaagatatgggattcgaagcgtcggtcgtgtcagaaagctgctccactaatcctttgggtaatcactcggccggaaactcaatggtccaaaccacggatggtaccccaacttcagtccaggaggtggcaccacacaccggtcgtctgcccgcaaaccacgcccctgatatccttgcaaagtccccccaaagcactcgcgccgtggcaccacagaagtgctttctccagattaagggcatgacctgtgccagctgtgtcagcaacatcgaacggaatcttcagaaagaagcgggcgtgctttcggtcctcgtggcgcttatggcagggaaggctgagataaagtacgatcccgaagtaattcaaccccttgaaattgcgcagttcattcaggatctgggtttcgaagcagctgtgatggaagattacgccggatcagatgggaacattgaacttacgataactgggatgacctgtgcgtcatgcgtgcacaatatagagagcaagctgactcgcaccaacggaatcacttacgcatccgtggcccttgccacctccaaggcactcgtgaagttcgatcccgagattatagggcctagagacataatcaagatcatcgaggagatcggttttcatgcatcactggcacaaagaaatcctaatgcccaccatctggaccacaaaatggagataaagcagtggaagaagagttttctgtgctcacttgtttttggtattccggtcatggcattgatgatctacatgctgataccgtccaatgaaccgcatcaatccatggtgctcgaccacaacatcattccaggtctttcgatactgaacctcattttctttatcctgtgcacttttgtccagctgcttggcggctggtacttttacgtccaggcctacaagtctctgcggcatcgttcagccaacatggatgtgcttattgtgttggccacctccattgcatatgtgtactccctcgttatcctcgtcgttgcagtcgcggagaaagcagaaagaagccctgtgacgttttttgataccccgcccatgttgtttgtgtttatcgcactcggcaggtggcttgaacatctggcaaaatccaaaacctctgaagcgctggcaaagctgatgtccctccaagcgaccgaagccaccgtggtcactctgggggaggacaacctcattatccgagaagagcaagtccctatggaacttgtgcagcgcggggatatcgtgaaggtagtgcccggaggaaaattccccgtggacggaaaggtgcttgaaggaaacactatggcagacgaatcgcttattactggtgaggccatgcctgtgactaaaaagcctgggtccaccgtcattgcaggctcaattaacgcccatggatccgtgttgattaaggctacccatgtaggaaacgataccactcttgcacaaattgtgaaacttgtcgaggaggcacaaatgtctaaggctcctatacagcaactcgctgatcgcttttcgggatacttcgtgccttttatcatcattatgagcaccctgaccctcgtagtttggattgtgattgggtttattgatttcggagtcgtgcaacgatactttccaaatccaaacaagcatatctcgcaaaccgaagtgataatcaggtttgcatttcaaacctccattactgtcctttgcattgcatgtccctgttcgttgggtcttgctactccaactgccgtgatggtgggtacgggggttgcggcacaaaacggaatactgattaaaggaggcaagccactcgagatggcacataagattaagacggtgatgtttgataaaaccgggaccataactcacggtgtgcctcgagtgatgagagtgctgctgctgggcgatgtggccaccctccccctccgaaaggtgttggcagtggtgggaactgcggaggcatcatccgaacatcctcttggggtggcagtgacgaagtattgtaaagaagaactgggaactgaaaccttgggatactgcactgattttcaagccgttcctggttgtggaatcggttgtaaggtgtccaacgtggaaggaattctggcgcacagtgaacgtccactgtcggcacctgcatcgcatttgaatgaagcaggctcacttccggcagaaaaggatgctgtgccacaaactttctcggtcctcatcggaaatagggagtggctccggaggaacggcctgactatttcgtccgatgtttcggacgcaatgactgaccacgaaatgaagggtcagactgcaattcttgtcgccatcgacggggtcctttgcggcatgatcgcaattgcagatgcagttaaacaagaagccgcactggcggtccataccctgcagtcgatgggagtggatgttgtgctgataaccggagataatagaaaaactgccagagcgatagccactcaggtgggcattaacaaagtgttcgcagaggtcctcccttcacataaggtggctaaagtgcaagaactgcagaataagggtaagaaggtggcaatggtaggggacggcgtgaacgattcgccggcccttgcacaggcagacatgggagttgccatcgggaccggaacggacgtggccattgaagccgcagacgtggttttgatccggaacgatttgctggatgtggtcgcatccatacacttgtcgaagaggaccgtcagaagaattagaatcaacctggttctcgccctgatctataacctcgtgggcattccaatagcagcaggtgtgttcatgccgatcggtattgtcctccaaccatggatggggtcggcggcgatggcagcttcgagtgtgtctgtggtcctgagctccctccaactcaaatgttacaaaaagccggacctggaacggtacgaggcacaagctcacggtcatatgaaaccactcactgcatcccaagtctctgtgcatattggcatggatgatcgttggcgcgactcgccgcgggctaccccgtgggatcaggtgtcgtacgtgtcgcaggtgtcgctttcttcccttacttccgacaagcctagcaggcatagcgctgcggcagatgacgacggcgataagtggtcactgctgttgaatggtcgtgatgaggaacaatacatt

SEQ ID NO: 7430 - DNA, 4395 bp, synthetic construct
  misc_feature 1..4395: note = source = /note="Description of Artificial Sequence: Synthetic coding sequence"
  source 1..4395: mol_type = other DNA
atgccggaacaagaacggcaaatcaccgcaagggagggggcctcgaggaagatactgtcaaaactgtcgctgccgactcgcgcatgggaaccagcgatgaaaaagagctttgcattcgataatgtcggatacgagggcggactggatggactgggtccgtcatcacaggttgccactagcacggtcaggatcctcggaatgacttgccaaagctgcgtgaagtcaatcgaggacagaatctcgaacctgaagggcatcatctcgatgaaggtgtcccttgaacagggatctgccaccgtgaagtacgtgccttctgtggtctgcctgcaacaggtgtgccaccagattggagacatgggtttcgaagcgtccatagcagaaggtaaagcagcctcctggccatctcgaagcctcccggcccaagaggccgtggtcaagctgcgcgtagagggaatgacgtgtcaatcatgcgtctcatccatcgagggcaaagtgcgaaaactgcagggcgtcgtgcgcgtcaaagtgagcttgtctaaccaggaggctgtgatcacctaccagccgtacctcatccagccggaagatctgagagatcacgttaatgacatgggattcgaggcggcgatcaaatccaaggtggccccgctgtcactgggccccatcgatatcgaacgcctccagtccactaacccgaagcgcccgctgtcctccgcaaatcagaatttcaataactccgaaaccctcggccaccaaggatcccatgtggtcaccctgcagcttcgcatagatggcatgcactgcaaatcctgcgtcctcaacatcgaagagaatatcgggcagctcctgggagtgcagtcgatccaggtgtctctggaaaacaaaaccgcccaggtcaagtacgacccgtcctgcacctcgcccgtcgctttgcagagagccattgaggcgctcccaccaggaaactttaaagtgtcacttcccgatggagctgaagggtcgggaaccgatcaccgcagcagctcaagccactcccctggctcacccccacggaaccaagtgcaaggaacttgctcaactaccctcatcgcgatcgctgggatgacctgcgcaagctgcgtgcactccatcgagggtatgatcagccagctcgagggagtgcagcagatctcagtgtcactcgcggagggaaccgccactgtcctgtacaatccatcagtcatctcgccggaggagctgcgtgctgcaattgaggacatgggcttcgaggcttccgtggtatccgagtcttgctcgaccaacccgcttggaaaccactctgcgggtaactcgatggtgcagactacggacggaactccgacctcggtccaagaagtggcgccgcacaccgggaggctgccggcgaaccatgccccggacattcttgccaagtccccacagtcaacccgggccgtggccccgcaaaaatgcttcctgcagattaaggggatgacttgcgcgtcgtgtgtctcgaatatcgaaagaaatctgcagaaggaagcaggagtcctctctgtcctcgtcgccctgatggcgggaaaggccgaaatcaagtatgatccagaggtgatccagcccttggaaatcgctcagttcatccaggacctgggatttgaagcggccgtgatggaggactacgcgggatccgatggtaacatcgagctcactatcaccggtatgacctgtgcctcatgcgtgcacaatattgagtcgaaactcactagaaccaacggcatcacttacgcctcagtggccctggcgacctccaaggcactcgtgaagtttgatcccgagatcatcggcccgcgcgacattatcaagattatcgaggagattgggtttcacgcctcgctggcgcagagaaatccgaacgcccaccatctggatcacaagatggaaatcaagcagtggaagaagagcttcttgtgttccctggtgttcggaatcccggtgatggccctgatgatctacatgctcatcccgtccaatgaaccccatcagtcaatggtgctggaccataacattatcccgggcctgagcatcctgaacctgatcttcttcattctgtgcacctttgtgcaacttctcggcggctggtacttctatgtgcaggcttacaagtctctgcgccaccgcagcgcaaacatggacgtgctcattgtgttggcaacctcaatcgcgtacgtgtacagcctcgtgatcctggtggtcgccgtggcagagaaggctgaacgtagccctgtgaccttcttcgacacccctcccatgctcttcgtgtttatcgctttgggacgctggctggagcacctggccaaatcaaagacttcagaggctctggcgaagctcatgtcgctgcaggcgacggaggccactgtggtgaccctcggagaagataaccttatcatccgggaagagcaggtcccaatggaactcgtgcaacggggagatatcgtgaaggtcgtgccgggcggaaagtttcctgtcgatggtaaggtgctcgaaggcaacaccatggctgatgagagcctgatcaccggggaagctatgccagtgaccaagaagcccggtagcaccgtgatcgccgggtcgatcaacgcgcatgggtccgtccttatcaaagcgactcacgtgggaaatgacactactttggcgcagatcgtgaagctcgtcgaagaagcccagatgtctaaggctccgatccaacagttggcagaccggttttccggatacttcgtgcctttcatcattatcatgtcaaccctcaccctcgtggtgtggatcgtgatcggcttcatcgacttcggcgtggtccagcgctacttccctaatccgaacaaacatatttcccagaccgaggtcatcatcaggtttgctttccagacctcgatcactgtgctctgcatcgcgtgtccttgctccctcggactggccaccccgaccgcggtaatggtgggcactggggtcgcggcacagaatggcatcctgatcaagggaggaaagcctcttgaaatggcacacaaaatcaagaccgtgatgttcgataaaaccggaactatcacccacggcgtgccacgggtgatgcgggtgctcctgctgggagacgttgccacgcttccactgcgcaaggtcctggcagttgtgggaactgccgaagcctcgagcgaacacccgctgggagtggctgtgaccaagtattgcaaagaggaactgggaaccgagactctgggctactgcaccgatttccaggctgtgccgggttgcggaatcggatgcaaggtgagcaatgtcgaaggcatcctggctcattccgaacgccccctcagcgccccagcctcacacctgaacgaagccgggtcccttccggctgagaaggacgccgtcccccagacgttcagcgtgctgattggtaaccgagaatggctgcggcgtaatgggctcactatctcgtcggatgtttcagacgccatgactgaccatgaaatgaagggccaaacggcgattctcgtggcaattgacggcgtgctgtgcggcatgatcgcaatcgcggacgccgtgaagcaggaagccgcgctcgcagtgcacaccttgcagtccatgggagtggacgtcgtgctgatcaccggtgacaatcgcaagactgcgcgcgcaatcgcgactcaggtcggaattaacaaagtgtttgcggaggtcctgccatcacacaaagtcgcaaaggtccaagagctgcaaaacaaggggaagaaagttgcaatggtgggagatggcgtgaatgactcgcctgctctggcgcaagcagacatgggagtggcgatcggcactggtaccgacgtggcaatcgaagcggcggatgtcgtgctgattaggaacgacctcttggacgtggtggcctcgatccacctctcgaaacgcactgtccggcgcatcagaatcaatttggtacttgccctcatctacaacctggtgggaatcccaatcgccgctggggtgttcatgcctatcgggatcgtcctccagccgtggatgggctcggcggccatggctgcgagcagcgtctcggtggtgctgagcagcctgcaactgaagtgctataagaagcctgacctggaaagatatgaagcccaagcgcacggacatatgaaaccactgactgccagccaggtgtccgtccacatcggcatggacgaccgctggcgggactccccgcgggctaccccctgggaccaagtgtcctacgtctcccaagtgtcgctgtcgagcttgacctccgacaagccgtcgcggcactcagcggcagcggacgacgacggtgacaagtggtcccttctgctgaacggaagggacgaagaacagtacatc

SEQ ID NO: 7431 - DNA, 4395 bp, synthetic construct
  misc_feature 1..4395: note = source = /note="Description of Artificial Sequence: Synthetic coding sequence"
  source 1..4395: mol_type = other DNA
atgcctgagcaagagcggcagataacagctcgtgagggagcatctcggaagatcctctctaaattgagcctacccacccgcgcatgggagccagccatgaaaaagagttttgccttcgataacgtgggctacgaagggggactagatgggctgggcccatctagccaggtggccacaagcacagtcaggattcttgggatgacctgtcaatcatgcgtgaaatctatcgaagaccggatcagcaacctcaaagggatcataagtatgaaggtgagcctggagcaagggtccgccactgtgaaatacgtcccctcagtggtctgcctgcagcaagtgtgccaccagatcggggatatgggattcgaggcgtccatcgctgaggggaaagccgcaagctggccttcaaggtctctgccggcccaggaggccgtagttaaactgagggtggaaggaatgacgtgccagtcctgcgtgagcagtatcgaaggcaaagtccgcaaattacagggagttgtccgggtcaaggtatctctctccaatcaggaagccgtgatcacctaccaaccctaccttatacagccggaggacctgcgcgaccacgttaacgatatgggctttgaggcggcgataaagtccaaggtcgcgcccctgagtttaggcccaattgacatagagcggctgcagtcaacgaaccccaaaaggccattatcttcagccaaccagaactttaacaacagcgaaacactgggccatcaggggagtcatgtcgtcacacttcagctccgtattgatggcatgcattgcaaatcctgtgtactgaacatcgaggagaacattgggcagctgctgggcgttcagtcaattcaggtctcccttgagaacaagaccgcacaggtgaagtacgatccgtcctgcacgtctccggtggcactgcagagggccatcgaggcactgccgcccgggaacttcaaggtgagtctacccgacggggctgaaggctccggcacagatcaccgaagtagttcttctcacagtcctgggagtccaccgcgcaaccaggtacagggaacatgttctactactttgattgcgatagcaggcatgacatgcgcctcctgtgtgcactctatcgagggaatgatctcccagttggagggcgtgcagcagatctccgtgtctctcgccgaggggacagcaactgtgctgtacaaccccagcgtgatctctcctgaggagctgcgagccgctatcgaagacatggggttcgaagcttcagtcgtcagtgaaagctgctcaaccaaccctttagggaaccactctgcagggaactctatggtgcagactacagatggtacgcccacgtctgtacaggaggtagcacctcatacagggcgcttgcccgcgaaccacgcccctgatatcctggcaaaatctcctcaatcaactcgggcagtcgccccccagaaatgtttccttcaaatcaaaggaatgacttgcgcctcatgtgtatcaaacatcgaaagaaacttacaaaaagaggctggagttctcagcgtgctggttgccctgatggccggaaaggccgagattaagtacgaccccgaggtcatccagcccctggaaatcgcccaattcattcaagatctcggtttcgaagctgccgtgatggaagactatgcagggtctgacggcaacatcgaactcaccatcaccggcatgacctgcgcttcttgcgtccacaacatcgaaagcaagttgacacggaccaacggcatcacctacgcgtccgtggcgcttgcaactagcaaagccctcgttaaattcgaccctgagataattggcccccgggacatcatcaaaatcatcgaggagataggcttccatgcatctttggcacagagaaatccgaatgctcatcacttggatcacaaaatggaaatcaaacagtggaagaaaagtttcctatgttcactggtgttcgggataccagttatggcactgatgatttatatgctgatcccctccaacgaaccccaccagtccatggtgttggaccataatatcatcccaggactgtccattctgaatctgattttctttattctttgcactttcgtgcagctcctgggcggttggtacttttacgtccaggcctataaaagtttgagacaccgatcggctaacatggatgtcctgatcgttctggcaaccagcatcgcctacgtgtacagtcttgtgattttggtggtcgcagtcgccgagaaggccgaacgtagccctgtgaccttctttgatacacctcccatgctgttcgtgttcatagcgttagggaggtggctcgagcatcttgcgaagagcaaaacctctgaggctctggccaagctcatgtccctgcaggctaccgaggctactgtggtcactttaggagaggacaacctcatcattcgggaagaacaggttcctatggagcttgttcaacgtggagacatcgtgaaggtcgtgcctggtggaaaattccctgtcgacggcaaagtcttggagggtaacacaatggcagatgaatccttgatcacgggggaggccatgcctgtgaccaagaagccagggagcacagttattgcaggtagcatcaatgcccacggaagtgtgctgatcaaggccactcacgttgggaacgataccacactggcacaaatcgtgaaactcgtcgaggaggcccagatgagcaaggcacccattcaacagttggccgatcgattttcgggttacttcgtgcccttcattataatcatgtccactcttacactcgttgtgtggatagtcatcggcttcattgacttcggggtggtgcaaagatatttccctaaccccaataaacatatttcccagaccgaggtgatcatcagattcgcattccagactagcataacagtgctgtgcatagcctgcccttgcagtctaggcctggctaccccaactgccgtgatggtggggaccggagtcgccgcccagaacggtatccttattaaggggggcaagcctctcgagatggctcataagataaagaccgtgatgtttgacaagactggcaccattacacacggggttccaagagtgatgcgggtcctgctgcttggcgatgttgcaaccctgcctctgcggaaagtgcttgccgtagtcggcaccgcagaggcaagcagcgagcacccgctgggagtcgctgttaccaaatactgtaaggaagagctggggactgagacccttggttactgcacagactttcaggccgtgcctggctgcgggattggatgcaaagtgtctaatgtggaagggatcctggcccattccgagcgtcccctgtccgccccagctagccacctgaacgaggccggctctcttccagcagaaaaagatgccgtgccccagacattcagtgtcctaatcggcaatcgagaatggctgcggaggaacgggttaaccatatccagcgacgtctccgatgccatgactgaccacgagatgaagggccagaccgccattcttgtcgcaatcgatggcgtgttatgtggaatgatcgccattgcagacgccgtgaagcaggaggccgccctcgcagtgcataccctgcagtccatgggagttgatgtggtgctgattactggggataaccgcaagacggcccgcgccatcgctacacaggtgggaattaataaagtctttgctgaagtcttgccatctcataaggtagccaaagtccaggagctgcagaacaaagggaagaaagtcgctatggtgggcgacggcgtcaatgatagtccagccctagcccaggctgacatgggggtcgcaattggcacaggtactgacgtggcgatcgaggccgccgatgtcgttttaatccgaaacgacctgctcgacgttgtggccagtatacacctgagcaaacggactgttagacgaatccggatcaacctcgtgttagcgttgatctacaatttggtcggaattcccatcgccgctggtgtgtttatgccaatcggtattgtgctgcagccatggatgggtagcgcggctatggccgccagcagtgtgtccgtcgtcctgagttctttgcagctcaaatgttacaagaagcccgaccttgagcggtacgaggctcaggcccacgggcacatgaaaccgctcaccgcatctcaggtgtcagtccatatcggcatggatgataggtggcgggactcccctagggctaccccttgggatcaggtctcctacgtgtcccaggtctctttgagtagtctgacctcagataaaccatcccgacattcagcggccgccgacgacgacggcgataagtggagcctcctactgaacggcagggatgaggagcagtacatt

SEQ ID NO: 7432 - DNA, 4395 bp, synthetic construct
  misc_feature 1..4395: note = source = /note="Description of Artificial Sequence: Synthetic coding sequence"
  source 1..4395: mol_type = other DNA
atgccggagcaggaacgccagataacagctcgagagggggcctctcgaaagatcctgtccaagttgagtctgcctacccgggcatgggagcctgccatgaaaaaaagcttcgcattcgataatgtggggtatgagggggggctcgatggactcgggcctagctctcaggtcgcgacttctactgtccgcattctgggaatgacctgccagagttgcgttaagtctattgaggatcggattagcaatctaaaaggcatcataagcatgaaggtcagccttgaacagggttctgcaaccgtaaaatacgttccgtctgtcgtctgcctgcagcaagtatgccaccagataggcgatatggggttcgaggctagtatcgcagaaggcaaagcggcaagttggccgagtagaagcttacccgcccaggaagccgtcgtaaagttgcgcgttgagggtatgacttgtcagtcatgtgtttcgagtatcgaagggaaggtacgaaagttgcagggggtggttcgggtcaaagtcagcctctcgaatcaggaggcagtgatcacataccagccatatctcatccagcctgaagatctacgagaccacgtgaacgatatgggcttcgaagcagccattaaatcaaaggtggctcccctttcactgggtcccattgacattgaacgtctccaaagcacgaatccaaagcgccctctgtcatctgcaaaccaaaatttcaataatagcgaaactcttggccaccagggtagccatgtcgtaacactgcagttgcgcatcgacgggatgcactgcaagagctgcgtattaaacatcgaagaaaacatcggtcagctgctcggggtacagagtattcaggtttctctcgagaataagactgcacaggtgaagtatgatcccagctgtacctctccagtcgccctccagagagcgatagaagctctgcctcccggaaattttaaggtctccctgcccgatggagcagagggttcaggcacagatcacaggtcttcttcgagtcacagccccggatcaccaccacggaaccaagtccagggcacttgcagcaccacactcatcgctattgcagggatgacttgcgcttcatgcgtccactctatcgagggcatgatctcacagctggagggtgtgcaacagatttccgtgtcattggctgagggaactgccactgtcctttataatcctagtgtgatctccccagaagagctgcgcgctgcgatcgaggacatgggattcgaggctagtgtagtctcagaatcgtgttccaccaatcctctcgggaaccatagcgccgggaattccatggtccagacaacagacggaacacctacatctgtgcaggaggtggcacctcacaccgggcgactgcctgccaaccatgcgccggacatcctggccaagtcgcctcagagtactagggctgttgcaccccagaaatgcttcctgcagattaaggggatgacctgcgcctcatgtgtgtccaacattgagaggaacctccaaaaggaggccggcgtactgtccgtgctggtcgccctgatggccggtaaggccgagattaaatacgacccagaagtgatccagccattggaaattgcccagttcatccaggatctagggttcgaagccgctgtaatggaggactatgccgggagcgatgggaatatcgaactgaccataactggcatgacatgcgctagctgcgtacacaatatagagtcaaagctaactcgcaccaacgggattacctacgctagtgttgcattggcaacctccaaggccctcgtgaagttcgatccagaaataatcgggcccagagacatcatcaaaatcattgaagagatcgggtttcatgcatctctggcacagagaaaccccaatgcgcatcatctggatcataagatggaaatcaagcagtggaagaagtccttcctctgctctctcgtttttgggattcctgtgatggcccttatgatctatatgttgataccctcaaatgagccccaccaaagtatggtcttggaccataacatcatccctggattgagcatcctcaacctgatcttctttatactttgtacatttgtgcagctcctaggcgggtggtatttttacgtgcaggcttataaatccctccgtcataggtctgctaacatggacgtcttgatcgtgttagcaaccagtattgcatacgtctattccctagtcatactagtagttgccgtggctgagaaagcagagcgatctcccgttacctttttcgacacacccccaatgctgttcgtgttcattgctctgggaaggtggcttgagcatctcgctaagagtaagactagcgaagcactcgcaaagttaatgagccttcaggccaccgaggcaacagtagtcactcttggggaagataatcttattatacgggaggagcaggtgcccatggagcttgtgcagcgcggagatatcgtgaaagtcgtcccaggcggaaagttccccgtggacggaaaggtgctcgagggaaacaccatggcagatgaatccctcatcaccggggaagcaatgccggtgacaaaaaaacctggctctacagtgattgcagggtctattaatgcacacggctccgttctgatcaaggccacccacgtgggcaatgatactaccctggcccaaatcgtgaagctggtggaggaggctcagatgtcgaaagcacctatccagcagctggcggaccgctttagtggatacttcgttccttttattattatcatgtccaccctgaccttagttgtatggatcgttattgggttcatcgatttcggagtggttcaacgctattttcccaatcctaataagcacatatcccagactgaagtgataatacggttcgcgtttcagaccagtatcacagtcctctgtatcgcgtgcccatgtagcctaggactggccacaccgaccgctgtgatggtcggcactggagtggctgcccagaatggcattctgattaaaggcggcaagcccctggagatggcacataaaattaaaacagtgatgttcgacaagacgggtacaatcacgcatggagttccccgcgtgatgagagtgctgctgcttggcgacgtagcaaccctccctctccgcaaagtcctagccgtggtaggtactgccgaagcctcatcagaacatcctcttggagtggctgtcaccaagtactgcaaggaagagctgggaaccgaaacgttggggtactgcacagacttccaggcagtcccaggctgcggcatcggctgcaaagtgtcaaatgtggagggcatattggcacatagcgagcggccactttcagcgcctgcctcacatctgaacgaagccggcagtcttcccgcggaaaaggatgccgtcccccaaactttcagcgtactcattggtaatcgagagtggcttagaaggaacgggctcacaataagcagcgatgtgtccgatgccatgacggatcatgagatgaagggccagacggccattcttgtggcaatcgacggcgtcctctgtggaatgattgctatagccgatgcagtcaagcaggaggccgcactagccgtgcacacgctgcaatcaatgggtgtggatgtggtgcttataacaggagacaacaggaagacagcccgggcaattgccactcaagtgggcattaataaggtcttcgcagaggtgttgccttcccacaaggtggccaaggttcaagagttgcaaaacaagggcaaaaaggtcgcaatggtgggcgacggggtgaatgatagccctgccctagcccaggccgatatgggggtggctatcggaactgggacagacgtagccatagaggcagcagatgttgtgctgatccgcaacgatttgctggatgttgtggctagtattcacctctccaagcggactgtgaggagaatcagaatcaacctggttttggctctcatctacaacttggtaggtatacccatcgccgctggcgtctttatgcctattggaatagtgttgcagccctggatggggtccgcggcaatggccgcctcatccgtgtctgtggtcctgagctccctacaactaaagtgttacaagaaaccagatcttgaaaggtatgaggcacaggcccatggtcatatgaaacccttgacagcctcacaggtatccgtgcatattggaatggacgatcgatggagggacagccctcgcgcaacaccctgggatcaggtgtcatacgtgagccaagtctccctgtcttccctaacttctgacaagccaagtcggcattcggccgctgctgatgacgacggagataagtggtctctactgcttaatgggcgtgacgaggaacagtatatc

SEQ ID NO: 7433 - DNA, 4395 bp, synthetic construct
  misc_feature 1..4395: note = source = /note="Description of Artificial Sequence: Synthetic coding sequence"
  source 1..4395: mol_type = other DNA
atgcccgagcaagagagacagatcacagccagagagggggcctctcggaagatccttagcaaactatccctgcctactagggcctgggagcctgccatgaagaagagctttgccttcgataatgttggctacgagggtggcttggacggtctcggcccctccagtcaggtcgccactagtactgtacggatcctgggcatgacctgccaatcttgcgttaagagtatcgaagatcggatttccaacctgaaaggcattatctccatgaaggtgagcctggagcagggctccgctaccgtcaagtatgtaccctctgtggtgtgccttcagcaggtctgtcaccagattggagatatgggcttcgaagcatccattgccgagggcaaggctgcaagttggccatcccgatctctccccgcccaagaggccgtggtgaaattaagagtggaagggatgacttgccagagctgcgtcagttcaatcgaaggcaaagtgcggaaactacagggggtggtccgagtaaaggtgtccctcagcaaccaggaggcagtaatcacctaccagccttatcttattcagcccgaagaccttcgcgaccacgtcaacgatatggggtttgaagccgcaatcaaaagtaaggttgcccccctatctcttggaccaattgacatcgaacgcttgcagtccaccaatcccaaaaggccactctcgtccgctaaccaaaattttaataacagcgagactctgggacaccaggggtctcatgtggtgactttacagctcaggattgatgggatgcattgtaaatcctgcgttctcaatatcgaggaaaatattggccaattgctgggggtgcaatctattcaagtgtcgctggaaaacaagacggcgcaggtaaagtatgacccttcttgtacatcacccgtcgcactacagagagcaatcgaggccctacctccaggaaactttaaagttagtctgccagatggtgcagaaggttcaggtactgatcaccggtcgagctcttctcactcacccggatctcccccgcgcaaccaggtccagggaacctgcagtaccacgctcattgccattgccggaatgacctgcgcctcatgtgtgcatagcatcgagggcatgatttcccagctggagggagtgcagcaaataagtgtgtcccttgccgaaggcacagccaccgtcctgtataatccctccgtgatcagtccagaggagttgcgcgcggccatcgaggacatgggcttcgaagcgtcggtggtgagcgagtcctgtagcaccaaccctctggggaatcattccgctggtaactccatggtgcaaacaactgacggcacccctacaagcgtgcaagaagtggccccccatacaggacgattgccagcaaaccatgctcccgatatactcgcaaagtctccccagagtacccgtgccgtggctccacagaaatgtttcttgcagatcaagggaatgacttgcgcaagttgtgtgagcaatattgagcggaacctccagaaggaagctggggtgctcagtgtgctggtggccttgatggccgggaaagcagagattaagtacgatccagaagtgattcagccattagagattgctcagtttattcaagatctgggcttcgaggcggccgtgatggaggattatgcagggtccgatggcaacatcgagctgacgattactggcatgacatgtgcaagttgcgtccacaatattgagagcaagttgacacgcacgaatggaataacgtatgccagtgtggccctcgctacttctaaagccctggtgaagtttgaccctgagatcatcgggcccagagatatcattaaaataatcgaggagataggttttcatgcttctttggcacagaggaatcccaacgcccaccacctggaccacaagatggagatcaagcagtggaagaaatctttcctatgttccctggtctttggcatcccggtaatggctctgatgatatacatgctgatcccgagtaacgagcctcaccagagcatggttctcgatcacaatatcatcccaggtctgtccattcttaatctgatcttctttatcctttgcacgttcgtgcagcttctggggggctggtatttttatgtgcaggcatataaaagccttcgccaccgtagcgctaatatggacgtgcttatcgtgctggccactagtatcgcttacgtgtacagcttagtgatcctggtcgtggccgtcgcagaaaaagctgaacggagtccagtgacgttctttgatactccacccatgctgttcgtgttcatcgctcttggacggtggctcgagcacttggccaagagcaagacaagcgaggcactggcaaagttgatgagtctgcaagctacggaagccactgtagtgacactgggggaggacaacttgatcattcgcgaggaacaagtgcccatggagctcgtacaaagaggagatattgttaaagtggtccctggtgggaagttccccgttgacggtaaggtgttagaagggaatacgatggcagacgagagcctgataacgggggaggctatgcctgtcacaaagaagcctggttccaccgtaattgccggatctattaacgcccatgggtctgtcttgattaaggcaacccatgtgggaaacgataccacattggctcagattgtgaaactggtggaagaagctcaaatgtccaaggcccctatccagcagctggcggaccgattttccggatattttgtgcccttcatcataatcatgtcaacccttacccttgtagtgtggatcgtaattgggttcattgattttggagtcgtccagcggtatttccccaatcccaataaacacatctcccagactgaagtgataatcaggtttgcatttcagactagtattactgtattgtgtattgcatgcccttgctccctgggattagctaccccgaccgccgttatggtgggaacaggtgttgctgcacagaacggcattctgattaaaggaggcaaacccctcgagatggctcacaagataaagacagtgatgttcgacaagacagggacaatcactcacggagtcccccgggtcatgcgcgtgttgctactgggcgatgtcgctactcttcccctccgaaaggtgctcgcagttgtgggaactgccgaggcttcctctgagcacccactaggagtggctgtgaccaagtattgcaaagaggagctgggcacggaaacattaggttactgcaccgacttccaggctgtgccgggctgtggaatcggttgtaaggtatcaaacgtggagggcatcctcgctcactcagagcgaccgttgagtgcacccgcatcgcacctaaatgaagcaggctccctaccagccgaaaaggacgctgtgccacagacattttctgttctgattggtaaccgcgaatggctgcggcggaatggcctcacaatatcaagcgatgtatcagatgccatgaccgaccatgaaatgaaggggcagactgccattctggtcgcaatcgatggcgtactgtgtggtatgattgccattgccgatgccgtgaaacaagaggccgcccttgccgtgcacaccttgcagtccatgggagttgacgtggtcctgattactggggataatcgtaaaaccgcccgcgcgattgctactcaggtggggataaataaagtgttcgccgaggtgttgcccagccataaggttgcaaaggtgcaggaactgcagaataagggaaaaaaagttgcaatggtgggagacggggtcaacgacagtccggcactggcccaagccgacatgggagtagcgatcggaactggaaccgatgtggccatcgaagccgccgatgtggtcctgatacgaaacgatctgctggatgttgtggcttcaatccacctgtctaagagaacagtgagacgtatcagaataaacctggtcctggctttaatctataatttggtcgggattcccatagctgctggagtgtttatgccaattgggatagtactccagccatggatgggatcagcagccatggcagctagcagcgtcagtgtcgttttgagctctctgcagctgaaatgctataagaagccagacctggaacgttacgaggcgcaggcccatggacacatgaaacctcttactgccagtcaagtgtctgtacacatcggaatggacgacagatggagggactcacccagggcaaccccctgggatcaagtgtcttacgtgtcgcaggtctcactatcttcactgacctcagataagccgagccggcattcagccgctgcagacgatgacggcgacaagtggagcctgcttttgaatggccgcgacgaagagcagtatatt

SEQ ID NO: 7434 - DNA, 4395 bp, synthetic construct
  misc_feature 1..4395: note = source = /note="Description of Artificial Sequence: Synthetic coding sequence"
  source 1..4395: mol_type = other DNA
atgccagagcaagaaagacaaatcaccgcaagggaaggtgcatccagaaagatactttctaaactgtcccttccaacaagagcctgggagccagccatgaaaaagtcattcgcgttcgacaatgtgggttatgagggtggactggacggactcggaccctcttctcaggtggcaacgtccaccgtcagaatcttgggcatgacttgtcagtcctgtgtcaagagcattgaggacaggattagtaacttgaagggaataatctccatgaaggtcagccttgaacaaggtagcgccaccgtcaagtacgtgcccagtgttgtctgtctgcagcaggtgtgccaccagataggcgacatgggtttcgaggcaagtatcgcagagggaaaagccgcctcctggccttcaaggtcactccccgcacaagaggcggttgtgaaactcagggttgagggtatgacctgccagagctgcgtttcaagcatcgagggcaaagtgagaaaactgcaaggagtggtgagggtaaaggtgagcctgagcaatcaagaagcagtgatcacgtaccaaccctacttgatccaacccgaggacctgagggatcacgtgaacgacatgggttttgaagccgccatcaagtccaaggtagcacctctcagcctgggcccaatcgatatagaaagactgcaatcaaccaacccaaaaaggcctcttagttccgctaaccaaaatttcaacaattccgaaacgctgggtcaccaaggttcccatgtggtcacattgcagctgcgcattgacggcatgcattgtaagagttgcgtgcttaacatcgaggaaaacattggacaactcttgggcgtgcagtcaatccaggtcagtttggagaataaaacagcacaagtcaagtatgatcccagctgcacaagtcctgtcgctcttcagagagccatcgaagctctgcccccgggcaatttcaaggtcagcctgcctgacggcgcggaaggctcaggcacggatcacaggtcctcttccagccatagccccggttcccctcctagaaaccaagtgcagggcacctgtagcaccacactgatcgccatcgcaggtatgacatgcgctagctgtgtccacagtatagaaggtatgattagtcaattggaaggcgttcagcagatttcagtgtccctcgcagaaggtaccgctaccgtactttataatcccagcgtcattagtcctgaggagcttagggctgcgattgaggacatgggtttcgaagcgtcagtggtgagtgaatcctgttctaccaaccccctcggcaatcactccgctggtaactccatggtccagaccacagatggaactcctacaagcgtccaggaggtagctccacacaccggaaggctgccagcaaaccatgctccggacatcctggccaagagcccccaaagcaccagagctgtcgctccccagaagtgctttctccagattaagggcatgacatgtgcctcttgtgttagtaacattgagagaaatttgcaaaaggaggctggcgtcttgtctgtacttgtggccctcatggctggaaaagcggaaatcaagtatgaccctgaagttatccagccccttgaaatcgctcagttcatccaggatctcggctttgaggcagccgtcatggaggattatgcaggttctgacggcaacattgagctcacaatcactggcatgacttgcgcgtcctgtgtgcacaatatcgagagtaaactgacaagaaccaacggaattacttatgcaagcgtcgctctggcaacaagcaaggccctggtcaagttcgatccggagatcattggccctcgcgacatcataaagatcatagaggaaatcggtttccacgcctctttggctcagcgcaatccgaacgcccaccacttggatcacaaaatggaaatcaagcagtggaagaagagctttttgtgtagtctggtttttggcatacccgtcatggcgctcatgatctacatgctgatcccatctaacgaacctcaccagtccatggtgttggaccacaatatcatcccaggattgagcatcctcaacttgatatttttcattttgtgcaccttcgtacagctgctgggaggctggtatttctatgtacaagcctacaaaagcttgcgccatcgctctgctaatatggatgtcctgatagtgctggccacttccattgcgtatgtgtatagcctcgtgatcctggtagttgctgtggcagagaaggccgaacgctcccctgtgacattcttcgacacccctcccatgttgttcgtattcatcgcattgggtaggtggctcgaacaccttgccaaatcaaaaactagtgaagcactggccaagctgatgtcattgcaagccactgaggccacagtcgtcactctgggcgaggacaatttgatcatcagagaggaacaggtccctatggagttggttcagaggggtgacattgtcaaggttgtgccaggcggtaagtttccagtggatggtaaggtcctcgaaggcaacaccatggcagacgagagccttatcacaggtgaagccatgcccgtcacaaagaagcccggtagcaccgttattgcgggttccatcaatgcacacggctctgtgctgataaaggctactcatgtcggaaatgataccacgttggctcaaatcgtcaagctggtggaagaagcgcagatgagcaaagcccctatccagcagctcgcggacagatttagtggatacttcgtgccattcattatcatcatgtccacactgacccttgttgtgtggattgtgatcggtttcatcgacttcggagtcgtccagcgctatttccccaaccccaacaaacacatcagccaaactgaggtcattatcaggttcgcctttcaaacttccatcacggtgctttgcatagcttgcccttgttctctgggcttggcgacacccactgccgtgatggtgggcactggtgtggccgctcagaacggtatcctgattaaaggaggtaaacctcttgagatggcccataagatcaaaacggtcatgttcgacaaaactggaactattacccacggcgtgcccagggtcatgagggtcctgctgctgggcgacgttgctacgttgcccctcaggaaggtcctggccgttgtcggaaccgcggaggcatctagcgaacatcccctgggtgtcgccgtgaccaagtactgcaaagaggagctgggaacagaaactcttggatattgcacagacttccaggcagttccaggttgcggtatcggatgcaaagtatccaatgtcgagggcatcctcgcgcactccgagaggccgctctcagctccagctagtcacctgaatgaagccggatcacttcccgctgagaaagacgcagtcccccagactttcagcgtcctgataggcaacagggaatggctcaggagaaatggcctgaccattagctccgacgtatctgatgccatgacagatcacgaaatgaagggccaaacagctatcctggtcgccattgatggcgtcctttgcggcatgatagccatcgccgatgcagttaaacaagaggctgcactcgcagtccatactttgcagagcatgggcgtggacgttgttctgatcaccggcgataaccgcaaaacggccagagcaatagccacacaggtaggcatcaacaaggtctttgctgaagtgcttccttctcataaggtcgccaaagtacaggagctgcaaaacaaaggtaagaaggttgccatggttggagacggagtaaacgactctcccgctctggcccaggctgatatgggtgttgccattggtactggtacagacgtcgccatcgaagccgcagacgtagtcttgatccgcaatgaccttctggacgtagttgcctcaatccatctgtcaaagcgcaccgtgaggagaattaggattaatctggtgctggcattgatttataacctggtcggtattcccatcgcagcgggagtattcatgcccatcggcattgttctgcaaccttggatgggatccgcggccatggccgcttctagcgtgtctgtggtgctgagctctctgcagctgaaatgttataagaaacctgatctcgaaaggtacgaggctcaggcacacggtcacatgaagcccctgaccgcctcccaggtgagcgtgcacatcggaatggatgatcgctggagggatagtcccagggccacgccatgggaccaagtctcctatgtgtctcaggtgtctctgtcttctttgacctcagacaagccttccaggcattctgctgccgcggacgatgacggcgataagtggtccctccttctgaacggaagggacgaagagcagtacatt

SEQ ID NO: 7435 - DNA, 4395 bp, synthetic construct
  misc_feature 1..4395: note = source = /note="Description of Artificial Sequence: Synthetic coding sequence"
  source 1..4395: mol_type = other DNA
atgccagaacaggagaggcagatcacggcgcgggagggagctagtaggaagatcttatcgaagttatccctacctacgcgcgcttgggaacctgctatgaagaagtcgttcgctttcgacaacgtcgggtacgagggcggcttggacgggcttggaccaagtagtcaggtcgccacttctactgtgcggattctcgggatgacatgccagtcctgcgtcaaatctatcgaggaccgaatatctaacctgaagggcatcattagcatgaaggtctctcttgagcaggggtcggccactgtgaaatacgtgccaagcgtggtgtgcctgcagcaagtgtgccatcagattggtgacatggggttcgaagcgagcatcgcagagggaaaggccgcctcgtggccctccagatctttgccagcccaggaggcggtcgtgaaactgagggtggagggcatgacctgccagtcttgcgtctctagcatcgagggtaaggtaaggaagcttcaaggggtggtgcgggtgaaggtcagcctgagcaatcaggaggcagtgataacctaccagccttacttgatccagccagaggatctccgcgatcacgtcaacgacatggggtttgaggccgcaattaagtctaaggttgccccgctgtccctggggccaattgatatcgaaagactccagagtactaatccgaagcgtccactatctagcgctaatcagaacttcaacaattccgaaactctcggtcatcaggggtcgcacgtggtcacgctgcagctgagaattgatggaatgcattgtaaatcgtgtgtgctgaatatcgaggaaaacatcggccagctgctgggagtgcaaagcattcaggtttccctcgaaaacaagacagcacaggtgaaatacgacccctcttgcacttccccggtagccctgcagagagcgatcgaggcactgccccctgggaattttaaggtttccttgcccgacggcgcagaggggtccggaacggaccatcggtcctcaagctcccattctccagggagccctcctaggaatcaggtgcagggaacctgctctaccactttgattgcgatcgccggaatgacatgtgcgagctgcgtccactcaattgagggcatgatatcccagcttgagggtgtgcagcagatcagtgtgtctctggccgagggcaccgccaccgtgctctacaaccccagtgtaattagcccggaagagctcagggcagctatcgaagacatgggatttgaagccagtgttgtgtccgagtcatgctccacgaatcccttaggcaaccattctgcaggtaacagcatggtgcagacaaccgacgggacaccgacctccgtacaggaagtcgcccctcataccgggagactgccagcgaatcatgctcctgatattcttgcaaaatcaccccaatccacaagggctgtagcgccacagaaatgtttcctgcagattaaaggaatgacatgtgccagctgtgtgtccaatatcgagagaaatctgcaaaaggaagccggggttctttctgttttggttgccctgatggctggcaaggccgaaatcaagtacgatcctgaggtgattcaaccactcgagatagcccagttcatccaggacctgggttttgaggcggctgttatggaagattacgctggtagtgacgggaacatagagctgaccattaccggaatgacttgcgcctcttgcgtccacaatatcgaatccaagctcacacgaacaaatggaataacatacgcctccgtagccctggcaacttccaaagcactggtcaagttcgatcccgaaatcatcggcccacgggatatcatcaaaattatcgaggaaatcgggttccacgcgtccctggcccaacgaaaccctaacgctcatcatttggaccataaaatggagatcaaacagtggaagaaatcatttctctgcagcctggtgtttggtatacccgtcatggcgcttatgatctatatgctcatcccatcaaatgagcctcaccagtcaatggtcttggaccataatatcatacccggattgtccattctgaatctgatattctttatcctgtgcacttttgtgcagctattggggggctggtacttttatgtccaagcttacaagagtctcagacacaggtccgccaacatggacgtcttgattgtgctggcaacctctatcgcttacgtgtactctctggtcattctcgtggtggccgtggccgaaaaggcggagcggtctcccgtaactttttttgatactccccccatgcttttcgttttcattgcgctcggccgctggctggagcatctagcaaagagcaagacctctgaggctctggccaagctgatgtccctacaagctacagaggcaaccgtggtaaccctcggcgaggataacctcattattagggaggagcaggtccccatggagctcgtgcaacgcggggacatcgttaaggtcgttccaggcggcaaatttccagtggacgggaaagtgcttgagggcaacactatggctgatgagtccctgataactggcgaggcaatgcctgtgactaagaagcctggctcaaccgtgatcgcgggtagcataaacgcgcatgggtcggtactgataaaggcaactcacgtcggaaacgatacaactttagctcaaatagtcaagctggtggaggaggcccagatgagtaaggctccgatccagcagctcgccgatagattttcaggatatttcgtcccctttatcataatcatgtcgaccctcactcttgtggtatggattgtgattggttttattgatttcggtgtggttcagagatactttcccaacccaaataagcacatcagccagaccgaggtgatcatacgcttcgctttccaaaccagtataaccgtgctctgtatcgcttgcccctgctctctgggcttagctactcccactgccgtgatggtgggaacgggagtcgccgcccaaaacggcattctgatcaaaggtggaaaacctctcgagatggcacacaagatcaagactgtgatgtttgataagactggtaccattacccatggtgtgcccagagtgatgcgagtcctgctcctgggggatgtcgcaaccctgcctctacggaaggtcctagccgtcgtaggaactgccgaggccagtagcgagcacccgttaggtgttgccgtgacaaaatactgcaaggaggaattaggtacggagaccctgggatattgtacagactttcaagccgtgcccggttgcggcattggctgtaaagtaagtaacgtcgagggcatcctggcccacagcgaaagacccctcagcgcaccggcttcacatctgaacgaggctggatctctgcctgcagagaaagacgcagttccacaaacattctcagtcttgattggaaacagagagtggctgcgcagaaatggactgacaatatcatcggacgtgtctgacgcaatgactgaccatgaaatgaagggacagactgcaatcttagttgccattgacggcgtgctgtgcggcatgatcgccatcgctgatgccgtgaagcaggaggcagcgctagcggtacacactctgcaatctatgggtgtggacgtggttctgattacaggcgataacaggaagacggcgagggccattgccacacaagtcggtattaataaggtgttcgctgaggtgttaccctcccacaaagtggcaaaagttcaggaactgcaaaacaaaggaaagaaggtagcaatggttggcgacggagtgaacgacagccccgccctggcccaggccgacatgggcgtagccattggaacgggaacagacgtagctatcgaggctgctgatgtggtactgattcgaaatgatcttttggatgtcgtggctagtattcacctaagtaagcgaacggtgcggaggatccgcattaatctcgtgctggctcttatatataatctggtgggtatccctattgcagccggggtcttcatgccaattggtattgtgctgcagccttggatggggagcgccgccatggcagcctcttcggtttcggttgttctgagctccctccagctgaagtgctacaagaagcccgacctggagaggtatgaggctcaggctcatgggcatatgaaaccactgactgcgtcgcaggtctccgttcatattggcatggacgaccggtggagggattccccccgcgctaccccttgggaccaggtgagctacgtgtcccaggtgtcactgtctagcctgaccagcgataagccatcaaggcacagcgccgcagcggacgacgacggtgacaagtggtcgctgctgctcaatgggcgtgacgaggagcagtacata

SEQ ID NO: 7436 - DNA, 4395 bp, synthetic construct
  misc_feature 1..4395: note = source = /note="Description of Artificial Sequence: Synthetic coding sequence"
  source 1..4395: mol_type = other DNA
atgcctgagcaggagaggcaaatcacagcgagagaaggcgcctctagaaaaattctatccaagctcagcttgccaacacgagcttgggaaccggcgatgaaaaagtcgttcgcgttcgacaacgtaggctacgagggggggttggacgggctgggacctagcagtcaggtggccacctccactgtaaggatccttggcatgacttgtcagtcctgtgtgaagtctatagaggatcgcatttctaacctcaaagggattatctctatgaaggtgtccttagagcagggatccgccacggtgaaatacgttcctagcgttgtgtgtctgcagcaggtctgccaccagattggagacatgggctttgaggcatcaattgccgaaggcaaggcagcctcatggccctctagaagccttccggcacaggaggctgtcgtcaaacttagagtggaaggtatgacatgtcagtcttgtgttagctccatcgaggggaaggtcagaaagctgcagggggtcgtgcgggttaaggtgtccttatcaaatcaggaggccgtgatcacttaccagccttacctgattcagcccgaggacctgcgcgaccacgtgaacgacatgggttttgaggccgccatcaaaagcaaggtggccccgttgagccttggccctatagacatagaacggttgcaatccactaacccgaagcgcccactttcttccgcgaatcagaattttaataacagcgaaaccctcggccaccaaggttctcacgttgtcactcttcaactgcgaatcgatgggatgcattgcaagtcgtgtgtactgaatatcgaggagaacattggccagttgcttggtgtgcagagcattcaggtgagtttggagaacaaaacggcccaggtcaaatatgacccttcttgcacttctccggttgccctgcagagagccatcgaggccctcccccctggcaatttcaaagtaagccttcctgatggtgccgaagggtcaggaacagaccaccgctccagcagcagtcatagtcctgggtctcccccccggaatcaggttcaaggtacatgttcgactactctgattgcaattgccggtatgacatgcgcatcttgtgtgcattccatcgagggaatgatctcccagctggagggcgtgcaacagatctctgtcagcctagccgagggtaccgcgactgtgctgtataatccatccgtaatttctcccgaggaactacgagctgccatcgaagatatgggcttcgaggcttctgtggtgtccgaatcttgttcgacaaatccattgggcaatcactctgcgggcaactcaatggtgcagacgaccgatggaacgccaacatctgtgcaggaggtagccccacatactggcagattacctgcaaaccacgcacctgacatcttggccaaatctccccagtctacccgggctgttgccccacagaagtgtttccttcagataaagggtatgacctgtgcgagttgcgtgtcaaatatagagagaaatctacagaaagaagccggcgtgctttctgtgcttgtggccctgatggcagggaaggccgaaattaagtatgatcccgaagtgatacagcctcttgaaatcgcacagttcatccaggacctcggcttcgaggctgcagtgatggaggattatgccggctccgatgggaatatcgaactgaccataaccggcatgacctgcgcctcctgcgtgcacaacatcgaatcaaagctgacgaggaccaacggcatcacgtacgccagcgtcgcccttgcaacatctaaagcgctcgtgaagttcgaccccgagataatcggccctagagatatcatcaaaatcattgaagaaatcggtttccatgcttccctcgctcagagaaatcctaatgcacaccacctcgaccataagatggagataaagcagtggaagaaatctttcctgtgctcactggtgttcgggatacccgtcatggcgctgatgatctatatgctaatccccagtaatgaacctcaccaatctatggtactggaccacaacatcatccctggtctgagtattctaaatttaatattttttattctatgcacatttgtgcagctgctgggtggctggtacttttatgtgcaagcctataagtccctgagacacaggagtgccaatatggatgttcttatcgtactggccacaagtatcgcgtacgtgtatagcctggtgatccttgttgtggctgtagctgaaaaggccgaacgaagccccgtgaccttcttcgatacgcctccaatgctctttgtgtttattgcacttgggcgatggctggagcacctagccaaatccaaaacgtcggaggcactggcaaaattgatgagcctccaggcaaccgaagctactgtagtgacactcggggaagacaaccttattatacgcgaggagcaggtgccaatggagcttgtgcagaggggcgacatcgtaaaggttgtgccagggggtaagttccccgttgatggtaaagtattggagggaaacacgatggctgatgagtccctgattaccggcgaggccatgcctgtcaccaaaaaaccagggtcaacagtgatcgctggatccatcaatgctcatggcagcgtccttatcaaggcgactcatgtcgggaatgacaccacacttgcacagatcgtgaaactggttgaggaagcacaaatgtccaaagctcccatccagcagctcgctgacaggttctccgggtattttgtgccttttataattataatgtctactctgacactggtggtgtggatcgttatcggatttatcgactttggtgtagtgcaacgctacttccccaatcccaataaacacatttcccagaccgaagtcatcatccggttcgcttttcagacttctataactgtgttgtgcatagcctgcccgtgcagtctgggtctggctacacccactgcagtcatggtcggtaccggggtggccgctcagaatggaattcttatcaagggcgggaaacctctggagatggctcacaaaatcaagacagtaatgtttgacaagaccggcaccatcacacatggcgtgcctcgagtgatgcgagtgctgctcctgggggatgtagctactctgccgctccggaaggtgttggccgttgtgggaaccgcggaagctagctctgagcatcccctgggtgtggctgtgacgaagtactgcaaagaagagctgggtaccgaaacattgggctattgtaccgacttccaggctgtgccaggatgtggcatcggctgcaaggtgtctaatgtggagggaatcctagcccatagtgagagaccactgagtgctcctgccagccacctgaatgaagccggaagtctgccagcagagaaagacgcagtgccacagacattctcagtcctcatcggcaaccgggagtggctgaggaggaacggactgaccatcagttccgacgttagcgacgcaatgacagatcatgagatgaaaggccaaaccgctatcctggtggcgattgacggagtgctatgcggaatgatagcgatcgcggatgctgtgaagcaagaagccgccctggccgtccataccctacagtctatgggagtggatgtggtactgatcactggcgataacagaaagacagctcgggccatagcaacgcaagtaggaatcaacaaagtgttcgccgaagtgctgccaagtcataaggtggctaaggtccaggagttgcaaaataaaggaaaaaaagtggcgatggtgggggatggagttaatgattccccagcccttgcccaggcggatatgggcgtcgccatcggaactggaacagacgtggccatcgaagcagctgatgtggtgctcatccgcaatgacctcctcgatgtcgtggcgtccatccatcttagcaagaggactgttagaaggattagaatcaatttggtcctggccttgatatacaatcttgtgggcatcccaattgcagccggcgtgttcatgcctataggcatcgttctgcaaccatggatgggatctgctgcaatggctgcttcatcagtaagtgtagtgctgtcaagcctacaacttaaatgctataaaaagccagacctggagcgctatgaggcccaggctcacgggcacatgaaaccactgacagcctcacaggtcagtgtgcacataggtatggatgaccggtggagagactccccaagggccacgccctgggaccaggtttcatatgtgtctcaggtcagcttgtcttcactcacaagcgacaagccctcacgccactccgctgctgctgatgatgacggggataaatggagcctcttactgaatggaagagacgaggagcagtacatt

SEQ ID NO: 7437 - DNA, 4395 bp, synthetic construct
  misc_feature 1..4395: note = source = /note="Description of Artificial Sequence: Synthetic coding sequence"
  source 1..4395: mol_type = other DNA
atgcccgaacaagaacgccagatcacggcccgagaaggcgcatcgcgtaagatattgtcaaaactgagcctgcctacaagagcgtgggaacctgctatgaaaaaatccttcgcttttgataacgtcgggtacgagggcggactggatggactcggcccatcctctcaagtggctacctcaactgtgagaatcctagggatgacctgccaatcttgcgtcaagtccatagaggatcgaatatccaaccttaagggaatcatctctatgaaggtgtccctggagcagggatccgctacagtgaagtacgtaccttcggttgtgtgcctccaacaggtgtgtcaccaaatcggggatatgggtttcgaggcctccattgctgagggaaaggccgcgtcttggcctagcagatcactgccggcgcaagaggccgtcgtgaaactacgagtggagggaatgacgtgtcagtcctgtgtcagttctattgaaggcaaagtgcgaaagctgcaaggagtcgtgcgagtgaaggtttctctgtccaatcaggaagcagttatcacgtaccaaccgtacctgatccagcccgaggatctccgagaccatgtgaatgacatgggttttgaggcagctataaagagtaaagtggccccactgagtttgggtcctattgatatagaacgcctacaaagtactaatccaaaaaggccgctgagcagtgccaaccagaacttcaacaattcagagacacttggccatcaggggtcgcatgtggttaccctgcagctgcgtatcgatgggatgcactgcaagagttgcgtgctcaatatcgaagaaaacatcggccagctcctcggggttcaatcgatccaggtatccttggagaataagacagcacaggtgaagtatgaccctagttgcacttccccggttgctctgcagcgcgcgatcgaagcattgcccccagggaatttcaaagtgagcttgcctgatggcgccgagggctctggaactgatcaccgctcttctagcagccattctccgggtagcccaccccggaaccaggtccaggggacttgctcaacaacactcattgccatcgccggaatgacttgtgcaagctgtgttcactctatcgagggaatgattagccagttagaaggcgtccagcagattagtgtgtctctggccgaaggcacggctacagttctctataaccccagtgtcatcagcccggaggaactacgggccgcaatcgaagatatgggctttgaggcctcggtggtgtccgaaagctgctctaccaaccccctcgggaatcactccgctggaaactctatggttcagaccaccgatggcacccccacttccgtgcaggaagtagcaccacataccgggcgcttgcccgccaatcacgccccagatatcctggccaagtctccccagtccacccgcgcggtggcaccacaaaagtgctttttgcagatcaaaggcatgacctgtgctagctgcgtgtctaacattgagcgtaatctacagaaggaggccggggttttgtcagtgctagtggcactgatggccggtaaggctgaaataaaatatgaccctgaggtgatccagcccttagagattgcacagtttatccaggatcttgggtttgaggccgccgtgatggaggactatgcgggctctgacggcaacatcgagcttactataacgggcatgacgtgcgcttcctgtgtacacaacatagagagcaagctgaccagaaccaatggaataacctacgcctccgtggcactggctactagcaaggcactggtcaaattcgacccagaaatcatcggaccccgagacatcataaagatcatcgaggagattggttttcacgcctctctcgctcaacgaaatccgaatgcccaccacctggaccacaagatggagatcaaacagtggaagaaaagtttcctgtgctccctcgttttcgggatcccagtgatggcactgatgatctacatgttgatcccgagtaacgagcctcaccagagcatggtccttgaccacaatatcataccaggcctctccattctgaacctcatcttttttatactgtgtacctttgtccagttgctgggcggctggtacttttacgttcaagcgtacaaatccttgaggcatcgttccgccaatatggacgtgcttatagtattagcaaccagcattgcttacgtgtattctttggttatactggtcgtggccgtggccgagaaggcggagaggtccccggtgacattttttgacacacctccaatgctcttcgtcttcatcgctctcgggcgatggctagaacatcttgcgaagtcaaaaacctctgaggcgttagccaaactgatgagtttgcaggctacagaagctaccgtggtgacattgggcgaggataatctgatcatcagagaggagcaggttccaatggaactggttcagcgtggtgatattgtcaaggtcgtgccagggggcaaattcccggtggatggcaaagtcctggaggggaatactatggccgacgaatctctgattacaggcgaagctatgccagtgactaagaaacccggttcgacagtgatagcagggagcatcaacgcccacggatcagtgttgattaaggccacccacgtgggtaatgacacaactctggctcagattgtgaagctggtggaggaggcacagatgtccaaggcaccaatccagcagctcgccgaccggttctccggttattttgtgccatttatcatcattatgagtacactgacattggtggtgtggatcgttattgggtttattgattttggggtggtgcagcggtactttccaaaccccaataaacatatcagtcagactgaagttataattcgctttgcatttcagaccagcatcaccgtcctgtgcattgcctgcccctgttctctgggactcgcgacgcctaccgccgtaatggtaggcaccggcgttgccgctcagaacggcatactgataaagggcggtaaaccactcgagatggcccacaaaatcaagaccgtcatgtttgacaagactgggacaatcactcatggtgtacccagggtcatgcgcgtgctcctgttgggtgacgttgccactttgccgctgcgaaaagtgctggctgtagtcggaacggccgaggcctcgtcggagcaccctctgggagtggccgtgactaaatattgtaaagaagaacttggcacagaaacgctaggctattgcaccgattttcaggccgtgccaggatgcggcatcggatgtaaagtgtctaacgtagagggaatcctggcacattcggagagaccactgtccgcccccgcttcccatttaaacgaggctggctccctccctgcagagaaagacgctgtcccgcagacgttttccgtcctgatcgggaatagagagtggctgagaaggaacggtctcacaattagcagcgatgtttccgatgcaatgactgaccatgagatgaaggggcagaccgccatcctcgttgctatagatggggtgctgtgtggcatgattgctattgctgatgccgtgaagcaggaagctgctctggccgtgcatacactccagtcaatgggagtagacgtggtgctgattacaggggataacagaaagactgctagagctatcgctacccaggttgggatcaacaaagtcttcgcagaagtgctaccctcccacaaagtggccaaggtccaggagctgcaaaacaagggaaagaaggtggcaatggttggcgacggagtaaacgattcccccgccctggcacaagcggatatgggtgtcgctattggcaccggcacagacgtggccatagaggctgcggacgtcgttttgatccgaaatgacctgctggacgtggttgcttctatacacctctcgaaaagaacagtacggcggatccgtattaatctggtgcttgccctgatctataatttggtgggcatccccatcgcggccggtgtgttcatgcctatcggaatcgtattgcagccttggatggggtcagccgcgatggctgctagctccgtcagcgtggtcctctcaagcttgcagttaaaatgctacaagaaaccagatctcgaacgttacgaagcacaggcccacggtcacatgaaaccccttaccgcttctcaggtatcagtacacattggtatggatgatcggtggcgggattctccaagggccacgccctgggaccaggtctcatatgtgtcacaagtgtcattaagctcccttacctccgacaagccttcccggcactctgcagctgctgatgacgatggtgacaagtggtcgctgttgctgaacggacgggacgaggagcagtacatt

SEQ ID NO: 7438 - DNA, 4395 bp, synthetic construct
  misc_feature 1..4395: note = source = /note="Description of Artificial Sequence: Synthetic coding sequence"
  source 1..4395: mol_type = other DNA
atgccagagcaagaaagacaaataactgctcgagagggtgcaagtagaaaaattctttctaaattatctcttcctactagagcttgggaaccagcaatgaaaaaatcttttgcatttgataatgttggatatgaaggaggtttagatggtttgggaccatcttctcaagtcgcaacatctactgttagaattttgggtatgacatgtcaatcatgtgttaaatcaatagaagatagaattagtaacttgaaaggaattatttctatgaaagtgtctttagagcaaggatcagcaacagttaaatatgttccatcagtagtatgtcttcaacaagtatgtcatcaaattggagatatgggattcgaagcatcaattgcagaaggaaaagctgcttcatggccatcaagatcattgccagcacaagaagcagttgttaaattacgtgttgaaggaatgacatgtcaatcttgtgtttcttcaatagaaggaaaggtaagaaagttgcaaggtgttgtaagagttaaagttagtttgagtaatcaagaagcagttattacttatcaaccatatcttattcaaccagaagatttaagagatcatgtaaatgatatgggatttgaagctgcaattaaatcaaaagttgcaccattaagtcttggacctattgatattgaaagattacaaagtacaaatccaaaaagacctttatcatctgccaaccaaaattttaataattctgaaactttgggacatcaaggatctcatgttgttactttacaattaagaattgatggaatgcattgtaaaagttgtgttttaaatattgaagagaacataggacaacttcttggagtacaatctattcaagtaagtcttgaaaacaagacagcacaagtaaaatatgacccatcatgcacatctccagttgcacttcaacgagctattgaggcacttccaccaggtaatttcaaagtaagtttaccagatggagcagaagggtcaggaacagatcatagatctagttcatctcattcaccaggatcaccaccaagaaatcaagttcaaggaacatgttcaacaacattaattgctatcgcaggaatgacttgtgctagttgtgttcattcaattgaaggaatgatttcgcaattagaaggtgttcaacaaattagtgtatcattagcagaaggtactgcaactgttctttataacccatctgttatttcaccagaagaattaagagcagctattgaagacatgggttttgaagcatcagttgtttcagaatcatgttcaactaatccattaggtaatcattctgcaggtaattcaatggttcaaacaactgatggtacaccaacatcagttcaagaagttgcaccacatacaggaagattaccagcaaatcatgctccagatatattggctaaatcaccacaatctacaagagctgtagcaccacaaaaatgttttttacaaattaaaggaatgacttgtgcatcttgtgttagcaacattgaaagaaatttacaaaaagaagctggagttctttctgttcttgttgcattaatggcaggaaaagcagaaattaaatatgatccagaagttattcaaccacttgaaattgctcaattcattcaagatttaggttttgaagctgctgtaatggaagattatgctggatcagatggaaatatagaattaactattacgggtatgacatgtgcatcttgtgttcataatattgaatccaaacttacacgtactaacggaataacttatgcttctgttgcattagctacttcaaaagctttagttaagttcgacccagagattattggaccaagagatattattaaaattattgaagaaataggatttcatgcaagtcttgctcaaagaaatccaaatgcacatcatttagatcataagatggaaattaaacaatggaaaaaatcttttctttgttctttggtttttggaattccagtaatggcacttatgatatatatgttaattccatcaaatgaacctcatcaatcaatggtattggatcataatattattccagggttatcaattttaaatcttattttctttattttatgtacattcgttcaattattaggaggatggtatttttatgttcaagcatataagtcccttagacataggagtgcaaacatggatgttttaattgttcttgcaacaagtattgcatatgtttatagtttagttatattggtggtcgcagtagcagaaaaggcagaacgttcaccagttactttttttgatacaccaccaatgttatttgtgtttattgcattaggtagatggcttgaacatttagcaaaatcaaaaacttcagaggctttagcaaaattaatgtcattacaagctactgaagcaacagttgttacattaggagaagataacttaattattagagaagagcaagttccaatggagcttgttcaaagaggagacatagttaaggtagttccaggaggaaaatttccagttgatggaaaagtcttagaaggtaatactatggctgatgaatcacttattacaggagaagctatgcctgttactaaaaaaccaggatcaactgttattgcaggatcaattaacgcacatggaagtgttttaataaaagctacacatgttgggaatgatacaacattggcccaaatagttaagttagttgaagaagcacaaatgtctaaagctccaatacaacagcttgcagatagattcagtggatattttgttccatttattataataatgagtacattaacccttgtcgtatggattgttattggatttattgattttggagttgtgcaaagatattttccaaatccaaataaacacataagtcaaacggaagttattattagatttgcctttcaaacaagtattacagttttgtgtattgcatgtccttgtagtttaggacttgctacaccaacagcagttatggttggtacaggtgtagctgctcaaaatggtatcttaattaaaggaggtaaaccattagaaatggctcataaaattaaaacagttatgttcgataaaacaggaacgatcactcatggagttccaagagttatgagagttcttttattaggagatgttgcaacattaccacttcgaaaagtattagcagttgttggtacagctgaagcaagttcggaacacccacttggagttgctgttactaaatattgtaaagaagaattaggaactgaaactctaggatattgtacagacttccaagcagttccaggatgtggaataggatgtaaagtttctaatgttgaaggtattttagcacattctgagagaccactttcagctcctgcatcacatcttaatgaagcaggatcattaccagcagaaaaagatgcagttccacaaacattttcagtcttaataggtaatagagaatggttaagaagaaacgggttaaccatttcatcagatgtttcagatgcaatgactgatcatgaaatgaaggggcaaacagctatacttgttgctattgacggtgtattatgtggaatgattgcaattgcagatgcagttaaacaagaagctgctcttgcagttcatactcttcaatctatgggagtcgatgttgttctcattacaggtgataatagaaagactgctagggcaattgcaactcaagttggaattaataaagtatttgcagaagttttaccaagtcataaagttgctaaagtacaagaattacaaaataaaggaaaaaaagttgcaatggttggtgatggtgttaatgattcaccagcacttgctcaagctgatatgggtgttgcaattggaacaggaactgatgttgctatagaggcagctgatgttgtacttataagaaatgatttattagatgttgtagcatcaattcatttatcaaaacgtactgttagaagaattagaattaatcttgttttagctcttatttataatcttgtaggaatccctatagctgctggtgtatttatgccaatcggaattgtattacaaccatggatgggatcagcagctatggctgctagttcagtttcagttgttctttcttcactacaacttaagtgttataaaaaaccagatttagaacgttatgaagctcaagcacatggacatatgaaacctttaacagcttcacaagtttcagttcacataggtatggatgacagatggagagattcaccaagagctacaccatgggatcaagtctcatatgtaagtcaagtttcattatcatcattaacttcagataagccatctagacattctgcagctgctgacgatgacggagataagtggtctttattgttaaatggaagagatgaagaacaatatatt

SEQ ID NO: 7439 - DNA, 4395 bp, synthetic construct
  misc_feature 1..4395: note = source = /note="Description of Artificial Sequence: Synthetic coding sequence"
  source 1..4395: mol_type = other DNA
atgcctgagcaggagaggcagattactgccagagaaggggcctcacggaagattctaagtaagctgtctctcccaacacgagcatgggaacccgccatgaaaaaaagcttcgcattcgataacgtcggttacgaaggtggtttggacgggctcggaccgtctagccaagtggcgaccagcaccgtgcgaatccttggtatgacgtgtcaaagctgcgtaaagtcgattgaagatcggatttccaatctgaagggcatcatatccatgaaagtctcccttgagcaaggatccgccacagtcaagtatgtaccgtctgtcgtttgccttcaacaggtgtgccaccagattggagacatggggtttgaagcatccatcgccgagggcaaggccgcaagctggcccagccggtcactccctgcacaggaggcagtggtcaagctcagagtcgagggaatgacttgccagtcttgtgtaagcagcatagaaggtaaagttcgcaagttgcagggggtggtcagggtcaaggtcagcctgtccaatcaggaggccgttattacttaccagccatacttaatccagcctgaagatttaagggatcatgtcaacgatatggggtttgaagcggctatcaagagcaaagtggctccactgtcccttgggccaatcgacatagaaagactccaatctacaaaccctaaaagacctctgagcagtgccaatcaaaacttcaataactccgaaaccctgggacaccagggctcacacgtggttaccttacaactccgcatcgatgggatgcattgtaaaagctgcgtactgaatatcgaggaaaacattggccaactgcttggcgttcagtccattcaagtaagtttggagaataaaaccgcccaggtgaagtatgatccctcttgcacttcccccgtggccctccagagagccatagaagctcttccgcccggcaactttaaagtatccctcccggatggcgcggaagggtcaggcaccgaccaccgctctagttcttcacacagtccgggctctccaccacggaaccaagtgcaaggtacgtgctctaccacgctcatagcaattgcgggcatgacgtgtgccagttgcgtacatagcatcgagggaatgattagccagttggaaggggtacagcagattagcgtgagcctcgccgagggcaccgctactgtgctctataatccatccgtgatcagtccagaggaactccgcgcagcaattgaggacatgggctttgaagctagcgtagtgagcgagagctgctccaccaaccccttggggaaccacagcgctggaaattcaatggtacaaacaacagatggtacaccgacatccgtgcaggaggtggcaccccacaccggtcgacttccagccaaccatgcccccgacatcctggccaaatctccacagagtacccgcgcagtcgcccctcagaaatgtttccttcagatcaaaggaatgacctgcgcgtcatgtgtgtccaacatcgaacggaatctccagaaagaagcaggagtcctgtcggtgctcgtcgctctgatggctgggaaagccgagataaagtacgaccccgaggtaattcagcctcttgaaatcgcgcagttcatccaggacctaggctttgaggcagcggtcatggaggattacgccggctctgacggcaatattgagctcactatcactggcatgacgtgtgcctcatgtgtccacaatatcgaatcgaagctaacacggaccaacggcattacctacgcctctgttgcactggctacttcaaaggcactggtgaaatttgatcctgaaatcataggacctagggacatcatcaagatcatcgaagagattgggttccacgcctccctcgctcagagaaatcccaacgctcaccatttagaccacaaaatggagataaagcagtggaagaaatctttcctgtgctctctggtgtttgggatcccagtgatggcgctgatgatttacatgctaatcccatctaacgagccgcaccaatccatggtgctggaccataatataataccgggtttgtctatcctgaacctcattttcttcatcctctgcacgttcgtgcagctgctcggaggatggtatttttatgtgcaggcctacaaatccctgagacaccgcagcgcaaacatggatgttctcatcgtgctggcgacgtcaattgcatatgtctattccctggttatccttgttgtggctgtggcggaaaaggccgagcgctcacccgtaacttttttcgacacgccccccatgcttttcgtgtttattgccctcggtaggtggttggagcacctcgcgaaatcaaaaactagtgaagcacttgccaaattgatgtcgctccaggcgactgaggccaccgtcgtgactctaggcgaagataatcttatcattcgggaggaacaggtcccaatggagcttgtgcagaggggagatatcgtcaaggtggtgccaggcggcaaattccccgtcgacggtaaggtgctggagggcaatacaatggccgacgaaagtctgattacgggcgaagcaatgcccgtgaccaagaaacccgggtccacagtgattgccggaagcatcaatgcccacgggtctgtgctaatcaaggctactcacgtagggaacgacaccacactggcccaaattgttaaattggttgaagaggcccaaatgagcaaggcaccgatccagcagctggctgacaggttcagtggttattttgtcccttttatcattattatgagtactctaactctggtggtctggatagttatcggttttatcgactttggagtcgttcagcgctactttccgaatccaaataaacatatatctcagactgaggtcatcattaggtttgctttccaaacttccataactgtgttgtgtatcgcctgcccatgtagcttggggctggcaacaccgaccgcagtcatggtggggaccggagttgctgctcagaatggcatccttattaagggtggaaaacccctcgaaatggcccacaaaattaaaacggtgatgtttgataagactggaaccataacgcacggcgtaccacgcgtgatgcgggtattactactcggggatgtggccacactgcccctgaggaaggtcctggcagtggtgggtacggccgaagcctccagcgagcatcccctcggggtagccgtcacgaagtactgtaaagaggagctgggaactgagacacttggttattgcactgactttcaggctgttcccggttgtggcattggatgtaaggtaagcaacgtggagggaatactggctcactcagagaggcccttgagcgcacccgccagtcatctgaacgaggctggtagcctgcctgctgaaaaagacgcagttccacagaccttcagcgtattgataggtaatcgggagtggttacgcagaaacggcttaacaatctcttctgacgtttccgacgccatgacggatcacgagatgaaaggccagaccgcaatcctggtcgcaatcgacggcgtgctgtgcgggatgatcgcgatagcggacgcagtgaagcaggaagccgcactggccgtgcacacacttcaaagcatgggagtggatgtggtccttatcacaggcgataatcggaagacagctcgtgcaatcgctacccaggtgggaattaataaagtgtttgccgaagtgctcccaagccataaggtggctaaggtgcaggaattgcagaacaagggaaagaaggtggcaatggtaggggacggagtcaacgatagccccgctctcgcccaggccgatatgggcgtggcaatcggcaccggcactgatgtggcgatagaggccgccgacgtagtcctgatccggaatgacctgctggacgttgttgcttctatccacctgtccaagcggacggtgcgtcgaattcggatcaatttggtgctcgctttgatttacaacttggtcggtattcccattgcagctggggtcttcatgccaattggcattgtactacagccttggatgggctccgcagccatggcagcctcctccgtgagcgtggtcctgagctccctgcagctgaaatgttataagaaacctgacctagagcgttatgaagctcaggcccatggccatatgaaaccattgaccgcatcccaagtcagcgtgcacattgggatggacgaccgctggcgtgattctccgagggccacaccgtgggatcaagtcagttacgtaagtcaggtgagcctgtccagtctcacgtctgacaaaccttcccgccacagcgcggctgctgacgatgacggggataaatggagcctcctgcttaatggcagagacgaggagcagtacatt

SEQ ID NO: 7440 - DNA, 4395 bp, synthetic construct
  misc_feature 1..4395: note = source = /note="Description of Artificial Sequence: Synthetic coding sequence"
  source 1..4395: mol_type = other DNA
atgcctgagcaggaaaggcagatcacagctcgggaaggggcatcaagaaaaatcctatctaaactgtcactccccactagggcttgggaaccagctatgaagaaaagttttgccttcgataacgtgggatacgaaggagggcttgatggactcgggccttcaagtcaggtggccacatcgacagtgcgcattcttgggatgacatgtcaatcctgcgtgaaaagtatagaggataggatatcaaacctcaaaggaataatctctatgaaggtctccctagagcaggggtctgccacagttaagtacgtgccttccgtggtttgtttgcagcaggtgtgtcatcagataggagatatgggattcgaagcatctatagctgaaggaaaagcggcctcttggccatctaggtcactcccagctcaggaggccgtggtaaaattgcgcgtggaagggatgacatgtcagtcctgtgtctcgtccattgagggaaaggtcaggaaactacagggagttgtgcgagtaaaagtcagtttgtctaatcaggaggcagtcatcacttaccagccttatctcattcagcctgaagatcttagggaccatgttaacgatatgggattcgaggccgctatcaagtcaaaagtcgcacctttatccctcggaccaattgatatcgaaagattacagtctactaaccctaaaaggcccttatcttcggccaaccagaattttaataactcagaaacactgggacaccaggggtcacatgttgtgacacttcagcttagaatagatggaatgcattgtaagtcatgtgtattgaatatagaggaaaacatcggacaactcctcggggtgcagtcgatacaggtcagtctagaaaataagacagcacaggtaaagtatgatcccagttgcacaagtcccgtcgcactccagagggccattgaagcactgccccctggaaacttcaaagtgtctctgccagatggggctgaaggatcaggaactgatcatcgatcctccagtagtcattcccctgggagtcccccccggaatcaggtccaggggacttgttccactacactgatagccatagcagggatgacatgtgctagttgtgttcattccatcgaggggatgatctcacagctggaaggggtccagcagatatctgtatctcttgcggaagggacagctacagtattgtacaaccctagtgtcatctctcctgaagagcttcgggctgcgatagaagatatggggttcgaagcgagtgtggttagtgaatcctgttccactaatccccttgggaatcattccgccggaaacagtatggtgcagactactgatgggacaccaacatccgtccaggaagttgcgccccatactggaaggcttcctgcaaatcatgcgcccgatatactcgcaaagagtccacagtctactcgggctgttgccccacaaaaatgctttctccagattaaaggaatgacatgtgcctcctgtgttagtaacatagaacgaaatctacagaaagaagcaggagtgctgtctgtcctggtagctctcatggctgggaaggccgaaatcaaatatgacccagaagtcatccagccactcgaaatcgcccagtttatccaagatcttgggtttgaggccgccgtaatggaggactacgctgggtccgatggaaatatcgagcttacaattactgggatgacgtgcgcttcttgtgttcataatattgagtctaaactaactaggactaacggaatcacttatgcgtccgtcgccctggccacttcgaaagctctcgtgaaatttgatcccgaaatcatcgggcctagagatattatcaaaatcatcgaagaaataggatttcacgcaagtctcgcccagaggaaccctaatgcacatcatctcgaccacaaaatggaaataaagcagtggaaaaaatcattcctctgttcactagtattcgggattcctgtgatggctctgatgatctacatgctgatcccctccaacgagcctcaccagtccatggtgctggaccacaacatcattccaggactgtccatccttaacctaattttcttcatcctttgcacatttgtgcaactgctagggggatggtatttttatgtgcaggcctacaaatccctccgccacagatcagctaacatggatgtgttaattgtgcttgccacatccatagcctacgtctattctcttgtgatacttgtggttgctgtggcagaaaaagccgaaaggtctcctgtaacattctttgacacaccccccatgctctttgtttttatagccctgggaaggtggctagaacatctcgccaaaagtaaaacatctgaagcactggcaaaattgatgtccctgcaggctactgaagccacagtggtcactctaggggaagataacctaataatccgcgaagaacaggtacccatggaacttgttcagcgcggggatatcgtaaaagtggtgccaggagggaaattccctgtagatggaaaagtcctagaaggaaacactatggctgatgaatctctgataacaggagaggctatgcctgtgacaaaaaaaccaggatcaacggtcatcgccgggtctataaatgcacacggaagtgtcctgatcaaagcaactcacgtcggaaatgatacaactctagctcagatcgtgaaactcgtcgaagaagcccagatgtctaaagcaccaatccagcagctagcggataggttttccggatactttgtacctttcattatcataatgtctacactgacattagtggtctggatcgtgataggatttattgattttggggtggtgcagagatatttcccaaacccaaacaaacacatcagtcagacagaagtcataatcaggtttgctttccagacatctatcactgttctctgtattgcctgcccctgctcactagggttagcgacacccactgctgtaatggtgggaacaggagtcgccgcacagaatgggatacttattaaagggggaaaacccctcgaaatggcccacaaaatcaaaactgtcatgttcgataaaacagggacaataactcatggagtgccccgagtaatgcgagtgctcttgcttggagatgttgctactctcccactccggaaagtgctcgccgtggtggggacagctgaggcctcctccgaacaccccttaggggtggctgtaactaagtattgtaaggaagaactgggaactgaaactctagggtattgcactgattttcaagctgtccctgggtgtggaatagggtgtaaagtatctaacgtggaggggattttggcacattctgaaaggcccctctccgcacccgcttcacacctaaacgaagccggatccttacccgccgaaaaagacgccgtcccacagacattctcggtcctgatagggaatcgagaatggctgcgcaggaacggactgacaatatcatccgatgtatctgatgctatgactgatcatgaaatgaagggacagactgccatcctggtcgctatagacggggtactgtgtgggatgatcgcaatcgccgatgcggtgaaacaggaagctgccctcgcggtgcatactctacagtctatgggagtggatgtcgttttaattactggagataaccgaaaaactgccagggccatcgccacacaggtgggaataaataaagtgttcgccgaagtcttaccttctcataaggtggctaaagtgcaggaactacagaataaaggaaaaaaagttgcaatggtcggggatggagtgaacgatagtcccgccctcgcacaggctgatatgggggtggctattggaacagggactgatgtggccattgaagcagccgatgtcgttctgatccgcaacgatctcctagatgtagtcgcttctatacatctctctaagcgcactgtgaggagaatacgtataaatttagtcctggctttaatttacaaccttgtaggaattcccatagcagcgggggtctttatgccaataggaatcgtgctccagccctggatgggatctgctgctatggcggcgtcatccgtgtccgttgtgttgtccagtctgcagctaaagtgctataagaaacccgacctggaaagatatgaagcccaagcccacgggcatatgaaacccctgactgctagtcaggtgtccgtacatattgggatggatgatcggtggagggattccccacgggcaacaccctgggatcaggtgtcatatgtgtctcaggtcagtctctccagtcttacgagtgacaaaccctctagacattctgccgccgctgacgatgacggggataaatggtcattgttactgaacgggagggatgaagaacaatacatc

SEQ ID NO: 7441 - DNA, 4395 bp, synthetic construct
  misc_feature 1..4395: note = source = /note="Description of Artificial Sequence: Synthetic coding sequence"
  source 1..4395: mol_type = other DNA
atgcccgaacaggagagacagataaccgccagagagggcgcatctagaaaaatacttagtaaacttagtttacctactagggcttgggagcccgctatgaagaaatcatttgccttcgacaacgtggggtatgaagggggcctggacggattgggccctagctcacaggtggccactagcactgtgcggatcctcggcatgacctgccagtcttgcgtcaaatcaattgaagataggatcagcaatctcaagggcataattagtatgaaagtgagtttagagcagggatctgctactgtcaagtacgtcccgtccgtagtttgtctgcagcaagtatgccatcagattggggatatggggtttgaggcctcaattgctgagggaaaggccgcatcttggcccagtaggtccctgccagcccaggaggctgtagtaaagctgagggttgaaggtatgacttgtcaaagctgcgtgtccagtatcgagggcaaggtgagaaagcttcagggagtagtacgagttaaggtctccttgtccaaccaggaagcggtcatcacatatcaaccctacctgatccagcctgaggatctgagggaccacgtgaatgatatgggctttgaggcagcgatcaaatctaaagtagcacccctgtctctgggtcctatcgatatcgagcgtctacagagcactaatccgaagagacctctttcatctgctaatcagaatttcaacaactctgagaccctcgggcatcagggatcccacgtcgttacactccaacttcgaatagacggcatgcattgcaaatcgtgtgtcctgaatattgaagagaatatcgggcaactcctgggggttcagtctatacaggtgagcttagaaaacaagacggcccaggtaaaatacgatcctagctgcacatccccagtggcccttcaaagggccattgaagccttacccccgggcaacttcaaagtgtctctccctgatggggccgaaggaagcggaaccgaccaccgttcaagttcttcgcacagtccagggtccccgccgagaaatcaagttcagggcacatgttccactactctcattgccattgccggaatgacatgtgcttcttgcgttcattcgatcgaaggcatgatcagtcagctggaaggggtccagcagattagcgtgtcgctagctgagggaaccgctactgtactctacaacccttctgtgatttcacccgaagagcttagagccgctatagaagacatgggatttgaagcctctgtcgtgtcagaatcttgttccacaaacccacttggaaatcacagcgctgggaactctatggtgcagacaaccgatggcacccccacgagcgtgcaggaggtagcacctcacacaggccgactgcctgccaaccacgcccccgacatactggcaaagtcccctcagtcaactagagcagtggctcctcagaaatgttttcttcagatcaagggcatgacctgcgcctcatgcgtgagtaacattgaaaggaacctccaaaaggaagctggcgtcctgagcgtcttggtggccctgatggcaggaaaggctgaaatcaagtacgacccagaggtcatccagccactcgagatcgcccagttcatccaggatctggggttcgaagcggcagtcatggaggactacgccggctccgacggcaatatagagctgacaattacggggatgacatgtgcctcctgcgtccacaacattgaatccaagctaactagaacaaacgggataacgtatgcttctgttgcgctagccacatcaaaagcgctcgtgaagtttgatcctgaaattataggacctcgagatattatcaagatcatcgaagagattggcttccacgcttccctcgcacaaagaaatcctaatgcccaccacctcgaccacaaaatggagattaagcagtggaagaaaagcttcctgtgctccctggtgttcggtatccccgtaatggccctcatgatatacatgctcatcccttctaacgagcctcatcagagcatggtcttagatcacaatatcattcccggactgtccatattaaatcttatcttcttcattttgtgcactttcgtgcagttgttgggcggatggtacttttacgtgcaagcgtacaagagcctgaggcacaggtccgctaatatggacgtgttaattgtactcgcgacaagtatcgcctacgtttacagtctggtgattcttgtggtggcggtcgctgaaaaagcagaaagatccccagtcacgttcttcgatactccaccgatgctctttgtatttatagctttgggtagatggctggaacacctagctaagtccaagacttccgaggcattggcgaaattgatgtctcttcaggcaaccgaagctactgtggttacccttggcgaagacaatctcataataagggaagaacaagtgcccatggaactcgtccagaggggggatatagttaaagtggtgcccggcggcaaatttcccgtggatgggaaggtcctagaaggaaatacgatggctgacgaatctttgattactggcgaagcaatgcctgtaactaaaaaacctggctctactgtgatagctggctctattaacgcacatggctccgtgctgatcaaggcaacccacgtgggaaacgatacgactctcgcccaaatcgtaaagcttgtagaagaggcccagatgtccaaagctcccatccagcagttagctgacagattctcagggtacttcgtgccgtttatcataatcatgtccaccctcactctcgtggtatggatagtgatagggtttattgattttggcgtcgtccagcgctatttcccaaatcctaataagcacatttcacaaaccgaggtgatcatcagatttgcttttcagacttctatcaccgtgctgtgcatcgcgtgcccgtgttctttgggactggcgactccaacagccgtgatggtaggcaccggagtggccgcccagaacggcattcttataaagggaggaaaaccgcttgaaatggcccataagataaagacggtgatgtttgacaagaccggaacgatcacgcacggggtaccccgtgtaatgcgggttctgttgctcggtgatgttgccaccctcccactgcgaaaggtgctcgccgtggtcgggacagctgaggcttcctcagaacaccccctaggggtcgctgtcacaaaatattgtaaggaggagctgggcacagaaacccttggctattgtacagacttccaagcagtaccagggtgcggtatagggtgcaaagttagcaatgtggaagggattcttgcccacagcgagaggccactgagtgctcctgcttcacaccttaatgaagcaggatcactgcctgccgagaaagatgccgtcccccagaccttttccgtgcttatagggaatagagagtggctgagaaggaacgggctgactatctctagcgatgtgtcggacgcaatgaccgaccacgagatgaaagggcagaccgctatactagttgctatagacggcgtgctgtgcggaatgatagcaatcgcggacgccgtcaagcaggaggcagccctagccgtgcatacactacagtctatgggggtggacgtcgtactgatcaccggcgacaaccgcaagaccgcacgagctatcgcaacacaagtaggcatcaataaggtgtttgcggaagtgctacccagtcacaaggtggccaaggtccaggaactgcagaacaaaggcaaaaaggtagcaatggtaggcgatggcgtaaacgactcccccgctcttgctcaggccgatatgggcgtcgccattggcactggaaccgatgtagcaattgaagcagctgatgtcgtacttatccgaaacgacctattggacgtcgttgcaagcatccacctgagcaaaagaacagtgaggagaatccgaattaatcttgttctggccctcatctacaatctcgtcggcatcccaattgctgccggggttttcatgccaattggaattgtactgcagccttggatgggtagtgccgccatggcagctagctcagtctcagtggttctgagctcactgcagctcaagtgttataagaaaccagatctggagagatatgaagcccaggcccacgggcacatgaaacccctgacagcctcacaggtgagcgtccatatcggcatggacgataggtggcgggattccccaagggccaccccctgggaccaggtgagctatgtgtcccaggtgagtttgtcgagcctcacatcggataagccaagtcggcactcagccgcagccgacgatgacggtgacaagtggtcgctgctgctgaatggcagggacgaagagcagtatatt

SEQ ID NO: 7442 - DNA, 4395 bp, synthetic construct
  misc_feature 1..4395: note = source = /note="Description of Artificial Sequence: Synthetic coding sequence"
  source 1..4395: mol_type = other DNA
atgccggagcaggaacgccaaattaccgccagagaaggggcatccagaaaaatcctttcgaaattgtccttgcccactagggcgtgggaaccagcaatgaaaaagtccttcgcatttgacaacgtcggatatgaggggggtctggatggactgggcccttcgtcccaagtggctacttcgactgtgcgtattctcgggatgacctgtcagtcctgtgtgaagagcatagaggatcgaatctccaatcttaagggaattatcagcatgaaggtgtctctcgaacaaggaagcgcaaccgtgaagtacgtgccttcggtggtgtgccttcaacaagtgtgtcatcaaatcggtgacatgggcttcgaggctagcattgcggaaggtaaggccgcatcgtggccttcacggtccctcccagcacaagaggcagtggtcaagttgcgcgtggagggcatgacttgccagtcatgtgttagctcgatcgagggaaaagtgaggaaacttcaaggggtggtccgtgtcaaggtgtcgctctcgaatcaagaagccgtgattacttaccagccctacctgattcagcctgaagatttgagggaccatgtgaacgatatggggttcgaagcagctattaagtccaaggtcgcgccactgagcctgggtcccattgatatcgaaagattgcaatccactaatcctaagcggcctttgtcgagtgcaaaccagaacttcaacaattcagagactctcggacatcagggatcgcacgtggtgaccctccagcttcggatagatggtatgcattgtaaatcatgtgtccttaacatagaagagaacatcggacagctgttgggcgtgcaatcaatccaagtcagtctggaaaacaagactgcccaagtaaagtacgatccttcctgtaccagccctgtggcactccaacgcgcgattgaggcgctccctcccgggaatttcaaggtttcgcttcctgacggggcagagggatcgggtaccgaccatcggagctcgtctagccattcgcctggatcccctccccgtaaccaagtccaagggacttgctccactacccttattgcaattgctggtatgacttgtgcctcgtgtgtacattcaatagaaggaatgatcagccaacttgagggtgtgcagcaaatttccgtgagcctcgccgagggaaccgcgactgtcctttacaacccctcggttattagcccggaagaacttagagcagcaatcgaagatatgggtttcgaggcctcagtcgtgtcggaatcctgttcgaccaatccacttggtaaccattcggccggaaactcaatggtccaaacgactgatggtacccctaccagcgtccaggaggtggccccccatactggaaggctcccagcgaatcatgcaccagatatactggccaaatcgccccagtccactagagcagtggcacctcaaaaatgttttcttcagataaagggcatgacgtgtgcaagctgcgtatcgaatattgagagaaaccttcagaaagaagccggtgtgttgtcggtcctggtggcactgatggctggaaaggcagagattaagtacgacccggaagtgattcaacccctggagatcgcacagtttattcaggaccttggttttgaggctgcagttatggaggattacgccggcagcgacggcaatatcgagctgaccatcactggaatgacttgcgcctcctgtgtgcacaatatagaatcaaaactgaccagaactaacgggattacgtacgcatccgtcgcccttgcaacctccaaggccctcgtgaaattcgacccggaaatcatcggaccacgagacatcataaagatcattgaagagattggatttcacgcatcactggcacaacgcaacccaaacgcacatcacctggatcacaagatggaaatcaaacaatggaaaaagtcttttctgtgctccctggtctttggaattcctgttatggcattgatgatttacatgctcattccatccaatgaaccccaccaatccatggtcctcgatcacaatatcattcctggtctttccatcctgaacttgattttcttcatcctgtgcaccttcgttcagcttctgggcggttggtacttttatgtgcaggcatacaagtcactccggcataggagcgctaacatggatgtactgatcgtgctggcgacgtctatcgcgtacgtgtattccctcgtgatcttggtcgtggcggtggcggaaaaggcagaacgatcgccggtgacgttctttgataccccaccaatgctctttgtgtttatcgcgcttggaaggtggctcgaacatctggccaagtcgaaaactagcgaggctctggccaagctgatgtcccttcaggcaaccgaagcgacggtcgtgactcttggtgaggacaacctgattattcgtgaggaacaagtccctatggaattggtgcagcggggagatatcgtgaaagtggtgccaggaggcaagtttcctgtggatgggaaagtactcgaaggtaatactatggcagatgaatcactgatcaccggtgaagcaatgcctgtgactaaaaagccaggctctactgtgattgccggctccattaacgcccacggttcagtcttgataaaggcaacccatgtgggtaacgacactaccctggcacagattgtgaagctggtggaagaggcgcaaatgtcaaaggcaccaattcaacagcttgcggaccgattttccggttactttgtgccctttatcatcatcatgtcgacgcttactctggtcgtctggatcgtgatcggctttatagactttggtgtcgtgcagcggtacttcccaaatcccaacaaacatatttcacaaaccgaggtcattatacgttttgcgtttcagacgtcaattaccgtgttgtgcattgcatgtccgtgtagcctgggtcttgccacccctaccgcagttatggtgggaactggagtcgccgctcaaaacgggattctgattaagggaggcaaaccactcgaaatggcccataagatcaagaccgtgatgtttgataagacgggaaccattacccatggggtgcctcgcgtaatgcgcgtgctgctccttggagatgtggctactctgcctctcagaaaggtccttgcagtcgtcggtacggccgaagcaagctcggaacaccctctgggcgtggcggtgaccaaatactgcaaggaagaactgggtaccgagactttgggatactgcaccgattttcaggcagtgccggggtgtgggatcggatgtaaggtgtcgaacgtggaagggattcttgcgcactcagagaggccccttagcgctccagcatcgcatctgaatgaagccggctccctgcctgcagaaaaggatgcagtgccacagaccttttcggtcctgatcggcaatcgagaatggcttagaagaaacggacttaccatttcatcggacgtgtcggacgcaatgaccgatcacgaaatgaaggggcagactgcgatcctcgtggccatagatggcgttctttgtggtatgatcgcaattgctgatgccgtcaagcaggaagcagccctggcagtccacaccctgcaatcaatgggtgtcgatgtggtgcttattaccggagataacagaaagacggcaagagctattgcaactcaagtgggcattaacaaggtgttcgcagaagttcttccctctcataaggtggccaaggtccaagaacttcagaacaagggaaaaaaggtagctatggtcggagatggagtgaacgattcccccgcactcgcacaggcagacatgggagtggcaatagggaccggcactgatgtggcaattgaggcggcagacgttgtgctcatccgaaatgaccttctggacgtcgtggcaagtattcaccttagcaagcgcaccgtcagacggatacggatcaacctggttctggctctgatttacaatctcgtaggaatccctattgcagcgggagtattcatgccaataggaattgtgctgcaaccatggatgggctccgccgccatggcagcctcgtcagtctcggtggtgctgagcagccttcaacttaagtgctacaagaagcctgatttggaacgctacgaagcacaggcacatggacacatgaagccgctgactgcaagccaagtgtcagtgcatatcgggatggacgaccgctggcgggatagccctagagccaccccatgggatcaggtgtcatacgtgagccaagtgtccctctcctcacttactagcgataagccatcccgacattcagcagctgcagatgacgatggagataaatggtcccttctgcttaacggcagagacgaagaacagtacatt

SEQ ID NO: 7443 - DNA, 4395 bp, synthetic construct
  misc_feature 1..4395: note = source = /note="Description of Artificial Sequence: Synthetic coding sequence"
  source 1..4395: mol_type = other DNA
atgccggagcaagaacgccagatcactgcccgcgaaggtgcctcacgcaagatcctctcgaaactgtcactgccgacccgcgcgtgggaaccagcgatgaagaaatcatttgccttcgacaacgtgggatacgaaggaggtctggatgggctgggaccaagctcccaagtggcaacctccaccgttcggatcctgggtatgacgtgccagtcttgcgtgaagtcgattgaggatagaatatcaaacctcaaaggtatcatctccatgaaggtgtcactggaacagggctccgctactgtcaaatacgtcccgtcggtggtgtgcctgcaacaggtgtgccatcaaatcggagacatgggctttgaagcctcgattgctgaaggaaaggctgcaagctggccatccagatccctccctgctcaagaggcagtcgtcaagctccgcgtggaaggaatgacctgtcagtcctgcgtgagctccattgagggtaaggtgaggaaattgcagggcgttgtgcgggtgaaagtctcgctgtcgaaccaggaagccgtgatcacctaccagccctacctcatccagccagaggacctccgcgaccacgtgaacgatatggggttcgaagccgctatcaagagcaaggtggcgccgctttcgctggggccaatagacatcgagcggctgcagtcgactaatccgaagcgcccactctcatcggccaatcaaaacttcaacaacagcgaaactttgggccaccaaggttcacatgtcgtgaccttgcaactgcggatcgatggaatgcactgcaagtcctgtgtcctgaacatcgaggagaacatcgggcagctccttggtgtgcagtcgatccaagtttccctcgagaataagactgcccaggtcaaatacgacccatcctgcacttcacctgtcgcgctgcagcgggcaatcgaggccctcccaccgggaaacttcaaagtctcgttgcccgacggagcggagggaagcggcaccgaccatagatcaagctcatcgcactcgcccggatcaccgccgcgcaaccaagtgcaagggacttgctccaccactctgatcgctatcgcgggcatgacgtgtgcaagctgtgtccatagcatcgaaggtatgatctcccaactggaaggggtgcaacagatctccgtgtcgctggcagaaggaaccgcgaccgtgctgtacaatccgtccgtgatctcaccggaagagctgcgagccgccatcgaggacatgggcttcgaagcatcagtcgtgtccgaatcatgttccaccaaccctctgggaaaccattccgcgggaaatagcatggtccaaaccactgacgggacccccacttcggtgcaagaagtggcgcctcacaccggccgactgccggccaatcacgctcctgacatcttggccaaatcgccacaatccaccagggcagtggccccgcagaagtgctttctgcagattaagggaatgacctgcgcctcatgcgtctccaacatcgaacggaatctgcaaaaggaggcgggagtgctctctgtgctcgtggcgctgatggcgggaaaagctgagatcaagtacgacccggaggtgattcagccccttgaaatcgcccagttcatccaggacctgggatttgaagccgccgtcatggaggattatgctggaagcgacggcaatatcgaactgactatcaccggaatgacttgcgcgtcctgtgtgcacaacatcgaatccaaactcactcgcactaacggaatcacctatgcgtccgtcgccctcgccacctccaaggctctggtgaaattcgacccagagatcattggaccgagagacatcatcaaaatcattgaagaaatcggttttcacgcgtccctggcgcagagaaatccgaacgcccatcatctggaccacaagatggaaatcaagcagtggaagaaatcctttctctgctccctggtgttcggcatccctgtcatggccctcatgatctacatgctgattccatctaacgagccccaccaaagcatggtgctggaccacaatatcattcccggactgtcgatcctgaacttgatcttcttcatcctgtgcaccttcgtgcagctcctcggcgggtggtacttttacgttcaagcgtacaagtccctgagacacagatccgctaacatggacgtgttgatcgtgctggctacctccatagcctacgtctacagcctggtgatccttgtcgtggccgtggcagagaaggcagaacgctctccagtgaccttcttcgatacgcctccgatgttgttcgtgttcatcgccctcggacgatggcttgagcatctggctaagtcaaagacctccgaggctctcgctaaacttatgagcctccaagccaccgaggccaccgtggtcactctgggggaggataacctgatcatcagggaggaacaggtgccgatggaattggttcaacgcggtgatattgtgaaggtcgtcccgggcggaaagttcccagtggacggaaaggtgctggaaggaaacactatggccgacgagtcattgatcacgggagaggccatgccggtcaccaagaaaccgggatccaccgtgatcgccgggtccatcaacgcacatgggtcagttttgatcaaggccacgcatgtcggaaatgacaccaccctggcccagatcgtgaaacttgtggaagaggcgcagatgtccaaggcaccaatccagcagcttgcagacagattctctggctactttgtgcctttcatcataatcatgagcactttgacgcttgtggtgtggatcgtgattggattcatcgactttggagtggtccagagatacttcccgaatcccaataagcacatctcccagacggaagtcatcatcagattcgcgttccagactagcatcactgtgctgtgtatcgcctgcccttgttcactcggccttgccaccccgaccgcagtgatggtgggaactggcgtggctgcccaaaacggaatcctcatcaagggagggaaaccgctggagatggcccacaagatcaagactgtcatgttcgacaaaaccgggactatcacgcatggtgtgccgcgggtgatgcgcgtcctgctcctgggtgatgtggccaccctcccgctgcgcaaggtgctcgccgtggtcggaaccgcagaagcaagctccgagcatccgcttggagtcgccgtcaccaaatactgtaaagaggagcttggcaccgaaaccctgggatactgcaccgatttccaagcagttcccggatgcggaattggctgtaaggtgtcgaacgtcgaaggtatcctggcacactcggaaagaccgctgtcagccccggcctcccacctcaacgaggccggatcgctgccagcagaaaaggatgctgtccctcagaccttctcggtgctgatcggaaatagggaatggctccgccggaacggtctgactattagctcggatgtgtcagacgctatgaccgatcacgagatgaaagggcagacggccatcctggtggccattgacggagtcctctgcggtatgatcgcaatcgctgacgccgtcaagcaggaagccgcgttggccgtgcacaccctgcagtctatgggtgtggacgtggtgcttattaccggagataatcgcaaaactgcccgtgccatcgccacgcaggtcggaatcaataaggtctttgccgaggtgctgccaagccacaaagtggctaaggtgcaagaactgcagaataagggaaaaaaggttgcgatggtcggggatggagtgaacgatagcccggctctggcccaggccgacatgggagtggccattgggactgggactgatgtggccatcgaagctgccgacgtcgtgcttatccgcaatgacctgctggacgtggtggcttccattcacttgagcaaaaggaccgtgaggcggattcgcatcaacctcgtgctggcactgatctataacctggtgggtatcccaatcgctgcgggcgtgttcatgccgatcggaatagtgctgcagccctggatgggaagcgccgcaatggccgcgtcgtcagtcagcgtggtcttgtcgtcgctgcagctcaagtgctacaagaagccggacttggaacgctacgaagcacaggcacatgggcatatgaagccgctgacggcatcccaggtgtcagtgcatattggcatggacgatcggtggcgtgattccccgcgtgcgactccgtgggatcaggtgtcatacgtgagccaagtgtctttgtcgagcctgacttcagacaagccgtcaagacattccgctgccgcagatgacgatggggacaagtggtcgctcctcctcaatggccgggatgaggagcagtacatc

SEQ ID NO: 7444 - DNA, 4395 bp, synthetic construct
  misc_feature 1..4395: note = source = /note="Description of Artificial Sequence: Synthetic coding sequence"
  source 1..4395: mol_type = other DNA
atgccagaacaggagaggcaaattactgcaagagaaggagcgagcagaaagatactgagcaaactttcccttccaacgcgcgcgtgggagccagcaatgaagaagtccttcgcgtttgataatgtgggttacgaggggggtctggacggtcttggacctagctcccaggtggcgacctcgaccgtgagaattcttggtatgacgtgtcaatcgtgtgtgaagtccattgaagatagaattagcaacttgaaggggatcatttcgatgaaggtgagcctggaacaaggttcagcaactgtcaagtacgtcccgagtgtggtgtgtctgcagcaggtctgccaccaaattggggacatggggtttgaagcctcaattgccgagggaaaggcggcatcctggccatcgagatcgcttccggcgcaggaagcagtggtgaagctgcgcgtggaggggatgacctgtcagtcgtgcgtctcctccatcgagggaaaagtccggaagctgcaaggagtcgtgcgggtcaaggtttcgctgagcaaccaagaggccgtgatcacgtatcagccctaccttattcagcctgaagatctgcgggaccacgttaacgatatgggctttgaggcagcaatcaaatcaaaggtggcacctctgtccctgggcccgattgacattgaacgtttgcagtcgactaatcccaagcgtccactgagctcagcgaaccaaaactttaacaatagcgaaacccttgggcatcaaggttcacatgtggtgacgcttcagctcagaattgatgggatgcactgcaagtcatgtgtgcttaacattgaagaaaacatagggcaacttcttggcgtgcaatcaattcaggtgtcactggagaacaagactgcacaggtaaagtatgatccttcctgtaccagccccgtggctttgcagagagcaattgaggccctgccacctggtaacttcaaggtttccctcccagatggagcagaaggctcgggcactgaccatcgaagctcgtctagccactcccctggatcgcccccaagaaaccaagttcaggggacttgctccactaccctcatcgcaatcgcggggatgacttgtgctagctgtgtgcattcgatcgaggggatgatttcgcaactggaaggagtgcagcaaataagtgtgtccctggcggaaggtactgccaccgtcctgtataatcccagcgtcatcagcccggaagaactccgagcagcaatcgaagatatgggatttgaggcgtcagtggtgtctgagtcgtgttccactaatccccttggaaaccattcggcgggaaactcgatggtgcaaaccaccgatggaactccaaccagcgtgcaagaagtcgccccacacaccggacgcctcccagcaaatcatgcacccgatatcctcgcaaagtcgccacagtccacccgagcagtggctcctcagaaatgtttcctccagatcaaaggaatgacctgtgcttcctgcgtgtcaaacatagagagaaacctgcaaaaggaggcgggtgtcctctccgtgcttgtggctctgatggccggtaaagcagaaatcaagtacgatcctgaagtcattcaacctcttgaaatagcgcagtttattcaggatctgggttttgaggccgcagtgatggaagattacgccggcagcgatggcaatattgaactgactataactggtatgacttgcgcatcgtgcgtgcataacattgaaagcaagctgaccagaaccaacggcatcacttacgccagcgtggcactggcaacttcgaaggcactcgtcaagtttgatcctgagatcattggtcctcgggatatcatcaagatcattgaggagattggatttcatgcaagccttgcacaaaggaaccctaatgcgcatcaccttgatcacaaaatggaaatcaagcagtggaagaagtcatttctgtgctcattggtgtttggaattccggtcatggccctgatgatatacatgttgataccatcgaatgaacctcatcaatccatggtcctggatcataacattattcccggcttgtcgatcctgaacctgatattcttcattctctgtacttttgtgcaactcctcggaggctggtacttttacgtgcaggcatacaaatcccttagacatcgatcagccaatatggatgtgcttattgtgttggcaacctcgatcgcatacgtgtactcccttgtgattctcgtcgtggccgtcgcggaaaaagcggaacgtagccctgtgactttctttgacactccaccaatgcttttcgtgttcatcgccctgggtcgatggcttgaacatttggccaagtcaaagacttccgaggcacttgcaaagctcatgagcctgcaggcaacggaggcaaccgttgtgactctcggagaagataatctgattattcgggaagaacaagtccctatggaacttgtgcagcggggagatattgtgaaggtggtgcccggaggaaagtttccagtcgatggtaaggtgctggaaggtaacaccatggcagatgaatcgctcatcacgggagaagccatgcccgtaacgaaaaaaccgggttcgactgtgatcgccggttcaattaacgcacacggatcggtattgatcaaagccactcatgtgggtaacgacactacccttgcacaaattgtgaagctggtggaggaagcccaaatgtcaaaggcccctatccaacaattggccgataggttctcaggctactttgtgccgtttatcatcatcatgtcgacccttaccctggtggtgtggatagtcattggattcatcgattttggagtggtgcagcgctacttcccaaatcccaacaaacacatttcgcaaaccgaggtgattatacggtttgcgtttcaaacttcgatcaccgtgctgtgtatagcgtgtccgtgtagcttgggtttggcaacgcctacggcggtcatggtgggtaccggggtggctgcccagaatggaatcttgattaaaggtggcaagcctcttgaaatggctcacaagataaagactgttatgttcgataagaccggcaccattacccatggtgtgcccagagtgatgcgcgtcctcctcctgggagatgtggccactcttcctctgcggaaggtccttgccgtggtgggaaccgcagaagcaagctcagaacatccactgggtgtcgcagtgactaagtactgcaaagaagaacttgggaccgaaacgctcgggtactgtaccgactttcaggccgtgcctggttgcggtattggttgtaaggtgagcaacgtcgaaggaattcttgcccattctgagcggcctctgtcggcacctgcaagccacctgaacgaagcagggtccctcccagcagaaaaagatgcagtccctcaaaccttttctgtcctcatcgggaatcgcgaatggcttagacggaatgggctgaccatatcgagcgatgtcagcgatgcgatgaccgaccacgaaatgaagggtcaaaccgctatactggtggcgatagatggagtcctgtgcggtatgatagcaatagcagacgcagtgaagcaggaagcagcgctggcagtgcacactctgcaatcgatgggagtggatgtggtccttataaccggagataatcgtaagacggctcgtgcaattgcgacgcaggtggggataaacaaagtgttcgcagaggtgctgcctagtcataaagtggcaaaggttcaggagctccaaaacaagggcaagaaggttgctatggtcggggatggtgtgaacgacagccctgcacttgcccaagccgacatgggtgtcgccattggaacgggaactgacgtggcgattgaagcagctgatgtggtgctcatccggaatgatcttcttgacgtggtggccagcatacatctttcaaaacgtactgtgagaagaataagaatcaatttggtgcttgcactgatctacaatctggtgggaatccccatagcggcaggcgtgttcatgccaatcggaatcgtcctgcaaccttggatgggatcggcggcaatggcagcatcgtcagtgtccgtggtgttgagctcacttcagcttaagtgttacaaaaagccggatttggagaggtacgaagctcaagcacatgggcatatgaagccactcaccgcgagccaagtgagcgttcatatcgggatggacgatcgatggcgtgatagcccacgggcaaccccttgggaccaggtgtcctacgttagccaagtctccctgagctccctcacctcggataagccttcgagacatagcgcggccgcagatgacgacggtgataaatggtcccttcttctgaacggtagggacgaagagcaatacatc

SEQ ID NO: 7445 - DNA, 4395 bp, synthetic construct
  misc_feature 1..4395: note = source = /note="Description of Artificial Sequence: Synthetic coding sequence"
  source 1..4395: mol_type = other DNA
atgccagagcaggagagacaaattactgccagagagggcgcatctcgtaaaatcctgtcgaaactttcccttcctactcgcgcctgggaaccagcgatgaagaagagcttcgcatttgataacgtgggatacgaaggaggtttggatggcctgggtccatcctcccaggtggctacctccacggtccgtattcttgggatgacctgtcagtcgtgtgtgaagtccattgaagatcggatatccaaccttaaggggatcatctcgatgaaggtgtctttggagcaaggaagcgcaactgtcaagtacgtcccttcagtggtgtgccttcaacaagtctgtcatcaaattggagacatgggttttgaagcatccattgcagaaggaaaggcggcctcctggccatcccgaagcctgcccgcacaggaagcagtggtcaagttgcgcgtggagggcatgacgtgccagagctgcgtgtcatcaatcgaaggaaaagtacgcaagctgcagggggtggtgagagttaaggtgagcctgtcaaatcaagaggcagtcatcacctaccagccttacctgatccaaccagaggaccttcgcgatcatgtgaatgacatgggctttgaggcagcgataaagtcgaaggtggcacctctgagccttggacctattgacattgaacgactgcaatcgactaacccaaagcgcccactctcgtcggcaaatcaaaacttcaataactcagagactctcggtcaccaagggtcccatgtggtcactcttcaacttcgtatcgacggaatgcattgcaagtcatgcgtgttgaatattgaagagaacatcggtcaattgcttggggtccaatcgattcaagtgagccttgagaacaagactgcacaggtcaagtacgatccttcctgtactagccctgtggccctgcaaagagccatcgaggcactgccccccggtaactttaaagtgtcgttgcctgatggtgcagagggctcgggtactgatcacagatcatcgtcgtcccattcgcctggttccccacctagaaaccaagtgcaaggaacttgttccactactcttatcgctattgcgggaatgacgtgcgcctcctgcgtgcactcgatcgaaggcatgatctcacagctggagggcgtccagcaaatctccgtaagtctggcagagggtacggcaacggtgctgtacaatccaagcgtcattagcccagaagaactccgggccgctattgaagatatgggattcgaagcgtcggtggtgagtgaatcgtgttccaccaatcccctcggtaatcattcggcgggcaactcaatggtgcaaactactgatggaacccccacctccgtgcaagaggtcgctccccatacggggagactgccagcaaaccatgcaccagacattcttgccaagtccccccaaagcactcgtgcggttgccccccaaaagtgttttctccagataaaggggatgacctgcgcaagctgtgtcagcaacattgagcggaatcttcagaaggaagcaggagtcctgagcgtgctcgtggcgcttatggccggtaaagcagaaatcaaatacgacccggaagtgattcaacctctggaaattgcacagtttatccaagatctgggtttcgaagctgcggtgatggaagattacgcaggatcggacggtaacattgagctcaccataaccggaatgacttgtgcttcatgtgtgcacaacattgagtcaaagctgacgagaactaatggcattacgtacgcatcggttgcacttgcgacctcaaaagcgctcgtgaagtttgatcctgaaatcataggaccacgcgacattatcaaaatcatcgaggaaattgggtttcatgcctcgcttgcacaacggaatcctaatgcacatcatcttgaccacaagatggagataaaacaatggaaaaagtcgtttttgtgcagcctggtgtttggtatcccagttatggctcttatgatctacatgctgatcccatcaaacgaaccacatcagtcaatggtcctggatcacaacatcatccccggacttagcattctgaacctgatattctttatactctgtacctttgtgcaactcctgggtggatggtacttctacgtccaagcgtacaaatcgttgcgacatcggtcggcaaatatggatgtgctgattgtgctcgccacctcgatcgcatatgtgtactcccttgtcatcctcgtcgtggcagtcgcagaaaaagcggaaagatccccggtgaccttttttgatacccctccaatgctttttgtgtttatagcactgggtcgctggctcgaacacctggcaaaatccaagacttcagaagcacttgcaaagttgatgagcctccaagcaactgaggcaactgtggttactctcggagaagataaccttatcattcgtgaggaacaggtgcctatggaactggtccagcgaggggatattgtgaaggtggtgccgggaggcaaatttccagtggacggaaaggtgttggagggtaacaccatggcggacgaatcccttattaccggtgaggcaatgcccgtgaccaagaaacccggttcaactgtgatcgcaggttcgataaatgcacatggttccgtgctgattaaagcaactcacgtgggtaatgataccactctggcacagattgtgaagttggtggaggaagcacaaatgagtaaagctcctatccagcagcttgccgataggtttagcggctactttgtgccattcatcattatcatgtccacgctgactctcgtggtttggatagtgatcggcttcattgatttcggggtggtgcaaagatacttccccaaccctaacaaacatatttcgcagaccgaggtgattatcagatttgcattccaaacctcgatcaccgtgctgtgtattgcgtgtccgtgttcgcttgggcttgcaacccctactgcagtgatggtgggaactggtgtggctgcacagaacgggattctgattaaaggcgggaaacctcttgaaatggcacataagatcaaaaccgtgatgtttgacaaaactggcaccatcacccacggggtccctagagtcatgcgagtgctgcttcttggggacgtggcaactctccctctgcgcaaggtgctggcagtcgtgggcaccgcggaggcgtcgtccgaacaccctctgggagtggcggtgactaagtactgtaaggaagaactgggcaccgagactctcggatactgtaccgacttccaagctgtgccaggttgcgggattggatgtaaggtgtcaaacgtggaagggatcctggcacattcggagcggcctcttagcgcgcccgccagccaccttaacgaggccggaagcctgccagcagaaaaagacgcagtgccccagactttctcagtgctgattggtaaccgggagtggctcaggcggaacggactgaccatttccagcgatgtctccgatgcaatgaccgaccatgagatgaaaggtcagactgcaatcctcgtagccattgatggagttctctgcggaatgattgcgattgctgatgccgtgaaacaggaggcagcgcttgctgtgcataccctgcagtcgatgggcgtcgatgtcgtgctgatcaccggagacaaccgcaagactgcacgcgccatcgcaacgcaagtgggcatcaacaaagtctttgcagaggtgctccccagccacaaggtggccaaagttcaagagcttcagaacaagggaaagaaagtggcgatggtcggggatggtgtgaacgactcgccggccctggcacaagctgatatgggcgtcgcgatcgggaccggtactgacgtggcgatcgaagcagcagatgtcgttcttattagaaacgacctccttgacgtcgtggcatcgatacacctgtccaaaagaaccgtgaggcgaatacggatcaaccttgtattggcgcttatctacaacctcgtcggaatacctatcgccgcaggtgtctttatgccaataggcattgtgctgcagccttggatgggaagcgcagcgatggcagcttcgtcggtgtctgtggtgctgagctcactgcagctgaagtgttacaaaaagcctgatctggaacggtacgaggcccaggcccatgggcacatgaaaccactgactgccagccaagtctccgtgcatatcggaatggatgacaggtggagggactcgccgcgggccaccccatgggatcaagtctcctacgtgtcgcaggtttccctttcatcccttacgtccgacaagccgtcgcggcactcggcagcagcagatgatgatggggacaaatggtcgcttcttcttaacgggcgggacgaagaacagtacatt

SEQ ID NO: 7446 - DNA, 4395 bp, synthetic construct
  misc_feature 1..4395: note = source = /note="Description of Artificial Sequence: Synthetic coding sequence"
  source 1..4395: mol_type = other DNA
atgcccgagcaggaacgacagattacagctagagaaggtgccagtagaaaaatcctgtctaagctgtcactacccacgagagcctgggagccagcgatgaaaaaatctttcgccttcgacaatgtcggatacgaaggcggattagatggcctaggcccctcctctcaggtcgcgacctctaccgtgaggatcctcgggatgacatgtcagtcgtgcgtgaagagtattgaggatcgtatctcaaatctgaaaggcataatcagcatgaaagtgtccttggaacagggtagcgcaaccgtgaagtacgtacctagcgtggtttgtctacaacaggtctgccatcaaataggtgatatggggtttgaggcatccattgcagaggggaaggctgcaagctggccatcacgatctctgcccgcccaagaggctgtggttaaactccgcgtggaggggatgacctgccagagttgcgtctcaagcatagaggggaaagtccgaaagctgcagggcgtggtgcgtgttaaggtttctctttcaaaccaggaggccgtcattacgtatcaaccttatctcatacagcctgaggacttgcgggatcacgttaatgacatgggtttcgaggctgcaatcaagagtaaggtcgccccactaagtctgggcccaatcgacattgagcgcttgcagtctaccaaccccaagaggcccctgagtagcgcgaaccaaaactttaacaattcagagacccttggacatcagggatctcatgtcgtgacactgcagctgagaatcgatggtatgcactgcaagagttgtgtgctcaacatcgaagaaaacatcggccagctgctaggggttcaatctattcaggtatcgctggaaaacaagacagctcaggtgaagtacgatccatcctgcaccagccccgtggccctccagcgggctatagaggctctccctcccgggaactttaaggtgagccttccagacggcgccgaaggctcagggactgatcaccgatcttccagctcccacagcccaggttcccctccacgtaaccaggtgcagggtacctgctctacgactttgatcgccatagctggaatgacctgcgcaagctgcgtgcatagtatcgagggaatgatttcccaactagagggcgtccagcagattagcgtatctctggcagagggcactgccaccgtgctgtataacccatctgtgatcagtcccgaagagctcagagccgctatcgaggacatgggctttgaagcgagcgtggtcagtgaaagctgttcgacgaatcctctaggtaaccacagcgctggtaactccatggtccagaccaccgatggcacccctacctcggtgcaagaagtggccccccatacgggccgcctccctgcaaaccacgcgccggacattttggcgaagagcccacaatctacccgggctgtcgcaccccaaaagtgtttcctgcaaataaaaggtatgacctgcgcctcgtgcgtatcaaacatcgagcggaacctgcaaaaagaagcaggcgtcctcagcgtactcgtggcattaatggcgggaaaggctgaaattaaatatgaccctgaagtcatccagccattggagattgcccagttcattcaggacttgggatttgaggcggctgtgatggaggactacgcaggatccgatggaaacatcgagttgactatcaccggcatgacttgcgccagttgtgttcacaacatcgagagcaagctcaccagaactaacgggataacatacgctagcgtcgctcttgccactagcaaggctttggtgaaattcgaccctgagataataggaccgagggacatcataaaaatcattgaagagatcggattccatgctagtctagcacagcggaatccaaatgctcatcatttggatcacaaaatggagataaaacaatggaaaaagagctttctctgtagcttggtgtttggtatcccagtgatggccctgatgatttacatgttgataccttctaatgaaccgcaccagtctatggtgctcgatcacaatataatccccgggttatcgatcctgaatctgattttttttatcctctgcacgttcgtgcagcttctggggggatggtacttctacgtacaggcctataagtccctgaggcatcgcagtgctaatatggacgttttgatcgtcctggcaacatccatcgcctatgtgtacagcctggtgattctcgtggtggcagtggccgaaaaggccgaacgctccccagtgaccttctttgatacacctcccatgctttttgtgttcatagctctgggccgctggctggaacacctcgccaaatccaagacaagcgaggctctggccaaactgatgagcctccaggccaccgaggctacagtggtgacactgggcgaggataacctcatcatccgcgaggagcaggttccgatggagttagtgcaaaggggcgacatcgtgaaagtggtgcctggcggtaagttccccgtcgacgggaaagttcttgagggaaatactatggcagatgaaagtctcattactggggaagccatgccagtcaccaagaaaccagggagcacagtgatcgcaggaagcattaatgctcacggctcagttctgatcaaagctactcatgttgggaacgacaccaccttggcgcagatcgtgaaactagtggaggaggctcagatgtcgaaagctcccattcaacagctcgccgacaggttcagtggttacttcgtacccttcatcatcattatgtccaccttaacactggtcgtttggattgtcattgggtttatagattttggggtggtgcagcgatactttccgaatcccaacaaacatatttctcaaaccgaagttatcatcaggtttgcttttcagacttccattacggtgctctgcattgcttgtccttgctcactgggattggcgacccccacggcagtgatggtgggcaccggggtggcagcccaaaatggaatcttaataaaggggggcaaaccactggaaatggcacataagatcaagacggtgatgtttgataagactggcacgattactcacggtgtgccgagggtgatgcgggtgctcctgctcggggacgtcgcaacactcccgttgagaaaagtgttagcagtggtaggcaccgccgaggcatcttcagaacatcctctgggagtggcagttacgaagtactgcaaggaggagctggggacggaaaccctcggttattgtaccgactttcaggctgttcctggctgtgggatcgggtgtaaagtatctaacgtggaggggatcctggctcactcggaacgccctctgtcagcaccagcctcacacttgaatgaggcaggctcgctgccagcagagaaggacgcagtccctcagacattcagtgtacttatcggtaatcgcgaatggttaagacgcaacggattgactatatccagtgacgtgagcgacgcaatgacagatcacgagatgaagggtcaaactgccatcctcgtcgcaatcgacggagtactttgtgggatgatagctatcgccgacgctgtgaagcaggaggctgcactggcagtacacaccctccagagcatgggggtggatgtggttctgatcacaggggataaccggaagactgcgagagcgatcgcgacccaggtgggcatcaacaaagtgtttgcagaggttctgccaagccacaaggttgctaaagtgcaagagcttcaaaataaaggtaaaaaggtggccatggtaggggatggtgtcaatgatagcccagcacttgcccaggccgacatgggtgttgccataggtacagggactgatgtggccatcgaggctgctgacgtggtcctgatccgcaatgatctcctagacgttgtggctagtatccacctgtctaagaggactgtcaggcgcatcaggattaacctcgtgctggctctcatatacaacttagtaggcatcccgatcgcagcaggcgtgttcatgccaatcggcatcgtgctccagccctggatggggagcgctgctatggccgctagttccgtgtcagtggtgctgagttctctgcagttaaagtgttacaagaagcctgatctggagaggtacgaggctcaggcccacggacatatgaaacctctgaccgcctcacaggtttccgttcatatcgggatggatgacagatggagagactctccacgtgccaccccatgggatcaggtgtcgtacgtttcgcaggtctccctgtcttctctgacaagtgacaaaccgtccaggcactcagccgccgccgatgacgatggagacaagtggtctctcctgcttaacgggcgggatgaagaacagtacatc

SEQ ID NO: 7447 - DNA, 4395 bp, synthetic construct
  misc_feature 1..4395: note = source = /note="Description of Artificial Sequence: Synthetic coding sequence"
  source 1..4395: mol_type = other DNA
atgccagaacaggagaggcagatcaccgcacgcgaaggcgcatccaggaagatcctttctaaactttccttgccaaccagggcttgggaacccgccatgaagaagagctttgctttcgacaacgttgggtatgaaggcggacttgatggcctcggcccttccagccaggtggccaccagcactgtaagaatcctgggcatgacttgtcaaagctgcgtgaaatccatcgaagacaggatttctaacctgaagggaattatctcaatgaaagtgtcactggagcagggaagtgctactgtcaagtacgtgccttctgtggtctgcctgcagcaggtgtgtcaccaaattggggacatgggctttgaagcaagtatcgccgagggaaaggcagcgagttggccttcaaggtccctgcccgcacaggaagccgttgtcaaactcagggtggagggcatgacttgccaaagctgcgtgagttcaatcgaagggaaggtgcgtaagttacagggcgtggtgcgcgtgaaggtctccctgtccaaccaggaggcagtgatcacctatcaaccctaccttatccagcccgaagatctcagagatcacgtgaacgacatgggatttgaagcagccatcaaatctaaagtggcacctctgagcttggggcctatcgacatcgagagattgcagagcacgaacccaaagcgcccactcagctccgccaaccagaactttaacaatagcgaaacactgggacaccagggtagtcacgtcgtaacactgcaactccgtatagacggcatgcattgtaagagctgcgtgctgaacatagaagaaaacatcggacagcttctcggagtccagtccattcaagtctcgttggagaacaaaaccgcccaggtgaagtatgatcccagttgtacatccccagtggcattacagcgcgccatagaggctcttcctccaggcaatttcaaggtgagccttcccgatggtgctgaaggatccgggactgatcaccgtagttctagctctcacagcccgggatctccccccaggaaccaggtgcaaggcacatgctctacaacactgatcgcgatagctggaatgacctgtgcaagctgcgttcacagcatcgaagggatgatctctcagttagagggtgtccaacaaatctcggtcagccttgctgaggggacagcaactgtgctttacaaccctagcgtgatttcacccgaggagctgcgcgccgcaatcgaggatatgggatttgaagcaagcgtagtgagcgaaagctgttccaccaaccctctcggaaatcacagcgctggtaactcgatggtccagaccacagacggcactcctacaagcgtgcaagaggtcgccccacacactggtcggctgcccgctaatcatgcacccgacattctggccaagagtccccaatctaccagggctgtggctccgcagaagtgctttctgcagataaaagggatgacctgcgctagctgcgttagcaacattgagagaaatctgcaaaaggaggctggcgtcctgtccgtgctggtcgccctcatggccggcaaagcggagattaagtacgaccccgaagttatccagccactggaaatcgctcagtttatccaagacctgggattcgaggctgccgtgatggaagactatgccggcagcgacggtaacattgaacttacaatcaccggaatgacctgtgcctcatgtgtgcacaacatcgagtctaaactgacccgcactaatggcattacctacgccagcgtcgcacttgcaacatccaaggccttggtgaagttcgatcccgaaattatcggccccagggatattatcaaaataatagaggagattggctttcacgcttctctggcccagagaaaccctaatgcccaccacttggaccacaaaatggagattaaacagtggaagaagagcttcttatgctctttagtgtttggaatacctgttatggcactcatgatctatatgctgataccgtctaacgagcctcaccagtctatggtcctggaccataacataatccctggcttgtctatactgaatttgatctttttcatcttatgcacattcgtgcaactccttgggggatggtacttctatgttcaggcctacaagagtctaagacacaggtcagccaacatggacgtgctgatcgttcttgcaacttcaatcgcatacgtctattctctggtgatcctcgttgtggccgtcgctgagaaagctgaaaggagtcccgtcacattctttgatacaccaccaatgttgttcgtttttattgcacttggacgctggctggaacacctggccaagtccaagacgtccgaggcgcttgccaaattgatgagcttgcaggcaaccgaagctactgtcgtgaccttaggagaagataatctaattatcagggaggaacaagtgcctatggagctggtccagcggggcgacatagtgaaagtggtgcccggaggaaagtttccagtggacggaaaggtcctggaggggaatactatggcggacgagagcctgattacaggagaagctatgccagtgaccaaaaaacctggatccactgtaattgctggaagcattaatgctcacgggtccgttttaattaaagcaacacatgtgggaaacgacacaacacttgctcagattgtcaagctcgttgaggaagcccagatgtccaaagctcccatccaacagcttgccgatcggttctctggatacttcgtcccattcatcattattatgtccacacttaccctcgtggtatggatcgtcattggcttcatcgactttggtgtggttcaaaggtacttcccgaaccctaataaacatatcagccaaactgaagtaatcatcaggtttgcatttcagaccagcattacagtcctttgtattgcatgtccttgttcactggggctggctacccccactgctgttatggtgggcaccggcgtggctgcccagaacggtatcctgattaaaggcggcaagcccctggaaatggcgcacaagatcaagacagtcatgttcgacaaaactggcactattacccatggtgtccccagggttatgcgcgtgctgctattgggggacgtggcgaccctgcctcttagaaaagttctggcagtggttggcaccgctgaggccagtagcgagcatcctctgggagttgcagtgaccaaatattgtaaggaagagctgggcactgaaaccctcggatattgcaccgactttcaggcagtgccgggctgcgggatcggctgtaaagtgagtaatgtggaaggcattctcgctcacagtgagcgccctctcagcgcccccgccagtcatttgaacgaggcaggcagccttccagcagagaaggacgctgttcctcagacatttagcgtgctcattgggaatcgggagtggctgaggaggaacgggctgaccatctctagcgacgtctccgatgctatgaccgatcacgaaatgaaggggcaaacagcgatccttgtcgccatcgacggagtcctatgcggcatgatcgcaatcgcagacgcagtgaagcaggaggccgctcttgcagtgcatacactgcagagcatgggagttgatgtcgtactaatcaccggggataacagaaagaccgcaagggccattgctacacaagtgggtatcaacaaggtgtttgccgaagtactacctagccacaaggttgcgaaggtgcaagaattacagaacaaagggaagaaggtggccatggtgggagatggggtgaacgattcccccgcgctggctcaggcagacatgggagtcgctatcggtaccggcactgatgtggcgattgaggcggctgacgtggtattgatcaggaacgatttattagatgtggtggcttctatccacctgagtaaaagaacagtaagaaggattaggatcaaccttgttctggcactgatctacaatcttgtcggcatccccatcgcggcaggggtttttatgccaatcggcatcgtactacagccgtggatgggaagcgcagcaatggcagccagcagcgtgtctgtggttctgagctctctgcaactcaagtgctataagaaacccgacctggagcgttacgaagctcaagcccatggtcacatgaaaccacttaccgccagccaggtctccgtgcatataggaatggatgaccgctggcgcgactccccgagggcaaccccctgggaccaggtctcttacgtttcccaggtgtctctgagctcattgacatccgataaaccatcgaggcatagcgccgctgctgatgatgatggggacaagtggtcactcctgctgaacggacgggacgaggagcagtacatt

SEQ ID NO: 7448 - DNA, 4395 bp, synthetic construct
  misc_feature 1..4395: note = source = /note="Description of Artificial Sequence: Synthetic coding sequence"
  source 1..4395: mol_type = other DNA
atgccagaacaagaacgtcaaatcacggcacgcgaaggtgcgtcccgtaagatcctctcgaagttgtcgcttcctactcgggcatgggagcctgcaatgaagaagtccttcgcattcgacaatgtcggttacgagggcggacttgatggcctggggccctcatcgcaagtggccacctcaaccgtcagaatacttgggatgacctgtcaatcttgcgtgaagagcattgaggacagaatttccaatcttaagggaattatctcaatgaaggtttcactggaacaagggtccgcaactgtgaagtacgtcccttcggtggtctgcctgcaacaagtgtgccaccagattggagatatgggattcgaagcatccattgctgaaggaaaggcagcaagctggccatcgaggtcccttccggctcaagaagctgtggtgaagctgcgcgtggaggggatgacttgtcaaagctgcgtctcatccatagaaggcaaagtgcggaagctgcagggtgtcgtccgggtgaaggtgtcactgagcaatcaggaggcagtcatcacttaccagccatatctgatacaaccagaagatcttagggatcatgtgaatgatatgggatttgaagcggcgatcaaatcgaaggtggcacctctctcactgggccccatcgacattgaaagactccaatccaccaatcctaaaagaccactgtcctcggcaaaccagaactttaacaattcagagactcttgggcatcaagggtcgcatgtcgtgacccttcagctgcgaatcgacggcatgcattgtaaaagctgtgtgttgaatattgaggaaaacattggacaacttctcggcgtccagtcgatccaagtctcgctggaaaacaagaccgcacaagtgaagtacgaccctagctgtacgtcccccgtggctttgcaacgtgcaatcgaagcactgccacctgggaactttaaggtttcactcccagatggagcagaaggatccggaaccgatcacagatcgagctcaagccactcccctggatcaccaccgaggaaccaagtccaaggcacctgcagcactactcttatcgccatagcgggaatgacctgtgcaagttgtgtgcattccatcgaggggatgatttcacaactcgagggagtgcagcagatctccgtgtctcttgctgaaggtactgcaaccgtgctttacaaccctagcgttatttcgcccgaagagcttcgggccgcaattgaggacatgggtttcgaagcatcggtcgtgtcggaatcctgttccaccaacccccttggcaatcacagcgccggcaattcaatggtgcaaaccactgatggaactcctacctccgtccaagaagtggcacctcacaccggtagactgcccgcaaaccacgcccctgacattcttgccaaatcgccgcaatcaacccgtgctgtggcaccccaaaaatgttttctgcagataaaaggtatgacttgtgcatcctgtgtgtcaaacatagaaaggaacctccagaaagaggccggagtgctctccgtccttgtggccctgatggcaggtaaggccgagatcaaatatgatcccgaggtgattcaaccgctggaaattgcacaattcatccaggatctcggttttgaggcagccgtcatggaggactacgcagggtcagatggaaatatcgaacttaccatcaccgggatgacgtgcgcatcgtgcgttcataacattgaatcaaaactgacccgcactaacggaatcacctacgcaagcgtggcactcgcaacgagcaaggcactcgtgaagtttgatccagagattattggacccagggatatcatcaagattattgaagagattgggttccatgcctcgctggcccaacgtaaccccaatgcacatcacctggatcataagatggagataaaacaatggaaaaagtcgttcctgtgttcgttggtattcggtattccagtcatggctcttatgatttacatgcttattccttccaacgaaccacatcaatccatggtgcttgatcacaacataattccaggcctgtcgatcctgaatctcatcttctttatcctttgtacctttgtgcagcttcttggaggttggtacttttacgtgcaagcgtacaagagcctcagacaccgcagcgccaacatggatgtgctgattgtcctggcaacttccatcgcttacgtctacagcctggtgatacttgtggtggcggtggcggaaaaggcagagagatcacctgtcacttttttcgacactcctcccatgcttttcgtgttcatcgcacttggaaggtggctcgagcatctggcgaagtccaagacctcggaagcgcttgcgaaacttatgtccctccaagctaccgaagcgacggtggtgaccctcggagaagataacttgatcataagggaagaacaagtgccaatggagctcgtccaaaggggtgatatcgtgaaggtggtcccaggaggtaagtttcctgtcgatggaaaggtgcttgaaggtaacaccatggcggatgaatcactcattaccggagaggccatgccagtgactaagaagccaggttcaactgtgattgcaggcagcattaacgctcatggcagcgtgctgataaaagcaacccatgtgggaaacgacaccactctggcacaaatcgtgaaactggtggaagaggcacagatgagcaaggcacctatccagcagctggcagacaggttttcgggatactttgtccctttcatcattatcatgtcaacgctcactctcgtggtgtggattgtgatcgggtttattgattttggtgtcgtccaacgctattttccgaaccctaataagcacatatctcagaccgaagtgattattcgcttcgcgtttcagacctcaataaccgtgctttgtattgcttgcccatgctcgctcggacttgccactccaactgcagtcatggtggggactggggttgcagctcaaaacggtattttgattaagggcggaaagccccttgaaatggcacacaaaatcaagacggtcatgttcgacaaaaccggtaccattactcatggcgtgccaagagtgatgcgcgtgcttctcctcggggatgtggcaaccctgcctctccggaaggtgctggcagtcgtgggtactgccgaagcatcgtcagaacacccactgggagttgcagttaccaaatactgcaaggaggaactgggtaccgaaactctgggatactgtaccgattttcaagcagtccctggctgcggtattggctgcaaagtctcgaacgtggagggaattctggcacactccgagaggccactcagcgcaccagcatcccatttgaacgaagcgggatcgctgccggcagaaaaggatgccgtgccacagacgttttcggtcctgatcggtaacagagagtggcttcgccgtaatgggctcactatttcgtctgacgtcagcgacgcaatgaccgatcacgagatgaagggacagacggcaatactcgtcgccatcgatggtgtgctgtgtggaatgatcgctattgcagatgcagtgaaacaagaggcagctcttgcagtgcacactttgcaatcaatgggagtggatgtagtcctgataaccggagacaaccgcaaaacggcccgtgcaatcgcaacccaagtgggtattaacaaggtgtttgctgaagtgctgccatcgcataaagtcgcaaaggtgcaagaactgcagaataaaggaaagaaggtggccatggttggtgacggagtgaacgattcgccagccctggcgcaggcagatatgggagtcgcgatcggaaccggtactgatgtggcgatcgaagcggctgatgttgtcctgatccgtaacgatctgttggatgtcgtggcctcaatccatttgagcaaacggactgtcagacggattcgtatcaatcttgtgcttgccctgatttacaatctcgtcggtattcccattgccgcaggtgtgtttatgccaattggaatcgtgctccaaccttggatgggctcggcagcgatggcggcaagcagcgtgtcggtggtgctttcctcccttcaactcaaatgttacaagaagcccgacctggagagatacgaagcacaagcacatggccatatgaagccacttacggcatcacaagtgtccgtgcatataggaatggacgataggtggagagattcccctagagcgactccatgggaccaggtttcatacgtctcccaggtgtcactgtcgtcccttacctcggataagccatcgcgccattcggccgcggcagacgatgatggagataagtggtccttgcttcttaacgggcgagacgaagagcaatacatt

SEQ ID NO: 7449 - DNA, 4395 bp, synthetic construct
  misc_feature 1..4395: note = source = /note="Description of Artificial Sequence: Synthetic coding sequence"
  source 1..4395: mol_type = other DNA
atgcccgaacaggagcgacagattaccgcaagagaaggggcctcgaggaagatactgtcgaagctgtctctgcccactcgggcttgggaacctgcaatgaagaaaagtttcgcttttgacaatgtggggtacgagggaggactggacggcctgggtccttcctcccaggtggcgacttccactgtgaggattctcggtatgacctgccaatcatgcgtcaagagcatagaagatcgcatctccaatctgaagggcattatctcgatgaaagtctcgcttgaacaggggtccgcgactgtcaagtacgtcccctcagtcgtgtgtctgcaacaagtttgtcaccaaattggtgatatgggatttgaagcaagcattgcagagggtaaggccgccagctggccgtccagatccctcccggcacaggaagccgtggtgaagctgagagttgaaggaatgacttgtcaatcgtgtgtgtccagcatagaaggaaaagtcagaaagttgcaaggggtggttcgggtgaaggtgtccctgtccaatcaagaagcagtgataacctaccagccatacctgattcaaccagaagatttgagagatcatgtgaacgacatgggtttcgaggcagctatcaaatctaaggttgcacctctttcgttggggcctatcgatattgagcggctccagtcgacgaaccctaaaaggcctctctcaagcgcaaatcaaaactttaacaacagcgaaactcttggtcaccagggatcccatgtcgtgactctgcagctcagaattgatgggatgcattgtaaatcgtgtgtccttaacattgaagagaatatcggacaacttcttggtgttcagagcatacaagtctctcttgaaaacaagactgcacaagtgaagtacgatccatcgtgtactagcccagtcgccttgcaaagagccatcgaagcactgccacccggcaatttcaaggtgagcctgcccgatggagcagagggatccggcaccgaccatagatcaagctcctcccattcgcctggaagccctccacgaaaccaggtgcagggcacctgcagcaccaccctgattgccatcgcaggtatgacctgtgcgtcttgcgtgcactcaattgagggaatgattagccaactggagggcgttcaacaaatctccgtgtcacttgccgagggaactgcgactgttttgtacaacccgtccgtcatttccccggaagaactccgggcagccattgaagatatgggcttcgaagcatcagttgtgtcggaatcttgttcgaccaacccactgggaaaccatagcgcaggtaattccatggtgcagacgacggacggcactccgacctcggtgcaggaggtggcacctcacacggggcgcctgcccgcaaatcatgcaccagatattctggcaaagtcacctcagagcactcgggcagtggcaccgcaaaaatgttttctccagatcaaggggatgacgtgcgcatcatgtgtgtcaaacatagaacgcaaccttcagaaggaagccggagtgttgtcggtgctcgtggctcttatggcagggaaggcagagatcaagtacgaccccgaagtgattcaaccactggaaattgcgcagttcatacaagatctgggattcgaggcggcagtgatggaagattacgcagggagcgatggaaacatcgagcttacgattacgggcatgacttgcgcctcatgtgtgcataacattgaatccaagctgactcggaccaacggtataacttatgcctcggtcgcccttgcgacctcgaaggcactcgtcaaattcgatcccgagattattggaccccgcgatatcataaagattatcgaggagattggattccacgcaagcctggcgcagagaaatccaaatgcccatcatctggatcacaaaatggagattaagcagtggaagaagtcgtttctgtgctcgctggtgtttggcattcctgtgatggcacttatgatttacatgctgattccttccaatgagcctcatcaaagcatggttctggatcataacataatccctggcctgtcgatcctgaacctgatctttttcattctttgtacctttgtgcaactgctcggaggttggtacttttacgtgcaagcgtacaagtcacttagacacagatccgcaaacatggatgtgctgattgtgcttgcgactagcatcgcatacgtgtactccttggtcattcttgtggtggctgtcgcagaaaaggcggagagatcacctgtgaccttctttgatactccacccatgctgtttgtgtttatagctcttggacgctggttggaacatcttgcaaagtcgaaaacctcggaagcattggcaaagttgatgtcgcttcaggcaaccgaagcaaccgtggtcactcttggagaagataacttgataattcgcgaagaacaagtgccaatggagctggtgcaacgtggtgacatcgtcaaggtcgtgcctggtgggaagtttccagtggacgggaaagttcttgagggcaataccatggcagacgaatccctgataaccggtgaagcaatgcctgtgaccaaaaagcctggaagcactgtgatcgcaggatctattaacgcccacggttccgtgctcattaaagccacccatgtcggcaacgatacgactcttgcacaaatcgtcaaacttgtcgaagaagcacaaatgagcaaagcaccgattcagcaactggcagatcgtttttcaggttacttcgtgccattcattatcattatgtcaactcttactctggtcgtctggattgtgattggctttattgacttcggagttgtgcaaagatactttcctaaccctaacaagcatatctcgcagaccgaagtcattattcggtttgcttttcaaactagcatcaccgtgctgtgtattgcgtgtccatgttccctgggtctggcaacccctaccgctgtcatggtcggaactggggtggctgcccagaatggtattctcattaaaggaggcaagcctcttgaaatggctcataagatcaaaactgtcatgttcgataagactggaactattactcatggcgtgcctcgagttatgcgcgtcttgcttctgggcgatgtggctactctgccactgcggaaggtcctggcagtggtcggtactgcagaagcatcatccgaacatcccctgggtgtggcagtcaccaagtactgtaaagaagagcttggaaccgaaactctgggctactgcactgatttccaagcagtgccaggctgcggaattggatgcaaggtgagcaacgtcgaagggattctggcccattccgaaaggccacttagcgcacctgcgtcgcatctgaatgaagcaggttcacttcccgccgaaaaggatgcagtgcctcagacgttctcagtactgatcggtaacagggaatggttgcgaagaaacggccttactatctcctcggacgtgtcagatgcaatgaccgaccacgagatgaaaggtcaaaccgcaatacttgtggcgatcgatggtgtgctgtgtggaatgatcgcaatcgcggatgcagtcaaacaagaagccgccctggccgtgcataccctgcagagcatgggagtggatgtggtccttatcacgggggataaccgcaagaccgcaagagcaatagccacccaggtgggcatcaataaagttttcgcagaagtcctgccctcccataaggtggcaaaagtgcaagaactccagaataaggggaagaaagtggcaatggtcggagatggagtgaacgattctccagcccttgcgcaagccgacatgggggtcgcaatcgggaccggaaccgacgtggcaatcgaggcggccgacgtcgttttgatccgcaatgatcttctggatgtggtggcaagtatccatctgtcgaagagaaccgtgagacgcattagaatcaacttggtgctggcactgatctataatctggtgggaattccaatcgcggccggtgtgttcatgcctatcggtatcgtgcttcaaccctggatggggtctgctgcaatggccgcatcatccgtgtcggtggtgctgtcctccctccaactgaaatgttacaaaaagcctgatctggaacgctacgaagcacaggcacacggccatatgaagccattgaccgcgtcccaagtgtcggtgcatattggaatggatgatcgttggcgggacagccctcgtgcgacgccatgggaccaggtgtcctacgtgtcgcaagtgtccttgagctcgctgacttcagataaaccctcgcgccatagcgcagcagcggacgacgatggtgataaatggtcattgctgcttaatgggcgcgatgaagaacagtacatc

SEQ ID NO: 7450 - DNA, 4395 bp, synthetic construct
  misc_feature 1..4395: note = source = /note="Description of Artificial Sequence: Synthetic coding sequence"
  source 1..4395: mol_type = other DNA
atgcctgagcaagaacgccagatcactgcccgagagggcgcctcccggaagatcctcagtaagttgtcccttccgacccgcgcctgggaaccggcgatgaaaaaatccttcgccttcgataacgtgggttatgaaggcggtctggatggcctcggaccgtcctcacaggtcgcaacctcgactgtccgcatcctggggatgacctgccaaagctgtgtgaaaagcatcgaggaccggatctcgaacctcaaaggaatcatttccatgaaagtgagcttggagcaaggtagcgccaccgtcaaatacgttccatcagtggtgtgcctgcagcaggtgtgtcaccagatcggagacatgggtttcgaagcaagcattgccgaaggaaaggcagcttcgtggccttctcgcagcctgccggcccaagaagcagtggtgaaactgcgcgttgagggaatgacttgccaatcctgtgtgtcctccattgagggtaaggtgcggaagctccagggagtggtgagggtcaaagtgtcgctcagcaaccaggaggccgtgattacctaccaaccgtacctgattcagcctgaggaccttcgggaccacgtgaacgacatgggattcgaggctgcaatcaagtcaaaggtggcaccgctctccctgggaccgatcgacatcgagcgcctgcaatccactaaccctaaacgaccgctgtcatcggccaatcagaatttcaacaattcggaaacgctgggacaccagggaagccatgtggtcactctgcaactccgcatcgacggtatgcactgcaaatcctgcgtgctgaacatcgaagagaatatcggacaactgctgggcgtgcagtccatccaggtgtcccttgagaataagacggcccaagtgaaatacgatccgtcgtgtactagcccagtcgctctccaaagagctatcgaggccttgccacctggaaatttcaaggtgtcgcttccggatggcgccgaaggctcgggaactgaccaccgctcgtcgtcaagccactccccgggatcgccaccgcggaatcaggtccagggaacctgtagcaccaccctgatcgcgatagccggcatgacctgcgctagctgcgtccattccatcgaagggatgatcagccagctggaaggcgtccagcaaatctcagtctccctggcagaaggcacggcgacggtgctctataacccttcagtcatcagcccggaagaactcagggcagccatcgaagatatgggatttgaggcgtcggtcgtctccgagtcgtgctcgactaacccgctcggaaaccactcggcgggcaactcgatggtccagactactgacggtaccccaacgtcagtgcaagaggtggctccgcacaccggtcggcttccggccaaccatgcccccgatatcttggccaaaagcccacagtcgactcgtgcagtcgctcctcagaaatgcttcctccagatcaagggcatgacgtgcgcatcttgtgtgtctaatatcgaacgcaatctgcaaaaggaagcaggcgtgctgagcgtgctggtggctctcatggccggcaaggccgagattaagtacgacccggaagtgatccagcctctggagatcgcacagtttatccaagacctcggattcgaagccgccgtgatggaggattacgccgggtccgacggaaacatcgagctgactatcacggggatgacttgcgcttcgtgtgtgcataacattgaatcgaagctgacccggactaacggaatcacctacgcgagcgtcgcacttgctacttccaaggcgctggtgaagttcgatcccgagatcatcggaccccgggacatcatcaagatcattgaggagatcggcttccacgcgagcctggctcaaagaaaccctaatgctcatcacctggaccacaagatggagatcaagcagtggaagaagtcgttcctgtgctccttggtttttggcatcccggtcatggctctgatgatttacatgctgattccgtcaaatgaaccacaccaatcaatggttctggatcataatatcatcccgggcctctcaatcttgaacctgatcttcttcatcctttgcacctttgtgcaactgctcggcggatggtatttctacgtgcaggcatacaagtccctgaggcatagatccgccaacatggatgtcctcattgtgctcgcaacgtccatcgcgtacgtgtactcgctggtgatcctggtggtggcggtggcggagaaagccgagagatcaccagtgactttcttcgacaccccgccgatgctcttcgtgtttatcgcgctcggacggtggctggaacatctcgccaaaagcaaaacctcggaggcactcgcaaaattgatgagcttgcaggcgaccgaggccaccgtggtgaccctgggggaggacaacctgattatcagagaagaacaagtgccgatggaactggtccagagaggtgacatcgtgaaggtggttccagggggaaagtttccagtggatggaaaggtgctcgagggcaacactatggctgatgaatccctgatcactggcgaagcgatgccggtcactaagaagccggggtcaactgttattgctggatcaatcaatgcgcacggaagcgttctgattaaggcgacccacgtagggaacgacaccaccctcgcccagatcgtgaaactggtggaagaggcgcagatgtcaaaggcccctatccaacaacttgcggaccgatttagtggatacttcgtgccgtttatcatcatcatgtcaaccttgactctcgtggtctggatcgtgatcggatttatcgacttcggcgtcgttcagcggtacttccccaatcctaacaagcacatctcacagaccgaggtgataattcgcttcgcgttccagactagtattactgtgctgtgcattgcctgcccttgttcgctcggactcgccactcccactgctgtcatggtcggcacgggagtggccgcgcagaacggaatcctgatcaagggaggaaaaccacttgaaatggcccacaagatcaaaaccgtgatgttcgacaagaccggaaccatcactcacggagtccccagagtgatgcgggtcctgcttctgggagacgtggcgacgctgccactgcgcaaggttctcgccgtggtcggtaccgccgaagcctcttcagaacaccctctgggagtcgctgtgaccaagtactgcaaggaagaacttgggactgaaaccctggggtactgcactgacttccaggctgtgcccggttgcggcatcgggtgcaaggtgtcaaacgtggaaggaatcctggcacactcggagcgcccgttgtcggcgccagcttcccatcttaacgaggccggctcccttccagccgaaaaggatgcagtcccacagaccttctcggtgctgatcggcaacagagaatggctccggagaaacggactcaccatctcgtcagacgtgtcggacgccatgactgaccacgaaatgaagggtcagaccgctatcctcgtggcgatcgatggggtgctgtgcggcatgatcgcaattgccgatgccgtgaagcaggaagcagcgctggctgtccatactctccagtcgatgggagtggatgtcgtcctgatcaccggagacaatcggaaaaccgcccgcgccatcgccacccaagtcggtattaataaggtattcgcagaagtgctgccatcccataaggtggccaaggtgcaggaactccagaacaagggaaagaaggtcgcgatggtgggggatggagtcaatgactcccccgcgctggctcaggcggatatgggggtcgccatcgggaccgggaccgacgtggccattgaggcggcagatgtggtcctcattcgcaacgatctgttggacgtggtggcatcaatccacctgtcgaagaggactgtgcgcaggattcggatcaacctggtcctcgcactgatctacaacctcgtcggaatccccatcgctgcaggcgtctttatgcctatcggaatcgtcttgcagccgtggatgggttccgcggctatggccgccagcagcgtgagcgttgtgctgtcctccttgcagctgaagtgctacaagaaaccagacctggaacgctacgaagcccaggcgcacggacatatgaaacccttgactgcctcgcaagtctctgtgcatatcggaatggatgaccggtggcgcgactcgccaagagccactccgtgggatcaagtgtcgtacgtgtcacaagtgtcactgtcgagcctgaccagcgataagccgagcaggcattccgccgcggcagacgacgacggagataagtggtccctccttctgaatggaagagacgaggaacagtacatc

SEQ ID NO: 7451 - DNA, 4395 bp, synthetic construct
  misc_feature 1..4395: note = source = /note="Description of Artificial Sequence: Synthetic coding sequence"
  source 1..4395: mol_type = other DNA
atgcctgaacaggaaagacagatcaccgctagagagggagccagtcgcaagatactaagcaaactctctctccccacccgggcttgggagcctgccatgaagaaaagttttgccttcgacaatgtgggctacgaaggcggcctggatggacttggccctagttcacaggtcgcgacgtccacggttcgcattttagggatgacatgccagagctgcgtgaagagtatcgaagatcgaatcagcaatttaaagggaatcatcagcatgaaggtgagcctggagcagggctccgccactgttaagtatgtgccaagcgtagtgtgtcttcaacaagtctgtcaccaaatcggcgacatgggttttgaggcttcaattgctgaagggaaagccgcatcatggcctagtcgcagcctacccgcccaggaggctgtagtgaagcttcgagtagagggaatgacttgtcagtcctgcgttagttccattgaaggaaaagtccgaaaactgcaaggggtcgtccgagtgaaagtctccctaagtaatcaggaggccgtcatcacataccagccctacttgatccaacccgaggacttgagggaccacgtcaacgatatgggattcgaggccgctatcaaatctaaggtcgcccccctgagcctgggccccattgatatcgagaggctacagagcaccaaccccaaaagacccttatcctcggctaaccagaatttcaataattccgaaacgctcgggcatcagggaagccacgtggtgaccttacagctgcgcatagacggtatgcattgcaagagctgcgtgctgaatattgaagagaacatcggccagctgttgggagtgcagtcaatccaagtgagcctggaaaacaagaccgctcaggttaaatatgatcctagctgcactagccctgtggcactacagagagctattgaagcactgccacccggcaatttcaaagtctctctgccagacggagcagagggctccggaaccgatcacagatctagctccagtcactccccaggaagcccgcctcggaaccaggtccaggggacatgtagcaccacactgatcgcaatcgcagggatgacatgtgctagttgtgtgcattctatcgaaggaatgatatcccaactggaaggggtgcagcagatctctgtgtcccttgcggaaggcactgccacagtcctctacaaccccagcgtcatctcaccggaagagttgagggccgccatcgaagacatgggctttgaggctagcgtcgtgtctgaatcttgcagtaccaatcctctcggcaatcattctgcagggaattctatggtgcagacgaccgacggcacgccaacatctgtgcaagaggtggctccgcacacggggcgactacctgctaatcacgccccagatatactggccaaatccccccagtccaccagggccgtggctccccagaaatgtttcttacagatcaaaggaatgacctgtgcctcatgcgtttctaatattgagagaaatcttcagaaagaggcgggcgttctgagcgtcctggtcgccctgatggcaggaaaggccgagattaagtatgaccctgaagtgatccagccactggaaatcgcccagtttatacaggatctcgggtttgaagctgcggtgatggaagactatgccggctcagacggtaacatcgaactcacgataacaggcatgacctgtgcttcctgcgtgcataatatcgagagcaagttaaccaggacaaatggaattacgtacgctagtgtggcactggcaaccagtaaagcattggttaaatttgatccggaaattatcggacccagggatattataaaaatcattgaagaaatcggattccacgcaagccttgcccagcggaatccaaacgcacatcatctagatcacaaaatggaaatcaagcagtggaaaaaaagcttcctctgttcattagtgttcgggattcccgtgatggcgctcatgatatacatgctgatccccagcaacgaaccacatcagagcatggtgctggaccacaatataatccctggactgtcaatcctgaacctcatattctttatcctgtgcacattcgttcagctgctggggggatggtatttttatgtgcaggcctacaagagtcttcgccataggtctgccaatatggatgtgctcatcgtgcttgcaaccagcatcgcgtacgtgtacagcctggttatcctcgtagtagctgtggccgagaaagctgagagatcaccagtcacgttttttgacaccccacctatgttattcgttttcatagctctcggcagatggctcgagcacttagctaaatctaagactagcgaggctctcgccaaactcatgagtctgcaagccacggaggccacagtagtcactctgggcgaggacaatctgatcatcagagaagagcaagtcccaatggagctggtgcagcgcggcgatatcgtgaaagttgtaccaggagggaagtttccggtggacggaaaggtcctggaaggaaatactatggcggatgaaagccttataacaggagaagccatgccggtgacaaagaagccaggatcaacagtcatagctggttctatcaacgcccatgggtctgtgctgatcaaggccacacacgtcgggaacgatacaaccctggctcagattgtgaaactggtcgaggaggctcagatgtccaaggcccccatccagcagcttgcggataggttctccggttatttcgttccatttattatcattatgagcacccttaccctggtggtatggatcgtcatcggcttcatcgactttggggttgtccagagatactttccgaatcctaataagcatatttcacagactgaagttatcataaggttcgcattccagactagcattactgttttatgtattgcctgtccttgctctctcggactcgccaccccaacagctgtgatggtagggactggcgtcgccgcacagaacggtatactcatcaagggcggtaaaccccttgagatggcacataaaattaaaaccgtgatgtttgacaaaactggcaccataacacatggtgtgcccagagtcatgcgcgttttactcctgggagatgtggccaccctcccgttgagaaaagtgctggctgtagttggcaccgcggaagccagcagtgaacaccctctcggcgtcgccgttacaaagtattgcaaagaggagctcgggacagagaccctgggatactgcaccgacttccaggcagtgccaggttgcgggattggttgcaaggttagcaatgtggaagggatcctggctcattctgaaagacctctgagtgcgccagcttctcacctgaacgaggcagggtccctccccgctgagaaggacgccgttccacagactttttcagtcttgatcggtaacagggaatggctgcggagaaatggactgacaatctcctccgatgtttcagatgcgatgaccgatcacgagatgaaggggcagacagctatcctagtggccatcgatggggtgctctgtgggatgatcgcaatcgcggatgcggtgaaacaggaggccgcactcgctgtacacacactccagtcaatgggagtggatgtggtattgatcacaggggacaatcgaaaaaccgctcgagccatagccacacaagtcggtattaataaggtatttgcggaagtgttaccatcacataaggttgctaaagtgcaagagttgcaaaacaagggtaagaaggtggctatggtaggggacggtgtaaacgacagcccggcactggcccaggccgacatgggtgtggcaattggtacgggaacagacgttgcgattgaagcagctgatgtggtgctgatccgtaatgatcttttggatgtcgtggccagcatacatctgtctaagcggaccgtccgacgaatccgaatcaaccttgtactggcgctcatttacaacctggtaggaatcccaatcgccgcaggtgtgtttatgccgatagggatcgtgctgcagccctggatggggtccgccgcgatggcggcctcttccgtatccgtcgtcctgagctcccttcagctaaagtgctacaagaaacccgatcttgagagatacgaagctcaggcgcacggtcatatgaaacctcttactgcctcacaggttagcgtacatattgggatggacgacagatggcgggactctccaagagccactccctgggaccaggtctcctatgtcagccaagtttcgttatccagcctgacctctgacaaaccctccaggcattcggcagcagccgacgatgacggcgacaagtggagcctgctcctgaacggccgagacgaggagcagtatatt

SEQ ID NO: 7452 - DNA, 4395 bp, synthetic construct
  misc_feature 1..4395: note = source = /note="Description of Artificial Sequence: Synthetic coding sequence"
  source 1..4395: mol_type = other DNA
atgcctgaacaggagcgacagatcaccgcccgggagggtgcttccagaaagatcctctccaagctctctcttcccacccgcgcctgggagccagccatgaaaaagtccttcgcctttgacaacgtgggatacgaaggcggattagacggtttgggtccttcctctcaggtcgccacatccaccgtccgcatcttgggcatgacatgtcagagctgcgtgaaatctattgaggacagaatctccaacctgaaaggtatcatcagcatgaaagttagcctggagcaaggctcggccacggtcaagtacgtgcccagcgtggtttgtctgcagcaggtctgtcatcagatcggcgacatgggcttcgaggcctccatcgccgaagggaaggcggcatcctggcctagcaggtccttgccagcacaggaggcagttgtcaagctccgcgtcgagggaatgacctgccagtcgtgcgtctcgtctatcgaaggaaaggtgcgtaagctgcaaggcgtggtccgcgtgaaggttagcctgagcaatcaagaggctgtcatcacctaccaaccgtacttgatccagcccgaggacctccgtgatcatgttaatgacatgggcttcgaagccgctattaagtccaaggttgctcccctctcgttgggtccgattgacatcgagcgcctgcaatccacgaaccccaaacgtcccctgagcagtgcaaaccagaacttcaataactctgaaaccttgggccatcagggcagtcacgtggtcacattgcagttacgcatcgacggaatgcattgcaagtcctgcgtcctcaacatcgaggagaacatcggccagttgcttggcgtgcagtctatacaggtttctctagagaacaagactgcccaggtaaagtacgacccttcctgcacaagcccggtagctctgcagcgcgcgatcgaggcccttcccccaggcaacttcaaggtctctctgcctgatggcgcagagggtagcggcaccgaccaccgctccagctcctctcactcgcccggaagtcctccccgtaaccaggtccaggggacgtgcagcacaactcttattgcgattgctggcatgacttgcgcgtcctgcgtgcactcgattgaaggtatgatttcgcagctggagggcgtccagcagatcagcgtctccctcgctgagggcacggccactgtgctgtacaacccgtctgttatctcccccgaagagctgcgtgcggcgatcgaagatatgggtttcgaagcctcggtcgtgtcggagtcctgctccacgaaccccctggggaaccactccgccggaaactccatggtgcagactacggacggaactcctacctccgtgcaggaagtcgcaccacataccggccgtttaccggcaaaccacgctccggacatcctcgctaagtctccccaatccacccgcgcagtcgcccctcaaaagtgcttcttgcagatcaagggcatgacctgtgctagttgcgtttcaaacatagagcgtaaccttcagaaggaggccggtgttctgtcggtgctggttgcgctcatggccggcaaggctgagatcaagtatgacccagaagttatccaacccctagaaatcgcacagtttattcaggatctgggattcgaggccgcagttatggaggactacgctggctctgacggaaacatcgaactcacaattacgggaatgacgtgcgcatcgtgcgttcacaacatcgagtccaagcttacccgcaccaatggcatcacctatgccagcgtcgcgttggccacttctaaggctctcgtcaagtttgaccccgagattatcggcccacgtgatattatcaagatcatcgaagagatcggcttccacgcttcgctcgcgcagaggaaccccaatgctcaccaccttgaccataaaatggagattaaacagtggaaaaagagcttcttgtgctccctggtcttcggtattcccgttatggcgctgatgatctacatgttgattccgtctaacgaacctcatcagtccatggtcctcgatcacaacatcattcccggcctctcgattctcaacttgattttcttcattctctgtaccttcgttcagcttttgggcggctggtatttctacgtccaggcctacaagtccttgcggcaccgttcagcaaacatggacgtcctcattgtcctggcaacctccatcgcttacgtctactctctcgtcatccttgtggttgcggtcgcagagaaggctgagcgctcccccgttacattcttcgataccccccccatgctgttcgtgttcatcgctctcgggcgttggttggagcatctggccaaatccaaaactagcgaagctctagcgaagttgatgagcctgcaggccaccgaggctactgtggttacgctgggagaagataacctgattattcgcgaggaacaggtcccgatggagctcgtccaacgcggagacatcgtcaaggtcgtccccggtggcaaattccctgtggatggcaaagtgttggaaggaaacacaatggccgatgagtccctcatcacgggggaggcgatgcccgttactaagaagcccggctctacagttatcgctggcagtatcaatgcgcacgggtcggtcctgatcaaggccacacatgtcggtaacgacaccaccctcgcccagatcgtaaagctggttgaagaggcccagatgtcaaaggcccccatccaacagttggctgatagattttccggctactttgtcccatttatcattatcatgagtaccctgacactagttgtttggattgtgatcgggttcatcgatttcggagttgttcagcgttattttcccaaccccaacaagcatatctcgcaaaccgaagtgattatccgtttcgctttccagacttcaattacggtcctgtgtatcgcctgtccctgttccctaggcctcgccactcctacagccgtcatggtcggcaccggtgtggccgcccagaacggtatactcatcaagggcggtaagccgctggagatggcccacaagatcaagacggtgatgttcgataagaccgggaccattacccacggtgttccgcgagttatgcgtgtgctgttgctgggtgacgtcgcgaccctccctctccgcaaggtgttagcagtcgtgggtacagccgaagcctcctccgagcatcccctaggcgtcgccgttaccaagtactgtaaggaggaattgggaaccgagactttgggctactgcacagacttccaagctgtaccaggctgtggcatcgggtgcaaggtatcgaacgtcgaaggcatcttggctcatagtgaacggcccctaagcgcccctgcatcgcacctaaacgaggccggcagcctccccgctgagaaggacgccgtccctcagacattttcggttctcatcggaaacagagaatggctccggaggaacggcttgacaatatctagtgacgtctccgacgcgatgaccgatcatgaaatgaagggccagactgcaattctcgttgcgattgatggggtcctttgcggcatgattgccatcgctgacgctgtgaagcaggaggcagctctggcggtccataccctgcagtccatgggcgtcgatgtcgtgttgatcacgggtgataaccgcaagaccgcccgagctattgctactcaggttggtatcaataaggtcttcgccgaggttcttccgtcgcacaaggttgccaaagtccaggagttgcagaacaagggcaagaaggtcgccatggttggcgatggcgtgaacgattctccggcgctagcacaggctgatatgggtgttgccattggtaccggaactgacgtggctattgaggccgctgacgtcgttttgatccgtaacgacctgctagatgtcgtagccagtattcacctgagcaaacgaaccgtccggcgtatccgtatcaacttggtgcttgccctgatctacaacctggtcgggattcccatcgccgcgggagtgtttatgccaataggaatcgtgttgcagccgtggatgggatccgcagcgatggctgcctcatctgtgtccgtggtgctgtccagcctgcagctcaagtgctacaagaagcctgatctcgagagatacgaggcccaggcccacggccatatgaagccccttacggcctcccaggtcagtgtccacattggtatggacgaccgctggagggattctccgcgggcaaccccctgggatcaggtctcgtacgtctctcaggtctccctctcctcgttgacaagtgataagccctcccggcattcggcggccgctgatgacgatggtgacaagtggagtctcctcctcaacggtcgagatgaggagcagtacatt

SEQ ID NO: 7453 - DNA, 4395 bp, synthetic construct
  misc_feature 1..4395: note = source = /note="Description of Artificial Sequence: Synthetic coding sequence"
  source 1..4395: mol_type = other DNA
atgcccgaacaggagcgtcaaatcacggcgagagagggggcgtccaggaaaatcctgtcaaaactctcccttccaacccgcgcatgggaaccggcgatgaagaagtcatttgcctttgataatgtcggctacgaaggtggcctggacggacttgggccctcatcgcaggtcgcgacgtcaaccgtgaggattctcggtatgacgtgccaatcttgcgtcaagagcattgaggaccggatctcgaacctcaagggaatcattagcatgaaagtttcgcttgaacagggttccgccactgtgaagtacgtgcctagcgttgtgtgcctgcagcaggtgtgtcaccaaattggagatatgggttttgaagcctccatagcggaaggaaaggccgcctcgtggcctagccgatcactcccagcacaagaagctgtggttaagctgagagtggaggggatgacgtgtcaatcgtgtgtcagctcgattgagggcaaagttagaaagctccaaggggtggtgagagtcaaggtgtccctgtctaaccaggaggctgttatcacttatcaaccttacctgatacaaccggaggatctgcgtgatcatgtcaacgacatggggttcgaagcggcaattaagagcaaggtggcaccgttgtctttggggccaattgacatcgaaagactgcagtcaactaaccccaagcgaccactctccagcgcaaatcaaaactttaacaattccgagactcttggccatcaagggtcccacgtggtgacccttcagcttagaattgacggaatgcattgcaaatcgtgtgttctcaacattgaggagaatataggacaactccttggtgtgcagtcgattcaagtgtctctggaaaacaagaccgcgcaagtgaagtatgatccatcctgtacgtccccagtcgcacttcaaagagcgatcgaagcacttcctcccggcaactttaaggtgtccttgcctgatggagccgaagggtccggaactgatcatcgaagctcaagctcgcatagcccgggatcccctcctcgcaatcaggtccagggtacttgttcgactaccctgatcgcaatcgccggtatgacctgtgcgtcctgtgtgcactcgatcgaaggaatgattagccagctggaaggcgtgcagcagatttcagtgtcccttgccgaaggtactgcgactgtcttgtacaacccatcggtgatttcgcccgaggagcttagagcagcgatcgaagatatgggcttcgaagcgagcgtggtgtcggaaagctgctcaaccaatcctctgggaaaccactcggccggaaattcaatggtgcaaaccactgatggaactcctacctcagtccaagaagtggcaccgcacaccggacggctgcccgcaaaccacgcccctgatattcttgcgaaatcgccacaatcgactagagctgtcgccccacagaagtgctttctgcagataaaaggcatgacctgcgctagctgcgtgtccaacattgaaaggaacttgcaaaaagaagcgggggtgctgtcagtccttgtggcgctgatggcgggaaaagccgaaatcaagtacgatcctgaggttattcaaccccttgaaatcgcccagttcatacaggatctgggatttgaggcagcagtgatggaggattacgccggatcggacggaaacatcgagcttaccatcaccgggatgacttgcgcaagctgtgtgcacaatatcgaatctaaactcactcggaccaatgggataacgtatgcatccgtcgcactcgcaacctccaaagcattggtgaagtttgatcctgagataattggacccagagatatcattaagattattgaagagataggatttcatgcatcgctcgcacagcgtaatcccaacgcccatcaccttgatcataagatggaaatcaaacaatggaaaaagtcgtttctgtgttcgcttgtctttggcattccggtcatggctctcatgatttacatgctcataccttccaacgaaccgcaccaatcgatggtcctggaccataacattatccctggactgtcgattcttaacttgatcttcttcatcctttgcacttttgtgcaactgctcggtggatggtacttctacgtgcaagcatacaagtccctgcgccaccggagcgcaaatatggacgtcctcattgtgctcgccacctccattgcatacgtctactccctggtgattctggttgtcgctgtggctgaaaaagcagagcgcagcccagtgactttcttcgataccccacctatgctgtttgtgttcatagcccttgggaggtggcttgaacatctggcaaagagcaagaccagcgaagcacttgccaagttgatgtcacttcaggcaaccgaggcaactgtggttactcttggagaggacaaccttatcattagagaggaacaagtgccaatggaacttgtgcagcgcggtgacattgtcaaggtggtccctggtgggaagtttcctgttgatggcaaggttctggagggaaatactatggctgatgaatcactgattaccggcgaagctatgcctgtcactaagaaaccaggttccaccgtgattgcaggttcaatcaacgctcatggaagcgtgctcattaaagcaacccacgtcgggaacgacactacccttgcacaaatagtgaaacttgtggaggaggctcaaatgtcaaaagcacccattcaacagctcgccgatcggttttcgggttactttgtgcccttcatcataatcatgtctacgctgactctggtggtgtggattgtgatcggctttatagatttcggagtggtgcagagatacttccctaatcctaataagcacatctcgcagaccgaggtcattatcaggtttgcattccaaacctcgattactgtgctttgcatagcgtgtccgtgtagcctcggactcgcaacgccgactgcggtcatggtgggtacgggcgtcgcagcccaaaacggaattctgattaagggtgggaagccactcgaaatggcacataagataaagactgtgatgtttgacaagactggaacgattacgcatggggtgcctagggtcatgagggtcctgctcttgggagacgtcgccactctgccacttcggaaagtgctggccgtggtcggaaccgcggaagcatcgagcgaacatccattgggtgtggctgtgaccaaatactgtaaagaagaactcgggactgaaactcttggatactgtaccgattttcaagccgtcccaggctgtgggatcggttgtaaggtgtccaatgtggaaggtatcctcgcacattcggagcggcccctttcggcacccgcatcacaccttaacgaagccgggagcttgcctgctgaaaaggacgcagtgccacagactttttcggtcttgataggtaaccgagaatggcttcgccgtaatggtctgaccattagctccgatgtgtcggatgcaatgaccgaccatgagatgaagggccaaaccgccattctcgttgcgattgacggagtgctgtgtggcatgattgcgattgcagacgcagtcaaacaggaggcagcgcttgccgtccatactctgcaatctatgggagtggatgtggtgcttatcaccggagacaacagaaagactgcacgagcaatcgcaactcaggtggggatcaataaggtctttgcagaggtgctgccatcacacaaggtggctaaggtgcaggagcttcaaaacaagggtaagaaggtggcaatggtgggtgatggagtgaatgacagcccggcactggcccaagcggatatgggggtggcgattgggacgggtaccgatgtcgctattgaagctgcggatgtcgtgctgatcagaaatgatcttcttgatgtcgtggcatcgatccacctgagcaagcgaactgtgaggagaattcgcattaaccttgtccttgcactgatctacaacctggtcggcatcccaatcgctgccggcgtgtttatgcctattggcatcgttcttcagccctggatgggatcggcagcaatggctgcatcatccgtctcggtggttttgtcaagcctgcaactcaaatgttacaagaaaccggatctggaacgttacgaagcgcaggcccacggtcacatgaagcctcttactgcgtcacaggtttccgtgcatatcggtatggatgaccggtggagggacagcccacgggcgactccgtgggaccaggtgagctacgtgtcgcaggtgtccctctcgtcactgacgtccgataagcctagccgccattcagcggcagcagatgatgacggagataaatggagcctgctgcttaacggaagagacgaagaacaatacatt

SEQ ID NO: 7454 - DNA, 4395 bp, synthetic construct
  misc_feature 1..4395: note = source = /note="Description of Artificial Sequence: Synthetic coding sequence"
  source 1..4395: mol_type = other DNA
atgccagagcaagagcggcagatcactgcccgcgaaggggccagccgcaagatcctgagcaagctctcgttgcctacccgggcctgggaaccagctatgaagaaatcgttcgcgtttgacaatgtgggatatgagggaggccttgacggcttgggcccatcgtcccaagtggccacgtcgactgtgagaatcctgggaatgacctgccagagctgtgtgaaatcgatcgaagatcggatttcaaacctcaagggaatcatctccatgaaagtctcgctcgaacaaggatcagccacggtgaagtacgttccgtcggtggtgtgtctgcagcaagtttgccatcagatcggcgacatgggatttgaggcaagcatcgcggaaggaaaggccgcttcgtggccatccaggtcgctgccggcgcaagaagcggtggtcaagctgcgcgtcgaaggcatgacctgtcagtcatgcgtcagctcaatcgagggaaaggtgcggaagctgcaaggagtggttcgcgtgaaggtgtcgctgagcaatcaagaggccgttattacttaccaaccttacctgatccagccagaggacctccgcgatcacgtgaacgatatgggatttgaagccgcgatcaaatccaaggtggccccgctttccctcggcccgatcgacatcgagaggcttcagagcacgaacccgaaacggccgttgtcgtcagcgaaccagaacttcaacaattcggagactctgggccatcagggatcccatgtcgttaccttgcaactcaggattgacggaatgcattgtaaatcctgcgttctgaacatcgaggagaacatcggccagctcctcggggtgcagagcatccaagtctccctggaaaacaagactgctcaggtcaagtacgaccccagctgcactagccctgtggcgctccagcgcgccatcgaagcgttgcctcctggaaatttcaaggtgtccctgccggatggagcggaaggaagcggaactgatcatcggagttcgagcagccattcgccaggctccccgccaagaaaccaggtgcaggggacttgctcaaccaccctgatcgcgatcgcagggatgacttgcgcgagctgtgtgcatagcatcgaaggaatgatctcgcaactggaaggtgtgcagcaaatttcggtgtcgctggcggagggcaccgcgactgtactgtacaacccaagcgtaatcagcccggaggaactgcgcgcggccatcgaagatatgggcttcgaagctagcgtggtgtcggaatcgtgctccaccaatccgctgggaaaccacagcgccggcaactccatggtccagaccaccgatgggactccaaccagcgtgcaggaagtggccccgcacaccggccgcctgccagccaatcacgctccggatattcttgccaagtcgccgcagtcgacccgggcagtggcgcctcaaaagtgcttcctgcagattaaggggatgacctgcgcatcctgcgtgagcaatatcgaacggaacctgcagaaagaggccggcgtgctgtcagtgctcgtggcgctgatggcaggcaaggcagaaatcaagtacgatcccgaagtgattcagccgctggaaatcgcgcagttcatccaggatctggggtttgaagctgctgtgatggaagattacgccgggtccgatggaaatatcgaactgactatcactggaatgacgtgcgcctcatgcgtgcacaacatcgaatccaagctgactagaaccaatggaatcacctacgcctcggtcgcccttgccacttccaaggctctggtcaagttcgatccagaaatcatcggaccaagggacattatcaagatcatcgaagagatcggattccatgctagcctggcgcaacggaacccgaacgcccaccacctggaccacaaaatggaaatcaaacaatggaagaagtccttcctgtgtagcctggtctttggtatcccggtgatggccctgatgatttacatgctcatcccttcgaacgagccgcatcaaagcatggtcctcgaccataacatcatccctggccttagcatcctgaatctgatcttcttcatcttgtgcaccttcgtacagcttctcgggggctggtacttctacgtgcaggcgtacaaatccctcagacaccggtccgcgaacatggacgtgctgatcgtgctcgcgacctcaatcgcttacgtttattcattggtcatcctggtcgtcgcggttgccgaaaaagccgagagatcaccagtgacgttctttgatacccctcccatgctcttcgtgttcatcgcactgggacgctggctggaacatcttgccaagagcaagacttccgaggcactggccaagctgatgtccctgcaggcaacggaagcgactgtcgtgactctcggggaagataatctgatcatccgcgaggaacaggtccctatggagttggtgcagcggggagacatcgttaaggttgtgcccggagggaagttcccagtggatggcaaggtcttggagggaaacactatggcagacgagtccctgattactggagaggcgatgccagtgactaagaagccaggctcaacggtgatcgccgggagcatcaatgcacacggcagcgtgctgattaaggccacccacgtgggaaacgatacgactctggcgcagatcgtcaagctggtcgaagaggcccagatgagcaaggcgccgattcagcagctcgctgaccgattttcaggatactttgtgcctttcatcatcataatgtctaccctgaccctcgtcgtgtggattgtgatcggattcatcgattttggagtggtccagagatacttccccaatcctaataagcatatcagccagactgaggtcatcatccggttcgctttccaaacttccatcacggtgctttgcatcgcgtgcccgtgctcactgggattggcgacccccactgccgtgatggtgggaaccggagttgccgcgcagaacggcatcctgatcaaagggggaaagcctctggaaatggctcacaagattaagactgtcatgttcgataaaactgggaccattactcatggtgtcccacgcgtcatgcgagtgcttctccttggagacgtcgctactctgcccctgcgcaaggtgctggcagttgtgggcaccgcggaggcctcgtctgaacacccgctcggagtggcagtcactaagtactgcaaggaggagcttggtactgaaaccctgggatactgcaccgatttccaggctgtgcccggctgtggaattggttgtaaagtctccaacgttgaagggattctggcacactcggagcggcctctcagcgctccagcatcacacctgaatgaagcaggatcactgccggctgagaaggacgccgtgccgcaaactttctccgtcctgatcggcaaccgagagtggctgcggcggaacgggttgaccatctcatccgatgtctcagatgccatgactgaccatgaaatgaaggggcagaccgccattttggtggccattgatggcgtcctttgcggcatgatcgctattgccgacgcggtcaagcaggaggctgctctggctgtgcacacgcttcagtccatgggagtggatgtggtgttgatcaccggagacaaccgcaagaccgccagagccatcgcgacccaggtgggaatcaacaaagtgttcgcggaagtcctgccgtcacataaggtggcgaaggtgcaggaattgcaaaacaagggtaagaaggtcgccatggtcggagatggagtcaatgacagccccgccctggcacaagctgacatgggcgtggccatcgggactggaactgacgtggcgattgaggccgccgatgtcgtgctgatccggaacgatctcctggacgtggtggcgtcgatccacttgtcgaagcgcactgtgcgccgcatccggatcaatttggtgcttgctctgatctacaatcttgtgggcatccctatcgccgcgggagtgttcatgccaatcggaatcgtcctccagccatggatgggatcggccgctatggctgcatccagcgtctcagttgtgcttagcagcctgcaactgaaatgctacaagaaaccggacctggagcgctacgaagcccaggcccatggacatatgaagccgttgactgcaagccaggtgtcggtgcacataggtatggacgatcgttggcgcgactcaccgcgggccaccccctgggatcaggtgtcgtacgtgtcgcaggtgtcgctgtcatccctcacttccgacaagccttcacggcattcagcagcggccgatgatgatggtgacaagtggtcgctgctcctgaacggacgggacgaggagcaatacatc

SEQ ID NO: 7455 - DNA, 4395 bp, synthetic construct
  misc_feature 1..4395: note = source = /note="Description of Artificial Sequence: Synthetic coding sequence"
  source 1..4395: mol_type = other DNA
atgccagagcaagaacgccaaatcactgcgcgggaaggcgcctcgcggaaaatcctgtccaagctctcgctgccgacgcgcgcttgggagccggccatgaagaagtccttcgctttcgacaacgtgggctatgaagggggactggacggactgggcccgtcaagccaggtcgccacctcgactgtgcgaatccttggaatgacctgtcaaagctgcgtgaagtcgatcgaggatcgcatctccaacctcaagggaattatcagcatgaaagtgtcgcttgaacagggttccgccacggtcaaatacgtgccgagcgtcgtttgcctccagcaagtgtgccaccagattggtgacatgggctttgaggccagcatcgcggagggcaaggctgcctcctggccatcgcggtcactccctgcgcaggaagcggtggtcaaactgcgcgtcgagggcatgacctgtcagtcatgcgtgtcgtcgatcgaaggaaaggtccgcaaacttcagggggtggtgcgtgtgaaagtctcgctgagcaaccaagaggcggtgattacgtatcaaccttacctgatccagccggaagatttgcgcgaccacgtgaacgatatgggattcgaagcggccattaagtccaaggtggccccgctgtcgctcggaccaatcgacatcgagcgactgcagtcaaccaatcctaagcgccctcttagctctgccaatcagaatttcaacaatagtgaaaccctggggcaccaaggttcccatgtcgtcaccctccagcttcggatcgacggaatgcactgcaagtcgtgcgtgctgaacatcgaggagaatataggtcaacttctgggggtccagagtatccaggtgtccctggagaacaagaccgcccaggtgaagtacgacccgtcctgcacctcaccggttgccctgcagcgcgcaatcgaggcccttccaccgggaaatttcaaggttagcctgccggacggggcagaagggtccggtaccgatcaccggtcgagtagctcgcactccccgggctcgccgcctaggaaccaggtccaaggcacttgctctactacgctgatcgctattgcaggaatgacgtgcgccagctgtgtccactccatcgaaggcatgatcagccagctggaaggggtccaacagatctcagtatccctggcagaagggaccgccactgtgctctacaacccatcagtgatcagcccagaggaactgcgcgctgctatagaggacatgggtttcgaggcctcagtggtgtcggagtcatgcagcaccaatcctctcggtaaccactcagccggaaattccatggtgcaaactacggatggaactccgacctcagtgcaggaagttgccccacacactggacgcctgccagcaaaccacgccccagatatcctcgcaaagtctccgcagagcacccgggctgtggcaccacagaagtgtttccttcagatcaaaggcatgacctgcgcatcatgcgtgagcaacatcgaaaggaacctccagaaagaagcaggcgtgctgtccgtgctcgtcgcgctcatggccggaaaagccgagatcaagtacgatccggaggtgatccaaccactggagattgcccaattcatccaggatctcggtttcgaagctgccgtcatggaggactacgcaggtagtgacggcaacatcgaactgacgatcactggcatgacgtgcgcttcatgtgtgcacaatatcgaatccaagctgaccagaactaacgggatcacttacgcatccgtggctttggccacgagcaaggccctggtgaagttcgaccccgagatcatcggaccacgggacattatcaagatcatcgaagagattggcttccatgcaagcctggcgcagagaaatccgaacgcacaccatctggaccacaagatggagatcaaacaatggaagaaatcgtttctctgctcccttgtgtttggaatcccggtgatggcactcatgatctatatgctcataccgagtaatgaaccccaccaatcaatggtgctcgatcacaacatcatcccgggcctgtcgatcctcaatctgatcttcttcatcctttgcactttcgtgcaactgctgggtggttggtacttttacgtgcaggcctacaagtccctgcggcataggagcgccaacatggatgtgttgatcgtgctcgctacctccatcgcttatgtctactcgctggtgatcctcgtcgtggccgtcgcggagaaagctgaacgatccccagtcacttttttcgacactccacccatgctttttgtgtttatcgcactcggacgctggctggaacacctggcgaagtccaagacctcagaggccctcgctaagctcatgtccctgcaggcaactgaggcgactgtggtaactctgggagaggacaacctgatcatccgcgaagagcaagtccccatggagctggtgcagagaggggacattgtgaaggtggtcccgggaggaaagtttcctgtggatggaaaagtgctggagggcaacaccatggctgacgagtcgcttatcaccggagaggccatgccggtgactaagaaacctggttcgaccgttattgcgggatccatcaacgcccacgggtccgtcctcattaaggcgactcatgtaggaaatgatacgaccttggcacaaatcgtcaagctggtggaagaggcgcaaatgtcgaaggcgcccattcagcagttggcagaccggttttcgggctacttcgtcccgttcatcatcatcatgtccaccctcactcttgtggtgtggattgtcatcggattcatcgacttcggagtcgtacaaaggtacttcccaaacccaaacaagcatatctcacaaaccgaagtgattattcggttcgcattccaaacttctattacggttctgtgtatcgcttgcccctgttcgctgggactcgccactcctaccgctgtcatggtggggactggagtggctgctcaaaatggaatcctgatcaagggaggaaagccgttggaaatggctcataagatcaagactgtcatgttcgataaaaccggaaccattacccacggagtgcctcgggtcatgcgggtcctgctgttgggcgatgtggccactcttccgcttaggaaggtccttgccgtggtggggaccgctgaagcctcatcggagcacccccttggagtggcagtcaccaaatactgcaaagaagagctgggaaccgagactctgggatactgcaccgactttcaggccgtgcctggctgcggcattggatgtaaggtgagcaacgtcgaaggaatcctcgctcattcagaacgccctctctctgcgcccgcctcgcatttgaacgaagccggatcgctgccggccgaaaaggatgctgtgccacagaccttcagcgtgctgatcggcaaccgcgaatggctgcggagaaatggcctgactattagctccgatgtttcagatgctatgaccgaccacgagatgaagggccaaactgcgatactggtggctatcgacggtgtgctgtgcggaatgattgccatcgcggacgcggtgaagcaggaagcggcgctcgccgtccacaccctgcagtccatgggtgtggatgttgtcctgatcactggcgataataggaaaaccgcccgagccattgcaactcaggtcggaatcaataaggtgttcgctgaagtgctgccgtcacataaagtggccaaggtgcaggaattgcagaacaagggtaagaaggtggcaatggttggagacggggtgaacgactctcccgcgctcgcacaggcggacatgggagttgccatcgggaccggaactgacgttgccattgaagcggctgatgtggtgttgatcagaaatgaccttctggacgtggtggcaagtatccatctgtccaaacgtactgtgcgccgcatccggatcaacctggtcctcgccctgatctacaatctcgtgggaatcccaatcgcggcgggggtgttcatgccgatcgggatcgtgctgcagccatggatgggctcagcggccatggcggcgagctccgttagcgttgtgctttcgtcgctccagctgaagtgctacaagaagcccgatttggaaagatacgaagcccaggcccatggacatatgaaacctctgaccgctagccaagtctcagtccatatcggaatggatgaccggtggcgcgactcccctagagccaccccgtgggaccaggtgtcctacgtgtcgcaagtctccttgtcatcccttacctcggacaaaccgtcgcgtcacagtgctgccgctgacgatgatggagataaatggagcttgctgctcaacggacgcgacgaagaacagtacatc

SEQ ID NO: 7456 - DNA, 4395 bp, synthetic construct
  misc_feature 1..4395: note = source = /note="Description of Artificial Sequence: Synthetic coding sequence"
  source 1..4395: mol_type = other DNA
atgcctgagcaggaacgtcagatcaccgccagggagggcgcttcacgcaaaatactgtctaaactgagcctccccactagggcttgggaaccagccatgaagaagagtttcgcatttgacaacgtcggttacgagggggggctggatggactaggacccagttctcaggtagccacaagcactgtacgaattttaggcatgacatgccaaagttgtgtgaaaagtattgaagacagaatcagtaacttgaaagggattattagcatgaaagttagtctcgaacaaggatcagccaccgtcaaatacgtgcctagtgtggtatgcctacagcaggtatgtcaccagatcggtgatatgggctttgaggcaagtatagctgagggtaaagccgcttcatggccctcaaggtcattgcctgctcaggaagctgtggtgaagttacgcgtcgagggaatgacttgccagagctgtgtcagttccatcgaaggaaaagtccggaaactccagggagtggtgcgcgtgaaggtgtccttatctaatcaagaagcagtcatcacctaccagccctatctgatccaaccagaggatctgcgtgatcatgtgaacgacatgggcttcgaggcagccatcaagtcaaaggtggccccactcagtcttggccctatagatatcgagcgactccagagtaccaacccaaagaggcccctgtcctccgcaaaccaaaactttaataactcagagacgttgggccaccaggggagccacgtcgtcacgttgcagcttaggatcgatgggatgcactgtaagtcgtgcgtgctgaatattgaagagaacattggacagcttctaggggttcagagcatccaagtgagtctggaaaacaaaacagcacaggtgaagtatgatccttcctgtacatcccccgtggcgctgcagagggctatagaggcccttcccccgggcaatttcaaggtcagcctgccagatggagccgaaggatctggaaccgatcacagaagttctagtagtcactctcccggatccccaccccgcaaccaggtccaaggaacttgctccaccactctgattgctattgctggtatgacctgcgcctcttgtgtgcacagcatcgagggtatgatttcacagctggaaggagtccagcagatatcagtgtccctggccgaagggaccgctaccgtattgtacaaccccagcgttatttcccctgaggagctccgagccgctattgaggatatgggcttcgaggctagcgtcgtgtcggagtcctgcagcacaaaccccttaggaaatcatagtgccggcaattctatggtgcaaacaaccgatggaacaccaacctccgtgcaagaagtcgcacctcacaccggccgcctccccgcaaaccacgctcctgatatcctggctaagtcgcctcagtctacacgtgcagtcgcaccacagaaatgctttctgcagatcaaggggatgacatgtgcgtcttgcgtcagcaacatcgagcgtaacctgcagaaagaggccggagtactcagtgtgttggtcgcactcatggcaggaaaggctgagatcaagtatgaccctgaggttattcaaccgttggaaatagctcagtttatccaggatttgggtttcgaagccgctgtaatggaggactatgctggaagtgacggtaacattgaactgacaatcacagggatgacctgtgcaagctgcgttcacaatatcgaaagcaaattgactcggaccaacggtataacctatgcttccgtcgctcttgccactagtaaagcactagttaagtttgaccctgagataatcggtccccgcgacatcataaagataatcgaggaaattggttttcacgcatctctggcccagagaaaccctaatgcccatcatttagaccataagatggagataaagcagtggaagaaatcgtttctatgctcactggtgttcggcatccctgtgatggccctgatgatttacatgctcatcccctctaacgagccacatcagtcaatggttctggatcacaatatcataccggggctgtctattctgaacttaatcttcttcattctgtgtacgtttgttcagctcctgggcggctggtacttttacgtgcaagcttacaaatctctcaggcaccgcagtgccaacatggacgtgctgatcgtgctggccaccagtatagcttacgtgtacagtttggtgattctggtagtggcagtggctgagaaggcggaaaggagtcctgtaaccttctttgatacacctcccatgttgttcgtctttatagctctgggccggtggttagaacacctggctaaaagcaagacctctgaggccctggcaaagctcatgagtctccaggctacagaagctaccgtcgttaccctcggagaggacaatctgatcatacgtgaagagcaagtgcccatggaactggtgcagaggggtgacatcgtgaaggtggtccctggcgggaagttcccggtggatggtaaggtcttagagggcaacacgatggcagatgagagcttgatcaccggggaggcgatgcctgtgactaagaaacctgggtccacggtgattgcaggtagcattaacgcccacggcagcgtcctgattaaggcaactcacgtaggcaacgataccacgctggcgcagatagtcaaactcgtggaggaggcccagatgagtaaagctcccatccagcagctggctgatcgcttctctggctacttcgtccctttcataatcatcatgtcaactctcaccctggtcgtgtggattgtcattggtttcattgactttggcgtcgtgcagagatatttccccaaccccaataaacatataagtcaaacagaggtgatcatacgtttcgcctttcagacaagcatcaccgtactatgcatcgcttgtccatgcagcctcggtctggcaacaccaaccgcagtgatggtcgggacaggagtggcagcccagaacggcattcttatcaagggcggtaaaccactcgaaatggcccacaaaattaagactgtgatgttcgacaaaacaggtaccattacacacggagtcccaagagttatgcgcgtgctgctgttaggcgatgtcgccacattgcctttacggaaagtacttgccgtggtgggcaccgcggaggctagtagtgagcatcctctaggagtggccgtgacgaaatactgtaaggaggaactcgggactgaaaccctgggttattgcacagacttccaggctgtgccggggtgcggcattggctgcaaggtgagtaacgtggagggaatactagctcactctgagagacctctcagtgctccagcctcacatcttaatgaggcgggcagcctgccagccgagaaggatgctgtgccacagacattcagtgtactcattggcaatcgggaatggctgagaaggaatggtttgactatctcctctgacgtgagtgatgcaatgaccgatcatgagatgaagggccagaccgctattctggtggcaatcgatggagtactgtgcggcatgatagcaatagctgatgccgtgaagcaggaagcggcactggccgttcataccctgcagagcatgggagtggacgtcgtgcttattaccggtgataataggaagacagctcgtgccatagccactcaagtaggcatcaataaagtgtttgcggaggttctcccctcccacaaggttgcgaaggttcaggaactgcaaaataagggaaagaaggtggccatggtcggagatggagtcaacgactcgccagccctggcccaggcagatatgggcgtagctatcggaaccgggactgatgtcgccattgaggccgccgacgtggtcctaatacggaatgacctgcttgatgtggtggcgtcaatccacctatcaaagcgcaccgtgcgcagaattcgaattaatttggtgttagcgctcatttacaacttagttggcatacccatagctgctggggtgttcatgcctatcggaatcgtgctgcagccatggatgggatctgcagccatggctgcctcgtctgtatctgtcgttctgtcaagcctccagctgaagtgttataagaagcctgacctagaaaggtacgaggctcaggctcatgggcacatgaagccgcttacagcctctcaggtctccgtccatattggaatggatgacagatggcgagacagtccccgagccaccccctgggatcaggtatcatacgtctcacaggtcagcctctcctctcttacctccgataagccgtctagacattcggccgcggccgacgatgatggagataagtggagcctgctactcaatggaagggatgaggagcaatatatc

SEQ ID NO: 7457 - DNA, 4395 bp, synthetic construct
  misc_feature 1..4395: note = source = /note="Description of Artificial Sequence: Synthetic coding sequence"
  source 1..4395: mol_type = other DNA
atgccggagcaggaacggcaaattactgcccgcgagggcgcctcgaggaagatactgtccaaattgtccctacccacgagggcatgggaaccggccatgaaaaagagcttcgcatttgataatgtggggtacgagggagggttagatgggctcggaccctcttcccaggtagctacgagcaccgttaggatcctgggcatgacctgtcaatcctgtgtgaagagtattgaagacaggatcagtaatctgaaggggatcattagcatgaaagtgtctttggaacagggctccgcaaccgtgaagtacgtcccctcggtggtatgcctgcagcaggtgtgtcaccagattggtgacatggggttcgaagcctcaatcgctgaaggaaaggcagcatcatggccgtctaggtcccttccggcccaggaagccgttgtgaaactgcgggtcgagggtatgacttgtcagagctgcgtctcttccattgaaggtaaagtcagaaaattacagggcgtggtgcgcgtgaaagtatcgctctccaaccaggaggccgtcatcacctaccaaccatacctgatccagccagaggatctgcgggaccatgtgaatgacatgggtttcgaggccgccatcaaatctaaggtcgcccccttaagtctcggccctattgacattgaaagacttcagtctaccaacccgaagcgcccgctgagcagcgccaaccagaacttcaataactcagaaacactagggcatcagggctcacatgtcgtgaccttgcagctaaggattgatgggatgcattgcaaatcgtgtgtgcttaacattgaggagaacattgggcaactcttgggtgtgcagagcatacaagtgtcccttgaaaacaaaacagcccaggtgaaatacgatccaagctgcacaagtccggttgctcttcaacgggccattgaagctcttcctcctggtaactttaaagtgtcactgcctgatggcgccgaggggtctggcacagatcataggagtagtagctcacacagcccggggtctccgcctcggaaccaagtacaaggcacctgctccactaccctcatcgcaattgctggcatgacctgcgcttcatgcgtgcactctatagagggaatgatatcacagttggaaggcgtgcagcagatcagcgtatcactggcagaaggtactgcaactgtgttgtataatccctcagtgatctccccagaagagctccgggctgccatcgaagacatgggctttgaggcctcagtggtttctgaaagctgtagtactaacccactgggtaaccacagcgccggaaactcaatggtgcaaacgaccgacgggacgccaacctctgtgcaggaagtagcacctcatacggggcgcctcccggcgaaccacgctcccgacatcttagctaaatcaccccagtccacacgtgctgtagcaccccagaaatgtttccttcaaatcaagggtatgacctgtgccagctgtgtttctaacattgagagaaatctgcagaaggaggcgggtgtgctgtctgtcctagtggcgctcatggctggcaaggctgagataaaatatgaccccgaagtgatccagccgctcgagatcgctcagttcattcaggatctggggtttgaagctgccgtaatggaagattatgcaggcagcgacggcaatatcgaattgacaataaccggaatgacctgcgcaagctgcgtacataacattgaatccaaactgacccgaaccaatggcatcacatacgccagtgttgcgctggctacgtcaaaggcgttggttaagtttgatccagagataattggcccgagggacattattaagattatcgaggagattggatttcatgccagcctcgctcagagaaacccaaacgcacatcatctggatcacaaaatggagatcaagcagtggaaaaaaagtttcctctgttctctcgtgttcggaataccggtgatggctttaatgatctatatgttgatccctagcaatgaaccacatcaatccatggtgctggaccacaacatcatccccgggctcagcatcctaaacctcatattttttattttatgcacctttgtgcagctcctgggcggctggtatttttatgtgcaggcttataaatcacttaggcacaggtccgcaaatatggacgtcctcatcgtcctggcgacttccatcgcctatgtatacagcttagttatcctggttgttgctgtggctgagaaggctgagaggagcccggtgaccttcttcgacacaccaccaatgttgttcgtctttatcgctttaggccgctggctggagcatttagctaagtcaaagacctccgaggcccttgcgaaactcatgtccctccaggccacagaagccacggtggtgaccctgggggaggacaacttgatcatccgcgaggagcaggtgcccatggagctggtccagcggggcgacatagttaaagtggtgccaggaggtaaattccccgtggatgggaaagtgttagaagggaacactatggccgatgagagcttgatcactggtgaagccatgcctgtgacgaaaaaacccggcagcactgttatcgcggggagtataaatgcccacggtagcgttttaattaaagctacgcacgttggaaacgatactaccctggcccaaattgtgaaactcgtggaggaagctcaaatgagcaaagccccaatccaacaactggccgatcgattctcagggtacttcgtgccctttataataattatgtcgaccctgaccctggttgtttggatagttatcggttttattgatttcggcgtggttcagcgctacttccctaatcccaataagcatatctcacagaccgaggttatcatccgctttgcctttcagacatcaattactgttctgtgcattgcctgtccttgttctctgggccttgccactcccacagccgtaatggtcggaactggagtcgcagctcaaaatggaattttgataaagggcggtaaacctttagaaatggctcataagatcaagaccgtaatgtttgataagacaggcaccataactcatggagtccctcgcgtcatgcgggtgctgcttctgggcgacgtggcaaccttacccttgaggaaggtcctggccgtcgtcggcactgccgaggcctcatctgaacatcccttgggtgttgccgtcactaagtactgcaaagaggaacttggcaccgagaccctgggctactgtacagacttccaggccgtccctggctgtggtattggctgcaaagtctcaaatgtggaaggaatcctggcgcactctgaacgcccactctcagcgccagcgagccacctgaacgaagccggcagcctgcctgcagaaaaggacgcggtgccacagactttctccgttctcattggtaatcgagagtggctgcgcagaaacggtctgaccatatcgtctgacgtaagcgacgccatgaccgatcacgaaatgaaaggccaaactgcgattctggtcgcaattgatggagtattatgcggaatgatcgctattgctgatgcagtgaagcaggaggccgcgctggcagttcacacgttacagagcatgggcgtcgatgtggtcctgattaccggcgacaaccgtaagaccgctagagcgatagccactcaagttggcattaacaaggtttttgctgaggtgctgccctcgcacaaggtcgccaaggtacaggaactgcaaaacaagggcaaaaaagtcgccatggtgggggacggcgtgaacgacagccctgcactggcccaggctgacatgggagtggccattgggaccgggactgacgtcgctatcgaggccgccgatgtggtgctcatacgaaatgatcttcttgatgttgtggcctctatccatttaagcaaaagaaccgtgcgaaggattaggataaatctagtgcttgccctgatctataacttggtcggaattccgatcgccgctggggtattcatgccaattgggattgtactccagccatggatgggctccgcagccatggctgcttccagtgtgtctgtcgtgcttagttcgttacagctgaaatgctataaaaagcccgatctcgaacgttatgaggcccaagcacatggccatatgaagcccctcacggcaagtcaagtttctgtgcatatcggcatggacgatagatggcgggattcgcctcgcgccacgccatgggaccaggtgagctatgtgagccaggtgagcctaagtagtttgacgtctgacaagccctcacgtcactccgccgccgccgacgatgatggagacaagtggagtcttctcctcaacggacgggacgaggaacagtatatt

SEQ ID NO: 7458 - DNA, 4395 bp, synthetic construct
  misc_feature 1..4395: note = source = /note="Description of Artificial Sequence: Synthetic coding sequence"
  source 1..4395: mol_type = other DNA
atgccggaacaggaacgtcaaattaccgcaagggagggagcgtctcgtaaaatcttaagtaaactttccttacctacaagagcgtgggaaccggccatgaagaaatcctttgcatttgacaatgttggatatgagggcgggctggatggtttgggcccttcatcgcaagtggcgacctcgaccgtacgaatcttgggtatgacttgccaatcctgcgtcaaatctattgaagacagaatttcaaatctcaaaggaattatttcaatgaaagtgagcctagagcaaggatctgcaacggtaaaatatgtcccgtcagtggtctgcttgcagcaagtgtgccaccaaatcggagatatgggattcgaggcttctatcgccgaaggaaaggctgcaagttggccctctaggtcacttccggcccaggaagcggtagtgaaactgcgtgttgaaggaatgacttgtcaatcatgcgtgtcaagcatcgaaggcaaagttaggaaacttcaaggtgttgtccgggttaaggttagtttgtccaaccaggaagctgttattacatatcaaccttatttgattcagccagaagatcttcgcgatcacgtgaacgacatgggatttgaagcggcgattaaatcaaaggtggctccacttagtttaggcccgatcgatattgaaagattacaatcaaccaaccccaaaagaccactgtcaagcgcgaatcaaaattttaataacagtgagaccctcggacatcagggtagtcacgtcgtaacgttgcaactgagaatcgatggcatgcattgcaaatcttgcgtgctgaacattgaggagaatatcggacagctcttaggagtacaaagtattcaagtctccttggagaacaaaaccgcacaagttaagtatgatccttcttgcacgtcaccggtcgccctgcaacgggcgattgaagccttacctccgggtaatttcaaagtctctttgcctgatggcgccgaaggtagtggcacggaccaccgaagctcaagttcacattctcccggctctcctccgcgcaaccaggttcagggcacgtgtagtactacccttattgccattgcaggaatgacctgtgcttcttgcgtacattcaatcgaagggatgatcagccagttagaaggggtacagcaaattagtgtctctctggccgaaggtacagcgacagttctttataacccctcggtaatttcaccggaagagctgcgggctgcaatagaagatatgggatttgaggcgtcggttgtgagcgaatcctgtagcaccaacccattgggtaaccactctgcgggcaattctatggtgcagacaacagatggcacgcccacgagcgtccaagaggtcgccccgcacacaggaagattaccggcaaatcacgccccagatattcttgcaaagtcgccgcaatcaacgcgtgcagttgccccgcagaaatgttttctccaaattaaaggaatgacttgtgcatcttgcgtttcaaacattgaacgtaacctgcaaaaagaagcaggtgtactgagtgtcttagttgcactgatggcgggcaaggccgaaattaagtacgaccctgaagtgattcagccgttagaaatcgctcagttcattcaagatcttggatttgaggctgcggtgatggaagattatgcaggttcagatggaaacatcgaattaacaatcacaggtatgacctgcgccagctgcgtacataatattgaatctaaactcacacggacgaacggcattacttatgcgagtgtagcattagcgacgtcgaaagcattggttaaattcgatcctgagatcattgggccacgagatataattaagattatcgaagaaatcgggtttcatgcgtccctcgctcagagaaacccgaacgctcaccaccttgaccataagatggaaattaaacaatggaaaaaaagttttctttgcagcctcgtgtttggcattccagtcatggcattgatgatttacatgctgatcccgtcaaatgaaccgcatcaatctatggtgctggatcataacataatcccgggtctgtcaattttgaaccttattttttttatattatgcacgttcgtccaacttcttggtgggtggtatttttacgtccaagcatataaatcacttaggcatcgctcggcgaacatggatgtattgatagtgctcgcaacgagcattgcatatgtatattcattagttattttggttgtagccgtcgcagagaaggctgaacgaagcccggttacgttcttcgatactcctccaatgttatttgtattcatcgccctgggacggtggttggaacacttagctaagagcaaaacgtcggaagcacttgcaaagttaatgagcctgcaagccacggaagcaacggtcgtgacacttggagaagataatctcattatacgtgaggagcaggttccgatggagcttgtacaacgtggggatattgtaaaagtagtgccgggcgggaaatttccggtcgatggaaaggtgcttgaaggtaatacgatggcagatgaatctcttatcactggcgaggcgatgcctgtaaccaagaaaccggggtcgactgtcattgcgggctccatcaacgcacatgggtcagttttgataaaggcgactcatgtcggtaatgacaccacattggctcaaattgtcaaacttgtggaagaagcccagatgtccaaagcaccgattcaacagctcgcagaccgtttttcgggttattttgtcccatttattatcattatgtctaccctgactctggtagtctggattgtaattggctttatcgattttggtgttgttcaacgttattttccgaatccgaataaacacatttcacaaacagaggttattattcgttttgcattccagactagcattactgtgctttgtattgcgtgcccctgttcacttggattagccacgccaacggcagttatggtaggcacaggagttgctgctcaaaacggtattctgataaaaggaggcaagccgcttgaaatggcccataaaattaaaacagtcatgtttgataaaacaggcacaattacacacggtgtgcctcgcgttatgagagttttgctgttaggagatgtggcgaccctgccgctgagaaaagtcttagcagttgttggaacagctgaagcttctagtgaacacccacttggagtcgcagttacgaaatattgcaaagaagaactgggaacggaaacgcttggatattgtaccgatttccaagcagtgccgggttgcggaattggctgcaaagtctcgaatgtcgaaggaatattggcgcatagtgaaagaccattatctgctccggcgtcacacctgaacgaagcaggtagtctgccggcagaaaaggacgcggtaccgcaaacattttctgttcttatcgggaatcgcgaatggttacgccgtaatggtttaacaataagcagtgatgtctccgatgcgatgacagatcatgagatgaaaggccaaacagccatcttagtagcgattgacggcgtactctgtggcatgattgcgatagctgatgctgtgaaacaagaggccgcattagcggttcatacattacaatccatgggagtggatgtggtcctgattacgggtgataatcgcaagaccgctcgggccattgcgacccaggtcggaattaacaaagtgtttgcagaagttctgccgtcacacaaagtggcgaaagtccaagaattacaaaataagggaaaaaaagtagccatggtcggcgacggggttaacgattctccggcgctcgctcaagctgatatgggtgtagcaattggaactggcaccgacgtagctattgaagcagccgatgtcgtacttatccgcaacgaccttctggatgttgtggcctcaatacatttgtcaaaaagaacagtccgcagaatacgaatcaatttggttctcgctctgatctataacctcgtgggcataccgatcgccgctggcgtttttatgccgatcggaatcgttttacagccttggatggggtccgcagcaatggctgcgtccagtgtgtcggttgttttatcaagtcttcaactgaaatgttataagaaacctgacttagagagatatgaggcgcaggcccatgggcatatgaaaccgctgacagcaagccaagtgtcggtccatattggcatggatgatcgttggcgcgattctccgagagctaccccctgggatcaggtaagttatgtatcacaggtctctctatctagcctgaccagcgataaacctagccgccattccgccgcggcagatgacgacggtgataagtggtcattactccttaatggcagagatgaggagcaatatatt

SEQ ID NO: 7459 - DNA, 4395 bp, synthetic construct
  misc_feature 1..4395: note = source = /note="Description of Artificial Sequence: Synthetic coding sequence"
  source 1..4395: mol_type = other DNA
atgccagagcaagaaagacagatcaccgcccgtgagggagcttcacgaaaaatcttatcaaaattaagcctaccaacgcgcgcttgggagccagctatgaaaaaatcattcgcgttcgataatgttggatatgaaggaggtcttgacggtctcggaccctcctcccaggtggcaacctcgactgtgagaatcttaggaatgacttgtcaatcatgcgtaaaatccattgaagatcgtatatcgaatttaaaaggaattatcagcatgaaagtatctcttgagcaaggttcagcaacagtcaagtatgtcccatcagtcgtttgtctccaacaggtttgtcaccaaattggagatatggggttcgaggcctcaattgctgaaggaaaagcagcttcatggcccagtagatctctacccgcacaggaagctgtcgttaagcttcgcgtagaaggtatgacgtgccagtcctgcgtttcttcgatcgagggaaaggttcgcaagttacaaggtgtggtgcgagtgaaggtgtcactatcgaatcaggaagcagttatcacttatcaaccgtacctcatacaaccagaagacctacgtgaccatgtcaacgacatgggctttgaagctgctattaaatcaaaggtcgcgccgttgtcattgggcccaattgatatagaaagattgcagagtacaaatccaaaacgcccattgagtagtgcgaatcaaaatttcaacaactcagaaacattaggtcatcaaggctctcatgttgttactttacaactacgtatcgacggaatgcattgtaaatcgtgcgtgctgaacattgaggagaacatcgggcaattgctcggggtccagagtatccaagtcagtttggaaaacaaaacagcccaggtcaaatatgatccaagttgtacgtcacctgttgctctgcaaagagctattgaagcactgccaccaggaaatttcaaagttagccttcctgatggagctgaaggatcaggaacagaccatagatcttcgtcatcccactctccgggatcgccacctcgaaaccaagttcagggaacatgttctactactttgattgcgattgccgggatgacgtgcgcatcttgtgttcattcaattgagggtatgattagtcagctcgaaggagttcagcagattagtgtgtcgttggcagaaggaactgctactgtcttatacaatccatccgttatctccccagaggaattaagagccgctatagaagatatgggatttgaagccagtgttgtttcagaatcctgctcaacaaatccacttggaaatcacagcgctggtaattcaatggttcagacaactgatggaactccaacttccgtgcaagaagttgcgcctcatacaggacgtttacctgcgaatcatgctcctgacattttggctaaaagtcctcagtctactcgagctgtcgctcctcagaagtgcttcttgcagattaagggaatgacctgcgcatcatgcgtgtccaacattgagagaaatctgcaaaaggaagctggcgtgctttcggtgctggtggcgctgatggcgggtaaagcagagattaaatatgatcctgaagtcatccaaccactagaaattgctcaatttatacaagatcttgggtttgaggctgcggtgatggaggactatgctggatctgatggaaacatcgagcttacgatcacaggaatgacatgcgctagttgcgtacataacatcgaatcaaagctcacaagaactaatggtatcacatatgcttctgtggctctcgctacgtctaaagctcttgttaagttcgatccagagatcattggcccacgagatattatcaagatcattgaagaaattggctttcatgcatctctcgctcagagaaatccgaacgcacaccatctggatcataagatggagattaaacaatggaaaaagtcattcctttgtagtttggtattcggcattcccgtgatggctctcatgatttatatgctcattccaagcaacgaaccacatcagtctatggttctggatcataatataatcccaggactgtccatccttaatctgatctttttcattctatgtacgtttgttcaactactgggaggttggtacttttacgtgcaagcatataaatctttgcggcaccgttcagcgaatatggatgttcttatcgtgcttgcaacttcaatcgcttatgtttactcgttagttattttggtagtcgcagtagcggagaaggctgaacgcagcccagtaacttttttcgacaccccgccaatgctttttgtttttattgcgttgggacggtggcttgagcacttggctaagagtaaaacatccgaagcacttgccaaattgatgagtcttcaagcaacagaagccacagtggtgactctcggtgaagataatctaattattagagaggagcaagtgcctatggaattggttcagagaggagacatcgtgaaggtagtcccaggaggaaagttcccagttgacggcaaggtgctcgagggaaacacaatggccgatgagtcgcttatcacgggagaggctatgcccgttacgaaaaaaccgggctccacagttattgcgggatcaataaatgcccatggaagcgtattgattaaagcaactcatgtggggaatgacactacgcttgctcaaattgtaaaattagttgaagaagctcagatgtcaaaagctcccattcagcagctcgccgaccgattcagcggctatttcgtcccttttatcatcataatgagcactttgacacttgtagtatggatagtgattggcttcatagatttcggcgtggtgcaacgatatttcccaaatcccaataaacatatttcacagacagaggtaatcattagattcgctttccaaacgtccattacagttctctgcatagcctgcccatgcagcttaggactcgcaactccaacagctgtcatggtgggaactggagtcgctgcacaaaatggaattttgattaagggaggaaagccactggaaatggcacacaagataaaaacggtgatgtttgataaaactggaaccattactcatggagttccacgagtgatgcgtgtactattgctgggagatgtcgcgactttgccacttcgaaaggtgttagcagtagttggaacagctgaagcctcatctgaacatcctcttggagttgctgttactaaatattgtaaggaggagttggggacagagacgctgggatattgtactgattttcaagctgtcccaggttgcggaattggatgtaaggttagcaatgtagaaggaattttggctcattctgaacggccactctcagctcctgcaagccaccttaatgaagccggatcactaccggctgaaaaagatgcagtacctcagacgttcagtgttctcataggtaacagggaatggctgcgacggaatggtttgaccatttcaagtgacgtctcagatgcaatgactgatcacgagatgaaaggtcaaacagctattctcgttgccatcgacggagtgttgtgtggtatgattgcaatcgctgatgccgttaagcaagaagctgcccttgctgttcacactcttcaaagcatgggagttgacgtagtgttgattactggagataatcgtaagactgctcgagcaatcgcaacacaagttggaattaataaggtcttcgctgaagttctaccctctcataaagtggcaaaagttcaagaattgcagaacaaaggaaaaaaagttgcaatggttggagatggagtgaatgattcaccggctctagctcaagccgacatgggagttgcaattgggacaggcaccgatgtagcgatcgaagccgcagatgttgtgttaatacgtaacgatctgctcgacgtcgtggcatcaattcatctctcaaagagaacagttcggcgcattcggatcaacttggtcctagctcttatttataacctggtaggaattccgatcgccgcgggagtttttatgcctataggcattgttctgcaaccttggatggggtcagccgctatggcagcatctagtgtgtctgtggtgttatcatcacttcaactgaaatgctacaagaagccagatctcgaacgttatgaagctcaggcacacggacatatgaaaccattgacagcttctcaagtgtcagttcatattggaatggatgatcgatggagggattcaccccgagccactccatgggaccaagtatcctatgtctcacaagttagtttgtcttcattgacatccgataaaccgtcgcgacactcggctgcagctgatgatgacggtgacaagtggtctctactactaaatggcagagatgaggagcaatacata

SEQ ID NO: 7460 - DNA, 4395 bp, synthetic construct
  misc_feature 1..4395: note = source = /note="Description of Artificial Sequence: Synthetic coding sequence"
  source 1..4395: mol_type = other DNA
atgccggagcaagagcggcaaattaccgccagagaaggcgcatcgcgcaaaattctgtctaaactatctctcccaactagggcatgggaaccagctatgaagaagagcttcgctttcgataacgtgggatatgagggcgggctagacggtctagggccctcatcccaggtggccacgagcacggttcgaattcttggcatgacatgtcaaagttgtgtcaagtcgattgaagatcggatcagcaacctgaaggggataataagtatgaaagtgagccttgagcaaggctctgccacggtgaagtatgtaccttccgtagtgtgtttgcagcaagtgtgtcatcagatcggtgatatgggatttgaggcttctatcgccgagggtaaggccgctagctggccgtctaggtccttacctgcacaggaggccgtcgtcaagcttcgggtcgaaggaatgacctgtcagagttgcgtcagtagtatcgaggggaaggtgcgaaaactccaaggagtcgtgcgggttaaggtttctttaagcaatcaggaggctgtaatcacctaccaaccctatttaatccagcccgaagacctcagggatcacgtaaatgacatgggattcgaagccgccattaaaagtaaagtggcccccctctccctggggcctatagacattgagcgcctccagagcaccaaccctaaacgtcctctgagcagcgcaaaccaaaatttcaacaactcagagaccctaggccaccagggtagtcacgtggtaactctgcagctcagaattgacggcatgcattgcaagtcttgcgttttgaacatcgaggagaacattgggcagttgttaggcgtgcagtccatccaggtgtctttagaaaacaaaacagcacaggtgaaatacgatccaagctgcacttcccctgtggccctccagcgggctattgaagcactcccacccgggaatttcaaggtttcactgcccgatggagcagagggcagtggcactgatcacaggtctagctccagccactcccctggctctccaccacgaaatcaggtccagggcacatgctctaccactctgatcgcaatcgctggaatgacttgtgccagctgcgtgcattcaatcgagggaatgatcagtcagcttgagggcgtccaacagatatctgtctcgctggccgaagggaccgcaacggtactgtacaacccgtcagtcatcagccccgaagaattaagggctgctatagaagatatgggattcgaagcctcagtggtgtccgaaagttgcagcaccaaccctttaggaaaccactcagcggggaacagcatggtgcagacaactgatggcacacctacatccgtccaggaggtcgctccacacacaggtcggcttcccgctaaccatgcaccggacattcttgctaaatcacctcagtctactcgcgctgtggccccgcagaagtgctttttgcagatcaagggcatgacctgtgcgtcctgtgtttcaaatatagagagaaacctacagaaggaggccggcgtcttgtctgtgctggtggccctgatggcgggaaaagctgagatcaaatatgatcctgaggtaatacagcccctagaaattgcccaattcatccaggatctgggatttgaggcggccgttatggaggattacgcaggaagtgatgggaatatcgaattaactatcacgggaatgacctgtgctagctgcgtgcataatattgaatccaagctgacgcggaccaacggcatcacttacgctagtgttgcgctggctacgtcaaaagcactcgtgaagttcgaccctgagatcataggccctagggacattattaagatcatagaggaaattggtttccatgccagcttggcccagaggaatcccaatgcccaccacctagatcataaaatggagataaagcagtggaagaagagctttctgtgtagtctggtgttcgggatacccgtgatggcgctaatgatttatatgttgattcctagcaatgaaccacatcagtcaatggtgttggaccataacatcatcccagggctcagtattctgaacctgatattcttcattctctgtacatttgtgcagctgctgggaggatggtacttctatgttcaggcatataaatccttgcggcacagaagcgcaaacatggacgtcctgatcgtgttggccacgtcaattgcgtatgtatacagcctagtgattttggttgtggccgtagcagagaaggccgaacgatctccggtgaccttcttcgatacccctcccatgctgtttgtttttatagcactcgggcgatggttggagcacttggccaaaagcaaaaccagcgaggctttagccaaattaatgagtttacaggccaccgaagcgactgtggttactctgggggaggataacctgattattagggaggagcaggtcccaatggagctggtgcagaggggtgacattgttaaagtggtcccaggaggcaaattccctgtggatgggaaagttctggagggtaatacgatggccgacgagtctctcatcacgggggaggctatgcctgttacaaaaaagccaggaagcacggtcatcgcaggttccattaacgcacacgggagcgtcctgatcaaagccacacacgtgggaaatgatactacccttgctcagatcgtcaagctagtggaagaagcacagatgagtaaggccccgatccagcagctggccgaccgattcagtggttacttcgtcccatttatcattatcatgagcacacttactctggttgtttggattgttatcggatttattgactttggcgtagtccagaggtacttccccaatcctaataagcacataagccaaactgaggtgatcattcgtttcgccttccagacatccatcacagtcctctgtattgcttgcccatgtagtttgggccttgccacacctaccgcggttatggtgggaaccggagtggcagcccaaaatggcatcctaattaagggtggcaaacccctcgagatggctcacaagattaaaacagtaatgtttgacaaaaccggaaccattacacatggggttcctcgcgtgatgcgcgtcctgctcctgggtgatgtagcaactctgccccttcggaaagtgctggctgtggtgggaaccgctgaagcaagctcagagcacccactgggtgttgccgtgactaaatattgtaaggaagagttggggacggagacactgggctactgcaccgattttcaggcggtgccggggtgtggtatcggctgcaaagtgagtaatgtcgaggggattttagcccactctgagcggcccctcagcgctccagcgtcccacttgaatgaagctggatcattgccggcagaaaaggatgccgtgccgcagacatttagcgtacttatcggcaatcgcgaatggttgcgcagaaatggcctcactatctcttctgacgtatcggatgccatgacggatcatgaaatgaaaggtcagaccgctatcctagttgccatcgacggcgttctctgcgggatgattgcgattgccgatgctgtgaaacaggaggccgcccttgctgtacacacactccagtccatgggtgtggatgtcgtgctgattaccggtgataataggaaaaccgcccgcgctattgctacccaggtgggaatcaacaaagtgttcgcagaagtgcttccctctcacaaggtggccaaagtccaggaactgcagaacaagggtaaaaaggtcgccatggtgggtgatggcgtaaacgattcccccgccctagcacaggctgacatgggtgtcgctataggcaccggaaccgacgtggccatagaagctgctgatgtggtcttgatccggaacgatctcctggatgtggtcgcgtcgatccacctctccaaaaggactgttaggcggataaggatcaacctagtcctcgcgctaatctataacttggtcgggatcccaatcgcagccggcgtgttcatgccaataggcatcgttctccagccctggatgggcagtgcagctatggctgcaagttcagtgtcagtagtgctgagctccctacagctgaagtgctataaaaagcccgatctcgagaggtacgaagctcaagcccacggacatatgaaacccctcactgcctcacaagtctccgttcatattggcatggacgatcgttggagagacagtcctagagcaaccccctgggaccaggtctcgtacgtgtcgcaggtgagcctgtcatcacttacatcagataaaccctcgagacattcagctgcagctgacgacgatggagataagtggtccctgctcctgaatggtagagatgaagagcaatatatt

SEQ ID NO: 7461 - DNA, 4395 bp, synthetic construct
  misc_feature 1..4395: note = source = /note="Description of Artificial Sequence: Synthetic coding sequence"
  source 1..4395: mol_type = other DNA
atgcccgagcaagagagacagatcactgcacgggagggagcatcccgcaaaatcttgtctaagctgtctctgccaacgagagcctgggagccagcaatgaagaagtcatttgccttcgacaacgttggttacgagggtggcctggatggcctcgggccctcctcccaagtggccactagcaccgtacggatcttgggtatgacctgccaatcatgcgtgaagagtatcgaggataggattagtaaccttaaaggtatcataagtatgaaggtcagcttggaacagggctccgctaccgtgaagtatgtacccagcgttgtttgtctgcagcaggtgtgccatcagattggtgatatgggtttcgaggcctccattgccgaggggaaggctgcatcttggccctcgagaagtttgcctgcccaagaagctgtcgtgaagctgagggtggagggaatgacgtgccagtcatgcgtcagcagcatcgaaggaaaggtacgaaagcttcagggcgtggtaagagtgaaggtaagcctgagtaatcaggaggccgtaataacctatcagccctacttaattcagccggaggacctgagggatcacgtaaacgatatgggctttgaagcagccatcaaatcgaaagtggctccattgtccctcgggccgattgacatcgaaagactgcagagcactaatcccaaacggccactcagctctgccaaccagaattttaacaattccgagactttaggccatcaagggtcccacgtcgtcacactgcagctcagaatagacggaatgcactgtaaatcttgcgtgttaaatattgaggagaatatcgggcaactcttgggagttcagagtatccaggtctctcttgagaacaagaccgcccaggtcaaatatgatccgtcttgtaccagccccgttgctctccagcgcgcaattgaggctttgccgcctggcaactttaaggtctcactccccgatggcgctgaggggtctggtactgaccacagaagtagtagctcccactccccgggaagccctccgcgcaaccaagtgcagggcacctgcagtactaccctgatcgctatcgcaggcatgacatgcgcgtcttgtgtgcactctatcgaaggaatgatctcacagctggaaggtgttcagcagatctcagtctctctggctgagggcactgccaccgtactctataatccaagcgtaatatctccagaggagctcagagccgcgatcgaggacatggggttcgaggccagcgtggtaagtgaatcctgttcaacaaacccgctcggaaatcactccgctggcaacagtatggtgcaaacaaccgatggtactcctacatctgttcaggaggtcgcgccacacaccggtagattgccagctaatcacgccccagatatcctcgcgaagtctccccaaagcactcgggctgttgcgcctcagaaatgttttctgcagatcaagggcatgacttgtgcctcttgcgtgagtaacattgaaaggaaccttcagaaggaggctggggtgttgagcgtcctggtcgctctgatggcgggaaaggctgaaatcaaatacgatccggaagtaatccagcccctggaaatagcgcagtttatccaagacctgggttttgaagcggcagttatggaggactacgccggcagcgatggcaatatcgagctgacaatcacgggaatgacatgcgcatcctgcgtccataacatcgaatcaaagctcacaagaaccaacggcataacatatgcgagcgttgcattggccacctccaaagctctggtgaagtttgaccccgagatcatcgggcctagagatataatcaaaattattgaggaaataggatttcatgcttccttggcccagcggaatcctaacgctcatcacctggaccacaagatggagattaaacagtggaagaaatcatttctctgcagtctggtgtttggcatccccgtgatggcactgatgatatatatgctaataccatccaatgaaccacatcagtccatggtactcgaccataacatcataccaggactctccatcttgaatctcatcttcttcattctctgtacttttgtgcaactacttggtgggtggtacttctacgtccaagcatataaatctcttcggcacagaagtgcgaacatggacgtgctgatcgtattagctacctcaattgcctacgtatactccctcgtcattctcgtggtcgccgtggcggaaaaagccgaaaggtccccagtaacctttttcgatacgccccctatgctgttcgtgttcattgctctcgggaggtggttagagcatctggctaaatctaagaccagcgaggccctggccaaactcatgtctctccaggctacggaggccactgtagtgacgctgggggaggacaatctgattattagggaggaacaggtgcctatggagctggtccaaaggggcgatatcgtgaaggtagtgcccggaggaaaattcccggttgatggtaaggtgctcgaagggaatactatggctgacgagagccttattaccggggaagccatgcctgttacaaagaagccaggtagcaccgtcatcgccggctcgattaacgcccacggctccgttctgataaaggcgacccacgtcggtaacgacaccacactggcacaaattgttaaacttgtggaagaggcccaaatgagtaaggcgcccatccagcagctggccgaccgctttagtggctacttcgtgccttttatcataattatgagtacactcacactggtggtgtggatcgtgatcggattcatcgattttggagtggtccaaagatacttcccgaacccaaacaaacacattagccagaccgaagtcattatacgatttgcgttccagactagtatcactgtgctctgcatagcgtgtccctgttcccttggactggctactcccaccgctgtgatggtgggaacaggggtggctgcccagaacggaatcctaatcaaggggggcaagcccttggaaatggcccacaaaataaagaccgtaatgtttgataaaactgggactataacccacggagtgccgcgggtcatgcgagtcctgttactgggggatgtcgccacactacccttgcgaaaggtgctggctgtggtgggcacagctgaggcaagcagcgagcaccctctgggggtggctgtaaccaaatactgtaaggaagaattgggaacggagaccctgggatattgcaccgattttcaagccgttccaggttgcggaatcggatgcaaggtgtccaatgttgagggcattctagctcattcagagcgacccctttcagctcccgcttctcatctaaacgaggccgggagcctcccggctgaaaaggatgcagtgcctcagaccttctcagtccttattggcaaccgcgaatggctcagacggaacggtcttacgatctcctcagatgtttctgatgcgatgacagaccacgagatgaaaggacagaccgcaatcttagtggccattgacggtgtgttatgcggcatgattgcgatcgccgacgccgtgaaacaggaagctgccttagctgtgcacacattgcagtctatgggagtggacgttgttctcataaccggggacaaccgcaagacagctcgcgcgatagctactcaggtcggcataaacaaagtgttcgcagaggttctccccagtcataaggtggctaaggttcaggagttgcaaaataagggcaagaaggtagctatggttggcgacggggttaatgactctccagctctggctcaggctgatatgggggtagcgatcggcacggggaccgacgtggcaattgaagccgctgacgttgtgcttatccgtaatgacctgctggacgtcgtcgcctcaatccatctgtcgaaaagaaccgtgcggaggattaggatcaatctggtgttagcgcttatctacaacctggtgggcatccccattgcagccggggtattcatgcctataggcatcgtgcttcagccctggatggggtccgctgccatggcagcgtcaagcgtctccgtggttctctcatctctgcagctcaagtgctacaagaagccagaccttgagcgctacgaagctcaagcccacggtcacatgaagcctttgaccgcaagccaagtgtccgtgcacattggcatggatgatcggtggcgggactcccctcgggccaccccttgggatcaggtgtcttatgtgagtcaggtttccctcagctccttaactagcgataagccttctagacacagtgcagctgctgacgacgacggggacaagtggagtctgctcctaaatggccgggacgaagagcaatatatt

SEQ ID NO: 7462 - DNA, 4395 bp, synthetic construct
  misc_feature 1..4395: note = source = /note="Description of Artificial Sequence: Synthetic coding sequence"
  source 1..4395: mol_type = other DNA
atgcccgaacaagaacgccagattacggcgcgcgaaggagcatctcggaagattctttccaagctgagccttccaaccagggcatgggagccggctatgaagaagagcttcgccttcgataacgtgggctacgaaggtggtcttgatggactgggacccagctcgcaagtggcaacctccactgtgaggatactgggaatgacctgccagtcctgcgtgaagagcatagaggatagaatttcgaaccttaagggaatcatctcgatgaaggtgtcgctggaacagggatcagcaaccgtcaaatacgtgccctccgtcgtgtgcctgcaacaggtctgtcatcaaattggtgatatgggattcgaggcctcaatcgcagaaggaaaggccgcatcctggccgtcgcgttccctcccagcacaggaagcggtcgtgaaacttcgcgtggaaggtatgacgtgtcaatcctgcgtctcatccatcgaaggaaaggtgagaaaactgcagggagtggtgcgcgtgaaagtctcacttagcaatcaagaggccgtgattacctaccagccatatctgatccagcccgaagatttgagagatcatgtgaatgacatgggattcgaagcagccatcaaatccaaggtggcgccactcagcctcggtcctatcgacatcgaaagactgcaatcgaccaatccaaaaagaccactgtcatcggcaaaccagaactttaacaattcggaaaccttggggcaccaaggaagccacgtggtgacgttgcaacttcggatcgacggcatgcactgtaagtcatgcgttctgaacattgaggaaaacatcggacaattgcttggagtgcaatcgattcaggttagcttggagaataagactgcccaggtgaaatacgatccttcgtgtacctcccccgtggcactgcaacgtgcgattgaagcactgcctccgggaaactttaaagtctcgctgcctgacggggccgagggttccggcaccgatcataggtcctcctcctcacattcaccgggatcaccacctaggaaccaagtgcagggaacttgttcaacgacccttatagccatcgcaggaatgacttgcgcctcgtgtgtgcactctattgaaggtatgatttcgcaactggaaggggtgcagcagatctccgtgtccctcgccgagggcaccgctaccgtgctgtacaacccctcagttatctcgccagaagaactcagggccgcaattgaagatatgggatttgaagcaagcgtcgtctcagaatcgtgtagcactaatcctttgggcaaccactcggctggaaattcgatggtccaaactacggacggcactcctacttccgtgcaagaggtcgcaccgcatactggcagacttccagcaaaccatgcaccagatatcctcgcaaagagccctcagtctacccgtgcagtcgcacctcagaagtgttttctccaaatcaagggcatgacttgtgcatcctgcgtgtcaaatatcgaacgaaaccttcaaaaagaggcaggtgtcctgtcggtccttgtcgcacttatggctggtaaggctgagattaagtacgatccagaggttattcaacctttggagatagctcagtttatccaagaccttggattcgaagctgccgtgatggaagattatgcgggctcggacgggaatatagaacttactattactggtatgacttgtgcgagctgtgtccacaatattgaatctaaattgacgcggacgaacggtattacttatgcttcggtggctctggctaccagcaaagcgcttgtgaagttcgaccctgagatcatcggccctcgagacattatcaagatcatcgaagaaataggattccatgccagcctggcgcaaagaaatcccaacgcacaccatcttgaccataagatggagattaagcagtggaagaaatcgtttctttgtagcttggtgttcggaatcccagtgatggcacttatgatttacatgctgatcccttccaacgaacctcatcagtctatggtgttggatcacaacattattcctgggctgagcattctcaaccttatcttctttatcctctgcacctttgtgcagctcctcggaggttggtacttttacgtgcaagcctacaagtcattgcgtcatagatccgcaaatatggacgtgctgatagtgctggcgacctcgatcgcatacgtctactcgctggtcatactggtggtcgcggtggcagagaaggccgaaagaagcccagtcacttttttcgatactcccccaatgctctttgtgtttatcgccctcggaagatggcttgaacatctggcaaagtctaaaacctcagaagctcttgcaaagctgatgtcgcttcaggccactgaagcgactgtggtgacccttggggaggataacttgattattcgcgaagaacaagtgcctatggagcttgtgcaacgaggggatatcgtgaaagtcgtgccagggggcaagttccccgtggacggcaaggtccttgagggtaacacgatggcggatgagtcgcttattaccggcgaagcgatgccggtgactaaaaagccaggctccaccgtgattgctggttccataaatgcccacggatcagtcctcattaaagcgacccatgtcggaaatgacacgaccttggcacagattgtgaagctcgtggaagaggcccagatgtctaaagcgcccattcaacaacttgcggacagatttagcgggtactttgttccttttatcatcatcatgtccactctgacgctggttgtctggatagtgattggcttcatcgattttggtgtggtgcaacgatactttcctaaccccaacaaacatatctcgcaaaccgaggtgattattcggttcgcatttcagacctccatcaccgtcctgtgcattgcttgtccttgttcgctgggacttgctacgcctaccgccgtcatggtcggcaccggagtggcagcgcagaatggaatcctgattaagggagggaaaccgcttgaaatggcccataagattaagaccgtgatgttcgataagaccggaaccatcacccacggggtgcctagagttatgagggtgcttcttcttggagacgtggcaactcttccactgagaaaggttttggcagtggtgggtactgcagaagcgtcctccgaacatccacttggtgtggcagtgaccaaatactgtaaggaagaactgggtactgaaactctgggatactgtaccgacttccaagcggttccaggttgtggtattggatgcaaggtttctaacgttgaaggcattcttgcccattctgagcgaccgctgtcagccccagcctcacacctgaacgaagctggtagcctgccagcagagaaggatgcggtgcctcagacctttagcgtgctcatcggaaatcgggaatggcttaggagaaacggattgacgatttcgtccgatgtctccgatgcaatgaccgaccacgagatgaaagggcaaactgcaattctcgtggcaattgatggtgtgctgtgtggtatgattgcaatagcggacgccgtcaagcaggaggcagctctcgccgtccataccctgcaatcgatgggcgtggatgtggtgcttattactggggataacagaaaaaccgccagagcaattgctacgcaggtgggaatcaacaaggtgtttgcagaggttcttccatcccataaggtcgcaaaagtgcaagaactgcagaataagggaaaaaaggtggcaatggttggtgacggcgtgaacgattcacctgcactcgcacaagcggacatgggagttgcaataggaactggaaccgatgtcgcaattgaagcggcagacgtggttcttatcaggaatgatctccttgatgtggtcgcgtccattcatctttcgaagagaaccgtgcggcggattcgaatcaacctggtgctcgccttgatttacaacctcgtcggaattccaattgcagcaggagtctttatgccgataggaattgtgcttcagccctggatgggctcggcagcgatggcagctagctctgtgagcgtcgtcctttcctcactccagctcaagtgctacaagaagccagacttggagcgctacgaggcacaagcccacggtcacatgaagcctctgaccgcgtcccaggtgagcgtgcatatcgggatggacgatcggtggcgagattcccctagagcaactccctgggatcaagtcagctacgtgtcacaagtgagccttagcagccttacctcggataagccatcgcggcattccgcagcagcggatgatgatggtgacaaatggagcctgctcctgaacgggcgcgatgaggagcagtacatt

SEQ ID NO: 7463 - DNA, 4395 bp, synthetic construct
  misc_feature 1..4395: note = source = /note="Description of Artificial Sequence: Synthetic coding sequence"
  source 1..4395: mol_type = other DNA
atgcctgagcaggaacggcagatcactgctagggaaggtgctagccggaagattctctccaaactgtcactcccaactagggcatgggagcctgcaatgaaaaagtcgtttgcttttgataacgtgggctacgaaggaggtcttgatggacttggtccttcatcacaagtggcgacttctaccgtgcgcattcttggtatgacttgccagtcctgtgtcaagtccatagaagatcggatttccaacctgaagggaatcatatcaatgaaggtatccctggagcagggatcggcaactgtgaagtacgtcccaagcgtggtgtgtttgcaacaggtgtgtcatcaaattggtgacatgggcttcgaggcatcaattgcagaggggaaggcagcttcatggcctagccgttcgctgccagcacaagaagcggtcgtgaagctgagggtggagggtatgacctgtcagtcgtgcgtctcctccattgaaggcaaggtgaggaagttgcaaggagtggtacgggtcaaggtgtcactttccaaccaagaagcagtgataacctaccaaccttacctgattcaacctgaagatttgcgcgatcatgtgaacgatatgggttttgaggcagcgatcaaatcaaaggttgctcctctgagcttggggcctatcgacatcgaacgccttcagtcaactaaccctaagcgccccctgtcctcagcaaaccagaatttcaacaattccgaaactcttggccatcaaggtagccatgtcgtgactctccagctgaggattgacggtatgcactgtaagtcctgtgtgctgaatattgaggaaaacatcggtcagttgttgggcgtgcaatcgattcaggtgtccctggagaataagacggcccaggtgaaatatgatcctagctgtactagcccggttgcacttcaaagggccattgaggcactcccgccaggaaactttaaagtgtcgctgcccgatggcgccgagggatcggggaccgatcatcgctcatcctcctcccacagcccagggtccccgccacgaaaccaggtgcagggaacctgtagcaccaccctcatcgctatcgcaggaatgacttgtgcatcgtgtgtgcactcgattgaagggatgatcagccagctggagggcgtccagcaaatttcagtgagccttgccgaaggtacggcaaccgtcctgtacaatccttcggtgatctccccagaagagttgcgcgcggcaattgaagatatggggttcgaggccagcgtggtgtccgaaagctgctccactaacccactcggcaaccattcagcaggaaactcgatggttcagacgactgatgggacccctacctcggtgcaagaagtggctcctcataccggtcggcttccggcaaatcacgctccagatatccttgcaaagtcccctcaaagcactagagcagtcgcgccccaaaagtgttttctgcagatcaaaggaatgacctgtgcatcgtgcgtgtcaaacattgagcggaacctgcaaaaggaggcaggtgtcctgtccgtgcttgtggccctgatggcaggaaaggcagagattaagtatgatccagaggtgattcagccgcttgaaatagcacaattcatccaggacctgggctttgaagcagcggtgatggaggattacgccggctccgatggaaacattgaactgactatcaccggaatgacgtgtgcatcctgtgtccataacatcgagtccaagctcactagaaccaatggaattacgtacgcatcggtggcccttgctacttcgaaggcacttgtaaagtttgatccggagattattggacctagagacatcattaagattattgaagaaataggatttcatgcaagccttgcacaacgtaatccaaacgcgcaccaccttgatcataagatggagattaagcagtggaagaaaagttttttgtgctccctggtctttggaattcctgtgatggcactgatgatctacatgcttattccttcaaacgaaccacaccaaagcatggtcctcgaccacaacataatacctggtctgtccattcttaacctgatcttctttattctctgtacctttgtgcaactgctgggaggatggtacttctacgtgcaggcgtacaaatccctgaggcatagatcagcaaatatggatgtccttattgtgctggcaacttcgattgcatacgtctactcgcttgtgatcctcgtggtggcagtggccgagaaggccgagagatccccagtcaccttttttgataccccgccgatgctgttcgtctttattgcactgggcagatggctggagcatctggcaaagagcaagacttcagaggcacttgcaaagctgatgtccctgcaagcgactgaggcgactgtggtcacgctcggagaggacaacttgattatacgcgaagagcaagtgccaatggaactggtgcagagaggcgacatcgttaaggttgtgccaggagggaagtttccagtggatggaaaggtgctcgaaggcaacactatggccgacgaatcgcttattactggagaagcaatgccagtgactaagaagcccggctcgaccgtcatcgcaggctcgattaacgcacatggatccgtgctgatcaaagcaactcatgtgggtaacgatactactctggcacaaatagtgaagctcgtggaagaagctcagatgtcaaaagcacctattcaacaacttgccgacagattctcgggttactttgtgccttttatcatcattatgtccaccctgacgctcgtggtctggatcgtcattggattcatcgatttcggcgtcgtgcagcgctactttcccaaccctaacaaacatatctcccaaactgaagtgatcattagatttgcctttcaaacctccattactgtcctgtgcatcgcgtgtccttgcagccttggactcgccactcctaccgcagtcatggtgggaaccggagtcgcagctcaaaacggtatccttatcaagggagggaagccactcgaaatggcacacaaaatcaagactgtgatgtttgataagactggcaccattactcatggggtgccccgcgtgatgcgggtgcttctccttggagatgtggctacccttcctctgcgcaaagtgcttgcagtggtcggaactgcggaggccagctccgagcacccactcggcgtggcagtgaccaagtactgtaaagaagagctcggtaccgaaaccctggggtactgtactgatttccaggcagtcccagggtgcggcattggatgcaaggtgtctaacgtggagggcatccttgcacactcagaacgccctctgtcagcaccagcttcccatctcaacgaagcaggctcacttcctgcagagaaggacgccgtgccgcaaaccttcagtgtccttatcggaaatagagaatggctgagacgcaacggacttaccatatcgtctgacgtgtccgacgcgatgacggaccatgagatgaaggggcagaccgcaatcctggtggcaattgatggcgtcctttgtggaatgattgcaatcgccgacgccgtcaaacaagaggcagcgcttgcagtgcacactctccagtccatgggagtggacgtcgtgttgattaccggcgacaaccggaaaacggctcgagcaattgcgactcaagtcggtattaacaaagtgttcgctgaagtcctcccatcacacaaggtggccaaggtgcaggagctgcagaataagggaaagaaggtcgccatggtgggagacggagtgaacgattcgcccgcactggcacaggcagacatgggagtcgcaataggtaccggaaccgacgttgctattgaagcagccgatgtggtcctcatccggaatgaccttctggatgtggtggcatctatccacctgtctaaacgcacggtcagaaggatcagaatcaaccttgtgctcgccttgatttacaacctcgtgggaatccctattgctgcaggtgtgttcatgcctattgggatcgttctgcagccatggatgggctcagcggcaatggcagccagtagcgtgtcagtggtgctttcgtcccttcaacttaagtgctacaaaaaacctgatctggaaagatacgaagcacaggcccatggtcatatgaaacctctcaccgcgtcgcaggtgtccgtccacattggcatggacgatcggtggagagattcaccacgagcgacgccttgggaccaagtctcatacgtgtcgcaagtctctctgagctcgttgacttcagacaagccttcacgtcactcggcagcagccgatgatgatggggataagtggtcgttgcttcttaacggaagagacgaagaacagtacatc

SEQ ID NO: 7464 - DNA, 4395 bp, synthetic construct
  misc_feature 1..4395: note = source = /note="Description of Artificial Sequence: Synthetic coding sequence"
  source 1..4395: mol_type = other DNA
atgcctgagcaggagaggcagatcacggctcgcgagggtgcatcccgtaaaatcctatcaaagctgagcctgccgacacgcgcgtgggagcctgccatgaagaagagtttcgctttcgataatgtcggctacgagggtggccttgacggcctggggcctagctcacaggtggctacaagcaccgtaagaatcttaggtatgacgtgtcagagttgtgtgaagagcattgaggaccgcattagcaacctcaaggggatcatcagcatgaaggtgtccctggaacaggggtcagcaaccgtgaaatacgtccccagcgtggtgtgtttgcaacaggtgtgtcaccagataggcgacatgggcttcgaggcgtcgattgcagagggaaaagctgcgtcttggccaagtcggagcttgcccgctcaggaggctgtagtgaaactcagagtggaaggcatgacatgtcaatcttgcgtcagctccattgaaggaaaagttcggaagctgcagggggtggtgagagtcaaagtctccctttccaatcaggaggctgtcattacctaccagccttacctgattcagccagaagatctcagagaccatgtcaacgacatggggttcgaagccgccatcaagtcaaaggtcgcccctctcagtctaggacctatcgacatagaacgcctgcagtccacaaaccccaagaggcccctttcttccgcaaatcaaaacttcaataatagtgagaccttgggtcaccagggctcccatgtggtgactctgcaactccggatcgatggtatgcattgcaagtcatgtgtgcttaacattgaagaaaatataggacagctccttggggtgcagagcatccaggttagtttggaaaacaaaacagcccaggttaagtacgatccaagctgcacaagtccagtggcccttcagcgtgccattgaggctttgcccccagggaactttaaggtgtccctgcccgacggggctgagggctctgggacagaccataggtctagttcttcccacagccccggctctccccccaggaatcaggtccagggcacgtgtagcacgaccctcatcgctatcgccggaatgacctgtgcctcttgcgtccactcaatcgaaggcatgatcagccagcttgagggcgtgcaacagatcagcgtaagcctcgcagaagggaccgcaaccgtgctgtacaatccttcagttataagtcccgaggaactgagggccgcgattgaggatatgggttttgaggcttcagtggtgagcgagagctgctctactaaccccctgggcaaccattcagcaggcaattccatggtccaaactaccgatggtacccccacctctgttcaggaagtggccccgcacaccgggcgcctgccagccaaccatgcgccagacatccttgcaaagtcccctcagtcaacgcgcgccgtggcgccacagaaatgctttctgcagatcaaggggatgacttgcgcgtcctgtgtgtctaacattgaaagaaaccttcagaaagaggccggggttttaagcgtgctggtggcactgatggcaggcaaggccgaaattaagtatgaccccgaggtcatccagcctcttgagattgctcaattcatccaggacctgggcttcgaggcagccgttatggaggattatgctgggtctgatggcaacatcgaactgacaatcacaggtatgacttgtgcttcctgtgtgcataatatcgaaagtaaactgaccaggaccaatggtatcacctacgccagcgtggctctggcaacttccaaggctcttgtgaaatttgatccagagataatcggcccgcgcgacataatcaagatcatagaagagatcgggtttcacgcatctttagcacaaagaaatcccaacgcccaccacctggaccataagatggagatcaagcagtggaagaagtcctttctgtgcagtctggtcttcggcattcccgtcatggctctgatgatttacatgctgatcccttctaacgagcctcatcagagcatggtgctggatcataatatcataccagggctgtccatcctgaatcttatctttttcatcctgtgtacctttgttcagcttctgggaggatggtatttttatgtgcaagcttacaagagtctgaggcaccgatccgcaaatatggatgtcttgatcgtgctagctacgtctatcgcttacgtctattctctcgtaatcctggtagttgctgtggccgaaaaggcggaacgctcacccgtgaccttcttcgacacacccccaatgctttttgttttcatcgcactgggccgctggctcgagcacctggccaagtccaagacctctgaggctttggcgaagctcatgtctctgcaggccaccgaggccacagtcgttaccctgggtgaggacaatttgatcatccgagaggaacaagtccccatggagctcgtgcaaaggggcgacatcgtcaaagtggtgcctggtggtaaattcccagtggacggaaaggtgctggaaggaaacaccatggctgatgagagcctcattactggtgaagctatgcccgtgacaaagaagcctggctcaacggttatcgccggatccattaatgcccacggaagcgtcctgatcaaggctacccatgttggtaatgacaccacactggcccaaatcgtgaaactggtcgaagaagcacagatgtctaaggcacctatccagcaactggccgatcggttctccgggtatttcgtgcctttcataatcatcatgtctacgcttaccctagtcgtatggatcgtcatcggcttcatcgatttcggcgtagttcagcggtactttcctaacccaaataagcacatctcccaaacagaagtaataatcagattcgcatttcaaacctccattaccgttctgtgcatcgcttgcccatgttctttgggtctggcgacacctactgccgtgatggtcggaaccggcgtggcagctcagaacggcatcctgattaagggggggaagcccctggagatggcccataagataaaaacggtgatgtttgataaaacaggaaccatcacgcacggtgtcccacgtgtgatgcgcgtcctgctacttggtgacgtggccacacttccactccgaaaggttctggccgtggtagggaccgcggaagcttcaagcgaacaccctctcggtgtggccgtgacgaagtattgtaaggaggagctcggcactgagaccctggggtactgtactgacttccaggccgtgcctgggtgtggcataggatgcaaggtttccaatgtggaaggtatcttagcccacagtgaaagacctctctcagccccggcatcccatctgaacgaagcagggagtctcccagctgagaaggacgccgtgccacagacttttagtgtcttgatcggcaatcgtgaatggctcaggcggaacggcctgactatctcatccgacgtgagcgacgccatgactgaccacgaaatgaagggacagacggcgatcctggtcgctatcgatggcgtcctgtgcgggatgatcgccatagccgacgcggtgaaacaggaagctgctctagcggttcatacactgcagtcaatgggcgttgatgtagtactgatcacgggagataatcgcaagactgctcgagccatagccactcaggtcggcatcaacaaggtattcgcagaagtcttacccagccacaaggtggcgaaggtgcaggagcttcagaacaagggaaagaaagtggccatggttggagacggagtgaacgacagtcctgccctcgcccaggcagatatgggcgtcgccattggcaccgggacagacgtggccatcgaagctgcagacgtcgtcctgatcaggaatgatcttctggacgtggtggcatcaatccacctgtccaagcgtacggtccgacggattcgaatcaacttggttttggccctcatatataatttggtgggtatccctattgcagctggcgtgttcatgcccatcggtatcgtgctgcagccatggatgggatcagctgctatggccgcaagcagtgtgtcagtcgtcctgtcctctctgcaacttaaatgctacaagaagcccgatctggaaaggtatgaagcgcaggcacatggtcatatgaagcccttaaccgcgagtcaggttagtgtgcatatcggaatggacgatagatggcgggactctccccgtgcaaccccctgggaccaggtgtcatacgtgagccaggtgagcttgtctagcctgacctcagacaagcctagcaggcacagcgccgcagctgacgacgatggagacaaatggtctttgctcttgaacgggcgagacgaggagcagtacatc

SEQ ID NO: 7465 - DNA, 4395 bp, synthetic construct
  misc_feature 1..4395: note = source = /note="Description of Artificial Sequence: Synthetic coding sequence"
  source 1..4395: mol_type = other DNA
atgcccgaacaggaacggcagattacagcaagagaaggagcctcaaggaagatactgtccaagctctccctgccaactagagcttgggagcctgccatgaagaagagctttgctttcgataacgttgggtacgaaggaggactggatggtctcggtccttctagtcaggtggcaacgagcactgtgcggatcctggggatgacgtgtcagagttgcgtaaagtcaatcgaggacaggatatccaacttgaaaggtattatctctatgaaggtctcacttgagcaagggtcagctaccgtcaagtatgtcccatccgttgtctgccttcagcaggtttgccaccagatcggagatatgggtttcgaggcatccattgctgaaggtaaggctgccagttggccctccagatccctcccagcacaagaggcagtggtcaagctgagagtggaggggatgacatgccaatcctgtgtctctagtattgaggggaaagtccggaagctccagggagttgtcagggtgaaggtgtccctgtctaaccaggaagcagtcatcacatatcagccttatctgatacagcctgaagatttgcgggatcatgtgaacgatatgggttttgaggccgcaattaagtctaaggtagctcccctgtcacttggccctatagatatcgaacgcctgcaatctaccaaccctaaacgacccctgtcctcagctaatcagaacttcaataacagtgagaccttgggtcaccagggttcccacgtggtgaccctgcagctgcgaatcgacggtatgcactgcaagagttgtgtgctgaacatcgaagagaatatcggccaactcctgggggtgcaatctatacaagttagcctcgagaacaagactgctcaggtcaagtatgacccgtcctgcacttcccccgtggctcttcagagagcaattgaagctctgccgcccggaaacttcaaagtttctctgcctgacggagcggaggggtccggtacagaccatcgcagttcatcttctcacagtccaggatcacccccgcgaaaccaggtgcaaggcacatgttccactaccttgattgctattgccgggatgacgtgtgcaagctgtgttcactctatcgagggcatgatctctcagttggagggtgtgcagcagatctccgtatccctggctgagggcacagccacggtgttgtacaatccctccgtgattagtccagaagaactgcgcgctgcgattgaggatatgggattcgaggcgagtgtggtgagcgaatcatgtagtacgaatcccctgggtaaccactctgcggggaattctatggtgcagaccaccgatggaacccctactagcgtccaggaggtggcacctcacacaggcagactgccggcgaatcacgcacccgatattctggctaagagtccgcagtctacaagagctgtagccccccagaaatgctttctgcaaatcaaaggaatgacttgtgccagctgcgtttccaatattgaacggaatttgcagaaggaagccggagttctctcagtgctggtcgcattgatggctggcaaggctgagatcaagtatgaccccgaggtgatccagccactcgaaatcgctcaatttatacaggaccttggatttgaggcggcagttatggaggactacgctggctcagacgggaacatcgagctgacaattacaggcatgacttgtgcctcctgtgtgcacaacatcgagagcaaacttactcgcactaatggaattacctatgcgagcgtggcacttgcaaccagtaaggccctggttaagttcgatcccgaaataatcgggcctcgggatattatcaaaatcattgaagagatcgggtttcatgcctcactggcacagaggaatcccaacgcccaccatctggaccacaagatggaaatcaaacaatggaaaaaatccttcttgtgctcacttgtgttcgggatccctgtgatggcattgatgatctatatgctgattccctccaatgagccccaccagtctatggtccttgaccacaacattattccgggtttgtctatcctcaatctgatcttcttcatcctctgcaccttcgtccaactgttgggaggatggtatttttatgtgcaggcttacaagagtctcagacacagatccgccaatatggacgtcttgatagtgttggccacaagtatagcctatgtgtactcactcgtcattctggttgtggcagtagcagagaaggccgagaggtccccagtcacgtttttcgatactcccccgatgctgtttgtgttcatagccttgggtagatggctggagcatttggctaagagcaagacgagcgaagccctggccaagctgatgagtctccaggctaccgaggcaactgttgtgactcttggagaagataatctgattattagggaagagcaggtgccaatggagttggtacagcgaggcgatatcgtcaaggtcgtacccggaggcaagttccccgtggacggtaaagtgctggaggggaatactatggccgacgagtctctgatcacgggggaagctatgcccgttacgaagaagccgggaagcactgtgatcgcaggctctattaacgcccatggttcagttctgattaaagccacacacgttgggaacgacaccacgcttgcccagatcgtcaaactcgtggaggaggcccagatgtcaaaagcccccattcagcagctggccgacaggttctccggatactttgtaccattcataatcataatgtctaccctgaccctggtcgtctggattgtcataggctttattgactttggcgtggtacagcgctactttcccaaccccaacaaacatatttcacagaccgaagtcataataaggtttgcattccagacatctatcaccgtgctgtgcattgcttgtccttgctcactgggcctggctaccccaactgcggtgatggtcggaacaggagtcgcggcacaaaacgggatcctgatcaagggaggcaaacccttggagatggcccataagatcaaaaccgttatgtttgataaaaccggtactattacccacggcgtaccacgggttatgagagttctgctgcttggggacgtggccaccctgcctcttcggaaggtgctggccgtcgtgggaaccgcggaagcttcctctgagcaccccctgggcgtcgccgtgacaaaatactgcaaagaagaactcggaacagagacactgggttattgcaccgacttccaggccgtgccgggctgcggaatcggctgtaaggtgtctaacgtggagggtattctcgcccatagtgagcggcctctctctgcgccagcgagtcatctgaatgaagctggtagccttccagccgaaaaagatgccgtgcctcagactttttcagtcctcatcggtaaccgagagtggctgaggagaaatggattgacgatctccagtgatgtttccgacgcaatgaccgaccacgagatgaagggacagaccgctatccttgtggcaatagatggtgtcctgtgcggaatgatagcaatcgcggatgccgtgaagcaggaggccgctctggccgtccacacgctgcagagcatgggagtagatgtagtgcttattaccggcgacaaccggaagaccgcacgcgcaatcgccacccaggtgggaattaataaggtgttcgcagaagtcctgccttctcacaaagtggcaaaggtacaggaacttcagaacaagggtaaaaaggtagcaatggtcggcgacggagtgaacgattcccctgctctggcacaggctgacatgggggtggcgatcggcactgggaccgacgtagcgatcgaggccgctgacgtcgtgttgatcagaaacgatcttctggatgtggtggcttccattcacctttctaagcggacagttcgccgcattcgaattaaccttgtgctcgccctgatctataacctggtcggaattccaattgccgctggtgtattcatgcctattggtatcgtactgcagccctggatgggatcagctgctatggccgctagttccgttagcgtggtcctgagcagcctccaattgaaatgctacaagaagccagacctggagcgatatgaagcacaggcccacggacatatgaagccacttacagcgtcacaggtgtccgtgcatatcggcatggacgacaggtggagagactcacctagagctacaccttgggatcaagtcagctatgtgtcccaggtcagtcttagcagccttacttctgacaaacccagtagacacagtgccgccgctgacgacgatggagacaaatggagtctgctcctcaatgggcgagacgaggagcagtacatt

SEQ ID NO: 7466 - DNA, 4395 bp, synthetic construct
  misc_feature 1..4395: note = source = /note="Description of Artificial Sequence: Synthetic coding sequence"
  source 1..4395: mol_type = other DNA
atgccagagcaggagaggcagatcacagccagggagggcgcctcacggaaaattctcagcaagctctctctcccgacacgggcttgggagcctgcaatgaagaagagctttgcattcgataacgtgggatacgagggtggacttgatggcctagggcctagcagccaggtggccacatctaccgtgaggatcctggggatgacctgccagtcgtgtgtaaaatcaatagaggatcgaattagtaatctcaaagggattatatctatgaaagtgtccttggagcagggaagtgccacagttaagtatgtgccgtcagtggtgtgtttgcaacaggtgtgccatcaaattggtgacatgggcttcgaggcctcgattgccgaaggaaaggctgcctcctggccatccaggagcctgcctgctcaggaagccgtggtcaagctgcgtgtggagggcatgacatgccagtcctgtgtatcttctattgaaggcaaggtgaggaagctgcagggagtcgtaagggtaaaagtcagtttgtccaaccaggaggcagtgatcacttaccaaccgtacttgatccaacccgaggatctacgggatcacgtgaacgacatggggttcgaagccgccatcaagtctaaggtcgcacctctatccctcggacctatagacatcgaaagactgcagagtacgaaccccaagaggcctctgtctagtgcaaatcaaaattttaataactccgagacgctgggccatcagggatctcacgtggtaaccttgcagctacgaatagacggtatgcactgcaagtcctgcgtactgaatatcgaggagaacattgggcaattgctcggcgtccagtctattcaggtttccctcgagaacaagacggcccaagtgaaatacgatccctcatgtactagccctgttgccctacagcgggccatcgaggcgcttcctcccggcaacttcaaggtcagcctgccagatggtgcagaaggtagtgggacggatcatcggtcatcctcctctcactccccaggctcaccacctcgaaatcaggtacaggggacgtgtagcacgacacttatagccatagccgggatgacttgtgcttcatgcgtgcattccatcgaggggatgatcagtcaactggaaggcgtgcaacaaatctccgtctccctagctgaaggcacggcgacagtactgtataatcccagtgtaatctcaccagaagaactcagggctgctattgaagatatgggttttgaagcaagtgtggtgagcgaatcttgttctacaaacccgctcgggaatcatagcgctggcaatagtatggtccaaaccactgatggaacgccaaccagtgtgcaagaggtagccccgcacactggccgcctgcctgccaaccacgccccggatatattggcgaagagtccacagtccacgagggctgtggctccacagaaatgcttcttgcaaatcaagggaatgacctgtgcctcttgtgtgtctaatatcgaacggaacctccagaaagaagccggggtcctctccgtgcttgtagcactcatggccgggaaggcggaaataaagtacgaccccgaggtgatccagcccttggagatcgcacagttcatccaggatttaggatttgaagccgcagttatggaggattatgctggaagtgatggcaacattgaactcacaatcactgggatgacttgtgcctcatgcgtgcacaatattgaatccaaactgacgaggacaaacgggatcacctacgctagtgttgccttagcaacatctaaagcactcgttaaatttgacccagagataatcgggcctagggatataatcaagatcatcgaagagatcggcttccatgcgtctctagcccagcgcaatccaaatgctcaccatttagatcacaaaatggagatcaagcagtggaagaaaagcttcctgtgcagtcttgtatttggaatccccgtgatggccctcatgatatatatgctgatccctagcaatgagccacatcagagcatggtacttgatcacaatatcatccctggcctgtcaattctgaacttgatattttttatcttgtgcacatttgtgcagctactgggaggttggtacttttacgtgcaggcctataagtccctgcggcaccggagtgctaacatggacgttctgattgtactcgcgaccagtatcgcctacgtgtactcccttgtcattctggtggttgcggtagcagaaaaggcggaacgtagccctgtgacattcttcgatacccccccaatgctttttgtgttcatcgcactagggaggtggttggaacacctggcgaaaagtaagacaagtgaggcacttgccaaactcatgtctttgcaggcaactgaagccaccgtggtaactctcggggaggacaacctgatcatcagggaggagcaggtaccaatggaactggttcagagaggggatattgtcaaggtcgtgcctggagggaagttccccgtggacggcaaagtgctggaaggaaatacaatggccgatgagagtctgatcactggagaggctatgccagtgacaaagaaacctggttccacagtcatcgccgggtccatcaacgcccatggctcagtgctgataaaggccactcatgtcggaaacgatactactctcgctcaaattgtcaagctcgtggaggaggctcagatgagcaaggctcccatccaacagttggcagatcgattctccgggtactttgttccttttatcattataatgtcaactctgactcttgtggtatggatcgtgatcggtttcattgacttcggagttgtacagagatacttccccaacccaaacaagcacatctctcagactgaggtgattattcggtttgcatttcaaacaagcatcaccgtgctttgcatcgcctgcccctgcagcctgggtcttgcaactccaaccgccgtgatggtgggcaccggagtggccgcacagaatggcattctcattaaaggcgggaagccactggaaatggctcataagatcaagacagtcatgttcgacaaaacaggcacaatcacgcatggagtcccgcgagttatgcgtgtgctgctcttgggggacgtcgccacattgcctctgaggaaagtgctggcggtcgtgggcactgcagaggcttcatccgaacatcccttaggagtggctgtgaccaagtattgcaaagaggagcttgggactgagacattggggtattgcacagacttccaggcagtcccgggatgcggaataggttgcaaggtgtccaacgtggaaggaattctggcgcatagcgagaggcctttgagtgcgccagcctctcacttgaatgaggccggaagcctgcctgctgagaaggacgctgtcccccagacctttagtgtgctcataggtaacagggagtggctccggcgcaatggtttgactatatcttctgacgtgtccgatgccatgaccgaccacgagatgaagggccagactgctattttagttgcgattgacggagtcctatgcggaatgattgccatcgctgatgccgtgaagcaggaggccgcgctggccgtgcacactttacagagcatgggggtcgatgtcgtgctgatcacaggggataacagaaaaacagcgcgggccatagcaacccaggtgggaattaataaggtcttcgcagaagtattgcccagtcataaggttgctaaagtgcaggaattgcagaacaaaggcaagaaggttgccatggtcggggacggcgttaacgatagtcctgcgctggcgcaggctgacatgggggtggccattggcaccgggaccgacgtggccatcgaagcggcagacgtggtgttaatacggaatgatttgctggacgtcgtcgcgtccattcacttgtccaagcgtacagtgaggcgaatcagaattaatctggtcttggccttgatttacaatcttgtggggattcctatagctgcgggtgtcttcatgcccatcgggattgtcttgcagccgtggatggggtccgcagcaatggcagcatctagcgtgtctgtggtgctgagctctctgcaactaaaatgctacaaaaaacccgatctggagagatacgaggcacaagctcacggtcacatgaagccactgactgcttcacaggtgtccgtccatattggcatggacgaccgctggcgcgattcaccacgcgcaacgccctgggaccaggtgtcttacgtgagccaagtttccctatcttcactgacatctgataagccttccaggcatagcgcagctgcagacgacgatggggacaaatggtccctgctgcttaacggccgcgatgaagagcagtacata

SEQ ID NO: 7467 - DNA, 4395 bp, synthetic construct
  misc_feature 1..4395: note = source = /note="Description of Artificial Sequence: Synthetic coding sequence"
  source 1..4395: mol_type = other DNA
atgccagagcaggagagacagatcaccgcccgcgaaggagcctctcggaagatcctctcgaagctgagcctccccactagggcgtgggagcccgctatgaagaagagcttcgccttcgataatgtcggctatgagggcggactggacggcctcggaccaagtagccaggtggctaccagcaccgtcagaatacttggaatgacttgccagtcatgcgtgaagtccatcgaggatcggatcagtaacctgaaggggattattagcatgaaagtctcactagagcaggggtcagcaaccgtgaaatatgtccccagtgtcgtgtgtctgcagcaagtgtgtcatcagatcggagatatgggattcgaggctagcatcgcagagggcaaagccgcaagctggccctctagaagtttgcccgcgcaggaggcagttgtcaaattgcgcgtcgagggcatgacgtgccagtcatgcgtctcctctatagaaggcaaggtcagaaaacttcagggggtggtgcgggttaaggtaagtttgagcaaccaggaagcagtaatcacataccagccttatctgatacagccagaggatctgcgcgatcacgtgaatgatatgggattcgaggccgcaatcaaatccaaagtggccccgctgtcactgggacctatagatatagagagactccaatccactaaccctaaacggcctttgtccagcgcaaatcagaacttcaacaattcagagaccctgggccaccaggggagccacgtggtcaccctacagctcagaatcgacggcatgcactgtaaaagctgtgtgctaaacattgaggagaacatcgggcaacttctgggggttcaaagcatacaggtgtctctggaaaataaaacagctcaggtgaaatacgaccccagttgtacctctcctgtcgccttacagcgtgctatcgaagctctccccccaggcaacttcaaggtgtctctccccgacggggctgagggctcaggcactgaccatcgcagttcgtcctctcatagtcccggctcacctccacgcaaccaagtgcagggaacctgttctaccacgctgattgctatcgctggcatgacctgcgccagttgtgtccactcgatcgaaggcatgatctctcaattggagggggtgcaacagatatcagtgagccttgcagagggtactgcaacagtgctgtacaatccgtccgtgattagtcccgaggagctgagggccgctattgaagacatggggttcgaggcaagcgttgtgtccgagtcctgttccaccaatccgctgggcaaccactccgctggcaacagtatggtgcagactaccgacgggactcctaccagcgtgcaggaggtggctcctcacaccggccgcctgccagctaatcacgctccggacatcctcgcaaaatcaccccagagtacccgagccgtggcgccacaaaagtgcttcttacagatcaaagggatgacctgtgcctcttgcgtctctaatatcgaacgaaacttacagaaggaggctggagtgctctcagtactggtggccctgatggctggcaaggcggaaattaaatatgatcctgaggtaattcagcccctggagattgctcaattcattcaggacttggggtttgaggcggctgtaatggaagactatgccggctctgacggaaacattgagttgactataacgggaatgacatgcgcctcatgtgtccacaacatcgagtccaagctgacacggacaaacggcataacatatgctagcgtggctttggctacatctaaggccctcgtgaaatttgatcccgaaattataggcccaagagatattatcaagatcatcgaggagatcggtttccatgcaagcctggctcagagaaatcctaacgcccatcacctggaccacaagatggagattaagcagtggaagaagtcgttcctgtgcagcttggtgtttggcattccagtcatggccctgatgatttacatgctgatcccctcgaatgagccccaccaaagcatggtcctggaccacaatattatcccaggtctatctatattgaacctgatcttttttattttatgtacctttgtgcagcttctcggcgggtggtatttctatgttcaagcctataagtctttacggcacaggtctgctaatatggacgttctgatcgtactggctacctctattgcatacgtttatagcctggtgattttggttgtggccgtggccgaaaaggcagaacgatcccctgtgacattttttgacacaccacccatgttgttcgtgttcattgctctgggcagatggctggaacacttagcaaagagtaaaacctctgaagctcttgcaaagttgatgagtctgcaggctacagaggccaccgtcgttacactgggtgaagacaacttgattatccgcgaggaacaggtgcccatggagttggtccagagaggcgatattgtcaaagtggtgcccggagggaagtttcctgtagatggcaaagtgttggagggcaacacaatggccgatgagtctttaatcactggagaggctatgcccgtgactaaaaagccggggtctaccgtgatagcaggaagtatcaacgcccacggaagtgttctcataaaggcgactcacgtcgggaatgatacgacattagcccagatagtcaagttggtagaagaggctcaaatgtctaaggcacctatccaacagctggccgatcgcttttctgggtatttcgtgccattcatcatcatcatgtccactctgacactggtggtgtggattgtgattggctttatagactttggagtggttcagcggtactttcccaatccaaataaacatatctcgcagaccgaggtgatcattaggttcgcctttcagacctccatcaccgttctctgcattgcctgtccgtgctcgctcggactggcaacgcccacggccgtgatggtgggaactggcgtcgctgcccagaacggcatcctgatcaagggtggaaagcctcttgaaatggcgcacaaaattaagacggtgatgttcgacaagacaggtacgattacacatggggtgccaagagtgatgcgggtgctgctactcggagacgtggccactcttcctctgcggaaagtactggcggttgtcgggaccgctgaggctagttcagaacatcccctgggcgtggccgtgaccaaatactgtaaagaagagttgggcacagaaacattgggctactgcacggacttccaggcagtgcccggatgtgggattgggtgtaaggtaagcaacgtggaaggtatactagcccacagcgagagacctttaagcgctccagcatcacatcttaatgaagccggctcactcccagccgaaaaggacgctgtcccccagacctttagtgtgctcatcggcaacagggaatggctgcggcggaacggcttgacaatctcctctgatgtcagcgatgcgatgactgaccacgaaatgaagggacagaccgcaatactggtcgccatcgatggcgttttgtgtggcatgatcgctatcgccgatgccgtgaaacaggaagccgctctggcagtgcatactttacaatccatgggggtggatgtcgtgctcatcacgggcgacaacaggaagactgccagagccatcgcaactcaggtaggaatcaataaggtcttcgccgaagttctaccttcccataaagtggccaaggttcaggagctccagaataaaggcaagaaggtggctatggtaggagacggggtgaatgattctcccgccctcgctcaggcagacatgggcgtggcgattggaaccggaaccgatgttgctattgaagctgctgacgtggtgctgatcaggaatgatctgctcgatgtggttgcctcaattcatttgagtaagcggacagttaggcgtatccgcatcaacttggttttggccttgatctacaacttagtaggcatcccgatcgcggcaggagtttttatgcctatagggatcgtgctccagccttggatgggctcagccgcaatggccgcctccagcgtttctgttgtgctcagtagcctacagctgaagtgctacaaaaagcctgatctggaaagatacgaagcacaagcccatggccatatgaagcctcttacagcatcgcaggtctctgtacatattggaatggatgacagatggcgtgattcgcccagggccaccccgtgggaccaggtctcgtatgtgagtcaggtaagtctgagcagtctgacctccgacaaaccttcaagacactctgccgctgccgatgacgacggggataaatggtctctccttctgaacggcagggatgaagagcagtacatc

SEQ ID NO: 7468 - DNA, 4395 bp, synthetic construct
  misc_feature 1..4395: note = source = /note="Description of Artificial Sequence: Synthetic coding sequence"
  source 1..4395: mol_type = other DNA
atgcctgagcaagagcgccaaatcaccgccagggagggggcttcccggaagatcttgtctaaattgtccttgcccacccgggcttgggaacccgctatgaagaagagctttgccttcgacaacgtgggctatgagggtggcctggatggactaggtcccagttcccaagtggccacttccactgtccgaatcttgggcatgacctgccagtcttgtgtaaaatccattgaagatcggatcagtaacttaaaaggaatcatttccatgaaggtgtctttggagcagggcagtgccaccgtgaagtacgttcccagcgtggtctgcctgcagcaggtgtgccatcagatcggggatatggggtttgaggcttcaattgccgagggcaaggcagcatcatggccaagcagaagcctgccagcacaggaggcggtggtcaaactccgtgtcgaaggcatgacatgccagagctgcgtttctagcatcgagggcaaggtacggaaactgcagggcgtggtcagagtgaaagttagccttagtaaccaggaagctgtgattacctaccagccttatctcatacagcccgaggacttgagggaccacgttaatgatatgggttttgaggccgctattaagagcaaggtggccccactgagccttggccccatcgacatcgagcgcctgcagagcaccaaccctaaaaggcccctgtcttcagcgaaccagaatttcaataacagcgagaccctggggcatcagggctctcacgttgtcacactccaattgaggatcgatgggatgcactgtaagtcctgtgttcttaatattgaagagaatattgggcagctcctaggggtgcagtcaattcaagtgtctctggaaaacaagaccgcccaagtcaagtacgatccgtcctgtactagccccgtggccttgcaacgcgcaatcgaggcactgcctccaggaaattttaaagtctccctacccgacggagcagaggggtccggaaccgaccataggagctccagttctcattctcccggctcacccccacgaaatcaggtgcaggggacctgctctacgacactgattgccattgccggtatgacctgtgcctcgtgtgttcacagcatcgaagggatgatctcccaattggagggggtccaacagataagcgtgtctttggccgagggcacagctaccgtcctttacaaccccagtgtgataagcccagaagagctgcgagccgccatcgaagatatgggatttgaggccagcgtagtgtccgaaagctgtagcacaaaccctcttgggaatcacagcgccgggaatagcatggtccagacaacagacggcacccctacttccgtgcaggaggtagcccctcacaccggcagattgccagcaaaccacgcccctgacatacttgctaagtctccgcagtctacccgggccgtggccccccaaaaatgctttctgcagatcaaaggcatgacatgcgcttcctgcgtctctaatatagagagaaacctacagaaggaggccggtgttttgagtgtattggtggctttgatggccgggaaagctgaaattaaatatgacccggaggtgatccagccacttgagatagcccaatttattcaggacctgggcttcgaagccgccgtgatggaagattacgctggcagtgacggcaatattgaactcacaatcacagggatgacatgtgcaagctgtgtccataacatcgaatcaaaactgacaaggaccaacggcattacctatgcctctgtcgcactagccacctccaaggcgctagtaaagttcgacccagaaattattggccccagagatattataaaaattatcgaagagatcggttttcacgcctccttagcccagcgcaacccgaacgcccaccacctagaccacaaaatggaaatcaagcagtggaagaaatcatttctgtgtagcctcgtgtttggcatcccggtaatggctctcatgatttacatgttaatcccttctaacgaaccccaccagagcatggtgctcgaccacaatattattcctggcctcagcattttgaacttgatttttttcatcctgtgtacctttgttcagctgctggggggatggtatttctatgtccaagcatacaagagtctgcgtcaccggtcagccaatatggacgtgctaatagtcctggccaccagtatagcttacgtgtacagcctcgtgatcctggtggtcgcagtcgcagagaaggccgaaaggagtcctgtgacattcttcgataccccccccatgctctttgtgttcattgcactggggaggtggcttgaacacctggccaagtctaaaactagcgaggccctggcaaaactgatgtctctacaggctaccgaggctaccgtagtcacgttaggggaagacaacctcataatccgggaagaacaggtacctatggaactggttcagcggggtgacattgtcaaagtcgtacccggcggaaaattccctgtggacggcaaagtgcttgaggggaatacaatggctgacgaaagcttgataaccggcgaggcgatgccagttacgaagaaacccgggagcacggtgattgcagggagcatcaacgcccacggtagcgtcctgattaaggctacacacgtgggcaacgataccacactcgctcagattgttaagttagttgaagaggcccagatgtcaaaggcgcctattcagcagctggcagatcgcttcagcggatatttcgtcccttttatcattatcatgagtacgctcaccctggtggtttggattgtcatcggttttattgacttcggtgtagtgcagcgttatttccccaacccgaataagcacatctctcagacagaagtgatcatcagattcgctttccagaccagtatcaccgtcctttgcatcgcctgcccatgtagtttgggcctggccacccccactgccgtgatggtcggtactggagttgctgcccagaatggcattctgatcaagggcgggaagccgctcgaaatggcacataaaattaagaccgtgatgttcgacaagaccggcacaataactcatggggtcccacgtgtgatgagggttctactgttgggcgacgtagctaccttgccactgcgcaaagtgctggcagttgttggcacagcagaggcatcttccgagcacccgttgggggttgcggtgactaagtattgcaaggaggagctgggaacggaaacactaggatactgcacggacttccaggctgtgccaggctgtggcatcggctgcaaggtgtcaaatgtggaggggattcttgcgcactccgaacgccctctgagtgccccagcgagccacctgaacgaagctgggtctcttccagccgaaaaagacgccgtgccacagacctttagtgtcctgatcggcaaccgggagtggttacggcgaaatggtctcaccatcagtagtgatgtgtccgatgccatgacagatcacgagatgaaaggccagaccgctatactcgtcgctatagacggcgtcctatgcggcatgatcgctatcgctgacgcggtgaaacaagaggcagccctcgccgtgcatactctacagtctatgggcgtggacgtggtgctgatcacaggcgataacaggaagactgctagagcaatcgctactcaggtgggcatcaataaggtatttgcggaagtactgccatctcataaggtggcaaaggtgcaggaactccagaataaaggcaaaaaggtcgccatggttggagacggagtgaatgacagccccgcactggctcaagccgacatgggagtggccatagggactgggacggacgtagccattgaggccgccgacgtggttctgattaggaacgatctgctcgacgtggtggcgtcaatccatctatcaaagagaaccgtgaggcgtattcggatcaacctggtgttagccctgatctataacctcgtaggcatacccattgccgccggtgtgtttatgccaatagggatagtacttcagccttggatgggaagtgctgcgatggcagccagctccgtgtctgtggtgctgtcatccctccagctgaaatgttataaaaagcctgatcttgagcggtatgaagcgcaggcacatggacatatgaagccactgaccgcttcacaggtctcggtgcacatcggcatggacgaccggtggagagatagcccacgggcgacaccatgggatcaggtgtcttatgtgtcgcaggtctccttatcgagtttaactagtgataagccgtctcgccactctgccgccgccgatgatgacggtgataagtggtctcttctgttaaatggtagagatgaagaacaatacatt

SEQ ID NO: 7469 - DNA, 4395 bp, synthetic construct
  misc_feature 1..4395: note = source = /note="Description of Artificial Sequence: Synthetic coding sequence"
  source 1..4395: mol_type = other DNA
atgcccgagcaagagaggcagatcactgctcgtgagggcgcttctcggaagatactcagcaagctgtctttgccaacccgcgcctgggaaccagccatgaaaaaaagctttgcatttgacaacgtgggatatgaggggggactcgatggactcggcccatctagccaggtggccacctcaacagttaggatcttaggcatgacctgccaatcctgtgtaaaatctatagaagatcggatatccaacctcaaaggcatcatcagcatgaaggtgtccttagagcagggcagcgctaccgtgaagtacgttccatctgtcgtgtgtctccagcaggtgtgtcaccagattggagacatggggtttgaggcttctatagctgaaggcaaagctgcaagctggccaagcaggtcactgccagctcaggaggctgttgtgaaactcagagttgaggggatgacttgtcaaagttgcgtcagctccatagaaggcaaggtgcgaaagctgcagggagtggtgagagtaaaggtctccctcagcaaccaagaagcagtgatcacctaccaaccatatctgatccagcccgaagacttacgggaccatgtgaatgatatgggatttgaggcagcaatcaagagtaaagtggcccctctcagcctcgggccaatcgatatcgaacggttgcagtccaccaaccccaagaggcccctcagcagcgccaaccagaactttaacaacagtgagactctagggcaccagggctcacatgtggtgaccctgcagttacgaatcgacgggatgcactgtaagtcttgtgtgttgaacattgaagagaacattggtcaactgcttggcgtgcaatctatccaggtgagtctagagaacaagacagcccaggttaagtatgatccatcatgcacatccccagtcgccctgcagcgggccattgaggcacttcccccaggtaactttaaggtcagcctgccggatggcgctgaaggctctggcaccgaccatcggagtagctcctcccacagtccaggatctcctcctagaaaccaggtgcagggcacctgcagcaccacccttatagctatcgcaggcatgacctgcgcctcctgcgtgcactccatagaggggatgatttcccagttggagggcgttcagcaaatatctgtgagtttagctgaaggaaccgccacagttctgtataacccctccgtgatctcccctgaggaacttcgtgctgcaattgaagatatgggctttgaagcctctgtcgtgtcagaatcttgttctaccaatccactggggaaccacagtgccggaaacagcatggttcaaacaaccgacggtactcctacatccgtgcaagaggttgcaccacatactgggcgcctgcctgccaaccacgctcccgatatcttagccaagtcccctcagtcaactcgagccgtcgctccacagaagtgtttcctgcagatcaaagggatgacctgtgccagctgcgtgtctaacatagagagaaacctccagaaagaagctggcgtcctatctgtcctggttgctttgatggccggcaaggctgaaattaaatacgaccccgaggtgattcaacctctagaaattgctcagttcatccaggacctcggctttgaggctgctgtgatggaggattatgctggttctgacggtaatatagaattaaccataactggcatgacctgtgcatcttgcgtgcacaacatagagtccaagctcacccggaccaatgggattacttatgctagcgtggctctcgccacatccaaagctcttgttaaattcgatcctgagataattggccccagagatatcataaaaatcattgaggagatcgggttccacgcatcattagcacagcgcaaccccaacgcccatcacctggaccataaaatggaaatcaaacagtggaagaagtcctttctgtgctccctggttttcggaataccagtgatggctctgatgatctatatgctgataccttccaacgaaccccatcagagcatggtgctggaccacaatattataccaggcctgtcaatactgaatctaatattcttcatcctgtgcacatttgttcaacttctgggcgggtggtatttttacgttcaggcctacaaatcattaaggcatagatccgctaacatggacgtcctgattgttctcgctacatctatagcttacgtctatagtctggttatcctagttgttgctgtggcagaaaaggccgagcgctcccccgtcaccttctttgatacccctcctatgctattcgttttcatagcactgggcaggtggctcgagcatctcgccaaaagcaagaccagtgaagccctcgccaaactgatgtctctgcaggccaccgaggccacagtggtgaccttaggtgaagataatctgattatcagagaagagcaggtgcctatggagctggtgcaacggggtgacatcgttaaggtagtgccaggtggtaaatttcccgtggacggcaaagtgctggagggcaacactatggccgatgaatcactcataaccggcgaagctatgcccgtgactaagaaacctggctctaccgtaattgccggcagcattaacgcacacggctctgtcctcataaaggcaacccacgtgggtaatgataccaccctcgcccagatcgttaagctagtcgaagaagcccaaatgtccaaggcccccatacaacagctggctgatcgcttcagcggctactttgtgccatttatcattattatgagcaccctgacactggtggtgtggattgttataggttttatcgattttggtgttgtgcagcggtacttcccaaatcctaacaaacacatctcccagactgaggtaattattcgctttgcattccagacctccatcacagttctgtgcatagcttgtccttgtagcctggggctggccacccctaccgcagtcatggtgggcactggggttgccgcacagaacggtattctgatcaagggtggcaaaccactcgagatggcccataagattaagacagttatgtttgacaaaactggaacaataactcatggagtccctagggtgatgcgcgtgctcctcctgggggacgtggctacccttccccttaggaaggtgttagctgtggtgggtaccgccgaagccagctctgaacatcccctcggcgtggccgtgaccaaatattgcaaagaggaactggggaccgagacactggggtattgtaccgacttccaggcagttccaggctgcggcatcgggtgcaaagtgtctaatgtggaaggcattctggcacactctgaacggcctttaagtgctcctgccagccacttaaacgaggctggatcactgccagccgaaaaagacgccgttccccagacttttagcgtcctgattggaaaccgcgagtggctgcgccggaatggcctgactataagctctgatgtgagcgacgctatgaccgatcacgaaatgaagggccaaaccgctatcctggtggcaattgacggagtgctgtgcgggatgatcgctattgctgatgccgtgaagcaggaagccgccctcgctgttcatactctgcagtctatgggtgtggacgtggtgttaatcacaggcgataacagaaagaccgcacgggcaattgctacccaggtgggaatcaataaagtatttgccgaagtcttacctagccacaaggtcgcaaaggttcaagaactgcagaataaggggaaaaaggtggctatggtgggcgatggcgtgaatgactctcccgcactcgcacaagccgacatgggtgtggcaatcgggaccggcaccgacgtggctattgaggctgcagatgtggtattaattcggaacgacctactggatgtggtggccagcatccaccttagcaagagaaccgtacgtaggatccggatcaacctggtgcttgcactgatctataacctagtcggtattccaattgctgccggagtctttatgccaatcggtatagtgttgcagccatggatgggtagtgcagccatggccgcctcttcagtgagtgtggtgttgtcctccctgcagctgaaatgttacaaaaaacctgatttggagcgttatgaggcccaggcacacggccatatgaagcctctcacagccagccaggtgagcgttcatattggaatggacgacaggtggagagactcaccacgggcaactccttgggaccaagtcagctacgtttcacaggtgagcctgagcagcctgacctctgataaaccatctagacatagcgccgccgcagatgacgacggcgacaagtggtccctgctgctgaacggtagagatgaggagcagtacatt

SEQ ID NO: 7470 - DNA, 4395 bp, synthetic construct
  misc_feature 1..4395: note = source = /note="Description of Artificial Sequence: Synthetic coding sequence"
  source 1..4395: mol_type = other DNA
atgccggaacaagaacgtcaaataacggcgcgagaaggtgcgtcgcgtaaaatattatcgaaattatcgttaccgacgcgagcgtgggaaccggcgatgaaaaaatcgtttgcgtttgataatgtaggttatgaaggtggtttagatggtctaggtccgtcgtcgcaagttgcgacgtcgacggttcgtatattaggtatgacgtgtcaatcgtgtgttaaatcgatagaagatcgtatatcgaatttaaaaggtataatatcgatgaaagtatcgctagaacaaggttcggcgacggttaaatatgtaccgtcggtagtttgtttacaacaagtatgtcatcaaataggtgatatgggttttgaagcgtcgatagcggaaggtaaagcggcgtcgtggccgtcgcgatcgctaccggcgcaagaagcggttgtaaaactacgtgttgaaggtatgacgtgtcaatcgtgtgtatcgtcgatagaaggtaaagtacgtaaactacaaggtgttgtacgagtaaaagtatcgctatcgaatcaagaagcggtaataacgtatcaaccgtatctaatacaaccggaagatttacgtgatcatgtaaatgatatgggttttgaagcggcgataaaatcgaaagtagcgccgctatcgttaggtccgatagatatagaacgtttacaatcgacgaatccgaaacgaccgttatcgtcggcgaatcaaaattttaataattcggaaacgctaggtcatcaaggttcgcatgtagtaacgttacaattacgaatagatggtatgcattgtaaatcgtgtgtactaaatatagaagaaaatataggtcaactattaggtgtacaatcgatacaagtatcgctagaaaataaaacggcgcaagtaaaatatgatccgtcgtgtacgtcgccggtagcgctacaacgagcgatagaagcgttaccgccgggtaattttaaagtatcgttaccggatggtgcggaaggttcgggtacggatcatcgttcgtcgtcgtcgcattcgccgggttcgccgccgcgaaatcaagtacaaggtacgtgttcgacgacgttaatagcgatagcgggtatgacgtgtgcgtcgtgtgtacattcgatagaaggtatgatatcgcaactagaaggtgtacaacaaatatcggtttcgttagcggaaggtacggcgacggtactatataatccgtcggtaatatcgccggaagaattacgtgcggcgatagaagatatgggttttgaagcgtcggttgtttcggaatcgtgttcgacgaatccgctaggtaatcattcggcgggtaattcgatggtacaaacgacggatggtacgccgacgtcggttcaagaagttgcgccgcatacgggtcgtttaccggcgaatcatgcgccggatatattagcgaaatcgccgcaatcgacgcgtgcggttgcgccgcaaaaatgttttttacaaataaaaggtatgacgtgtgcgtcgtgtgtatcgaatatagaacgaaatttacaaaaagaagcgggtgttttatcggttctagttgcgctaatggcgggtaaagcggaaataaaatatgatccggaagtaatacaaccgctagaaatagcgcaatttatacaagatttaggttttgaagcggcggtaatggaagattatgcgggttcggatggtaatatagaactaacgataacgggtatgacgtgtgcgtcgtgtgttcataatatagaatcgaaattaacgcgaacgaatggtataacgtatgcgtcggtagcgttagcgacgtcgaaagcgctagtaaaatttgatccggaaataataggtccgcgagatataataaaaataatagaagaaataggttttcatgcgtcgctagcgcaacgtaatccgaatgcgcatcatttagatcataaaatggaaataaaacaatggaaaaaatcgtttttatgttcgttagtatttggtataccggttatggcgctaatgatatatatgttaataccgtcgaatgaaccgcatcaatcgatggtattagatcataatataataccgggtctatcgatattaaatctaatattttttatactatgtacgtttgtacaattactaggtggttggtatttttatgtacaagcgtataaatcgctacgacatcgttcggcgaatatggatgtattaatagtattagcgacgtcgatagcgtatgtatattcgttagtaatattagttgtagcggtagcggaaaaagcggaacgatcgccggtaacgttttttgatacgccgccgatgttatttgtatttatagcgctaggtcgatggttagaacatttagcgaaatcgaaaacgtcggaagcgttagcgaaattaatgtcgctacaagcgacggaagcgacggttgtaacgttaggtgaagataatttaataatacgtgaagaacaagtaccgatggaattagtacaacgaggtgatatagtaaaagtagtaccgggtggtaaatttccggtagatggtaaagtattagaaggtaatacgatggcggatgaatcgttaataacgggtgaagcgatgccggtaacgaaaaaaccgggttcgacggttatagcgggttcgataaatgcgcatggttcggtattaataaaagcgacgcatgttggtaatgatacgacgttagcgcaaatagtaaaattagttgaagaagcgcaaatgtcgaaagcgccgatacaacaattagcggatcgattttcgggttattttgtaccgtttataataataatgtcgacgctaacgttagtagtatggatagtaataggttttatagattttggtgttgtacaacgatattttccgaatccgaataaacatatatcgcaaacggaagtaataatacgttttgcgtttcaaacgtcgataacggttctatgtatagcgtgtccgtgttcgttaggtttagcgacgccgacggcggtaatggttggtacgggtgttgcggcgcaaaatggtatattaataaaaggtggtaaaccgttagaaatggcgcataaaataaaaacggtaatgtttgataaaacgggtacgataacgcatggtgttccgcgtgttatgcgtgtattactattaggtgatgttgcgacgctaccgctacgtaaagttttagcggttgtaggtacggcggaagcgtcgtcggaacatccgctaggtgttgcggttacgaaatattgtaaagaagaactaggtacggaaacgctaggttattgtacggattttcaagcggtaccgggttgtggtataggttgtaaagtatcgaatgttgaaggtatactagcgcattcggaacgtccgctatcggcgccggcgtcgcatctaaatgaagcgggttcgctaccggcggaaaaagatgcggtaccgcaaacgttttcggttttaataggtaatcgagaatggttacgtcgaaatggtctaacgatatcgtcggatgtatcggatgcgatgacggatcatgaaatgaaaggtcaaacggcgatactagtagcgatagatggtgtactatgtggtatgatagcgatagcggatgcggtaaaacaagaagcggcgctagcggttcatacgctacaatcgatgggtgtagatgttgtattaataacgggtgataatcgaaaaacggcgcgtgcgatagcgacgcaagtaggtataaataaagtttttgcggaagttctaccgtcgcataaagttgcgaaagttcaagaattacaaaataaaggtaaaaaagttgcgatggttggtgatggtgttaatgattcgccggcgttagcgcaagcggatatgggtgtagcgataggtacgggtacggatgtagcgatagaagcggcggatgtagttttaatacgtaatgatttattagatgtagtagcgtcgatacatctatcgaaacgaacggtacgtcgtatacgtataaatttagttttagcgttaatatataatctagtaggtataccgatagcggcgggtgtttttatgccgataggtatagtactacaaccgtggatgggttcggcggcgatggcggcgtcgtcggtatcggtagtactatcgtcgttacaactaaaatgttataaaaaaccggatttagaacgttatgaagcgcaagcgcatggtcatatgaaaccgttaacggcgtcgcaagtatcggtacatataggtatggatgatcgatggcgtgattcgccgcgtgcgacgccgtgggatcaagtatcgtatgtatcgcaagtttcgttatcgtcgttaacgtcggataaaccgtcgcgacattcggcggcggcggatgatgatggtgataaatggtcgttattattaaatggtcgtgatgaagaacaatatata

SEQ ID NO: 7471 - DNA, 4395 bp, synthetic construct
  misc_feature 1..4395: note = source = /note="Description of Artificial Sequence: Synthetic coding sequence"
  source 1..4395: mol_type = other DNA
atgccagaacaggagcgacaaattaccgctcgcgaaggagcttcccgtaagattctttcaaagttatcactacctactagggcatgggaaccagctatgaaaaagagtttcgcattcgataacgttggttatgaaggtggactggacggattgggtccatcatctcaagtagccacttcaaccgtgagaattctcggcatgacctgccaaagctgtgttaagtcgattgaggatcgtatttctaatttaaagggaattatatctatgaaggtcagcctggaacaggggtcagcaaccgtgaagtatgttccaagtgttgtttgtttgcagcaggtgtgtcatcaaatcggagacatggggttcgaagctagtattgcagagggtaaggctgcttcttggccatccaggtcattacccgctcaagaagctgtggttaaactccgggttgaggggatgacctgtcagtcttgtgttagctctattgaaggtaaagtcaggaaacttcagggggtcgttcgtgtaaaagtcagcttgtctaatcaggaggcggtcattacttatcagccgtacctcattcaacctgaagacctcagggatcatgttaatgatatgggatttgaggccgcaattaaatcgaaggtcgcacccctaagccttgggcctattgatatcgagagacttcaatctaccaatcctaagcgccctctgtcctcagccaaccagaattttaacaactctgagacacttggacatcaggggagtcatgtcgtgaccttacaattgcgtattgacggaatgcattgtaagagttgtgtattgaacattgaggaaaatattggtcagctcttgggggtgcagtcaatccaggtgtcgttagagaacaaaactgcacaagtcaaatatgatccatcgtgtacatcacctgttgctcttcaaagagcaatcgaggcactcccacctggtaacttcaaggtcagccttcctgacggcgctgaaggttcgggcaccgatcatcgatcatcttcgtcacacagccctggtagccctcctagaaatcaagttcaaggaacatgtagtactacattgatagctattgccggaatgacatgcgcatcttgtgttcacagcattgagggaatgatctcccaactcgaaggagttcagcagatttctgtgtcgcttgccgagggtacagcaactgtgttgtacaatcctagtgttatttctcctgaagaacttagggcagctatagaagatatgggtttcgaggcttccgtagtctcagagagctgtagcacaaatccactgggtaaccacagcgcaggaaattctatggttcagacaacagacggtactcctacttcagtacaggaagtcgcaccacataccggtcgacttcctgctaaccatgctccagacatactcgctaaatctccgcagtcgacacgagccgtagcgccacaaaagtgctttctgcagataaaggggatgacgtgtgcttcctgcgtctcaaatattgaaagaaacctgcagaaggaggcgggggtgctatctgtcctagttgcccttatggccggtaaggctgagatcaaatatgatcctgaagtcattcaaccactcgagatcgcccagtttattcaagaccttgggtttgaagcagctgtcatggaggattatgcgggatctgatggaaatattgagttaaccattaccggcatgacatgcgcatcctgtgttcataacatcgagagcaagctgactcgtacgaatggtataacgtatgcaagtgttgctctagccacttccaaggcccttgtaaagttcgacccggagattatcggtccaagggatataattaagataatagaagaaattggtttccatgcttctttagctcaaagaaatcctaatgctcaccacctcgaccataagatggaaatcaagcagtggaaaaaaagcttcttatgttcccttgtgttcggcatacctgttatggctctcatgatttatatgcttattccttccaacgaaccgcaccagtcgatggttctcgatcacaacataatacctgggctttcaatacttaatcttatcttttttatcctctgcacctttgtacagttacttggaggttggtatttctacgtccaagcttacaagagtttgaggcaccgtagcgctaacatggatgtgttgatcgtacttgccacgtcaattgcttatgtttattcactggtaattctagtagtcgcggttgcagagaaagcagaaaggtctcctgtcacattctttgatacacctcccatgctgttcgtgtttattgcccttggtaggtggttagaacatctggctaagtctaaaacgagtgaggcactggctaagctcatgtctttgcaggcaacggaggccacggtggtcacccttggtgaggataaccttataataagagaagagcaggtgccaatggaacttgtgcagcgcggtgatattgttaaagttgtgcctgggggtaagttcccggtggatggaaaagtgcttgaagggaatacaatggcagacgagtccctaataaccggtgaagcaatgccggttacaaaaaagccgggatccactgtgatcgctggatccataaacgcccacggtagcgtccttattaaggctacccatgtgggtaatgatactacgcttgcccagattgtgaagctcgtggaagaagcacagatgtccaaagcgcctattcaacaattggctgatcggtttagtggatattttgttccatttataattattatgagcaccctgacgcttgtggtctggatagtgattgggttcattgacttcggtgttgtacagagatatttccctaatccaaataagcacatttctcaaactgaagttattattaggttcgcttttcaaacatccataacagtgttatgtatagcttgcccttgttcgctgggtcttgctacaccaacagcagtaatggtaggaaccggtgtcgcagctcagaatgggatccttattaagggtggtaaacctcttgagatggcacataaaattaagactgtgatgttcgataagacaggtaccataactcatggtgtgccaagagtaatgcgggtacttcttcttggtgacgtcgccaccctgccgctccgtaaagttcttgctgtggttgggacagcagaagcgtccagcgagcaccccttgggtgttgcagtcaccaaatattgcaaagaggaacttgggactgagactctcggctactgcactgattttcaagcggtgcctggttgtggtatcggttgcaaggtgagcaacgtcgaaggtattcttgctcattcggagaggcctctctcagctccagcttcacatcttaatgaggctgggagcttacctgctgaaaaggatgccgtaccacaaactttttctgtgctcataggtaatcgcgagtggcttagacgaaatggattgacaatttcgagtgatgtaagtgacgccatgacggaccatgaaatgaaaggccaaactgccatattagttgcgatagatggagttttgtgtggtatgattgccatcgctgatgcagtcaaacaagaagcggcccttgctgtccacacgcttcagtcaatgggagtcgatgtcgttcttattactggtgacaacaggaagaccgctcgtgctatcgctactcaggtcgggattaataaggtttttgcggaggtcttgccctcacataaggttgctaaagtccaagaactccagaataagggaaagaaggttgctatggttggggatggcgtgaacgactccccagcattggctcaagccgatatgggagtggctataggaactggtacggacgtggctatagaggctgctgacgttgttctcatcaggaatgatttgctagatgttgttgcttctattcatctcagcaagcgaaccgtacggcggatcagaatcaacctcgtccttgcgctgatttacaatttggtcggtattccaatagctgccggtgtttttatgccgatagggatagttctccaaccatggatgggatcagccgctatggccgcttcctccgtgtctgttgttttgtcatcactgcagctgaagtgttacaagaagcctgatttggagaggtacgaagctcaagctcacggacatatgaagcccttgacagcctctcaggtttctgttcacatcggcatggacgataggtggcgggacagcccgagagcaaccccttgggaccaagtgtcctatgtctctcaagtgtcacttagttccttaaccagtgataaacccagcaggcattcagcagctgctgatgacgatggagacaaatggtcgcttctcctcaatgggcgtgatgaggagcaatacatt

SEQ ID NO: 7472 - DNA, 4395 bp, synthetic construct
  misc_feature 1..4395: note = source = /note="Description of Artificial Sequence: Synthetic coding sequence"
  source 1..4395: mol_type = other DNA
atgcctgagcaggaacgacagatcacagcccgcgaaggggcatccagaaagatcttgtccaagttgagtttgcccacgcgagcttgggagcccgccatgaagaagtcctttgcgtttgataacgtcgggtacgaggggggactggatggcctcggacccagcagccaagtggctacaagcaccgttagaatcctcggcatgacctgccagtcttgtgtgaagagtatcgaggaccgcataagcaatctgaagggaatcattagcatgaaagtgtcattggagcaaggttcagccaccgtgaagtacgtcccttccgtcgtctgccttcagcaagtatgtcaccagataggggatatggggttcgaggccagtatcgccgagggaaaggctgcctcttggcctagccggtccctcccagcacaggaggccgtcgtgaagctccgcgtcgagggcatgacatgccagagttgcgtgagcagtatagaagggaaggtccgcaagctgcagggggttgtgcgagtgaaagtgagtctgagcaaccaggaggcggtgatcacttaccagccgtacctgattcagcccgaggatctgagagatcatgtgaatgacatgggatttgaagccgctatcaaatctaaagtggctccgctctccctcgggccgattgacatagaaaggctgcagtccaccaaccccaagagaccattgtccagcgcgaaccagaacttcaataattctgagacactcgggcaccaggggtcccatgtggtaaccctgcagttgcgcatcgacggcatgcactgtaaatcatgcgttcttaacatcgaggagaacatagggcagctgctgggcgtccagagcatccaggtgagtcttgagaataaaacagcccaggtgaagtatgatccaagttgcacctctcctgtcgccctgcaacgagcgatcgaggctcttcctcctggaaacttcaaggtctctttgcctgacggcgccgagggcagcggaacggaccacaggagtagctctagccacagcccagggagtccacctcgcaatcaggtccagggcacctgtagtacgacacttatagctattgcggggatgacctgcgccagttgtgttcactcaattgaagggatgatatctcaacttgagggggtgcagcagatatctgttagcctggcagaaggtacggccacagtcctgtacaaccccagcgtgattagccccgaggaattgagagctgctatcgaggacatgggattcgaagctagcgtggtgtctgaaagctgttccacaaatcccctcgggaaccatagcgccgggaactccatggtccagacgactgatggtactccaactagcgtgcaggaggtggcaccccacacaggccggttgccagctaaccatgccccagatattctggctaagagcccccaaagcactagggcagttgccccccagaagtgctttttgcaaatcaaggggatgacctgcgcttcttgtgtttcaaacatagagcggaaccttcaaaaagaggctggtgtcctgagcgtgctggtcgccttgatggccggtaaagcagaaatcaagtacgaccctgaagttatccaacccctggaaattgcccagtttattcaggacctgggatttgaggcagcagtcatggaggactacgctggaagcgatggcaatattgaattgactatcaccggcatgacgtgtgccagttgcgtacacaacatcgaatccaagctgaccagaactaatgggatcacctacgccagcgttgccctggccacttcaaaggcgctggttaaatttgatccagagatcatcggtcctcgcgacatcattaaaatcatcgaggaaatcggctttcatgcttccctggctcagcgaaaccccaatgcccatcatctcgatcacaaaatggagatcaaacagtggaaaaagagcttcctttgtagtctggtctttggcataccagttatggccctgatgatttacatgctgatcccctcaaacgaacctcaccagagtatggtgctggaccacaacatcatccccggcctgagtatcctgaatctgatattctttatcctttgcaccttcgtgcagctgctcggtggctggtacttctatgttcaagcctataagtcccttagacatagatctgcaaatatggatgtgctgatcgtgttggctacaagcatagcatacgtgtacagtctggtgatcctggtagtggctgtcgctgaaaaggctgaacggtcccccgtgacctttttcgacacgccccctatgctgtttgtctttattgcgctcggcagatggctcgagcacttggcaaaatctaaaacctctgaggctctggctaaactgatgagcctgcaggccacagaggccaccgtcgtgaccttgggggaggacaatctgatcataagggaagaacaggttccaatggagctggtgcagcgcggggatattgtgaaagtggttccaggtggaaagttcccggtagacggcaaggtgctggaaggcaataccatggccgacgagtccctgatcacaggggaggccatgcctgttacaaagaaacccggcagtacagtgattgcaggttctatcaatgctcatggctctgtgctcatcaaggccacccatgtcggtaatgacactacattggctcaaatcgtgaagctggtggaagaggcacagatgtccaaggctcctatccagcaactggccgatagatttagcggatacttcgtaccctttattattatcatgtccacactgaccctggtcgtttggatcgtgattggatttatagattttggcgtggtgcaacggtacttcccaaatcccaacaagcacataagccaaaccgaggtgatcattcggtttgcgtttcagaccagcatcactgtgttgtgcatcgcctgcccctgttctctcgggctggccacacctaccgcggtcatggtcggtacaggagtagccgcccagaatgggattctcatcaaaggagggaagcccttggagatggcgcataaaattaagaccgtcatgtttgataaaactgggactataacccacggcgtccctcgggtgatgcgagttttgcttctcggcgacgtggcaacccttcccttgcggaaggtgctggccgtggtgggaaccgccgaggcttcctccgagcatcctcttggcgtggccgtgaccaaatactgcaaggaggagcttggtaccgaaactctgggatattgcacagattttcaggccgtacctgggtgtggcatagggtgcaaggtgtctaacgtcgagggcatactggctcacagcgaacgacctctgtccgccccggcctcccatctgaacgaggcgggttcactgcctgccgagaaggatgcggtccctcaaactttctcagtcctgatcgggaatagggaatggctccgcaggaacgggctgaccatctccagcgatgtgagtgacgcaatgacggatcatgaaatgaaggggcagactgccatcctggttgctatcgatggggtgctgtgtggaatgatcgcaattgccgatgcagtgaaacaggaagctgccttggccgtgcacactttgcagtcaatgggagtggacgtggttctgattactggcgataatagaaaaaccgctcgcgccattgctacccaggtaggcatcaacaaagtcttcgcagaagtcttgccttcccacaaggtggccaaagtgcaggaactccaaaataaaggaaagaaagtagctatggtgggagatggggttaatgactcccctgcactggcccaggctgacatgggcgttgcgatcggcacaggaactgacgtagccatcgaggctgccgacgttgtcctgattaggaacgatctcctcgatgtggttgcgtccatccacctctccaagcgaaccgtcagacggatcagaatcaacctggtgctcgctctcatctacaacctcgtgggcattcctatagcagccggagtttttatgcccattggaattgttttgcagccctggatgggatccgcagcaatggctgcgagcagcgtgagtgtggtattgagttctctccagcttaagtgctacaaaaaacccgatctggagcggtacgaggcacaggctcacggacacatgaaacccctgacagcaagtcaggtgagcgttcacatcgggatggatgatcgctggagggacagccccagggctacgccatgggaccaggtgtcttacgtgtcccaggtttccctttcctccctcacatccgacaagccatcccggcacagcgcggcagccgatgacgatggtgataaatggagcctgctgctcaatggccgggatgaagagcagtatatt

SEQ ID NO: 7473 - DNA, 4395 bp, synthetic construct
  misc_feature 1..4395: note = source = /note="Description of Artificial Sequence: Synthetic coding sequence"
  source 1..4395: mol_type = other DNA
atgccggaacaagaacggcaaattaccgccagagagggagcatcaagaaagatcctgtcgaagctgtcgcttccaactagggcatgggaaccggccatgaagaaatcattcgcatttgataacgtggggtacgagggaggtcttgacgggctcggaccctcttcacaagtcgcgactagcaccgtcagaattttgggaatgacttgtcagtcgtgtgtcaaatcaatcgaagatcgtatctcaaacctcaaaggtatcatttccatgaaagtctcacttgagcagggctcggccactgtgaagtacgtgccatccgtcgtgtgtctccaacaagtgtgccaccagatcggtgacatgggtttcgaagcatcaatcgctgaaggtaaagcagcatcctggccttcgagatccctccctgcccaggaagcggtcgtgaagctccgtgtggaaggcatgacttgtcaatcctgtgtgagctctattgaaggaaaggtgagaaagctgcagggggtggtgcgcgtcaaagtctcccttagcaatcaagaagcagtgattacgtaccagccatacctcattcaaccagaagatcttagagatcatgtgaatgacatgggattcgaagcagcaataaagtcgaaagtagcacctctctcgcttggcccgatcgatattgaacgccttcagtccactaaccccaaacgcccactgagcagcgctaaccagaacttcaacaactcggagactcttggtcatcaaggatcccatgtggtgacgcttcagctgcgcattgatggcatgcattgcaaatcgtgcgtccttaacattgaagaaaacattggtcaactccttggagtgcaatcgattcaagtctcactcgaaaacaaaactgcacaagtgaaatacgatccatcctgtacctcacctgtcgcattgcaacgggcaatcgaagcccttcctcctggcaactttaaggtttcccttccagatggcgcagagggtagcggtaccgaccatagatcctcgtcctcccactcgccaggctccccgcctcgtaaccaggtgcagggaacctgtagcaccacccttattgcaattgccgggatgacctgtgcttcgtgtgtgcactcgattgaaggtatgatctcccaactggaaggggtgcaacagatttctgtctcgctcgcagagggtactgccaccgtgctttacaacccatctgtcatatccccggaagaacttagagctgcaattgaggatatgggattcgaggcaagcgtggtgagcgagtcgtgctctactaacccacttggcaatcattccgccggaaattccatggtgcagaccactgatggtactcccacctcggtgcaagaggtcgcacctcacactggtcgcctgcccgcaaaccatgctcctgatatccttgcgaaatcgcctcagtcgactcgggcagtcgcaccgcaaaaatgtttcctccaaatcaaagggatgacgtgtgcatcctgcgtctccaacatcgagcgtaacttgcagaaggaagccggagtgctttccgtccttgtggctctgatggctggaaaggcagagattaagtacgatccagaagtgattcagcctttggagattgctcagtttattcaggatcttggctttgaggcagctgtgatggaagattacgccggaagcgatggaaacattgaactgactataaccggtatgacctgcgcgtcgtgcgtgcataacatcgagagcaaactgactcggaccaacggcattacttacgccagcgttgcactcgcaacctcgaaagcacttgtgaagttcgacccagaaatcattggaccgcgcgacatcattaagattattgaagaaattggcttccatgcctcgcttgcccaacgtaatccaaatgcgcaccatctggaccacaaaatggaaatcaagcagtggaagaagtcgttcctttgttcgctcgtgtttggcatacccgtgatggccctgatgatttacatgcttattcctagcaacgagccacaccagtcaatggtcctggaccacaatatcatccctggactctcaatacttaatctgatctttttcatcctttgtacttttgtccaactgctgggtggatggtacttctacgtgcaggcgtacaagtcgctgcgccataggtccgcaaatatggatgtccttatcgtcctggcaacgagcatagcatacgtgtactccctggtgattctggtggtcgccgtggcagaaaaagcagaacgcagccccgtgacgttttttgataccccacctatgctctttgtgtttattgcactggggagatggctcgaacatctggcaaaaagcaagaccagcgaggcacttgcaaaattgatgtctcttcaagcaaccgaagccactgtggtgactctgggggaggacaacctcatcatacgagaggaacaggtgccaatggaactcgtccagagaggagatattgtgaaggtggtgcctggaggaaagtttcccgtggacggcaaggtgcttgaaggaaataccatggctgatgagtcactcattacgggcgaagcgatgcctgtgactaagaagccaggatcgaccgtgatagcaggctccattaatgcgcacggaagcgtgctgatcaaggcaacccatgtgggtaatgatactaccctggcacagattgtgaagctcgtggaggaagctcaaatgtccaaggcacctattcagcaactggcggacagatttagcggctacttcgtgccatttatcataatcatgtctactctgactctggtggtgtggatcgtgatcggctttatcgattttggcgttgtccagcgatacttccctaatcctaacaagcacatctcccagaccgaggtgattatccgattcgcgtttcagacctccatcactgtgctgtgtatcgcgtgtccgtgttcgcttggccttgcaactcctactgcagtcatggtcggaaccggcgtggcagcacagaatggaatcctcattaagggcggtaagccactggaaatggcacataagatcaaaactgtgatgtttgataagactggcaccattacccatggtgtcccacgcgttatgcgggtcctcctgcttggagacgtggcaactcttcctcttcgcaaggttctggcggtggtaggaactgcagaggcatcatcagagcatcctcttggagtggcagtgaccaagtactgtaaggaggagctgggtaccgagacgctcggatactgtactgattttcaggcggtgccaggttgcggtatcggatgtaaagtgtcgaacgtggaaggaattctggcgcattcagagcgacccctgtccgcaccagcatcgcatctcaacgaggcaggttcgctgcctgccgaaaaagatgctgtgccacaaactttttcggtgcttattggaaacagagagtggctcaggagaaatggactcaccatctcttccgatgtcagcgacgcaatgaccgaccatgaaatgaagggtcaaactgccatccttgtggcaattgatggagtgctgtgtggtatgatcgcaattgcagatgcagtcaaacaggaagcagcgcttgcagtgcataccttgcaatcaatgggggtcgacgtggtcctcattaccggggacaacaggaaaaccgcccgggcgattgcaactcaggttggaatcaataaagtctttgcagaggtccttccatcacacaaggtggcgaaggtgcaagagctgcagaacaagggaaaaaaggtggcaatggtgggggacggggtgaacgacagcccagcactcgcacaagcggatatgggtgtggcaattggaaccggaaccgacgtcgcaattgaagccgctgacgtggttcttattcgcaacgatcttctggacgtggtggcatccattcatctctccaagagaaccgtgcgtcgcattcggattaatcttgtcttggcgctgatctacaaccttgtcggaatccctatagcagcgggtgtgttcatgcctattggcatagtgcttcagccctggatggggtcggccgctatggcagcgagctccgtgtcagtggtcctttcgtccttgcaactgaaatgttacaagaagccagacctggaacgttacgaagcacaagcgcacggacacatgaagcctttgaccgcatcccaagtgtcagtgcacattggtatggatgatagatggagggactcccccagagccaccccatgggatcaagtgtcctacgtctcgcaagtgtcgctgtcatcgctgactagcgacaaaccctcccgacattcagccgccgcagatgatgacggcgacaagtggtccctcctgcttaacggtagagacgaagagcaatacatt

SEQ ID NO: 7474 - DNA, 4395 bp, synthetic construct
  misc_feature 1..4395: note = source = /note="Description of Artificial Sequence: Synthetic coding sequence"
  source 1..4395: mol_type = other DNA
atgccggaacaggagcggcagatcaccgcgcgcgaaggcgcctcccgcaaaatcctgtcgaagctgtccctccccaccagagcgtgggaacccgctatgaagaagtcgttcgccttcgataacgtgggctacgagggtggactggacggattgggcccctcatcccaggtggctacctcgaccgtgcggatcctcggaatgacctgtcagagctgcgtcaaatcgatcgaggacagaatctcgaatctgaagggaatcatttccatgaaagtcagcctcgagcaaggctccgccacggtcaaatacgtgccgtcagtggtgtgtctgcaacaagtgtgccaccagatcggcgatatggggttcgaagcctcaatcgcggagggcaaagccgcatcgtggccctcaagatcgctgccagcccaggaggctgtggtcaaactgagggtggagggtatgacttgtcagtcatgcgtgagctcgattgaaggaaaggtgcgaaagctccagggagttgtgcgagtgaaagtgtcactgagcaaccaagaggcagttatcacctaccaaccatacctgattcagccagaggacctgcgcgatcacgtgaatgacatgggattcgaggccgctatcaagtcaaaagtcgcgccgctgtcgctcgggcctatcgacatcgaaaggctgcaatccaccaacccgaaacggccactgtcatcagccaaccagaatttcaacaattcagagactctgggtcaccaaggaagccacgtcgtcaccctgcagctgcggatcgacggaatgcattgcaagagctgcgtgttgaatatcgaagagaacattggccagctcctcggcgttcaaagcattcaggtgtcactggaaaacaaaaccgcacaggtcaaatacgacccttcgtgcacgtcgcctgtggcgctccagcgcgctatagaggctctcccgccaggaaatttcaaggtgtcccttccggacggggcggagggctccggaaccgatcatcgctctagctcctcccattcgccgggctcgccgccacgcaaccaagtgcagggcacctgctccactactttgattgcaatcgcagggatgacctgcgcctcatgcgtgcattctatcgagggcatgatctcacagctcgagggagtgcaacagatcagcgtgtcgcttgccgaaggcaccgcaactgtgctgtacaacccctcggtgatctcgccggaagagctgcgggccgccatcgaagatatgggatttgaagcctcggtggtttcggagtcgtgctcaaccaacccgctgggcaaccactcggcaggcaattctatggtgcaaaccacggacgggactcctaccagcgtgcaggaggtcgccccacatactgggcgccttcccgcgaatcatgctccggatatcctcgccaagagcccgcagtccaccagagctgttgcaccacagaagtgcttccttcaaatcaagggaatgacttgcgcatcatgcgtctcgaatatcgagaggaatctgcaaaaggaagcaggagttctctccgtgttggtcgctttgatggcaggaaaagcggagataaagtatgatcctgaggtcattcagccacttgaaatcgcacaattcatccaggaccttggattcgaagcagcggtgatggaagattacgccggatcagacggaaacatcgaactcactataacgggcatgacctgtgcctcctgtgtgcataacatcgaatccaaattgacccggactaacggaatcacttatgcttcggtggcactggcgacttcaaaggccctggtgaagttcgatcccgagatcatcggaccgcgggacatcattaagatcatagaggagattggatttcatgcctcacttgcacagcgaaaccctaacgctcaccatctggaccataagatggaaatcaagcaatggaagaagtcattcttgtgcagcttggtgttcggcatcccagtgatggcgctcatgatctacatgctgattcccagcaatgagccgcaccagtcaatggtgctggatcataacattattccgggactgtcgatcctcaacctgatcttctttatcttgtgtacttttgtccaactgctgggtggctggtacttctacgtgcaggcatacaagagcctgagacaccggtccgcgaatatggatgttctcatcgtgttggccacgagcatcgcgtatgtttatagcctcgtcatcctggtcgtggccgtcgcagaaaaggcagaacgctccccggttacctttttcgatactccaccgatgctttttgtgttcatcgccctgggtcggtggctggaacatctggcgaagtctaagactagcgaagcactggcaaagctcatgtccttgcaagcgactgaagcgactgttgtgactctcggggaggacaatctgattatccgtgaagaacaggttccaatggagcttgtccagcgcggagacatcgtcaaggtggtgccaggaggaaagttccccgtggacgggaaggtgctggaaggcaatacgatggctgacgaatcgctcatcaccggagaggctatgccggtcaccaagaaacccgggtcaaccgtgatcgccggaagcatcaacgcacacggctcagtgctgatcaaggctacccacgtcggtaacgatactacgttggcccaaatcgtcaaacttgtcgaagaggctcagatgtcaaaggccccgatccagcagctggctgaccgcttctcgggatacttcgtgccatttatcatcatcatgtcgaccctgaccctggtcgtgtggatcgtgatcggcttcatagattttggcgtggtccaacgttacttcccgaaccctaacaagcatatctctcaaacggaagtgatcatcagatttgcatttcaaactagcatcactgtgctgtgcatcgcctgcccttgcagcctggggctcgcgactccaacggcggttatggtgggaaccggagtggcagctcagaatggaatcctgatcaaaggtggcaaaccgctggaaatggctcacaagatcaagacggtgatgttcgacaaaacgggtaccatcactcatggcgtccctcgcgtgatgcgcgtgctgcttctcggggacgtggccaccctcccgctcaggaaagtgcttgccgtggtggggactgccgaagcgtcgtccgaacatccactgggagtggccgtgaccaagtactgtaaagaggaactgggaaccgaaactctgggatactgcaccgatttccaagccgtccctggatgcggcattggctgcaaggtcagcaacgtggaggggattcttgcccactccgaaaggccactcagcgccccggcgtcgcatctgaacgaagcaggttcactcccagccgagaaagatgccgtccctcagacgttcagcgtgctcatcggcaatagggaatggctgaggcgaaacggactgaccatctcctccgacgtgtcggatgccatgaccgaccatgagatgaagggacaaaccgccattctcgtcgctatcgacggcgtgctgtgtggcatgatcgcgattgcagatgcagtcaagcaggaggcagcattggcggtgcatactctgcagagcatgggcgtcgacgtggtcttgatcactggcgataacagaaaaaccgccagagcgatcgccacgcaggtcggaatcaataaggtgttcgccgaggtgctcccatcgcacaaggtggcaaaggtccaggaacttcagaacaagggtaagaaggtggcgatggtgggggacggggtgaatgactcgccggcgctggcccaagcggacatgggggtggctatcggcactggaaccgatgtggcgatcgaggcagccgatgtcgtcctgatccggaacgacctgctggacgtggtcgcttcaattcatctctccaagcgcaccgtgcgccggatccggatcaacctggtgctcgccctgatctataacctggttggaattccgatcgccgcgggagtgttcatgccgataggaattgtgctccaaccttggatgggttcggcagctatggccgcctcctcggtcagcgtggtcctgtcatccctccaactgaagtgctacaagaagcctgatctcgagcgctatgaggcccaggcccacggacacatgaagcctctgactgcctcccaagtctccgtgcacattggaatggatgacagatggcgcgattcgcctcgggcgactccctgggaccaggtcagctacgtgtcgcaagtctccctgagctcgctgacttcagacaaaccgagcagacattccgccgcagccgatgacgacggggacaagtggagcctgttgctgaatggtcgcgacgaggaacagtacatc

SEQ ID NO: 7475 - DNA, 4395 bp, synthetic construct
  misc_feature 1..4395: note = source = /note="Description of Artificial Sequence: Synthetic coding sequence"
  source 1..4395: mol_type = other DNA
atgccagagcaggaacggcagattaccgctcgcgagggggcttcccgcaaaatactcagtaagttgtccctgccaactcgtgcctgggagcctgctatgaaaaaatcatttgctttcgacaacgtcggatatgaaggagggctggacgggctggggccgtcgtctcaggtggcgaccagtaccgtgcggattctgggaatgacctgtcagtcatgcgtgaaaagtatcgaggacaggatctccaatttgaaagggattatcagtatgaaggtatcactcgagcaggggtcagccaccgtcaagtacgtgccatcagtggtgtgtttgcagcaggtgtgtcaccagataggagacatggggttcgaggcctccatcgccgaggggaaggctgcaagttggccctctagatctctgccagctcaggaggcagtggtaaagctcagagtcgagggtatgacatgtcagagctgtgttagttccatcgagggcaaggttagaaagctccaaggtgtagtgcgcgtcaaagtgtcattatccaatcaggaagcggtgatcacataccagccctacctcatacagccggaggatctgagggaccatgtgaatgacatgggcttcgaggctgcgattaagtccaaggttgcccccctttctcttggccccatcgacattgagcgacttcaatccactaacccaaagcgacctttatcttctgctaaccagaatttcaataatagtgagaccttgggccatcagggctctcacgtagtgactctacagctgcgcattgatggcatgcattgcaagtcatgcgtccttaatattgaagaaaacattggccaattactgggcgtgcagagcattcaggtgtccctggaaaacaagacagcccaggtcaaatatgaccctagctgtacttctccagtggctctccagcgtgccatagaggccctgccgccaggaaactttaaggtgtctcttcccgacggcgcagaagggtctgggactgaccaccgatcttcgtcaagccactcaccaggctccccaccaaggaatcaggtgcaggggacatgtagcaccactttaattgccatcgccggtatgacatgcgcatcttgtgtccacagtatagaaggaatgatatctcagctggagggtgtgcaacaaattagcgtttcccttgctgagggcacggccaccgtgttatacaatccctcagtgatttccccggaagaactacgcgcagctatagaggacatgggttttgaagcttcagtggtgagcgagagctgttcgaccaaccccttgggcaatcattccgctggaaattcaatggtgcagactaccgacggtacacccacgtcagtgcaggaagtggccccacacaccggacggctgcccgccaaccacgctcccgatatcttggctaagagcccacagtcgacaagagccgttgccccccagaaatgtttcttgcaaataaagggcatgacatgtgcgtcctgtgtatcaaatattgaacgcaatctccagaaagaggctggagtcctgtccgtgctggttgcgctgatggctggaaaagcagaaattaagtatgatcctgaggtgatccagcctctagagattgcccagtttattcaggacctcgggtttgaagcagccgtgatggaggattacgctggcagtgacgggaatatagaactaacaatcacaggtatgacatgtgctagttgcgtgcacaacattgaatcaaagctgacccggacgaatggcattacatacgcaagcgtggcgctggctacaagcaaagctcttgtcaagttcgacccggagatcattggcccccgagacattataaagatcatagaggagataggtttccacgcgtccctggcgcagaggaatccaaacgcccaccatttggaccacaagatggaaattaaacaatggaaaaagtcttttctctgcagcctggtctttggcattcccgtgatggcgttgatgatttatatgctcattccctccaacgagccgcaccagagtatggtactggaccacaatattatccccggcttgtcgatccttaacctgatcttctttattttatgcacatttgtccaactgctgggggggtggtacttttacgtgcaagcctacaagtccctgcggcaccggtcagcaaatatggacgtgctgatcgttctggcaacctctattgcttatgtctattctcttgtaattttggtcgtagccgttgcagagaaagctgagcgttcacccgtgacatttttcgacacgcctccgatgctgtttgtctttatagccctcggtcgctggctcgagcaccttgcgaaatcaaaaacgtccgaagctctggccaaactgatgtccctgcaggccactgaggctacagtggttactttgggagaggataatcttatcatcagagaagaacaggtccccatggagcttgtccagcgcggtgatatcgttaaggtagttcctggaggaaaattcccagtcgatggtaaggtgttggagggtaacactatggccgacgagtctctgatcactggggaggctatgccggttaccaaaaagcctggatcaactgttatcgccggaagcattaatgcccacgggagcgtcctgattaaagctactcatgtgggtaatgacacaaccctcgcgcaaattgtcaagctggtcgaagaagcccagatgagcaaagcgcctattcaacaacttgccgacagattctcaggctacttcgtgccgttcatcattataatgagcaccctgactctcgtggtttggatcgtgattggcttcatcgatttcggcgtggtgcagagatatttccccaatcccaacaagcacatcagccagacggaggtgatcattcgcttcgcatttcagacatcaatcactgtgctgtgcatagcttgcccctgcagtctgggtctcgctacacctaccgctgtgatggtgggcaccggggtggctgcccagaatgggatcttgattaaaggcgggaagcccctggaaatggctcataagatcaagaccgttatgtttgataagacagggaccatcacgcacggcgtaccaagagtcatgcgagtgctgctgctgggcgatgtcgccacgctgcccttgcgaaaagtgctggcagttgtgggcaccgccgaggccagttctgaacaccctctaggggtggccgtcaccaagtactgcaaagaagaacttggcacagaaacactgggttactgtaccgactttcaggcagtacctggatgtggtattgggtgtaaggtctccaatgtagaggggattctggcccactccgagcgccctctgtccgctccagcttcccacctgaatgaggcaggctctctgcccgcagagaaggacgcagtccctcagaccttctcggtgttgattgggaaccgagagtggctacgtcggaacggtctgactatcagctccgatgtgagcgacgcgatgactgaccacgagatgaagggccagaccgccattttggttgccatagacggggtgttatgtggaatgattgctatcgctgacgccgtgaaacaagaggccgcactggctgttcacactttgcagtccatgggagtggacgtcgttctgatcaccggcgataacaggaaaaccgcacgggctattgcaactcaagttggtatcaacaaggtgttcgctgaggtgctgcctagccacaaagtggcaaaagttcaggaacttcaaaataaggggaagaaggtggccatggtgggagatggtgtcaacgattcgcctgctctggctcaagccgatatgggcgtcgcgatagggactggtacggatgttgccatcgaggccgctgacgtcgtgttgatccgcaatgacttgctggacgtggtggcctccatccacctgtctaagcgcactgtgcgtagaatacgaataaatctggttttagcactgatctataatcttgttggaattcccatagccgctggtgtctttatgcccattggaattgtacttcagccatggatgggtagtgccgccatggcagcctcttccgtctcagtagtcctctcaagcctccagcttaaatgctacaagaaaccagacttagagcgctatgaagcacaagctcacggacacatgaaacccttaacggctagtcaggtctcagtccatattggaatggatgatagatggagagattctccccgggcaactccctgggaccaagtctcttacgtgagccaggtttccttaagctcactcacatctgataaacctagcaggcacagcgcggccgccgacgacgacggagacaaatggtctctgttgttaaacggtagagacgaggaacaatatatc

SEQ ID NO: 7476 - DNA, 4395 bp, synthetic construct; identical to SEQ ID NO: 7467
  misc_feature 1..4395: note = source = /note="Description of Artificial Sequence: Synthetic coding sequence"
  source 1..4395: mol_type = other DNA

SEQ ID NO: 7477 - DNA, 4395 bp, synthetic construct
  misc_feature 1..4395: note = source = /note="Description of Artificial Sequence: Synthetic coding sequence"
  source 1..4395: mol_type = other DNA
atgccggaacaagaacgccaaattaccgctagagagggcgcctccagaaagatcctgtccaaactgtccttgcctacccgcgcctgggaaccggcgatgaagaagtccttcgcattcgataatgtgggatacgagggtggacttgatggactgggaccttcgagccaagtggcaacctcaactgtgaggatcctgggcatgacgtgtcagtcctgcgtcaaatccatcgaagatcgcattagcaatctgaaaggaatcatctcgatgaaggtatcccttgaacaagggtcagccactgtgaaatacgtgccgagcgtggtctgcctgcagcaggtgtgccaccagatcggggatatggggtttgaagcgtcgatcgcagaaggcaaggccgcctcttggccgagccggtccctgccagcgcaagaagcggtggtgaagctgagggtggaaggaatgacctgccagagctgcgtgtcctcgatcgaaggaaaggtcagaaagctgcaaggcgtggtccgcgtgaaagttagcctgtcgaatcaggaagctgtgatcacctaccaaccgtacctgatccagccggaggatctgagagatcacgttaatgacatgggctttgaagcggccatcaagtcgaaggtcgcaccattgtcactgggaccgatcgacattgaacgcctgcaatcaaccaatccaaagaggccgctcagtagcgcaaaccagaactttaacaactcagagactctcggccatcaagggagccacgttgtcacgctccagctgagaatcgatgggatgcactgtaaatcgtgcgtcctgaacatcgaggagaatattggccaactcctcggcgtgcagtcgatccaggttagtctcgagaataagaccgctcaggtgaaatacgatcctagctgtaccagcccggtggccctgcaaagagctatcgaagcgctcccgccaggaaacttcaaagtcagcttgccagatggtgcagaaggatctggaacggatcatcggtcatcatcctcccacagccctggaagccctccccgcaatcaggtccaggggacctgcagcaccaccctcatcgctatcgctggtatgacctgcgcttcgtgtgtgcactcaatcgaaggaatgattagccagttggagggagtgcagcaaatctccgtgagcctggcagagggcactgccactgtgctttacaacccgtcagtgatctcaccggaggaactgcgagccgctatcgaggacatgggattcgaagcctcggtggtgtcggagtcatgctcgacgaacccgctcggaaaccactcggcaggaaactcgatggttcaaaccactgacggcactccgaccagcgtgcaggaggtggctcctcacactggaagattgccggccaaccatgccccagacatccttgcgaagtccccgcagtcgacccgggccgtggctcctcaaaagtgcttcctccagatcaaaggcatgacttgtgcctcctgcgtgtcgaatatcgagcgcaacctgcagaaggaagccggagtgctgagcgtgctggtggcactcatggcaggaaaggccgaaatcaagtacgatccggaagtgatccagccgctggagatcgctcaattcattcaagacctgggcttcgaggccgcagtcatggaagattacgcgggctcggatggaaacattgagctgaccatcactggaatgacctgtgcgagctgtgtgcataacatcgagtcaaagctgactcggactaacggaatcacctacgcctcagtcgcgctggccacctccaaagccctggtcaagttcgaccccgaaatcattggacctcgcgatatcattaagattatcgaggaaatcggatttcacgcttcactggcacaacgcaatccgaatgcgcaccacctcgatcataagatggaaatcaagcaatggaagaaatccttcctttgcagccttgtgttcgggatcccggtcatggcgttgatgatctacatgctcatcccgagcaacgaaccgcatcaatcaatggtgctggaccacaacatcatccccggcctgtcgattctcaaccttatcttctttatcctgtgcaccttcgtccagttgctcgggggatggtacttctacgtgcaagcctacaagtcgctgcgccaccgcagcgccaatatggacgtgctcatcgtcctggccacgtcgatcgcctatgtgtatagcctcgtcatcctggtggtcgcagtggccgaaaaagccgagcgaagcccggtcactttcttcgacaccccgcccatgctgttcgtctttatcgctctggggcgttggctggaacacctggcaaagtccaagacgtcggaggctctggcgaaacttatgtcgctccaggcgactgaggccactgtcgtgactcttggcgaggacaacctgattatccgcgaggagcaggtcccgatggagctcgtccaaaggggcgacatcgtcaaagttgtgccgggcggcaagttcccagtggacggtaaggttctggagggtaataccatggcagatgagagcctgataactggagaagccatgcctgtgaccaaaaaacctggatccactgtgatcgccggctcaatcaacgctcacggaagtgtcctgatcaaagcgactcatgtggggaacgatactactcttgctcagatcgtgaaactcgtggaagaagcgcagatgtccaaggccccaatccaacaactcgccgatagattttcaggatacttcgtcccgtttatcatcatcatgtccactctgactctcgtggtgtggattgtcattgggtttatcgatttcggagtggtacagcggtacttcccgaacccgaacaagcatatttcgcaaactgaggtgatcatccgctttgcctttcaaacgtcgatcaccgtcctctgcatcgcatgcccgtgctctctgggactggctactccgacggccgtcatggtggggaccggcgtggccgcgcagaacggaatcctgattaaaggagggaagccactggaaatggctcataagatcaagacggtgatgtttgacaaaacgggaacgatcactcacggagtcccacgcgtgatgagagtgctgctgctgggagacgtggccactctgccgctcagaaaggtcttggcagtggtcggaaccgcagaggccagctcggaacaccctctcggagtggccgtgaccaagtactgcaaagaagagctgggcaccgaaaccctgggctactgcactgactttcaagccgtgccgggatgcggtattggatgcaaggtgtccaacgtggaagggatcctggcgcatagcgaacgcccgctgtcggcgcccgcatcgcacctcaatgaggccggtagtctgccggccgaaaaagacgcagtcccgcagactttttctgtcctgatcggtaacagagagtggctccggcgcaacgggctgaccatctcgagcgacgtctcggatgcgatgaccgaccacgagatgaagggacagactgcaatcctcgtggccatcgacggagtgctgtgcggcatgatcgcgatcgccgacgctgtcaagcaggaagctgctcttgctgtgcatactctgcaatctatgggagtcgacgtggtgttgatcaccggcgataaccgcaagaccgctcgggcaatcgcaacccaggtggggataaacaaggtgttcgcagaagtgctcccttcgcacaaggtcgctaaggtccaggaactccagaataagggcaagaaggttgccatggtgggggacggtgtcaatgacagcccagcgctggctcaagccgacatgggagtggcaatcggtacgggcaccgacgtcgccatcgaagcggccgacgtggtgctgatcagaaacgatctgctggacgtcgtcgctagtatccatctctccaagagaactgtgcgccggatccgcataaatctggtgctggctcttatctacaatctggtggggattcccatcgccgcaggagtgtttatgccaatcggaatcgtgctgcagccttggatgggatccgcggccatggcggcctcatccgtctcagtggtgttgtcatcactccaactgaaatgctacaagaaacccgacctggagcggtacgaggcgcaagcacatggacacatgaagccgctcacggcctcgcaagtgagtgtgcatatagggatggatgatcgctggcgggactccccgcgcgcaaccccatgggatcaagtgtcctacgtgtcgcaagtctcgctttcatcccttacttcagataagccctccaggcacagcgcagcggccgacgatgacggagacaagtggtccctgctcctcaacggacgcgacgaagaacagtacatt

SEQ ID NO: 7478 - DNA, 4395 bp, synthetic construct
  misc_feature 1..4395: note = source = /note="Description of Artificial Sequence: Synthetic coding sequence"
  source 1..4395: mol_type = other DNA
atgcctgagcaggaacgccagattaccgcacgggagggagcaagccggaagatcctttctaagctcagcctgccgacacgggcatgggagcctgccatgaagaagagcttcgccttcgacaacgttggatacgagggcgggctggacggcctgggaccatcctctcaggtcgctaccagcacagtcagaatcctcggcatgacttgccaatcctgcgtgaaaagcatcgaggatagaataagtaacctgaaaggcataatcagcatgaaggtgagtttggagcagggaagcgcaacagttaaatacgtcccttctgttgtgtgtctgcaacaggtctgccatcagattggggacatggggtttgaagcctcaatcgcagagggaaaggctgcttcttggccctctagatctctcccagcacaggaggctgtggtgaagttacgggtcgaaggaatgacatgtcagagctgcgtcagcagtattgaaggcaaagtccgcaagctgcagggtgttgtaagagtgaaagtgtcattgagtaatcaggaagccgtgatcacatatcagccctacctgattcaacctgaggatttacgcgatcacgtgaatgacatgggctttgaggctgcaataaaatctaaagtggctccactgagcctcggaccaatcgacatcgagcggcttcagtctacgaacccaaaaaggcctctcagctccgctaatcaaaattttaacaactctgagaccctgggtcaccaaggcagccatgtggtgacactccagctgcggatcgacgggatgcactgcaaatcatgcgtgctcaacattgaggaaaatataggccaacttctcggcgtccagtcaattcaagttagcttggaaaacaaaaccgcccaggtgaagtatgacccaagctgtacctctcccgtcgccctccaacgggctattgaggccctgcctccaggcaatttcaaagttagtctgcctgatggagctgagggcagcgggacagatcaccggtcaagctccagccatagtccaggatctccgccaaggaaccaagtccaaggaacctgttctacaaccctcatcgctatcgcaggcatgacctgcgcctcatgtgtacactctatcgagggcatgatatctcagcttgagggagtccagcaaataagcgttagccttgcagaaggcaccgccacagtcctctataatccaagcgtgatatctcccgaggaattacgcgctgctattgaagatatgggatttgaagccagcgtggtgtcagagagctgtagcacaaacccgctcgggaatcatagtgccggtaactctatggtccagaccacagatggaacccctaccagcgttcaggaggtggctccacatactgggaggcttccagccaaccatgcgcctgatatcctcgccaagtcaccccagagcactcgtgcagtggccccacaaaagtgcttcctgcagatcaaaggcatgacttgcgctagttgcgtgagcaacatagagcgcaaccttcaaaaagaagccggagttttatccgtgctcgtcgctttaatggccggcaaagctgagataaagtatgatcctgaggtcatccagccactggagattgcacagtttatccaagacctgggattcgaagccgccgtcatggaagactatgctgggtcggacggcaatatcgagcttaccatcacagggatgacctgtgctagctgtgtgcataacatcgaaagtaagcttacaagaactaacggaatcacatacgcgtcggtcgccctcgctacatcaaaagccttggtaaaatttgacccagagattatcggccctagagatatcataaaaatcattgaagagatcggattccacgccagcctggcacaacgtaaccctaacgctcaccatctggatcataagatggagatcaagcagtggaagaaaagcttcctgtgtagcttggtgtttggaattccagtgatggccttgatgatctacatgcttatcccctcaaatgagcctcaccaatctatggtgctcgaccataatattatacctggactcagcattttaaaccttatcttttttatcctctgtaccttcgtccagctgctgggaggatggtatttctatgtacaagcctacaagagcctgagacaccgctctgcaaacatggacgtgcttattgtgttagctacatcaatcgcttatgtctattctctggttatcctggtcgtggccgttgctgaaaaggctgagcggagtccagttacatttttcgatacaccgcctatgctctttgtgttcattgccctgggccgctggctggaacatttggccaaaagcaagacaagcgaggccctcgccaagctcatgagcctgcaggctactgaagcaaccgttgtgaccctgggtgaagataacctgattatccgcgaagaacaggtccccatggaacttgtacagcggggggacattgtaaaggtggtgccaggaggtaaattcccggtggatggcaaggtgctggagggtaacaccatggccgacgagagccttatcacaggcgaggctatgccagtgactaaaaagcccgggtccactgttatcgctggttctatcaacgcccatgggagcgtcctcataaaagcgacccatgttggcaatgataccactctggctcagatagtaaagttagtggaagaggcccaaatgagcaaggcacccatccagcagcttgctgatcgtttttccgggtactttgtcccattcatcatcatcatgagcaccctgacactggtcgtctggatcgttattggtttcatagattttggcgtggtccagagatacttccctaatccgaacaaacacatcagccaaaccgaggtcatcattaggtttgctttccagaccagcattaccgtgttgtgcattgcttgcccttgttcccttgggctggctacacctacagcagttatggtcggcactggcgtcgctgcccaaaacggcattctgatcaagggtgggaaaccactcgaaatggctcataaaattaagactgtgatgttcgataaaacaggtacaattacacacggcgtccctcgagtgatgcgcgttctactgttaggcgacgtcgctacactgccattacggaaggttttggcagtggtgggcactgccgaagccagtagcgaacacccactcggcgtcgctgttacaaaatattgcaaagaggaactgggaactgagacgctggggtactgcacagacttccaggctgtgccaggatgtggaatcggctgcaaggtttccaacgtcgaaggcatcttggcacactcagaaagaccgttgtcagctcctgcttcccatctgaacgaggctggaagcctgccagctgagaaggacgcagtccctcaaaccttcagcgtgctgatcgggaaccgggagtggctccgcaggaatggacttaccatatcaagtgacgtcagcgatgcgatgacggaccacgagatgaaaggacaaaccgctatccttgtagccatcgacggagtgctatgcgggatgattgcaattgccgatgctgtgaaacaggaggccgcattagcagtgcataccctgcagagtatgggcgtggacgttgtgctgatcacaggggacaacaggaagactgcccgggccattgctacccaggttggaatcaacaaggtgttcgcggaagtgctgccaagtcacaaagtcgctaaagtgcaggagctccaaaataaggggaagaaggttgccatggtaggggacggagtcaacgacagcccggctctggctcaggccgacatgggcgttgctatcgggacaggaaccgatgtggctattgaagcagcagacgtcgtgctgatcaggaacgatcttttagatgtcgtagcatcaatccacctttccaagaggactgtgcgcaggatccgcatcaaccttgtactggctctgatctataatcttgtcggaatccctatcgccgcaggagttttcatgcctatagggattgtgctgcagccatggatggggagcgcagccatggcggcttcatccgtttctgtggtgctgtcctccctccagctgaaatgctacaagaagccggacctggagaggtacgaggcacaggcacacggccacatgaaacctctgactgcctctcaggtttcggtccacattggcatggatgatagatggagggactcccccagggctactccatgggaccaagttagttacgttagccaggttagtctatcttctctgacaagtgataagccgtcaagacattccgctgctgccgatgacgacggcgataaatggagcctgctgctcaacggccgcgatgaagagcaatacatt

SEQ ID NO: 7479 - DNA, 4395 bp, synthetic construct
  misc_feature 1..4395: note = source = /note="Description of Artificial Sequence: Synthetic coding sequence"
  source 1..4395: mol_type = other DNA
atgccagaacaggagagacagatcactgcacgcgagggagcgtcgcggaagattctttcgaagctctcattgccaaccagggcttgggaacccgcaatgaagaagtccttcgcattcgataatgtgggttacgagggaggacttgatggcctggggccatcgtcccaagtggcaacctcgacggtcaggatcctcgggatgacgtgccaatcatgtgtcaaatcgatcgaagatcggatttccaatctgaaggggataatctccatgaaggtgtcgctggaacaagggtccgccaccgtgaagtatgtgccctcggtggtgtgcctgcaacaagtgtgtcaccaaatcggtgatatgggatttgaagcatccatcgcagaagggaaggcagcaagctggccaagccgatccctgccagcacaggaggccgttgtgaagttgcgagtcgaggggatgacttgtcaatcgtgtgtgtcctccatagaggggaaggtgcgtaaactgcaaggagtcgtgagagtgaaagtgtcgctttccaaccaagaagccgtgatcacgtaccagccttacctgattcaacccgaagatctgcgggatcatgtgaacgacatgggttttgaagccgctattaagtccaaggttgcacctctgtcgttgggacccatagatatagaacgcctgcaatcaactaaccccaaacgacctttgagctcggcgaaccaaaactttaacaactcagaaaccctggggcatcagggaagtcacgtggtgacgctccagcttcgtatcgacggaatgcattgcaagagctgtgtgcttaacatcgaggagaatataggacaactgctgggcgtccaaagcatccaagtgtctctggaaaacaagaccgcgcaggttaagtatgatccttcgtgtacgtcgcctgtcgccttgcagcgagctattgaggcacttccgcctggtaacttcaaagtgtcattgccagacggagcagaaggatcggggaccgatcaccgcagttcatcctcgcattccccaggttcacccccacgtaatcaggtgcagggtacgtgttccacgactcttattgcgattgcgggcatgacttgtgccagctgtgtccattccatcgaaggtatgattagccaacttgagggagtgcagcagatctcagtgagccttgcagaaggaactgctaccgtcctctacaacccaagcgtgatcagcccagaggaacttcgcgcagccattgaggacatgggtttcgaggcctcggtggtaagcgagagctgttccactaacccacttggcaaccactccgcgggaaactccatggtgcagaccaccgacggaacccccaccagcgtgcaagaagtggcaccacataccggacgccttccagcaaaccatgctcccgatattcttgcaaagagcccccaatcgactcgggccgtcgcaccacaaaagtgctttctccagattaaaggaatgacttgcgccagctgtgtgagcaatattgagcgtaacctccaaaaagaagcaggagtgctgtcagtgctcgtggcactgatggccggcaaggcagaaatcaagtacgatccggaggtgatacaacctcttgaaatagctcagtttattcaggacctgggattcgaagcagcagtgatggaggactacgcaggctccgacggtaacattgaactgaccattactggtatgacctgtgcctcctgcgtccataacattgaatctaagctcaccagaaccaatggtatcacctacgcgtccgtggcgcttgcaacttcaaaagcgctggtgaagtttgatccggagattattggtcccagagatatcattaagattatcgaggaaataggtttccacgcgtcgcttgcacagcgaaaccctaatgctcatcatctcgatcataagatggagatcaagcagtggaagaagtcgtttctgtgctccttggtgttcggaatccctgtgatggctctgatgatatacatgcttatcccttccaacgaaccacaccaatcaatggtcctggatcacaacattatccctggattgagcattcttaacctgatcttcttcatcctgtgtaccttcgtgcagctgcttgggggctggtacttttacgtgcaagcatacaagagtctgcgccaccggtctgcaaatatggatgtcttgattgtgcttgcaactagcatcgcatacgtgtactcccttgtgattttggtggtggcggtggctgaaaaggcagaacggtcgccagtcaccttttttgatactccacccatgctgtttgtgtttatcgcactggggaggtggctggaacatctggccaagtccaagacgtccgaagcccttgcaaagctgatgagcctgcaagcaaccgaagcaaccgtggtgacccttggggaagataacctcattatcagagaagaacaggtgcctatggagctggtgcagagaggtgatatagtgaaagtcgttcccggtggtaagtttccagtggacggcaaagtgctggagggcaacactatggcggatgaaagcctgataactggcgaagccatgcccgtgactaagaagccgggatcaactgtcattgccggttcaatcaatgcgcatgggtcagtcttgattaaagcgactcacgtgggtaatgacaccaccctcgcacaaattgtgaaacttgtggaggaagcccaaatgtcgaaagccccaattcaacagctggccgatagattctccggctacttcgtgcctttcattatcatcatgtctactcttacccttgtggtttggattgtgataggctttattgacttcggcgtggtgcagaggtattttcctaatcccaacaagcacatttcccaaactgaggtgattatacgttttgcatttcagacctcaattactgtcctctgcatcgcatgtccctgtagtctgggtcttgcgaccccaacggccgtgatggtggggacgggagtggctgcacagaatggcattctgatcaaaggtggaaagcctcttgaaatggctcataagattaagaccgtcatgtttgacaaaaccggaactattacccacggagtcccgcgggtcatgcgtgtcctgcttttgggcgatgtggcaactcttcccttgcgcaaagtgcttgcagtcgtgggaactgccgaagcgtcgtcagagcatccactgggggtggcagtcaccaagtattgcaaggaagaactcggaactgaaactctgggatactgtaccgactttcaagcagtgccaggatgtggaattgggtgcaaagtgtcgaacgtggaaggaattctggcccatagcgagcggccactctcagcgcccgcatcacatctgaacgaagcaggttccctgcctgccgaaaaggatgcagtcccgcaaaccttttcagtgctgataggaaatagagagtggttgcgccgaaacggccttaccattagctcagatgtctccgatgccatgaccgaccacgagatgaagggacaaaccgccatccttgtggcaatcgacggtgtcctctgcggaatgattgcgattgccgacgccgtgaaacaagaggcggcactggccgtgcacacccttcaaagcatgggggtggatgtcgtcctgattaccggtgataaccgcaagaccgctcgtgccatcgcaacccaagtgggcataaacaaggtctttgcggaggtgctcccctcgcacaaggtggcaaaggtgcaggagctccaaaacaaaggtaaaaaggtggccatggtaggtgacggagtgaacgacagccctgctctggcccaggcagatatgggagtggcaattgggactggtacggacgttgcaattgaagcagcagacgtggtgcttatacgtaacgatctgcttgacgtggtagcctctattcatcttagcaaaagaactgtgcgccgcatccggattaatctggtgcttgcgcttatctataatctggtgggtattccgattgctgcgggagtctttatgccaatcggcattgtgttgcaaccgtggatgggctcagcagcgatggcggcttcgtcagtgtccgtggtgctttcgtcccttcaactcaagtgctacaaaaagcctgatcttgaacgctacgaggcacaagcacatggccacatgaaaccgcttaccgcatcgcaggtgtccgtccatatcgggatggatgacagatggagggactcacctagagccaccccctgggatcaggtgtcgtacgtgtcacaagtctccctgagctcgcttacttcggacaagccttcccgccactcggcagcagcggatgacgatggcgataagtggtcgctgctgctgaacggacgagatgaggagcagtacatt

SEQ ID NO: 7480 - DNA, 4395 bp, synthetic construct
  misc_feature 1..4395: note = source = /note="Description of Artificial Sequence: Synthetic coding sequence"
  source 1..4395: mol_type = other DNA
atgcccgagcaggaacggcaaatcacagccagagaaggagctagccgaaaaatcctgagtaagctttccctgccaactagagcgtgggagcctgccatgaagaagtccttcgctttcgataacgtgggttacgaaggaggcttggacgggctcggaccctccagccaagtggcaacctccacagtgcggatccttggaatgacttgtcaatcatgtgtgaagagcattgaggatcggatctctaacttaaagggcattatctccatgaaagtcagcctcgaacaaggcagcgccactgttaaatatgttccctccgtggtatgcctgcaacaagtctgccaccagatcggagacatggggttcgaggcatcaattgcagaaggtaaagccgctagttggccaagtagatccctgcccgcacaggaagcagtcgtgaaactgagagtggagggaatgacctgccaaagctgtgtatcctcaatcgagggaaaagttcgcaaattgcagggcgtagtgagagtaaaagtgtccctctctaatcaggaggccgtgatcacataccagccttacctgattcagccagaggacctcagggatcacgtgaatgacatgggattcgaagccgcaattaagtccaaagtagcacccttgtccttaggtcctatcgacattgaacggctccagtctactaatcctaagcggccactgagctccgcaaaccaaaatttcaataatagcgagactctggggcatcagggctcacatgtagtcaccctacagcttcgcatcgacgggatgcactgtaagagctgtgtactcaacatcgaagagaacataggacagctcctgggagttcagtctatccaagttagtttggaaaacaagacagcacaagtgaaatacgatccttcatgcacctccccggtggctctgcaacgggccatcgaggccctccctcccggaaacttcaaagtcagcctgccagatggtgccgagggatccggtaccgaccacaggtcatcctcctcgcactctcccgggtctcccccaagaaatcaggtgcagggcacgtgctctacaaccttaatcgcaattgcaggtatgacatgtgcatcttgcgtccattcgatcgaagggatgatctcccagttagagggagtgcagcagatctccgtgtccctggcagaagggaccgctacggtgctatacaacccctccgttatctcacctgaagagttgagagcagcaatcgaggacatggggtttgaagcaagtgtcgttagtgagagttgctccacaaacccgttaggaaaccattccgcagggaactccatggttcagaccactgacggcacacccacctccgtgcaggaggtcgccccccatacaggacggctgcccgccaatcacgcccctgatatactggcaaagagcccccaatctacacgagccgttgctcctcaaaaatgcttcctccaaattaaaggtatgacctgcgcgtcatgtgtaagcaacatcgagcgtaatctacagaaggaggctggcgttttgtcagtattagttgccctgatggcaggcaaggcagagatcaagtatgaccccgaagttatccaacccctggaaattgcacagtttatccaagatctggggttcgaagcggcagtgatggaggactatgctggatcggacgggaatatcgagctgacgatcacaggcatgacttgtgctagttgtgttcacaacatcgagagcaagctgacgcgcacgaacggtatcacttacgcttccgttgctctggctacgtctaaggcgcttgtcaaattcgatccggaaatcattggtccccgggatatcatcaaaattattgaggaaattgggtttcacgcctcccttgcacagcgcaaccccaacgctcatcatcttgaccataaaatggaaattaagcagtggaagaaaagctttctgtgcagcttggtctttggtatcccagtgatggctctgatgatctacatgttaatcccatccaacgaaccccaccagagcatggtactggaccacaacattatccctgggttaagtatcctaaatctcatcttctttatcctctgtacgtttgttcagctgctgggtggctggtatttctatgtgcaggcttacaaaagtctacgccatcggtccgcaaacatggatgtgctcatcgtgctggccacatcaattgcctacgtttacagtctggtcatcttagtggtggccgtggcagagaaggcggaacgctcgccggtcaccttcttcgatacacctcccatgctatttgtgtttattgcacttgggcggtggttggagcacttggctaaatcgaagacatctgaggcgctggccaaactcatgtcactccaggctaccgaagctactgtcgtcacgctgggcgaagataacttgattatacgggaggaacaggtgcctatggagctggttcagcgcggcgacattgtcaaagtcgtgccgggggggaagttccccgtagatggaaaggtgttggaaggcaacaccatggccgacgaatcccttattacgggagaggccatgccggtgacaaaaaagccggggagtaccgtgatagcgggaagcataaacgcccatggctccgtactcatcaaggcaactcatgtaggcaatgatactacattggctcagatcgtcaaattagtggaggaggcccagatgtccaaagcacctatacaacagttagcagatcgattcagtgggtactttgtgccattcatcatcatcatgagcaccttgacactggtggtttggatcgtgatcgggttcattgactttggagtggtgcaacgctatttccccaatccaaataaacatataagccagacagaggtcataatcagatttgcatttcagacatcgatcacagtcctctgtattgcttgtccttgttcactcggtctagcaactcccacggcggtgatggtcggaaccggagtcgctgcccaaaacggaatactgataaaagggggaaaacccctggaaatggcccacaagatcaagaccgttatgtttgataagaccgggactatcactcacggcgtgccccgagtgatgagagtgcttctgctgggagatgtggccactctacctctgaggaaggtactagccgtggtgggcactgccgaggcgtcttcagagcaccctctgggcgtcgcggtcaccaaatactgtaaagaggaacttggcacagaaacactaggctattgtaccgattttcaagctgtccctggatgcggtattggctgtaaagtgagcaacgtcgagggcatcctggcccactccgagcgcccgttatctgctcccgcatcacaccttaatgaggcaggatctctgccggccgagaaagatgccgtgccccagacattcagtgtgcttattggaaatcgcgagtggttgaggagaaacggcctgaccattagcagtgatgtaagcgatgcgatgaccgatcacgaaatgaaaggacaaacagctatccttgtcgccatcgatggcgtgctctgcggcatgatagcgatcgccgatgccgttaagcaggaggcagccctggctgtccacacactccagagtatgggcgtcgacgttgtgctcataacaggtgataatagaaagaccgctcgcgccatcgccactcaggtgggtatcaataaggtttttgccgaagtgctaccatcccacaaggttgccaaagtgcaggaattacagaacaagggaaaaaaagtcgccatggtgggtgacggagtgaacgattctcccgcgctggctcaggccgatatgggcgtagctatcggcacaggaactgacgttgccatcgaagccgctgatgtcgtcctcattcggaatgaccttctcgacgtcgttgcatccattcacttgagtaagcgaactgtgcggcgaatcagaattaatctggtcctggccttaatctataacttggtcgggatccctattgccgctggcgtgttcatgcccattgggatcgtcctgcagccttggatggggtctgccgccatggccgcgtcctccgtcagcgttgttctgtccagtcttcagctcaagtgctataaaaagccagacctcgaaaggtatgaggcacaggcccacgggcacatgaagcctctgaccgccagtcaggtatctgtgcatatcggaatggacgaccggtggcgggactcaccaagagccactccctgggaccaggtgagttatgtgagccaggtgtccctgtcaagcctcactagtgataaacctagccgtcattcagccgccgccgacgatgatggcgataagtggagcctcctactaaacgggcgggacgaggagcagtacata

SEQ ID NO: 7481 - DNA, 4395 bp, synthetic construct
  misc_feature 1..4395: note = source = /note="Description of Artificial Sequence: Synthetic coding sequence"
  source 1..4395: mol_type = other DNA
atgccggaacaggagagacagatcacagccagggagggggcctccagaaaaattctttccaagctctcacttcctacccgggcttgggagccagcaatgaagaagtcatttgcttttgataatgtgggttacgagggtggccttgacggtctgggtccaagttcccaggtcgcaacgtcaacagtgagaatcttagggatgacttgccagtcgtgtgtcaagtcgatagaggaccgcatctccaatctgaaggggattatcagcatgaaagtgtcactcgaacaggggtcggccacagtgaagtacgtgccgtcagtggtgtgtctgcagcaggtgtgtcaccagatcggggatatgggcttcgaggccagcatcgctgaagggaaggctgcctcttggccatcccgctctctgcccgcacaggaagccgttgttaagttgcgcgtggaaggcatgacatgtcagtcatgtgtctctagcatcgaaggtaaagtacgaaaactacagggtgtggtgcgggtcaaggtatctctctcaaatcaggaggcagtaatcacctatcagccttatttaattcagccagaagacctgagggaccatgtaaacgatatgggcttcgaagccgccattaaatccaaagtcgcccctctgagcctagggcccatcgacatagagaggctccagtccactaaccctaaaagaccgcttagctcagccaatcagaacttcaacaactccgaaaccttggggcaccagggctcacatgtggtcactcttcaactgcgcatagatggcatgcactgcaagtcctgcgtgctgaacattgaggagaatataggccagttgctcggcgttcagtccatccaggtgagcttggaaaataagacggctcaggtgaaatatgaccccagctgcaccagtccggtggccctgcagagggccattgaagcccttccacctggtaatttcaaggtttctctgccggatggcgccgagggctcaggcacggaccatcggtcatcatcctcccatagccctggatctccccccagaaatcaagtgcagggcacatgtagcacgactctaatcgctatagcaggcatgacatgtgccagctgtgtacattccatcgaaggcatgatcagtcaactggaaggcgtgcagcagatcagtgtgagcctggcggagggaaccgccactgttctgtacaacccttctgtgatctccccagaggagctgagagccgccatcgaagatatgggattcgaggcctctgttgtgagtgagagttgttccacaaaccctctgggcaaccattcagccggcaattctatggtccagacaacagatggtactcctacttctgtgcaagaagtggccccacataccggacgccttcctgccaatcacgctcccgacatcctcgccaagtctccacagagtaccagagccgttgccccacagaagtgcttccttcagatcaagggcatgacatgtgcaagctgcgtttcaaatatcgagcggaatctccagaaagaggctggggtgctctcggttctggtggccctgatggctgggaaggccgaaataaaatatgaccctgaagtgattcaacctctcgagattgcccagtttatccaggatctcggatttgaggcggccgtgatggaggactacgcgggatctgatggcaacattgaactgaccattactggaatgacgtgcgcttcatgtgtgcataatatcgaatcaaaactgacccggaccaacggcatcacttacgccagcgtggcactggctacatctaaggcgctggtcaagtttgatcctgaaattattggaccgcgagatattatcaagatcattgaagagatcggcttccatgcaagtttagctcagaggaacccgaacgcacatcatctagatcataaaatggaaattaagcagtggaagaaaagttttctctgtagtctcgtattcggaattcctgtcatggccctgatgatttacatgctaatcccaagtaatgaaccccatcagagtatggtgctcgaccataatatcatccccggtctttctatactcaatctaatcttctttatactgtgtaccttcgtacagcttctggggggatggtatttttatgttcaggcatacaagtcactgaggcatcggtccgctaacatggatgtactgatcgtgttagccacgagtattgcctatgtttacagtctcgtaatccttgtggtggccgtggcggagaaggccgaaaggtctcctgtcactttctttgacaccccgccaatgttatttgtattcatcgcactgggaaggtggttggagcacctcgccaagtctaaaacatctgaggccctcgctaagctaatgagcctgcaggccactgaagcaaccgtcgttacactgggagaggacaatctcatcattcgagaggaacaagtcccaatggaactggttcaaagaggcgacatagttaaggtcgtgccgggcggaaagtttcctgtggacgggaaagtgctcgagggaaacacaatggctgatgaaagtctgattactggcgaagccatgccggtgaccaagaaacctgggagtaccgtcattgccggctccataaatgctcatggttccgttttaatcaaagccactcatgtcggcaatgatacaaccctagcccagatagtaaagctagtagaggaagcccagatgagcaaggcccctatacagcagctggctgaccggtttagcggctacttcgtgccttttataattataatgtccactttaaccctcgttgtctggatagtgatcggcttcattgattttggcgtggtccaaaggtacttccccaatccaaacaaacacattagccaaaccgaagtcatcattcggttcgcctttcagacatcaatcacggtgctgtgcattgcttgcccctgtagtctgggcctggcaacccctaccgctgttatggttgggactggagtggccgcccagaatggaatactaatcaaaggcggaaaacccctggagatggcccataaaattaaaaccgtcatgtttgacaaaaccggtacgattacccacggcgttccgagggttatgcgagtacttctactcggtgacgtggccacccttccgctgcgcaaggtgttagcagtggttgggaccgcagaggcgtcgtctgagcatcccctgggtgtagccgtgaccaagtactgtaaagaagagctgggcaccgaaaccctcggctattgcactgatttccaggctgtgccgggttgcgggattggatgtaaagtctcaaacgtagaaggcattcttgcacactcagagcgccccttaagcgcccccgcctcccacttgaatgaagcgggaagcttacccgccgaaaaggacgcagttccgcagactttctcagtgctgattgggaaccgcgaatggttgcggcggaatggcctaactatttcaagcgatgtcagtgatgccatgaccgatcatgagatgaagggacagaccgcaattctggtcgcaatcgatggggtgctatgcggtatgatcgccattgcagacgcggtgaagcaagaggccgcactcgccgtgcacaccttgcagtcaatgggcgtagacgtcgtgctcattaccggggacaaccgtaaaaccgcgcgcgcaatagccacacaggtaggcataaataaagtttttgccgaagtgctgccatcacataaggtcgcaaaggttcaagagctccaaaataaagggaagaaggtcgccatggtgggagatggcgtcaacgattctcccgccctggcgcaagccgacatgggagtagctatcggtactgggaccgatgtggccattgaagcagcagacgttgtgctcatccgcaacgatttactggatgtggttgcaagtattcatctgtccaagagaacggtccgccggatccggatcaacctcgtgcttgccttgatctacaacctggttgggatcccaatcgccgctggcgtgtttatgcctatcggcatagtgctccagccttggatgggctccgctgctatggccgcttccagtgtgtccgtcgttttatccagtctgcagctgaagtgctacaagaaaccggatctggaacgctacgaggcacaggcccacggccacatgaagcctttaaccgcctcccaagttagcgtgcatattggcatggatgaccggtggcgtgattctccaagagccacaccctgggaccaggtgtcctacgtgtcgcaggtctcgttgagctcattgaccagcgataaaccaagcaggcattcggctgcagcagacgacgacggcgataagtggtctctgctcctcaatggcagggacgaggagcagtatatc

SEQ ID NO: 7482 - DNA, 4395 bp, synthetic construct
  misc_feature 1..4395: note = source = /note="Description of Artificial Sequence: Synthetic coding sequence"
  source 1..4395: mol_type = other DNA
atgcctgagcaggaacgtcagattaccgcaagagagggtgcctcacgcaagatcctttcaaagctgtctcttcctaccagagcatgggaacctgccatgaaaaagtcttttgcttttgacaacgtcggctacgagggtggtttggatggactgggtccttcctcacaagtggctaccagcaccgtgcgtattctgggcatgacttgccagtcctgtgttaaaagtatagaagaccgcatcagtaacttgaagggtatcatctccatgaaagtctccctggagcagggatctgccactgtcaaatacgtaccttccgtagtctgcctgcagcaggtgtgtcaccagattggagatatgggtttcgaggcatcaatcgcagagggtaaggctgcctcttggccctcaagatcactgcctgcccaagaggccgtggtcaaactccgtgtggagggaatgacttgccaaagctgcgtgagttctatcgaaggcaaggtgcgtaagcttcagggtgtcgtcagagtgaaagtctcacttagcaaccaagaagcagtcatcacctatcagccctaccttattcaacccgaagacctgcgcgatcatgtcaatgacatgggattcgaggctgcaataaagtccaaggtggcaccattgtctctgggtcctatcgatatcgaacgtctgcaatccactaatccaaaacgtccactcagttcagctaaccaaaacttcaataatagcgagactctcggtcatcaaggctctcatgtggtgactctgcaactgcgcatcgatggaatgcactgtaagagctgtgtcctgaacatcgaagaaaacatcggacagctcctgggcgtgcagagcatccaagtgagcttggaaaataagactgctcaggtcaagtacgatccctcttgcacatctcctgtggctctgcaacgtgccattgaggccctgccacctggaaacttcaaggtgagcctgcctgacggcgctgagggatctggaaccgaccaccgctcctcaagtagtcatagccctggctctcctcccagaaatcaggtgcaaggcacatgctctactaccctcatcgcaattgccggtatgacctgcgctagttgcgtacattctatagaaggaatgatctctcagttggaaggcgtgcagcagattagtgtgagcctggctgagggaactgccaccgtcctgtataacccatctgttatcagccctgaagagcttcgtgccgcaatcgaagacatgggcttcgaagcatccgtggtttctgaaagttgcagcaccaatccactgggcaaccattccgctggaaacagcatggtgcaaacaaccgacggtacccctacatctgttcaggaagtcgcaccacacactggccgcctccccgctaatcacgctcccgatatcttggctaagagtccacagagtactagggcagttgctccccagaagtgtttcctccaaatcaagggtatgacatgtgcctcctgcgtatctaacatcgagagaaatttgcaaaaggaggcaggtgttttgtccgttctggtggcccttatggcaggaaaggccgagataaaatacgatccagaggtcatacagccactcgaaatagcccaatttattcaagacctgggttttgaagctgccgtgatggaagattacgccggtagcgacggcaatattgaactgaccatcaccggtatgacttgcgccagttgcgtgcacaacattgaatctaaacttacacgcacaaacggtatcacctacgcctccgtagctctcgctacctccaaagctctggtgaagttcgacccagagatcatcggtccaagggacatcatcaagattattgaggagatcggatttcatgcaagtctcgcacaaaggaaccccaacgctcaccacctcgatcacaagatggaaataaaacaatggaagaaatccttcctgtgctcattggtgttcggtatccccgtgatggctctgatgatttatatgctgattccctctaacgagccacatcaaagtatggtgctggaccacaacataattccaggactgtccattctcaacctgatattcttcatcctgtgcactttcgtccagttgctgggaggctggtatttctacgtacaggcttacaagtcactgcgccatagatcagctaacatggatgtgcttatcgtactcgctacttccatcgcctacgtatattctctggtgatattggtggtggccgtggctgaaaaggctgaacgtagtcccgtgacttttttcgatactccccctatgctgttcgtatttattgccctcggccgttggctggagcacctcgctaagtctaagacttctgaagcactggctaaactgatgagcttgcaggcaacagaagctactgtcgtgactcttggcgaagataatctgattatccgcgaagagcaggtgccaatggaactcgtgcagaggggcgacatcgtaaaggtggtgcccggcggaaaattccctgtggacggcaaggtcctggaaggaaatactatggctgacgagtcactgattactggtgaagccatgcctgttacaaaaaaacccggtagtaccgttatcgctggatccattaatgctcatggctcagtccttattaaggctacccacgtgggcaatgacactaccctcgcccagatagtgaagctggtcgaggaggcacagatgagcaaggctcctatccagcagctggccgataggtttagcggttactttgtcccattcatcatcatcatgagcaccctgactttggttgtctggatcgtcatcggtttcattgatttcggcgttgtgcagcgttacttccctaatcctaacaagcatatatcccagactgaagttatcatcaggtttgctttccagaccagcatcacagttctgtgtatcgcttgcccttgcagtttgggccttgctacacctactgcagtgatggttggcaccggcgtcgcagcccaaaacggcatcctgatcaagggcggtaagcccctcgaaatggctcacaagatcaagaccgtgatgttcgataaaacaggtaccatcacccatggtgtgccacgtgtaatgcgcgtcctcctcctgggtgatgtggccaccctgcccctccgcaaagtgttggcagtagtaggaactgcagaggcttcttccgaacacccactcggcgtggctgtaacaaaatactgcaaagaggagcttggaactgagacacttggctactgtactgactttcaagccgtgcctggctgcggaatcggatgcaaggtaagtaacgtagagggaattctggcacactcagaacgtcccttgtcagcccctgcttctcacctcaacgaggccggttcacttcccgctgagaaggatgccgtgccacagacattttcagtcctgattggcaacagagaatggcttagaagaaacggcttgaccatatccagcgatgtgagtgatgctatgaccgaccacgaaatgaagggtcaaacagctatcctggtggctatcgacggcgtactctgcggaatgatcgccatagcagatgccgtgaagcaggaggcagcacttgccgtgcacactctgcagagcatgggtgttgacgtggtgctcataactggagataataggaagaccgctcgcgcaatcgctacccaggtcggcatcaataaggttttcgccgaggtactcccttcacacaaggtagccaaggtgcaggagttgcagaacaagggtaaaaaagtggccatggtgggcgacggagtaaacgattcccctgcccttgcccaggccgatatgggcgtggcaattggtaccggtactgatgtagcaatcgaggccgctgacgtggtgcttatcagaaatgatctgctggacgtggttgcttccatccacctgtctaaacgtacagtaagacgtattcgtattaaccttgtgctggccctgatttacaatctcgtcggcatccctatagctgccggcgtcttcatgcctattggaatcgtgctccagccttggatgggatctgctgctatggctgcttcctccgtttccgtcgtcctgagttctctgcagctgaaatgttacaaaaagcctgatcttgagaggtatgaggcccaagcacatggacatatgaaaccactcacagccagccaggtctccgtccacatcggcatggatgatcgctggcgtgatagcccaagagccaccccttgggatcaggtctcatatgtcagccaggtttctctttcatcactgacttctgacaagccctcaaggcattctgccgctgcagacgacgacggagataaatggtccctccttcttaacggcagggacgaagaacaatatatc

SEQ ID NO: 7483 - DNA, 4395 bp, synthetic construct
  misc_feature 1..4395: note = source = /note="Description of Artificial Sequence: Synthetic coding sequence"
  source 1..4395: mol_type = other DNA
atgcccgagcaagagcggcaaatcaccgcaagagagggcgcatcccgaaaaatattgtctaagctgtcactacctactagagcgtgggaaccagccatgaagaagagctttgcgttcgacaacgtgggttacgaggggggtctggacgggcttgggccttcctcccaggtggccacgtcgaccgtgcggatcctagggatgacctgccaatcatgcgtcaagagtatcgaggaccgaatcagcaatttgaaaggcattatatctatgaaagtttcgttagagcagggttctgcgaccgttaagtatgtccctagcgttgtttgcctgcagcaggtttgccaccagattggagatatgggttttgaggcctctattgccgagggcaaggcggccagctggccgtcacgatcacttccggcccaggaggcagtcgttaagctaagagttgaagggatgacctgccaatcttgtgttagttcaattgagggtaaggttcggaaattacagggcgtggtgcgggtgaaagtcagtctttcgaaccaagaggcggtcataacatatcagccctacctcatacaaccagaggatctgcgggaccacgtcaacgatatgggcttcgaagctgcgatcaagtctaaggttgcaccactgtctcttggcccgatcgatatcgagcgtttacaaagcacaaatcccaagcgtcccctgtcctcagctaatcagaacttcaacaacagcgagacactcggccaccaaggaagtcatgtggtaacgcttcaactgaggatcgacggtatgcattgcaaaagctgtgtcctgaacatcgaggagaacatcggtcagcttctgggggtccagtccattcaggtgtctctcgaaaacaaaactgcccaagttaaatatgacccatcctgcacctcaccagtagcgttgcagagagcaattgaagccttgccacccggcaacttcaaggtcagccttcctgacggcgcagaaggttcgggaacggatcacagatccagcagttcccacagccctggtagcccaccgcgcaaccaagtgcaggggacctgctcgacaaccttgatcgcaatcgcagggatgacttgtgcttcctgcgtccacagtatagagggtatgatatctcagctcgaaggtgtccaacaaatcagcgtctctttagccgaagggactgcaacagtgctttacaacccttcggtgatttcaccggaagagcttcgagctgctattgaggatatgggctttgaagcatccgtggtcagtgagtcatgctctaccaacccgcttggtaatcactctgctggtaattcgatggtgcaaacgaccgatgggaccccgacttccgtccaggaagttgcccctcacacaggacgactcccggcgaatcacgctcccgacatcctcgcgaaatcccctcagagcactcgagctgttgcccctcagaaatgtttcctccagattaagggcatgacttgcgcctcctgcgtctcaaatatcgagcgaaacctccagaaggaggcgggcgtgctttccgttctcgtggcactcatggctggaaaggctgagattaagtatgacccggaagtcattcaacccctggagattgcacaattcatacaggaccttggctttgaagccgctgttatggaagattacgctggatctgatggcaacattgaactgactatcactggaatgacttgcgcgtcctgcgttcacaatattgagagtaaactgacaagaactaacggaatcacgtacgcctccgtggcgctcgccacatcaaaagcccttgtgaaattcgatccagaaatcataggtccgcgcgacattatcaagataatcgaggagattggcttccatgctagcctggctcagcgtaaccccaacgcccaccacctcgatcataagatggaaattaagcagtggaagaagtcctttctgtgcagccttgtatttggaatccctgtgatggcgctgatgatttatatgctcatcccatccaatgaacctcatcagtcgatggtcttggatcataatataataccaggtctgtcgattcttaaccttatcttttttatcctctgcacttttgtgcaattactgggtggatggtacttttatgtccaggcatacaagtcccttcgtcatcggtcagcgaatatggatgttttgatcgtgctagcaacgagcatcgcttatgtctatagtctcgtcattcttgtggttgcggtggcggagaaagcagagcgatctcctgtaacgtttttcgacacacctccaatgctgttcgtttttatcgcgttaggtcgttggttggagcatctagcaaagtccaagacgtcagaggctcttgccaagctgatgtctctgcaagcgacggaagctacggttgtaaccttgggagaggacaacctcataattcgggaagagcaagtccccatggagctcgtacaaagaggggatattgtgaaggttgtgcctggagggaagtttcctgttgatggtaaggtgctggagggtaatacgatggctgacgagagcctcatcactggagaggcaatgcctgtcacaaagaaacccggctccactgtcatcgccggatcgatcaacgctcacggctcagtgctgatcaaggctacacacgttggaaacgatacaacgcttgcacaaatcgtgaagttagtcgaggaagctcagatgtccaaggcgccaatacagcagcttgctgatcgattttctggctattttgttcccttcatcatcatcatgtctaccttgacccttgtcgtttggattgtgattggattcatagattttggcgttgtccagcgctatttccccaacccaaataagcacatctcgcagacggaggtgatcatacggttcgccttccagacttccattaccgtgttgtgtattgcgtgtccttgttcgctgggcctggcaacccctacagctgtaatggtcggcaccggcgtggccgcacaaaacggcattctcatcaaaggcggcaaacctctagagatggctcacaagatcaagactgtaatgttcgataagaccggtacaattactcacggtgttccccgagttatgcgagttctattgcttggcgatgtcgccaccctcccgttgcgaaaggttctggcggtggttgggacagcagaggcgtcttctgagcatcctttgggtgtagcagtcaccaagtattgtaaagaggaattaggaacggagacgcttggttactgtaccgacttccaagctgtaccggggtgtggaattggatgtaaggttagtaatgttgaagggatcctggcacactctgagcggcccctatctgctcccgcttcccatttgaacgaggcaggcagcctgcctgcagaaaaggatgcggtgcctcagactttctcagtgctgatcggtaatcgcgagtggctccgtcgcaacgggctgaccatcagttcggacgtctcagacgctatgacagatcatgaaatgaagggtcaaaccgccatcctggtggcaatagacggtgtgctgtgtgggatgatagcaatcgccgatgctgtgaagcaggaagcagcgcttgccgtccacacgctacagtccatgggtgtcgatgtcgtactcataaccggtgacaaccggaagaccgcccgtgccatcgctacgcaagtaggtatcaacaaagtgttcgccgaggtcctaccctcacacaaagtcgcgaaagtacaagaactgcagaacaagggtaagaaggttgccatggtcggagatggagttaacgactcacccgcccttgcccaggcggacatgggcgtcgcgatcggcaccggtacggacgttgccatcgaggcggcggacgtcgtgttgatccgtaacgacctgctggatgtggtggcctcgattcatctttcgaaacgaactgtgagacggattaggataaacctggtccttgcgttgatctacaaccttgtaggtatccctattgctgctggcgtttttatgccgattggtatcgttctccagccatggatgggttcggccgccatggcagcgtcatcggtctcagtcgttctttcctcacttcagctcaagtgttataagaagcccgatttagaaaggtatgaggctcaggcgcacggtcatatgaagccgctaacggcctcacaggtttcggttcatataggtatggatgacaggtggcgggattcacctcgggccactccttgggaccaggtctcttacgtcagccaagtctctctgagctcacttacgtccgataagccctcgcgacattccgcagccgcggacgatgacggcgacaagtggtcccttctgcttaacggacgtgatgaagaacaatacatc

SEQ ID NO: 7484 - DNA, 4395 bp, synthetic construct
  misc_feature 1..4395: note = source = /note="Description of Artificial Sequence: Synthetic coding sequence"
  source 1..4395: mol_type = other DNA
atgccggagcaggaaagacaaatcactgcccgcgaaggcgccagtcgcaaaatattgtcgaagctgtcgttgccgacccgtgcctgggaacctgccatgaagaagagttttgcgttcgacaacgtaggatacgaggggggcctggacggactagggccatcgagtcaggtggcgacaagtactgtgcgcattctaggcatgacctgccagagctgcgtgaagtcgatagaggaccgcatcagcaatctgaagggtattattagtatgaaggtttctttggagcagggttcagccaccgtaaagtacgttccctcagtggtttgcttgcaacaggtctgtcatcaaattggtgatatgggcttcgaagccagcatagcagagggcaaagccgcctcctggccgagtcggagcttgccagcccaggaagccgtggtcaaactgcgggtggagggtatgacctgccagagctgtgtgtcctctattgaagggaaggtgcgcaaactacagggagtcgtcagggtcaaggtgtctctgagcaaccaagaagccgtgattacctaccagccatacctgattcaaccggaggatcttcgtgatcatgtgaacgacatgggctttgaagccgcgattaagtccaaagtcgcccccctgtcactgggtcccatcgatatcgaacggctgcaatcgactaatccgaagcgcccgctgtcatccgccaatcagaatttcaataattccgagaccctcggacaccagggaagccatgttgtaaccctgcagctgcgcattgatggcatgcattgcaagtcgtgcgtgctaaacatagaggaaaacatcggccaactactcggtgtccagagcatacaggtgtccctagaaaataagacagcccaggtcaaatacgatccgagctgtacatcaccggtggccttgcaacgggccatcgaggcgctgcccccaggaaactttaaggtgtcgctccccgacggtgcggagggaagcggcacagatcacaggagctccagctcccactcgccaggtagcccaccgcgcaaccaggtccagggaacttgttctacgacgctgatcgccattgcaggcatgacctgcgctagctgcgtacactctattgaaggaatgatcagccagctggagggtgtgcagcaaatctctgtttctttggcggagggcacagcgactgtactgtataatccatccgtgatctctcccgaagagttgcgtgccgctatcgaggacatgggcttcgaggcctctgttgtatctgagtcctgttcgaccaacccactcggtaaccattcggctggaaacagtatggtgcagacgacagacggcacgccgacgtccgtccaggaggtggccccgcatactggccgtctgccagctaatcacgctccagacatcctggccaagtccccacagtccacccgcgccgttgccccccagaagtgctttttgcagatcaagggaatgacgtgcgcgagttgtgtgtctaatattgagcgcaatctgcagaaggaagccggcgtcttgtccgtgctggtggcgttaatggcgggaaaagcggagatcaagtacgaccccgaggttatacaaccactcgagatagcccagttcattcaggatctgggcttcgaagcagctgtgatggaagactacgccggctcggatggaaatattgagctgaccattacaggtatgacctgcgccagctgtgtgcacaacatcgagtcaaagttgacccgtacgaatggcattacttacgccagcgtcgcgcttgccacctccaaggctttggtgaagttcgatccggaaataataggaccacgggacattataaagatcatagaggagataggattccacgcttcgctggcacaacgcaatccgaacgcgcaccaccttgatcacaagatggaaataaagcagtggaagaagagcttcttgtgcagccttgtgtttggtatccctgtgatggcgctaatgatctacatgctcatcccatccaacgagccccaccaaagcatggtcctcgatcacaatataatcccaggtctatccattttgaatctgatcttttttattctgtgcacctttgtccagttgctcggaggctggtacttttacgttcaagcttacaagagcctacgccatcgcagcgccaacatggacgttctaatcgttctcgccacaagcattgcttacgtgtattcactggtgattttggttgtggccgtagcggagaaggcagagagatccccggtgaccttcttcgacacgccccccatgctcttcgttttcatagcgctcgggcgttggttggagcatctggccaagtccaaaacctctgaggccttggccaaactcatgagcctccaggccacggaagccacagtggttaccctcggtgaggacaacttaattatcagggaggagcaagtcccgatggagctggtgcaaaggggcgacattgtgaaggtcgtccccggcggcaaattcccggtcgatggtaaagtgctagaaggcaatacgatggccgacgagagtctaataaccggtgaggcgatgcctgtgaccaagaaacccggatcaacagtgatcgctggcagtattaatgcgcatggaagcgtgttgattaaggctactcacgtcggtaatgataccaccttagctcagattgtgaagctcgtggaggaagcccagatgagtaaagcgcccattcaacagctagccgatcggttctccggatacttcgttccgttcataatcatcatgtcgacactgactctagtcgtgtggatcgtgatcggttttattgattttggcgtggtgcagcggtatttccccaatccgaacaaacatatctcacagaccgaggttatcattcgctttgcgtttcagactagcattacggtgctgtgtatagcctgcccctgcagcttgggactggcaacacctaccgccgtgatggtgggtacgggcgtcgccgcccaaaatggtatccttattaagggtggtaagcccttagaaatggcccacaagataaaaaccgtcatgttcgataagactggcactattacccatggggtgccgcgtgtgatgcgggtcctcttgctgggcgatgtcgcaacgctgccactccgaaaggtattggcagtcgttggaacagccgaggccagcagtgagcaccccctgggagtggcggtgaccaagtattgcaaggaggaactcggaacggagactctgggatattgcactgatttccaagccgtgccgggctgcggaattggctgcaaggtttcgaacgtagaggggattctggcgcactcggagcgtcccctgtccgctcctgcttcacacctcaacgaagctggaagtttgccggcggagaaggatgccgtaccccagaccttcagcgtgctgatcggcaatcgtgagtggctccgccgcaacgggctgaccatctccagcgacgtcagcgatgccatgactgatcacgagatgaagggccagacggcgatccttgtggcgatcgatggtgtcctgtgtggtatgatcgcgattgcagatgccgttaaacaagaggcggccctcgccgtgcacacgttacagagcatgggtgtcgatgtggtgttaatcaccggggataatcgaaagacggccagggccattgcgacgcaagtgggcataaataaggtcttcgcagaggtcctaccgtcccataaggtcgcaaaggtacaggaactccaaaacaagggcaagaaagttgcgatggttggagatggcgtgaatgattcgccggcgctggcccaagcggatatgggagtggcgatcggaaccggaaccgatgtggccatcgaagcggctgacgtggtgctgattagaaatgacctgctggatgttgtagctagtatacacctaagtaagcgtaccgtgcgacgcatccgtataaatttggtgctcgcgttgatttacaacctggtgggaattccaatcgcggccggcgttttcatgcctatcggcattgtgttacaaccatggatgggcagtgcggcgatggctgcgtcctcggtctccgtggtcctgtcctcccttcagttgaaatgctataaaaaaccggaccttgaacgctacgaagctcaggcccacggccacatgaagcccctcacggcctcgcaagtgtcggttcatattggcatggacgatcgctggagggattccccgcgcgctacaccgtgggaccaggtgtcgtatgtcagccaggtgtctttgagctcgttgaccagcgataagcccagtcgccattcagcagccgcggatgacgatggggacaagtggtcacttctgctgaacggccgtgatgaagagcagtacatc

SEQ ID NO: 7485 - DNA, 4395 bp, synthetic construct
  misc_feature 1..4395: note = source = /note="Description of Artificial Sequence: Synthetic coding sequence"
  source 1..4395: mol_type = other DNA
atgccagagcaggagcggcagattaccgcccgagaaggcgcatcccgtaagatcttatccaagctgtctctcccaacccgggcttgggaacctgctatgaaaaagtctttcgcattcgacaatgtaggttacgagggggggttagatggcctgggcccatcatcacaggtggccaccagtaccgtccggattctggggatgacatgtcaatcatgtgtgaaatccatcgaggatagaatttcaaacctaaaggggatcatttctatgaaggtgtccctggaacagggaagtgctactgtaaaatacgtgcctagtgtcgtttgtctgcagcaggtttgccatcaaattggcgatatgggatttgaagcttctattgccgaggggaaagctgcttcctggcctagcaggagcctgccagcacaggaagctgttgtgaaactgagagtggaaggcatgacctgtcagtcatgcgtttcctccattgaaggaaaggtccgcaaactccagggagtggtgagggtgaaagtgtcactctccaatcaagaagctgtgatcacctatcagccctatctgatccagcctgaagacctccgcgaccacgtaaacgacatgggtttcgaggctgccatcaaatcaaaggtggctcccctcagtttaggccctattgacatcgagaggttacagtccaccaatcccaagcgacctctatcatccgcgaaccagaatttcaataatagcgagactctgggacaccagggctcacacgtggtcaccctgcaactgagaatagatggaatgcactgcaaatcttgtgtgctaaacatcgaagagaacattggacagctgctgggagtccagagtattcaagtctctttggagaataaaactgcgcaggttaagtatgacccgtcttgtacctcacctgtcgcactgcaaagagcgatcgaggcgttgcctccaggtaacttcaaggttagtctcccggacggcgccgaggggagcggaaccgatcaccggagtagctcatcccactcccccggtagtccgcccagaaaccaggttcagggcacctgcagcaccacacttatcgccatcgcaggcatgacgtgcgcatcttgtgtgcactctatcgagggaatgatctctcagctcgagggagtgcaacaaatctcagtgtccttggccgagggaaccgcgaccgtgttatacaatccaagcgttatatctcccgaggagctgcgcgcggccattgaggacatgggctttgaagcctctgtggtgagtgagtcatgttctactaatcctctaggcaatcactctgcgggtaactctatggtgcaaaccaccgatggtacccctacctccgtgcaagaggtggcgccacacactgggcgtttgccggccaaccatgcccccgacatactcgctaaaagcccccagagtactagggccgtggccccgcagaagtgtttcctgcaaatcaaggggatgacctgtgcttcgtgcgtcagcaacatagaacgcaacctgcagaaggaggccggagttctaagcgttcttgtcgctctgatggctggcaaagccgaaattaaatacgaccccgaggtgattcaaccactggagatcgcgcaattcatccaggacttggggtttgaagccgcagtcatggaagactatgctggctctgatggaaatatcgagttaacaattaccgggatgacttgtgcgtcttgcgttcacaatattgaatcaaagctgacccgcaccaacgggattacgtatgcttctgtggctttagccacgtccaaagctctagtaaagttcgacccagaaatcattggcccccgggacatcattaagattatcgaagagatcggatttcacgcctcgttggcgcagagaaatccaaatgcccaccacttggaccataaaatggagataaagcagtggaagaagtcattcctttgcagcctagtcttcggcatccccgtaatggcgctcatgatatacatgctgattcctagcaacgaacctcaccaatccatggttttggaccacaatattatccccggcctgagtattctgaacctgatcttcttcattctctgtacatttgtgcagctacttggaggttggtacttttacgtacaggcttacaagtctctcaggcataggtccgccaatatggatgtgttgatcgtacttgcaacatccatcgcctatgtgtattccctggtcattctggttgtagctgtggccgagaaagccgagagaagtcctgtgaccttcttcgacaccccccctatgttgttcgttttcatagcgctgggccgctggctggagcatctggctaaatccaaaacatcagaagcactggctaaactaatgtcacttcaggctaccgaggcgactgttgttactctgggagaagacaacctgatcattcgagaggagcaagttccgatggagctggttcagaggggagatatagtgaaagttgtgcccggaggcaaattcccggtcgacgggaaggttttggaaggcaatacaatggccgacgagagtctgatcaccggcgaggccatgccagtaacgaagaagcccggttctaccgtgattgcggggtctataaacgctcacggctcggtattaattaaggccacccatgtgggtaacgacaccacactggcacagatagtgaagttggtggaagaggcacaaatgagtaaggcccccatccagcaattggcagacagattttcgggatattttgtgccattcataataattatgtccaccctgactcttgtggtctggatagtgatcggcttcatcgacttcggggtggtgcagcgatactttccgaaccccaacaagcatattagtcaaacagaggtgataattcgcttcgcattccaaacatccatcacagttctgtgcatagcttgtccatgctcactcggcctggccactcctaccgctgtcatggtcggaaccggggttgcagctcagaacggtatcctcatcaaaggggggaagcccctggagatggctcacaagatcaagacagtgatgttcgacaaaacaggcaccatcactcacggggtacctagagtgatgcgggtgctactgctcggggacgtggccactctgccactgcgcaaagtgttggccgtcgtgggtacagctgaggctagtagtgagcaccctctgggagtagctgttacaaaatattgcaaggaagagcttggaaccgagacgctgggctactgtactgacttccaggcagtaccgggatgtggcattggttgcaaagtgtcaaacgtggaaggtattcttgcccactcggaacggcctctcagcgctccagcctctcacctcaacgaagcgggcagcctgccagcagagaaggatgctgttccacagacgttctccgttttgatcggcaaccgagagtggctacgtagaaacggcctgactatctcttctgatgtgtccgatgccatgaccgaccatgagatgaagggccagacagcaatcttggtggccatagacggcgtcctgtgtgggatgatcgcaatcgcagacgccgtgaagcaggaggccgcactggccgtgcatacactgcagagtatgggagtggatgtggtgctgatcacaggagataatagaaagaccgctcgtgccatcgctacacaggtgggcatcaacaaggtttttgccgaagtcctgcctagccataaagtggccaaagtgcaggagctccaaaacaagggaaagaaggttgccatggtgggcgacggcgtgaatgactcccctgccctggctcaagctgacatgggagtcgctattggaacaggcactgacgtggctattgaagcagctgatgtggtgctcatccggaacgatttgctcgacgttgtggcgtcgattcatcttagcaaacgcacggttcgcaggattagaattaacctcgtgctagctctgatatataatcttgtaggtatacccatcgccgctggcgttttcatgcccatcggaatcgtcctccaaccatggatgggttccgctgccatggccgcaagtagcgtcagcgtggtgctgtccagcctccagctcaaatgctacaagaaaccagatttggagaggtacgaggctcaggcgcatgggcatatgaagcccctcaccgccagtcaagtgagtgtgcacatcggcatggacgatcgctggcgggactcccccagggcaaccccatgggatcaggtttcgtacgttagccaggtcagcttatcttcacttacaagcgataagccgtctagacactcagccgccgctgatgacgacggggataaatggagcctccttctaaacgggcgtgacgaagagcagtacatc

SEQ ID NO: 7486 - DNA, 3858 bp, synthetic construct
  misc_feature 1..3858: note = source = /note="Description of Artificial Sequence: Synthetic coding sequence"
  source 1..3858: mol_type = other DNA
atggatttggaggccgctaagaacggaaccgcctggcgccctacttcagcggaaggagactttgagctgggcatctctagtaaacagaaaagaaagaaaaccaagaccgtcaagatgatcggtgtgctcactctgttcagatactcagactggcaggacaagttgttcatgtcgctgggcaccatcatggcgatcgcccacggatcaggactgccgctgatgatgatcgtctttggtgaaatgactgacaagtttgtggacactgccggcaatttctcgtttccggtgaacttctcgctgagcctgctgaatccgggaaaaatcctggaagaggaaatgaccagatacgcgtattactactccggactgggggcaggcgtgcttgtcgccgcctacatccaagtttcgttctggacgcttgcagctggtaggcaaattcggaagatccggcagaagttcttccacgccatcctccggcaagaaatcggatggttcgatatcaacgatactaccgagctgaacacccgccttaccgacgatatctccaaaatcagtgaggggatcggagataaggtgggcatgtttttccaggccgtcgccacctttttcgctggcttcattgtgggctttattcgggggtggaaactgacccttgtgatcatggcaatcagcccaatcctgggactgtccgccgcagtgtgggccaagatactctcggcttttagtgacaaagaattggccgcctacgctaaggcaggtgctgtggccgaggaagccctgggagccatcagaactgtgattgccttcgggggccagaacaaggaactggagcgataccaaaagcatctggaaaatgccaaggaaatcggaatcaagaaggcgatctcggccaacattagcatgggaattgcctttcttttgatttacgcctcctacgccctggcgttttggtacggcagcacgctcgtgatctccaaagaatacactatcggaaatgcaatgactgtgtttttctcaatactgatcggcgccttctccgtggggcaagcagcaccatgcattgacgcgttcgcaaacgcgcgcggagctgcctacgtcatttttgacatcattgataacaatcctaaaatcgactcgttctcagagcggggacacaagccggactcaatcaagggtaacctggagttcaatgacgtgcatttctcgtacccgagcagggccaacgttaagatccttaaggggctgaacctgaaggtgcagtcagggcagactgtggcactggtcggctcgagcggctgtggaaaatccactacggtccagctcattcagagactctatgacccggacgaaggaaccattaacatcgatggacaggacatccgcaatttcaatgtgaactacctgcgggagattataggcgtcgtgtcccaggaaccggtgctcttctcaaccaccattgccgagaacatatgctacggtcggggcaacgtcaccatggatgagatcaagaaagccgtcaaggaggcgaacgcttacgagtttatcatgaaactgccgcagaagtttgatactctggttggagaacggggtgcacaactctctggaggacagaaacaacgtatcgccatcgcacgcgcgctggtccggaatccgaagattctcctcctggacgaagcgacctccgctctcgataccgagtcagaagcggaggtccaagccgcgctggacaaggctagagaggggcgcactacgatcgtcatcgctcatcgtctctcgaccgtgcggaatgcagacgtgatcgccggattcgaggatggagtgatcgtcgaacagggatcgcactcggagctgatgaagaaagagggagtgtacttcaagttggtcaatatgcagacttcaggttcccaaattcagagcgaagaatttgaactgaatgatgaaaaggcggccacccgcatggcgcccaacgggtggaaatcacgactgttcaggcactcgacccagaaaaacctgaagaacagccagatgtgtcagaaatcgttggacgtggaaacggacgggctggaggcaaatgttccaccggtatccttcctgaaggtgctgaagctgaacaagactgaatggccttactttgtcgtcgggacggtgtgcgctatcgctaacggagggctgcagccagcgttcagcgtgatcttctccgaaatcatcgcgatcttcggccctggcgatgacgcggtgaagcaacaaaagtgcaacattttcagcctgatcttcctgttcttgggaatcatctcttttttcactttcttcctgcagggtttcaccttcggcaaggcgggagaaattctcacccgtcgccttaggtcgatggcgttcaaagctatgttgcggcaagacatgagttggttcgacgaccacaagaattccaccggcgccctgtccactcgcctggccacggatgctgcacaagtgcaaggcgccaccgggactcgcctcgcccttatcgcacagaacatcgccaatcttggaactggaatcatcatctccttcatatacggatggcaactgaccctcctccttctcgcagtggtccctatcatcgcagtgtctggaatcgtcgaaatgaaactgttggcgggaaacgctaagagagacaagaaagagctggaagccgctggcaagattgccaccgaagccatagagaatattcggaccgtggtgtcgctcacccaagagcgcaagttcgagtcgatgtacgtggaaaagctctacggaccctatcggaactccgtgcagaaagcccacatctacggaatcaccttctcaatctcgcaagccttcatgtacttttcttacgctggttgcttccgcttcggcgcctacttgatcgtgaacggtcatatgagatttcgagatgttatcctcgtgttttcggcgatcgtgttcggagccgttgcattgggccacgcgtcatcctttgccccagattacgccaaagcgaagctgtcggctgcgcatctgttcatgttgtttgagcgccaaccactcatcgacagctactccgaggaaggtctgaagccggacaagttcgaagggaacatcactttcaacgaagtggtgttcaactatcccactcgcgctaacgtgccggtgctgcaaggtctgtcacttgaggtcaaaaagggacaaacccttgccctcgtaggaagctcaggttgcgggaagagcaccgtagtgcagttgctcgagcgattctacgacccactcgcaggtacggtctttgtggacttcgggttccagctccttgatggccaagaagcaaaaaagctcaatgtccagtggctgcgcgcccagctcggaattgtttcccaggaaccaatcctcttcgactgctcgattgcggagaatatcgcctacggagataatagcagagtggtttcccaggatgagatcgtgagcgcagctaaggccgctaacatccacccattcatcgagactctgccccacaagtacgaaactcgggtcggggacaagggaacccagctgtcagggggacagaagcagcggattgcgatcgctagagcgctgatcaggcagccccagatcctgttgctcgatgaggcaacgtccgcgttggacactgaaagcgagaaggtggtccaggaagcgctcgacaaagcccgcgaaggacgtacttgtatcgtgatcgcgcacagactgtcaactatccaaaacgctgatcttatcgtcgtgttccaaaatggccgcgtcaaggaacatggaacccatcagcagcttctcgcacagaagggcatctacttctccatggtcagcgtgcaagccggtactcagaacctg

SEQ ID NO: 7487 - DNA, 3858 bp, synthetic construct
  misc_feature 1..3858: note = source = /note="Description of Artificial Sequence: Synthetic coding sequence"
  source 1..3858: mol_type = other DNA
atggacctggaagcagcaaagaacggaaccgcatggcgccctacctcagccgaaggcgacttcgaactgggcatctctagcaaacagaaaaggaaaaagactaagactgtcaagatgatcggtgtgctgacgctcttccgatacagcgattggcaggacaaactgttcatgagcctcggtacgatcatggcgatcgcacacggctcaggactccctttgatgatgatcgtgttcggagaaatgactgataagttcgtggacacggcggggaacttttcattcccagtcaacttctcactgtccttgctgaatccgggaaagatcctggaagaagagatgacccgctacgcgtactactactccggattgggagcaggagtgttggttgctgcctacatccaagtctcgttctggaccctcgcagccggacgccagatccgcaagatccgccaaaagtttttccacgccattcttcggcaggagatcggatggttcgatatcaatgatactaccgaactgaatacccgcctgaccgatgacatctcgaagatctccgagggtattggggacaaagtgggcatgtttttccaagccgtggccacttttttcgccggctttattgtgggattcatccgcggttggaagctcacgctggtgatcatggccatctcgccgatcctggggctttcagcggctgtctgggcgaaaatccttagcgcgttctccgataaggaactggccgcctacgcaaaagcgggcgccgtcgcggaagaagcactcggcgccatcagaactgtgatcgccttcggaggacagaataaggagcttgaacgctaccagaaacacctcgaaaacgcaaaggaaatcggcatcaagaaggcgatcagtgcgaacatcagcatggggatcgcgtttcttctcatctacgctagctacgctttggccttttggtacggctccactttggtgatttcaaaggagtatactatcgggaatgctatgaccgtctttttctccatcttgattggggcgttctccgtgggccaggctgccccctgcatcgacgctttcgcgaacgcccggggcgctgcgtatgtgatttttgatatcatcgacaataatcccaagatcgactcgttttcagaacgggggcacaaaccagattcgattaagggcaacctggaattcaatgacgtccatttttcgtatccttcgcgcgccaacgtgaagatccttaagggccttaacctcaaggtccagtcaggccagaccgtggcgcttgtgggatcctcaggttgcggcaagtcgactaccgtgcaacttattcaacggctgtacgatccggatgagggtacgatcaacatcgatggccaggatattagaaactttaacgttaactacttgcgggagatcattggcgtggtgtcccaggaaccggtcttgttcagcaccactattgcagagaacatctgctacgggcggggaaacgtgaccatggacgagattaagaaggccgtgaaagaggccaatgcatacgaattcatcatgaagctccctcagaagttcgacaccctcgtcggggaaagaggagcccagctgtctggcggacaaaagcaacgcatcgccatcgcacgcgccctggtgcggaacccaaaaatcctgctcctggacgaagccacgagcgcgctggacaccgagagcgaagcagaggtgcaggctgcgctggacaaggcgcgggagggaagaacgactattgtgatcgctcacaggctgtcaactgtgcgcaacgccgacgtgattgctggcttcgaagatggtgtgatagttgaacaaggctctcattcagaactgatgaagaaggaaggagtttactttaaactcgtgaacatgcagacctcgggctcacagatccagtccgaggaattcgaactgaacgacgaaaaagcggcgacccggatggccccgaacggttggaagtcgagactgtttcggcactcaacccagaagaatctgaagaacagccaaatgtgccaaaagagcctcgacgtagaaaccgacggactggaagcaaatgtccctccggtgtccttcctgaaggttctgaaacttaacaagactgagtggccatactttgtggtgggtacggtgtgcgcgatcgccaacggcggactccagcctgccttcagcgttatcttttccgagattatcgccatctttggaccgggtgacgatgccgtcaaacagcaaaagtgcaacatcttctccctcattttcctgtttctgggtatcatcagcttcttcacttttttcctgcaaggattcacttttggaaaggccggggagatcctcacccggcggcttaggtccatggctttcaaagcaatgcttagacaggatatgtcatggttcgatgaccacaagaattccactggcgcgctgtccactagactggccaccgatgccgcacaagtgcaaggcgccaccggaactcggttggccctgatcgcccagaatatcgctaatctgggaactggcattatcatctcgttcatctacggatggcaactgaccctgctgctgctggcggttgtcccgatcatcgcggtcagcggcatcgtcgagatgaagctgcttgctgggaacgctaagcgggacaaaaaggaactggaggcggcaggcaagattgctaccgaagctattgaaaacatccgaactgtggtttccctgacccaggaacgtaagttcgagtccatgtacgtggagaagctctacggcccataccgcaactcagtccaaaaggcccatatctatggaattaccttcagcatcagccaggccttcatgtactttagctacgccggttgcttccggttcggagcctacttgattgtcaacggacacatgagattccgggatgtgatcctggtctttagcgctatcgtgttcggcgccgtggccctcggacatgcctcatcatttgcaccagactacgccaaagccaagctctcggctgcccacctgttcatgctgttcgaacggcagccgctcatcgatagctactcagaagaaggcctgaaaccggataagttcgagggaaacatcaccttcaacgaagtggtgttcaattacccgactcgggccaacgtgccggtgctccagggactttccctcgaagtgaagaagggacagaccctcgccctggtcggcagcagcggatgcggaaagtcgaccgtcgtgcaactccttgagagattctacgacccgctggcaggaactgtgtttgtggactttggattccagctcctggacggccaggaagcgaagaagctgaatgtgcagtggctgcgcgcacagcttgggatcgtgtcccaagaaccgatcctgttcgattgctccatcgcggagaacatcgcctacggcgataattcccgggtggtgtcgcaagatgagatcgtgtctgcagctaaggccgcgaacatccacccgttcatcgaaactctgccgcataagtatgaaactagggtgggcgacaaggggacccagctgtcagggggccagaagcagcggattgctatcgcacgggccctcatccgacaaccgcaaattcttctgctcgacgaagcgacttccgccctggataccgagtcggaaaaggtggtgcaggaggcgctggataaagcgagagagggtagaacctgcatcgtcatcgcccataggttgtcgactattcaaaatgcggatctcatcgtggttttccagaacggcagggtgaaggaacacggaactcaccagcagctcttggcgcaaaaaggcatctacttctcaatggtatctgtgcaggcaggaactcagaacctg

SEQ ID NO: 7488 - DNA, 3858 bp, synthetic construct
  misc_feature 1..3858: note = source = /note="Description of Artificial Sequence: Synthetic coding sequence"
  source 1..3858: mol_type = other DNA
atggaccttgaggcagccaaaaatggaaccgcgtggcgtcccacctccgcagagggagacttcgaactgggaatttcctccaagcagaagcgcaagaaaaccaagacggtcaaaatgattggagtgctcaccctgtttagatacagcgattggcaagataaactgttcatgagcctcggcactatcatggcaattgcgcatggctcggggcttcctctgatgatgatcgtattcggcgaaatgactgataagttcgtggatactgcgggaaacttttcatttcccgtcaacttttccctctcccttctcaacccagggaaaattctggaagaagaaatgacgcgttacgcctactactacagcggactgggcgcgggcgtcctggtcgcagcatacattcaagtctcattttggactctcgccgcaggaaggcagattaggaaaatccggcagaagtttttccatgccatacttagacaagaaattggatggtttgatatcaatgacactactgagttgaatactcgcctgaccgacgacatttcaaagatctccgaaggtataggagataaagtcggaatgttcttccaagcagtggcgacgttttttgcaggcttcatcgtggggttcattcggggatggaaactgacccttgtcattatggcaatttcgcccattcttggactctcggccgccgtctgggcaaagattttgtccgcattttccgataaggaactggcagcctacgcaaaggccggagccgttgccgaagaagccctcggtgcgatccggaccgtcatcgcgtttggaggacaaaacaaggagctggagcgttaccagaaacacctggagaacgcaaaagaaattgggatcaaaaaagcaatatcggcaaatatcagcatggggatcgcctttcttctgatctatgcctcctacgcactggcattctggtacggttccaccctggtgatttccaaagagtacaccattggaaatgcaatgactgtgtttttcagtatcctcattggagcattttccgtgggacaagcagccccatgcatcgacgcgtttgcgaacgctagaggggcagcatacgtgatctttgacatcatcgacaacaatcccaaaattgattcctttagcgaacgggggcataagcccgacagcattaaggggaatttggaattcaacgatgtgcatttttcttacccaagcagggcgaacgtgaaaattctgaagggtctgaatctcaaggtgcagtcaggtcaaactgtggctctcgttggctcgtctggctgcggtaaatcgactactgtgcaactgatccaaagactctacgatcctgatgaaggaactataaacatcgacggtcaagatattagaaactttaatgtcaattaccttagggagattatcggagtggtgtctcaggagccagtgctgttttccaccactatagctgaaaacatttgctacggtcgtggcaacgtgactatggatgagatcaagaaagcagtgaaggaggcaaacgcgtacgaattcatcatgaaacttccacagaagttcgacactcttgtgggagagcggggagcccaactttcggggggacaaaagcagcggattgccatcgcaagggcacttgtcaggaatccaaagattcttcttcttgacgaagcaactagcgcgcttgataccgaatcggaagcagaggttcaagcagcacttgataaggcacgagagggacggaccaccattgtcatcgcccacagactttccactgtccgcaatgccgacgtgattgcagggtttgaagatggggtcatagtggagcaggggagccatagcgaactgatgaagaaggaaggtgtgtactttaaactcgtcaacatgcagaccagcgggagccagattcaaagcgaagaatttgaactgaacgatgagaaggccgcaaccaggatggcccctaatggatggaaatcgagacttttcagacattccacccaaaagaatcttaagaactcgcagatgtgccaaaaatctctggacgtcgaaactgacggcctcgaagcaaatgtccctccagtctcgttccttaaggtgcttaaactgaacaagaccgaatggccatacttcgtggtcgggaccgtgtgcgcaatcgctaatgggggcctgcaacctgcattctcagtgattttctcagagattatagcaatcttcggtccaggcgatgatgccgtcaagcagcaaaaatgtaacatctttagcctgatctttcttttcctgggcatcattagctttttcaccttttttctccaaggatttacttttggcaaggcgggagagatacttacccgccgccttcggtccatggcctttaaagccatgctgagacaggatatgtcgtggtttgatgatcataagaactcgacgggtgcactctcgactagactcgcaacggatgcagcccaagtgcagggcgccactggaactcggttggcccttatagcgcaaaacattgcgaacctgggaactggaattatcatttcgttcatatacggatggcagcttactctgctgctgcttgcagtcgtgcccattatcgcagtctcgggcattgtggagatgaaacttctggcgggcaacgcgaagcgagataagaaggaacttgaggcagctgggaagatcgcaaccgaagcaatagaaaacattcggactgtggtcagtctgacccaggaacgcaagtttgagtccatgtacgtcgaaaagttgtacggaccctacagaaactccgtccaaaaggcccatatctacggaataaccttttccatttcacaggcgtttatgtacttttcctacgcaggatgttttagatttggagcatacctgattgtcaacggtcatatgagatttagggatgttattctggtgttttcagccatcgtctttggcgccgtggccctcggccatgcctcatcattcgcccctgattacgctaaggcaaaactttcagctgcacatctgttcatgctgttcgaacggcaacccctgatagactcctactccgaggaaggtttgaagcccgataagtttgagggtaatatcacttttaacgaggtcgtattcaactacccaacccgcgcaaacgttccagtgctgcagggtcttagccttgaagtgaaaaagggacagacccttgcactggtcggatcttctggttgtggcaaatcgactgtggtgcaactccttgaaagattctacgaccctcttgcaggaactgtgttcgtggattttgggtttcagctgctggatggccaggaagccaagaagctgaatgtgcaatggctgcgtgcgcagctgggcatcgtgtcccaagaacctattcttttcgattgcagcatagcagagaatatcgcatacggtgataactcgagagtggtgagccaagatgaaatagtgtccgccgctaaggcagccaatattcatcctttcattgaaactttgcctcataagtacgagactcgcgtgggtgataagggtactcagctgtccggtggccaaaagcaacgcatcgcgatagccagagcacttattagacagccccagattctgctgctggatgaggcaacctcagcattggacacggaatcagagaaggtcgtccaggaggcattggacaaggcgcgcgagggaaggacctgtatcgtgattgcacatcgactcagcactattcaaaacgcagatctcattgtggtctttcagaacggtagggtgaaagaacacggcacccaccaacagcttctcgcacaaaagggaatctactttagcatggtgtcggtgcaagcaggtacccaaaacctt

SEQ ID NO: 7489 - DNA, 3858 bp, synthetic construct
  misc_feature 1..3858: note = source = /note="Description of Artificial Sequence: Synthetic coding sequence"
  source 1..3858: mol_type = other DNA
atggacctggaagcagccaagaatggcactgcatggaggcccacgtcggcagagggagattttgaactgggaatttcctcaaagcagaaaagaaaaaagaccaagaccgtgaagatgattggagtgcttacccttttccgctactcagattggcaggacaagctgttcatgtcgttgggaaccattatggctattgcacatggtagcggattgccacttatgatgatcgtgtttggcgaaatgaccgacaaattcgtcgatactgcagggaacttttccttcccagtcaatttctccctgagccttcttaacccaggcaagattttggaagaagagatgactagatacgcttactactactcggggcttggagctggagtccttgtggcagcatacatacaggtgtccttttggaccctggccgcaggtagacagataagaaagattagacaaaagttctttcatgccattttgagacaggagattggttggttcgatatcaatgacaccactgaattgaacacgcggcttaccgatgacatttcaaagattagcgaaggaattggtgataaggtcggaatgttctttcaggcagtggccaccttctttgccggttttatcgtcggcttcattcgaggatggaagctgacccttgtgatcatggcaatttcgcccattctggggcttagcgccgcagtctgggcaaaaatcctgtcagcctttagcgataaagagctcgccgcgtacgctaaggcaggagccgtcgcagaagaggcacttggagccattagaacggtgatcgctttcggcggacaaaacaaagaactggagagataccaaaagcaccttgaaaacgcaaaggaaattggaatcaaaaaggcaatttccgcaaatatctcgatggggattgcatttcttctgatttacgcatcatacgcacttgcattctggtacggatcaacgctggttatatccaaggagtacacgattggcaatgcaatgaccgtctttttcagcattcttatcggggcattcagcgtcggacaagctgcaccatgtatcgatgcattcgcgaacgcccggggcgcagcttacgtgatctttgacattattgataacaacccaaagattgactcgttttccgaacgtggacataagcccgattcgatcaaaggcaacctggagtttaatgatgtgcatttctcgtatccatcgcgggcaaacgtgaagatcctcaagggactgaacctgaaggtgcaatcgggtcaaaccgtggcactggtgggaagctcaggatgtggtaaatccaccactgtgcagctgatccagcgactttacgatccagatgagggaaccattaacattgatggtcaagacattagaaactttaatgttaactacttgcgggaaatcattggagtggtgtcacaggaaccagtcctcttttcaaccaccattgccgaaaacatttgctacggtcgcggtaacgtgactatggatgagattaagaaggcagttaaggaagcaaacgcatacgagttcataatgaagttgccacagaagttcgacaccctcgtaggggaacgcggggcacaactgtccggtggacaaaagcagaggattgccattgcgcgcgccctggtccgaaaccccaagattctgctgctggatgaggcaacgagcgcacttgataccgagtcagaagcagaagtgcaagcggcccttgacaaggcacgtgagggtcgcactactattgtcattgcgcataggcttagcactgtgcgcaacgccgatgtgattgcgggattcgaggacggagtgattgtggagcaggggtcgcactcggaactcatgaaaaaagaaggagtctactttaaacttgtgaatatgcaaaccagcggatcccagatacagagcgaagagtttgagcttaatgatgagaaggctgcaactcgtatggccccaaatggatggaagtcacgtctttttaggcactcgactcagaagaacctgaagaattcacaaatgtgtcaaaaatccctggacgtggaaaccgacggccttgaggcgaacgtgccgccagtgagctttcttaaggtgctcaaacttaacaaaacggagtggccttactttgtcgtgggtaccgtgtgcgcaattgcaaatgggggcctccaaccagccttctcagtgatcttctccgaaatcatagcaattttcgggcctggagacgacgccgtcaaacaacaaaagtgtaatatcttctccctcatttttcttttcctgggtataatctccttcttcaccttttttctccagggattcacttttggtaaagcaggcgagattttgaccaggcgacttcgctccatggcatttaaggctatgctgagacaagatatgagctggtttgatgaccacaaaaacagcactggagccctcagcacccgtctggcaactgatgccgcacaagtgcagggtgcaaccgggactagacttgcactcatcgcgcagaacattgcaaatctcggtaccggaattatcatctcgtttatctacggttggcaactgacccttctcctgctggcagtggtgcctatcattgccgtgtcaggaattgtggagatgaagttgcttgcaggaaatgctaagcgagataagaaggaactggaagcggcaggcaagatcgccaccgaagcgatagaaaacatccgtaccgtcgtgtccctcacccaagaacggaagtttgaatcgatgtacgtggaaaagctgtacggtccttacagaaactccgtgcagaaggcacacatatatgggatcactttttcaatctcgcaggccttcatgtacttttcgtacgcaggctgtttccgttttggagcgtacctgattgtgaatgggcacatgcggttcagggatgtcattcttgtgttctccgccattgtctttggtgcagtggcactgggtcacgcatcctcatttgcccccgactacgcaaaagcgaaattgagcgctgcacacctctttatgctctttgaacggcagcctctgattgattcctattcagaggagggactgaagcctgacaagtttgagggcaacattacttttaacgaggtggtgttcaactacccaacccgcgcaaatgtgcccgttctgcaaggcctttcgctcgaagtgaagaaagggcagacgctggcactcgtgggatccagcggatgtggaaaatctactgtggtgcaactgcttgaaagattctacgacccgcttgctggaaccgtgtttgtggactttggctttcaactcctggacgggcaagaagcaaagaaactgaacgtgcaatggctccgagcccaactgggtatagtgtcccaagaacctatcctgtttgactgttcgattgcagagaacatagcatacggagataactcaagggtggtgtcccaggatgaaattgtctccgcagccaaagcagcaaacattcatccgttcattgaaaccctcccacataagtatgagactagggtgggcgataaagggactcaattgtcggggggtcaaaaacagcgtattgccattgctcgggcacttatcagacaaccccagatcttgctcttggacgaggccacctcggcgctggatactgaatcggagaaggtcgtgcaagaagcattggacaaggctcgcgaaggacgcacgtgcatagtcatcgcccataggctctccaccatccagaacgcggatctcatcgtcgtgtttcaaaacggaagagtcaaggaacatgggactcatcagcaactgttggcccagaagggaatttacttctcgatggtgtctgtgcaggcaggtacgcagaatctc

SEQ ID NO: 7490 - DNA, 3858 bp, synthetic construct
  misc_feature 1..3858: note = source = /note="Description of Artificial Sequence: Synthetic coding sequence"
  source 1..3858: mol_type = other DNA
atggacctggaagcagccaagaacggaaccgcatggcggccaacttctgcagagggagacttcgagctgggaatttcgtcgaagcagaagcggaagaaaactaagactgtcaagatgatcggagtgctcaccctgttccgctacagcgactggcaagacaagctcttcatgtccctgggtactatcatggctatcgcccacggaagcggtttgccgctcatgatgatcgtgtttggggaaatgaccgacaagttcgtggataccgccggaaacttctcgttcccggtgaacttctcgctctcgctcctgaatcctggaaagattctggaagaagagatgaccaggtacgcatactactactcgggtctgggcgcaggggtgctggtggccgcatatatccaggtttccttctggaccctcgccgcaggccgacagatcaggaagatccggcagaaattctttcacgcaatccttcggcaagaaatcggatggttcgacattaatgacacgactgaactgaacacccgcctgaccgacgacatcagcaagattagcgagggcatcggggataaggtgggtatgtttttccaagcggtggccacgtttttcgccggattcatcgtggggtttatccgaggctggaaacttactctggtgatcatggccatttcaccaattttgggactgagcgccgccgtgtgggctaagattctgtcagcattcagtgacaaagagcttgctgcgtacgccaaggccggagctgtggctgaagaagctctgggtgcaatcaggactgtcatcgccttcggaggacagaacaaggaattggaacgctaccagaagcacctcgagaacgccaaggaaattggcatcaagaaggccatcagcgctaacatcagcatgggaatcgctttcctgttgatctatgcctcctacgctctggctttctggtacggaagcacgctggtcatcagcaaggaatacactatcggaaacgcaatgaccgtgttcttcagcattttgatcggcgccttcagcgtgggccaggccgccccatgcatagatgcatttgccaacgcgcggggggcagcatacgtcatcttcgatatcattgacaataatccgaagattgactcattttcggaacggggccacaagcccgactcgatcaaggggaatctggagttcaatgacgtgcacttctcatatccatcgagggccaatgtgaagattctgaagggactgaatctcaaggtccagtcgggacagaccgtcgccctggtcggatcgtctgggtgcggaaaatcaactaccgtccaactgatccaacgcctgtacgaccctgatgaaggcactatcaatatcgatggtcaagatatccgcaatttcaatgtcaattacctgcgggagatcatcggggtggtgtcccaggaacccgtgctcttcagtaccactatcgcggaaaacatctgctacggacgcggcaacgtcaccatggacgagatcaagaaggcagtgaaagaagcgaacgcctacgaattcatcatgaaactgccgcagaagtttgacacgctggtcggggagcggggagcgcagctgtcgggcggacaaaagcagaggatcgcgattgctcgggctctcgtgcgcaaccccaaaatcttgcttctcgacgaggcgacttcggcgttggacactgaatccgaggcggaagtccaggccgcgctcgacaaggctagggaaggacggaccaccatcgtcatcgcccacagactctccactgtgcgcaacgcggatgtgatcgccggcttcgaagatggcgtcatcgtggagcaggggtcccacagcgagctgatgaagaaggagggagtctactttaagctggtcaacatgcagacctcgggcagccaaattcagagcgaagaattcgagctcaatgacgaaaaagcggccaccagaatggccccgaacggttggaagagccgcttgttcagacactctacgcagaagaatctgaaaaactcgcagatgtgccaaaagtcgctggacgtcgaaaccgacggactcgaggcgaatgtcccgccagtgtcctttctcaaggtcctgaaactgaacaagaccgaatggccttacttcgttgtggggactgtctgcgccattgccaacggcggcctgcagccagctttttccgtgatcttctctgaaatcatcgcgatctttggcccaggagatgacgccgtcaagcagcaaaaatgcaacatctttagcctcatctttctgttcctgggaattatctcctttttcacctttttcctccagggattcactttcggcaaggcaggcgagatccttacccggcggctgcgcagcatggccttcaaagcaatgctccggcaagatatgagctggttcgacgaccataagaacagtacgggtgcactcagcactcgcctggccaccgatgcggcccaggtgcaaggcgccaccggaactcgcctggcgctgatcgcccagaacatcgcgaacctgggtaccggtatcatcatcagtttcatctacgggtggcaactcaccctgctgctgctggctgtagtgccgatcatcgcggtgtcgggcatcgtcgaaatgaagctgctggcgggaaatgcgaagagagataagaaggaactggaagctgcgggcaaaatcgctaccgaggcaattgagaatatccgcaccgtggtgtccctgactcaagaacgcaagttcgagagcatgtacgttgaaaagttgtacggaccatacaggaattcggtgcaaaaggcccacatctacgggatcaccttctccatcagccaggcattcatgtacttctcatacgccggatgcttccggttcggggcgtatcttatcgtgaacggccatatgcgctttcgggacgtgatcctggtgttctcggcgatcgtgttcggagcagtcgcccttggacacgcgtcgtccttcgcgccggattacgctaaagcgaagctctccgccgcccatctcttcatgctgttcgagagacagccactgatcgactcgtactccgaggaagggcttaagccggacaagtttgagggaaacatcacgttcaacgaagtggtgttcaattacccaaccagagcgaacgtgccagtcctgcaagggttgtcccttgaagtgaagaagggacaaaccctggccctcgtgggatcgtcaggatgcgggaaatcgaccgtggtccagctgttggaacggttctacgatcctctggctggcaccgtgtttgtggattttggatttcaacttttggacggacaagaagccaagaaactgaacgtgcagtggcttcgggcgcagctcggaatcgtcagccaggaaccgatcttgtttgattgctcgatcgcggagaatatcgcatacggagacaactcgcgcgtcgtgtcccaggatgaaatcgtgtcggccgcgaaggccgccaatatacacccctttatcgagactctgccgcacaagtacgaaactcgcgtgggcgacaaggggacccagctttccgggggacagaagcagcgcatcgccatcgcccgcgccttgatccgacaaccgcagatcctgctcttggatgaagccacctcagcactggatactgaatcagaaaaggtggtccaagaagcgctggacaaggccagagagggacggacttgcattgtgatcgctcatagattgtcaactatccagaacgcggacttgattgttgtgttccagaatgggcgggtcaaagagcacgggacccaccagcagctcctggcgcagaagggaatctatttctctatggtgtccgtccaagcagggactcagaacctc

SEQ ID NO: 7491 - DNA, 3858 bp, synthetic construct
  misc_feature 1..3858: note = source = /note="Description of Artificial Sequence: Synthetic coding sequence"
  source 1..3858: mol_type = other DNA
atggacctggaagccgctaaaaatgggacagcatggagacccaccagtgctgagggagacttcgaacttgggattagtagcaagcagaagaggaagaagaccaagacggtgaagatgattggcgttctaacactgttcaggtatagcgactggcaagataagttgttcatgagccttgggacaatcatggctattgcccacggcagcggactcccactgatgatgattgttttcggggaaatgaccgacaaattcgtggacaccgccggcaattttagctttccagtgaacttctctctctctctgctaaacccgggtaaaatccttgaggaggagatgacccgctatgcctactattacagcgggcttggggctggagttttagtggccgcatacatccaagtatcgttctggacactggccgccggcaggcagattcgcaaaattaggcagaagttctttcatgccatcttgcgccaagaaattggctggttcgatatcaacgacaccactgaactcaatacgcgtctcacagatgacatcagcaaaatctccgagggaattggcgataaggtcggaatgttctttcaggccgtcgcaactttcttcgccggattcatagttggattcattagaggctggaagctaaccctggttataatggctatatctcctatcctgggactttccgccgcggtatgggcaaagattctgtccgcgttctccgacaaggagcttgcagcgtatgctaaagcaggggccgtggctgaggaagccctgggtgcaatccgcacggttatagccttcggcggtcaaaacaaggaattggagcggtaccaaaagcacctggaaaacgccaaggaaatcggaataaagaaggccattagcgctaatatctcaatgggtatcgctttcctactgatctatgccagttacgctctcgccttctggtatggcagcaccctggtgatctctaaggagtacacaatagggaatgccatgactgtgttcttttcaatcctgattggagcgtttagcgtgggccaggccgccccttgcatcgatgcatttgccaatgccagaggagcagcctatgtcatcttcgacatcattgacaacaatcccaaaatagactccttttccgaaagggggcacaagccggattcgatcaagggcaatctggagttcaatgacgttcatttttcatacccctcaagagcaaacgtaaaaatcctcaagggtctcaatcttaaggtacagtcgggccagacagttgccctggtaggttcttcaggctgtggcaagagtacgacagtgcagctcatccagcggctctacgatccagatgaaggtactatcaatatagacgggcaggacatccggaatttcaatgttaattacctgcgcgaaattatcggagttgtgtcacaggagcccgtactgtttagtacaactatcgccgagaatatctgctacggccgcggaaatgttacgatggacgagatcaagaaggcagtcaaggaagctaatgcctacgaattcataatgaagctgccacagaaatttgacactctcgtgggtgagaggggggcccagctgtcagggggacagaaacagaggatcgcaatcgcacgtgcgttagtccggaaccctaaaatccttcttctggatgaggcaacctctgctctagacacagaatctgaggcggaagttcaagcagccttggacaaagcccgtgaggggcgtactacgattgtgatagcccataggctgtctacagtacgtaatgctgatgtcattgccggatttgaagatggcgtgatcgtcgaacagggatcgcactctgagttgatgaagaaagaaggcgtatatttcaagttagtgaatatgcagacaagcggaagccagatccaaagcgaagagttcgagctcaatgatgaaaaagccgctacacgcatggctcccaatggatggaaatcccggctcttcaggcactccacacaaaagaatctgaagaatagccaaatgtgccagaagtctctcgatgtggagactgatggtctcgaggcgaatgtccctcccgtatcctttctgaaagttctaaaactgaataagactgagtggccctacttcgtggtgggaaccgtatgtgcgatcgccaatggcggactgcagccagctttctctgtcatcttcagcgagatcatcgcgatcttcggacccggtgacgacgccgtgaagcaacagaagtgcaacatcttctctctgatatttctgttcctaggtattattagttttttcacattctttcttcaggggtttacctttgggaaggccggcgagattttgactagacgcctccgctccatggcgttcaaagctatgctgcgacaagacatgagctggttcgacgaccataagaatagtaccggcgccctgagcacccgccttgccacggatgcagctcaggtgcaaggcgccacgggcacacggctggctctgatcgcccaaaatatcgccaacttgggaactggtataatcatttcctttatttacggatggcagctaacattacttctccttgctgtggtcccaataattgctgtgtccgggatcgtggagatgaagcttctagctggcaacgctaagcgcgacaagaaggagttggaggccgcggggaaaatcgcgactgaagctattgagaatatcagaacagttgtatcactgacccaggagcggaaattcgaatcaatgtatgtcgaaaaactgtacggcccctaccgaaactctgtgcaaaaagcccacatctacggaatcactttctcaatctctcaggcctttatgtatttttcctacgccggatgcttcaggttcggcgcgtatctaatagtcaacgggcatatgcgattcagagacgtgatattagtcttctcggccattgtctttggcgcggtggcactaggacatgctagcagcttcgcccctgactacgctaaggccaaactcagcgccgcacacctttttatgttgtttgagagacaaccactaattgattcatacagcgaagaaggtctgaaaccagacaagttcgaggggaacatcacctttaatgaagtggtgtttaactatccaaccagggccaatgtgcctgtgctgcagggtctgtcactagaggtgaaaaaaggccagactctcgccctcgtgggcagcagcggatgcggaaagtccacagtggtgcaactgctcgagaggttttatgatcccttggcaggtactgtcttcgtcgacttcggattccaattactcgatggacaggaggctaagaaactcaatgttcagtggctccgggcccaacttggtatcgtgtcccaggaaccgatcctgtttgactgcagcatcgctgaaaacattgcctacggggacaactcgagggtagtgtcacaagacgagattgtgagtgccgcgaaagccgccaacatacacccttttatagagacgctaccgcacaaatatgaaactcgcgtgggcgacaagggaacccagctgtctgggggccagaaacagaggattgccatagctcgcgccctcataaggcagcctcagatcctgctgttagacgaggccacctccgccctggatacagaatcagaaaaggtagtgcaggaagccctagacaaagcacgagaagggcggacctgcattgtgatagcccacaggctgagtaccatccagaacgctgacctgatagttgtcttccaaaatggaagagttaaagaacacggtacccaccagcagctgctcgctcaaaaaggcatctactttagcatggtgtctgtgcaggctggcactcagaacctt

SEQ ID NO: 7492 - DNA, 3858 bp, synthetic construct
  misc_feature 1..3858: note = source = /note="Description of Artificial Sequence: Synthetic coding sequence"
  source 1..3858: mol_type = other DNA
atggacctcgaggctgccaagaatggcactgcctggcggcccacgtcagcggaaggcgatttcgagctgggtatttcatctaaacagaagcgcaaaaagacaaagacagtgaagatgattggcgtgctgaccctttttcggtattcggactggcaagataaactgttcatgtcactagggactataatggctatagcgcatggctccggtctccctcttatgatgatagtcttcggggaaatgaccgataagttcgtcgatacagcggggaatttttcgttccccgttaatttctcactgagtctccttaatcctgggaagattctcgaagaagagatgacccgctacgcgtattattattccggtctgggggcgggagtacttgtggcagcctatatacaggtcagcttttggaccttggcagccggtcggcagatccggaagatacgccagaagttcttccacgccatacttagacaggaaatcgggtggtttgatattaacgacacgaccgagctcaacaccagattgacggatgatatctctaagatctctgagggcattggcgataaggtgggaatgttcttccaagccgtggcaactttttttgccggcttcatcgtgggttttattcgcggatggaaactgacgctcgttataatggcgataagcccaatcctgggactctcggcagccgtgtgggctaaaattctcagtgccttttccgataaggagctggcggcatatgccaaagccggggctgtagcggaggaggcactgggagccattaggacggttatcgctttcggcggccaaaacaaagagctggaaagataccaaaaacacctggaaaatgccaaggaaatcggaatcaaaaaagccatttccgctaacatctcaatgggcatcgctttcttactgatttatgccagttacgctttggccttttggtacggcagcacactagtaatctctaaggaatacacaatcggcaatgcaatgactgtcttttttagcattctcataggagccttcagcgtcggacaggccgctccttgcattgatgccttcgcgaacgcccggggggcggcctatgtcatcttcgacataatcgataataaccctaagatcgacagcttctccgaacggggacacaagcctgattccatcaaggggaacctggaatttaacgacgtgcatttctcatacccaagccgagcaaacgtgaaaatcctgaaaggcctgaacctgaaggtgcagtcaggacagaccgtcgctctcgtgggttctagtggctgtggtaaatccactactgtgcagctcattcagcgcctttacgatcccgacgaaggaactataaacattgacggccaggacatacgcaactttaatgtgaattatttgcgggagattatcggagtcgtatcgcaggaacccgtgctcttttctactactatagcggagaacatctgctacggacgaggcaacgtcacaatggatgagataaagaaggctgtaaaagaagcaaacgcttacgagttcatcatgaagttgcctcagaaatttgacactctggttggcgagaggggtgcccagttgagcggcgggcaaaaacagcgaattgcgatcgctcgagccctcgttcgcaatcccaagattttactgctcgacgaggccacaagcgcccttgatacagagagcgaagccgaggtgcaggccgctctggataaggctcgggagggtcggaccactatagtaatcgctcacaggcttagtaccgtgcgtaacgctgatgtcattgctggctttgaggatggggtgattgtggagcaaggctcacatagtgagttgatgaaaaaggagggagtatattttaaactggtgaatatgcaaacttccggatctcagattcagagtgaagagttcgagttgaatgatgagaaagcagccaccaggatggctccaaatgggtggaaatctaggctctttcgccacagcacccaaaagaacctgaaaaacagtcaaatgtgccagaaatcactggatgtcgagaccgacggactagaggccaatgtcccccccgtttctttcctgaaggtcctgaaattaaacaaaactgaatggccatacttcgttgtgggaaccgtttgtgccattgcaaatggaggcttgcagcccgcctttagtgtgattttttccgagattatcgccatattcgggcccggcgacgatgctgtcaagcaacaaaagtgcaatattttcagtcttatcttcttgttcctggggatcataagtttcttcactttcttcctccaggggtttactttcggtaaggccggcgaaatcttgactaggagactgcggtcaatggcattcaaggccatgctgagacaggacatgtcctggtttgacgatcacaaaaactcaacgggagccctgtcaacaagattggccactgacgccgctcaagtccagggtgctaccggcacccgacttgcgctcatcgcccagaatatcgccaacctgggcacgggcatcattatcagctttatatacggatggcagctcacacttctgctcctggcggtggtccctatcatagcggtttcgggtattgtggagatgaaactgttagcagggaacgctaaaagggataaaaaagagctggaggccgccggaaagatagcaaccgaggcaatcgagaacattaggacagtggttagcctcactcaagagcggaaattcgagagcatgtatgtggaaaaactgtatgggccttacagaaactcagtgcagaaagcccacatatacggcataacattctcaattagtcaagcattcatgtacttcagctatgcaggttgctttaggtttggagcctatctgatagttaatgggcatatgcggttccgggacgtgatattggtgttctccgccatcgtgtttggtgccgtggctctcgggcatgcttctagtttcgcgcccgactatgccaaggctaagctctctgccgctcatttgttcatgctttttgagaggcagcccttgatcgattcctattctgaggagggtctgaaacctgataagtttgaggggaatatcaccttcaatgaagtcgttttcaactaccctacacgagctaatgttcctgtactgcaggggctgtccttggaggtgaaaaagggtcaaaccctggcattagtcggctcaagcggttgcggtaagtccaccgtcgtgcagcttctggaaaggttctatgacccccttgccgggacagttttcgtggacttcggttttcagctcctcgacggacaggaggcaaagaagttgaatgtgcagtggctgcgagcacagctggggatcgtgagtcaggaacctattctcttcgactgctctatcgcagagaacattgcttatggcgataactctagggtcgtctcacaggatgagatcgtgtcagccgcaaaggctgcgaacatacacccttttatcgaaacattacctcacaaatacgagaccagagtgggtgacaagggcacccagctcagcgggggccagaaacagaggatcgctatcgcacgggccctcatccggcagcctcagattctcctgctggacgaggcaactagtgccctggataccgagtctgagaaggtggtccaggaggccctggacaaagcacgagagggacgaacctgcatcgttattgctcataggctgagtaccattcagaatgctgatttgatagtggtttttcagaacggcagggtaaaagaacacggtacacaccagcagctgctcgcacagaagggtatttactttagcatggtgtctgtgcaggcaggcacccagaacttg

SEQ ID NO: 7493 - DNA, 3858 bp, synthetic construct
  misc_feature 1..3858: note = source = /note="Description of Artificial Sequence: Synthetic coding sequence"
  source 1..3858: mol_type = other DNA
atggatcttgaagccgctaaaaacgggactgcatggaggccgacctcggctgaaggagacttcgaactgggaatctcctccaaacagaagcggaaaaaaactaaaaccgtgaaaatgatcggggttctcacactgtttagatattccgattggcaggataagttgttcatgagcctagggacgattatggcaatcgcccacggttccggccttccacttatgatgatcgtgtttggagagatgactgataaatttgtggatacagccggcaatttctcctttcccgtgaactttagcttgtccctcctgaatcctggcaagatcctggaggaggagatgacgcgatatgcctactactactccggtctgggcgcgggggtactcgtggcagcctatatccaagtttccttctggacgctggcggccgggcgacagattcgcaaaatcagacagaaattttttcacgccattctgcgtcaagagatcgggtggtttgacattaacgataccaccgaattgaacacgaggttaacggacgacatcagcaaaatcagcgaggggatcggagacaaggtggggatgttcttccaggcagtggcgaccttcttcgctgggtttatcgtgggctttattcgaggctggaaactcacattggtgatcatggccattagtcccatcttgggcctcagtgcagcagtatgggctaaaattctgtccgctttttcagacaaggaactcgccgcctatgcgaaggccggggctgtagcggaagaggctctaggcgccatccgcaccgtgatcgcttttggcggtcaaaataaggagctagagcgctaccagaagcatctggagaacgcaaaagaaattggaattaagaaggccatctccgccaacatctccatgggtatagcctttttactgatctatgcgagttacgcattagccttttggtacggcagcaccctggtgattagtaaggaatacactatcggcaacgctatgactgtttttttcagtattctgataggcgccttcagcgtgggccaggcagccccatgcatagatgcgttcgccaatgccagaggggccgcatatgtaatcttcgatattatagacaataatcctaaaatcgatagcttctccgaaagagggcacaaaccggacagcatcaagggcaatctggaatttaatgacgtgcatttcagctatcccagcagggctaatgtcaagattctgaaagggctcaaccttaaggttcagagtgggcagaccgtcgcactggtcggcagcagcggttgtggcaaaagcaccacagtccagctcattcagcggctgtatgaccccgacgaaggcaccatcaacatcgatggacaggatattagaaacttcaacgtgaattacctgcgggaaatcattggtgtggtgagccaggaacccgtgctcttttccacaaccattgctgaaaatatttgttatggacggggcaatgtgaccatggacgagatcaaaaaggcagtgaaggaggcaaacgcttacgagttcatcatgaagctaccacagaaattcgataccctggtgggcgagagaggggctcagctcagtggaggacagaagcagaggatcgctatagcgcgcgcattggttagaaatccaaagattttattgttggatgaggctacatcagctttggacacggaaagtgaagccgaagtccaggccgcgctcgacaaggcgagagagggccggaccactatagtcatcgcccatcgattgagcaccgtcaggaacgccgatgttatcgccggatttgaggacggcgtcatcgttgaacaggggagccattcagaactcatgaaaaaagagggcgtttacttcaaactggttaacatgcagacgtccggcagccaaatacagtctgaggagtttgaactcaacgacgagaaggccgccaccaggatggcaccgaatggttggaaatcaaggctgttccgccactcaactcagaagaatctgaagaatagccagatgtgtcagaagtcacttgatgtggaaaccgacggactcgaggccaatgtgcctcctgtctcctttttgaaggtgctcaagctgaataagaccgagtggccttatttcgtggtgggtacagtctgtgccattgctaacggaggtcttcagcccgctttttcagtgatcttctctgaaatcatcgctattttcggcccgggtgatgacgccgtgaagcagcagaagtgtaacattttttccctgatcttcttgtttctagggattattagttttttcacctttttcctgcagggttttactttcggcaaggcgggtgagatcctgactagaagactgcgctccatggcctttaaggcaatgctgagacaggacatgtcttggttcgatgaccataagaactccaccggggccttatcaactcgactggccaccgacgccgcccaggtgcagggagctaccggtacacggttagccttgatagcccaaaatatcgccaacctgggtacgggcatcattataagtttcatatacgggtggcagctgactctgctgctgttggccgtcgttcccatcattgcagtaagcgggatcgtggagatgaaactgttggcaggtaacgctaagcgcgacaagaaggaattggaggccgcgggcaagatagccacagaagcaatcgaaaacataaggaccgttgtatccctgacacaggagcgtaagtttgaatctatgtatgtcgaaaaactttatggcccataccgcaattcagtccagaaagcacacatttacgggatcaccttctccatcagccaggccttcatgtatttttcctatgccggctgcttccgcttcggagcctacctaatcgtcaacggccatatgagattccgagacgttatcctagtattttcagcaattgtctttggggccgttgctcttgggcacgcttcatccttcgctccggactacgcaaaagccaagttgagcgcggcccatctgtttatgttgttcgaaaggcagcctttaatcgattcctactccgaggagggactaaagccggacaagttcgagggcaacattacatttaatgaggtggtgttcaattacccgactcgggccaacgtgcccgtgcttcaagggctgagtctggaagtgaagaaaggacaaacattggctctcgtagggtccagcggttgtgggaagagcacagtggtacagttactcgagcgattctacgaccccctggccggaacagtgttcgtcgattttgggtttcagcttcttgacgggcaggaggccaaaaagctaaacgtgcagtggttaagggctcagctgggcatagtgtcacaggagcccatcctgttcgactgttctatagccgagaacattgcgtatggcgacaactcacgggtggtcagccaggatgaaatcgtcagcgcagcgaaagcagcgaacattcatccatttatagaaactctaccccacaaatacgagactcgcgtcggtgataagggcacacagttatctgggggtcaaaaacaacgcatcgcaatcgctcgtgcattaattcgtcagcctcagattctcctcttagatgaagctacttctgccctggatacagaaagtgaaaaagtagtccaagaggccctggacaaggcaagagaggggcggacctgcatcgttattgcacaccgactaagcacaattcagaatgctgatctgatcgtggtgtttcagaatggtagagttaaggagcacggcacccaccagcagctgttggcccagaaagggatttacttctctatggtctctgtgcaggccgggacacaaaacctg

SEQ ID NO: 7494 - DNA, 3858 bp, synthetic construct
  misc_feature 1..3858: note = source = /note="Description of Artificial Sequence: Synthetic coding sequence"
  source 1..3858: mol_type = other DNA
atggacctggaagcggccaaaaacgggactgcatggcgccctacctcagcagagggagacttcgagctggggattagctcgaagcagaagcggaaaaagactaagaccgtcaagatgattggtgtgctgaccctgttcagatactcggattggcaggacaagctcttcatgtcactcggaactattatggccatcgcacacggctccggactccctctcatgatgattgtgtttggtgaaatgactgataagttcgtcgacacggccggcaatttctcatttccggtgaacttctccctcagcctgctcaaccccggaaagatcctcgaagaagagatgacccgatacgcgtactactactcgggactgggagccggtgtcctggtggccgcatacatccaggtgtcgttctggactctcgctgcaggtcggcagatcagaaagatacgccagaagtttttccacgcaatcctgaggcaggaaatcggatggtttgacataaatgatactaccgaactgaatacccgcctgaccgacgacatctcgaagatctcggagggcatcggcgacaaggtggggatgttctttcaggccgtcgccacttttttcgccggattcatcgtgggctttatcaggggatggaagctgaccctggtgatcatggcaatttccccaatcttggggctctccgctgccgtgtgggcaaagatcctgtccgcattctctgacaaagagcttgcagcatacgctaaggcaggagcagtggcagaggaagccttgggagccatcagaaccgtcatcgctttcggaggacagaacaaggagttggagcgctatcagaagcaccttgagaacgcgaaggaaatcggcatcaaaaaagctatctcagcgaacatttcaatgggcattgcattcctgctgatctacgcttcgtacgcgttggctttttggtacggcagcaccctggtgatttcgaaagagtacaccatcgggaatgcgatgactgtctttttctctatcctcatcggagccttttcagtgggccaggcggctccatgcatcgatgcgttcgcgaatgcaagaggcgcggcctacgtgatcttcgacatcatcgataacaacccaaagattgactcattctcggagcggggacacaagcccgattcgatcaagggaaatctggagttcaacgacgtgcatttcagctacccgtcgcgcgcgaatgtgaagatcctcaaggggctgaatcttaaggttcagagcgggcagaccgtggccctggtggggagctcgggatgtggaaaatcaactaccgtccagctcatccagcgcctctacgaccctgatgaggggaccatcaatatcgatggacaggacattcgcaacttcaatgtgaactacctgcgcgaaatcatcggcgtggttagccaggaacccgtgctgtttagcactaccatcgcagagaatatctgctatggaagaggaaacgtcaccatggatgaaatcaagaaagcagtgaaggaagcgaacgcatatgagttcatcatgaagctcccccagaaattcgataccctggtcggcgagagaggagcacagctctcgggaggacagaagcaacggatcgccatcgcgagggcgctggtccggaacccaaagatcctgctcctcgacgaggccaccagcgcacttgataccgaatcggaagcggaagtacaggccgcactggataaagcgagagaaggacgtacgacgatcgtgatcgcccacagactgtcaaccgtgcggaatgccgatgtgattgcaggctttgaagatggggtgatcgtggagcagggctctcattcagaactgatgaagaaagaaggggtgtactttaaactcgttaacatgcaaacgagcggctcgcagatccagtcggaggaatttgagctgaatgatgagaaagcggccacccggatggccccaaacggatggaaatcacgcctgttccgtcattcaacgcagaagaacctgaagaatagccaaatgtgccagaagtcactggatgtggaaactgacggcctggaagcgaatgtacctcccgtgtccttcctgaaggtactgaaactcaacaagaccgaatggccgtactttgtggtgggaaccgtctgcgccatcgccaacggtggattgcaacctgctttcagcgtgatcttttcagagatcatcgccatctttggaccaggtgatgacgcggtgaagcagcaaaagtgcaacatcttttcgctgattttcctctttctcggcatcatttcgttctttaccttcttcctccagggcttcacgttcggaaaagccggagagattctcacgaggcggctgaggtctatggcgtttaaagcgatgctgcgacaagatatgagctggttcgacgaccacaagaactccaccggagccttgtcgactcggctggcgaccgatgctgcgcaagtccaaggggccactggaactagactggcgctgatcgcccaaaacatagccaatcttgggaccggaatcatcatctcgtttatctacgggtggcagctgactctcctgctgcttgcagtcgtgccgatcattgcagtgtcgggaatcgtggagatgaagctgctggctggaaacgccaaaagagacaagaaggaactcgaagccgccggaaaaatcgcaaccgaggcaatcgaaaacatacggaccgtggtttcattgacgcaagaacggaagttcgaatcgatgtacgtggaaaagctctacggaccgtaccgaaactcggtccaaaaagcgcatatctacggtataactttctccatctctcaggccttcatgtacttctcctacgctggttgcttccggtttggcgcctaccttattgtcaacggccacatgcggttcagagacgtgatccttgtgttctctgcgatcgtgttcggcgccgtcgccctgggacatgcctcctcattcgccccggactacgccaaggccaagctgtccgctgcccatctgttcatgctctttgaacggcagcccctgatcgattcctattctgaagagggactgaaaccagacaaattcgaaggaaacatcaccttcaacgaagtcgtctttaactacccgactagagctaatgtgccagtgctgcaaggtttgtcactggaagtcaagaagggtcagaccctcgccttggtgggatcctccggatgcggaaagagcactgtcgtgcagttgcttgagcgcttttacgatccgctggccggcactgtctttgtggattttggtttccagctgctcgacggccaagaagcgaagaagctcaatgtgcaatggctgagagctcagcttggaattgtgtcccaggaaccaatcctgttcgattgttcaattgctgagaatattgcctacggagacaacagccgcgtggtgtcccaggatgaaattgtctccgccgcaaaggcggccaacatccacccattcatcgaaaccctgcctcacaagtacgagactcgcgtaggcgacaaaggaacccagctctccggtggtcaaaagcaaagaatagccatagctagagcgctgattcgccaaccacaaatcctgctgctcgacgaggcaactagcgccctggatactgagagcgagaaagtcgtgcaggaggcccttgacaaagctcgcgaaggcaggacttgtatcgtgattgcacatcgcctgtcgactatccagaatgctgacctgatcgtcgtgttccagaatgggcgggtgaaggaacacggaactcatcagcaactgctggcgcagaagggaatttacttctcaatggtgtccgttcaggccgggactcagaatctg

SEQ ID NO: 7495 - DNA, 3858 bp, synthetic construct
  misc_feature 1..3858: note = source = /note="Description of Artificial Sequence: Synthetic coding sequence"
  source 1..3858: mol_type = other DNA
atggacctcgaagctgctaagaacggcaccgcctggaggcccacctcggccgagggcgatttcgaactggggatatccagtaaacagaagcgcaagaaaaccaaaaccgtgaagatgatcggggttctaactttattcaggtatagtgactggcaggataaactcttcatgagcctcggaacaatcatggcaatagcacatggaagcggattacccctgatgatgatcgtgtttggggaaatgaccgataaatttgtcgatacagcaggaaacttcagctttcctgttaacttttctctgagcctcttgaatccaggcaagatcctggaagaggagatgacccggtatgcctactactattccggtctgggagcaggggtcttggtggccgcttatatccaggtgtcgttctggactttggcagccggaagacaaataaggaagattaggcagaaattcttccacgcaatcctcagacaggagatcggatggttcgatattaatgatactactgagctgaatacccgcctaaccgacgacatctctaaaattagtgaaggcatcggagacaaggtaggaatgttctttcaagcagtggcaaccttcttcgccggcttcatcgtggggttcattcgggggtggaaactgacactggttattatggccatcagccccatcctcggtttatcagccgcggtgtgggccaagatactgtctgccttctcagacaaggagctggcagcgtatgctaaggcaggcgctgtcgcggaggaggccttgggggccattcggactgtaattgcgttcggcggacagaataaggagctggagcggtaccagaagcatctggagaacgctaaggagatagggatcaagaaggccatcagtgcaaacatatcaatgggcatcgcatttctcctcatctatgcgtcatacgctttggctttctggtatgggtccacactcgtcattagcaaggaatataccatcggaaacgcgatgacggtgtttttcagcatcctgatcggagctttcagtgtggggcaggcagccccctgcatcgatgcctttgcaaatgcccggggggccgcatatgtaattttcgacatcatagacaataacccaaaaatagatagcttttcagagcggggtcataagccggactctattaaggggaatttggagtttaacgacgtgcacttctcctacccaagcagggcaaacgtgaagatcttgaaagggctcaacctcaaagtgcagtcaggccagacagtagcccttgttggatcgagcggctgcgggaaatcaaccaccgttcagttaatacagagactttacgaccccgacgagggaaccattaatattgacggccaggacattcgcaactttaacgtgaactatctacgggaaataatcggcgtggtgagccaagaacccgtgctttttagcaccaccatagccgaaaacatctgttatggccgtggcaatgtcaccatggatgaaattaaaaaggcagtgaaggaagcgaacgcctacgagttcattatgaagctgccccagaaatttgataccctcgttggtgagcgcggagctcagctcagtggtggccaaaaacagcgaatcgcaatcgcgcgcgcattagtcaggaatcccaagattttgctccttgacgaagccacatcagcgctggacaccgaaagcgaggccgaagtgcaggccgccctcgacaaggctagggaaggaaggacgaccattgtgatcgctcataggcttagcacggtgaggaacgctgatgtgatcgctgggttcgaggacggcgtcattgtagagcagggatctcacagtgaactcatgaagaaggaaggcgtgtattttaaattggtgaacatgcaaacttccggatctcagattcagtctgaagagttcgagctgaatgacgaaaaagctgccacacggatggctcctaatgggtggaagtctcgactttttcgccacagtacccagaagaacctgaagaattcccagatgtgccagaagagtctcgatgttgaaactgatgggcttgaggccaatgtgcctcctgtttcatttttgaaggttttaaagctaaataagacagagtggccttattttgtagtcggtactgtctgcgcgatagccaatggcggtttgcagcctgcattttccgtgatattttctgagattatagccatttttgggccaggcgacgacgcggtgaaacagcaaaaatgcaacatcttcagcctcatctttttatttttgggcataatttcattctttacctttttcctccaaggctttacctttggcaaggcaggagaaattttaacacggaggctgagatcgatggcctttaaagctatgcttcgacaagacatgtcgtggtttgatgaccacaaaaattctaccggcgcgctttcaacaagactggccacggacgctgcccaggtgcaaggcgcaacaggtacacggttggcacttatcgctcaaaatattgcaaacttaggcactgggattataatctctttcatttatggatggcaactgacgcttcttttgctggccgtggtgccgataatcgcagtgagtggcatagtggaaatgaagttactggccggaaacgctaaacgggacaaaaaagagctggaggcagctggcaagatcgcaacggaagctatagaaaacatccgaacagtcgtctcgttaactcaggagcggaagttcgagagtatgtatgtagaaaaactctatggcccgtatcgtaattcagtgcagaaggcgcatatttatggcatcacattttctattagccaggccttcatgtacttctcctatgctgggtgtttcagattcggcgcctacttgatcgtgaatggccacatgcgatttcgggatgttattctggtgttctccgcgatcgtattcggtgcagtcgccttagggcacgctagttcttttgccccagactacgccaaggcgaaactcagtgccgcacacctgttcatgctttttgagaggcagcccctgatcgacagctacagcgaggaaggacttaaacccgacaagtttgaaggaaacattacttttaacgaagtggtttttaattatccgactagggccaacgtccctgttctgcagggtttatctctggaggtgaagaagggccaaaccctggctctggttggatctagcggctgcggcaaatctactgtagtgcagctgttggagagattctacgatcccttagccgggacagtcttcgtagacttcggctttcagcttcttgacggacaggaagccaaaaagcttaacgtgcagtggctcagagcccaactgggcattgtctcccaggaacccatcctctttgactgttctattgccgagaatatcgcctacggcgataattctagggtggtgtctcaggatgagattgttagtgcagcaaaggccgcaaacattcacccgtttatcgagactctcccacacaagtacgaaacccgcgtgggcgacaaaggaactcagctgagtggaggccaaaaacagaggatcgcaattgctcgagcgctgatcaggcagccacagatactcttattggacgaggctacctctgcactagatacagagtctgagaaggtggtccaggaggcactggataaggcacgtgaggggcggacgtgcatcgtcatagcccataggttgagtaccatacaaaatgctgacctgatcgtggtgttccaaaatggcagggtaaaggagcacggcacccatcagcaacttctcgcccagaaaggaatttatttctccatggtgagcgttcaggctgggactcagaatttg

SEQ ID NO: 7496 - DNA, 3858 bp, synthetic construct
  misc_feature 1..3858: note = source = /note="Description of Artificial Sequence: Synthetic coding sequence"
  source 1..3858: mol_type = other DNA
atggacctggaggctgccaaaaacggcactgcatggaggccaacctccgcagagggcgactttgagctcggtatctcaagtaagcaaaagcggaaaaaaacgaagaccgtgaaaatgattggtgttctcacactgttcaggtatagcgattggcaagataagctctttatgagcctgggaacaatcatggcaattgcccatggttctggattgcccttaatgatgattgtgttcggggagatgaccgacaagtttgttgatactgccggaaacttttctttccctgtaaacttcagcctgtcactgctcaaccctggcaagatcctcgaagaggaaatgaccagatacgcttactattacagtggactcggcgcaggggtgttggtcgccgcttacattcaggtcagcttttggactttggccgctggtagacaaattaggaaaatccggcagaaatttttccatgctatactccgccaggagatcggctggtttgacattaatgataccacagaactgaatactcggctaactgacgatatatctaagatcagtgagggcatcggagataaagtgggcatgttctttcaggcagtggccacttttttcgcaggctttattgtgggattcattcgaggttggaagctgaccctggtgatcatggctatcagccctattctcggactctctgctgcagtgtgggccaagattctctcagcctttagtgacaaggaactggcggcttacgccaaagccggtgctgtagctgaagaagcattgggcgccatcagaaccgtcatcgctttcggcggccaaaacaaggaattggagcgctatcagaagcacctggaaaacgcaaaagagatcggaatcaagaaggctatcagcgctaacatctcgatgggcatagccttccttctgatttatgcttcctacgctttggctttttggtacgggtcgacactcgtaatcagtaaggagtacactataggaaacgccatgacggtgttcttttccattcttatcggagctttttccgtcggtcaggccgcaccatgcatcgatgcctttgccaacgctcgcggcgcagcatacgtgatttttgacattatcgataataaccctaaaattgattcattctctgaacgtggtcacaaacccgattctatcaaaggcaacctcgagttcaacgacgtccatttttcatacccaagtcgcgcgaacgttaagatcttgaaggggcttaacctgaaggtacagtccggacagaccgtggctttggtgggcagttcaggctgtggcaagagcaccacagtgcagctaatccaaagattgtatgacccagacgaaggaaccattaatatagatggccaggacatccgcaacttcaacgttaactatctccgcgagataataggggtggtgagccaggaaccagtgctcttcagcactaccatcgctgagaacatctgctacggcaggggcaacgtcacaatggatgagatcaaaaaagcggtgaaagaggcaaatgcctatgagttcataatgaaactgccacaaaagttcgatactctggtcggcgagaggggagcacaactttcaggcggacagaaacagcggattgccatagctagagcgcttgtgagaaaccctaagatcctcctgctggatgaagccacatctgcgctggatacagagagcgaagctgaagtccaggccgctctggacaaagccagggaagggaggactaccattgtgattgctcatagactcagcaccgtgaggaacgctgacgtgatcgccggtttcgaagacggagtgatcgtagagcaaggaagccattccgaacttatgaaaaaggaaggggtgtacttcaaattagttaacatgcaaacatcaggcagccagatccagagtgaagagttcgagctgaacgatgaaaaagcagccacaaggatggcccccaacggctggaaatctagactctttcgccatagtacccagaagaatctgaagaacagtcagatgtgccagaaatccttggacgtagaaacagacggattagaggcaaacgtgccaccagtatcatttctgaaagtcctgaaactgaacaagactgagtggccttattttgttgtcggcacagtgtgcgcaatcgctaacggtggtttgcagccagcattttctgtcatttttagcgagatcatcgccatcttcggtccaggcgatgatgctgttaagcaacagaagtgcaacattttcagtttgatatttctgttccttgggatcataagcttttttacattctttttgcaaggatttacatttggaaaagctggcgagatactgactcggcgtctgagaagcatggctttcaaggctatgctccgccaagacatgtcctggtttgacgaccataagaacagcaccggtgcattgtctacaaggctggccaccgatgccgcccaagtccagggggccaccgggaccaggttggctttgatcgctcaaaacatagccaacttaggcacaggaattattatctcgttcatctacggctggcagttgaccctcctgctgctagcagtcgttcctattatcgccgtcagtggaattgtcgaaatgaagcttctggcgggcaacgcgaagagagataagaaagagctggaagcagcgggtaaaattgcaacagaagccatcgagaacatccggactgtcgtcagcctgacccaagaaagaaagttcgagagcatgtacgttgagaaactgtacggaccatacagaaatagcgtgcaaaaagctcatatttacggcattactttttctatcagccaagcgttcatgtattttagctacgccggatgctttaggttcggggcttacctgatagttaatggtcatatgaggttcagggacgttatactcgtctttagtgctattgtctttggagcagtcgccctcgggcatgcttcttctttcgctcctgactacgccaaagcaaaattgagtgcagcacatctgtttatgctcttcgagcgccaacccctaatcgattcctacagcgaagaggggttaaaaccggacaaatttgagggaaatatcacatttaatgaagtagtgtttaactaccctacaagagccaacgttcccgttctgcagggactttcactggaagtcaagaagggccagacacttgctttggtgggttcctcgggctgtggaaaatcgaccgtggtgcagctgctggagaggttttacgaccctttagcagggactgtgttcgtggacttcggatttcagctgctggatggccaagaagctaaaaagctgaacgtgcaatggctgcgagctcagctcggcatcgtcagccaggaacccattctgtttgactgctcgatagcagagaacatagcttacggagacaattcgagggttgtaagccaagatgaaatagtgagcgctgccaaggctgcaaatatccatcctttcatcgagacactcccccacaaatacgagacccgggtgggagacaaaggaacacagctgagcggtggacagaagcagagaatcgctatcgcgcgtgctttgattaggcagccacagatacttctcctcgacgaagctacatccgctctggatacagagtccgaaaaagtcgtccaggaggctctcgataaagcaagagagggccgcacctgtatagtgattgcacatagactgagcaccattcagaacgctgacctgatcgtcgttttccagaacggaagagtgaaagagcatggtacccaccagcagctgctggcgcagaagggcatctacttctcaatggtcagtgtccaggctggcactcaaaacctc

SEQ ID NO: 7497 - DNA, 3858 bp, synthetic construct
  misc_feature 1..3858: note = source = /note="Description of Artificial Sequence: Synthetic coding sequence"
  source 1..3858: mol_type = other DNA
atggatttggaggccgccaagaatgggaccgcctggcgccccacgtcagcagagggcgacttcgagctcggcatctcctcgaaacagaagcgaaaaaagaccaagaccgtgaaaatgatcggagtgctcactctcttccgctactcggattggcaggacaagctgttcatgagtctggggactatcatggcgatcgcccacggatctgggcttccgctgatgatgattgtgttcggcgaaatgaccgataagtttgttgacactgctggaaatttctcatttccggtgaacttctccctgagcttgctgaaccctgggaagatcttggaggaggagatgaccaggtacgcgtactactactcgggcctgggagccggagtgcttgtggcagcgtatatccaagtctcattctggaccctggcagcgggtagacagatccgtaagattcggcagaagttcttccacgcgatcctccgccaagaaatcggctggttcgatatcaacgacaccactgaactgaatacccgcttgaccgacgatatatcgaagatcagcgagggaataggtgataaggtgggcatgttcttccaggcggtggcgactttcttcgctggattcattgttggctttatcagaggttggaaattgactctggtgatcatggcaatcagcccgatcctcgggttgtccgccgccgtgtgggcgaaaatcttgtcagcattttccgacaaagaacttgccgcgtacgctaaggccggcgcggtggcagaggaagccctcggtgccatccggacggtgatcgcgtttgggggacagaataaagagctcgaaaggtaccagaagcatctggaaaatgcaaaagagatcggaatcaaaaaagctatctccgctaacatcagcatgggcatcgccttcctcctcatctacgcctcctacgcattggccttctggtacggctccactttggtgatcagcaaagaatacactatcggaaatgccatgactgtgttcttctcgatccttattggcgcattcagcgtcggacaagctgccccatgcatcgatgccttcgctaatgcccggggggcggcatatgtgatcttcgacatcatcgacaacaatcccaagatcgattcattcagtgaacggggacacaagccggacagcatcaaagggaacctcgagtttaatgacgtgcatttctcgtacccatcccgggccaatgtcaagatcctgaagggactgaacctgaaggtccagagcggacaaactgtggcactcgtcggtagttccggatgcgggaagtcaaccaccgtccaactcatccagcgtctctatgacccagacgaaggcaccatcaatatcgatggccaggacatccgtaacttcaacgtcaattacctgcgcgagattatcggagttgtgtcccaggagccggtgctcttctcaactaccatcgcagaaaacatctgctacggacggggcaacgtgactatggatgagatcaagaaagcggtgaaagaagcaaatgcgtacgaattcattatgaaactgccccagaaattcgatacccttgtgggtgaaagaggggcacagctgtcgggcggccagaagcaacggatagcgatcgcgcgagctttggtccggaacccaaagatcttgctgctggatgaagcgacttcagccctcgataccgaatcggaggctgaagtccaagcggcgctcgataaggcacgggaagggagaaccaccattgtgatcgctcaccgcctgtctaccgtccgcaacgccgacgtcattgcgggtttcgaagatggagtcatcgtcgaacaggggtcccatagcgagcttatgaagaaggagggcgtgtactttaagctcgtcaacatgcaaacgtccggatcgcagatccagtctgaagaattcgagctgaacgacgaaaaggcagctacccgcatggccccgaatggatggaagagccgactgtttcgacactcaacccagaaaaacctcaaaaactcgcaaatgtgccaaaagtctctggacgtggagactgacggactggaagccaacgtgcctccggtgagctttcttaaggtcctgaaactgaataagaccgaatggccgtactttgtcgtgggaaccgtgtgtgccatcgcaaacggaggattgcagccagccttctcggtcatcttctccgagataatcgcaattttcggacccggcgacgacgccgtgaaacaacaaaagtgcaacatctttagtctgatattcctgttcctgggaatcatttccttcttcaccttcttcctccaaggctttacctttggcaaggctggtgagatcctgacgaggcgcctcaggagcatggccttcaaagctatgttgagacaggatatgtcgtggtttgatgaccacaagaattccaccggcgcgctttcgactagattggcgactgacgccgcccaggtgcagggagcgactggaactagactggccctgattgcccagaacatcgcaaatctgggcactggcatcatcatttcgtttatctacggctggcagcttaccctgctgctcctggccgtggtccctatcatcgcggtgtccggtatcgtcgaaatgaagctccttgcaggaaacgccaaaagagataagaaggaactggaggctgctggaaaaatcgcgactgaggccatcgaaaacattcggaccgtggtgagcctcactcaggaacgcaagttcgagtctatgtacgtggaaaagctgtacggtccttaccggaacagcgttcagaaggcacatatctacggaatcactttctcgatctcacaggccttcatgtacttttcatacgctggctgctttcgattcggagcctacttgatcgtcaatggacacatgcggtttcgcgatgtgatcctcgtgttctccgcgattgtgtttggagccgtggcccttggacacgcgagctccttcgcgccggactacgcgaaggccaaactcagcgctgcccacctcttcatgctgtttgaacggcaacccctgattgattcgtactccgaggaaggtcttaagccggacaagttcgaaggaaacattacgttcaacgaggtggtgtttaactacccgactagagccaacgtcccagtccttcaggggctgtcgctggaggttaagaagggtcaaactctggcactcgtgggctcctctggatgtggaaagtcgactgtggtccaactcctggagcgcttctacgacccactggccggtaccgtctttgtggacttcgggttccagctgttggacggacaggaagcgaaaaagctgaatgtgcagtggctgcgggcacaactcgggattgtctcccaagagcctatcctcttcgactgttcaatcgccgaaaacatcgcgtacggcgacaactctcgcgtggtttcacaggacgaaatcgtgagcgctgctaaggcggcgaatatccatccttttatcgagacgctgccacataagtatgagacgcgggtgggagataagggaactcaactctcgggaggacagaagcaacgcatcgctattgcccgtgctctgattaggcaaccgcagatcctcctcctggacgaggccacttctgccctggacacggaatcggagaaggtggtccaggaagcgctggacaaggcccgcgagggaaggacgtgcatcgtaattgctcatcgcctgagcaccatccagaacgcagacctgatagtggtgttccaaaacggtcgcgtgaaggaacacggtacccaccaacagctgctggcccagaaaggtatctatttctctatggtgtccgtccaagcaggaacccagaacctg

SEQ ID NO: 7498 - DNA, 3858 bp, synthetic construct
  misc_feature 1..3858: note = source = /note="Description of Artificial Sequence: Synthetic coding sequence"
  source 1..3858: mol_type = other DNA
atggacttggaggccgcaaagaatggcaccgcctggcggcctacctcagctgagggggacttcgaactcggcatcagtagcaagcagaaaaggaaaaaaaccaagactgtcaaaatgattggagtcctgacactgtttcgctattcagattggcaagataagctctttatgtctctcgggacaatcatggctatagcccatggaagcggattgccgttaatgatgattgtgttcggggagatgactgacaagtttgttgacacggccggtaacttctcctttcccgtgaacttttctctgagcctcttaaatccgggtaagatacttgaagaggagatgacccgttacgcatactactacagcggacttggggcaggagtgctagtggcggcctacattcaggtgagcttttggaccctggcagcgggtcggcagatcagaaagatcaggcagaagtttttccacgcaatcttgcgccaggagatcggctggtttgacatcaatgatactacagaattgaatacaaggctgaccgacgacatatccaagatttccgaaggtatcggagacaaagtggggatgttcttccaggcggtcgctacattctttgctggatttatcgtaggcttcatcagaggctggaagctgaccctggtgatcatggctataagccctattctgggactgtcagctgcagtctgggccaagattttgtcagctttttccgacaaagagctggctgcctatgctaaggcaggagcagtagctgaagaggcactgggagccatcagaaccgtaatagccttcggaggtcagaataaagagctggagaggtatcagaagcacctggaaaatgccaaggagatcggcatcaagaaagccattagtgccaatatcagtatggggattgcttttcttttgatttacgcaagttatgccctcgccttctggtacgggtctaccctggtcatatctaaagaatatacaatcggtaatgccatgaccgtgtttttttccatcttgattggtgcattctcagttggccaggctgccccttgtatcgacgcctttgctaacgcgaggggcgccgcatacgtgatcttcgacattatcgataataaccctaagatcgactccttctcagaacgcggccataaacccgactctatcaaggggaatctcgaatttaatgatgtacacttttcttacccctcacgggcgaacgtgaagatcctgaaagggctaaacctgaaagtgcaatccggccagacagttgcactggttgggtcatcaggttgcgggaaatcaaccactgtgcaactcatccagcggctttacgatcccgacgaaggaacaatcaacatagatggacaagatatacgaaattttaacgtgaactacttacgggagatcatcggggtagtttcccaggagccagtgctgttttccaccaccattgccgaaaacatttgttacgggaggggaaatgttactatggatgagatcaagaaagccgtaaaggaggcaaatgcctatgagttcataatgaaactcccccagaaattcgataccttggtcggcgaacgtggggcgcagctgtctggcgggcagaaacagcgtatagcaatcgcccgggcactcgtgaggaatcctaagatcctgttacttgacgaggcgacaagtgcactcgacactgagagcgaggccgaggtgcaggcagccctggataaggccagggagggcagaaccacaatcgtgatcgcgcaccgtttatccacggtccggaatgcagatgtgatcgctggcttcgaagatggggttatagtagagcaaggcagccatagcgagctgatgaagaaggagggggtctactttaagctggtcaacatgcagacatcgggcagccagattcagtctgaggagtttgagcttaatgatgaaaaagctgccacaagaatggcccccaatggctggaagagccgactctttcggcactctactcagaagaacctgaagaactcgcagatgtgccaaaaaagcttggacgtcgagacagatggtctggaggcgaacgtaccacctgtcagtttccttaaagtgctcaaattgaacaagactgagtggccttatttcgtcgtgggaactgtgtgtgccatagccaacggtggcctgcagcccgcattctccgtgatattctcagagatcatcgccatttttgggcctggagacgacgccgtgaagcagcaaaaatgcaatattttcagcctgatcttcctgtttctgggaatcattagctttttcacattctttttgcaaggatttacgtttggcaaagctggcgaaatcttgacgaggcggctgcgttcgatggcttttaaggccatgttgaggcaggacatgagctggttcgatgaccacaaaaactcaacgggtgctctgtccacccgccttgccacagatgccgcacaggtgcagggagccaccggaaccagactggctttaattgcgcaaaatattgcaaacttgggcaccggtattattattagcttcatctatgggtggcagctcacattgctcttgctcgccgtggtgccaatcattgccgtgtctggaatcgtggagatgaagttgctggccggcaacgcaaagcgagacaagaaggaactggaggccgctggtaagatcgcaacagaagctatagagaatattcggaccgtggtcagtctgacccaagaacggaaatttgaaagcatgtacgtagagaaactttacgggccttatcgcaattccgtgcagaaagcacatatctacggtattacgttttctattagtcaggccttcatgtacttcagttacgccggttgctttcgcttcggtgcctacctgatcgtgaatgggcacatgaggttcagagatgttatacttgtgttctcggccattgtgttcggggccgtcgcactgggccacgcatcgtctttcgcccccgattatgctaaggcaaagctctcggcggcgcacctctttatgcttttcgaacgtcagcccctcatcgattcctactccgaagagggactgaaacccgacaaatttgaagggaacattacgtttaacgaggtggtgtttaattatcccacgagagcaaatgtgcccgtgttacagggcctgtcacttgaagtcaagaaggggcagacactggctctggtgggctcttccggttgtgggaagagtaccgtggtgcagctgttggagcggttttacgaccctctggcagggacagtgtttgtcgacttcggattccagctgttggacggccaggaagccaagaaactcaatgtccagtggcttagggcccagctcggaattgtttcacaggaacctatcctgttcgactgctccatcgccgagaatatcgcgtatggtgacaactcaagggtggtttcccaagatgaaatagtatccgctgcaaaagctgcaaacatccacccttttatcgagaccttaccgcataaatatgagacccgtgttggcgataagggcacccagctgagtgggggccagaagcaacgaatcgccattgcgcgcgctctgattcggcagccacagattttattgttggacgaggccacttctgccctggatactgaaagcgagaaagtcgtacaggaagccctcgacaaggcccgcgaaggacggacgtgcattgtcatcgctcatcgccttagtacaatccaaaatgctgaccttattgtggtgttccagaacggaagagtcaaggagcatgggactcatcagcagttgttggcacagaagggaatttatttcagcatggtgtccgtgcaggccggcacccagaacctg

SEQ ID NO: 7499 - DNA, 3858 bp, synthetic construct
  misc_feature 1..3858: note = source = /note="Description of Artificial Sequence: Synthetic coding sequence"
  source 1..3858: mol_type = other DNA
atggatttggaagccgcaaagaacggaacggcgtggcgcccgacttccgcagaaggagacttcgagctgggcatatcatcgaagcaaaaacgaaagaaaactaagactgtgaagatgatcggtgtccttacccttttcagatacagcgattggcaagataaactgtttatgtcacttggcactattatggccatcgctcatggatcagggcttccactgatgatgattgtctttggtgaaatgaccgataagtttgtggatactgcaggaaacttctcttttcctgtcaacttctccctgagccttctgaaccctggaaagattcttgaagaagagatgaccagatacgcatactactactcaggacttggggccggagtgctggtggcagcatacattcaagtatccttctggaccttggcggcgggtaggcagattcgaaagatccgtcagaagttttttcacgcaattttgcggcaagaaatcggctggtttgacataaacgatactaccgagctcaacactcgtctgacggatgatattagcaagatatcggagggaattggagacaaggtcggaatgttttttcaagccgtggcgacctttttcgccgggtttatcgttggttttatcagaggttggaagctgacccttgtcattatggcaatcagccctattctgggacttagcgcagcagtttgggcaaagattctgtccgcattctccgataaggagctggctgcatacgcgaaggcaggcgcagtggcagaagaggcacttggcgccatacgtactgtgattgcgtttggtggacagaacaaagaactggaacgctaccagaaacatctcgagaacgcaaaagaaatcgggatcaagaaggcaatcagcgccaacatctccatgggtatcgcgtttctgcttatctacgcatcctacgcacttgcattttggtatggttcgaccctcgttattagcaaggaatatacgataggtaacgctatgaccgtctttttctccatcctgattggcgcattttcagtggggcaggcagccccttgcattgacgcctttgccaacgcacggggtgccgcatacgtcatctttgacattattgacaataaccctaaaatcgacagcttttcggagcggggacacaagcctgattcgatcaagggcaacctcgagtttaacgatgtgcatttttcctacccatcgagggcaaatgtgaagattcttaagggcttgaatctcaaggtgcaaagcggccagactgtagcacttgtcggatccagcgggtgtggtaaaagcactaccgtccaactgatacaacggttgtacgacccagacgaaggcaccatcaatattgacggtcaagatatccgaaatttcaacgtgaattaccttcgggagattatcggtgtggtgtcgcaggagcctgtgctgttttccactactattgcagaaaacatctgttacggtaggggaaacgtgactatggacgaaatcaaaaaggcggtgaaggaagcaaacgcatacgagttcattatgaagctccctcaaaagtttgatactctggtgggagagcgcggggctcaactttcgggaggacagaaacaacggatcgcaatcgcaagagcactggtgcgaaatcccaagattctgctgctggacgaagccacttcggccctcgataccgaatcggaagcagaggtccaagcggcacttgataaggcacgtgagggtaggactactatcgtgattgcacatcggctttcgaccgtccgaaatgctgatgttattgcaggattcgaagatggagtcatagtggaacaaggtagtcattccgagttgatgaagaaggaaggtgtgtactttaaacttgtcaatatgcaaacctctggaagccagattcaatccgaagagtttgaactgaacgacgagaaagcagcaacgaggatggcccctaacggatggaagtcaagattgtttaggcattcaactcagaaaaaccttaagaattcgcagatgtgtcaaaaatcgctcgacgtggaaaccgatggactggaagcaaatgtgccaccagtcagctttctcaaggtcctgaaacttaacaagacggaatggccatactttgtcgtgggtaccgtctgcgcaatcgcaaatggaggactgcaacctgcgttttcggtgatattctctgagataattgcaattttcggaccaggcgatgacgcagtgaagcaacaaaagtgtaacattttctctctgattttccttttcctgggtattatctccttctttactttctttctgcaaggctttactttcggtaaagcaggtgaaatcttgaccagaaggcttcggtccatggcctttaaagcaatgctgcgacaagatatgtcgtggtttgacgaccataagaactccaccggcgcgctgtcgaccaggcttgcaactgatgcggcacaagtccaaggagcaaccggtacccgcttggcgcttattgcccagaacattgcaaacctgggcaccggtattatcattagcttcatttacgggtggcagctcaccctgctcctcctcgcagtggtgccgataattgcagtgtccgggattgtcgaaatgaagttgctcgcagggaacgccaaaagagacaaaaaagaactcgaagcagcggggaagatagcaactgaagcaatcgagaacattcggactgttgtctcactgactcaagaacgaaagttcgaatcgatgtacgtggaaaaactgtacggtccatatcgcaatagcgttcagaaggcacacatctacgggattactttctcgatcagccaggccttcatgtactttagctacgcaggttgctttcggtttggagcataccttatcgtcaatggccacatgagatttcgcgatgtgattttggtgtttagtgcaatcgtttttggtgcagtggcactgggacatgcatccagttttgcacctgattacgcaaaagcaaaactgtcagcggcccatttgttcatgttgtttgaacgccagcccctcattgattcatactccgaggaggggctgaagcctgataagtttgaaggcaacataacttttaacgaggtcgtgtttaactacccaacgagagcaaatgtccctgtgcttcagggactttcccttgaggtgaagaagggacagactcttgcactggtaggaagctcaggatgtgggaagagcaccgtggtgcaattgcttgaaaggttctacgacccgcttgcaggcactgtgtttgtcgacttcgggttccaactgctcgatggacaggaagcgaagaagttgaacgtgcagtggctgagggcccaacttggcattgtgtcgcaagaacccatattgttcgactgcagcatagcagaaaacattgcgtacggagacaattcccgggtcgtgtcccaggacgaaatcgtctcggcggcgaaagcagccaacatccacccctttattgaaacccttccgcataagtacgaaacccgcgtgggtgataagggtacccagttgagcggagggcagaagcagagaattgccattgcccgagcccttatcagacagcctcagatcctgctgctggatgaagccacttctgcgcttgataccgagtcagaaaaggtggtgcaggaggccctggataaagcacgggagggacgcacctgtattgtcatcgcacaccggctctcaaccattcaaaacgccgatcttatcgtcgtctttcaaaacgggagggtgaaggaacacggcacccatcagcagctgctcgcgcaaaagggtatttacttttccatggtgtcagtgcaagcaggcacccagaacctt

SEQ ID NO: 7500 - DNA, 3858 bp, synthetic construct
  misc_feature 1..3858: note = source = /note="Description of Artificial Sequence: Synthetic coding sequence"
  source 1..3858: mol_type = other DNA
atggacttggaggctgctaagaatggcacagcatggcgccctacgtccgctgaaggggacttcgagctgggcatctcctctaaacagaagagaaagaaaactaagacagtgaaaatgatcggagtgctgacattattccggtattcagactggcaggataagctcttcatgtccctcgggacgatcatggcgatagcacatggctccgggcttcctttgatgatgattgtcttcggggagatgaccgataaattcgtagacactgccggaaacttctctttcccggtgaatttctcactcagtttgctgaatcccggaaagatcttggaagaagagatgacacgatacgcatattattatagtggcctcggtgcaggagtcctggttgctgcctatatacaagtgtctttttggacactggccgctggccggcagatcagaaagattcgccagaagttttttcatgccattctgaggcaggagatcggctggtttgacattaatgataccactgagctaaacacaaggttgaccgatgatattagcaagatttccgaggggatcggggacaaggtaggcatgttttttcaggctgtggcaactttttttgcaggtttcattgtcggatttattcggggctggaagttgactctggtaattatggctatttcccccatactgggactgagtgccgccgtgtgggccaaaattctgtctgccttctctgataaagaactggccgcttatgcaaaggccggcgccgttgctgaagaggcgcttggagctatccgcacagtaattgccttcggggggcagaataaagaactcgagaggtaccaaaagcatctcgagaacgcaaaggaaatcggtatcaagaaggctatctccgccaacatcagcatgggcattgccttccttctcatttatgcgtcctatgccttagcattttggtatgggtctacgctggtcatttctaaagagtatacaatagggaacgctatgaccgtattcttctccatccttatcggagcattttcagtaggtcaggctgccccttgcatagacgctttcgctaacgcgcgtggtgctgcctatgtaattttcgacataatcgataacaatccgaaaatcgacagctttagcgaacggggtcacaaacccgatagcataaaaggcaatctggagttcaatgacgttcatttttcctatccttcaagagctaatgtgaagattctgaagggcctgaacctaaaggtgcagagcggccagaccgttgctctcgtcggaagcagcggttgcggcaagtctactaccgtccagctgattcagcgcctgtacgatccggatgaagggaccatcaacatagatggacaggatatacggaactttaatgtgaactatctgcgggagatcataggggttgtgtcgcaagagcccgtgctctttagcacgacaatcgccgagaacatctgttatgggcgtgggaatgtcactatggacgaaattaaaaaggccgtcaaagaagcaaatgcctacgaattcatcatgaaactgccgcagaagtttgatacccttgtgggagagcggggcgcccagctgtctggaggtcaaaaacagagaatagccatcgctagggcccttgttagaaatcccaagatcctgttgctggacgaagcgacaagtgctcttgatactgagtccgaagcagaggtgcaggcagctcttgataaagcacgggaggggagaacaaccattgtgattgcacacaggctttccaccgtgcggaacgcagacgtaatcgctggctttgaggatggcgtaattgttgagcaggggtcacattcagagctcatgaagaaagagggtgtgtatttcaagctcgtcaatatgcagactagtgggagccaaatccagagcgaggagtttgagctcaatgatgagaaagctgccacccggatggctcccaatggttggaaatcgaggctgttccgccattcgacacagaagaacctgaagaactctcagatgtgccagaagagtctggacgtggagactgacggtctagaggccaatgtacctccagtttcgtttttgaaggtactcaaactgaataaaacagaatggccctattttgtggtgggcactgtatgcgcaatcgcaaacgggggtctgcaacccgccttttcagtgatattctcagagattattgcaattttcggccccggggatgatgccgtgaagcaacagaaatgcaacattttttctctgatttttttgttcctggggattatctcattcttcactttttttcttcaggggtttacattcgggaaggccggggaaattttgaccaggaggctccggtctatggcctttaaggccatgcttcgtcaggatatgagttggtttgatgaccataaaaactcaaccggcgctctttccactagactggccacggacgccgcgcaggtccagggggctaccggcactagattggctcttatcgcccaaaatatcgccaatctaggtaccggaatcattatttccttcatttatggatggcagctgactctgctactcttggcagtcgtgcctatcattgccgtgagtggaatagttgaaatgaaattgctcgccggcaatgcaaagcgagataagaaggaactagaagcagccggaaagatcgcgacggaagccatagaaaacatacggactgtggtctccctgacacaggagagaaaatttgagagtatgtatgttgagaagctgtacggcccctatcggaatagcgtacagaaagcgcacatatacggcattacttttagcattagtcaggccttcatgtatttctcctatgctgggtgcttccgctttggcgcctacctgatagtgaacggccatatgcgttttcgggatgttattttggtgttttccgctatcgtattcggagccgttgctcttgggcacgccagtagctttgcaccagactatgccaaggccaagctgtctgccgctcatttattcatgctgttcgagaggcagccgctcattgacagctatagtgaggaaggcctgaaacctgacaagttcgagggaaatatcaccttcaacgaggtggtgtttaattaccccactagagccaatgtacccgtcctgcaggggctcagcctagaggtgaaaaaaggacagactctcgcgctggtcggatcctctgggtgcgggaaatcaacagtcgtccagctgctcgagaggttctacgatccgctggcagggacagtattcgtcgattttggtttccaactgttggatgggcaggaggccaagaaactgaatgtgcagtggttacgggctcagttgggtattgtgtctcaagaacccatcctgtttgattgctccatcgctgaaaacattgcgtatggggataactctcgggtggtctcccaggatgagattgtatcagcggctaaggccgctaatatccacccttttatcgagactctacctcataagtacgagaccagggtcggcgacaaaggcacacaactctctggcggacagaaacagcgaatagcaatcgcgcgtgccttaattaggcaacctcagatattattactggacgaagctacttcagctctggacaccgagtcagagaaggtagtccaagaggccctggataaagctcgcgagggtagaacatgcattgtgatcgcacaccggctatccactattcagaacgccgatctgatcgtggtgttccagaatggtagggtgaaggagcacggaacacaccagcagctgttagcacaaaagggcatctacttctctatggtctcagtacaggcaggcactcagaatctt

SEQ ID NO: 7501 - DNA, 3858 bp, synthetic construct
  misc_feature 1..3858: note = source = /note="Description of Artificial Sequence: Synthetic coding sequence"
  source 1..3858: mol_type = other DNA
atggacttagaagcagccaaaaatggaactgcttggcgccctacctctgcagaaggcgactttgagctgggtatctccagtaagcagaagcgtaagaaaacaaagactgtaaagatgatcggcgtccttacattgttccgttactcggattggcaggacaaactgttcatgagtttaggaactattatggctatagctcatggtagcggtcttcccctcatgatgatcgtatttggggagatgaccgacaagtttgtggataccgcgggaaacttcagcttccccgtgaacttttccctgtccctactgaaccccgggaagattctggaagaagagatgactcggtatgcatactattactccggtctgggcgccggtgtgctcgtcgccgcttatatacaggtctcgttttggacactcgcagcggggaggcaaattcgtaagatacggcaaaagtttttccatgccattctgagacaggaaattggctggtttgacattaacgatacgaccgagcttaacacccggctgaccgatgacatcagcaaaatcagtgaaggcattggtgacaaggtggggatgttctttcaagcggtggctactttcttcgccggttttatcgtgggattcatacgcggatggaaactcaccctggtgatcatggccatttctccaatccttgggctgtctgccgctgtatgggccaagatactgtccgcattttctgacaaggaactagcagcatacgcaaaggcaggggccgtggccgaggaagcacttggtgctatccgtacagtgatagccttcggagggcagaacaaggagttggagagatatcaaaaacacctcgaaaatgcgaaggaaattggcatcaagaaggctattagcgctaatatatctatggggatcgccttcttgctgatctacgcctcttatgctctggcattttggtatggtagcaccctggttattagcaaagagtacactattggcaatgctatgaccgtgttcttctctattttgatcggcgcattttctgtgggacaagccgcgccgtgtatagacgcgtttgccaatgcgaggggagctgcctacgtcatctttgacattattgataacaacccgaaaattgactccttttctgaacgcggccataagcccgactctattaagggcaacctagagttcaacgacgtgcacttctcatatcctagtagggccaatgtcaagatactgaaaggtctcaatctcaaggtacaatctggtcagacggtggcactggtcggatcttccggatgtgggaaaagcaccaccgtgcaactgatccagcggctttatgacccagacgaggggacaatcaatattgacggccaggacatcagaaacttcaacgttaactatctgcgggagattatcggcgtcgtgtcgcaggagcccgtgctattctcaactacgatcgccgaaaatatctgctatggaaggggtaacgttacaatggacgaaattaaaaaagctgtgaaggaggcaaatgcttacgagtttatcatgaaactaccccagaagtttgacaccctggtcggggagcgcggggcccagctgtccggcggccagaagcagcggatcgcaatagcgcgggctctcgtccgcaatcccaagattttgttgctggacgaggctactagcgctctagatactgagtccgaggccgaggtgcaggcagcgctcgataaagcacgggagggccgtaccaccatcgtcatcgctcatagactttccacagtgcggaacgctgacgtgattgccgggttcgaagacggggtgatcgttgagcaggggagtcattctgaactaatgaaaaaagaaggcgtctattttaagctggtcaacatgcagaccagcgggtctcagatccagtcggaggagttcgaactcaacgacgagaaggcagccactcggatggccccaaacggatggaagtccagacttttcagacacagcacccagaagaacctgaaaaactcccagatgtgccagaagtcactggatgtggagaccgatggattagaggcaaacgtgccacctgtgagtttcctgaaggtcctgaagctgaacaaaacagaatggccgtattttgtcgtgggaacagtgtgcgctatcgctaatggcggcttgcagcccgcattctcagtgatcttctctgagatcatcgccatctttgggcccggagacgacgcagtgaagcagcagaagtgtaacattttcagcctgattttcctgttcctgggaatcatcagtttctttacctttttcctccaaggttttacctttggcaaggcaggagaaatcctgactagaaggctacgcagcatggcctttaaagccatgctgcggcaggatatgagttggttcgatgatcacaagaatagcacaggggccttaagcacacggctggccaccgacgcggctcaggttcagggagccacgggcaccagactggcgctcatcgcacagaacattgccaatctggggactgggataatcatatcctttatctatggatggcagctgacactgctgctgttggctgtggtgcccattatcgctgtttcaggcattgtggagatgaaacttctggcagggaatgcaaaacgagataaaaaagaattagaggccgccggaaaaattgccaccgaggctatcgagaatatccgaactgtggtctctttaacacaggagcgaaaatttgagtcgatgtatgtagagaaactctacggtccatacaggaactccgtacagaaagcacacatttatggcataacgttttctattagtcaggcttttatgtatttttcttatgccggctgttttcggttcggcgcatatctgattgttaacggacatatgcggttccgggatgtcattcttgtcttctcagcaatcgtttttggggcagtcgcgctaggccatgccagttccttcgctccagattacgccaaagctaagctgagcgccgcccacttgttcatgctatttgaaaggcagcctttgatcgactcctattctgaagaggggcttaagcctgacaagtttgagggtaacatcactttcaatgaagttgtattcaactacccaactcgcgctaacgtaccagtgctgcaaggcctctctcttgaggtgaaaaaaggtcagaccctcgccttagtgggatctagcggatgcgggaagtcaacagtggttcagctgctggagagattctatgacccactggccggtacagtttttgtcgacttcggctttcaacttctggatggtcaggaggccaagaaactcaacgtacagtggctcagggcacagctcggcatcgtctctcaggaacccattcttttcgattgtagcattgctgagaatatagcatacggggacaattcgcgggtcgttagccaagatgagatcgtgagtgccgccaaggctgctaacatccatccctttattgaaaccctaccccacaaatacgagacacgcgtgggcgataaaggtactcagctgagcggagggcagaaacagaggatagccattgctagggccctaatcaggcagccacaaattttactgttagatgaggccactagcgcactcgacaccgaatccgagaaggtcgtgcaggaggcactcgacaaagctcgggaaggacgcacatgtattgtcatcgctcaccggttgtccaccatccaaaacgccgacctcattgtcgtgtttcagaacgggagagttaaagagcatggcacccatcaacagttgttagcgcagaaggggatatacttcagcatggtgagtgtacaagccgggacccagaatttg

SEQ ID NO: 7502 - DNA, 3858 bp, synthetic construct
  misc_feature 1..3858: note = source = /note="Description of Artificial Sequence: Synthetic coding sequence"
  source 1..3858: mol_type = other DNA
atggacctggaggcagccaagaacggaaccgcctggcggcctacatctgccgaaggcgattttgaactcggaatctcttcaaagcagaagcgaaagaagaccaagacagtgaagatgatcggagtccttactctctttcggtacagcgattggcaggataagctcttcatgtctctcggcacaataatggctatcgctcacggttcaggcctgcctcttatgatgattgtgttcggagaaatgaccgataagtttgttgacactgcagggaacttttcttttcccgtcaatttcagtttgtccttacttaaccccggcaagattctggaagaggagatgacccggtacgcctactattactccgggctgggagccggtgtgcttgtagccgcttatatccaggtctcgttctggactcttgccgccggccgccagattcgcaaaatccgccaaaaatttttccacgccatcttgcggcaagagatcggctggttcgacatcaatgatacgacggagctgaacacccggcttacagatgatatctcaaaaatttcagaaggcatcggagacaaagtgggaatgttttttcaggcagtggccactttttttgccgggtttatcgtcggctttatcaggggctggaagctgacccttgtgattatggccatttcccccattctcggcctgagcgcagcggtgtgggcaaaaattctttcagcctttagtgataaggagctcgctgcttatgccaaagcaggcgctgttgccgaagaggccttgggagcaattcgaacagtgatcgctttcggagggcaaaataaggagctggagcgatatcaaaaacacctggaaaacgccaaagagatcgggatcaagaaagctatctctgccaacatcagcatgggaatcgcttttctattgatttacgcctcttatgcccttgctttctggtatggctcaacactggtaatcagtaaagagtacactatagggaacgcgatgaccgtcttctttagtattctgatcggtgcatttagcgtaggacaggctgccccttgcatcgatgccttcgctaatgcccgtggcgctgcctatgtcatcttcgacatcattgacaacaatccaaaaatagattccttcagtgagagggggcataaaccagatagcattaagggcaatttagagttcaatgatgtccatttcagttatccttcgcgcgctaacgttaaaattctgaaaggactaaacctgaaggttcagtctggccagaccgttgcccttgtcggcagcagcggttgtggcaagtccactactgtccagcttatacagagattatatgatcccgacgagggcaccatcaacatcgacggccaggatatccggaactttaacgtaaattacctgcgagaaatcataggagtggtttctcaagagccagtgctgttctctacgaccatcgccgaaaacatctgttatgggcggggcaacgtgaccatggacgagattaagaaggctgtcaaagaggccaatgcatatgagtttattatgaagttgcctcagaaatttgacacactagtaggggagcgaggagcacagctgagcgggggtcagaaacagcgcattgccatcgcccgcgccctggtgagaaaccctaaaattcttctgctagacgaagccacctcagcgttagacacagaaagcgaagcagaggtgcaggccgcgttagacaaggcacgcgagggtcgcacaacaatcgtgattgctcaccgcctgagcactgtgagaaatgccgacgtgatcgcaggatttgaagacggcgtgatagtggaacaagggagccattccgagcttatgaagaaagagggagtctatttcaaattggttaacatgcagacctccggctcccaaattcagtcggaagagttcgagcttaatgatgaaaaggccgctacccggatggcccccaacggttggaagagccgcctctttcggcactctactcagaaaaacctcaagaactctcagatgtgccaaaagtcattagacgtcgaaaccgatgggttggaggcaaatgtccccccggtaagctttttaaaagtcctgaaactcaataaaaccgagtggccttactttgtcgtgggcacagtgtgcgcaatcgcgaacggaggcttacaacccgctttctccgtgatcttctctgaaatcatcgctatcttcggccccggtgatgatgccgtcaagcagcagaaatgcaacatcttttccctcatcttcctgtttctgggcatcatcagcttctttaccttcttccttcaggggtttacttttgggaaggccggcgaaatcctcacaaggagactgagaagtatggccttcaaggcaatgctgcgccaggatatgagctggtttgatgaccacaagaatagtaccggggctttgtccacccggcttgccacagatgccgctcaagtgcagggcgccaccggcacgcgcctggccctgattgcacaaaatatcgccaacctggggaccggaataataatatcctttatctacggatggcagcttaccctgctcttacttgctgttgtacctataatcgctgtctccggcatagtggaaatgaagttgctggccgggaatgctaaaagagacaagaaagagctggaagcggccggcaaaattgcaacggaggcgatcgaaaacatacgaacagttgtgtctttgactcaggagaggaagtttgagtcaatgtatgtggagaagctgtatggtccgtacagaaactcggtacaaaaagctcatatatacggtattaccttttccatcagccaggcctttatgtacttcagttatgctggctgttttaggttcggcgcgtatctgatcgtcaacggccacatgcgctttcgggacgtcatccttgtgttcagcgctatcgtgtttggtgccgtggccctggggcatgcctctagctttgctcccgattacgctaaggccaagctaagcgcagcacatttattcatgttattcgagcgtcagccccttatcgactcatattccgaggagggcctgaagccagataagttcgaaggcaatattacgtttaatgaagtggtcttcaactaccctacaagggccaatgtgccggtgctgcagggtctctctctggaagttaagaagggtcagacactggcactggttggcagttcgggctgcggtaagagtaccgtcgttcaactgctcgagcggttctatgatcccctggcaggaacagtctttgtggattttggatttcagctgctggatggacaggaagctaaaaagctgaatgttcagtggttgcgggcgcagttgggcatcgtgtcacaagagcccatcctgttcgattgctcaatcgctgaaaacatcgcatacggcgataattcccgggtagtgtcccaggacgaaattgtttcagcggccaaggccgctaatatacacccatttatcgagacgcttcctcataagtatgaaacccgagttggcgacaagggtacccagttatcaggaggacagaagcagaggatcgccatagccagggccctcattcggcagcctcaaatcctcttgctggatgaagctacatccgctctggacacagagagtgagaaggtggtccaggaggctctggataaggcccgggaagggcggacttgcattgtgatcgcccaccgattatcaacaatacaaaacgcggacttgattgttgtgttccagaatggacgcgtgaaggagcacggcacacatcagcagctgctcgcgcagaagggtatctatttctcaatggtttcggttcaggcagggacacaaaactta

SEQ ID NO: 7503 - DNA, 3858 bp, synthetic construct
  misc_feature 1..3858: note = source = /note="Description of Artificial Sequence: Synthetic coding sequence"
  source 1..3858: mol_type = other DNA
atggacttggaggcagcgaaaaatggtactgcatggcgccctacatctgccgaaggtgacttcgaattgggcatttcatcaaagcagaagcggaagaagactaaaacagtcaaaatgattggagtcctgactctcttcagatatagcgattggcaggacaaattgttcatgtctcttggcactataatggcaatcgcccatggtagtggactacctttgatgatgatcgtgttcggagaaatgacagacaagttcgtggatacagccggcaatttctccttccctgtgaacttctctctttcactgctaaacccggggaaaatcctcgaggaagaaatgacgagatatgcgtactactacagtggtctgggagcgggtgtgctggtggcggcctacatccaggtgtccttctggactttagccgctggacggcagattagaaagatccggcagaagttttttcacgctattctcagacaggagattggctggtttgacattaacgacacgactgaactgaatactcgcttgaccgacgacatttccaaaatatccgaggggattggagataaggtgggaatgttcttccaggctgttgctactttctttgccggcttcatagttggtttcattagagggtggaagctgaccctggtgattatggccatctctcccatcctagggctgtccgcagccgtatgggccaaaatactgtccgctttcagcgacaaagaactggctgcatatgccaaggcgggagccgtggctgaagaggcattaggtgccattcgaaccgtgatagccttcggcggccagaacaaggaacttgagcggtaccagaagcacttggagaatgctaaagaaattggtataaagaaagccatctccgccaatatctccatgggcatcgcatttctcctcatttatgcctcttacgctcttgctttctggtacggaagcacactggttatctccaaagagtataccattggaaatgccatgacagtgtttttctctatcttgataggggcttttagtgtcgggcaggccgccccatgtatcgacgccttcgctaacgccaggggtgcagcctatgtgatatttgatatcattgacaataacccgaagatcgactcattcagcgaacgcggccataagccagacagcatcaagggcaatctcgaattcaatgatgtccatttctcataccctagccgggccaacgttaagatccttaaaggactgaacctaaaggtgcagtcgggccaaaccgttgcactggttgggagtagcgggtgcggtaaatccactaccgtgcagctcatccagagactgtatgaccctgacgagggcacaatcaacatcgacgggcaggacatccggaacttcaacgtgaattacctgcgcgaaataattggagttgtatcacaagagcccgtcctgttcagtacaaccatcgccgaaaacatttgctacggcagaggcaacgtaaccatggatgagattaaaaaggccgtcaaagaagccaacgcttatgagtttatcatgaagttgccacagaagttcgataccctggtgggcgagcggggagcccagttgagcggggggcaaaaacagaggattgcgatcgcccgcgctctagtccgcaatccaaagatcttacttctggatgaggccactagtgctcttgatacagaatccgaagccgaggtgcaggccgccctggataaggcccgggaaggacgcactaccatcgtgatcgcacatcgcctgtctacagtgaggaatgcggatgtgatagctggcttcgaagatggcgtgattgtggaacaggggagccacagtgagttgatgaagaaggaaggggtgtacttcaaactggtgaatatgcagaccagcggcagtcagatccagagcgaagaattcgagctcaacgatgaaaaagccgccacacgcatggcacctaacggctggaagtctcgtctctttcgccactctacccagaaaaacctcaagaattcacagatgtgtcagaagagccttgacgtggaaacggatggactcgaagctaacgttccccctgtctcatttcttaaggtactgaaactgaacaagactgagtggccgtacttcgtggtcggtacagtctgcgcaatcgccaatggcggcttacaacctgccttttcggtgattttcagcgaaatcatcgcaatctttggccctggcgacgatgcggtgaaacaacaaaaatgtaacatattcagcctgatcttcctattccttggcattataagtttcttcactttttttctgcaagggtttacctttggcaaagccggggagattctgaccaggcggctgaggtcaatggctttcaaagctatgctccggcaagatatgtcttggtttgatgaccacaagaacagcacgggcgcactgtctacaaggttggcgacggacgcagctcaggtgcaaggagctactggtactcgtttggctttgattgctcagaatatcgcaaacttgggcacaggaatcatcatttcctttatatacggctggcagctgacactcctcttacttgccgtggtgccgattatcgcggtgagtggaatagtggagatgaagttacttgcaggaaatgccaagcgcgacaagaaggaacttgaagctgcaggcaagatcgctacggaagccatcgagaatattagaacagtagtctctcttacccaggagagaaagttcgagtcaatgtacgtcgagaaattatatgggccctacaggaattccgtgcagaaggcccatatttacggcataacgtttagcatctcacaggctttcatgtatttcagttatgccggttgcttccgatttggtgcctacttgatcgttaatggacacatgcgcttccgtgacgtgatcctggtgttttccgccattgtgttcggcgccgtggccttgggccacgcttctagttttgcacctgactatgccaaggccaaactctcagcagcccatctgtttatgttgtttgaaaggcagcccctgatcgactcatatagcgaggaggggctaaaaccagacaagttcgaaggaaacatcaccttcaacgaggtcgtgttcaactaccccactcgcgccaacgtccccgttctccaggggttgagtctggaagtcaagaagggccaaaccttggcccttgtgggctcatctggatgtggaaaatccacagtggtacagctgctcgaaaggttttatgacccactcgctggcacggtgtttgtcgatttcggcttccaactgcttgacggtcaggaggccaaaaagttaaacgtccaatggctgcgcgcccaactgggaatcgtgagccaggaaccgatccttttcgattgttccatcgctgaaaatatcgcttacggagataactcccgcgtggtctctcaggatgaaattgtttccgcggcaaaagctgcgaacatccatccattcatagaaacgctgccccataagtacgagacccgggtcggtgacaagggaacacagctgagcggggggcaaaagcaacgcatcgccattgcgagagccctgatcaggcagcctcagatcctcctgctggacgaggcaaccagcgccctggatacagagagcgaaaaagttgttcaagaggccctggataaggctcgagaaggacggacttgcatcgtcattgcacaccggctgagcactatacagaatgctgatctgattgtcgtgttccagaacggccgggtgaaggaacacggaacccatcagcagctgctggcacagaagggtatttacttcagtatggtgtcagtgcaggctggcacccaaaatctt

SEQ ID NO: 7504 - DNA, 3858 bp, synthetic construct
  misc_feature 1..3858: note = source = /note="Description of Artificial Sequence: Synthetic coding sequence"
  source 1..3858: mol_type = other DNA
atggatctggaggctgccaagaacggaacggcctggcgccccaccagtgccgaaggagatttcgagcttggcatatccagcaaacagaaacgcaaaaaaaccaagaccgtgaaaatgataggggtgcttacccttttccgctactctgattggcaggacaaacttttcatgagcttgggtacaatcatggccatcgctcatggcagcggtcttccactgatgatgatagtgttcggggagatgacggacaagtttgtcgacacagcagggaatttctcatttcctgtgaatttttccctcagtctcctcaatccggggaaaattctggaagaggagatgaccagatatgcttactactattcaggcctgggagctggtgtgttggtggccgcatacattcaggtttcattttggacgctggctgctggtaggcagattaggaagattagacaaaagtttttccacgccatcctgaggcaagagatcggttggtttgatatcaacgataccacagagttgaacaccagactgacagatgacatcagtaaaatttccgagggtataggcgacaaggtcggcatgttctttcaggcggtggctacgttcttcgccggctttatcgttggattcatcagagggtggaaactgacactggtgattatggccattagcccaatcctggggctgagtgccgccgtttgggctaagatcctctccgccttcagcgacaaggagctcgccgcgtatgctaaggccggggcggtggctgaagaggctcttggcgcaatccggacagtgatcgccttcggaggccagaacaaagagttggagaggtatcagaagcaccttgaaaacgccaaagagattggaattaagaaggcgatcagtgccaatatctccatgggaatcgcgtttctcctgatttacgcctcatatgctctggctttctggtatggatctactctggtgatttctaaagagtacacgatcgggaatgccatgaccgtcttcttctccattctcatcggtgcgttcagtgtcggacaagcggctccctgcattgatgctttcgccaatgcccgcggggcagcatatgtgatcttcgacataattgataacaacccaaagatagattctttcagtgagcgcggccacaaaccagatagtatcaaagggaatcttgaatttaacgatgtgcacttttcctacccatctcgcgccaacgtgaagattctcaagggcctgaaccttaaggtacagtcaggtcagaccgttgcattggtcggcagttccggctgcggcaagtccactactgtgcaactgattcagcgcctgtacgaccccgatgaaggtaccatcaacattgatggacaagacatccgcaattttaatgtcaactatctgagggagataatcggggttgtgtcccaggaacccgtcctgttttctactaccatcgccgaaaatatctgctacggccgaggcaacgttacaatggatgagatcaaaaaggccgttaaagaggccaacgcctacgaattcatcatgaagttgccacagaagttcgatacacttgtgggcgagcggggggcccagctctctggcggccagaaacagaggattgccattgcccgggccctggtgaggaacccgaaaatcctgttgttggatgaagcgacatctgcccttgataccgagtccgaagccgaggtgcaagcagctctggataaggctcgagagggcagaactacaatagtgatcgcgcatagactcagcacagttcgaaatgccgacgtcatcgctggttttgaagatggagtgattgtggaacaaggtagtcattctgaactcatgaagaaggagggagtctactttaagctcgtcaatatgcagacatctgggtcacaaattcagtccgaggaatttgaactgaacgatgagaaggctgccacacggatggccccgaatggctggaagagccggctgtttcggcacagcacacaaaagaacctgaaaaactcccagatgtgtcaaaaaagtcttgatgtggaaacagacggcctggaagccaatgtcccgcctgtctccttccttaaagtcctcaagctgaataagacagagtggccctatttcgtggtcgggacggtttgtgccattgcaaatggtggactgcagccggccttctctgtcatattttcagagattatcgcaatatttggaccaggcgacgacgccgtaaagcagcagaagtgcaatatctttagtctcattttcctgttcctcggaatcatctccttctttacattcttcttgcaaggatttacttttggcaaggctggggagattctcactcggagactgagaagtatggcctttaaagcgatgcttcgacaagacatgagctggtttgatgaccataagaattcaaccggcgcgctgagcacccgactggccacagacgcggcccaagtccagggggctactggtactaggctcgctcttatcgctcagaatatagccaatctgggaacgggaatcataatcagcttcatttacgggtggcaactgacactgttgctcctggccgtagtgccaatcatagccgtgtctggcatcgtggagatgaaacttctcgcaggaaacgccaagcgggacaagaaggagctggaagcagccggcaaaatagctaccgaggccatagaaaacattcgaactgtggtcagccttacccaggagcgaaaatttgagtccatgtacgtggagaagctgtacgggccctaccgcaatagcgtccagaaagcccacatctacggcatcacattctctatttcccaggcgttcatgtatttctcatacgctggatgctttcggttcggcgcctacctgatagtgaatggacatatgcgctttagagacgtgatccttgtattttctgccatcgtgttcggcgcagtcgccctggggcatgcctcaagttttgctccggactacgccaaagccaagctttccgcggcacacctgttcatgctgtttgagcgacagcctctcatcgattcatactctgaggaaggactgaaacccgacaagtttgagggcaatattacctttaacgaagtagtattcaattacccaacaagggccaacgtgcctgtgttgcagggcctcagcctggaggtaaaaaaaggccagacgctcgccctggtgggtagctctggatgcggcaaaagtactgtagtccagctcttggagcgcttctacgacccattggccggaacagtatttgtggacttcggctttcagttgctggacgggcaagaggcgaaaaagctgaatgtgcaatggctgcgagcacagctgggcatcgtttcccaggaaccaatcctctttgattgctcaatcgccgagaacattgcatatggtgacaactctcgggtcgtctcccaggacgaaatcgtgagtgccgcgaaggccgcaaatatccacccgtttatagagactctgccgcataagtacgagacaagggtgggtgacaaggggactcaactctccggcggacaaaaacagcggattgctatcgcgcgggccttgattagacagccacagatcctcctgctggatgaagctacctctgcactcgataccgaaagcgagaaagtcgtgcaggaggcactggacaaggcaagagaggggcggacctgcatagtgatcgcccacaggctgagcaccatccagaatgcggacctgatagtggtctttcaaaatggccgcgtaaaggagcatggaactcatcaacagctgctggcacagaaaggtatatacttcagcatggtatccgtgcaagccgggacccagaatctg

SEQ ID NO: 7505 - DNA, 3858 bp, synthetic construct
  misc_feature 1..3858: note = source = /note="Description of Artificial Sequence: Synthetic coding sequence"
  source 1..3858: mol_type = other DNA
atggacctagaggctgcaaagaatggcacggcttggagaccaacgagcgccgaaggtgactttgagttagggattagctccaagcaaaagaggaagaaaactaagactgtgaaaatgatcggcgtcctcacgttgtttcgctattcggactggcaagataaactttttatgtcccttggtaccataatggcaatagcacacgggagcgggcttccacttatgatgattgtttttggagaaatgaccgacaagtttgtggacactgccggaaactttagctttcccgtcaacttttccctttcgctcctgaacccaggaaaaatcctggaagaggaaatgacacgatacgcttattactacagtggtctcggcgccggagttctggtagcagcttatatccaggtgtctttctggacgttggcagctggccgccagatcaggaagattcgacagaaattcttccacgcgatcctcagacaggagatcggttggttcgatatcaacgacaccactgagttgaacacccgtcttaccgacgatatttccaaaatctccgagggtatcggggataaggttggtatgttcttccaagccgttgcaactttctttgccggttttattgtcggtttcattagagggtggaaattaacactcgtcataatggcaatctcgcccatcttaggcctatcggcggcagtgtgggcaaagatcctgtccgcttttagtgataaggaactcgctgcgtacgccaaggcaggggcagttgctgaggaagccctgggtgcgatccggactgttatcgcgtttggcggccagaacaaggaactcgagcggtatcagaagcacctagaaaatgccaaggagattggaattaaaaaagctattagtgctaacatctctatgggtatcgcctttttgctgatctacgcttcctacgctctcgcgttctggtatggctctactttggtgatttccaaggagtatactataggcaacgctatgaccgtcttttttagtatcctcattggcgcgttcagcgtgggccaagcggctccttgcattgacgcatttgctaacgctaggggtgctgcatatgtcatctttgacatcattgataacaaccctaaaatcgactccttttccgagaggggtcacaagcccgatagtattaagggaaacctggaattcaacgatgtccactttagttatccatcaagagcaaacgtgaagattctaaagggcttgaatctgaaagttcagtccggtcagacagtggcattggtgggcagttctggctgcggaaagagcactacggtacagcttattcaacgtctatatgatccggacgaaggaacgattaacattgatggccaggatatccggaattttaacgtcaattacctccgcgaaataataggagtggtttcacaggagcctgtcctgttttccacgactatcgcagaaaacatctgctacggccgaggtaacgtgaccatggatgaaattaagaaagcagtaaaggaggccaacgcatatgaattcatcatgaagttgccgcaaaaattcgatactttggtaggagaaaggggcgcccagctatcaggaggtcaaaagcagcgtattgctatcgcccgggcactcgttcgaaacccaaagatcctactgttagatgaggctactagtgctcttgacacggagtcagaagcggaggttcaggccgccctggataaagctcgcgagggacgtacaaccatcgttatcgctcaccggctctctacagttcgcaatgcagatgtgattgcaggatttgaggatggagtaattgtcgaacaaggtagccattctgaactgatgaagaaggagggagtctactttaagctggttaacatgcaaacttctggatcccaaatccaaagcgaggaatttgagctgaacgatgagaaggcggcgacacggatggcacctaacggatggaagtctagacttttccggcatagcacccagaagaatttgaaaaatagccaaatgtgtcaaaagtcgttggatgtcgaaaccgacggattggaagctaacgtcccacctgtttccttcctcaaggttttgaagctcaacaaaacggaatggccgtacttcgtcgtcggaaccgtctgtgctattgccaacggcggtttgcagccggcattttcggtaatttttagtgaaatcatagcaatcttcggccctggggacgatgccgtcaagcaacagaaatgtaatatcttttcgcttatcttcttgttcctcggcattatcagctttttcacctttttcctacagggattcaccttcggaaaggcaggtgagattcttacccgacgccttcggtctatggcattcaaagcaatgctgaggcaggacatgagctggttcgacgaccacaagaattctacgggtgccctttccactcgcctcgcaacagacgctgctcaagtgcaaggggcgacaggtaccaggctcgcgcttattgctcaaaatatcgcaaatctcgggacaggcatcatcatcagctttatatacgggtggcagttgaccctcctcctgctcgccgtcgtcccaatcattgcggtttcaggaattgtagagatgaagctactggcaggtaacgcaaagcgagataagaaagaattggaagctgcgggtaaaatcgccacggaggctatcgagaatatccgcactgtggtcagtctcacacaggagcgtaagtttgagtcaatgtacgtggagaagttgtacggaccgtaccgaaatagtgtgcaaaaagctcatatttacggcattacatttagtatctcacaggcattcatgtacttttcgtatgcgggctgcttccggttcggtgcctacttgatcgtcaatgggcatatgcggttccgagatgtgatcctcgtcttcagtgccatcgtgttcggcgccgtggcccttgggcacgcgtcttcgttcgctcctgactatgctaaggctaagctgtccgcagcgcacctgttcatgctatttgagcggcagccacttattgacagctatagcgaggaaggtctcaaacctgataaatttgaaggcaacataaccttcaatgaggttgtgttcaattacccaactcgagcaaacgtaccagtcctccagggcttaagcctcgaggtcaagaagggccaaacacttgctctagttggttcgtcaggatgcggtaagtccactgtggtgcaactccttgaacgcttttacgatcctctagctggcaccgttttcgtagacttcggatttcagttgctagatggccaggaagcaaaaaaactgaatgtccaatggcttcgggcccagctgggcattgtgtcccaagagcccattctcttcgactgctctatcgcggaaaatatcgcgtatggcgacaattccagggtcgtttcgcaagatgagatcgtctccgcggccaaagcggcgaacattcacccattcattgagactttaccgcataaatacgagacccgggtgggcgacaagggaacgcagctttccggaggtcagaagcaacgcatcgctatcgcaagagcactcatccgacaacctcagatattgttacttgatgaagctacgagcgccctggatacagagtctgaaaaggtggtgcaggaagcgctggacaaggcgcgagaagggcggacctgtatcgttattgcgcacaggcttagtaccattcaaaatgccgatctgattgttgtgttccaaaatggtcgcgtcaaggagcatgggacacatcagcagttgttagcacagaaaggtatctatttctcaatggtgtccgttcaagctggaactcagaacctg

SEQ ID NO: 7506 - DNA, 3858 bp, synthetic construct
  misc_feature 1..3858: note = source = /note="Description of Artificial Sequence: Synthetic coding sequence"
  source 1..3858: mol_type = other DNA
atggatctcgaagcagccaaaaacgggactgcctggcggcccacatccgccgagggggatttcgaattaggaatttcctctaaacaaaaaagaaaaaaaactaaaacagtcaagatgatcggagttctaactctgttcagatatagtgattggcaggacaaactatttatgtcccttggaactataatggctatagcccacgggtcaggattgcctctgatgatgattgtcttcggagaaatgacagataaattcgtggatacagccgggaacttttccttccccgtgaattttagtctctctctccttaatcccggaaaaattcttgaagaagaaatgacgcggtacgcctactactattcaggactaggggccggagtgctagtggctgcctatatccaggtcagtttctggactctcgctgccgggaggcagatacggaaaattagacagaaattctttcatgctatacttcggcaggaaatagggtggtttgatatcaacgacacaactgaactcaacactcggctcacagatgatatctcaaaaatatccgaagggataggagataaagtcggaatgtttttccaggctgtggccacattttttgccgggtttatagttggattcatccgggggtggaaactcactcttgtgattatggcaattagtcctatccttggactgagtgctgcagtgtgggctaagatcctctcggccttctccgacaaagaactagccgcttatgccaaagccggggcagtagccgaggaagcccttggggccatcaggacggtgatcgcctttggagggcagaacaaagaattagagagataccagaagcaccttgaaaatgccaaagaaataggaatcaagaaggcaatatctgccaatatctccatggggatagcattcttacttatctatgcatcttacgccctcgctttctggtatgggtctactttagtgatatcaaaagaatatacaatcggaaacgctatgactgtctttttttctatccttattggagccttttccgtcggacaagctgccccctgtatcgatgcttttgccaacgctagaggagctgcatatgtcatcttcgacattatagataataatcccaaaatagactcattcagtgaacgagggcacaagccagattcaattaaagggaatttggaattcaatgacgtacacttctcctacccttctcgggcaaacgtgaaaatcttgaaagggctcaacctgaaggtgcaatctgggcagacagtggccctagttgggtcttctggatgtgggaaatctacaactgtccagctcatacagcggctctacgatcccgatgaagggactatcaacatcgatgggcaggacatcagaaacttcaatgtgaactatcttagggagattataggagtggtgtcccaggagcctgttctattctcaactacaattgctgaaaacatatgttatggacggggaaatgtaactatggatgaaataaaaaaagccgtaaaagaagccaacgcctatgaattcatcatgaaattgccccagaaatttgatacactggtcggagaaagaggagcacagctcagtggaggacagaaacagcgcatcgcaattgcacgggccttagtgaggaatccaaaaatcctactcctcgatgaagcgacaagtgctctcgatacagaatccgaagccgaagtgcaggcagcattagataaagccagagaagggagaactactatcgttatcgctcacagactgagtacagttcgcaatgcagacgtgattgcagggttcgaagatggagtgatagtggaacagggatcacattctgaactcatgaaaaaggaaggagtatattttaaacttgtcaatatgcagacatctgggtcacagatccagagtgaagaattcgaacttaacgatgaaaaggctgccacaaggatggcaccaaacggatggaagtccaggctctttaggcattctacacagaagaatctgaagaactctcagatgtgtcagaaatctcttgacgttgaaacagatgggctcgaagcaaatgttccacctgtgagttttttgaaagtgctgaaactaaataaaacggaatggccatatttcgttgttgggacagtctgcgctatcgccaatggaggactgcagccagcgttctcagtgatcttttccgaaataatcgccattttcggaccaggggacgatgcagtgaagcagcagaaatgcaatatattttccttaatattcctgttcctgggaataatttctttttttactttttttctacaggggtttactttcgggaaagccggagaaatactgacaaggcgattgagaagtatggcttttaaagccatgcttcggcaggatatgtcatggttcgacgatcataaaaattccacaggagccctatcaactaggcttgccactgatgctgcacaggtccagggggccactggaacacggttggcactcatagctcagaatattgcaaaccttgggacaggaataataatctcttttatctatgggtggcagctcacacttctcctgctggcagtagtgcccataattgcggtttccgggatcgtggaaatgaaacttctggctgggaatgcaaagagagataaaaaagaactcgaggcagccggaaaaatagccacagaagccatagaaaatattaggactgtggtttccttgacacaggaacggaaattcgaatctatgtacgttgaaaagctctatggaccatacagaaattctgtgcagaaagcccacatatatgggatcactttttctatctcccaggcttttatgtatttctcatacgctggatgtttccggttcggagcgtacctcatagtaaatggacacatgcgatttagggatgtcattctggtcttttcagccatagtcttcggggctgttgcacttggacatgcatcatctttcgcccctgattatgcgaaggctaagctctctgctgcgcacctgttcatgcttttcgaacgacagccactaatagattcctatagtgaagaaggactcaaaccagataaatttgagggaaatatcacttttaacgaagtcgtgttcaactacccaactcgggctaacgtgcccgtactccagggactctccctggaagtaaaaaaggggcagactctggcactcgtcggatcctctggatgtggaaaatccacggttgtgcagcttctagaacgcttctatgaccctctcgcaggaacagtgtttgtcgattttgggttccagctattggatggacaggaagcaaaaaaacttaacgtccagtggctccgggctcaattaggaattgtttctcaagaacctatactgttcgactgttcaatagccgagaacattgcgtacggggataattccagggtggtctcgcaggatgaaattgtgtccgccgccaaagctgccaatatccatcccttcatcgaaacactacctcacaaatatgaaactcgggtaggagataaagggactcagctgtccggaggacagaaacagagaatcgcaatagctagggcactcatacggcagccccagatcctgctccttgatgaagccacatctgccctagatacagaaagtgaaaaagtggtccaggaagccttagataaagcacgcgagggacgcacatgtatcgtcatcgcccatcggttgagtacaatccagaatgcggacttaatcgtcgtgtttcagaatgggcgcgtgaaagaacatggaacacaccagcagttgctggcacagaagggaatctatttttctatggtctctgtccaggccgggacacagaacctt

SEQ ID NO: 7507 - DNA, 3858 bp, synthetic construct
  misc_feature 1..3858: note = source = /note="Description of Artificial Sequence: Synthetic coding sequence"
  source 1..3858: mol_type = other DNA
atggacctggaggcggccaagaatggcaccgcatggcgaccaaccagcgctgaaggagatttcgagctgggaatctcatcgaagcaaaagcgaaagaaaaccaaaaccgtgaagatgataggcgtcctgacgctcttcagatactccgactggcaagacaagctgttcatgtcactgggcactattatggctatcgcacatggatccggtctgcctttgatgatgattgtgtttggcgaaatgactgacaagttcgtggacactgctgggaacttctcgtttccggttaacttctccctgagccttctgaacccagggaaaatcctggaagaagagatgactcgctacgcctactactactctggattgggagcgggcgtccttgttgctgcgtacattcaggtgagcttttggaccctcgctgcggggcggcaaatcaggaagataagacagaagttctttcacgctatcctccgccaggagattggctggttcgacatcaatgatactaccgagttgaatacgcggttgaccgatgatatttcaaaaatcagcgagggtatcggagataaagtggggatgttctttcaagcggtcgcaacgtttttcgctggatttatcgttgggttcatcaggggctggaagctgacccttgtgatcatggcaatctcacctatcctgggactgtcggctgccgtgtgggcgaagattttgagcgccttttcagataaggagctggccgcgtacgccaaggccggcgccgtggctgaagaagccctcggcgcgattcggacggtgatcgctttcggaggccagaataaggagctcgaaaggtaccaaaagcacctggagaacgcgaaagagattggaattaagaaggcaatatccgcgaacatctcgatgggtatcgcgttcctgctgatctacgctagctacgccctcgccttctggtacggaagcactctcgtaatcagcaaagagtacaccatcgggaatgcgatgaccgtgtttttcagcatcctcatcggtgctttttcggtgggtcaggccgcgccctgtatcgacgctttcgccaatgctcggggagcagcctacgtgatcttcgacattatcgataacaacccaaagattgactccttctcagaacgaggccacaaacccgacagcattaaaggaaacctcgagttcaatgatgtgcactttagttacccgtcccgggcgaacgttaagatcctgaagggacttaatctgaaggtccagtcggggcagaccgtggcactggtggggtcctcgggttgcggtaagagcactaccgttcaactcatccaacgcttgtacgacccagacgaggggaccatcaacatcgatggtcaagatatcagaaacttcaacgtgaattacctccgcgagatcatcggagtggtgtcccaagagccggtcctgttttcgacgactatcgctgagaacatctgctatgggagaggaaacgttaccatggatgaaatcaaaaaggcggtgaaagaagcgaatgcctatgagttcattatgaagctgccgcagaagttcgacaccctcgtgggtgaaagaggagcccagctctcgggtgggcagaagcaacggatcgccatcgcacgtgctctggtcaggaatccgaagatcctcctcctggatgaagccacctcagcgcttgacaccgaatccgaagccgaagtgcaggcagcgctcgacaaggcccgtgaaggacgcactactatcgtcatcgcacatcgactgtcaaccgtgcgaaacgccgatgtgatcgccggatttgaagatggagtgatcgtggagcaaggatcacactcggagctcatgaagaaggagggtgtgtacttcaagttggtaaacatgcagacctctgggtcacagattcaatctgaagagttcgaacttaatgacgagaaggccgcgactcgcatggccccgaacgggtggaagtccagactcttccgccatagcacccagaagaacctgaaaaacagccagatgtgccagaaatctctcgacgtcgaaaccgacggccttgaagccaacgtgcccccagtgtcctttctgaaggtgttgaaactgaacaagaccgagtggccatacttcgtggtgggtactgtctgcgcaatcgccaacggtgggctgcagccggctttctcagtgatcttttcggagatcattgccatctttggcccgggcgacgatgccgtgaagcaacaaaaatgtaacatcttttcgctgatcttcttgttcctggggatcattagcttcttcaccttcttcctgcaaggcttcacgttcggaaaggccggggaaatccttacgcggcgtctgaggtcgatggcatttaaggctatgctgaggcaggatatgtcatggttcgacgaccacaaaaactccactggggccctgtccaccagattggcaacggacgccgcccaagtccagggagccactgggacgagactcgcgttgattgcgcagaacatcgccaacctcggtaccggtattatcattagttttatctacggatggcagctgactctcttgctgctcgccgtcgtgccaatcatagccgtctcgggaatcgtcgagatgaagctgctggctgggaatgccaaacgcgacaagaaagaactcgaagctgctggtaaaatcgcgactgaagcgatcgagaacatccggactgtggtcagccttacccaagaacggaagtttgaatcgatgtatgtggagaagctgtacggaccctacagaaattcggtgcagaaggctcacatctacggaatcactttctccattagccaagcgttcatgtacttcagctacgccggatgtttccgcttcggagcctatctgatcgtcaacggccatatgcgcttccgggacgtgatcttggtgttcagcgccattgtctttggcgcagtcgctttgggacacgcgtcctccttcgctcctgactacgcaaaagctaaactgagcgcagcgcacctcttcatgctctttgagagacagccactgattgactcatactcggaggagggcctgaagcctgataagttcgagggcaacatcacctttaacgaggttgtgttcaactacccaaccagagcgaacgtgcctgtgttgcaggggctgtcactcgaagtcaagaagggacagactctcgccctggtgggcagctcgggctgtggcaagtcgaccgtggtccagctgctcgaacgcttttacgatccgctggccggaactgtgttcgtcgatttcggatttcaactcctggacggccaggaggcgaaaaagctcaatgtgcagtggctgagggcccagctgggaatcgtgtcgcaggaaccgattcttttcgactgttccatcgccgagaacatcgcctacggcgacaatagccgcgtcgtgtcacaagatgaaatcgtgtccgcagccaaggctgccaacatccatccgttcattgaaactctccctcacaaatacgaaactagggtcggtgataagggcactcaactctccggtggacagaaacaacgaatcgctatcgctagagcgctgatccgccaacctcagatcctgttgctcgatgaagcgacttccgccctggatactgagtcagagaaggtggtgcaggaggccctggacaaagcccgcgaagggcggacctgcatcgtgatcgcgcaccgcttgtccaccatccagaatgcggatctgattgtcgtgtttcagaacggacgggtgaaggagcatggaacccatcagcagctccttgcccagaagggaatttacttctccatggtgtccgtgcaggccggaacgcagaacctc

SEQ ID NO: 7508 - DNA, 3858 bp, synthetic construct
  misc_feature 1..3858: note = source = /note="Description of Artificial Sequence: Synthetic coding sequence"
  source 1..3858: mol_type = other DNA
atggacctggaagctgcaaaaaacggaactgcctggaggcctacctcggcagagggtgacttcgaactgggcatctcctctaaacagaagcgaaagaagaccaagacggtcaagatgatcggggtcctaactctgtttcggtacagtgactggcaggacaaattatttatgtccctcggcactataatggccatcgcccatggatcgggcttgcctttgatgatgattgtctttggcgagatgacggataagttcgtagatacagctggcaattttagtttccccgtcaacttctctttgtcattgctcaaccccgggaagatattggaggaagaaatgacccgctatgcgtattattatagtggccttggcgcaggagtgctggttgcagcctacattcaggtcagtttctggaccttggccgccggccgccagatacggaagattagacaaaagttctttcatgctattctgcggcaggagattggctggtttgacattaatgataccactgagctcaacacccgtctgactgacgacatcagcaagatctcagaggggataggggataaagtaggcatgtttttccaggccgtggccacattttttgctgggttcatcgtggggtttatcagaggatggaaactgaccctagttatcatggcgatttcacctatattggggctttctgcagcagtctgggctaagatactgtccgccttcagtgataaggagcttgcagcttatgcgaaggcaggggccgtcgccgaagaggccctgggggctatacggacagtgatcgccttcggcggacagaacaaagaattagaaagatatcagaaacacctggagaatgctaaggaaattggaattaagaaggctatctctgccaacatctcgatgggcatcgcattcttgctgatatatgctagctatgccctggccttctggtacggcagcacccttgttatctctaaagagtacacaatcgggaatgctatgaccgtcttttttagtatattaattggtgctttttcggtcggtcaggctgctccatgtattgacgcatttgccaatgctcggggggcggcttacgtcattttcgatatcattgacaataaccccaaaattgacagctttagcgaaagggggcataagccagatagcattaaaggcaacctggaattcaacgatgtgcacttctcttatccttctagggcaaatgtgaagatactcaaaggcctgaacctgaaggtccaatccggccagaccgtagctctagttggaagctccgggtgcggaaaatctacaaccgtccagctcatccaacgtctttacgacccagacgagggaaccataaacatcgatggccaggacattagaaactttaatgttaattatctgcgggagatcataggggtggtgtcccaggagccggttctttttagcaccaccatagcagagaacatctgttatggaagagggaacgtgacaatggatgagattaagaaggccgtgaaggaagccaatgcatatgagttcatcatgaagttacctcagaaattcgacaccctggttggcgagcggggcgcacagttaagcggagggcagaagcagaggatcgccattgctcgtgctctggtgcgtaacccaaagatactgctcctggatgaggctacaagcgcactagacacggagtccgaagcggaggtgcaggcagctttggataaggcgcgcgaagggcggacaacaatcgtaattgctcatcgactttcaactgtcagaaacgcagacgtcatcgctggctttgaggatggcgtaatcgtggagcaaggcagccattctgaactcatgaaaaaagagggggtgtattttaagctggttaatatgcagacctcagggtcccagattcaaagcgaggaattcgagttgaacgatgagaaggcggcaaccaggatggcccccaatgggtggaagtctaggctcttccgacactctacccagaagaatctgaagaactcacagatgtgtcagaaatcgttggatgttgaaactgacgggctggaagctaatgtcccaccagtgagttttttaaaggtactgaagctgaacaaaactgaatggccctactttgtcgtgggcacagtgtgcgcaattgctaatggaggcctgcagcctgcctttagcgttattttcagtgaaattatagcaatttttggacctggcgatgacgcagtgaaacaacagaagtgcaacatcttttctctcatctttttgttcctgggcattataagcttttttaccttcttccttcagggcttcacatttggaaaggcaggtgagatcctgaccagaagactgcggtctatggccttcaaggctatgctcaggcaggacatgtcgtggttcgacgatcacaagaattccacaggtgctctctccaccagactcgccactgacgcggcccaagtgcagggcgcaacaggtaccaggctggccttgatagcccagaatattgccaatctgggaaccggaatcatcatctcctttatttacggctggcagttaaccctgctgctgctagctgtggtgcccatcattgcggtgtcaggaatagtcgagatgaagttgctcgctggtaacgcaaagcgcgataagaaggagctcgaggcagccgggaagatcgccactgaagccatcgaaaatatacgcactgtagtctccctgacccaggaaagaaagttcgagagcatgtacgtggagaagctctacggtccctaccggaattcagtccagaaagctcacatctatggtattacattctctatttcccaagctttcatgtatttttcttatgctggatgtttcagattcggcgcctaccttatcgtcaatggacacatgagattcagggacgtgattctggtgttttcggcgatagtgtttggagctgtagctctcgggcacgcgtcatccttcgccccggattatgctaaagccaaactgagcgcagcccacctttttatgctctttgagcgacagcctctgattgattcttactctgaagaaggactaaagcctgataaattcgagggaaacattacattcaacgaggtcgtatttaattaccccacacgcgccaatgtgccagtgctacaaggtctatctctggaagtgaagaagggccagactctggccctggtaggctcgtctgggtgtggtaaatctaccgttgtccagctgctggagaggttttacgatccgctcgcaggcaccgtgttcgttgatttcgggttccagctccttgatggtcaggaggctaaaaagcttaacgtgcagtggctaagggcccaactcggaattgtgtcccaggagccaatcttgttcgattgctctatagccgaaaacatagcctatggagacaatagtcgcgtagtatctcaagatgagattgtcagcgccgccaaggccgctaatatacacccatttatcgagacccttccccacaaatacgagacccgggtgggggacaaggggactcaactgtccggggggcaaaagcagcgtatcgcaattgcccgcgctttgataagacagccccagatcctcctgctcgacgaggctacatctgccctggataccgagtccgagaaagttgtccaggaagccctggacaaagccagggagggcagaacttgtatcgttatcgcccatagattgagcaccatacagaatgctgacctgattgtggtgtttcaaaatgggagagtgaaggagcacgggacgcaccagcagctgctagcccagaagggaatttattttagtatggtatcggtccaggctggaacacagaatctg

SEQ ID NO: 7509 - DNA, 3858 bp, synthetic construct
  misc_feature 1..3858: note = source = /note="Description of Artificial Sequence: Synthetic coding sequence"
  source 1..3858: mol_type = other DNA
atggacctcgaagcagccaagaatggaaccgcatggcggcccactagcgcggaaggtgacttcgaactgggtatctccagcaagcaaaagagaaaaaagaccaaaactgtgaagatgatcggagtgcttactctttttaggtactcggattggcaagataaacttttcatgtcacttggcaccattatggcgatcgcccacggctcagggctgcccctcatgatgatagtttttggagaaatgaccgataagtttgtcgataccgcaggaaacttttcatttcctgttaacttttccctgagcctcttgaacccgggcaagatactggaggaagagatgacccgatacgcgtactactactctggacttggcgcaggagtgcttgtggcggcctacattcaagtgtcgttttggacgttggctgcaggacgacagatcagaaaaatcaggcagaagttctttcatgcgatcctgagacaggaaattggatggtttgacattaacgatactactgagcttaacacccgactcaccgatgatatctcgaagatctcggaaggaattggagataaggtgggaatgtttttccaagcagtcgccacctttttcgcaggctttattgtgggctttatacgcggctggaagctgactctggtgattatggcaatttcgcctatcctgggccttagcgccgccgtctgggcgaagattcttagcgcgttcagcgataaagaactggcagcatacgctaaggcaggagccgtcgcagaagaggccctcggtgcaattaggactgtgattgcatttggagggcaaaacaaggaacttgaaagataccagaagcatctcgaaaacgccaaggaaatcggtatcaaaaaggcaatctcagcaaacatttccatggggatagcttttctgctgatatacgcatcctacgcgctggcgttttggtacggttcaacccttgtgatctcgaaagaatacacgattggcaatgcgatgactgtgtttttctcgattcttattggagcattcagcgtcggtcaggccgcaccttgtatcgatgcatttgccaacgcgcggggagctgcctacgtcatttttgacatcattgacaacaatccgaagattgattcgttttcggaacgtggacataagccggatagcatcaagggtaatctcgaattcaatgatgtccattttagctacccttccagagcaaacgtcaagatccttaaaggcctgaatctgaaagtgcagtcgggacagaccgtggccctggtcggttcgagcggatgcggtaaaagcactactgtgcagctcatccaacggctctacgatcctgatgagggaaccataaacattgatggccaagatatcagaaacttcaacgtgaattaccttagggaaatcattggagtggtgtctcaggagcccgtgctcttctccactactatcgcggagaacatttgttacggaagaggaaatgtgacgatggacgagattaagaaagccgtcaaagaagccaatgcatacgagttcattatgaaacttcctcagaaatttgatactcttgtgggggagagaggggcccagctttcggggggacagaaacagcgcattgccatcgcccgggcacttgttcgaaatccaaagattcttctgcttgatgaagcgaccagcgcattggacactgaatcagaagctgaagtgcaggctgcactcgataaggcacgtgagggaagaaccactatcgtaatcgcccatcggcttagcactgtccgcaacgctgatgtgattgcgggatttgaggatggtgtcattgtcgaacaaggttcacattccgagttgatgaagaaggaaggggtgtatttcaagttggtcaacatgcaaacgtcaggctcacaaattcaatccgaagagtttgaactcaacgatgagaaggcagcgacgcggatggccccaaatggatggaaatcgagactgtttaggcattccactcagaagaaccttaagaacagccaaatgtgtcagaagtcccttgacgtcgagactgatgggctggaagcaaacgtcccccctgtgtctttccttaaggtgctgaaactgaacaagaccgaatggccctactttgtggtggggaccgtgtgtgcaattgcaaacggagggctccaacctgccttttcggtgatattctcagaaatcatagccatctttgggcctggggatgatgcggtcaaacagcagaagtgcaacatattctcgctgattttcctttttcttggtataatctcgttctttacgttttttctgcagggatttacctttggcaaagcaggagaaatactgactaggcgactgcgttccatggcattcaaggccatgctccgacaagatatgtcctggtttgacgaccataagaacagcactggcgctctttcgaccaggctggccactgatgcagcacaggtgcaaggagcaactggtactcgcctcgcccttattgctcagaacatcgccaatctcggcactgggattatcatatccttcatttacggttggcaacttacgcttctgctgcttgcggtggtgccaattatcgccgtctccggaatcgtcgagatgaaacttctggcaggtaatgcaaagcgggataagaaggagcttgaggcagcaggaaaaatcgccactgaagcaatcgagaacatccggaccgtggtgagccttacccaggagcgaaagtttgagtcaatgtacgtggagaagttgtacgggccgtacaggaatagcgtgcagaaggctcatatctacggcattaccttttccatcagccaggcctttatgtacttttcgtacgcaggatgtttccgtttcggagcatatctgattgtaaacggacatatgcgtttcagggatgtgatccttgtcttttccgcaatagtgtttggtgcagtcgcccttgggcacgcaagctcatttgcacctgattacgcaaaggcaaagctgtccgcagcacacctgtttatgctgttcgaaagacaaccgctgatagatagctacagcgaggaaggacttaaacctgataagttcgaaggtaatatcacctttaacgaggtcgtgtttaactaccctacccgagcgaacgtgcctgtcctgcagggtttgagtctcgaagtcaagaaaggtcaaactctcgcattggtcgggtcctccggatgcggcaaaagcaccgtcgtgcagctgctggaaagattttacgatcctctcgctggaaccgtgtttgtggatttcggatttcagctgcttgacggtcaagaggctaaaaagctgaatgtccaatggctgcgggcacaactgggaattgtctcgcaggaaccaatactcttcgactgttcaattgcagaaaacattgcttacggagataattcccgcgtggtgtcccaggacgaaatcgtgtcagcagcaaaggccgcgaacattcatccgtttatcgaaacccttccccataagtacgagactcgagtcggggacaagggaacgcaactttccggtgggcaaaagcaacgcatcgcaattgcaagggcactgattcgacaacctcaaattcttcttcttgacgaggcaacgtcagcactggataccgaatcggaaaaggtcgtgcaggaggcactggacaaagcgcgcgaaggtcgaacttgtatagtgattgctcataggcttagcacgattcagaatgcagatctgattgtggtgttccagaatggacgggtgaaggagcatgggactcatcaacaattgctcgcccaaaagggaatttacttctcgatggtgagcgtgcaagccggaactcaaaatctc

SEQ ID NO: 7510 - DNA, 3858 bp, synthetic construct
  misc_feature 1..3858: note = source = /note="Description of Artificial Sequence: Synthetic coding sequence"
  source 1..3858: mol_type = other DNA
atggatctcgaggcagctaaaaacggtacggcatggaggcctacctcagcagagggagattttgagcttgggatttcttcgaagcagaagcgcaagaaaaccaagactgtgaagatgattggtgtactgacactgtttaggtattcagattggcaggataaactgtttatgtctctgggcactatcatggctatcgcacatggatctggtttgcccttgatgatgatagtgtttggtgagatgaccgataagttcgtggacactgccggcaattttagttttccagtgaatttcagcctttccctgcttaatccagggaagatattagaggaggagatgacaaggtatgcgtattactactccggcctgggcgcaggcgtgctggtggctgcatacatacaggtgagcttctggaccctagcagccggtcgtcagattcgcaagattcggcagaagttcttccatgccattctgcggcaggagatcgggtggttcgatattaatgacactactgagctgaatacacgcctgaccgacgatatcagcaagatttcagaggggattggagataaggtcgggatgttcttccaggcagtggccaccttcttcgccgggttcatcgttgggtttatccgcgggtggaaactgacccttgtcattatggccatctcacccattctgggactgagtgcggccgtgtgggccaagatcctgtccgcattttctgacaaagagctggcagcttacgcgaaggccggcgcggtagcggaagaggcgttaggggctatacggacggttatcgctttcggggggcaaaataaggaactggagagataccagaagcacctggaaaatgccaaggagattgggatcaagaaggccatctccgccaacatcagcatgggaatcgctttcctgttgatctatgcaagctacgctctcgctttctggtatggctctactttggtaatctcaaaagagtatacgattgggaacgccatgaccgtgttttttagcattctgataggggctttttccgtcgggcaggctgccccatgtatcgacgccttcgctaacgctcggggcgctgcatacgtgatattcgatatcatcgacaataacccaaagattgattctttcagcgagagggggcacaagcctgactccattaaagggaatctcgagttcaacgatgttcacttcagttacccatctcgggcgaatgtgaagatcctcaagggcttaaacctgaaggttcagtcgggccaaaccgtggcgcttgtaggatcttccggctgtggcaaatctactaccgttcagttgatccagaggctgtacgacccagatgaggggacgattaatatcgacggacaggacatcagaaattttaatgtgaactatttgagagaaattatcggtgtcgtgagccaggagcctgtgctgttctctactacaatcgctgaaaatatttgttacggcaggggcaatgtgacaatggacgagattaagaaagccgtgaaggaggcgaatgcgtatgagtttattatgaagttaccccagaaattcgacacgctcgtaggggaaagaggcgcgcagctaagtggggggcagaagcaaaggatagccatagcgagagctctagtcaggaaccctaagatcctgttgctggacgaggctacttcagccctcgatactgaatctgaggccgaggtgcaagcagcgctcgataaagcgcgggagggaaggacaacgattgttatagcccaccggctgtcaacagtccgcaacgctgacgttatcgctggatttgaagacggggtcattgtcgagcagggcagccacagtgagctgatgaagaaggagggcgtctactttaaactggttaatatgcagacctccggcagccagatacagtctgaagaattcgaacttaatgatgagaaggcagctactagaatggcgccaaatggttggaaatctcgactgttcagacactcgacacagaaaaatctgaagaactcgcagatgtgtcagaagtcgctggatgtggaaactgacgggctcgaggccaacgtgccacccgttagcttcctgaaggtgctgaagttgaataagactgagtggccatactttgtggttggtaccgtgtgtgctatcgccaatggtggcctgcagcccgccttttcggttattttcagtgagattatcgcaatttttggcccaggcgatgacgctgtcaaacagcagaagtgtaacatctttagcctgatattcttgttcctggggatcatctctttcttcactttctttctccaagggttcacattcggaaaagccggggaaatactcacaagaagattgcgatcaatggcatttaaggctatgcttcgtcaggacatgtcttggttcgacgatcacaagaactccaccggggctcttagtactcggctcgcgaccgatgcagctcaggttcagggagcaaccggaactaggctggcccttattgctcaaaacatcgccaatctgggtacggggattatcatttcctttatctatgggtggcagctgacgctgctcctgctcgccgtggttccaatcatcgccgtcagtgggatagtagagatgaagctactggctggcaacgccaagagagataaaaaggagttggaagcagcaggcaaaatcgccactgaggctattgagaatatccggactgtcgtctcattaacacaggagagaaagttcgagagcatgtatgtggagaagctgtatggtccgtatcgcaactccgtccagaaagcgcatatctatggcataacatttagcatcagccaagctttcatgtacttcagctacgccggatgcttccggttcggagcttatctcatcgtcaacgggcacatgcgcttcagggacgtgattctggtgttttcagccattgtgttcggggcagtggccctgggtcatgccagctctttcgcaccagattacgctaaggccaagctctcagcagctcacctgttcatgctatttgagcggcagcccctcattgactcatatagtgaggaagggctgaaaccggacaagtttgagggcaacatcacattcaatgaggtggttttcaattaccccactcgtgcaaacgtcccggtactgcaaggccttagccttgaggtgaagaaaggacagactcttgcgctggtgggttcctctggttgcggcaagtccaccgtcgtgcagctcctggagcgattctacgaccctctagcagggactgtgtttgtggacttcggatttcagctgcttgacggtcaggaggcaaagaagttgaatgtccagtggttgagggcccagcttggcattgtctcgcaagaacccatcttatttgattgcagtattgctgaaaacattgcctatggtgacaactcccgtgttgtaagtcaggatgagatcgtgagtgccgccaaggcggctaacatacatcctttcatcgagactctgccgcataagtatgaaacacgcgtgggagataaaggcacccagctatccggggggcagaagcagaggatcgccatagcgcgtgcattgatccgccagccacagattctgcttctggacgaggcaacctctgcgctcgatactgaatccgagaaagtcgtccaggaggccctggacaaggctagagaaggtcgaacatgcattgtgatcgcgcaccggctcagcacaatccagaatgctgatctcatcgtggtcttccagaacggcagggtgaaagaacatggaacccatcagcaactcctagcccaaaagggaatatatttttcaatggtgagcgtacaagcaggaacacagaatctg

SEQ ID NO: 7511 - DNA, 3858 bp, synthetic construct
  misc_feature 1..3858: note = source = /note="Description of Artificial Sequence: Synthetic coding sequence"
  source 1..3858: mol_type = other DNA
atggaccttgaagccgcaaagaacggtaccgcttggcgtccgacgtcggccgaaggcgattttgaactgggaatttcatccaagcaaaaacgcaagaaaaccaagaccgtcaagatgatcggagtgctcaccctttttagatactcagattggcaagacaagctcttcatgtccctgggaaccatcatggccatcgcacatggtagcggtctgccactgatgatgatcgtgtttggagagatgaccgataagttcgtggataccgccggtaacttttcctttccggtgaatttctccctgtcgttgcttaatccgggaaagatcctggaagaggagatgacgaggtacgcctactactactcaggcctcggtgcaggcgtcctggtggcagcttatatccaagtgtccttctggactctggccgcgggaaggcaaatccggaagatccgacagaagtttttccatgccatcctgcggcaggagatcggttggttcgatatcaacgacactaccgaactgaatacccggctcaccgacgatatctcgaagatctcagagggtattggggacaaagttggaatgttcttccaggccgtcgccactttcttcgctggatttatcgtgggattcatacgcggatggaagctgaccctcgtgatcatggcgattagcccgatcctgggactgagcgccgcggtgtgggccaaaatcctgagcgcgttctcggataaggaactggccgcctacgcgaaagcaggagctgttgcggaggaggccctgggcgctatcaggacggtcatcgcctttggaggccagaataaagagctggagcgataccagaagcatctggaaaatgccaaggaaatcggaatcaagaaagccatttcggccaacatttctatggggattgccttcctgctgatctacgcgtcgtacgccttggccttttggtacggttccacccttgtcatctctaaggaatacaccattggaaatgcaatgaccgtgtttttctccattctgatcggtgctttcagcgtgggacaggccgcaccgtgtatcgatgccttcgcgaacgcccgcggagcagcctacgtcatcttcgatatcatcgacaacaatcccaagatcgactcgttctccgagcgcggccacaagcccgactcaattaaggggaacctggagttcaatgatgtgcacttctcctacccaagccgggccaatgtgaaaatcttgaagggtctgaaccttaaggtccaatcaggacagaccgtggctctggtggggtcgtcgggttgcggtaagtctacgactgtccaactgattcagcggctctatgaccctgatgaaggcaccatcaacatcgacggacaagatattcggaacttcaacgttaactaccttcgggaaatcataggcgtggtgtcccaagagccggtcttgttctccactactatagctgaaaacatttgctacggccgggggaatgtcaccatggatgaaatcaaaaaggctgtgaaggaggccaatgcctacgaattcatcatgaagctgcctcaaaagtttgacactctggtcggagaaagaggagctcagctcagcggtggacaaaagcagaggattgcgatcgccagagccctggtgcgtaacccaaaaatcctgctcctggacgaagcaacctccgctctggacaccgagtcggaagccgaggtccaagccgctctcgacaaagcccgagaaggtcgcactacgattgtgatcgcccataggcttagcaccgtgagaaatgctgacgttatagccggatttgaagatggcgtcatcgtggaacagggatcccactcggagctcatgaagaaagaaggcgtctactttaaactcgtgaacatgcagacttcaggcagccagattcagtccgaagagttcgaactgaatgacgaaaaagctgctacccggatggcgcctaacgggtggaaatcgcggcttttcagacactccactcaaaagaacctcaagaatagccaaatgtgccagaagtccctggacgtcgagactgatggtttggaggcaaacgtgccgccggtgtccttcttgaaggtcctcaagctgaataagactgaatggccgtatttcgtggtaggaactgtgtgtgcgatcgccaacggaggactgcagcctgccttctcagtgatcttctcagaaatcatcgccatcttcggcccgggcgacgacgcagtgaagcagcagaaatgcaacatcttctcgctgatcttcctcttcctcggaatcatttccttcttcactttctttctgcagggattcactttcggaaaggccggggaaatcctgacccggcgcctccgctcgatggccttcaaggccatgttgcgacaggacatgagctggttcgatgaccacaagaactccaccggagcactgagcacccgcttggctactgacgctgcccaggtccagggggctactggaaccagacttgcacttatcgcacaaaacatcgctaatcttggtactggaatcatcatctcgttcatctacggatggcagctgaccttgctcctgctggcggtcgtgccgatcatcgccgtgagcggcattgtggagatgaagctgctggcaggaaatgccaagcgggataagaaagagctggaagcggcaggcaagatcgctaccgaagcgatcgagaacatccgcaccgtggtgtcacttactcaggagaggaaattcgagagcatgtacgtggagaaactctacggaccataccggaactcggtgcaaaaggcgcacatctacggcataaccttctccatcagccaagccttcatgtacttctcctacgccgggtgctttcgctttggggcgtacctgattgtcaacggccacatgaggttccgggacgtgatcctcgtcttttcggcgattgtttttggtgccgtggcgctcggccacgccagctcatttgcaccggactacgccaaggccaaattgagcgcggcacatctgttcatgctgttcgaacggcagcctctgatcgatagctactccgaagaaggactgaagccggacaagttcgagggaaacatcaccttcaacgaggtcgtgtttaactatcccaccagagctaacgtgccggtgctgcagggactctcgctggaagtgaagaaaggacagactctggcgctcgtggggtcctcgggttgcggaaagtctactgtggtgcagctgctggagcgcttctacgaccctctggcggggactgtgttcgtcgatttcggcttccagctcctggatggccaggaggctaagaagctgaacgtccaatggctgcgcgcacagctcggaatcgtgtcacaggagccgatcctgttcgactgttccatcgccgagaatatcgcgtatggggacaacagccgcgttgtctcacaagacgaaatcgtctcggccgccaaggcagctaatatccacccattcattgagactttgccgcacaaatatgagacgagagtgggagacaagggaacgcagctgtcagggggacagaagcagcggatcgccatcgctagagctctgatccggcagccacaaatactgctgctcgacgaagcaacttccgccctggatactgaatcagagaaggtggtgcaggaagctctggataaggcgcgcgaaggacgcacttgtatcgtcatcgcgcacaggttgtcgaccatccagaatgctgacctcatcgtggtattccagaacggaagagtgaaggaacacggcactcaccaacagcttctcgcgcaaaagggaatctacttctcaatggtatcagtgcaggctggaacccagaatctc

SEQ ID NO: 7512 - DNA, 3858 bp, synthetic construct
  misc_feature 1..3858: note = source = /note="Description of Artificial Sequence: Synthetic coding sequence"
  source 1..3858: mol_type = other DNA
atggaccttgaagcagctaaaaatggaaccgcttggagacctacttctgctgaaggagattttgaattaggtattagttcaaaacaaaaaagaaagaaaacaaagactgttaaaatgatcggagtacttacattatttcgttattcggattggcaagataagttattcatgtcattagggacaataatggctattgcacatggaagtggattaccattgatgatgattgtttttggagaaatgactgataaatttgtagatacagctggaaatttctctttcccagtaaatttctctttatcattattaaatccaggaaaaattttagaagaagaaatgacaagatatgcttactattactcagggttaggtgctggggtcctagttgctgcttacatacaagttagtttctggactcttgctgctggaagacaaattagaaaaatcagacaaaaattttttcatgctatacttcgacaagaaattggatggtttgacattaatgatactactgaacttaatacaagattaacagatgatattagtaaaatttcagaagggattggtgataaagtaggtatgttttttcaagcagtagctacattttttgctggatttattgttggatttataagaggatggaaacttacacttgttatcatggcaatttctcctattcttggactttcggctgctgtttgggcaaagatcttatctgcatttagtgataaggagttagctgcttatgctaaagcaggagcagtcgcagaagaggctcttggagctattcgtacagttattgcttttggaggacaaaataaggaattagaaagataccaaaaacacttagaaaatgcaaaagaaattggaattaaaaaagcaatttctgctaatatatcaatgggaattgcttttttattaatttatgcatcatatgctcttgctttctggtatggatctacactagtaatttcaaaagaatatactataggaaatgcaatgactgtattttttagtattttaattggagcattttcagttggacaagctgcaccatgtattgatgcttttgcaaatgctagaggagctgcatacgtgatttttgatattattgacaataatccaaaaattgattctttttcagagagaggtcataagccagatagtattaaaggaaatttggaattcaatgatgttcatttttcatatccaagtcgagcaaatgtaaagattttaaaaggattaaatttaaaggtccaatctggacaaacagtagctttagttggaagttctggatgtgggaaatccacgacagtccaacttattcaaaggttatacgatccagacgaaggtacaataaatattgacggacaagatattcgtaatttcaatgttaattatttaagagaaattattggagttgtatctcaagaaccagttcttttttcaacaacaattgctgaaaatatttgttatggaagaggaaatgtgacaatggatgaaattaaaaaagcagtcaaagaagctaatgcttatgaattcattatgaaacttcctcaaaaattcgacactcttgttggagaaagaggagcacaactttctggtggtcaaaaacaaagaattgctattgctcgtgcacttgttagaaatccaaagattcttttgttggatgaagcaacttcagcacttgatactgaatcagaagctgaagtacaagcagcattagataaagcaagagaaggtcgtacaacaattgttattgcacatcgactttcaacagttagaaatgcagacgttattgcaggtttcgaagatggagtgattgttgaacaaggatctcattcagaattaatgaagaaagaaggtgtttattttaaacttgttaatatgcaaacttcaggatcacaaattcaatcagaagaatttgaattgaacgatgaaaaagctgcaaccagaatggctccaaatgggtggaagtcaaggctttttagacattcaactcaaaaaaatcttaaaaacagtcaaatgtgtcagaaatctttagatgttgaaactgatggtttagaggctaatgttccaccagtttcatttttgaaagtacttaaattaaataaaacagaatggccatactttgttgttggtactgtttgcgctatagctaatggaggactccaaccagcattcagtgtcattttttcagaaataatcgcaatatttggtcctggtgatgatgctgttaaacaacaaaaatgtaatattttcagtcttatttttttatttttgggaataatttcattttttactttttttttacagggattcacatttggaaaagcaggagaaattcttacaagaagacttcgttcaatggcttttaaagcaatgttaaggcaagatatgagttggttcgatgatcataaaaatagtacaggagctcttagtactagacttgcaacagatgcagctcaagtacaaggtgcaacgggaacaagacttgctttaattgctcaaaatatagctaatcttggtacaggaattattatttcttttatatatggatggcaattaactttattactattggctgttgttccaatcatagctgtttctggaattgttgaaatgaaattactagctggaaatgcaaaaagagataaaaaagaattagaagcagcaggtaaaattgcaactgaagcaattgagaatattagaactgttgtttcacttactcaagaaagaaaatttgaatctatgtatgtagaaaaactttatggaccatatcgtaatagtgtccaaaaggcacatatctatgggattacattttcaattagtcaagcttttatgtatttttcatatgcaggatgttttaggtttggagcttatctaattgttaatggacatatgagatttagagatgtaattcttgttttttcagccattgtttttggagctgttgcattaggacatgcatcatcatttgcaccagattatgctaaagcaaaattatctgctgctcatttatttatgttatttgaaagacaacctttaattgatagttatagtgaagaaggattaaaaccagataaatttgaagggaatattactttcaatgaagtagtatttaattatcctactagagctaatgtgccagttttacaaggacttagtcttgaagtaaaaaaaggtcaaacattagcacttgtaggatcaagtggttgtggaaaaagtactgttgttcaattacttgaaagattttatgatccattagctggaaccgtatttgtagattttggatttcaactcttagatggacaggaagcaaaaaaattaaacgtacaatggttaagagctcaattaggtattgtaagtcaagaaccaatattattcgattgttcgattgcagaaaacatagcatatggagataatagtagggttgtttctcaagatgaaattgtttcagcagcaaaggcagctaatattcatccatttatagaaactttaccacataaatatgaaacaagagttggagacaaaggaactcagctatcaggaggtcaaaagcaacgaatagcaattgctagagcattaattagacaacctcaaattcttttattagacgaagctacaagtgcacttgatactgaatctgaaaaagtagtacaagaagcattagataaagctagagaaggaagaacttgtatagttatcgctcataggctttctacaatacaaaatgcagatcttattgttgtttttcaaaatggtagagtaaaagaacatggaactcatcagcaattacttgcacaaaaaggaatttattttagtatggtttctgttcaagctggaactcaaaattta

SEQ ID NO: 7513 - DNA, 3858 bp, synthetic construct
  misc_feature 1..3858: note = source = /note="Description of Artificial Sequence: Synthetic coding sequence"
  source 1..3858: mol_type = other DNA
atggacctggaagccgctaagaatggaacagcgtggcgacccacgtccgctgagggcgattttgaactggggatatcatccaagcagaaacgtaagaaaaccaaaactgtcaagatgattggcgtgctgactttattccgctactccgattggcaggacaaactcttcatgtctctaggtaccatcatggcaatcgcccacgggtcaggacttccactgatgatgatcgtgtttggtgaaatgaccgacaagtttgtggataccgccgggaacttctcttttcctgtgaatttctcactctcacttctgaatcctgggaaaatactagaagaggaaatgacacgctacgcatattattactccggactcggagcaggagtgctggtggcagcttatattcaggtatctttctggacattggcagctggtcgacagattaggaagattcggcaaaagttctttcatgccatcctgagacaagagatcggttggtttgacattaacgacactactgaacttaacacaagacttactgacgatatttcgaagatcagtgagggcatcggtgataaagttgggatgttctttcaggcagtggcgacgttcttcgccggatttatagttggatttatccgagggtggaaattaactcttgttataatggccatatcaccgatacttggactgagcgccgcagtttgggccaagatccttagcgcctttagtgacaaggaactggcggcctacgctaaagccggggcggttgcggaagaagctttgggcgccatcagaactgtcattgcattcgggggccaaaataaagaactggaaaggtatcagaaacacttggaaaatgccaaagagataggcatcaaaaaggccatctctgctaacatctccatgggcatcgcatttctcctgatttatgcatcatatgccctggccttttggtacggttcaacgttagtgatctccaaggaatatacaattggaaacgcaatgaccgttttctttagtatcctcatcggagccttttcagtgggccaggcagcaccctgtatagacgccttcgccaatgctagaggggcagcatacgtgatcttcgacatcatagataacaatccgaagatcgattcattctctgagcgcggccataagccagatagtatcaagggcaacttagagttcaacgatgtgcattttagttatcctagccgggctaacgtaaaaatattaaaaggcctgaacctgaaagtgcagtccgggcagacagtggctcttgtaggcagctcagggtgcggaaagtcgacaaccgtgcaactcatccagcggttatatgacccagacgaaggcaccataaacatcgacggtcaggatattaggaatttcaacgtgaactatttgagagaaattatcggggtggttagccaggagcctgtgcttttcagcactacgatcgctgagaacatttgctacggtcgaggcaatgttaccatggatgaaatcaagaaggctgttaaagaagccaacgcctatgaattcatcatgaaactgccacagaaatttgacactttggtcggggagcgcggtgcgcagctgagcgggggacagaagcagagaatcgccattgcgcgggctctggtgagaaatcccaagatccttttactggatgaggccactagtgcccttgataccgaaagtgaagctgaagtgcaagccgcgttggacaaggcacgggaggggcggaccactatcgttattgctcacaggcttagcaccgtgcgtaatgcagatgtgatagcgggatttgaagacggcgtcatcgttgagcaaggaagtcattccgaattaatgaaaaaagaaggggtgtactttaaactggtgaatatgcagacatccgggtcacaaattcagtccgaggaatttgagctgaacgacgagaaagctgctactagaatggcaccaaatgggtggaagagccgcttgttccgccactctactcagaaaaacttgaaaaactcccagatgtgtcagaagagcttggacgtcgagacagatggcctcgaggcaaacgtgcctccggtctcctttcttaaagttctgaagctgaacaagaccgagtggccctattttgtggtgggaactgtgtgcgcgatagccaacgggggtttgcagccagcctttagcgtaatcttctccgaaatcatcgctatattcggccctggtgacgacgcagtgaagcagcaaaagtgcaacatcttctcccttatttttctgttcttgggcattattagtttcttcacgtttttcctgcaggggtttacattcggcaaggccggcgagattctgacgcggagactgcgctccatggcgttcaaggctatgctgagacaggacatgtcctggtttgatgaccacaagaattctacaggcgcattgagcaccagacttgccactgacgctgcacaggtgcagggcgctactggaacccgcctcgcactaatcgctcagaacatcgctaaccttgggaccgggataatcatttcattcatttatggctggcagttgaccctcctgctcttggccgtcgtgcctatcatcgccgtctctggaatagtcgagatgaagctgttagctggcaacgcaaaacgagataaaaaggagctggaggccgccggtaagattgctaccgaagcgatcgagaatattaggaccgtcgtgtctctgacgcaagaaaggaaattcgaaagcatgtacgtagagaaattgtatggtccctatcgcaactcagtccagaaggctcatatttatggtattaccttcagcatatcacaggcgttcatgtatttcagctacgctggatgctttagatttggagcctatctgatcgtgaacgggcatatgcgattccgagatgtgatcctggtttttagcgcaattgtctttggggcagtggccctgggacacgctagctccttcgcacctgattacgcaaaggctaagctgagcgcggcccatctctttatgttgttcgaacgtcagccgctcattgacagctacagcgaggaggggctcaagccggacaaatttgaggggaatataacctttaacgaggtcgtgtttaattaccccacaagggcgaatgtgcccgtgctgcaaggcttgtctctggaggtgaagaaggggcagacactggctctagtgggaagtagtggctgtggcaagagcacagtggttcagctattagagcggttttatgatcctctggccggcaccgtgtttgtggatttcgggtttcaactgctcgatggacaggaagccaagaagcttaatgtgcagtggctccgggcgcagctaggaattgtttctcaggagccaatactgttcgattgttctatagccgagaacatcgcttacggcgataattctagggtggtgtcccaggacgagatcgtttccgcagccaaagctgccaacatccatcctttcatcgagaccttgccccataaatatgagacacgcgtcggcgacaaagggacacagctgtcaggggggcagaaacaacgaattgctattgcccgggccctgatccggcaacctcagatcctgttgctagacgaggccacatcagctctcgatacggagtctgagaaagtggtacaggaggccctggacaaagctcgcgagggccggacctgtatagtcatagcccataggttgtctaccatccaaaacgcagatttgattgtcgtgttccaaaatggccgggttaaagagcacggcacacaccagcagctgcttgcccagaaaggaatctatttttccatggtttccgtacaggcaggaactcagaacctt

SEQ ID NO: 7514 - DNA, 3858 bp, synthetic construct
  misc_feature 1..3858: note = source = /note="Description of Artificial Sequence: Synthetic coding sequence"
  source 1..3858: mol_type = other DNA
atggatcttgaggctgccaagaacggaaccgcttggcgcccgactagcgctgagggagacttcgagcttggaatctctagcaagcagaagcggaagaaaactaagactgttaagatgattggcgtcctcactctctttcgctatagtgactggcaggacaagctgttcatgtcgctggggacaataatggccattgcccatggttctggtctgcccctcatgatgattgtcttcggagagatgaccgataagtttgtggacactgccggcaactttagtttccccgtgaatttcagcctttctcttctgaatccaggaaaaatcttagaagaggagatgaccaggtatgcctactattattccgggctgggcgccggtgtcttagtagccgcttatatccaggtgagtttttggactttagccgccggcaggcagatcaggaaaatccggcaaaagttcttccacgccatactgagacaagagattggatggtttgatataaacgatacaactgagctcaatacacgcctgaccgatgatatcagcaaaatatccgaaggaattggggacaaggtaggtatgtttttccaggctgtggctaccttttttgccgggttcatagtgggcttcatcaggggctggaagttgacacttgtcatcatggccatcagtcccattctgggcctctcagcggcggtgtgggccaagatcctatcagccttcagcgacaaggagcttgctgcatatgccaaggctggcgcagtagcagaggaagcgctcggggcaattagaaccgttatcgcattcggcggacagaataaagaactcgaacgataccagaaacacctggaaaatgctaaagaaatcggcatcaaaaaggcaataagtgcaaacattagcatggggatcgcctttttgttaatttatgccagctacgccctggccttctggtacggctcaaccctggtcattagcaaagagtacacgatcggcaacgctatgacagtgttctttagcatcttaatcggtgcgttttccgtcggtcaagcggccccttgcattgacgctttcgccaatgcacgtggagcagcatacgttatcttcgatatcatagacaacaaccctaagattgattccttttctgagaggggacacaaacctgattccatcaagggcaatctcgagtttaatgacgtgcacttctcctaccctagcagggccaatgtgaagattctgaagggattaaacctgaaggtgcagagtgggcagacagtggcccttgtaggctcaagtggttgtggtaaatcgaccacagtccagctgattcaacgtctgtacgacccggatgaagggacaattaacattgacggccaggatattaggaacttcaacgtgaactacctccgtgaaatcattggcgttgtgtctcaggagcctgtcctgttcagtacaaccatcgcagaaaacatttgctacggcagaggcaacgtcactatggacgaaattaagaaagccgtgaaagaggcaaatgcatacgaattcattatgaagctgccacagaaattcgacacactggtgggtgagaggggcgcccagctgtccgggggccaaaaacagcgcattgcgatcgcgagggcactcgtccggaatcctaaaatcttattgttagacgaagcgacatcagccctggacactgaatcagaggccgaggtccaggcagcgctcgataaggcaagagagggccgcaccacgattgtgatagctcaccgcttaagtaccgtccgaaacgctgatgtgatcgcgggctttgaggacggggttatcgtggaacagggaagccattctgaactgatgaaaaaagagggggtctattttaaactagtgaatatgcaaactagtggatcgcagatacagtcggaggagttcgaactgaacgacgagaaagccgctacacgcatggcgcctaatgggtggaagtcacgcctgttccgtcactcaacccaaaagaacttgaagaatagccagatgtgccaaaaaagcttggatgtggagaccgatgggttggaggcaaatgtccctccggtgtctttcctgaaggtgctgaaacttaacaaaacagagtggccctacttcgtggtaggcaccgtatgcgccatcgcaaatggagggctccagcctgcgttctccgtgatcttttcagaaattatcgcaatctttggacccggggatgacgcagttaagcagcagaagtgcaacatattcagcctcatcttcctcttcctcggcatcatttcattcttcaccttcttcttgcaggggtttacttttggcaaggcaggagagattctgacccgacgcttacgcagcatggcgttcaaggccatgctgagacaagatatgtcgtggttcgacgaccataaaaacagtactggtgctctctcaactcgacttgccaccgacgctgcacaggtgcaaggtgccaccggaacgagactagccttgattgcacagaacattgcaaacctcgggactggtatcatcatcagctttatttatggatggcagttaacactgctgttgctagcagtggtgcccatcattgccgtgtccggaatcgtcgagatgaagcttctggccgggaacgctaagagggacaagaaagagcttgaggcggcaggaaagatagccacagaggcaattgagaacattaggaccgtagtttccctgacccaggaacgcaagttcgagagtatgtatgtggaaaaattgtatggcccttatcgcaattccgttcagaaagctcacatttatggcatcactttctctatttcccaggccttcatgtattttagctacgctggatgctttcgattcggcgcttacctaatcgttaacggccacatgaggttccgcgatgtgatcctggttttcagcgccatcgtgtttggagctgtcgctcttggccatgcgagttctttcgctcccgactacgctaaggctaagttgtccgccgcgcacctgtttatgctttttgaaaggcagccgctcatcgactcttattcagaagagggtctgaagccggataaatttgaaggcaacattacctttaatgaagtagtctttaactacccgacgcgagcaaatgttcccgtgctgcaaggactatctctcgaggtaaaaaagggccaaaccctggctctcgtaggtagctcagggtgcggcaagtccaccgtggttcagctccttgaacggttctatgacccgctggctggtacagtgtttgtggattttggttttcaactcctggatggccaggaggctaagaagctgaacgtgcaatggctccgcgctcagctcggcattgtgagccaagagcccatattatttgattgcagtattgcagagaatatagcctacggcgataatagcagggtggtgtcgcaggatgagatcgtgagcgctgctaaggctgcaaacatacaccccttcatcgagacactcccccacaagtatgagaccagggtaggcgataagggaacccaactgagtgggggtcagaaacagagaatcgctattgctcgggccctgatcagacagccacagattctgcttctggatgaggcgacaagtgccctggacacagagtcagagaaggtggtccaagaagcactggataaggcccgtgaggggcgaacctgtatcgtgatcgcacaccgtctttctaccatccagaacgctgatctgattgtggtatttcaaaacggccgtgttaaagaacatggcacccatcaacagttgctggcacagaagggaatttacttctctatggtgtccgttcaggcgggcacacagaacctc

SEQ ID NO: 7515 - DNA, 3858 bp, synthetic construct
  misc_feature 1..3858: note = source = /note="Description of Artificial Sequence: Synthetic coding sequence"
  source 1..3858: mol_type = other DNA
atggaccttgaagcagccaagaacgggactgcatggcgaccgacttcggcagagggagattttgagcttggaatctcctccaagcagaagcgcaagaaaacgaaaactgtgaagatgatcggcgtgcttactctttttcgttacagcgattggcaggacaaattgtttatgtccctgggtactatcatggcaatcgcccatggttccgggctccctctgatgatgatagtgttcggggaaatgaccgacaaattcgtggatactgccggcaactttagctttcctgtgaatttctcgctcagcctgctgaacccagggaagatcctggaagaagaaatgacccgctacgcatactactactccggactcggagcaggagtgttggtcgcagcatacatccaggtgtccttctggaccctggcggcgggccgccagatcagaaagattagacagaaattctttcacgccattcttcggcaagaaattggctggtttgacataaatgatacgactgaactgaacactcgtctcaccgatgacatttcaaagatttcggaaggaatcggggacaaggtaggcatgttcttccaggccgtggcaacctttttcgctggcttcatcgtgggcttcattagaggatggaaacttaccctggtgataatggcgatttcacctattctcggcttgtcagccgcagtttgggcaaagattctttcagctttctcggataaagaactcgcagcctacgcaaaagctggggcggtggcggaggaagcacttggcgcgattagaaccgtgattgcatttggaggccagaataaggaacttgaacggtaccaaaagcatcttgaaaacgccaaggagatcggtatcaaaaaggccattagcgcaaacatctcaatgggtatcgcatttcttctgatatacgcatcatacgcccttgcattctggtacggatcaactcttgtcatttcaaaggagtacactattgggaatgcaatgaccgtgttcttttctattctgatcggtgcattttccgtgggtcaagccgcgccttgtattgatgcgtttgccaacgcacgcggtgcggcgtacgtgatctttgacattatcgataacaatcccaagattgatagcttttcagaaaggggacataagccagactcgataaagggaaacttggagtttaatgatgtgcatttctcatatccaagccgggcgaacgtgaagatactgaaaggattgaacctgaaggttcaaagtggacagacggtcgcactggtgggaagctcaggatgtggtaagtccaccaccgttcaactcatccagcgactgtacgatccggatgaagggactattaacatcgacggtcaggacatccgcaactttaatgtgaactacctgagagagataatcggagtagtgtcccaggagcccgttctctttagcaccaccatcgctgagaacatttgctacggacgaggcaacgtcactatggacgagatcaagaaggcagtgaaggaagcaaacgcatacgagttcattatgaagctcccccagaagtttgatacccttgtgggagagcggggcgctcaactttcggggggtcaaaagcaaagaattgcgattgcacgagcactcgtcagaaatcctaaaatcttgcttttggacgaagcaacttcggcacttgatactgaatcggaagccgaagttcaggccgccctggataaggcaagagaaggtcgaactaccatcgtcatcgcacacagactttcaaccgtgcgtaacgccgacgtgatcgcgggttttgaagatggagtgattgtggaacaggggtcccactcggaactcatgaagaaggagggtgtgtactttaagctggtgaatatgcaaacgtcagggtcacagattcagtcagaagaattcgaactgaacgatgagaaagcggctacgcgcatggcgccgaacggctggaagtcacgcctgtttcgtcactccacccaaaagaacctgaagaattcccagatgtgtcagaagtcgctcgatgtggaaactgatggccttgaagctaatgtgccgcccgtgtccttcctgaaagtgctcaagctcaataagactgaatggccttacttcgtggtcggcacggtctgcgcaatagccaacgggggtctgcagccagcattttcagtgatctttagcgaaatcatagccatattcgggccaggtgatgacgccgtgaagcaacaaaagtgtaacatctttagccttatctttctcttccttggcattatctccttctttactttctttcttcagggattcactttcggtaaggcaggagagattctgactaggagactcaggtcgatggcctttaaggcaatgctgcgccaagatatgtcctggtttgatgaccataagaactcgaccggggctctgagcactcggctggccaccgatgcagcgcaagtgcaaggagctactggtactcgcctggcccttattgctcagaacattgcaaacctcggaaccggaatcattatctcttttatctacggatggcagctcaccttgcttctgctggcggtcgtgccgataattgccgtgtcgggaatagtcgaaatgaaacttctcgcagggaacgcaaagagagataagaaggagctggaggcagctggaaagattgcaactgaagcaatagaaaacatccgtaccgtggtgagccttacgcaggaaagaaagtttgaatcgatgtatgttgaaaaactttatggcccttaccggaattcggtgcaaaaagctcacatctacgggatcaccttttcgatctcacaggcatttatgtactttagctacgcggggtgctttcgattcggggcctatctgatagtcaacggccatatgcgatttcgcgatgtgattctcgtgttcagcgcaatcgttttcggagcagtggcacttggacatgctagcagctttgcccctgattacgctaaggcaaagctctccgcagcacatctgtttatgctttttgaacgacaacctctgatagattcgtactcggaggaaggattgaagcctgacaaatttgaaggcaacattacttttaacgaagtggtgttcaattaccctaccagagcaaatgtgcctgttcttcagggactgtcactcgaagtgaaaaagggtcaaacgcttgctctggtgggatcttccggttgcggaaagagcacggtggtccaactcctggaaagattttacgatcctcttgctggtacggtgtttgtggacttcggatttcagcttctcgatggtcaagaagcaaagaagctgaacgtgcagtggctccgggcgcagctgggaattgtgtcacaggagcctatcctgttcgattgttcaattgcagaaaacattgcatatggtgataattcccgcgtggtgtcccaagatgagattgtgtcggcggcaaaggcagcaaacatccatccattcattgagactctgcctcataagtacgaaacgagagtcggagacaaaggtactcagcttagtggaggtcaaaaacagagaattgctattgcaagagcactcattaggcaacctcaaattcttctgctggacgaagccacctccgcgcttgatacggaatctgagaaggtggtgcaggaggcgcttgacaaagccagggagggacggacctgcatagtcattgcccatcgcctttcgaccattcaaaacgcggatcttattgtggtgttccagaatggacgcgtgaaggaacatgggacccatcaacaacttctggcacaaaagggaatttacttcagcatggtcagcgtgcaggcaggcacccaaaatctt

SEQ ID NO: 7516 - DNA, 3858 bp, synthetic construct
  misc_feature 1..3858: note = source = /note="Description of Artificial Sequence: Synthetic coding sequence"
  source 1..3858: mol_type = other DNA
atggatctcgaggccgcaaagaatggaactgcatggaggcctacctcggctgaaggggattttgaactgggaatcagctccaagcagaagcgaaagaaaactaagaccgtgaagatgattggagtccttactctttttagatactcggattggcaggataagctctttatgtcacttggtaccattatggcaattgcccatggttcgggacttccccttatgatgatcgtgtttggtgagatgaccgataagtttgtggataccgctggcaatttctcctttccagtgaacttttcgctgtcactcctcaaccctggaaagatcctggaagaggaaatgaccagatacgcatactactactcagggcttggagccggagtgcttgtggcagcctatattcaggtgtcgttttggactctggcagcggggcgacaaatcaggaagattcggcaaaagttctttcatgcaatacttcgccaagagataggctggtttgacattaatgataccaccgaacttaacacccggcttactgatgacatttcaaagatatcagaaggtattggtgataaggtgggtatgttttttcaggcggtggcaactttctttgccggctttatcgtcgggtttattcgcggttggaaactcacgctggtgataatggctatatcgccaatccttggcctgagtgcagcggtgtgggccaagattctttcagcattttcagacaaggaactcgcagcgtacgccaaagcaggtgcggtggcagaagaggctctgggagcaatacgcaccgtgattgcatttgggggacagaacaaagagctcgaacgttaccagaagcacctggagaatgcaaaagagattggaattaagaaagcaatcagcgccaacatttccatgggaatagcgttcctgctcatttacgcttcgtacgcgcttgcattttggtacgggagcacgttggtgatttccaaggagtacactatcggtaacgccatgaccgttttcttttcaattctgatcggggcatttagcgtcgggcaggccgcaccgtgcatagatgcattcgcaaacgccaggggagcggcctacgtgatttttgacattatcgataacaatcccaagattgactccttctcggagaggggacataaaccagactccattaagggaaacttggagttcaatgacgttcatttctcgtaccctagccgcgcaaacgtgaagattcttaagggcctcaacctcaaggtgcagtccggacaaaccgtggcactggtgggatcctccggctgcggaaagagcaccactgtgcaactgatccaaagactctacgatcctgacgaaggcaccataaacatagacggacaggacatcagaaactttaatgtgaactacctccgagagataattggagtggtgtcgcaagagcctgtgcttttttcgaccactatcgcagaaaacatttgttatgggcggggaaatgtgaccatggatgaaatcaagaaagcagtgaaggaagcaaacgcctacgaattcataatgaagttgcctcagaagttcgacactctggtgggtgaacggggtgcacaattgagcgggggacaaaaacaacgcattgccatcgctagagcactcgtgagaaaccccaagatcctgttgcttgatgaagcaacttcggcactcgatactgaaagcgaggccgaggtgcaggcagcactggataaggcaagagagggacgcaccaccatcgtgatcgctcaccggcttagcaccgtgcgaaatgccgatgtgatagcaggttttgaggatggagtgattgtcgagcaaggatctcattccgagcttatgaagaaggaaggagtgtacttcaaactcgtcaacatgcaaacctcaggttctcagatccaatcagaagaattcgaacttaatgatgagaaggcggccaccagaatggcgcctaatggatggaaaagccggctctttagacactcaactcagaagaaccttaagaactcgcaaatgtgtcagaaatcgcttgatgtggaaaccgatgggttggaagcaaacgtccctcctgtttcgtttctgaaggtgctgaaactgaataagaccgagtggccatacttcgtggtgggaaccgtgtgtgcaattgcaaacgggggcttgcagcctgccttttcggtaatcttttctgaaatcattgcgatatttggccccggcgacgatgctgtgaagcagcagaaatgcaacattttctctcttatcttcctctttcttgggatcatttcatttttcactttctttcttcagggctttaccttcgggaaggcaggggaaattctcacccgtagactgcgatcaatggcattcaaagccatgcttagacaagatatgtcctggtttgacgatcacaaaaacagcaccggggcactttccacccggctcgcaaccgacgcagcacaagtccaaggggccactggaacgaggctggcactgattgcacagaatattgcaaatcttggtaccgggataatcatatcgttcatttatggatggcaactcacccttttgctcctggccgtggtgccgataattgcagtgtcaggtattgtagaaatgaaactgctggcgggtaacgccaagcgcgataagaaggagttggaggcagctggcaagatcgccactgaagctattgaaaacatccgtaccgtcgtgtccctgactcaggaacgaaagtttgaaagcatgtacgtggaaaaactttacggaccgtaccgaaattcagtgcagaaagcccacatctatggaattactttttccatttcgcaagcctttatgtacttttcgtacgctggctgctttagatttggcgcatacctcatcgttaacggccacatgcggttccgcgacgtgattcttgtgtttagcgcaatcgtctttggagccgtcgcgctgggccacgcatcctcctttgcgcccgattacgcgaaggccaaactttccgcagctcacctctttatgcttttcgaacgccaacctctgatagattcctactccgaagaaggacttaagcctgataagtttgaaggcaacattacctttaacgaggtggttttcaactaccccactagagctaatgtgcctgtcctccaaggcctgtccctggaagtgaagaagggccagactctggccctggtggggtcctcaggctgtggaaagtcgacggtcgtgcaactcctggagcgattctacgacccactcgccggtaccgtgttcgtggattttggatttcaactgcttgatggccaagaagcaaagaagctgaatgtgcaatggcttagggcacaacttggtattgtgtcccaagagccaattctgttcgattgttcgatcgcagagaacattgcctacggtgataattcgagagtcgtgtcccaggacgaaatagtgagcgcagctaaggcagcaaacattcatccattcattgaaacgctccctcataagtacgaaaccagagtgggggataagggcacccaactgagcggtggtcaaaagcagagaatagcaattgcacgcgctctgatccgccaaccacagatcctgctgctggacgaagcgaccagcgcactcgacactgaatccgaaaaggtggtgcaagaagctctcgacaaggctagagaggggagaacctgtattgtgattgcccatagactctcgactatccagaacgcggacctcattgtggtgttccaaaacggacgggtgaaggaacatggtacccaccagcagcttctcgcccagaagggtatttacttctcgatggtgtcagtccaggctggtacccagaatctc

SEQ ID NO: 7517 - DNA, 3858 bp, synthetic construct
  misc_feature 1..3858: note = source = /note="Description of Artificial Sequence: Synthetic coding sequence"
  source 1..3858: mol_type = other DNA
atggatctcgaggcggcgaagaatgggaccgcctggcgaccaacatccgctgaaggggatttcgaactcggtatctcaagtaagcagaagagaaagaagactaaaaccgtgaaaatgatcggggtgttgacactttttagatactctgattggcaagacaagctattcatgtctctggggacaataatggctattgcccacggctcaggcttgcctttaatgatgatcgtgttcggcgagatgacagacaaatttgtagacactgccggaaactttagctttccagtgaatttctccttgtccctcttgaatcccggcaaaatcttggaagaggagatgactcgctacgcctactactattccggtcttggagcaggggtgctcgtggcagcgtacattcaggtgtctttctggaccctcgcagccggaagacagattcggaaaatccgacagaaattttttcatgcgatcctgcgtcaggagattggatggtttgacatcaacgatactactgagcttaatactcgactgacagacgacattagtaaaattagcgaagggatcggcgataaggtaggtatgttttttcaagccgtggcaaccttctttgcagggtttatagtgggatttatacgtgggtggaagctgacgctggtcatcatggccatttcccccatccttggtctgtcggcggccgtgtgggccaagattttatccgccttttccgataaagagttggccgcctatgcaaaagccggcgccgtggcagaagaagcactcggagctatacgaaccgtaattgctttcggtggacaaaacaaggaactagagcgatatcagaagcatctggaaaacgctaaggagatcggaatcaagaaggccataagcgcaaatataagcatgggcatcgcctttctgctgatttacgcctcctatgccttggctttctggtatggaagtacgctggtcatctcaaaagagtatactattggaaatgccatgaccgtcttctttagtatcctgatcggcgcatttagcgtagggcaggctgcgccctgtatcgacgccttcgcgaatgctaggggggctgcctacgttatctttgacatcattgacaataaccccaagatcgattcattcagcgaacgaggccataagccagattccataaagggaaatttggaattcaatgatgttcatttctcatacccttcacgagctaacgtgaaaatccttaagggccttaatctgaaagtgcaaagcggtcagactgtggccctggtaggttccagcgggtgcggcaaaagcaccactgtgcagctgatccagagactttatgatccggatgagggcacaatcaatatcgacggacaggatattagaaattttaatgtgaattacctgagagaaattattggcgtggtgagccaggaaccggtgctcttcagtaccaccattgctgaaaatatctgttatgggagggggaatgtcacgatggatgagatcaagaaagcagttaaagaagccaatgcatatgaattcatcatgaagctgcctcagaagttcgatacattggtgggggaaaggggggcgcagctgtctgggggccaaaagcaacgaatagccattgctagggcccttgtgagaaatccgaaaattcttttactagatgaagccacctccgcactagacactgagagtgaggcggaggtgcaggcggcactggacaaagcaagagaagggcgaacaacaatcgttatcgcacacaggctgtcaacggtgaggaatgccgatgtaatcgctgggttcgaagacggtgtgatagtggagcaaggatcgcactcggaacttatgaaaaaagaaggggtatacttcaagctcgtcaatatgcagacctctggctcccagattcagtccgaagagttcgagctcaacgatgagaaggctgctactagaatggcccccaatgggtggaaatcgagattatttagacacagcacccagaagaacctcaagaacagtcagatgtgccagaagtccctggacgtcgaaacagacggactcgaagccaacgtgcctccagtttcatttctgaaggtacttaagttgaacaagacagagtggccttactttgttgttgggaccgtgtgtgcaatcgcaaacggtgggctgcaacccgcgttctccgtcatttttagcgaaataattgctatatttggccctggagatgatgcggtcaaacagcaaaagtgcaatatttttagcctcatcttcctttttcttggaatcatatctttcttcactttctttctgcagggcttcacctttggtaaagccggcgaaatattgacgcgaaggctgagatccatggcatttaaagctatgctacggcaggacatgtcctggtttgatgatcacaagaactcaaccggagcgttgtcaacacgtctggcgactgatgcagcccaggttcagggagccaccggcaccagactggcattgatagctcagaacatcgcaaacctgggcacagggattataatttcatttatctatggctggcagttgacattgctcttgctcgctgtggtccctatcatcgcagtttcaggtatcgttgaaatgaaattactggctggcaatgctaaaagggataaaaaggagttggaggcggccgggaaaatagccacagaagctatcgaaaatatcaggaccgtggttagcttgacccaggaacgaaaattcgagtcgatgtatgtcgaaaagttatacgggccctaccgaaactcagttcagaaggcgcacatctacggtataacgttcagtattagccaggcattcatgtatttcagttatgctggctgctttaggttcggcgcctatctgatcgtcaacgggcacatgcgatttcgtgacgtgatactggtgttcagcgccattgtgttcggcgctgtagctctaggccacgcatcatccttcgcgcccgattacgctaaagcgaaactgtccgcagctcacctttttatgctcttcgagaggcaacccctcattgacagttatagcgaggagggcctcaagccagataaattcgagggtaatataacctttaatgaagtggtattcaactatccaacacgcgccaacgtgcctgttttgcagggcctgtccctcgaggtgaagaagggacagacactcgctctggtgggctcctctggatgcgggaagtctactgtagtgcaactgctggagcgcttttacgatcccctggccggaaccgtgttcgttgacttcggatttcagcttctggatgggcaagaagcaaaaaaactaaatgtccaatggcttcgggcccagcttggtatcgttagccaggaacccatcctgttcgattgcagtatcgccgagaatattgcctatggtgataactctagagtggtctcccaggacgagatcgtgagcgctgccaaggccgccaatattcacccgttcatagagaccctgcctcataagtacgaaacaagggttggagacaaaggtacacaactgtccggcggtcaaaagcagcgcatagctatcgcccgcgccctgatcagacagcctcagatcctgctactagatgaagcaaccagtgcccttgacaccgaaagcgaaaaagtggttcaggaagcactcgataaagcgcgcgagggacggacctgtattgttatcgcccatcgtctgagcaccatccagaatgcagacctcatagttgtgttccagaacggtcgggtgaaggagcacggaactcatcagcaattgctcgctcagaaaggcatctacttctccatggtgagcgtgcaggcaggaacccagaatttg

SEQ ID NO: 7518 - DNA, 3858 bp, synthetic construct
  misc_feature 1..3858: note = source = /note="Description of Artificial Sequence: Synthetic coding sequence"
  source 1..3858: mol_type = other DNA
atggacctcgaagcagctaagaatgggactgcctggcgcccgacctccgcagagggggatttcgaactgggcatcagctcgaaacaaaagagaaaaaagactaaaacggtaaagatgatcggcgtcctgaccctgttccgctactcagactggcaagataaactgttcatgtctttgggaacgattatggcgatcgcccacggctccgggctgcccctcatgatgatcgtattcggtgagatgaccgacaaattcgttgacaccgcgggaaatttctcgttccccgtgaacttctccctgagcctgcttaatccgggaaagatcctggaagaagaaatgacccggtatgcctattactactcggggctcggagctggggtcctggtggctgcatatatccaagtcagcttctggaccctggcggctggcagacagatcagaaagatccgccagaagtttttccacgcgatcctgcgacaagagatcggctggttcgacatcaacgatacgaccgagctcaacactcggctcactgatgacatttccaagatctcggagggtatcggagataaggtcggaatgttcttccaggcagtggccacttttttcgcgggctttatagtgggatttatcaggggctggaagctgactctggtgatcatggctatctccccaatcctggggttgtcggcggccgtgtgggcaaaaatcctgagcgcgtttagtgacaaggagcttgccgcctacgcaaaggcaggagctgtggccgaagaagctctcggtgccattcggaccgtgatcgccttcggtggacagaataaggaactcgaacggtaccaaaagcacctcgaaaacgctaaagagatcggaatcaagaaagcgatctcagcgaacattagcatgggaatcgcattcctcctgatctacgcttcatacgctctggccttctggtacggatcgaccctggtgatctcaaaggaatacaccataggaaacgccatgacggtgttctttagcatcctcatcggtgccttctcagtgggacaggcggccccgtgtattgacgcattcgccaatgccaggggagcagcttacgtgatattcgacatcattgacaacaacccgaaaatcgactcattcagcgaacgggggcacaagccagatagcattaaaggaaatttggagttcaacgatgtgcacttttcctacccgagccgggcaaatgtgaagatcctgaagggcttgaatttgaaagtgcagtcggggcagaccgtcgctctggtggggagctccggctgcggtaaatcaactactgtgcagctgattcagagactctacgatcctgatgagggaactatcaacatcgatggtcaggacatccggaatttcaacgttaactacctccgagaaatcatcggagttgtgagccaggaaccagtgctgttctcaaccactatcgcagagaacatttgctacggaagagggaacgtcaccatggacgagatcaagaaagccgtgaaagaggccaatgcctacgaattcatcatgaagctgcctcaaaagtttgacaccctcgtgggcgaacgcggagctcagctgtccggtgggcaaaagcagcgcatcgccatcgctcgcgcacttgtcaggaacccgaagatcctgctgctcgacgaggcgacttccgccctcgacaccgaatcggaagccgaggtgcaggctgccctcgataaggcccgggaaggacgcactacgatagtgatcgcgcaccggttgtcgactgtcagaaatgccgacgtcattgcaggcttcgaggacggagtcatcgtggagcagggatcgcactcggagctgatgaagaaggaaggcgtctacttcaaactcgtgaacatgcaaacgagcgggagccagatccagtccgaagagttcgagctgaacgacgaaaaggctgccaccagaatggctcccaacggatggaagtcccggctgtttcgccattccacccagaaaaatctgaagaactcccaaatgtgccaaaaaagcctggacgtggaaaccgacggactcgaggccaacgtcccgcccgtgtccttcctcaaggtgctcaagctgaacaaaaccgaatggccatacttcgtcgtcggcactgtgtgtgctatcgcgaacgggggacttcagccggccttttcggtgatcttctccgagatcatcgcaatctttggcccgggagacgacgcggtaaaacagcagaagtgcaacatcttctccctgattttcctgttccttggaatcatatcattcttcactttctttctgcaaggatttaccttcggaaaggcaggagaaatcttgactcggcggcttaggtccatggctttcaaggctatgctcagacaggatatgtcctggttcgatgatcacaagaactcaactggagcgctgtccactcgcctggccactgacgccgcccaagtgcagggcgccaccggaactcgactcgcgcttatcgcccagaacatcgcgaatctgggaaccggaatcatcatctcgttcatttatggctggcagcttactctgcttttgctcgctgtggtgccgatcattgcagttagcggcatcgttgagatgaagttgttggctggaaatgcgaaacgcgacaagaaggagctggaggctgcggggaagatcgccactgaggccatcgagaatattcgtactgtggtgtccttgacccaagaacgcaaatttgagtccatgtacgtggaaaagctctacggaccgtaccgtaattcagtccaaaaagcacatatctacgggattacgttctcaatctcgcaagcgtttatgtacttttcatacgcaggatgctttcgcttcggcgcgtacctgatcgtgaacggccatatgagattccgagacgtcatcctggtgttctcggccatcgtgttcggtgctgtggccctcggacatgcgtcctcgtttgccccggattacgccaaggccaagctgtccgcagcccatctcttcatgctgtttgagcgccaacctctgattgattcgtacagcgaggaagggctgaaaccagataagttcgaagggaacatcaccttcaacgaagtcgtgttcaattaccccacccgggccaatgtgccagtcctgcagggcctgtcgctggaggtgaaaaagggtcagacccttgcattggtgggctcatccggctgcggcaagagtaccgtagtccagctcctggaacgcttctacgacccactcgccggaactgtctttgtcgacttcggattccagctgctcgacggccaggaagcgaagaaactgaacgtgcagtggctgcgcgctcagctcggaatagtttcgcaggaacctatcctctttgactgttcaatcgcagaaaacatcgcctacggcgataactcgagagtcgtctcacaagacgagatcgtcagcgccgcgaaggcagccaatatccatcctttcatcgaaactcttcctcacaagtacgaaaccagggtgggagataagggtactcagttgtcaggaggacagaagcaacgaatagcaatcgctcgagccctcatccgccagccccaaattctcctgctggatgaggcgacgtctgcgcttgacaccgagtcggaaaaagtggtgcaggaggccctcgacaaggcccgcgaaggccggacctgtatcgtgatcgcacatcggctttcgacgattcaaaacgccgatctgatcgtggtgttccaaaatggacgcgtcaaggaacacggaacccaccaacaactgttggcccagaagggtatctacttcagtatggtgtcggtgcaagctggcacccagaacctg

SEQ ID NO: 7519 - DNA, 3858 bp, synthetic construct
  misc_feature 1..3858: note = source = /note="Description of Artificial Sequence: Synthetic coding sequence"
  source 1..3858: mol_type = other DNA
atggacctggaagccgccaaaaacggtacggcttggcggccaacatcagccgagggtgattttgaactcgggatctccagcaagcagaagcgaaaaaagaccaagaccgtcaagatgatcggggtgctcacactattcagatacagtgattggcaggacaagctctttatgagtttgggcaccattatggccatagcgcacggaagcggcctaccactcatgatgatcgttttcggggagatgacagacaaattcgtggacacagcggggaacttctccttcccggtgaatttcagcctctctttgctgaacccaggcaaaattctcgaggaggaaatgactcggtatgcctactactattctgggctgggtgccggagtacttgtggcggcatacatacaggtaagtttctggacactcgcagcagggcgccagatccgcaagattaggcagaagttctttcacgctatcttgcggcaggaaattggttggttcgatatcaatgacactaccgagcttaacactcgcctgaccgatgacatatccaagatatcagagggcatcggagataaagtggggatgtttttccaagccgtcgccactttttttgccggcttcatagtcggattcatccgcggttggaaactgactttggtgatcatggctatcagccctatcctgggcttatccgctgcggtgtgggctaagatcctcagcgccttctcagataaagagttggccgcctatgcaaaagcgggagcggtggccgaggaagcgctgggtgcaatcagaactgttatagctttcggcggccagaataaggagttggagaggtatcagaaacatttagagaatgccaaggaaatcggcataaagaaggcaattagcgcgaacatcagcatggggatcgccttcctactgatctatgcatcgtatgccctggcattctggtatggctctacgctcgtcatttcgaaagaatatacgatcggaaatgccatgactgtgttcttctctatcctgataggcgcgttttccgtggggcaggctgctccatgtattgatgcattcgcaaacgcacgaggcgccgcttatgtgatctttgacattatcgacaacaacccaaaaatcgactcctttagcgaaagggggcataagccagattcgatcaaggggaacctcgagttcaacgacgtgcacttctcctacccgtcccgagctaatgtgaagatcctcaagggactcaatctgaaggttcagtctggtcagaccgtggcgctggttgggtcctctgggtgcggaaagagcacaacagtacagttaatccaaagattatatgacccagatgagggtacaattaatatagatggtcaagacattaggaactttaatgtaaactatttgcgagagataattggggtggtgagtcaggaaccagtgcttttttctacgaccatcgccgagaacatctgttatggtcggggtaacgtgactatggatgaaatcaaaaaggccgtgaaagaagccaacgcctacgaattcatcatgaagcttccgcagaaattcgacaccctggtgggcgaaagaggtgcacagctgagtgggggccagaagcagcgtattgcgattgcccgagccttggttcggaatccaaagatcctattgcttgatgaggctacaagtgctctggatactgaaagcgaagcagaggtccaggccgccctcgacaaggctcgcgaggggcggaccacaatcgttattgcacaccgactgagcacggtgagaaacgctgatgtgattgccggattcgaggatggtgtgatcgtcgagcaagggagccatagcgaactcatgaagaaagagggcgtctatttcaagctcgtgaatatgcagacatctggttcacaaatccagagcgaagaatttgagttgaatgatgagaaagctgccaccagaatggcccccaatggctggaaaagtcggctcttcaggcatagcacccagaaaaacttaaagaattcccagatgtgtcagaagagcttagatgtcgagaccgatggcctggaggctaacgtccctcctgtgtctttcctgaaagtcttgaaattgaacaagactgaatggccctactttgtggtggggaccgtgtgcgctattgctaacggcggtctacaaccggcattttctgtcatattttctgagattatcgcaatctttggacccggtgatgacgccgtgaagcagcagaagtgcaacatattcagccttatctttctgtttctgggaattatcagcttttttacctttttcttacagggcttcacttttggcaaggcgggtgaaatcctcacacgccgtctgaggagcatggcgtttaaggccatgctgcgtcaggacatgagctggtttgacgaccacaagaatagcaccggagcattgagcacgaggctggctaccgacgcagctcaggttcagggtgctactggcacccggctggcactgatcgctcagaatatcgccaacctggggaccgggataatcatatcttttatctacggttggcagctgactctgctgctcctggctgtggttcccattatcgctgtgtctggaattgtagagatgaaactactcgccgggaatgcaaaaagagacaagaaggagctagaagctgccggaaagattgcaactgaagcgatcgagaacattcggaccgtggtatcccttacacaggagcggaagttcgaaagcatgtatgtggaaaaattgtatggtccctatcgcaatagtgtgcagaaagctcacatctatggtatcacttttagcatatcgcaggccttcatgtacttctcatacgctgggtgctttagatttggcgcctacttgatcgtcaatggccacatgaggttcagagacgtgatacttgtctttagcgctatcgtattcggcgcagtcgcactgggccatgcgtcctcctttgcgcccgactacgccaaggctaaactgtccgccgcccatcttttcatgcttttcgaaagacagcccctcatagattcatattcggaggagggactcaaaccggataagtttgaagggaatatcacctttaatgaagtggtgtttaattatccaactagagcaaacgtgccagtacttcaaggacttagtctggaggtcaagaaggggcaaacattagcccttgtggggtcttccggctgcggcaagagtacagtcgtccagctactggaaagattttacgatcctctcgctgggaccgtgttcgtggactttggctttcaacttctggacggccaggaggccaaaaagttgaatgtccaatggctcagagcccagttaggaattgtgagtcaagaacctatcctcttcgactgttcgattgccgaaaatatcgcatacggggacaattcaagggtagtctcacaagacgaaatcgtctcagccgcgaaggccgccaatattcatccgttcatcgagactctgccacataaatacgaaacaagggtcggagacaagggtactcaactcagtggtggacagaagcagcgcatcgccattgcccgcgctctgattcgacagccccagatcttgctgctggacgaggccacctccgctctcgacacagaatccgaaaaggtcgtgcaggaggctttggacaaggccagggaagggagaacgtgcatcgtgatagctcatcggctcagcactattcagaatgccgatctcatagtcgtgttccagaatggcagagttaaggagcacgggacccaccagcagctgttggctcagaaaggaatttacttctccatggtgtcggtacaagctgggactcagaacctt

SEQ ID NO: 7520 - DNA, 3858 bp, synthetic construct
  misc_feature 1..3858: note = source = /note="Description of Artificial Sequence: Synthetic coding sequence"
  source 1..3858: mol_type = other DNA
atggacctggaagctgctaagaacggaactgcctggcgccctacgtctgccgagggagacttcgaattgggaatcagctccaaacagaagcgcaaaaagaccaaaaccgtgaagatgatcggagtgctgaccttgtttcggtactcggactggcaagacaaacttttcatgtcgctgggaactatcatggcaattgcgcacggatctggtctgcctctgatgatgattgtttttggggaaatgaccgacaaattcgtggataccgctggaaacttcagcttcccggtgaacttttccctgagcttgcttaacccaggtaagatcctggaggaggaaatgaccaggtacgcgtattactactcaggcctgggagcaggtgtgctggtcgcggcatacatccaagttagcttctggaccctcgcggcggggcgccagatcagaaagatccgccagaagttttttcatgcgatcttgcgccaggaaatcggatggttcgacatcaacgacaccactgagctgaacaccagactcactgacgacatctcgaagatctcggaaggaatcggcgataaggtcggaatgttctttcaggcagtcgcgaccttctttgctggattcatcgtgggcttcatccgcggctggaagttgaccttggtgataatggccatcagcccgatcctcggcctgtcggcggccgtctgggcgaagatcctctccgccttctcagataaggagctggccgcatacgcgaaagcgggagccgtcgcggaagaggccctgggcgccatccggactgtgatcgcgttcggaggacagaataaagaactcgagcgctaccagaagcacctcgagaatgctaaggaaatcggaatcaagaaggcaatttcggccaacatcagcatgggcattgccttcctgctgatctacgcatcctacgcgctcgccttttggtacggatcgactctcgtgatttcgaaggaatacactatcgggaacgccatgactgtgtttttctcgatcctgatcggtgcgttctcagtgggccaggctgctccatgcatcgatgcctttgccaacgcgcgcggcgccgcctatgtcatcttcgacataatcgacaacaacccaaagatcgatagcttctcagaacgcggacacaagccggactcgatcaaaggtaatcttgaattcaacgatgtgcatttttcatacccttcaagggcgaacgtgaagatcctcaaggggctgaacctcaaggtgcaaagcggacaaaccgtcgcgctggtgggctcatctggctgcggcaagtcgaccactgtgcagctgatccagcgcttgtacgacccggacgagggcaccatcaacatcgacggacaggacattcggaatttcaatgtgaactacctgcgcgagatcataggagtggtgtcccaggaacccgtgctgttctccaccacgatcgccgagaacatttgttacggccggggaaatgtgaccatggatgagatcaaaaaagccgtcaaagaggcgaacgcttacgagttcatcatgaaactgccacagaagttcgacaccctggtcggagaacgcggtgcacagctgtccggaggccaaaaacagcgcatcgcgatcgcaagggcgctggtccggaaccctaagatcttgctcctcgatgaagcgacgagcgcgcttgacaccgagagcgaagcggaagtgcaggcagcactcgataaggccagagagggccggacgacgatcgtgattgctcacaggctgtccaccgtccgcaatgcagatgtgatcgcaggatttgaagatggcgtgatcgtggagcaaggatcacacagcgaattgatgaaaaaagaaggggtgtactttaaacttgtgaatatgcagacttccggatcacaaatccagtccgaggaattcgagctcaacgacgaaaaagccgccacccgaatggcaccgaacggatggaagagtcggctgtttcgtcattcaacccagaaaaacctgaaaaacagccagatgtgccagaagagcctggacgtggaaaccgacgggcttgaggccaacgtgccaccagtttccttcctcaaggtgctcaaactcaacaagaccgaatggccctactttgtggtcggtaccgtgtgcgccatcgccaacggtggactgcaaccggctttctctgtgatcttcagcgaaatcatcgcgatctttggaccgggagatgatgcggtcaagcagcagaagtgcaacattttctctctgattttcctgttcttgggaattatctcattcttcacttttttcctgcaaggttttacgttcggtaaagccggtgaaatcctgactagacggctcagatctatggccttcaaggcaatgcttagacaggatatgagctggttcgacgaccacaagaatagcaccggagcgctgtcaacccgcctggccactgatgccgcccaagtccaaggagccactggaactcggctggcgctgatcgcacagaacatcgcaaatctggggaccgggatcattatctccttcatctacggatggcagctgactctgctgctgttggccgtggtcccgataattgctgtgtccggcatcgtcgagatgaagctgctggcgggtaacgccaagagggataagaaggaactcgaggcagcggggaaaatcgctactgaggctatcgagaatatccggactgtcgtgtccctcacgcaagaaaggaagtttgaatcaatgtacgtggagaagctgtacggaccgtaccggaattcggtgcagaaggctcacatctatggaatcactttttcaatctcccaggcattcatgtacttcagctacgcgggatgcttccggttcggtgcatacctgatcgttaatggacacatgagattccgcgatgtgatcctggtgttctcagcaatcgtgtttggagcagtggccctgggccatgcgtcctccttcgcgccggactacgcgaaggccaagctgtccgccgcccacctgttcatgctcttcgagcgccaaccattgatcgactcgtactcggaggaaggcttgaaacctgataagttcgaagggaacatcacgtttaacgaggtggtctttaactaccctaccagagcgaatgtccccgtgctgcaagggctctcgctggaagtgaagaagggacaaactctggctctcgtgggctcttcgggatgcggaaaatcgaccgtggtgcaactgctcgagcggttctacgacccactggcaggaaccgttttcgtggacttcggcttccaactgctggacggacaggaggcaaagaagctcaacgtgcagtggctccgggcacagctcgggatcgtctcacaagaaccgatcctcttcgattgctcaatcgccgaaaacatcgcctatggcgacaactccagagtggtcagtcaggatgaaatcgtctcggcggccaaggccgccaatatccacccctttatcgaaactctgccgcacaagtacgaaactcgggtgggggacaaggggactcaattgtcggggggacagaagcagcggatcgctatcgcgcgcgcattgataagacaaccgcaaatcctccttcttgacgaggctacgtctgccctggacaccgaatcagagaaagttgtgcaggaggcgctggataaggcccgcgaaggtcggacgtgcatcgtcatcgctcaccgcttgtcgactatccagaatgccgacctcatcgtggtctttcagaacggacgcgtgaaagaacacggaactcaccagcagctgctcgcccagaagggcatctatttctctatggtgtctgtccaagctggaacccagaatctc

SEQ ID NO: 7521 - DNA, 3858 bp, synthetic construct
  misc_feature 1..3858: note = source = /note="Description of Artificial Sequence: Synthetic coding sequence"
  source 1..3858: mol_type = other DNA
atggatctagaagcggcgaaaaatggtacggcgtggcgtccgacgtcggcggaaggtgattttgaattaggtatatcgtcgaaacaaaaacgtaaaaaaacgaaaacggttaaaatgataggtgtattaacgctatttcgatattcggattggcaagataaactatttatgtcgttaggtacgataatggcgatagcgcatggttcgggtttaccgctaatgatgatagtatttggtgaaatgacggataaatttgtagatacggcgggtaatttttcgtttccggtaaatttttcgttatcgttattaaatccgggtaaaatattagaagaagaaatgacgcgttatgcgtattattattcgggtctaggtgcgggtgtattagttgcggcgtatatacaagtatcgttttggacgttagcggcgggtcgacaaatacgtaaaatacgtcaaaaattttttcatgcgatattacgacaagaaataggttggtttgatataaatgatacgacggaactaaatacgcgtctaacggatgatatatcgaaaatatcggaaggtataggtgataaagtaggtatgttttttcaagcggttgcgacgttttttgcgggttttatagttggttttatacgtggttggaaattaacgctagtaataatggcgatatcgccgatactaggtttatcggcggcggtatgggcgaaaatactatcggcgttttcggataaagaattagcggcgtatgcgaaagcgggtgcggtagcggaagaagcgttaggtgcgatacgaacggtaatagcgtttggtggtcaaaataaagaattagaacgatatcaaaaacatttagaaaatgcgaaagaaataggtataaaaaaagcgatatcggcgaatatatcgatgggtatagcgtttttactaatatatgcgtcgtatgcgctagcgttttggtatggttcgacgctagtaatatcgaaagaatatacgataggtaatgcgatgacggtttttttttcgatactaataggtgcgttttcggtaggtcaagcggcgccgtgtatagatgcgtttgcgaatgcgcgtggtgcggcgtatgtaatatttgatataatagataataatccgaaaatagattcgttttcggaacgaggtcataaaccggattcgataaaaggtaatctagaatttaatgatgtacatttttcgtatccgtcgcgtgcgaatgtaaaaatattaaaaggtttaaatctaaaagtacaatcgggtcaaacggttgcgttagtaggttcgtcgggttgtggtaaatcgacgacggtacaactaatacaacgtttatatgatccggatgaaggtacgataaatatagatggtcaagatatacgtaattttaatgtaaattatctacgtgaaataataggtgtagtttcgcaagaaccggtattattttcgacgacgatagcggaaaatatatgttatggtcgtggtaatgttacgatggatgaaataaaaaaagcggttaaagaagcgaatgcgtatgaatttataatgaaattaccgcaaaaatttgatacgttagtaggtgaacgaggtgcgcaattatcgggtggtcaaaaacaacgtatagcgatagcgcgtgcgctagtacgtaatccgaaaatactactactagatgaagcgacgtcggcgctagatacggaatcggaagcggaagttcaagcggcgttagataaagcgcgagaaggtcgtacgacgatagtaatagcgcatcgtttatcgacggtacgtaatgcggatgtaatagcgggttttgaagatggtgttatagtagaacaaggttcgcattcggaattaatgaaaaaagaaggtgtttattttaaattagttaatatgcaaacgtcgggttcgcaaatacaatcggaagaatttgaactaaatgatgaaaaagcggcgacgcgaatggcgccgaatggttggaaatcgcgactatttcgacattcgacgcaaaaaaatttaaaaaattcgcaaatgtgtcaaaaatcgttagatgttgaaacggatggtctagaagcgaatgttccgccggtttcgtttctaaaagttctaaaactaaataaaacggaatggccgtattttgtagtaggtacggtatgtgcgatagcgaatggtggtctacaaccggcgttttcggttatattttcggaaataatagcgatatttggtccgggtgatgatgcggtaaaacaacaaaaatgtaatatattttcgttaatatttttatttttaggtataatatcgttttttacgttttttttacaaggttttacgtttggtaaagcgggtgaaatactaacgcgtcgattacgatcgatggcgtttaaagcgatgttacgacaagatatgtcgtggtttgatgatcataaaaattcgacgggtgcgctatcgacgcgtttagcgacggatgcggcgcaagtacaaggtgcgacgggtacgcgtttagcgttaatagcgcaaaatatagcgaatctaggtacgggtataataatatcgtttatatatggttggcaattaacgctactattattagcggttgttccgataatagcggtatcgggtatagtagaaatgaaattactagcgggtaatgcgaaacgtgataaaaaagaattagaagcggcgggtaaaatagcgacggaagcgatagaaaatatacgaacggtagtttcgctaacgcaagaacgtaaatttgaatcgatgtatgttgaaaaattatatggtccgtatcgaaattcggttcaaaaagcgcatatatatggtataacgttttcgatatcgcaagcgtttatgtatttttcgtatgcgggttgttttcgatttggtgcgtatttaatagttaatggtcatatgcgatttcgagatgtaatattagtattttcggcgatagtatttggtgcggtagcgctaggtcatgcgtcgtcgtttgcgccggattatgcgaaagcgaaattatcggcggcgcatctatttatgctatttgaacgacaaccgttaatagattcgtattcggaagaaggtctaaaaccggataaatttgaaggtaatataacgtttaatgaagtagtttttaattatccgacgcgagcgaatgtaccggtattacaaggtctatcgctagaagttaaaaaaggtcaaacgctagcgttagttggttcgtcgggttgtggtaaatcgacggtagtacaactattagaacgtttttatgatccgctagcgggtacggtttttgttgattttggttttcaattattagatggtcaagaagcgaaaaaactaaatgtacaatggttacgtgcgcaattaggtatagtatcgcaagaaccgatattatttgattgttcgatagcggaaaatatagcgtatggtgataattcgcgtgtagtttcgcaagatgaaatagtttcggcggcgaaagcggcgaatatacatccgtttatagaaacgttaccgcataaatatgaaacgcgagtaggtgataaaggtacgcaattatcgggtggtcaaaaacaacgtatagcgatagcgcgagcgttaatacgacaaccgcaaatattattattagatgaagcgacgtcggcgctagatacggaatcggaaaaagttgtacaagaagcgttagataaagcgcgagaaggtcgaacgtgtatagtaatagcgcatcgtttatcgacgatacaaaatgcggatttaatagtagtatttcaaaatggtcgtgttaaagaacatggtacgcatcaacaactactagcgcaaaaaggtatatatttttcgatggtatcggttcaagcgggtacgcaaaattta

SEQ ID NO: 7522 - DNA, 3858 bp, synthetic construct
  misc_feature 1..3858: note = source = /note="Description of Artificial Sequence: Synthetic coding sequence"
  source 1..3858: mol_type = other DNA
atggatctggaggccgccaaaaatggcaccgcatggcgacctaccagtgcggagggagacttcgagctggggatatcaagcaagcagaagaggaaaaagaccaagacggtcaaaatgattggagtccttaccctttttagatactcagattggcaagataagttgttcatgtccctcggcaccattatggcgattgctcatggatcgggtttgcctttgatgatgatcgtgtttggtgagatgaccgataagtttgtggatactgccggaaacttctcatttccagtcaactttagcctgtcacttctgaacccaggaaaaatcttggaagaagagatgaccaggtacgcatactactactcgggattgggtgcaggggtgctggttgcggcatacatccaggtttccttttggacccttgctgccgggcggcagattagaaagattaggcaaaagtttttccatgcgatcctccgccaagagattggctggttcgatatcaatgatactaccgaacttaacactcgactgaccgatgatatttcgaagatctccgagggaataggggataaggtgggtatgttcttccaggccgtggcaaccttctttgcgggattcatcgttggattcattcgtggttggaagctcacccttgttatcatggcaatctcaccaattttggggctgtcagccgccgtgtgggccaaaattctctcagcattttctgacaaggagttggcagcctacgcaaaggcgggtgctgtggcggaagaggcccttggagccatcagaactgtgattgcctttggcggtcagaataaagaactcgagcgataccaaaagcatctcgaaaacgctaaggagatcggtattaagaaagcaatttcagccaacatatctatgggtattgccttcctcctcatttacgcatcctacgccctcgcattttggtatggttcgactctcgtgatttctaaggaatacactatcggaaatgcaatgactgtgttcttttcgattttgattggtgctttctcggtgggtcaggctgcaccctgtattgacgcatttgccaacgcacgcggtgcagcatacgtcatttttgacattattgacaacaacccaaagattgattcctttagtgaacgtggccataaacccgatagcattaagggtaacctggagtttaacgatgtgcacttttcgtacccatcccgagccaatgtgaagatccttaagggtctgaacctcaaagtgcagtccggacagactgtagcacttgtggggagctctggttgcggtaaatcgaccaccgtgcagctcatccagcggctgtacgaccccgatgagggaaccattaacatcgatggtcaggatatcaggaacttcaacgtaaactaccttcgcgagattataggtgttgtgtctcaagaacctgtgctgtttagcactacgatagcggaaaacatatgctacggaaggggaaacgtgaccatggatgaaatcaagaaagcagtcaaggaagcgaatgcttacgaattcattatgaaactccctcagaaatttgacaccctggtgggagaaagaggtgcccaactcagcggtggtcaaaaacaacggatcgcaatcgcaagggcactggtgcggaaccccaaaatacttctgttggatgaggctactagcgctcttgataccgaatcagaagcagaggtgcaggcagcactggataaggcccgggaaggccgtacgaccattgtgattgcgcaccgactctccactgtcaggaatgccgatgtgatcgcagggtttgaagatggagtcatcgtcgaacagggttcacattccgagcttatgaagaaggagggagtgtactttaagttggtgaacatgcagacctcgggaagccaaatacaatcagaggaattcgaacttaacgacgagaaagcagccaccagaatggccccaaatggttggaaatccaggctgtttcggcattcgacccaaaagaacttgaagaactcccagatgtgtcaaaagtccctggacgtggagactgatggacttgaagccaatgtgcctcccgtgagcttcctgaaagtgctgaagctcaacaagaccgaatggccgtactttgtggtcgggactgtgtgtgcaattgcaaacgggggactgcagcctgcatttagcgtgatcttttccgaaatcatcgcaattttcgggcctggagatgacgcagtcaaacaacaaaagtgtaacatcttttccctcattttcctgtttttgggaataatctcatttttcactttcttcctccagggatttacgtttgggaaggccggtgaaatccttactagacggctgcgttcaatggcgtttaaggcaatgctgagacaagacatgtcgtggttcgacgaccacaagaactccaccggtgcgcttagcaccagactcgcgactgatgcagcacaagtgcagggtgcgactggcactcggttggcactgatcgcacagaatatagcaaatctcggtacggggatcatcatatctttcatatacggctggcagcttaccctgcttctgctggctgtcgtgcccatcatagccgtgtcggggatcgtcgagatgaagctgcttgcaggaaatgccaagagagataagaaggagctcgaggcagccggtaagattgccacggaggcaatcgaaaacataagaaccgtggtgtccctcacccaagaaagaaagttcgaatcgatgtatgtggagaagctgtacggcccatatcgtaactcagtgcaaaaggcccatatctacggaatcaccttcagcatctcacaggcatttatgtacttttcatacgctggttgctttcggtttggtgcatacctgatcgtgaatgggcatatgagatttagggacgtgattctggtgttttcagcaatcgtgtttggcgcagtggcattgggacacgcatccagctttgcccctgattacgccaaagcaaaactttcggcggcacatcttttcatgcttttcgaacggcagcctctcatcgattcgtattccgaagaggggctcaagcctgacaagtttgaaggaaacattacctttaacgaagtggtgtttaactacccaaccagagcgaatgtccctgtgctgcaaggcctgtcgctcgaagtgaagaagggacagactctggcacttgtgggatcctccgggtgtgggaagtcaacggtcgtgcagctcctggagcggttctacgacccacttgcaggaaccgtgtttgtggattttggctttcagctgcttgacggacaagaagcaaaaaagctgaacgtccaatggcttagagcccaacttggaattgtgagccaagaaccgatccttttcgactgttccattgcggagaatattgcatacggtgacaactcgagagttgtgtcacaagatgaaatagtgtccgcagcaaaggcagctaacattcacccctttatcgaaactcttccacataagtacgaaaccagggtgggagataagggcacccagctttccggcgggcaaaagcagaggattgcaatcgcacgggctctcatcaggcaaccacaaattctcctgctcgacgaagccacttcggctctggataccgagtcagagaaagtcgtgcaggaagctcttgacaaggcgcgagaaggcagaacttgtatagttatcgcacatagacttagcaccattcagaacgcagacctcattgtggtgttccaaaatggccgggttaaagagcacggaactcatcaacagctgctggcgcaaaagggaatctacttctcaatggtcagcgtgcaagcaggaactcaaaacctc

SEQ ID NO: 7523 - DNA, 3858 bp, synthetic construct
  misc_feature 1..3858: note = source = /note="Description of Artificial Sequence: Synthetic coding sequence"
  source 1..3858: mol_type = other DNA
atggacttggaggccgccaagaatggcacagcttggcgaccaacttcagctgaaggcgactttgagctggggattagcagcaagcagaagagaaagaagactaaaacagtaaagatgatcggcgtactaaccctgtttcgatatagtgattggcaagacaagctttttatgtccctgggcactatcatggctatcgcgcatggatcaggccttccactgatgatgatcgtgttcggggagatgacagacaagttcgtggacacagctggcaatttctcctttcccgtgaatttctctctcagcttactcaatccaggtaagattctcgaggaagagatgacccgttatgcctactactactcaggtctgggggccggcgtacttgtcgcggcctacatccaggtgagcttctggactcttgctgctggacgacagatccgaaagatccgacagaagttctttcacgcaatcctgcgccaggaaatcgggtggtttgacatcaacgatacaaccgagctaaacaccaggctcacagatgatatctcgaaaatctcagaggggatcggggataaagtggggatgttctttcaagccgtggctacttttttcgcaggattcattgtaggtttcatacgtggttggaaactgacactagtcataatggctattagccccatcctcggactgagcgctgctgtttgggcaaaaattctttctgcttttagcgataaagagttggccgcttacgccaaggctggggccgtagcagaagaagccctgggggccataaggacagtgatagcatttggaggccagaacaaagaactagagcgataccagaaacacctagagaacgccaaggagattggcattaagaaagccattagcgccaatatctccatgggaatcgcttttctgctgatttacgcttcgtatgctttggcattctggtatgggagcacccttgtgatttctaaggaatacaccataggcaacgcgatgaccgtctttttctcaattctgattggcgcgttctctgtaggtcaggctgctccctgtatcgatgcatttgctaacgcaaggggggcagcttacgtgatttttgacataatcgacaataacccaaagattgactctttctctgaaaggggacataaacccgacagcatcaagggcaacctagaatttaacgacgttcacttctcgtatccatcaagagctaatgtaaagattctgaagggtctgaacctgaaggtgcaatcaggacagacagtagccctggttggcagtagcggctgtggaaaatctaccacagtgcagctgatccaacgtctctatgatccagatgagggcactataaacattgatggacaggatatccgaaatttcaacgttaactatcttcgagagattattggggtggtgtcccaggagccagtcctgttttctaccactatcgccgaaaatatctgctatggacgaggcaatgtgacgatggacgagataaaaaaggcggtgaaggaggcaaacgcctacgagttcatcatgaagctgcctcagaagtttgacactttagtgggcgaacgaggagctcagttgtccggggggcagaagcagaggatcgctattgcgcgagcactcgtccgaaatcccaaaatcctcctgctggatgaagcaacctccgccttggacaccgagtctgaggctgaagtgcaggctgctctagacaaggccagggaagggaggacaacgatagtcatcgcccaccgcctatctacagtacgaaatgccgatgtgattgctggctttgaagacggagtaattgttgagcagggctcccattccgagctgatgaagaaagaaggcgtctacttcaaactggtcaacatgcagactagtgggtctcagatccaatctgaagaatttgagctgaatgatgagaaagcagcgacaagaatggctcccaatggctggaagtccaggctctttcggcatagtacgcaaaaaaacttgaagaatagccagatgtgtcagaaatctctagacgttgagacggacgggctcgaggcgaatgtcccacctgtctccttcctgaaggtccttaaacttaacaaaacagaatggccctactttgtggtgggcacggtgtgcgcaatcgccaatgggggcctgcagccagccttttctgtaatcttctccgagatcattgccatcttcggaccgggggacgatgctgtgaaacaacaaaaatgcaatatcttctctctgatattcctgttcctgggcatcatctccttctttaccttttttcttcagggttttacgttcggaaaggcaggcgagatcctgacaaggcgactgaggagtatggccttcaaggcaatgctgcgccaggacatgagctggttcgacgaccataagaatagcaccggtgcactttccacacgcctcgcgactgacgctgctcaggtccagggagccaccggcactcgattggcactcattgcacaaaacattgcaaacttgggaacaggaattattatctcgtttatttatggctggcaacttacacttctccttctggcagtcgttccaataatagctgtcagcggaatcgtcgaaatgaaactcctcgcagggaacgcgaaaagagataagaaggaattggaagccgcgggaaaaatcgcgacagaagccattgaaaatatccgaaccgttgtttctctaacacaggagcgtaagtttgaatctatgtatgtggagaagctctacggcccataccgtaatagcgtacagaaggcgcatatctacggcataacgtttagtatctctcaggcattcatgtacttcagctacgctggatgcttcaggttcggagcctatctgatagttaatgggcatatgcgatttcgcgatgttatccttgttttctcggctatcgttttcggtgccgtagccttgggccacgcgagttccttcgctcctgattatgcaaaggctaaactttccgcggcccacctatttatgctgttcgaacgacagcctttaattgactcttacagcgaagaagggctcaaaccagacaaattcgagggtaacatcacatttaatgaggtggttttcaactatccgacaagagcaaacgtgcctgtgctgcaggggcttagcctggaagttaaaaagggccagacacttgccttggttggttcctcggggtgcggaaagagcacagttgtccaactcttggagaggttttacgatccactggcaggaaccgtttttgtcgactttggctttcaactcctggatggccaggaagccaaaaaactgaatgtacagtggctgagagcgcagctcgggatcgtttcccaggaaccaattctcttcgactgctccattgcggagaacattgcctatggagataactcaagagtggtgagccaggatgaaatagtgtccgccgccaaggctgcaaatatacacccctttattgaaaccctcccacataagtatgagactagggtcggtgacaaaggcacccaacttagcggtggccagaagcaaaggatcgccatcgcacgggccctgatcaggcaacctcagatcctactactggatgaggctacaagcgctctggatactgaatctgagaaagtggtccaggaagctctggacaaagcccgtgagggcagaacatgtatcgtgatcgcccaccgcctctccactatccagaatgccgatttgattgtcgtttttcagaatggcagggtgaaggaacacgggacccatcagcagctgttagctcaaaagggcatctatttttccatggtcagtgtacaagcagggactcagaatctg

SEQ ID NO: 7524 - DNA, 3858 bp, synthetic construct
  misc_feature 1..3858: note = source = /note="Description of Artificial Sequence: Synthetic coding sequence"
  source 1..3858: mol_type = other DNA
atggacctggaagccgctaagaatggtactgcatggcggcccacctctgctgagggcgacttcgagctgggaattagctcaaaacaaaaacggaagaagaccaaaacagtcaagatgattggggtcttaacactgttcaggtatagtgattggcaggacaaattatttatgtctctgggcaccattatggcaatagcccatggatcagggctacccttaatgatgattgtctttggcgaaatgacagataaattcgtggatacagctggcaactttagctttcctgtgaactttagcctgagtcttctgaatcctggcaaaatcctggaagaagaaatgacaagatatgcctactattattctgggctgggcgccggtgtgttagtggccgcctacatacaggtgtcattctggactctggcagccggcagacaaattcggaaaatcaggcagaagttcttccatgcaatactaagacaggagatagggtggttcgatattaatgatacaactgagctgaatacccggctgactgacgatatatccaaaatttccgaggggatcggggacaaagtggggatgtttttccaggctgtggcaactttctttgctggcttcatagttggctttatacgcggctggaaactgaccctggtgatcatggccatatcaccaattctgggcctatccgcagctgtgtgggccaaaattctgagcgccttcagcgataaagagctggccgcttatgccaaggcaggagcagttgctgaggaagctctgggggctattcggaccgttatcgcatttggtggccaaaacaaagagttagagcgttatcagaagcacctggagaatgccaaagaaataggaatcaagaaagctatcagcgccaacataagtatgggcatcgctttccttctaatatacgcttcttacgctctggccttctggtacggcagcacactagtcatatccaaggaatacactatcggcaatgctatgaccgtttttttcagcatactgattggcgcattctctgtcggccaggccgcaccatgtattgatgctttcgcaaatgcacggggcgcagcctacgtgatttttgatattattgataataatcccaagatcgattccttttcagagaggggccacaagcctgattccatcaagggcaacctggagttcaacgatgtgcacttttcctaccccagcagagccaatgttaaaatcctgaaaggcctcaatctcaaagtgcagtcaggccagacagtcgccctggtgggcagttcaggctgcggaaaaagcactactgttcagctgatacaaagactgtacgatccagacgaagggactataaacatcgatggccaggacattcgcaatttcaatgttaattacttaagagaaataattggggtcgtgagccaggagcccgttctgtttagtaccactatagcagagaacatctgctatggaagaggaaatgtcacaatggacgagatcaaaaaagccgtgaaagaggcaaacgcatacgagttcataatgaaactgccccagaagtttgacaccttagtgggcgaaagaggggcccagctgtctgggggccagaagcagcgcatagccatagcccgcgcactggtgagaaatcctaagatattactcctggacgaagccacctcagctctggacactgaaagtgaagccgaagtccaggccgcactggataaagcacgtgaaggaagaactaccatcgtgattgctcatcgcctgtctaccgtgagaaatgcagatgtgatcgcaggcttcgaagacggtgttattgttgagcaggggtcccattccgagctcatgaagaaggagggcgtctactttaagctggtgaatatgcagaccagtggaagccagatccagtcagaggagttcgagctgaacgacgagaaagcagctactagaatggctcccaacggttggaaaagcaggctgtttcgacactcaacccagaagaaccttaagaacagtcagatgtgtcagaagagtctggacgtggaaaccgacgggctggaagccaacgtaccacccgtttcttttctgaaggttcttaagttaaacaaaaccgagtggccttactttgtcgtgggcacagtgtgtgccatcgctaatgggggtttgcagccagccttcagcgtcatttttagtgaaataattgccatttttggtcccggcgacgatgcagttaagcagcaaaagtgtaatatcttcagcctaattttcctgttcctggggataataagctttttcacatttttcctgcaagggtttacctttggaaaggccggggagattttaactaggcggttacgctcaatggcctttaaggccatgttgaggcaggacatgtcttggttcgacgaccacaaaaattccaccggggccctaagcacacggcttgcaacagatgcagcacaggtgcagggcgccaccgggaccagactcgcccttattgcccagaacattgcaaacctcggaaccggaatcataatatccttcatatatggatggcaacttactttattacttctagccgttgtccctattatcgccgtttccggcattgtggaaatgaaacttctggcaggaaatgctaagcgcgataagaaagagttagaggccgccggcaaaatcgccaccgaggccatcgagaatataaggactgtggtgtccctgactcaggagagaaagtttgagagcatgtatgttgaaaaattgtatggcccctacaggaattctgtgcagaaggctcacatctatggaattacattctccatctctcaggctttcatgtatttcagctacgctgggtgctttaggttcggagcctacctgatcgttaacgggcacatgagattccgagacgttatactggtgttctcagctattgtgttcggtgctgtggcacttggacacgcttcatcattcgcccctgactacgccaaggctaagctcagcgccgcacatctgttcatgctgttcgagaggcagcccctgatagacagctattctgaggaaggtcttaaaccagacaagttcgagggcaatattaccttcaacgaggtggtttttaactatcctactcgcgctaatgtgccagttttacagggtctatctctggaagtgaaaaagggccagaccttagctcttgtcggtagctcaggatgcggcaagtccaccgttgtccaactgctggaaaggttttacgacccactggcagggacagtgtttgtggattttggatttcagctgctcgatggacaagaggccaaaaagttaaacgtacagtggctgcgcgctcagctcggcatagtgtctcaggaacccatcctgttcgattgttccatcgcagagaacattgcctatggggataactcaagggttgtctcacaggacgagattgtttcagccgctaaggctgccaatattcacccttttatcgaaacattacctcataagtacgagactcgggttggtgacaaagggactcagctgagcggcggccagaagcagcgcatcgccatcgctagggccctaataaggcagccacagatcttactgctggacgaggccactagtgcccttgacactgaatcagagaaagtggtgcaggaggccctagacaaagctcgggagggccgtacctgcatagtcatcgcccatcgtctctctactatccagaatgccgatctcatcgtggtgtttcagaatggcagggtgaaagaacacggcacccaccagcagctgctagcccagaagggcatctacttctctatggtgtccgtgcaggctggaacccaaaacctg

SEQ ID NO: 7525 - DNA, 3858 bp, synthetic construct
  misc_feature 1..3858: note = source = /note="Description of Artificial Sequence: Synthetic coding sequence"
  source 1..3858: mol_type = other DNA
atggatttggaagctgccaagaacggaactgcttggcgccccacctcggcagagggagacttcgaacttgggatctccagcaagcaaaagcggaaaaagaccaaaactgtgaaaatgatcggcgtgctgaccctcttccgatactccgattggcaggacaaactgttcatgtccttgggaactatcatggcaattgcgcacggctccggactgcccctcatgatgatcgtgttcggggagatgaccgacaagtttgtggacactgctggaaacttcagcttcccggttaacttcagcctgagcttgctgaatccgggaaagatcctggaggaagagatgaccagatacgcgtactactattccggactcggagcaggtgtcctcgtcgcggcgtatatccaggtatctttctggactctggctgcgggacggcagatccgcaagatccgtcagaagttctttcacgcaatcctccgccaagagataggctggttcgacatcaacgacacgactgagctcaacaccaggttgaccgatgacataagcaaaatctcagaaggaatcggtgacaaggtgggaatgttttttcaagcggtggcgacctttttcgcagggttcattgtcggttttatccggggatggaaactcactctggtgataatggccatttcaccaatcctgggactgtcggcagcggtgtgggcgaaaatcctttcggctttctcagacaaggaactggcggcatatgccaaggcgggggcggtggctgaagaagcactcggggcaatcagaactgtgatcgcctttggaggccaaaacaaggagctggagaggtaccagaagcacttggagaacgccaaggaaatcggtattaagaaagctatcagcgccaatatctcaatggggattgcgttcctgttgatctacgcatcatacgccctcgctttctggtacggatcaaccctcgtcatctcgaaagaatacaccatcggaaatgccatgaccgtgttcttctcaatcctgattggagccttctcagtcggacaagccgctccgtgcattgacgccttcgctaacgcccggggtgcggcatacgtgatcttcgatatcatcgacaataacccgaaaatcgactccttcagcgagcgcggccataagccggattccatcaaaggcaatctcgaattcaatgatgtccacttctcgtacccgagccgcgccaacgtcaagatcctgaagggactgaacctgaaggttcaatcaggccaaactgtcgctctcgttggcagttcgggatgcgggaagtcaactactgtccagttgattcagcgactgtacgaccctgacgaggggacgatcaatatcgatggacaagatatccgaaatttcaatgtgaactacctccgcgagatcattggagtggtgtcccaggagccggtgctcttctctactactatcgcagaaaacatctgttacggtcgaggtaacgtcactatggatgagataaagaaggccgtgaaagaagccaacgcgtacgaattcattatgaagttgccacagaagttcgacactctggtgggagagcgaggggcgcagctcagcggaggccagaagcagagaatcgctatagcgcgggcactcgtgaggaatccgaaaatccttctcctggacgaagcaacctcggcactggataccgaatctgaagccgaggtgcaagcagccttggacaaggctcgcgagggtagaacgaccattgttatcgcacatcgcttgtccactgtgcggaacgcagacgtcatcgccggcttcgaagatggagtgattgtggaacagggatcccattcggaactgatgaagaaggagggagtttacttcaaactggtgaatatgcagaccagcggcagccagatccagtcagaggaattcgagctgaacgatgaaaaggcggcaacccgcatggccccgaatgggtggaagtcacgccttttccggcactccacccagaagaacctcaagaattcccaaatgtgtcagaagtcgttggacgtcgaaactgacggtcttgaggccaacgtgcctccagtgtcgttcctgaaggtgcttaaacttaacaagaccgaatggccctacttcgtagtgggaaccgtctgcgcgatcgctaacggcggactgcagccagcgttctccgtcatcttctctgaaatcatcgccatcttcggaccgggagatgatgcggtgaagcagcagaagtgtaacatcttcagcctcatctttcttttcctgggaatcatctcgtttttcaccttcttcctgcaaggctttacttttggtaaagcaggcgaaatcctgacgaggcgcctgcggtctatggctttcaaggctatgctgcgtcaagatatgagttggttcgacgaccacaagaactcgacgggagcgctttcgaccagacttgccaccgacgccgcgcaggtgcagggagcaactggaactcggttggcgctgatcgcacagaacatcgccaatctcggaaccgggatcatcatttcgtttatctacggatggcaactgaccctgttgctgcttgccgtggtgcctatcattgctgtttccggtatagtggagatgaaactgctggccgggaacgctaaacgcgacaagaaagagctggaagcagctggaaagatcgccactgaagcaatcgaaaacatcaggaccgtggtttccctcactcaagagcggaaattcgaatcgatgtacgtcgagaagctctacgggccataccgcaattccgtgcaaaaggcgcatatctacgggatcactttttcaatcagccaagcctttatgtacttcagctacgccggctgctttcgcttcggagcgtacctgattgtgaatggccatatgagatttcgcgatgtcattctcgtgttctcagcaattgtgttcggggctgtggctctgggacacgcatccagcttcgcccctgattacgcgaaagcgaaactcagcgcggcccacctgttcatgctgtttgagcggcagccactcatcgactcatactccgaagaaggactgaagccagacaaattcgaaggtaacattacgttcaatgaggtggtgtttaactatcccactagggctaacgtcccggtcctgcaaggtttgtcgctggaagtgaagaagggacagactctcgctctcgtggggtcgtcaggatgtggaaaatcgaccgtcgttcagcttttggaaagattctacgatcctctcgccggcactgtgttcgtggacttcggattccagctcctcgacggccaggaggcgaagaaactgaatgtacaatggctgcgcgctcagctcgggatagtgtcgcaagaaccgatcctctttgactgctctattgccgagaacatcgcctacggtgataacagtcgcgtcgtcagccaggatgaaatcgtgagcgcagcaaaggccgcaaatatccatccttttatcgaaacccttccacacaagtacgagacgagagtgggagataagggtactcagctctccggcggtcagaagcagcggatcgccatcgcccgggcgctgattagacaaccgcaaatcctgctgctggacgaagcgacctccgctcttgacactgaatcggagaaggtggtccaggaggcgctggacaaggccagggaagggagaacctgcatcgtgatcgcccaccggctgtccaccatccaaaatgccgatctcatcgtggtatttcaaaatggaagggtgaaggagcacgggacccatcagcaactgctggcgcagaagggcatctacttctcgatggtgagcgtccaggccggaacccaaaacctc

SEQ ID NO: 7526 - DNA, 3858 bp, synthetic construct
  misc_feature 1..3858: note = source = /note="Description of Artificial Sequence: Synthetic coding sequence"
  source 1..3858: mol_type = other DNA
atggacctcgaagcggcgaagaacggcactgcttggaggcccacgtccgcggagggcgactttgagctcggcatctcctctaagcagaagagaaagaaaaccaagacagtaaagatgattggagtgctgactcttttcagatactctgactggcaagacaagctgttcatgtctcttggcactataatggccattgctcacggtagcggtctccccttgatgatgattgtcttcggtgagatgaccgacaaattcgtggataccgcaggtaacttttcttttcctgtaaacttcagcctgtccctgctgaacccgggtaagatactggaagaggaaatgacgaggtacgcttactactattccggtttgggcgccggagtcctggtcgctgcctacattcaagttagtttttggacgctggccgctggtaggcagatcagaaaaataaggcagaaattcttccatgcgatccttagacaagagatcggatggttcgatatcaatgacacaacagaactgaatactaggcttacagatgacatctctaagatatcagagggtatcggcgacaaggtgggcatgtttttccaggctgttgccactttcttcgctggtttcatagttggattcatcagaggttggaaattgacgttggtcataatggctatttcaccaatcctgggtctctcagcggcagtctgggccaaaatcctctctgctttctcagacaaggagttggccgcctatgctaaggcgggagcagtggcggaggaagctctcggtgctattcgcacagttatagcgttcggtggtcagaacaaagagctcgagaggtaccagaagcacctggagaacgcaaaggagatcggcattaagaaggcaatctctgccaacataagcatgggcatcgcattccttttgatctacgcgtcatatgccctggccttctggtatggttccacactggtgatatctaaggagtacaccattggcaacgccatgaccgtatttttcagcatccttatcggcgctttcagtgttggacaagcagctccctgcatagatgccttcgccaacgccaggggtgcggcctatgttatctttgacatcatcgataataatccgaagatagattcattcagcgaaagaggtcataagcccgactcaataaagggcaacctggaattcaatgacgttcatttctcctacccttccagggcgaacgttaagatcttgaagggattgaacctgaaagtgcaaagtggccaaaccgtcgctctggtaggctccagcggatgcggaaagtctacaactgtccagctcatccagagactctacgaccccgatgagggcactataaatatcgacggtcaggacatccgcaattttaacgtgaactatttgagagagatcatcggcgtcgtttcccaagagcctgtcttgtttagtaccacgatcgccgagaacatttgttatggccgcggtaacgtgaccatggatgagatcaaaaaggccgtgaaagaggcaaatgcttacgagtttatcatgaagctgccacagaaattcgataccctcgtgggcgaaaggggtgcccaactttccggtggacagaagcaacgcatcgctatagcaagggcgcttgtgaggaatcccaagatcctcctgctggatgaagctacatctgcactggacactgagagcgaggcggaggtacaggcggcgctggacaaggctagagagggcaggacaaccatagttatagcacacagactgagcaccgtccgcaacgctgacgttatcgcaggctttgaagacggcgttatcgtggagcagggtagtcatagcgaactgatgaagaaggagggagtatacttcaagctggttaacatgcaaacttcaggatctcagatccagtctgaggaatttgagctcaatgacgagaaggctgcgaccaggatggcaccaaacggctggaaaagcaggctgttcagacacagcacgcaaaagaacctcaaaaatagtcaaatgtgtcagaagtccttggacgtggagacggacggtcttgaggccaacgtgccccctgtcagcttcctgaaggtcctgaagctgaacaaaaccgaatggccttactttgtcgtgggtactgtatgcgcgattgcgaacggaggtttgcaaccagccttctctgtcattttctctgagatcatagctattttcggacctggagacgatgccgtcaagcagcagaaatgtaacattttctccctgatctttttgttccttggtatcatctcctttttcacatttttcctccagggattcaccttcggcaaggccggcgagatcctgacccgcaggttgaggtctatggcttttaaagccatgctccgccaggatatgtcctggttcgacgatcacaagaactctaccggcgctctgtctacccgcttggccactgacgcggctcaggttcagggtgctacaggtaccaggctggcgctgatagcccagaacatcgccaacctcggaaccggtattatcatttcattcatctacggatggcagctcactctcctgctgctggctgtagtgcccattatcgcagtgtctggtattgtcgaaatgaagctcctcgctggtaacgctaaacgcgataagaaggagttggaagccgccggtaagattgcaaccgaagccatcgagaacattagaacggtggttagcttgacccaggaacgcaagttcgaatctatgtatgttgagaagctttatggtccatacaggaatagcgttcagaaggcgcacatatatggaattactttctctatcagtcaggcattcatgtacttctcttacgcaggatgcttcagatttggagcctacctgattgtcaacggccatatgcgctttcgcgatgttatcttggtgttcagcgccatcgtgtttggagctgttgcgttgggccatgctagtagcttcgcgcctgactatgctaaggccaaactgagtgccgcacacctgtttatgctctttgaacgccagccactgatcgactcatactctgaagaaggtcttaagcccgacaagttcgaaggtaatattacattcaatgaggtcgtattcaactaccctactagagctaacgtacccgtactgcagggcctgtcactcgaggttaagaagggtcagacactggcgttggttggctcctctggctgcggcaagtccaccgtggttcaactgctggaaagattttacgaccccctggccggaacagtgttcgtggatttcggcttccaactgctcgatggacaagaggccaaaaagctgaatgtgcagtggctccgcgcccaactgggcatcgtatctcaggagcccatcctcttcgactgttctatagctgagaacatcgcatacggtgacaactccagggttgtaagccaggatgaaatcgtgtccgccgccaaagccgctaacatccatccatttatcgagactcttccgcataagtacgaaaccagagtgggagataagggtacacagctgtccggcggtcagaagcaacgcatcgctatcgctagagccctgatcagacaacctcagatccttcttcttgacgaggcaacttccgcgctggacaccgagagtgagaaagttgtgcaagaggcactggacaaggctcgcgaaggacgcacttgtatcgtaatcgcccatcgcttgagcactatccagaacgcagacctcatcgtggtgttccaaaatggaagggtaaaggagcacggcacccaccaacagctgctggcccagaagggcatttactttagcatggtctctgtccaggctggcacccagaacttg

SEQ ID NO: 7527 - DNA, 3858 bp, synthetic construct
  misc_feature 1..3858: note = source = /note="Description of Artificial Sequence: Synthetic coding sequence"
  source 1..3858: mol_type = other DNA
atggatctggaagcagccaagaacggtacggcctggcgtcctacttcagcggaaggagacttcgagttgggaatttcatccaagcagaagagaaaaaagactaagaccgtgaaaatgattggagtcctgaccctgttcagatactccgattggcaagataagctgttcatgtcgctgggtaccattatggctatcgcacatggctcgggattgccacttatgatgattgtgtttggagagatgaccgacaagtttgttgataccgcaggcaacttctcgtttccagtgaacttcagcctgtcccttctgaatcccggtaagattctggaagaagagatgactcgctatgcatactactactcggggctgggagcaggcgtgctggttgcagcatacattcaagtgtccttttggacccttgctgcgggtcgacaaataagaaagatcagacaaaagttttttcatgcaatccttaggcaagaaattggatggtttgacattaacgacaccactgagcttaatactagactgaccgacgacatcagcaagatttcagagggtataggagacaaggttggtatgttttttcaagctgtggccacgtttttcgccgggtttatcgtggggtttatacgaggatggaagctcaccctggtcatcatggcaatcagccctatactcggcttgagcgcagcggtgtgggccaagatcctcagcgcctttagcgacaaggaattggctgcatatgcaaaggcaggagctgtcgctgaggaagcccttggggcaattagaacggtcattgcatttggaggccaaaacaaggagctggagcgctaccaaaaacatcttgaaaacgcaaaggagattggaattaagaaggctatctcggcgaacatatcgatgggcattgcttttctgctgatttacgcctcgtacgcacttgcgttttggtacggatcgactctcgtgatttccaaggagtacactattggtaacgcaatgaccgtgttctttagcatccttatcggagcgttctcagtcggtcaagccgcaccatgtattgacgcttttgcaaacgcccggggcgcagcatacgtgatctttgatatcatagataacaacccaaagattgactcattcagcgagcgcggtcataaacctgattctataaagggaaacctcgagtttaatgacgtgcattttagctacccaagccgagccaacgtcaagattcttaaggggctcaatctcaaggtccaatccggacagactgtcgccctcgtgggaagctcaggttgtggaaaatcaactaccgtccagcttattcaacgcctttacgacccagatgaagggaccatcaacatagatggtcaagatatccggaactttaatgtgaattatctgagggagattattggagttgtgtcacaggaaccagtcctgtttagcacgaccatcgcagagaacatctgctacggacgtggcaacgtgactatggatgagattaagaaagccgtgaaggaagcgaacgcatacgagttcatcatgaagctgcctcaaaagttcgatacccttgtgggggagcgaggcgcacaactgtcgggaggccaaaagcaaaggattgcaatcgcaagagccctggtgagaaaccctaagattctccttctggacgaagcaacttccgccctcgatactgaatcagaagcggaagttcaagccgcgctggacaaggcacgcgagggaagaaccaccattgtgatcgcacatagactgtccacggtgaggaacgcagatgtcatcgcgggctttgaggatggcgttattgtcgaacaagggagccactcagaactgatgaagaaggaaggcgtgtactttaagctcgtcaatatgcagacctcgggttcgcaaattcaatcggaagaatttgaacttaacgatgagaaggcggcaacgcgcatggccccaaacgggtggaaatccagactgtttaggcattcgactcagaagaatctgaagaattcacagatgtgtcagaagagcctggatgtggagactgatgggcttgaagctaacgtgcctcccgtgtcatttcttaaggtgctgaaacttaacaagaccgaatggccttacttcgtggtgggaaccgtgtgcgccatagcaaatggaggactccaacccgctttttcggtcattttcagcgaaatcatagcaattttcggacccggagatgacgcagtgaaacagcagaagtgtaacatcttttcgctcatttttctgtttctcggaatcatttcgtttttcacgttctttctgcaaggtttcactttcggcaaagcgggggagatcttgactcggagacttaggagcatggccttcaaggcaatgctgagacaagatatgtcctggttcgacgatcataagaactcgactggggcactttcaacccggcttgcaactgatgcagcccaggtgcaaggagctactggaacccgacttgcactgatagcgcagaatatcgcaaacctcggaactggtatcattatctcgttcatctacggatggcaactcactctgctgctcctggccgtggtgcccattatagccgtgagcggcattgtcgagatgaaactgctggcaggcaatgcaaagcgtgacaagaaggagttggaggctgcaggaaaaatcgccaccgaagcaatcgaaaacattcgcactgtggtgtcgctcacccaggaacgcaagttcgaaagcatgtacgtggagaaactgtacggtccatacaggaatagcgtgcagaaggctcacatttacggtataacgttttccatttcccaagcatttatgtatttctcttacgccggatgcttcaggttcggcgcataccttattgtcaatggacacatgcgttttcgggatgtgattctcgtgtttagcgctattgtctttggcgccgtcgcactgggacacgcctcatcgtttgcacctgattacgcaaaagcaaaactctccgcagcccatctgttcatgctgttcgaaagacaaccccttatcgactcgtactccgaagaaggactcaagccggataagttcgaagggaacattacctttaacgaagttgtgttcaactacccaaccagagcaaatgtgcctgtgctgcaaggtctttcgctcgaggtgaaaaaaggtcaaaccctggcacttgtcggctcctccggctgtggtaaatccaccgtcgtgcaactccttgagcgcttctacgaccccctcgcgggtaccgtgtttgtggacttcggatttcaactgctggatggacaggaggctaagaagctgaacgtgcaatggctgcgggcccagctcggtattgtgagccaggagcctatcttgtttgattgttccattgcagaaaacattgcttacggagacaactcccgtgtggtcagccaagatgaaattgtgtccgcagcaaaggctgccaacattcacccttttatcgaaacccttccacataagtacgagactagagtcggtgataaaggaacccaactctcggggggacagaaacaacggattgccatagcacgggcactcattcgtcaacctcaaattcttctgctcgacgaagcgacttcggcgcttgacacggaatccgaaaaggtcgtccaagaagctctggataaggcgagagaaggaaggacgtgtattgtgatagcccataggcttagcacgatccaaaacgccgatcttatcgttgtgtttcagaacggacgcgttaaggaacatggaactcatcaacagctgcttgcacagaagggtatttactttagcatggtgtccgtgcaagccggtactcagaacctt

SEQ ID NO: 7528 - DNA, 3858 bp, synthetic construct
  misc_feature 1..3858: note = source = /note="Description of Artificial Sequence: Synthetic coding sequence"
  source 1..3858: mol_type = other DNA
atggacttggaagctgctaagaacggcaccgcctggcgcccgacctctgcagagggcgattttgaattgggaatctcatccaaacagaaaagaaagaaaaccaagactgtaaaaatgataggcgtgctgacactgttcaggtactcagactggcaggacaagctctttatgagcctgggaaccatcatggctatcgcacatggatcaggacttccactcatgatgattgtattcggtgagatgactgacaagttcgtggatactgccggcaattttagttttcccgtcaacttctccctgtcattattgaaccctggaaagatcctggaagaggaaatgactcgttatgcctattactatagtgggcttggcgcgggcgtgctcgtggcagcatacatacaggtgtccttctggacgctagccgcgggaagacagatcaggaaaatacgtcagaagttcttccacgccatcctccgccaggagataggatggttcgatattaatgacacaaccgagctgaatacacgtctgaccgacgacatttctaaaatctctgaagggattggggacaaggtggggatgttttttcaggccgtggccaccttcttcgccgggtttatagtgggctttatccgagggtggaagctaacactggtgattatggctatttccccaattctggggttgagtgcggcagtctgggcgaagatactcagtgccttttctgacaaggaactcgctgcatatgcgaaggcgggtgcagtcgcggaggaagcacttggcgcaatccggaccgtcatcgcttttggcggtcagaataaggagcttgagcgatatcaaaaacacctagaaaatgcaaaggagatcgggataaagaaggccatcagcgccaatattagcatggggatagcctttttgttgatttacgcttcgtacgctctcgcgttttggtatggttctaccctcgtcatctcaaaagagtacacaattggcaacgcgatgactgtcttcttttcgattctgataggcgcttttagtgttgggcaggccgctccctgtattgatgcattcgccaatgcacggggcgccgcttacgtcatattcgacatcattgacaataacccaaagatcgattcatttagcgaacggggccacaagcccgacagcataaagggcaatctagagttcaatgatgtccacttttcttatccgtcccgtgcaaacgtgaagatactgaaggggttgaaccttaaagtgcagtccggtcagactgtagcacttgtgggatcttctggatgtggcaagtccacaactgtccagctgatccaacggctttatgaccccgatgaaggtacaatcaacatcgatggtcaggatattagaaactttaacgttaactatctcagagaaattatcggagttgtctcccaggagccagtcctttttagtacaacaatcgcagagaacatttgctatggcagaggcaacgttaccatggatgagatcaagaaagctgtgaaagaggccaacgcctacgagtttattatgaagcttccacaaaagttcgatacattagtcggtgagcggggggcacagctctcaggcggacaaaagcagcgcatagccatcgctagggctctggtgcggaatccaaaaatattgctattagacgaggctacttcagctcttgacacagaaagcgaggccgaagtgcaggccgctctggacaaagctagagaggggcgtactaccattgtgatcgcgcacagactgtccacggtgcgcaacgcggacgttattgccggctttgaagatggagtcatcgtcgagcaaggaagtcattccgagctgatgaaaaaggagggcgtttattttaagcttgtgaacatgcagacatcagggagccagatccaaagcgaggaattcgaattgaacgatgagaaggcagctacacgcatggcacccaacggttggaagagtcgcctcttccggcatagcacacagaagaatctgaagaactctcagatgtgtcaaaagtcattagacgtcgaaacagatgggttggaggctaatgtcccccccgtgtcgttcttaaaggtcctgaagctgaacaagactgagtggccctacttcgtcgtaggaactgtctgcgccatcgccaacggtggcttacagcccgcattttccgtcatcttttcagagatcatagccattttcggcccgggagatgatgccgtgaaacagcagaaatgtaacatcttttcactcatcttcctcttcctcggcatcatctccttcttcacattcttcctgcagggcttcacctttgggaaggcaggtgagatcctgacacggcggctcagatccatggcgtttaaggctatgctgcgtcaggatatgagctggttcgacgaccacaaaaattcaacgggcgcactgagtactagactggcaaccgacgctgcacaggtgcagggcgcaaccgggaccagactggctttgatcgcccagaacatcgccaacctgggtacagggattatcatttccttcatctacggctggcagttaactctgctgttgctggctgtggtgcctatcatcgcggtctcaggtatagttgagatgaagttgttggcaggtaatgctaagcgagacaaaaaggaactggaggccgcgggcaagattgccaccgaagccatagagaacatacgcaccgtggtgtcactgactcaggagagaaaattcgagtcaatgtatgtcgagaagttgtacggaccataccggaacagcgtccagaaggcgcatatctacggcattaccttttccattagtcaggccttcatgtacttctcgtacgcggggtgttttagattcggggcctacctcattgtgaacggtcatatgcgcttccgggacgtgatcctggttttttctgctatcgtgttcggagccgtggctttgggtcatgcgtcctccttcgcgcctgattatgcaaaagcaaaactgtccgccgcccacttgttcatgctgtttgagaggcaaccgctgattgatagctacagtgaagaaggtctgaagcccgataagtttgaaggaaatattaccttcaacgaggtggtgtttaattatcccacccgcgcaaatgtgcctgttctgcaaggcctgagcctcgaggttaagaagggccaaactctagctctggtggggagttcagggtgtggcaaatctaccgtggttcaactgctggaacgcttctatgaccccctggcaggaacggtttttgtcgactttgggtttcaactcctggatggccaggaagctaaaaaactcaatgtgcagtggctaagagctcagctaggaattgtcagccaggaaccaattcttttcgactgctctattgccgagaatatagcttatggggacaatagccgcgtggtctcgcaggacgagatagtgtctgccgctaaggctgcaaacatccatcccttcattgaaacactacctcacaaatatgaaactagggttggagacaaaggcactcagttgtctggcggacagaaacagaggatcgcgatcgctagagccctaatccgacagccccagatcctgctactggatgaggccaccagcgcactggacaccgagagtgaaaaagtcgtccaggaggccctggacaaagcgagagaaggacgaacttgtattgttatcgcccataggctctccacaattcagaatgccgacctcattgtagtcttccagaacgggcgagtgaaggagcacgggactcaccagcagctgctggctcagaaaggtatttacttttcgatggtttccgtgcaggccggcacccagaacctc

SEQ ID NO: 7529 - DNA, 3858 bp, synthetic construct
  misc_feature 1..3858: note = source = /note="Description of Artificial Sequence: Synthetic coding sequence"
  source 1..3858: mol_type = other DNA
atggacctcgaagctgctaaaaacggaacagcgtggcgacccacctccgcagaaggcgactttgagctgggtataagtagcaagcaaaagcggaagaagacaaaaactgttaaaatgattggcgtcctgaccctattcagatacagtgactggcaggacaagctcttcatgtcactcgggacgataatggctattgctcacggatccggtctgccgttgatgatgatcgtgttcggggaaatgaccgataagtttgtcgacacggctggaaatttctccttccccgtcaacttttcactgagcctgctcaatccgggaaaaattcttgaagaagaaatgacacgatacgcctattattattccggtttgggcgccggcgtactagtcgcagcctacatccaagtaagcttctggacactggccgctgggcgacagatccgcaaaatccgtcagaaattcttccatgctatcctgagacaagaaatcggttggttcgatattaacgacactaccgaactcaacaccagactgacagacgacattagcaagatttccgagggcattggcgataaagtcggaatgttctttcaggcggtagcaaccttctttgcggggttcatcgtcggcttcattcgcggatggaaactcactctggtgattatggcgatttctcctattttaggactgtcagccgccgtatgggctaagatcctgtcagcgtttagtgacaaggaactggccgcatacgccaaagctggagccgtcgccgaagaagccttgggtgcaatcagaaccgtaattgcgtttggtggacagaacaaggaactcgagagataccaaaagcatctggagaacgcgaaagaaataggtattaaaaaagcgataagcgctaacatctctatgggtatcgcctttttgttgatctatgcttcctacgcacttgccttttggtacggatctacattggttatcagcaaagagtacaccatcggtaatgccatgacagtgttcttttcgatcctgattggagcgttttccgttggacaggccgccccatgtatcgacgcctttgcaaacgcgagaggtgccgcttatgtgattttcgacattatcgacaacaaccctaagattgattcgttctcagagagaggtcacaagccagactctatcaaaggtaacctggagttcaacgacgtacattttagctatccaagccgggccaacgtcaaaatactgaaaggcctcaacctgaaagtacagtcaggacaaacagtagccctcgtggggtcatcggggtgtgggaagagcaccaccgtgcaactgattcaaagattgtatgacccagatgaaggcacgatcaatattgatggacaagatatcaggaacttcaacgtaaactacttgagagagataatcggcgtggtgtctcaagaaccagtgctctttagcacaacaattgcagaaaacatatgttacggcagggggaatgttaccatggacgaaattaagaaagcggtcaaggaagctaacgcctacgaatttatcatgaaactgccccaaaagtttgacaccttggtgggagaaaggggagcgcagctaagcggtggccagaagcagcgcatcgcaattgccagagctctggtccgaaatcccaaaattttgctattggatgaagctacctcagccctcgacacagagtctgaggccgaggtgcaagctgcattagataaggccagagaaggacgcaccactattgttattgcgcaccgcttaagtacagtgcgaaacgcagacgtgattgcaggcttcgaagatggagttatcgtggagcagggcagccatagcgagctaatgaagaaggagggggtgtacttcaagttggtgaatatgcaaactagcggctcacagatccagtctgaggagttcgaactcaacgacgagaaagccgcgacccgtatggctccaaacggatggaaaagccgcctgttccgacattctacacagaagaacctgaagaattctcaaatgtgtcaaaaatctctggatgtcgagaccgacggactagaggcaaacgttccaccggtgagtttcctgaaagtgctgaaactaaacaagacggaatggccttattttgtggtgggcacagtttgtgcgattgcaaacggaggtctgcagccggccttttctgtgattttctctgaaattattgccatcttcggcccgggtgacgacgctgtgaagcagcaaaagtgcaacatcttcagcctcattttcctgtttctagggattatctcttttttcactttttttcttcaaggctttactttcgggaaggcaggagaaattctgactcgccgcctccgttccatggctttcaaagctatgttgagacaggatatgagctggtttgatgaccacaagaattccaccggcgccctgagcacgcgtctcgccaccgatgcagcccaagtacagggggccacagggactaggctggcgctgattgcccagaacattgcgaatctcgggaccggtatcataatttcattcatatacggctggcaactgacactcctactgttggcagtggtgcctattatcgctgttagcgggatcgtcgaaatgaaacttctggctggcaatgccaagagggacaaaaaagaactcgaggccgcggggaagattgcaactgaggccatcgaaaacatccgcacagtggtttccctaacacaggagaggaagtttgagagtatgtatgttgaaaaactctatggaccctataggaactctgtccagaaagcccacatatacggtatcacgttctcgatctcacaggcttttatgtatttctcatatgcaggttgtttcagattcggagcatatctaatagtcaacgggcatatgaggttccgagatgtgatcttggtgttctcagccattgtctttggtgcagtggcattgggacacgccagttcctttgcaccagactacgccaaagctaagctctccgcggcgcacctctttatgctgtttgaaagacagccacttatcgatagctacagcgaagagggcttgaagcccgataaatttgagggaaatattactttcaacgaagtggtgttcaactaccctacacgcgccaacgttcccgtcctccagggactgagcctcgaggtaaagaagggacagaccctggccctcgtagggagcagcggttgcggaaaatcaacggtggtccagttgcttgaaaggttctacgatccgctggcaggtacagttttcgtagactttggcttccagctgctcgacggtcaagaggccaagaaacttaatgttcagtggctgcgcgcccagctggggatagtgtcccaagagcctatcctattcgattgcagcatcgcagaaaatatcgcctatggagataactcacgtgtcgtgagtcaagacgagatcgtttccgctgcgaaagcggcaaacattcatccatttatagaaaccctgcctcacaagtatgaaacgagagtgggggataagggcacacagcttagcggcggccaaaaacagcggattgcaattgctagggccttgataaggcagccgcagatcttgctcctagacgaagccacaagtgccctagataccgaaagcgaaaaggtggtccaagaagccctggataaggccagagaaggcaggacctgtatcgtcatcgcacatcgtctgagtacgattcagaacgctgacctcattgtggtattccagaacggaagggtgaaggagcacggcacgcaccagcaactgctggctcagaagggcatttacttttccatggtcagtgtccaagcgggaacgcagaacctg

SEQ ID NO: 7530 - DNA, 3858 bp, synthetic construct
  misc_feature 1..3858: note = source = /note="Description of Artificial Sequence: Synthetic coding sequence"
  source 1..3858: mol_type = other DNA
atggacctcgaggccgctaagaacggcaccgcctggcgtccgactagcgctgagggtgatttcgagcttggcatttctagcaaacagaagcgtaagaagaccaagactgtcaagatgattggtgtgctgaccctgttccgctacagcgattggcaggacaagcttttcatgtcgctcggcaccatcatggccatcgcgcatggctccgggttgcccctgatgatgattgtgttcggcgagatgaccgataagtttgtcgatactgccggtaacttctctttcccggtcaacttttctttaagtttgctcaatccaggcaagattctggaggaggagatgacccgctatgcttactactactccggtttgggtgcgggcgtactcgtcgccgcctacatacaagtgtctttctggaccttagcggccggtcggcagatcaggaagatccgccagaagttcttccacgccatactgcgccaggaaatcgggtggttcgacatcaacgatacgactgagctgaacacacggctgactgacgacatttccaagatctcggagggcattggtgataaggtcggcatgttcttccaggccgttgcgacgttctttgccggtttcattgtcggtttcattcgtggctggaagctcacgctggtcatcatggcgattagccccattctgggtctctcggcagccgtctgggccaagattttgtctgccttctcggacaaggagctcgccgcgtacgctaaggccggtgccgtcgctgaggaggcgctgggtgcgatccgcaccgttatcgcgttcggtggtcagaacaaggagctcgagcgctaccaaaagcatctcgagaatgcgaaggagatcggtatcaaaaaggccattagtgcaaacatctcaatggggatcgcgttcttgttgatctatgcctcctatgcgctcgctttctggtacggtagcactcttgtcatttccaaggaatacaccatcggtaacgcaatgactgtgttcttttcgatcctcatcggtgccttcagtgttggacaggcagctccctgcattgatgctttcgccaacgcccgcggcgctgcttacgttatcttcgatatcatcgacaataacccgaagattgattcctttagcgagcgtggccacaagcccgactccattaaggggaacttggaatttaacgatgttcatttctcgtaccctagccgcgctaacgtaaagatccttaaaggtcttaacttgaaggtgcaatccggtcagaccgtcgctttagtgggctcctctggctgcggtaaatctacgacggtgcagctcattcaacgtctttacgaccccgatgaggggactatcaacattgacggtcaggacattcgaaacttcaacgttaactacctccgtgagataattggggtcgtgtcgcaggagcctgttttgtttagtaccactatcgctgagaacatctgctacggtcgcggcaacgtcaccatggacgagatcaaaaaggctgtcaaggaggccaacgcttatgagtttatcatgaagctaccccaaaagttcgacactctcgtgggcgaacgaggggcccagttgtctggaggccagaagcaacgtatcgccatcgctcgtgcactcgtcagaaaccccaagatcctcttactggacgaggcgacttcggccttggatactgaatctgaggctgaggttcaagccgcgctggataaggcccgtgagggacggactaccatcgtgatcgcgcaccggctctcgacggtccggaacgctgacgtgattgctggcttcgaggacggagtcattgtagagcagggtagtcactccgagcttatgaagaaggagggtgtatactttaagcttgtgaacatgcaaacatcgggctcccagatccaatccgaagagttcgagcttaacgacgaaaaggctgctacccgcatggcacccaatggctggaagtcgcgcctgttccgccattccacgcagaagaacctgaagaatagccagatgtgtcagaaatccctggatgtggaaacagacggcttggaggccaacgtaccccctgtcagcttcctgaaggtcctgaaattaaataagaccgaatggccctatttcgtcgtgggtaccgtttgcgccatcgctaatggtggcttgcagcccgctttctcggtcatcttctctgagattatcgctatctttggacctggtgacgacgcggtgaagcaacagaaatgcaacatcttcagtctgattttcctctttctaggcattatctcgttcttcaccttcttccttcagggttttaccttcggaaaggcgggcgaaatcctcactcgcaggttgcgttcgatggcttttaaggcaatgctccgccaggacatgtcgtggttcgatgaccacaagaacagcactggcgctctttccacccgccttgccactgacgctgcccaggtccagggggccaccggcaccagactggccctcatcgcccagaatattgcaaacctcggcaccggaatcatcatctcattcatctatggttggcagctcaccctactcctcttggccgtcgtgcccattattgcggtgtccggaatcgtagagatgaagctgctcgctggtaatgctaagcgcgataagaaggaattggaggccgcgggcaagattgcgaccgaggctatcgagaacatccgcacagtcgtcagtctgacccaggagcgaaagttcgagtctatgtacgttgagaagttatacggaccgtaccgcaactcagtccagaaggctcatatttacggcatcaccttctccatttctcaggcctttatgtatttttcctacgcgggctgcttccgctttggcgcctatctcattgtcaacggccatatgcgatttcgcgatgttattctggtcttctccgcgattgtttttggggccgtggccctgggccacgcgtcctcttttgctccggattacgcgaaggccaagctttcggccgcccaccttttcatgctcttcgagcgtcagcctctcatcgattcctattcggaggagggattaaagccggacaagtttgagggcaacatcacattcaacgaggtcgtgttcaactacccaaccagggccaacgtccctgtcttgcagggcctttcgctcgaggtcaagaagggccaaacactcgccttggtcggttcttcgggatgcgggaaatccactgtcgttcagttgctcgagcgcttctacgaccccttggccggaaccgtgtttgtcgacttcggcttccaactgttggacggccaggaggccaagaagctaaatgtgcagtggctccgggcccagctcgggattgtttcccaggaaccgattctgttcgactgctcaatcgcggagaatatcgcctacggcgataactccagggtcgtttcccaggatgagatcgtgtctgccgccaaggctgctaacattcatccatttatcgagaccctgcctcacaagtacgagacccgggtcggtgataagggcacccagctgtctggtggccagaagcagcgtatcgccatcgcgcgcgctctcatccggcagccgcagatccttctcctggacgaggctacctcggccctagacaccgagagcgagaaagttgtccaggaggcactcgacaaggctcgtgagggccggacgtgcatcgtcattgcccaccggctctcaacaattcagaacgcggatctcatcgtggtgtttcagaacggacgcgttaaggaacacggaacgcaccagcagctattggcacaaaagggcatttacttctctatggtctccgttcaggccggtactcagaacctc

SEQ ID NO: 7531 - DNA, 3858 bp, synthetic construct
  misc_feature 1..3858: note = source = /note="Description of Artificial Sequence: Synthetic coding sequence"
  source 1..3858: mol_type = other DNA
atggatcttgaagcagcaaagaatgggaccgcatggcgtcctacctcggcagaaggagactttgaactggggatttcctccaagcagaaaagaaaaaagactaaaactgtgaaaatgattggtgtcctgacccttttccgctactcggattggcaagacaagttgttcatgtcccttggaaccattatggctatcgctcacggatctggactgccactcatgatgattgtctttggagaaatgaccgacaagttcgtcgacaccgcaggcaactttagcttcccagtgaacttttcattgtcactgcttaaccctggcaagattctggaagaagagatgacgaggtacgcgtactactactccgggcttggagcaggggtcctcgtggcagcatacattcaagtctcattttggaccctggcagcaggacgacagatccggaagattaggcagaagttttttcatgcaatccttcgacaagaaatcggatggtttgatatcaatgacaccactgagcttaatacccggctgacggatgatatatccaagatatccgaaggcatcggagataaggtgggaatgttctttcaggcagttgcgactttctttgcaggattcatagtgggattcattagaggatggaagctcaccctcgtgatcatggcgatttcgcctatcctcggtctttcggccgccgtgtgggcaaaaatcctgtccgcatttagcgacaaggaactcgccgcatacgcaaaggctggggccgtcgcagaagaagcactgggcgcaatccgaaccgtcatcgcatttggtggtcaaaacaaggagcttgagcgctaccagaaacacctggaaaatgctaaggagattggcattaagaaggcaatttcggcaaatatctcaatgggtatcgcatttctgctcatttacgcatcgtacgcacttgcattttggtacggttcgactcttgtgatctcgaaggagtacactattggaaacgccatgactgtgtttttctccatactgattggggcattctctgtgggtcaggcggctccttgcattgacgcctttgccaacgcaagaggtgccgcgtatgtgatttttgatatcatagacaacaacccaaagattgattcgttttccgaacgggggcataagcctgactcgatcaagggcaatctcgagttcaatgacgtccatttctcgtacccttcacgtgccaacgtcaagattcttaagggtcttaaccttaaggtgcaaagcgggcaaacggtggcactcgtcggctcgtcaggctgcggtaagtcgaccactgtccaactgatacaacgcctctacgatccagatgaaggaactatcaacattgatggacaggatattcggaactttaacgtgaactacctgcgggagatcattggagtggtgtcgcaggaacctgtgctgttcagcactactattgcagaaaacatctgctatggacgaggaaacgttaccatggatgagattaagaaggccgtgaaagaagcaaacgcgtacgagtttatcatgaagctcccacaaaagttcgacactttggtgggagaacgtggtgcacaactgtccggcgggcagaagcagcggattgcaattgcgcgcgcacttgtgcgtaacccaaagatactgctgctcgatgaagcgacctcggcccttgatactgagtcggaagccgaagtgcaagcagcccttgacaaagccagggagggccgaactaccattgtcattgcccatcgcctttccactgtgcgtaatgccgatgtgattgccggtttcgaggacggtgttattgtagaacaaggaagccactcggagttgatgaagaaggagggcgtgtactttaaactcgtcaacatgcaaacctcgggatcccaaattcaatctgaagaattcgagctcaacgatgagaaagccgcaaccaggatggctcccaatggatggaagagcaggctcttcagacactcgacccaaaagaacttgaaaaactcgcaaatgtgtcaaaagtcccttgacgtcgaaaccgatggtcttgaggcaaacgtcccacctgtctcctttctcaaagtgctgaagctcaacaaaaccgaatggccctacttcgtggtgggtactgtctgcgcaatcgcaaacggtggacttcaaccagcattttcagtcattttcagcgagataattgcaatctttgggcctggagacgatgccgtcaaacagcaaaagtgtaacattttctcccttatctttcttttcctcggcataatcagctttttcacgttctttcttcaagggttcacctttggtaaggccggggaaattctgactaggcgtctccgaagcatggcttttaaggcaatgttgcgccaggatatgtcttggtttgatgatcacaaaaacagcaccggtgccctttccaccagattggcaactgatgcagcacaggtgcagggagcaaccggtactcggcttgcactgatcgcacagaatatagccaacctgggaactgggatcattatctcgttcatttacgggtggcagcttaccctcctgctcttggcagtggtccctattatcgccgtgtcgggaattgtcgagatgaagctgcttgccgggaacgcaaaacgggataagaaggagcttgaagcggctggcaagattgcgacggaggctattgagaacatccgaaccgtggtgagcctcacccaggaaagaaagtttgaaagcatgtacgtggaaaagctctatggaccataccgcaactcggtgcagaaagcacacatctacggaatcaccttttcaatttcacaggcattcatgtacttctcgtacgccgggtgttttcgattcggcgcatatctcatcgtgaatggtcatatgcgtttcagggatgtgattcttgtgttctcggcaatcgtgtttggagctgtggctctgggccatgcctccagcttcgcacctgactacgcaaaagcaaaactctcggctgctcatttgttcatgcttttcgaaagacaaccacttatcgactcatactccgaagaagggctcaaacctgataagtttgagggtaacataaccttcaacgaagtcgtgttcaactaccctacccgagccaatgtgcctgtgcttcagggtctgtcgctggaagtgaaaaagggacagacgctggctcttgtgggttcctcggggtgtggtaagtcaaccgtggtgcagctgctcgagaggttttacgatcctctggcaggtaccgtgtttgttgatttcggttttcagctgctcgatggacaagaagcgaagaagctgaatgtgcaatggctgagagcgcaactgggcatcgtatcacaagagcctattctttttgattgttccatagctgaaaacatcgcctacggggataattcccgcgtcgtgtcacaggatgagattgtgtccgcagcaaaagcggcaaacatccatccattcatagagactctgcctcataagtatgaaacccgggtcggagacaaagggactcaattgtcgggaggccagaaacaaaggatagcaattgcaagggcccttatcagacagccccaaattctcttgcttgatgaggcaacctcagccctggataccgaatccgaaaaggtggtgcaggaagcgctggataaagcgagggagggaagaacgtgtatagtcattgcacataggctgtccactatacagaacgcagacctgatagtggtgtttcaaaacgggcgggtgaaagagcatggaactcatcaacaactgctggcacaaaagggaatttacttctcgatggtgtcagtgcaggcagggactcaaaatctg

SEQ ID NO: 7532 - DNA, 3858 bp, synthetic construct
  misc_feature 1..3858: note = source = /note="Description of Artificial Sequence: Synthetic coding sequence"
  source 1..3858: mol_type = other DNA
atggatctggaagcagcaaagaatggcaccgcctggaggccaacgagcgcagaaggcgatttcgagctgggaatctcctcaaaacaaaaacgcaaaaagacgaaaacggtcaagatgatcggagtcttgaccctgttcagatattctgattggcaggataaactcttcatgtccctggggaccatcatggccatcgcgcacggaagcggcctgcctctgatgatgattgtctttggtgaaatgaccgataagttcgtcgacactgccggtaacttttcgttcccagtcaacttttcgctgtccctgctgaatccgggtaaaatcctggaagaggagatgacccgctacgcctattactactcaggactgggggccggagtgctggtggctgcgtacattcaggtgtcattctggactttggcagccggacgccaaatccggaaaatcagacagaagtttttccacgccatcctccggcaggaaatcggctggtttgacattaatgacactactgaactgaatactcgcctgactgatgatatctcaaaaatctccgaaggaattggagacaaggtcggcatgttcttccaagctgtggcaaccttcttcgcaggattcatagtgggcttcatcagggggtggaagctgactctggtgatcatggcgatctcacccatcctgggcctctcggccgcggtctgggcgaagatactgtcggccttctccgataaggaactcgcggcctacgcaaaggctggggccgtcgctgaagaggctctgggcgccatcaggactgtcatcgccttcggcggccagaacaaggaacttgagaggtaccagaagcatctggagaatgcaaaggaaattggaatcaagaaggcaatttccgccaatatctcgatgggaatcgccttcctcttgatctacgcctcgtacgcgctggcattctggtacggttcaacgctcgtcatctcgaaggagtatactattgggaatgcaatgactgtgttcttctccatcctcatcggagcttttagcgtgggtcaagccgctccctgtattgacgcctttgcgaatgcccgcggggcggcttacgtgatctttgatatcatcgacaacaatccaaagatcgacagcttttcagaaaggggtcataagcccgactccatcaagggaaacctcgaattcaacgatgtgcatttctcctatccttcaagagccaacgtcaagatcctgaagggactgaatctcaaggtccagtcaggacaaactgtggctcttgtcggatcctcaggctgcggaaagtccactaccgtccagctcatccagaggctgtatgaccctgatgaaggcactattaacatcgatggtcaggacatccgcaacttcaacgtgaactacctcagagaaatcatcggggttgtgtcacaggagccggtgttgttctctactaccatcgcggagaatatctgctacggacggggcaatgtcaccatggatgaaatcaaaaaagcggtgaaggaagcgaatgcctacgagtttatcatgaagctgccgcagaagttcgacactctggtgggggaaagaggcgcacagctgtccggtggacagaaacagagaatcgctatcgctcgcgccctggtcagaaaccccaagattctcctgctggatgaggccactagcgccctcgacaccgagagcgaagcggaggtccaggccgctctcgacaaggcccgcgaaggaagaaccaccatcgtgatcgcccatagactgagcactgtgcggaacgcagacgtcatcgcagggttcgaagatggagtgatcgtggaacagggttcgcactccgagctcatgaagaaggaaggggtgtacttcaagctcgtgaacatgcaaacctccggctctcaaattcaatcggaggaatttgaattgaacgatgaaaaagcggctactagaatggcccctaacggttggaagagcaggctgtttcgccactcgacccagaaaaacctcaagaattcgcagatgtgccaaaaatcgctggatgtggagacggacggactggaggcaaatgtgccaccggtcagctttctgaaggtgctcaagctgaataagaccgaatggccgtactttgtggtgggcaccgtgtgcgccattgccaatggaggactccagccagcgttctcagtcatctttagcgagatcatcgcgatcttcggccccggagacgacgccgtgaagcaacagaagtgcaacatcttctcgctcatcttcctcttcctcggaatcatttcattcttcaccttctttttgcagggctttaccttcggcaaggccggagaaatcctcactcgccgcctccgcagcatggcgtttaaggcgatgttgaggcaggatatgtcgtggttcgatgatcataagaattccaccggtgctctgtccaccagattggctaccgatgcagcccaggtccagggggccactgggacccggcttgccctgattgcgcagaatatcgcgaatctgggcacgggaatcataatctctttcatctacggctggcaactgaccctccttctgctggcagtggtgcctattatcgcggtgtccggaattgtcgaaatgaaactgctggcaggtaacgcaaagcgcgacaaaaaggagctggaagccgcgggtaagatcgcaactgaggccatcgagaacatccggacggtggtcagcctgactcaagaaagaaagttcgaatccatgtacgtcgaaaagctgtacgggccgtacaggaattcagtccaaaaggcgcacatctacggaattaccttctcgatctcgcaagcattcatgtacttctcgtatgcaggatgcttcaggttcggagcatacctgatcgtgaacggccacatgcggtttcgcgatgtgatcctcgtctttagcgcgatcgtgttcggcgcagtcgctctgggacacgcctcgtcgttcgcccccgactacgctaaagcaaagctgtcagcggcgcacctgttcatgctgttcgagcgccagcctctgattgactcctactccgaagaggggctgaagcctgataagttcgagggcaacatcacgttcaatgaagtggttttcaactacccgactcgggcaaatgtaccggtgctgcaaggattgtcccttgaagtgaagaagggacagaccttggctctggtgggatcgtccggttgtggaaagtcaactgttgtgcagctgctggagagattttacgaccctctcgcagggaccgtgttcgtggacttcggattccaattgctcgacggacaagaagccaagaaactgaacgtgcagtggctgcgcgcacagctcggcatcgtgtcccaagaaccgatcctgtttgactgttccatcgcggaaaacatcgcctacggagacaactccagagtggtatcgcaggatgaaatcgtgtcggcggcaaaggctgccaacatccaccccttcattgagactttgccacacaaatacgaaactcgggtgggagacaagggaactcagctgtcggggggacaaaaacagcggatcgccatcgcgcgcgcgctgatccgccagccgcagatcctgctcctggacgaggctacctcggccctggacactgagtctgaaaaagtcgtgcaagaagccttggacaaggccagagaaggaagaacgtgcatcgtcattgcacatagactctcgaccatccagaacgccgaccttatcgtggtctttcagaacgggcgcgtcaaggaacatggaactcatcagcagctccttgcacagaagggaatttacttctccatggtcagcgtgcaggcaggaacccagaatctg

SEQ ID NO: 7533 - DNA, 3858 bp, synthetic construct
  misc_feature 1..3858: note = source = /note="Description of Artificial Sequence: Synthetic coding sequence"
  source 1..3858: mol_type = other DNA
atggatctggaggccgccaagaatggcactgcctggcgcccgacgtctgcggaaggcgatttcgaactgggcatctcctccaagcagaagcggaagaaaacgaaaaccgtgaagatgattggcgtgctgactctgttccggtactctgactggcaagacaagttgttcatgtcactgggaaccatcatggctatcgctcatggttcgggcctcccattgatgatgatagtgttcggagaaatgacggacaagttcgtcgataccgccggaaacttcagcttcccagtcaatttctcactgtccctgctgaaccccggaaagattctcgaagaggaaatgactaggtacgcatactactactcgggcctgggagcgggcgtccttgtcgccgcctatatccaagtctcgttctggacgctggcagccggacgccaaattcgcaagattagacagaagttcttccatgccatcctgaggcaggagatcggctggttcgatatcaatgacactaccgagctcaacacgcgcctgactgacgacatctccaagatctcggagggaatcggagacaaggttggaatgttcttccaggcagtggctaccttctttgcaggtttcatcgttgggtttatccgcggatggaagctgaccctcgtcatcatggccatcagcccaatactggggctgtcagccgccgtgtgggccaagattctctccgcgttctccgataaggaattggcggcttacgcaaaggccggggcagtcgccgaagaagcgctgggagccatccggaccgttattgcttttggaggacagaacaaggagcttgaacgctatcagaagcacctcgagaatgccaaggaaatcggtatcaaaaaggcgatctccgcgaatatctcgatgggcatcgcattcctgctcatctacgcctcgtacgccctcgccttctggtacggctccacgctggtcatcagcaaggaatataccattgggaacgcgatgactgtgtttttctcaatcctgatcggagcgttttcagtgggacaggcggcaccttgcatcgacgcgttcgccaacgcccgaggagcagcctacgtcatctttgacatcatcgacaataacccaaaaatcgattcattctccgaaagaggacacaagcctgacagcatcaagggaaacctcgagttcaatgacgtgcacttctcataccctagccgggccaacgtgaagatcctgaagggtcttaacctcaaggtccaatcgggacagacggtcgcgctggtgggcagctcggggtgcggaaagtccactaccgtccagctgatccagcggctctacgacccggacgagggaactatcaacatcgatggacaggacatccggaatttcaatgtgaactacctccgcgaaatcatcggggtcgtgtcgcaagaaccggtgctgttctcgactaccatcgccgagaatatctgctacggaaggggaaatgtgacgatggacgaaatcaagaaagcagtgaaggaagcaaacgcgtacgaattcatcatgaagctgccacagaaatttgataccctcgttggggagcggggagcgcagctgagcgggggacaaaagcagcggattgccatcgcaagggccctcgtgcgcaaccctaagatccttctgctcgatgaagccacgtccgcactggatacggagtccgaggcggaagtccaggccgctctggacaaggcgcgggaggggcgcaccaccatcgtcattgcccatagattgagcactgtgaggaacgcagacgtgattgcaggattcgaagatggagtgatcgtggagcagggctcgcatagcgagctgatgaaaaaggaaggcgtgtacttcaagctcgtcaacatgcagacctccggaagccaaatccagtccgaagagtttgaactgaacgacgaaaaggctgcgactaggatggcgcctaatggttggaaatcccgcctgttccgccactcaacccagaagaatctcaaaaactcgcagatgtgccagaagtccctggatgtcgaaactgacggactcgaggcgaacgtcccgcctgtatcatttttgaaggtgctgaaactgaataagactgagtggccgtacttcgtcgtgggaaccgtgtgcgctatcgccaacggagggctgcagccagcatttagcgtgatcttttccgagatcatcgccattttcggaccgggtgatgacgctgtcaagcaacagaagtgcaacatcttctccctgatctttctgttccttggcatcatcagcttcttcacgttcttcctccagggattcaccttcggcaaagccggcgaaatcctgacccgcagactccgctcgatggcgttcaaagctatgttgcgccaggacatgtcgtggttcgatgaccacaagaattcaacgggtgctctgtcgaccaggctggcaactgacgctgcccaggtccaaggagccaccggcacccggttggccctcatcgcccagaatatcgcgaacctcggaaccggaattatcatttcattcatttacggatggcaactcactcttctccttctggcagtagtgccgatcatcgcggtgtccggtatcgtcgagatgaaacttctggccggaaacgctaagcgggacaagaaagagctggaagcagccggcaagatcgctaccgaagccatcgaaaacatccggactgtggtgtccttgacccaagagcgcaagttcgagtccatgtacgtggaaaagttgtacggcccataccggaattcggtgcaaaaggctcatatctacggcatcactttctccatctcacaggcttttatgtacttcagctacgctggatgcttcagattcggagcatacctgatcgtcaatggccacatgagattccgcgacgtcatcctggtgttcagcgcgatcgtttttggagccgtggccctgggccacgcatcctcgttcgcaccagattacgccaaggcaaaactctccgcagcccatctgttcatgctctttgagcggcagccccttatcgattcgtactccgaagaaggactcaagcctgacaaatttgagggaaatatcacttttaacgaagtggtgttcaattatcccacccgggccaatgtgccggtgctgcagggccttagcctcgaggtcaaaaagggccagaccttggccctggtgggaagctcaggctgtggcaagtcgaccgtggtgcaattgctggaacggttctacgaccctctggcgggaactgtatttgtggattttggattccagctgctggacggacaagaagccaagaaactgaatgtgcagtggttgcgcgcacaactgggcatcgtgtcccaagagccaatcctgttcgactgcagcattgcggaaaacattgcctacggggacaattcccgggtggtgtcgcaggatgagatcgtctccgccgccaaggcggccaatatccatcctttcatcgagactctcccgcacaaatatgagactagagtcggcgataaagggactcaattgagcggtggccagaaacagcgtatcgcgattgcaagagcactgatcagacagcctcagattttgctcctggatgaggcaaccagcgccctggataccgaatccgagaaggtggtgcaggaggcgctcgataaagcgcgcgagggaagaacttgcatcgtgattgcacaccggctgtccactatccagaatgcagatctcatcgtcgtgttccagaacgggcgcgtgaaagaacacggcacccaccagcaactgctggcccaaaagggaatctacttctccatggtgtcagtgcaagcaggtactcagaatttg

SEQ ID NO: 7534 - DNA, 3858 bp, synthetic construct
  misc_feature 1..3858: note = source = /note="Description of Artificial Sequence: Synthetic coding sequence"
  source 1..3858: mol_type = other DNA
atggacctggaggccgcgaagaatggcacagcctggcgaccaacctcggcggagggagacttcgagctgggcatttcgtccaagcaaaagcgcaagaaaactaaaacagttaagatgattggcgtcctgacgctgttccgatacagcgactggcaagataagttgtttatgagcttaggaacaattatggccattgcacatggttccggcctcccgttgatgatgatcgtatttggcgagatgactgataagtttgtcgacaccgctggaaatttttctttccccgtaaactttagcctaagcctgctgaacccaggtaaaatcttggaggaagagatgacacgttacgcgtattattattcgggactcggtgcgggagtcctagttgccgcctacattcaggttagtttctggaccttggccgcaggacggcaaatcagaaaaatcagacagaaatttttccacgccatcctgagacaggagatcggctggttcgacatcaacgatactactgagctcaataccagactgaccgacgatatctcgaagatctcagagggcattggcgataaggtgggtatgttctttcaggctgtggccacgttcttcgcaggcttcatagtcggattcatccgtggttggaagctgaccctggtaattatggcgatctcccctatactgggattgagcgccgccgtgtgggccaagatcctctcggctttttccgataaagagttagcagcgtatgccaaagccggggccgttgcggaagaggccctgggcgccattcgcaccgttattgcatttggtggccaaaataaggagctggagcgttaccagaagcacctggagaacgcaaaagagatcgggattaagaaggcaataagtgccaatattagcatgggtatagccttcctgctcatctacgcgtcttatgcgctggctttctggtatggaagcacattggtgatttcgaaagaatacaccatcggcaatgccatgacagtattcttctctattctgataggcgcattttcggtgggtcaggccgccccctgtattgacgccttcgcgaacgcgcgtggcgccgcgtatgttatttttgacatcatcgacaataacccaaaaatagactccttcagtgaaagaggacataagcccgatagtatcaaaggcaatctagaattcaatgatgttcatttctcctacccatcccgggccaacgtcaagatcctgaagggcttgaacctgaaggtccaatccggccagaccgttgctctggttggatcttccggttgtggtaagtcaacaacagtgcaactcatacagcggctgtatgacccggatgaaggcaccatcaacattgacggacaagatatacgaaattttaacgtgaactacctaagggagatcattggcgtcgtgagccaggagcccgttctgttcagcacgaccattgccgagaacatatgctacggacgcggtaacgtgacaatggatgagatcaagaaagcggttaaggaggcaaacgcctacgagtttatcatgaaactgccgcaaaagttcgatacgctggtaggcgagcgcggcgcacagttgtcaggcggccagaaacagaggatcgccatagcccgtgctttagtcagaaatccgaaaatattactgttagacgaagccaccagtgctctggatacggagtcggaagccgaggtacaggcggcccttgataaagcccgcgaaggtaggaccacaatcgtgattgcgcatcggctgagcactgtgcgcaacgccgatgtcattgcaggatttgaggacggcgtcattgtcgagcagggtagtcactcggaattgatgaagaaggagggagtgtacttcaaactcgtgaatatgcaaacgagcggctcgcagatacaatcggaagagtttgaactcaacgatgaaaaggctgccacgcgaatggccccgaacggatggaagtcccgcctgtttaggcactccactcagaaaaatctgaagaactcgcagatgtgccaaaagtcgttggacgttgaaaccgacggactggaggcaaacgtccccccggttagtttccttaaggtcctaaagctcaataaaaccgaatggccatacttcgtggtcggcacagtgtgtgccatagcaaacggcgggcttcagcccgcttttagcgtgattttctccgaaatcattgctatatttggtcccggagatgacgcagtgaagcagcagaagtgtaacatattttcgttaattttcctgtttctgggtatcatcagtttcttcacgttcttcctccaaggctttacttttggtaaagccggtgagatcttgacacgccgcctgcgttccatggctttcaaagcaatgctcagacaggatatgagctggttcgatgaccacaaaaatagcactggcgcactgagtacgcgcctggccaccgatgcagcccaagtgcagggcgccacggggacccgactggctttgattgcccagaacatcgcaaacctgggtaccggtattatcatttccttcatttacgggtggcagcttacgctgctgcttctagccgtcgttccgataatcgcagtcagcggcattgttgaaatgaaattgttagcgggcaacgcgaagcgagacaagaaggagctggaggcagctggaaagattgccaccgaggccatcgagaacattcgtacggtggtcagcctaactcaggagcgaaagttcgaatcgatgtacgtggagaagctatatggcccttatcggaactcggtgcaaaaggcacatatatatggcatcactttcagcatcagccaggcgttcatgtacttcagctacgccggctgcttcagattcggcgcctacctgatcgtgaatggacacatgaggttccgtgacgtgatactggtgttttcagcgatagtgtttggagcggtggctctgggtcatgccagctcattcgcccccgattatgctaaggcaaagctcagcgctgcacacctgtttatgctgttcgaaaggcagccactgatcgactcgtactcggaggagggactcaaaccagataagtttgagggcaatataacatttaacgaagtggtgttcaattaccccacgagggcaaatgtgcctgtattgcagggcttgagtctggaggtcaaaaaggggcagacgctcgcccttgtaggatcaagtggatgcggtaaatcaactgtggtgcagctattggagcgcttttatgatccgttggcaggaacggttttcgtcgactttggctttcagttgctggatggccaggaggcaaagaaactgaatgtccagtggctgcgcgcgcagctgggaatagtatcccaggagcccatcttgttcgattgttccattgccgagaatatcgcatacggtgacaattcccgcgtggtgtcacaggacgagatagtgtccgccgcgaaggctgctaatatccacccgtttatcgaaacactcccccataagtacgaaactcgggttggggataagggcacgcagttaagtggcggccagaagcagaggatcgccatcgcacgggcgctgattcgtcaaccccagatactacttctggatgaggccaccagcgcactggatacagaatcagagaaggtggttcaggaggctctcgacaaggcccgcgaggggcgcacctgcatcgttatcgcccaccgcctgagtacaattcaaaacgctgacctaattgtggtcttccagaacggacgtgtgaaggagcatggcacacaccagcaactgctagcacagaaaggaatctattttagtatggtttcggtccaggctggaacccagaatctg

SEQ ID NO: 7535 - DNA, 3858 bp, synthetic construct
  misc_feature 1..3858: note = source = /note="Description of Artificial Sequence: Synthetic coding sequence"
  source 1..3858: mol_type = other DNA
atggacctggaggcagccaagaatggcactgcctggcgccctactagcgctgaaggtgacttcgaactgggaatctcatctaagcagaagagaaagaagacaaaaactgttaaaatgatcggcgtcttgacgctgttccggtacagtgattggcaggataagttgtttatgagcctcgggactattatggcaattgcacacggttcggggcttcctctcatgatgatcgtgtttggcgagatgacagataaatttgttgacactgccggcaacttctcgttccccgtcaatttcagcctgtctctgttgaatccagggaaaatccttgaggaggagatgacccgatacgcttattactattccggactaggagccggtgtgctggtagctgcttatattcaggtctctttctggacccttgccgccgggaggcagatccgcaagatccgtcaaaaattttttcacgccattctgagacaggaaataggatggttcgatataaatgacaccactgagctaaatactcgactgaccgacgacattagtaaaatatcagaaggcattggagacaaagttggcatgttttttcaagctgtggctacattctttgccggattcattgttggcttcatacggggctggaagttgacacttgtcatcatggctatcagtcctattctcggactgagcgctgctgtctgggccaagatattatccgcgttctcagataaggaattagccgcctacgccaaggcaggggccgtggctgaggaagcgttgggtgccatccgcacagtgatcgctttcggcggccagaacaaagagctggaaagataccaaaaacatttagagaatgccaaagagatcgggattaaaaaagctatttccgccaatatcagtatgggtattgccttcctccttatctacgcctcctacgcccttgctttctggtacggtagcacgcttgtgatctcgaaagagtataccatcggcaatgcaatgacagtctttttcagcatactgatcggggcttttagcgtagggcaagccgccccatgcatcgacgcgttcgccaatgcgagaggtgcagcgtacgtgatcttcgatatcatcgacaataacccaaagatcgattccttttcagaaagggggcacaaacctgattccataaaaggcaacctggagttcaatgacgttcattttagttatcctagtcgcgcaaacgtaaaaatcttaaagggacttaacctcaaggttcaaagcggccagacagtggctctcgtgggttcttcgggctgcggcaaatctactaccgtgcaacttattcagagactatatgatccagacgaaggtacaatcaacatcgacgggcaagatataaggaactttaacgtgaactacctgagggagataatcggagtggtgtctcaggaacccgtgctcttttcgaccactattgccgaaaatatttgctacggccggggaaatgtgacgatggatgagattaagaaggctgtgaaggaggcaaacgcatatgagtttatcatgaagttaccacagaaattcgacacactggtcggcgagcggggcgctcagctctccgggggacagaaacagagaatcgccattgcgcgcgccctggtcaggaatccaaaaatcttgctacttgacgaggctactagcgcgttggataccgagagtgaggccgaggtccaggctgctctggataaagcccgagagggccgcacaactattgtgatagctcaccgtctctccacagtcaggaacgctgacgtaatagcggggttcgaagatggcgtgatcgtggagcagggaagccactctgagcttatgaaaaaagaaggggtgtactttaaactagtaaatatgcaaacctcagggtcacaaatccagtccgaggaattcgagctcaacgacgagaaagctgcaacccgaatggcgccaaacggatggaaatcccgcctgttccgacactccacccagaagaaccttaagaatagtcaaatgtgtcagaaatcattggacgtcgaaaccgacgggttagaagctaacgttcctcccgtcagtttcctgaaagtgctcaagctgaacaagactgagtggccctattttgtagttggaactgtgtgtgctatcgctaatggaggactgcagccagcattctctgtcattttcagtgagattatcgcaatcttcggccccggagacgatgcagttaaacagcagaagtgtaacatcttttcactaatttttctatttttgggaattatctcctttttcacattcttcctgcagggctttacattcggcaaggccggcgagatattgacccgcaggcttagaagcatggctttcaaagctatgttaaggcaagatatgagctggttcgatgaccacaagaactccaccggagccctttctacgcggctggcaaccgatgctgcccaggtgcagggggcaactgggacgagactggctctaatcgcacagaatatcgctaatttgggcacgggcatcattataagttttatttatggttggcagctgacacttcttttgctggcagttgtacccattattgcagttagcggaatcgtggagatgaagctgctcgcgggcaatgcaaagagagataaaaaagagctcgaagcagctggtaagatcgccactgaagccatcgagaacatccggactgtggtgtcgctcacacaggagcgcaagttcgagagtatgtacgtcgagaaattgtatggcccctacaggaactctgtgcaaaaggcccacatctacggaattacattcagtatatcccaggctttcatgtatttttcctatgcgggctgcttcaggttcggggcttacctgatagtgaatggccacatgcgctttagggacgtgatcctggtctttagcgctatcgtgttcggagccgtggcgcttggccatgcctcctcctttgcccctgattacgccaaagccaagctgtccgctgctcaccttttcatgctttttgagcgccagccgttgattgacagttactcagaggaaggcctgaaacccgacaagttcgaaggaaacattacattcaacgaggtggtatttaattacccaacccgtgccaacgtgcccgtcctacagggcctctccctagaggttaaaaagggacagaccctagcactggttggatcaagtgggtgtggtaagagtacggtggttcagcttctggagcgtttctatgatccactggcgggtactgtcttcgttgactttggattccagctcctcgacggtcaagaggccaaaaaactgaatgtccaatggctccgggcccagctcgggattgttagtcaagaacctatcctattcgattgtagcattgctgaaaacatcgcctacggtgacaattctagggtcgttagccaggacgaaatcgtttcagcagccaaggctgccaatatccatccctttatagagacgctcccacacaagtacgagaccagagtcggtgacaaagggacacagctctccggaggccagaaacaacgcattgccattgccagggcactgattcgacagccacagatcctcctgctcgacgaggccacaagcgctctggatacagaatctgagaaagttgtccaggaggccttggacaaggctagggaggggaggacgtgcattgtaatcgctcaccggctctcgacaatccagaatgctgatctgatcgtcgtctttcaaaatggcagagttaaagaacacgggacacaccaacagctcctagcccagaaaggtatctatttctcaatggtgagcgtgcaggccgggacacagaattta

SEQ ID NO: 7536 - DNA, 3858 bp, synthetic construct
  misc_feature 1..3858: note = source = /note="Description of Artificial Sequence: Synthetic coding sequence"
  source 1..3858: mol_type = other DNA
atggacctggaagccgctaaaaatggcaccgcatggcggccaacctctgccgaaggagatttcgagttggggatctcttcaaaacagaagagaaagaaaaccaaaacagtgaagatgataggggtgctgacattgtttagatatagcgattggcaggataagctcttcatgtctctgggcaccatcatggccatcgcacacggctcaggtctccctttgatgatgattgtgttcggggagatgactgacaagttcgttgataccgcaggcaatttctccttcccggtgaatttttcactgagtctcctcaaccccggaaaaatcctcgaggaggagatgacaaggtacgcgtattattatagtggactgggcgcaggtgtcctggtggccgcatacatacaggtgagtttctggaccttagccgctggacggcagatcaggaagataagacagaagttcttccatgcaatattacggcaggaaataggctggttcgacatcaacgacaccacagaactcaatacgcgactgacggatgatatctcaaagatcagcgaaggcattggagacaaggtcggtatgttcttccaagccgtcgccaccttcttcgccgggtttatcgtgggttttataaggggctggaaactgacgctggtgatcatggccatttcaccgatcttgggtctgagcgcggcagtgtgggcgaagattctgtcagcattctccgataaagagttggctgcgtacgccaaggccggagctgtggccgaagaggcccttggcgctatcagaactgtgatagcgtttggcgggcagaacaaggaattagaacgctatcagaagcatctggagaacgctaaagagattgggataaaaaaagccatctcagccaacatctccatggggatcgctttcctcttgatttatgcctcttacgccctcgccttttggtatggcagtaccttggtcatttccaaggagtataccatcggcaacgctatgacggtattttttagtatcctgatcggtgccttttccgtgggccaggcagcgccttgcatagatgccttcgctaacgcacgtggagctgcttatgtcattttcgacattatcgacaacaaccccaaaatcgatagcttttcagagcggggacataagccggattccattaagggcaatctcgagttcaacgatgtacactttagctatccttctcgtgctaatgtgaagattcttaagggcctgaatctgaaagttcagagtggccagaccgtggccctagtgggctcgtcaggatgcgggaagtccaccaccgttcagcttattcagaggctatacgacccggatgagggtacaattaatatcgatggtcaggacatcaggaacttcaatgttaactatctgcgagagattatcggcgtcgtctctcaggaacctgtgctgttcagcaccaccatcgcagaaaatatttgctacggacgagggaacgtgactatggacgaaatcaagaaggcggtgaaggaggccaacgcttatgagtttatcatgaagctccctcagaaatttgatacactggttggtgagcggggggcacagcttagtggaggccagaaacagcgcattgctattgcgcgggctctagtgcggaaccccaaaatccttcttctggacgaggctaccagtgccctagacacagagagtgaggccgaggtgcaagcagcactagataaggctagagagggcagaactactatcgtgattgctcataggctctccactgtgaggaatgctgacgtaatagctggatttgaggacggagtgatcgtggagcaagggtctcactcagaactgatgaagaaggagggagtgtattttaagctggtgaacatgcagacctcaggatcacagatccaatcagaggaatttgagctaaatgacgagaaagccgcaactaggatggcccccaacggctggaagtccagactctttaggcactctactcagaagaacctgaagaatagccagatgtgtcagaaatcccttgacgtagagaccgatgggctggaagccaatgtcccccctgtatcatttctaaaagtgcttaagttgaacaagactgagtggccctacttcgtggttgggacagtgtgcgcaattgcaaacggagggcttcagcccgccttttcagtgattttctctgagatcatcgccatctttggccccggggatgacgctgtaaagcagcagaagtgtaacatcttctcactcatttttctctttctaggcattatctctttcttcaccttctttctgcagggatttacctttggaaaagcaggggaaatattgacaaggcggctgcgatccatggctttcaaagctatgctgcggcaagacatgtcatggttcgatgatcataagaatagcaccggcgctctatcaacacggctggccactgatgcggcacaagttcagggtgcaactggtacccgactggctctgattgcacagaatatcgcgaacttgggcaccggtattattatctccttcatttacggctggcaactgacattattactcctggctgtcgtgccaatcatcgcagtgagcgggatcgtggagatgaagctgctcgctgggaacgccaagcgggataaaaaggagctagaggccgccggcaagattgccacagaggcaatcgaaaacattaggactgtggtttctctcacacaggagagaaagtttgaatccatgtacgttgagaagctgtatgggccataccggaactctgtgcagaaagctcatatttacggaatcacgttttcaatttcccaagcgtttatgtacttcagttacgcaggctgctttcgctttggagcctatctcatcgtaaacggacacatgcgcttccgggacgtgatcctggtgttcagtgcgatcgtgttcggtgccgtggccttaggtcacgcatcttcttttgcgcccgattatgccaaggctaagctctctgctgctcacctcttcatgctcttcgaaaggcagcctctgatcgatagctattccgaggagggccttaagcccgacaaatttgaggggaacatcacttttaatgaggtggtgttcaattatcccaccagggccaacgtgcctgtcctgcaggggcttagccttgaagtcaagaaaggacagacccttgctctggtcggtagctcagggtgcggtaaatccacagtggtgcagctcctggagcgtttctatgaccccttggctggtactgtgtttgtggattttggatttcagctactggatggccaggaggccaaaaagctcaacgttcagtggctgcgcgcgcaactggggatcgtgtctcaggaacctattctttttgattgctcaattgctgaaaatattgcgtacggcgacaactcacgtgtagtctcacaggatgagatcgtcagtgccgctaaagcagccaatattcacccctttatcgagacactcccgcataagtatgaaacgcgggttggcgataagggtacccagctgtccggcggtcaaaagcagcgcatcgccatagcccgggctttaatccgacagccacagattctgctgcttgacgaggcaacctctgcactcgacaccgagagcgagaaagttgtccaggaagcacttgacaaagctagggagggcagaacttgtatcgtgatcgcgcataggctcagcactattcagaacgctgacctgattgtagtgtttcaaaacggaagggtgaaagagcacggtactcatcagcagctgctggcgcaaaaggggatatatttctctatggtctcagtgcaagccggcacacagaatctc

SEQ ID NO: 7537 - DNA, 3858 bp, synthetic construct
  misc_feature 1..3858: note = source = /note="Description of Artificial Sequence: Synthetic coding sequence"
  source 1..3858: mol_type = other DNA
atggacttagaggccgctaaaaatgggactgcgtggcgtcctacctccgcagaaggagattttgagttaggtattagctctaaacagaagcggaagaagacaaaaaccgttaagatgatcggtgtactcaccctcttcagatactccgattggcaggacaagctttttatgtcactgggcaccattatggctatcgcccacggatctggactgccgctgatgatgattgttttcggcgagatgacagacaaatttgtggacacggctgggaatttcagtttcccggtgaatttctccttgtccctgctgaatcctggaaagattctcgaggaggaaatgacccggtatgcgtattactactctggactcggtgccggggtgctggtggccgcctatattcaggtgagcttttggaccttggcggccggaaggcaaattagaaaaatcaggcagaagttcttccacgccatcctacgccaggagattggctggtttgatattaacgacacaacagagctcaatactaggcttaccgatgatatttccaagatctccgaagggattggcgacaaagtaggtatgttttttcaggcagtagcgacgttctttgccggttttatagtaggcttcatcagagggtggaaactaacacttgtcattatggcaatttcacctattctgggcctgtcagccgctgtatgggccaagatcctatccgcattttcagataaggaactggccgcttacgctaaagctggcgccgtggcagaggaagccctgggcgccataaggactgtcatcgcattcggcggccagaataaagaattggagaggtatcagaaacacctagagaacgcaaaagagatcggcattaagaaagctatttcggctaacataagcatggggatagctttcttattaatctatgcatcttacgcgctggctttttggtatgggtccacattggtcataagcaaagaatacaccatcggcaatgcaatgactgtgttcttttctatactgattggtgcattcagcgtgggtcaggctgctccatgcattgacgcctttgcgaatgccaggggagcagcttatgtcatcttcgatatcatcgataacaacccaaaaatcgacagcttttctgaaagaggccacaagccggatagtatcaaaggaaacctcgaattcaatgacgttcatttctcttatccctctagagcgaacgtgaaaatcctcaaggggctgaatctgaaggtgcagtcaggacagactgtagcgctcgtggggagcagtggatgtggcaaaagcaccacagttcagttgatacaacggctgtatgaccccgatgaaggaaccattaacattgatgggcaggatataagaaactttaatgttaattatctgagggaaataataggcgtcgtttcccaagaaccggtactgttttcaacgactattgccgagaatatttgttatgggcgaggaaacgtgacgatggatgagatcaagaaggctgtgaaggaggccaatgcctatgagttcataatgaaactccctcagaagtttgatacactggtcggtgaacggggagcacagctttctggaggtcagaagcagagaatcgctatcgcacgggccctggttcgcaatccgaagattctgcttctggacgaggcgactagcgcattagacaccgagagtgaagccgaggtgcaggccgccctggacaaggcaagagagggacggactacaatcgtgattgcccaccgtctcagcacagtccgtaacgcagacgttatcgcgggtttcgaagatggcgtaattgtcgagcagggctctcactccgagttaatgaaaaaggaaggagtttatttcaaactggttaacatgcagacatcaggcagtcagattcagtcagaggaattcgagctgaatgatgagaaagccgcgacgagaatggcacctaatggatggaaatctcggcttttcaggcactccactcagaaaaatctaaaaaacagtcagatgtgtcagaaaagcctggacgtcgaaacagacggtcttgaggccaacgtgccacctgtgtcctttctcaaggttttaaaactgaataaaaccgagtggccctacttcgttgtgggaaccgtctgcgctattgccaatggaggcctccagcccgccttcagtgtaatcttctccgaaatcatcgccatatttggacccggggacgatgcggtgaagcaacagaaatgtaacatcttctctctcattttcttgttcttggggatcatctccttcttcaccttctttctccagggattcactttcggtaaagccggagagattttgacaagacgcctgcgatcgatggccttcaaagcaatgcttcggcaggatatgagctggtttgacgatcataaaaacagtaccggggcactgtcaacccggctggcaacagacgcagctcaggtgcaaggagcgacgggtaccaggttggctctgattgctcagaacattgctaatctcggcactggcattatcataagctttatatacggctggcagctcactctgctgctccttgccgtcgttccaattatcgccgttagcggtatcgtcgaaatgaagctgcttgcaggtaatgccaagcgcgacaagaaagaacttgaggctgccggcaaaatcgctacagaggcaatcgaaaatataaggacagtagtcagcttgacacaggagagaaaattcgagtcgatgtatgttgaaaagctatatggtccttataggaactctgtgcagaaagcacacatctacggaattaccttttctatttcccaggcgtttatgtatttttcctacgctggttgtttcagatttggcgcctacttaattgtgaatggccacatgcgctttcgtgacgtgatcctcgttttctcagcgatcgtgttcggggcagtggcgctcggacatgcttcatcctttgccccagattacgctaaggcaaaactctccgctgcccatctgtttatgctgttcgaaagacaaccactgatcgattcttattccgaagaggggctgaagccagataagttcgaggggaatataacgtttaacgaagttgtattcaattacccaacaagggccaatgtgccggtccttcaagggctgtccctggaagtcaagaaggggcaaaccttggccctagttggctcctctggatgcgggaaaagtaccgtggtgcagctgcttgagcggttttatgatcctcttgccgggacagtgtttgtggattttggattccagcttctggatggccaggaggctaaaaaactgaacgtccagtggctgagagcccaattaggtattgtctcccaggagcccatactctttgactgtagcatagcggaaaatattgcatatggtgacaactcccgcgtcgtgtctcaggacgagatagtttctgcggcaaaggccgctaatatccaccccttcatcgaaacgctcccgcacaagtatgagaccagagtaggcgacaagggaacacagctgagcggtggccaaaagcaaaggattgctatcgctagagccctgattagacagccccagatcctcctacttgatgaggccacaagtgccttggataccgaaagcgagaaagtggtgcaggaggctttggacaaagccagggaggggaggacttgtatcgtcattgcacacaggctaagcaccatccagaacgccgatcttatcgtcgtttttcagaatggccgagtgaaggaacatggaacacaccaacaactactggcccagaaggggatctatttctccatggtgagtgtccaggctggtacccagaatctg

SEQ ID NO: 7538 - DNA, 3858 bp, synthetic construct
  misc_feature 1..3858: note = source = /note="Description of Artificial Sequence: Synthetic coding sequence"
  source 1..3858: mol_type = other DNA
atggaccttgaagcagcaaaaaatggaactgcatggcgaccaacttctgccgagggagatttcgaacttggaatctcgtcgaaacaaaaacgcaagaaaacaaaaacagtaaaaatgatcggggtgcttacactctttcgatattcagactggcaagacaagctttttatgagcctcgggactataatggcgattgcacatgggtcgggacttccgttgatgatgattgtgtttggagaaatgactgataagttcgtcgatacagcagggaacttctctttccccgttaatttctcattgtcgctgcttaatccaggaaagattctagaagaggagatgactagatatgcatactactatagtgggttaggagcaggagttctagttgcagcatacattcaggtctcgttctggaccttggcggctgggcggcaaattcgaaaaattcgccaaaaattcttccacgctattctccgtcaagagataggatggtttgatattaatgataccaccgaactcaacacccgcctcaccgacgacatttccaagatttcagaaggaattggggacaaggttggaatgttcttccaagcagttgcaacgttctttgctgggttcattgtgggtttcatacgaggctggaagctaaccctggtgattatggcgatctcgccaattctgggactctcggccgcagtgtgggccaaaattctttccgcattttcggacaaggagctcgcagcctacgccaaggcaggagccgttgcagaggaggcattgggtgctattagaacagttatcgctttcggtgggcaaaataaagaattggagcgctatcaaaaacacctagaaaacgccaaagaaatcggaattaaaaaagctatatcagccaacatatcaatgggaatagcattcttgctgatatacgcttcatacgcactggctttctggtatggctccactctcgtgatctcaaaggagtacactatcgggaatgcaatgacagttttcttcagcatattaattggtgccttctcggttggtcaagctgcaccctgcattgatgcgttcgctaatgcgagaggcgccgcatatgttatcttcgacattattgataataacccaaaaattgactcatttagtgaaagagggcataagccagactcaattaagggcaatcttgaatttaatgacgtgcatttttcgtatccatctcgagctaatgtgaagattctaaaaggacttaatcttaaggttcaatcaggacaaacggttgctttggtgggcagttcggggtgcggaaagtcaacaacagtgcaactcatccaacgtctctatgatcccgatgaaggaactattaacatcgatggacaagatatacgtaacttcaatgttaactaccttagagaaattattggggtcgtatcacaggagccggtccttttctctacaacgatcgcagaaaatatctgctacggacggggaaatgtaaccatggatgaaataaaaaaagctgttaaggaggcaaatgcctatgaatttataatgaagcttccacaaaaatttgacacgctggtcggtgaacgtggagcacagctgagtggaggtcaaaagcaacgaattgctatagccagagctctagttagaaacccaaaaattttgcttctagacgaagcgactagtgcattggataccgaaagtgaggccgaagtccaagcagcactggacaaagccagagagggtcgcactaccatagttatagctcacagactctcgacagtacggaacgctgatgttatcgccggcttcgaggacggagtcattgttgaacaaggatcgcattcagaacttatgaaaaaagaaggtgtatatttcaaacttgttaatatgcagacatctggatctcagattcaatcggaggagtttgagttgaacgatgaaaaggctgcaactagaatggccccaaatggttggaaatcacgtctcttccgacactctacccaaaagaatttgaaaaactcacagatgtgccagaaatctttggacgtcgaaactgatgggctagaagcaaacgtcccacctgttagttttttgaaggtcttaaaattaaacaaaactgaatggccatatttcgtggtggggactgtgtgtgctattgccaacggaggtttacaaccggcattctctgtaatattctccgaaattattgctatatttggacctggagatgatgccgttaaacagcaaaagtgtaatatttttagcctcattttcttgtttttgggcattatctcattctttacattctttctacaaggatttacattcggtaaggcaggtgaaatccttacacgtcgactacggtcaatggctttcaaagctatgctgcgtcaagatatgtcttggtttgatgaccataaaaattccacgggagcattaagtactagactagcgactgatgcggcccaagttcaaggagctactggaactagactcgcgttgatcgcgcaaaacattgcaaatttaggaactggaataattatctccttcatttacggatggcagttaacgctactattgcttgcggttgtgccaatcattgctgtttctggtatcgttgaaatgaagctccttgctggaaatgccaagcgtgataagaaagaacttgaagctgcgggcaaaatcgcaactgaagctattgagaatatccgaacagtagtatcactcacacaggaacgaaagttcgaaagtatgtatgttgagaagctatacggaccttatagaaattcagtacaaaaagctcacatctacggaattacgttctctatcagccaggcctttatgtatttctcgtatgccggttgttttagattcggagcttacttaatcgtaaatggtcatatgcgattccgagacgtaatattggttttcagtgcaattgtgttcggtgcagtggctcttggccatgcatccagctttgccccagattatgcgaaagcgaagttgtcggctgctcatttgtttatgttgtttgagcggcagcctcttattgattcttactcggaagaaggacttaaaccagataagttcgaagggaatatcacttttaacgaagtcgtttttaattatccaactcgggccaatgtaccagtgctccaaggattgtccttagaggtgaagaaaggccaaacattagccctggtcggtagtagtggttgcggaaaatctactgttgttcagctgctggaaagattttatgatccgttggcaggtactgtttttgttgattttggatttcaactattggatggccaagaagcaaaaaaacttaacgttcaatggttacgcgctcaactggggattgtaagtcaagagccaattttgttcgactgctctattgcagaaaacatcgcttatggagacaattctcgcgtagttagtcaagatgaaatagtgtcggctgcaaaggcggcaaatattcatccgtttatagagactctaccacataagtatgaaactagggttggagacaagggcactcaactgtctggaggacaaaaacagcgaattgcaattgcgcgagcattgattcgtcaaccacaaattttactgctagacgaggcgacttctgcattagatactgagtctgagaaagttgttcaggaggcactcgataaggcgagagagggacggacttgcatcgtgatcgcgcatcgcctcagcactattcagaatgcagatctcatcgttgtatttcaaaatggaagagtcaaagagcacggaactcatcagcaacttctggcacagaaaggcatttatttctcaatggtgtccgttcaggccggcactcaaaaccta

SEQ ID NO: 7539 - DNA, 3858 bp, synthetic construct
  misc_feature 1..3858: note = source = /note="Description of Artificial Sequence: Synthetic coding sequence"
  source 1..3858: mol_type = other DNA
atggatttggaagccgcaaagaatggtaccgcttggaggccgaccagcgccgaaggagattttgaactgggcatttcatccaagcagaaacgaaagaaaactaaaaccgtcaaaatgattggtgtgctgactctgtttcgctactcagactggcaagataagctgtttatgtcacttggtactataatggcaattgcgcatggatcgggactgcctctgatgatgatcgtgtttggagaaatgaccgacaagttcgttgacaccgccggaaacttctcatttccagtgaacttcagcctttcgctgctgaatcctggtaagatcttggaggaagaaatgactcgctatgcatactactactccggactcggcgcaggtgtgcttgtggccgcatacatacaagtgtccttctggaccctggctgccgggcggcaaattcgcaagatcagacagaaattctttcacgcgatcctcagacaggagattggatggttcgacataaatgacaccactgaactgaacactagactgactgatgatatatcgaagatatcagaaggaattggagataaggttggtatgtttttccaagccgtcgccaccttttttgccggctttatcgtgggattcatccgtggttggaaactgacgcttgtgataatggcaatatcgccaatccttggactttcggcagcagtgtgggcaaaaatcttgtccgccttttctgataaagaactggcagcatatgcaaaagctggtgccgtcgcagaagaagcacttggggctatccgcactgtcatcgcatttggcggacaaaacaaggagttggagagataccaaaagcatcttgaaaatgcaaaggagattgggattaagaaggcgattagcgcaaatatctctatgggcattgcatttcttcttatctacgcatcctacgcactcgcattttggtacggatccaccctggtgatcagcaaagaatacaccattggaaacgcaatgaccgtgttcttctcgattctgatcggtgctttttcggtcggccaagcagcaccctgtattgatgcattcgccaacgctcgcggcgcggcctacgtgatttttgatatcattgacaacaatcccaagatagattcttttagcgaaagaggccataagccagattccataaagggtaaccttgaattcaacgacgtgcatttctcctatccttcacgtgcgaacgttaagatcctcaagggccttaaccttaaggtgcagagcggacaaactgtggcgcttgtgggttcgtcggggtgtgggaagtctactactgtccagcttattcaaaggctgtacgatcccgacgagggaactataaacattgacggacaggatattagaaactttaatgtgaattacctgcgcgagataattggcgttgtgtcccaagaacctgttctgttctcgactaccatcgccgagaatatctgttacggaagaggtaacgtgactatggatgagataaagaaagcggtgaaggaagccaacgcgtacgagtttatcatgaaactgcctcaaaagttcgacaccctcgtgggggaaagaggagctcaactgtcgggtggacagaagcagcgcatcgcgatagcacgcgcattggtgaggaaccctaagattctgcttctggatgaagcaaccagcgcactggacactgaatcagaggcagaagtgcaggcagcgcttgataaggcacgtgagggtagaacgaccatcgtcatcgcccacagactctcgacggtgcgcaacgcggatgttatcgcaggattcgaggacggagtcatcgtggagcagggatctcacagcgaacttatgaagaaggagggggtgtactttaagctggtgaacatgcagacgagcggtagccaaatccagagcgaagaattcgaactcaatgacgagaaggcagcaactcggatggcaccgaatggttggaagtcgcggctctttaggcattccactcagaagaacttgaagaattcgcaaatgtgtcagaagtcacttgatgtggagactgatggacttgaagctaatgtccctccggtgtcgtttctgaaagtgctgaagttgaacaagaccgaatggccatacttcgtcgtgggaaccgtgtgtgcgattgctaacggtggactgcaacccgcattttccgtgattttctcggagattatcgcaatctttggtcctggcgacgacgccgtcaagcagcagaaatgcaacatcttttcgctgatctttctgttcctcggcattatctcatttttcaccttttttctgcaagggtttactttcggaaaggcaggggaaattctcactcggcggctgcgatcgatggcctttaaggccatgctcaggcaagatatgtcgtggttcgacgaccataagaactccactggggcattgtcgacccgcctggcaacggacgccgctcaggtgcaaggcgccaccggaacccggctggcgttgatagcgcagaatattgcaaacctgggtactggtattatcatctcatttatctacggctggcaactcactctccttctccttgcggtggtgccgataattgcagtctcaggaattgtcgagatgaaactgcttgctggcaacgcgaagcgcgataagaaggagctggaggcagcaggtaagattgcaactgaagcaatcgaaaacatcagaacggtggtcagcctgacccaagagaggaaatttgaaagcatgtacgtggaaaaactgtacggaccataccgcaacagcgtgcagaaagcacacatttacgggatcactttctcaatttcccaagcctttatgtacttctcatacgcggggtgctttagattcggcgcctacctgattgtgaacggacatatgagattcagggatgtcattcttgtctttagcgccatagtgttcggagctgtggcccttggccacgcaagctcgtttgcacctgattatgcgaaagcaaaactgagcgctgcacatcttttcatgttgttcgagcgacaacccctcatagattcttacagcgaagaaggtcttaagcctgataagttcgagggcaacattacgttcaacgaggtcgtgtttaactacccgacgcgggcgaacgtgccagtgctgcagggcctgtccctcgaagtcaagaagggacagactcttgcacttgtcgggagctcgggctgtggcaagtccaccgtggtccaattgctcgagagattttacgatccgctcgccggtaccgtgtttgttgattttggatttcagctgctggacggacaggaagccaagaagctgaatgtgcaatggcttagagcacagctcggtatagtgtcgcaagaaccaatcctgttcgactgctccatcgcggagaatattgcctacggagacaactcaagggtcgtctctcaagatgagattgtctccgcggcaaaggcggccaatattcatccctttatcgaaaccctgccacacaaatacgaaaccagagtgggggataagggcacccaactgtccggaggtcaaaaacagcggattgcaatcgcacgcgcccttatcaggcaacctcagatcctgctgctcgatgaagcgacgagcgcactcgataccgagagcgaaaaggtggtgcaggaggcactggacaaagcacgggaaggtcgcacctgcatcgtgattgctcacagactgtccaccattcagaacgcagatctgattgtggtgtttcagaatgggagggtgaaagaacatggtacgcatcaacaacttcttgcccaaaagggaatatactttagcatggtcagcgtgcaagcgggtacccagaatttg

SEQ ID NO: 7540 - DNA, 3858 bp, synthetic construct
  misc_feature 1..3858: note = source = /note="Description of Artificial Sequence: Synthetic coding sequence"
  source 1..3858: mol_type = other DNA
atggatctggaagcagccaaaaacggcactgcatggcgacctactagcgcagaaggtgatttcgagctgggtatctcgtcgaaacagaagcgcaagaaaactaagacggtcaagatgataggagtgcttactctcttccgctacagcgactggcaagacaaattgtttatgtcccttgggactattatggcaattgcacatggttccggcctcccactgatgatgattgtgtttggagaaatgaccgacaaattcgtggatactgcaggaaatttctcgttccccgtcaactttagcctttcccttctgaacccaggaaagatcctggaagaagaaatgaccaggtacgcatattactactctggtcttggagcaggagtcctcgtggctgcgtatattcaagtctccttttggactctggcggccggtcggcagattcgcaagatccgtcagaagttttttcacgctatccttaggcaggaaataggatggtttgacatcaacgacaccactgaactcaacacgcgcctgaccgacgatatttcaaagatatctgaaggaattggggataaggtgggtatgtttttccaggcagtggcaacttttttcgcgggtttcattgtcggatttatccgaggatggaaacttacccttgtgataatggcaatctcgccaattcttggcctctcggccgcggtgtgggcaaagatcctcagcgcattttcagacaaagaactggcggcatacgcgaaggcgggagcggtcgcagaagaagcgcttggtgccatccgaaccgtgatagcctttggcgggcaaaacaaggaattggaacggtaccaaaagcaccttgagaatgcaaaagaaataggcataaagaaagcgatctcagctaacatatcgatgggaatcgccttcctgctgatttatgccagctacgcattggccttttggtatggatcgacgctggtgatttctaaagagtacaccatcggtaacgcaatgacggtgtttttctcaatcctgatcggtgcattctccgtcggtcaagccgcaccatgtatcgatgcctttgccaatgccaggggagcagcgtacgtgatcttcgacataatcgataacaaccctaaaatcgatagctttagcgaacggggacacaaaccagactcgattaagggaaatcttgagtttaatgatgtgcattttagctacccaagcagagcgaatgtgaagattttgaagggtctgaatctgaaggtgcagtccgggcagactgtggcgcttgtcgggtcctccggatgtgggaagagcaccacggtgcaacttattcaaagactgtacgatccagatgaaggtaccatcaatatcgatgggcaggatatccgtaactttaatgtgaactacctgagggaaatcattggagtcgtgagtcaggaaccagttttgttttcgacgactattgcagaaaacatctgttacggaaggggaaacgtcactatggatgagatcaaaaaagctgtgaaggaggcaaacgcatacgagttcattatgaagctgccccagaaatttgacactctggtgggagaaagaggagcccaactgtcgggaggacaaaagcaacgcatcgccatcgcaagggcactggtgcggaaccctaagatcttgctgcttgacgaagcaacctctgcgttggatactgagtccgaagcagaagtgcaggcagccctcgataaagcacgcgaaggacgcaccactatcgttatagcccaccgtctttccactgtccgcaacgctgacgtgattgcaggattcgaagatggagtgattgtggaacagggcagccattccgaactgatgaagaaggaaggggtctactttaagctcgtgaatatgcagacctccggaagccaaattcagtcggaagaatttgagttgaatgatgaaaaggcagcaactaggatggcgccgaacggctggaagtcaaggctgtttagacattccacccaaaagaacttgaaaaactcccagatgtgtcagaaaagccttgatgtggaaactgacggacttgaggcaaatgtgcctcctgtgtccttccttaaggtcctgaaacttaacaaaacggagtggccttactttgtggtgggtacggtgtgcgccattgctaacggcggtttgcaacctgcattctctgtgattttcagtgagatcatagcgatttttggacctggagatgatgccgtcaagcaacagaagtgtaacatcttctcactcatttttctttttctgggaatcattagctttttcaccttcttcttgcaagggtttacctttggtaaggccggagaaattcttacccggagactcagaagcatggcatttaaggctatgttgcgccaagatatgtcctggtttgatgaccacaagaattccactggagcactgtcgacccggcttgcaaccgatgcggcccaggtccagggcgcaactggaacgcggctcgcactgattgcacagaacatcgcaaacctcgggaccggcattatcatttcgtttatctacggttggcaacttaccctgcttcttctggccgtggttccaataatcgctgtctcaggcattgtggagatgaagttgctcgcaggaaacgcaaagagagacaagaaggaactggaggccgcaggaaaaatcgcaacggaggcgatagaaaacataagaactgtggtatcactgactcaggagcgcaagtttgaatcgatgtacgtggaaaagctgtacggaccttaccgtaattcagtgcagaaggcccacatttacggaattactttttccatttcccaagcatttatgtacttctcatacgcaggatgtttccgttttggtgcctacctgattgtgaacgggcatatgaggttccgagatgtcatactggtcttttcggcaattgtgttcggtgcagtcgcacttgggcatgcatcgtcgtttgcaccagattacgcaaaggcgaagctgagcgcagctcacctctttatgctgtttgagagacaaccgttgattgattcgtattcggaggaggggctgaaaccagataagttcgaaggcaacatcacctttaatgaagttgtgttcaactaccctactagggcaaacgttcctgtccttcagggacttagccttgaagtgaagaagggccaaacgcttgcccttgtgggctcgtcagggtgtggaaagtcgactgtcgtccagctgcttgaacggttttacgatccactggcaggaaccgtgtttgtcgatttcggatttcaactgcttgatggacaagaagcaaagaagctgaacgtgcaatggttgagggcacaactcggtattgtgtcacaagagcctatcctttttgactgctcgattgccgaaaacattgcatacggcgataactcgagagtggtgtcgcaggatgagattgtgtctgctgccaaggccgccaacatacatcccttcatcgaaactctgccccacaaatacgaaacccgggtgggggacaagggaactcagctttcaggaggccaaaaacaacggatcgccatcgctcgcgcacttatccgtcaacctcaaatccttcttttggacgaggcaacctccgcactcgataccgaatctgaaaaggtggtccaggaggcactggataaggcaagggagggaagaacttgtatagtcatcgcacatagactgagcactattcagaacgcggatctgattgtggtgttccagaacggccgggttaaggagcatggcactcatcagcaactgcttgcgcaaaagggaatctacttttccatggtgtctgtccaagcaggcacccagaacctc

SEQ ID NO: 7541 - DNA, 3858 bp, synthetic construct
  misc_feature 1..3858: note = source = /note="Description of Artificial Sequence: Synthetic coding sequence"
  source 1..3858: mol_type = other DNA
atggatctagaggccgcgaaaaacgggacagcttggcgcccaacgagcgccgagggggatttcgagctcggaattagtagcaagcaaaaaaggaagaagacgaaaaccgtcaaaatgattggggttctgacgttgttccgctattctgactggcaggacaagctgttcatgtctctgggtactatcatggccatcgcacacggtagtggactgccactcatgatgattgtgtttggggaaatgaccgataaattcgtggatactgctggcaatttctctttccccgtcaacttcagcctgtccctgttaaacccgggaaaaatattagaggaagaaatgacccggtacgcttactactactctggactgggagcaggcgtcctcgttgccgcatacatccaggtttcgttctggacactggccgcagggcgccaaatacgaaagatcagacaaaagttcttccacgcaatcctgcggcaagagatcggctggtttgatattaacgacactacggagctaaacacaaggctgacggatgacatttctaaaattagcgagggcatcggtgataaggttggaatgttttttcaagccgttgctacattcttcgctgggtttatcgtcggtttcatcagagggtggaaactgaccctggttatcatggcaatcagtcccatcctgggactcagcgctgcagtctgggccaagatactttccgctttttctgacaaagaattagccgcctacgcaaaggcaggcgccgtcgccgaagaggctttgggagctattcggaccgttattgcctttgggggacagaacaaagaacttgagaggtatcaaaaacacctcgagaacgcaaaggaaattgggatcaagaaggccatcagtgcaaatatcagtatgggaattgccttcctcctgatttatgccagctacgcacttgccttctggtacgggagcacactggtcatttcaaaggaatataccattggcaatgccatgacagtattttttagtatcttgattggtgcgtttagtgtcggccaggccgcgccatgcattgacgcatttgccaatgctcgaggcgccgcctacgtgatctttgatattatcgacaacaacccaaaaatagactcattctcggagcggggtcacaaaccagactccatcaagggcaatctagaatttaacgacgtgcacttctcctatccctcaagagccaacgtgaagatcctcaagggcctcaatctcaaagtgcagagtggccagactgttgctcttgttgggagtagcggatgtggtaagtcaaccaccgtccagctgatccagcgactgtacgacccagacgagggcaccatcaacattgatgggcaagatattagaaactttaatgtgaattatctgcgggagatcataggcgtggtgagtcaggaaccagtcctgtttagcaccaccattgccgagaatatctgttatggccgaggtaatgttacaatggatgaaattaaaaaagctgtgaaagaggccaacgcctatgagtttatcatgaagctgccgcagaagtttgacacacttgtgggcgaacggggcgcacaacttagtggtggtcagaagcagcggatcgctattgctagggccttggtgcgaaatcctaagatactactcttggacgaagccactagcgctcttgacacagagagcgaagcagaagtgcaggccgcgctggataaggcccgagagggccgaacaacaattgtgattgcccatcgactgagtaccgtccgcaatgcagatgtaattgctggttttgaagacggcgttattgtagagcagggcagtcattccgaacttatgaagaaagaaggagtatactttaagctggtgaatatgcaaaccagtggttcccagatccagtccgaggagtttgagctgaacgatgagaaggccgcgacgaggatggcccctaacggctggaaatcacggctgtttcgccattctacgcagaaaaatttgaaaaactcccagatgtgtcagaaatctctggacgtggagaccgacgggttagaggccaacgtaccacctgtgtcctttctcaaagttctgaagcttaacaagacggaatggccttacttcgtcgtgggcaccgtttgcgccatcgccaatggcggtctccagccagcattcagcgtgattttcagtgaaataatcgcgatctttgggccaggggacgacgccgtgaagcaacaaaagtgtaacatctttagcttaatttttctcttcctcggcatcataagcttcttcacgttcttcctccagggatttacttttgggaaagctggcgagatactcacccgccgcctacgcagtatggcattcaaagcgatgttgaggcaggacatgtcttggtttgatgaccataagaactcgacaggcgccctgagtacgagactcgctactgatgccgctcaggtccaaggggctaccggtactcgactcgcactgattgcgcagaatatcgctaacctcggaaccggcattatcatcagcttcatttatgggtggcaactcacactcctactgctggctgtggtgccaatcatcgccgtgagtggaattgtggaaatgaagctgctcgcaggtaatgcaaaacgtgacaagaaggagctagaggccgctgggaagatcgccaccgaggccatcgagaatattaggaccgtggttagtctgacacaggagcgcaagttcgagtcaatgtacgttgagaagctgtacggcccctataggaacagcgtgcagaaagctcatatatacgggataacttttagtatctctcaagcttttatgtacttctcgtacgctggctgcttccgcttcggggcttatctcattgtcaacggccatatgcggttccgcgacgtaatcttagtgttttccgccattgtgtttggagctgttgctctgggtcacgcatctagttttgcaccagactacgcaaaggccaagctcagcgcggcccatctcttcatgctgtttgaaaggcaacctttgatcgatagctatagcgaagagggcttgaagccagataaatttgagggaaacataacattcaatgaagttgtatttaattacccaacaagggcgaatgtgcccgtgctgcaagggctgtctctcgaagttaaaaaggggcagacgctggcactggttggcagctctggctgcgggaaatcaacagtggtgcagctcctggagaggttctacgatccattagctggaactgtgttcgtggatttcgggtttcaactccttgacgggcaggaagctaaaaagctgaacgtgcagtggctgagagcccagcttggtatagtgagtcaagaaccaatcctttttgactgctccatagcggaaaatatagcttatggagataacagcagagtagtatcccaggacgaaatcgtgagtgcagccaaggccgccaacatccacccctttattgaaacattgccccacaagtatgaaactagagtgggcgataaaggaacgcagctctccggcggccagaaacaacgtatcgcaatcgctcgcgcccttattcggcagccccagattctactactggacgaggccaccagtgccctcgacacagagagcgaaaaagtggttcaggaggctctggataaggcccgcgaaggaaggacctgcatagtgattgcccatcgcctttccacgatccaaaatgctgatctgattgtggtgtttcagaacggtagggtgaaagagcacggtacgcatcagcagctgcttgctcaaaagggaatctactttagtatggtcagcgtgcaggccggcacacagaacctt

SEQ ID NO: 7542 - DNA, 3858 bp, synthetic construct
  misc_feature 1..3858: note = source = /note="Description of Artificial Sequence: Synthetic coding sequence"
  source 1..3858: mol_type = other DNA
atggaccttgaggccgcaaagaacgggaccgcctggcggccgacttccgctgaaggagacttcgaactcggaatttcgtcgaagcagaagaggaaaaagaccaaaactgtgaagatgatcggagtgttgaccctgttcagatattcagactggcaagataagctctttatgtcgctcggcaccataatggccatagctcacggctcaggcctcccactgatgatgattgttttcggggagatgaccgacaaattcgtcgatacggcaggcaactttagcttccctgtgaatttctcgctgtcgctgctcaacccgggtaaaatcctggaggaggagatgacccggtacgcctactactattccggcctcggagccggagtgctcgtggcggcgtacattcaggtgagcttctggaccttggcggctggacgccaaatcagaaagatcaggcaaaagtttttccacgctatcctccggcaagaaatcggctggttcgacatcaatgacactactgagctgaacactcgactgactgacgacatctctaagatttctgaaggtatcggcgacaaggtgggaatgttctttcaggccgtggccacttttttcgccggattcatcgtcggcttcatcagaggatggaaactcactctggtgattatggccatttcgcctatcctggggctgtcggcggcagtgtgggcgaaaatcctctcggctttctcggacaaagagctggccgcatacgcaaaggcgggggccgtggcagaagaggccctgggcgccatccgcaccgtgatcgccttcggaggacaaaacaaagaattggagcgctaccagaagcacctcgaaaatgcgaaggaaatcggaattaagaaggccatctcggccaacatttcgatggggatcgccttccttctgatctacgcgtcctacgccctggcattctggtacggatcgacccttgtgatctcgaaggagtacactatcggaaacgcgatgaccgtgttcttctcaatcctgatcggagctttctcagtcggccaggccgcaccgtgcatcgacgctttcgccaacgctagaggagccgcctacgtgatctttgacatcatcgacaataacccaaagattgattccttctcagagcggggccacaagcccgactcgatcaagggaaatttggaattcaacgacgtgcacttctcctatccatccagggccaatgtgaagattctcaaaggactcaatctgaaagtgcaatcggggcagactgtggccctggtgggtagctcagggtgcggaaagtcgaccaccgtccaactcatccagagactctacgatcctgacgaagggaccatcaacatcgacggacaggacatccggaacttcaacgtgaattacttgcgggagatcatcggagtggtgtcacaggagcctgtgctcttcagcaccacgatcgccgaaaacatctgctacggacgggggaacgtgaccatggatgagatcaagaaggccgtgaaggaggcgaacgcctacgaattcatcatgaagctgccgcagaagttcgacaccctcgtcggcgaacgcggcgcacaactctccggaggtcagaaacagcggatcgcaattgcacgcgcactcgtgaggaacccgaagatcttgctgctggatgaagccacttcggcgctggacaccgaaagcgaagctgaagtccaagcggcgcttgacaaagcccgtgagggacgcaccactatcgtgatcgcacatcgcctgagcaccgtcaggaatgccgacgtgattgcggggttcgaggatggagtgatcgtcgaacagggatcgcattccgaactcatgaagaaggaaggagtgtacttcaagttggtgaacatgcagacttccggctcccaaatacagtctgaggaattcgaattgaacgacgagaaggcggcgaccagaatggccccgaacggctggaagtcacggctcttccggcactcgactcagaaaaatctgaagaatagccagatgtgtcaaaagtcgctggacgtggagacggacggccttgaggcaaatgtgccccctgtctccttcctcaaggtgctcaagctgaacaagaccgagtggccgtacttcgtcgtgggaacggtctgcgcaattgccaacggaggactgcagccagccttctcggtgatcttctcggagatcatcgcaatcttcggccctggagatgacgcggtcaaacagcaaaagtgcaacatcttctccctgatcttcctgttcctgggaatcatctccttctttacctttttcctgcaaggtttcactttcggaaaggcaggcgaaattctgactcgccggctcagatcgatggcgtttaaagccatgctcagacaggatatgtcctggtttgacgaccacaaaaacagcaccggcgccctgtccactcgcttggcgaccgacgctgcccaggtgcagggtgccacgggcacgcggctggctctgatcgcacaaaacatcgcgaatttgggtactggcatcataatctcgttcatctacggatggcaactgactctgttgctgctcgccgttgtgcccatcatcgcagtgtcgggaatcgtggaaatgaagctgcttgccggtaacgccaagcgcgacaaaaaggagcttgaggcagccggcaagatcgcgaccgaagccatcgaaaacattcggactgttgtctccctgactcaagaacggaagtttgaatccatgtacgtggaaaagctgtacggaccctacagaaatagcgtgcaaaaagcgcacatctacgggatcactttctccatctcacaagcattcatgtacttctcctacgcgggatgctttagattcggggcctacctgatcgtgaatgggcatatgagatttagagatgtgatcctggtgttttccgccatcgtgtttggagctgttgcccttggacacgcatcctcgttcgcccccgattacgcgaaggctaagctcagcgcagcccatcttttcatgctgtttgagcgccagcccctgatcgattcatacagcgaggaggggctgaagccggacaaattcgagggaaacatcactttcaatgaggttgtctttaactacccgacccgggccaacgtcccagtgctgcagggactgtccctggaagtgaagaagggacagacgttggctctcgtcgggtcaagcggatgcggcaagtccacggttgtccagctcctcgagaggttctacgacccgttggccggcacggtgtttgttgacttcggcttccaactgctggacgggcaggaggcaaagaaactgaacgtgcaatggctccgggcacagctgggaatcgtgtcccaggagcctatcctgttcgactgttcaatcgccgagaacattgcgtacggagacaattcgcgcgtagtctcgcaagacgaaatcgtgtccgccgccaaggctgcaaacatccacccatttatcgaaacgctcccgcacaaatacgaaacccgcgtgggagataagggtacgcagctgtcgggaggacagaagcagcgcatcgccattgcgcgcgcacttatcagacagcctcaaattctgctcctcgacgaggcgacctcggccctcgatacggagtcggagaaagtggttcaggaggctctcgacaaggccagggagggacggacttgcatcgtcatcgcgcaccggctctccacgatccagaacgcagatctgatcgtggtgttccagaacggccgggtcaaggagcacggtactcaccagcagcttttggcccagaagggaatctacttcagcatggtgagcgtgcaggcgggaacccagaacctc

SEQ ID NO: 7543 - DNA, 3858 bp, synthetic construct
  misc_feature 1..3858: note = source = /note="Description of Artificial Sequence: Synthetic coding sequence"
  source 1..3858: mol_type = other DNA
atggatttggaagccgcaaagaatgggaccgcttggaggcctacttcagcagaaggggattttgagctgggtatcagctcgaaacaaaaaagaaagaaaactaaaaccgtgaaaatgattggagtcctgaccctgttcagatactccgactggcaagataaactgttcatgtcccttggaactataatggccattgcgcatggctccggtttgccactgatgatgattgtctttggtgaaatgaccgataagtttgtggacacggcgggtaacttttcgttccccgtgaatttcagcctgagcctccttaatccgggtaagattcttgaagaggaaatgacgcggtacgcatattactactcagggctcggcgcaggtgtgctggtggcagcatacattcaggtgtccttttggaccctcgcggcaggccgccaaatcagaaagatcagacaaaagttttttcatgcaatactgcggcaggaaatcggatggtttgatatcaatgacaccactgaattgaacactcgtcttaccgacgatattagcaagatttcggagggtattggtgataaggtgggtatgttttttcaagccgtcgcaactttcttcgcaggattcatagtaggattcattagaggatggaagctgactctcgtgattatggctataagcccaatcctcgggctttctgcagcagtgtgggcaaagatattgtccgcatttagcgataaagagctcgcggcctacgccaaggcaggcgcagtggcggaagaagcactgggggcgattcgaaccgtcatcgcgttcggggggcagaacaaagaacttgaaagataccagaagcatctggagaacgccaaggagatcggaatcaaaaaagccatctccgcaaacatctcgatgggaattgcatttttgctgatttacgcaagctacgcgctggcgttttggtacgggtcgacgctggtaatctcgaaagaatacactataggtaatgccatgacggtgttctttagcattcttattggtgcttttagcgtcggacaagcagccccttgtatcgacgcttttgccaacgcaagaggagcagcatacgtgattttcgacattattgacaacaaccccaagatcgactcctttagcgagcgaggacataagcctgactccataaagggaaacctcgaattcaatgacgtccactttagctacccatcacgagccaacgtgaagatacttaagggtctgaacctgaaggtgcaatccggacagaccgtggccttggtcggatcctcgggttgtggtaagtcgacgactgtgcaactcattcaaagactctacgatcctgatgaaggtactatcaacattgacggccaagatattagaaactttaacgtgaattacctgagggagatcattggcgtcgtgtcgcaggaacctgtgttgtttagcaccaccattgccgaaaacatctgctatggacgcggtaatgttacgatggatgagataaagaaagcagttaaggaagcaaatgcatacgaattcatcatgaaacttccacagaagttcgacactctggtgggtgagcgcggtgcccagctctcgggaggacaaaagcaacgtatagccattgcacgggcgctggtgcgtaatcctaagatcctgctgcttgatgaagccacctctgcattggacactgagtcagaagccgaagtgcaagcagctcttgataaagcacgggagggtaggaccacgattgtgattgcccatcgactttctaccgtacggaatgcagatgtgatagccggtttcgaagatggggtgatcgttgagcaaggaagccacagcgaactgatgaagaaggaaggtgtctactttaagctggtgaatatgcaaacctcaggatcacagatccagtcggaagaatttgaactcaatgatgaaaaagccgctacccggatggcacctaacgggtggaaatcaaggctttttcgccattcgactcagaaaaaccttaagaactcacagatgtgtcagaaaagcctggacgttgaaaccgatggcctcgaagcaaatgtgcctcctgtgtcattccttaaggtcctgaagctgaataagactgaatggccctactttgtcgtgggaaccgtgtgtgcgattgccaacggaggacttcagcctgctttcagcgtcatattcagcgagattattgcaatcttcggacccggagatgacgcagtgaaacagcagaagtgtaacatcttctcgctgatatttctttttctcgggattatctcatttttcacttttttcctgcaaggcttcacctttggaaaggccggtgagattttgactaggcgcctgcggtcaatggcatttaaggcaatgctgcgtcaagatatgtcgtggtttgacgatcacaaaaactccaccggagctctgtccacgcggttggctaccgatgcggcacaagtccaaggagcgaccggtactcggctcgcactcatagcgcaaaacatcgcaaaccttggtaccggaattatcatcagtttcatttacggatggcaactcaccctgcttcttttggccgtcgtaccgattatagcagtgtccggaattgtcgaaatgaaattgcttgcagggaacgcaaagagagacaaaaaggaactcgaagcagccggaaagattgccactgaagcgattgagaacattagaaccgtggtgtcgctcactcaagaaaggaagtttgagtccatgtacgtggagaagctgtatgggccttacagaaacagcgtgcaaaaggcacacatctacgggattaccttctcgatctcacaggccttcatgtatttctcctatgcaggatgtttcagatttggagcttacctcatagtgaatggacacatgaggtttagagacgttattcttgttttttccgcaattgtatttggtgcagtggcactggggcatgcaagcagctttgcaccagattacgcgaaggcaaagctgtccgctgcgcatctgttcatgctttttgaacgccagcccctgatcgattcgtactcggaggagggcctgaaaccagataagtttgaaggaaacattacctttaatgaagtcgttttcaattaccctacgagggctaacgtgcctgtgcttcagggcctctcgcttgaagtgaagaagggccaaactcttgcgcttgtcggatcatcgggctgtggtaagtcaaccgtggtgcaactgctcgagcgtttttacgatcccctggcaggtactgtctttgtggactttggctttcaactcctcgatggccaggaggcaaagaaattgaacgtgcagtggttgcgggcacaactgggaatcgtgtcccaggagccaattctgttcgactgctcgatagctgagaatatcgcttacggggataactcccgtgtggtgtcacaagatgagattgtctccgcggcgaaggctgcaaacattcatccattcattgagactcttccacataagtatgaaaccagggtcggcgacaagggaactcaactcagcggcggacaaaaacaacggattgccattgccagagcacttatccgacagccacagattctgcttttggatgaagcaacttcggcactggatactgagtcagagaaggtggtgcaagaggcattggataaggccagggaaggtcgtacgtgtatagtgatcgcgcatcgtctcagcaccatacagaatgcagacctgatcgtcgtctttcaaaacggacgcgttaaggaacacggtacccaccagcaactgctggcgcagaagggaatttacttttctatggtgtccgtgcaggcaggaactcaaaatctt

SEQ ID NO: 7544 - DNA, 3858 bp, synthetic construct
  misc_feature 1..3858: note = source = /note="Description of Artificial Sequence: Synthetic coding sequence"
  source 1..3858: mol_type = other DNA
atggacctagaggccgctaagaacggtactgcatggaggccaacatcggcggagggagactttgaattgggcattagctcgaagcagaagcggaaaaagaccaagactgttaaaatgatcggagtgttgaccctttttaggtactctgactggcaggataaacttttcatgtctctcggcactataatggcgattgctcatggatccggactcccactgatgatgatcgtatttggtgagatgactgataaattcgtggataccgctggcaatttctcctttcctgtcaattttagtctaagtcttttgaatcctggtaagattctggaagaggagatgacaaggtatgcatattattattccggtttaggtgctggggtgcttgtcgctgcttacattcaagtttccttttggaccctcgctgcgggacgccaaatccgaaaaattagacagaagttttttcatgcaatattgagacaagaaattgggtggttcgacattaacgatactactgaacttaatactaggctgacagatgatatctcaaagattagcgagggaattggggataaagttggaatgttctttcaagccgtcgcgaccttttttgccggattcattgttgggttcatacgagggtggaagttgaccttggtcatcatggctataagccctatcttgggactcagcgctgctgtatgggccaagattctcagcgcattctccgataaggagttagcagcttatgcaaaggccggtgctgttgctgaagaggcgcttggtgcaataaggactgtgatcgcattcgggggacagaataaggaactcgagaggtatcaaaagcaccttgagaatgctaaggaaatagggataaagaaagctatctctgctaacatctccatgggcattgcttttttgctcatatacgcaagttacgccttagccttttggtatggctcaaccctagttatatcgaaagaatataccatcgggaacgcaatgactgttttcttctcaatacttattggagcattcagcgtgggccaagcggccccctgtattgacgctttcgcaaacgcacgtggtgcagcttacgtcatcttcgacattatagataacaatccaaaaattgattcattttcagaaagaggacacaaaccagatagcattaaaggaaacctagagttcaatgatgtgcatttttcctatccatcccgtgctaatgtcaaaattctcaagggcctcaaccttaaagtgcagagtggacaaaccgtggctctggtcggatccagtggttgcggtaaaagtactaccgtgcagctaatccaaagactatacgaccccgatgagggtacgattaatatcgatgggcaggatattaggaattttaatgtgaactatttgcgtgaaattattggagtggttagtcaagaacctgtactctttagcactactattgccgagaatatttgttatgggcgtggtaatgtaaccatggatgagatcaagaaggcggtaaaagaggcaaatgcttacgagtttatcatgaaattgcctcagaagtttgatacactcgtcggcgagagaggggcgcaactttcaggaggtcaaaaacaaaggatcgctattgctagggctttggtccgtaacccaaaaatccttctcttggatgaggccacttcggctctcgataccgaatcagaggcagaagtacaagccgcccttgataaggctcgagaggggcgtacaacgattgttattgcccatcggttgagtacagtgcggaatgctgatgttattgctggtttcgaagatggggttattgttgaacaaggttctcacagtgagctcatgaaaaaggagggagtatattttaaactcgtgaatatgcaaacctctggtagccagatacaaagcgaagaatttgaattgaatgacgagaaggctgcaacacgaatggcaccaaatggctggaaaagtagactttttcggcatagtacacagaaaaaccttaagaattcccaaatgtgtcaaaagtcacttgatgtagaaaccgatggtcttgaggctaatgtgcctccagtatcttttctgaaagttctgaaacttaacaagacagagtggccatactttgttgtggggaccgtgtgcgccattgccaatgggggactacaaccggccttttccgttattttcagcgaaatcatagcaatctttgggcctggtgatgatgccgttaagcagcaaaaatgcaacattttcagccttatcttcctatttcttggtatcatttcattttttaccttcttcctacaagggtttacttttggaaaggctggcgaaatccttacgcgacgtttacgtagcatggcttttaaagctatgcttcgacaggatatgtcatggtttgatgatcataagaactctaccggcgctttgtctacaaggttagcaactgacgctgcacaagttcaaggagctactgggacccggctggcccttatcgcccaaaatattgctaacttggggactgggatcatcatcagtttcatttatggatggcaacttaccttgctccttcttgcagtggttcctataattgcagtttcgggtattgtagaaatgaaattacttgcgggtaatgccaagcgtgacaaaaaagagttggaggctgctggcaagatagctactgaagctatagaaaatattaggacagttgtgtcactgacacaagaaaggaaattcgagtctatgtacgtggagaaattgtacggcccatatcgtaattcggtgcaaaaagcacatatctacggtataaccttcagcatttcccaggcatttatgtactttagttatgctgggtgtttcaggtttggagcatatctgattgtcaacggacatatgagattcagggatgtgatccttgtattcagcgccatagtttttggtgcagtagctcttggacacgcctcatcctttgcgccagattatgctaaggcaaagctatctgccgctcatttattcatgttatttgagaggcaaccacttattgattcatattcagaagagggcctcaagccagataaatttgaaggtaatattacttttaatgaagtggtgtttaattaccccacaagagcaaatgttcccgtgcttcagggtttgtctttagaagttaagaagggtcaaactctagcactagttggatctagtgggtgcgggaaatccactgttgtgcaattgttggaaagattttacgatcctctagctggtactgtttttgttgacttcggatttcagctgctagacggtcaagaggcaaagaaactcaatgtgcaatggcttagggcccagctgggaatagtgtcacaggaacctattctttttgactgttcgattgccgagaatattgcctatggagataacagccgcgtggtaagtcaagatgaaatcgtgtctgcagccaaagccgctaatattcatccatttattgagactcttccacataagtacgaaactagagtaggcgataagggtactcagctctccggcgggcaaaagcagaggattgctatcgcaagagccctgattagacaaccacaaattctcttattggacgaggctaccagcgctctggatacagaaagtgaaaaagtcgttcaggaagctttggataaggcgcgcgagggaagaacgtgcatcgtgatcgctcatcggctttccaccattcaaaatgcagatctgatcgtagtttttcaaaatgggcgagttaaagaacatggtacccatcaacaacttctagcccagaaggggatttatttttctatggttagtgttcaagcaggaacacagaattta

SEQ ID NO: 7545 - DNA, 3858 bp, synthetic construct
  misc_feature 1..3858: note = source = /note="Description of Artificial Sequence: Synthetic coding sequence"
  source 1..3858: mol_type = other DNA
atggatttggaagctgcaaaaaacggcaccgcctggagaccgacaagcgcagagggtgacttcgagctggggatttcctcaaaacagaaaagaaaaaaaacaaaaaccgttaaaatgattggggtgctgacgctgttccggtactctgactggcaggacaaattgtttatgagcttagggaccatcatggcgatagctcatggctcaggcctcccactgatgatgattgtttttggtgaaatgacggataagttcgtggacacagccggcaacttctcttttcctgtgaattttagccttagcctgcttaatcctggaaagatcttagaggaagagatgacccgttatgcatactactactcaggcctgggtgccggtgtcttggttgcagcctacattcaggtatcattttggaccctcgccgcaggtagacagattagaaaaataagacagaaattttttcacgcaatactgaggcaggagataggatggttcgatattaatgataccacggaactcaatacacgtctcaccgatgacatttccaaaatcagcgaagggatcggggacaaagtaggcatgttcttccaggcagtggcaaccttctttgcggggttcatcgtcggttttatacgtggatggaagctcaccctggtgatcatggccatctcaccgatactagggctgtctgccgccgtgtgggctaagattctgtctgccttctccgataaggagctcgccgcgtacgctaaggccggcgccgtcgctgaggaagcactgggcgcaattcgaacagtgatagcctttggcggtcaaaacaaggagcttgaacggtaccagaagcacttggagaacgctaaagaaatcggaatcaaaaaggccatcagcgctaacatctctatggggattgcttttttattgatctacgcctcatatgcattagccttctggtacggcagtactcttgtgatatctaaggagtacacgatcggaaacgccatgaccgtatttttcagtattcttatcggtgcattcagcgtaggacaagccgccccttgcatcgacgcctttgcgaatgctcgcggggccgcttacgtgatattcgatatcatcgacaacaaccctaaaatcgacagcttctccgaaaggggccataagccagattcaatcaaaggcaacttggaattcaatgacgttcatttctcctatcccagccgggcaaacgtgaaaattctgaagggactgaacttgaaggtgcaatctgggcagaccgtggcactggtggggtccagtggttgcggtaagagtaccactgtccagctgatccagcgtctctacgatcccgatgaaggaacaatcaatatcgatggtcaggatatacgaaactttaacgttaattacctgagggagattatcggggtggtatcccaagagccagtcctgttcagtacaaccatcgcagaaaatatatgttacggccgcggaaatgttactatggatgagataaagaaagctgttaaagaagctaacgcatatgagttcattatgaaactgccccagaaatttgacaccttggtcggggaaagaggagcgcagctttccggaggacagaagcagcggatagctatagctcgggccttagtaagaaatcccaaaatactcctgttggacgaagctactagcgccctggacacagagtctgaagcggaggttcaagccgctctggacaaggcccgtgaaggacggaccaccattgtgattgcccatcggctgtccacagtgcgtaacgctgatgtgattgcaggcttcgaagatggcgtcatcgttgagcagggctctcacagcgagctgatgaaaaaggaaggggtgtacttcaagctggtcaatatgcagacaagcggatcccagattcagtcagaggaatttgaactgaatgatgaaaaggcagcaactaggatggctccgaatggctggaaaagtaggttgtttaggcatagcacccagaagaatttgaaaaactcgcaaatgtgtcagaagtccctggacgtggaaacagacggcttggaggcgaacgtgcccccggttagctttctgaaggtactgaagttaaacaaaacggaatggccttatttcgttgtcggcaccgtgtgcgcaatcgcaaatggcggtctgcagccggctttctccgttatcttcagcgagattatcgctatcttcgggccgggtgatgacgctgtcaagcaacaaaagtgtaacattttctccctgatcttcctgttcctgggtataatttcattctttacatttttcttacagggattcacgttcgggaaagctggtgagattctcactaggcggctgcgcagcatggcctttaaagccatgctccggcaggacatgtcttggtttgacgatcacaagaactcaaccggcgctctgagtactcgcttggcaaccgacgccgcccaggttcaaggggctaccggtactcgcctggcgctgatcgctcagaacattgcaaatctcggaactgggatcattatatcatttatctatggctggcagcttactttgctcctcctggctgtggtgcccatcatcgcagtgtctggcatagtggagatgaagctgctggccgggaatgccaagagagataagaaggaactggaagctgccggtaagattgcgaccgaggccattgaaaatatcagaactgttgtttcactcacacaggaacgtaaattcgaaagtatgtatgtggaaaagctatatggtccgtatcgtaattccgttcagaaagcgcacatatacggaatcactttcagcatctctcaagcatttatgtactttagctatgcgggatgcttcagattcggggcctatcttatcgtgaatgggcacatgagatttcgggacgtgatcttagtgttttcggctattgtgttcggggctgtggctttgggtcacgcctcatcattcgcgcccgactatgccaaggccaaactctcagccgcacacctgttcatgctgttcgagcggcagccattgattgactcctactctgaagaaggactgaagcctgacaaattcgagggcaatattaccttcaatgaggtcgtgtttaattaccctaccagagctaatgtccccgtcttgcaagggttgtctttggaggtcaagaaaggccagactctggcactggttggaagctcgggatgtgggaaatcgacagtggttcagctgctggagcgattttacgaccctctcgccgggactgtgttcgtggacttcgggttccagctgctggacggccaggaggctaaaaaactgaacgttcagtggctacgcgctcagcttgggatcgtatctcaggagccaatcctttttgattgttcaatagcggaaaacattgcctacggcgacaatagccgggtagtgtcccaggatgagatagtatccgccgccaaagccgccaacatccatccatttattgaaactctaccccacaagtacgagacaagggtaggagacaaaggtacacagctgagcggtgggcagaagcagagaatcgctatagcccgcgcactgattcgccagccacagatcctgctactggacgaagcaaccagtgcactcgacacagagtctgaaaaagtggttcaggaggcactggacaaggcacgtgaggggcgtacttgcattgtgatcgcgcaccgtctgagcacgatccagaatgcagacctgatagtcgtcttccaaaatggcagggttaaggagcatgggactcatcagcagctacttgcacagaaaggcatctatttttctatggtgtccgtgcaggcaggcacgcaaaatctc

SEQ ID NO: 7546 - DNA, 3858 bp, synthetic construct
  misc_feature 1..3858: note = source = /note="Description of Artificial Sequence: Synthetic coding sequence"
  source 1..3858: mol_type = other DNA
atggacctggaagctgctaagaacggaactgcctggcgccctacatccgccgagggagacttcgaattgggcatttctagtaagcagaagagaaaaaagaccaaaaccgtgaaaatgatcggtgtcctgacactgtttcgctactctgattggcaagacaagctgtttatgtcactgggtactattatggccatcgcccacggcagtggattgcccctcatgatgattgtgttcggtgagatgaccgataagttcgtagatactgctggcaacttcagctttcctgtaaacttttcactgtcattgctgaatcccggaaagatcctggaagaggagatgacacgttacgcttactactatagtggccttggtgctggagtgctggtggctgcttatattcaggtctctttttggactctggcagccggacgtcagattcgtaagattcgtcagaagttttttcatgccattctgagacaggagatcggctggtttgatataaatgacactactgagctgaacaccaggcttaccgacgacatctccaaaattagcgagggaattggagataaggtgggaatgtttttccaggctgtggctacattcttcgccggctttatcgtgggatttatccgcggctggaagctgactctggtaatcatggctatcagccctatcctgggtctcagcgcagccgtgtgggctaagatcctttccgcttttagtgacaaggagctggccgcctacgcaaaagccggcgccgttgcagaagaggcactgggtgccattcgtaccgtgatcgcctttggtggccaaaataaggaactcgagaggtaccaaaaacacctggagaacgccaaggaaataggtattaaaaaggccatcagtgcaaatatctccatgggtatcgctttcttgctgatttacgcttcatatgcccttgctttctggtatggctccacactggtgattagcaaagagtacactatcggtaacgctatgacagtgttcttctccatcctcattggagccttttccgtcggtcaggcagctccctgcatcgatgcctttgctaacgcccgcggtgctgcttatgtaatttttgatataattgacaacaatccaaagatcgactccttctctgagcgtggtcacaaacctgattccattaaaggaaacctggagttcaacgatgtacacttctcctatccatccagggcaaacgtgaaaattctgaaaggtctgaacctgaaagtccagtccggtcagaccgtggccctcgtcggttcaagtggttgcggtaagagtacaactgtgcaactgattcagcgcctctacgaccctgacgagggcactatcaacatagatggccaggatatccgtaatttcaatgtgaactacctgagagagattataggagtcgtctcccaggagcctgtcctgttttctacaacaattgctgagaacatatgctacggccgcggcaacgtcactatggatgaaattaaaaaggccgtcaaggaggcaaacgcctacgaattcatcatgaagttgcctcagaagttcgatacccttgtgggcgaacgcggcgctcagcttagtggtggtcaaaagcaacgcatcgctattgcccgtgccctggtgagaaatcctaagatactgctgctggacgaagctacttctgcccttgacacagaatcagaggctgaggtgcaagccgctctggacaaggcaagggagggtcgcacaactatcgtgatcgcccaccgcctcagtactgtgaggaatgcagacgttatagccggtttcgaagacggagtaattgtggagcagggtagccattccgagctgatgaaaaaagaaggcgtatactttaaattggttaacatgcaaacctctggtagccaaatccaatcagaggagttcgagctcaacgatgaaaaagctgccacccgcatggcacctaacggctggaaatccaggcttttccgtcactccacacagaagaatcttaagaatagtcagatgtgtcagaagagcctggacgtcgaaaccgatggcctggaagcaaatgttccaccagtttccttcctgaaggtcctcaaactcaacaagaccgagtggccctacttcgtggtaggtacagtgtgtgccatcgccaatggaggattgcaacccgccttcagtgttatcttctccgagatcattgctattttcggccctggtgacgacgcagtgaaacaacaaaagtgcaatatcttcagcttgattttccttttcctcggtattatcagcttcttcacattctttctgcaaggtttcacttttggaaaggcaggagaaattctgaccaggcgcctgaggagcatggcattcaaagcaatgctgcgccaggatatgagttggttcgatgatcacaagaattccaccggtgctctcagtacacgcttggccaccgacgccgctcaagtgcagggagctacaggcacaagactcgcactgatcgcccaaaacattgccaatctgggtaccggtattataatctccttcatctatggctggcagcttaccttgctgctgctcgctgtggtacccatcattgccgtgtctggcattgtcgagatgaaacttctggctggaaacgctaagcgtgacaaaaaggagctcgaggccgcaggcaagattgctacagaagctatcgagaacatccgcaccgttgtgtccttgacccaggaacgtaagttcgagtccatgtacgtggagaaattgtacggcccttacagaaactcagtgcaaaaggctcatatttacggcattacattcagtatctctcaagctttcatgtatttctcctatgccggctgcttcagattcggagcttatctgattgttaacggtcacatgcgctttcgtgacgtaatcctggtattttccgccattgttttcggagctgtcgcactgggacacgcctcctctttcgcaccagactacgccaaggctaagcttagtgccgcccacctgttcatgctcttcgagagacagccactgatcgattcttacagtgaagaaggattgaaaccagataagtttgagggcaacatcacattcaacgaggttgtgtttaattacccaaccagagcaaatgtccctgtattgcagggcctcagcctggaggtgaaaaagggccagaccctcgccctggtcggttcctccggatgcggcaagtccactgtcgtccaattgcttgagcgcttttacgatcctctcgcaggtaccgtcttcgtcgactttggatttcagttgttggacggccaggaggccaagaagctgaacgtacaatggctgagagcccaactcggcatcgtttcccaggaacccatattgtttgactgctcaatcgctgagaacatcgcttacggcgataatagccgtgtggtgagtcaggatgaaatcgtctcagctgctaaggctgctaatatccatccatttatcgaaaccctgccccataagtatgagactcgtgtgggtgacaaaggtactcagctgtccggaggacaaaaacaacgtatcgccattgccagggcacttatccgtcagccccagatcctgttgcttgacgaagcaacttctgcacttgacactgaatcagaaaaggtggtgcaggaggctttggacaaggcacgcgaaggccgtacctgtatcgtgatcgcccaccgtctttccacaatccaaaacgctgacttgatcgtagtatttcaaaatggcagagtcaaagaacatggcactcatcagcagcttctggcacagaagggtatatacttctccatggtgtctgtccaagctggaacacaaaacctg

SEQ ID NO: 7547 - DNA, 3858 bp, synthetic construct
  misc_feature 1..3858: note = source = /note="Description of Artificial Sequence: Synthetic coding sequence"
  source 1..3858: mol_type = other DNA
atggacctggaggccgccaagaatggcaccgcatggcgacctacgtccgctgagggagattttgagctcggaatttcatcaaagcaaaaacggaaaaagaccaaaaccgtgaagatgatcggagtcctgaccctcttcaggtactcggactggcaagataagctgtttatgagcctcggcactatcatggcgatcgcacatggaagcgggctgccgctgatgatgatcgtgtttggggaaatgactgacaaatttgtggataccgcggggaacttctcattccctgtcaatttctcgctgtcgctgctgaatccaggcaagatcctggaggaagagatgacgcgctacgcgtactactattccggtctgggagcgggtgtgctggtggcggcctacatccaggtgtccttctggaccctcgcggcgggccgacagatcagaaagatccgtcagaagttcttccacgccattctgagacaggaaatcggatggtttgacatcaatgacaccaccgaactcaacacccggctgaccgacgacatctccaaaatctcagaaggcatcggtgacaaggtgggaatgttcttccaggccgtggccaccttcttcgcaggattcatcgtgggattcatccgcgggtggaagctgaccctggtgataatggctatctccccgattctgggattgtcggcagcagtgtgggcaaagattctgtccgccttttccgacaaggagctggcggcttacgctaaagcaggagctgttgccgaggaagcactgggggccatccgcaccgtcatcgcgttcgggggacagaacaaggaactcgaaagatatcaaaaacacctggagaacgcaaaggaaattggaattaagaaagctatcagcgcaaacatctcaatgggcatcgctttccttctgatctatgcttcgtacgctctggcgttctggtacggatcgacgctcgtgatcagcaaagaatacactatcggtaatgcaatgaccgtgttcttttccatccttataggcgctttctcggtcggccaggccgctccctgcatcgacgcgtttgctaacgccagaggcgcggcgtacgtgatctttgacatcatcgataacaacccgaaaatcgactcgttttcggagcgcggacacaaaccagactcgatcaagggaaatctcgagtttaatgatgtccacttctcctacccttcaagagctaatgtgaagatcctcaagggactgaacctgaaagtgcagtcaggacagaccgtggcgctcgtgggctcgtcagggtgtggaaagtcgactacggtgcagcttatccagcgcttgtacgaccccgatgagggaacgatcaacatcgacggacaggacattaggaactttaacgtcaattacctgcgggagatcatcggggtggtgtcccaagagccggtgctgttttcaactaccatcgcggaaaacatttgctacggtcgcggaaatgtgactatggatgaaatcaaaaaggccgtcaaggaagcaaatgcttacgaattcattatgaaactgccgcagaaattcgacactctcgttggcgaacgcggagcccagctgtccggcggccaaaaacagcggattgcgatcgctagggcgttggtgaggaaccctaaaatcctgctgctcgacgaggccacttcagctctggacactgagagcgaagcagaggtgcaggcggctcttgacaaagctcgcgaaggacggactaccatcgtaatcgctcaccgcctgagcaccgtgaggaacgcggacgtgatcgctggcttcgaagatggagtgatcgtggagcaaggatcgcactcggagctcatgaagaaagagggagtctactttaaacttgtgaatatgcaaacttccggatcacagattcagagcgaagagttcgagctgaacgatgaaaaagctgccaccaggatggcgccgaatggttggaaatcccgcctgttccggcattccacccagaagaacctcaagaactctcagatgtgccagaagtcgctggacgtggagactgacggattggaggccaatgtgccgcccgtgagcttccttaaggtgttgaaattgaataagacggaatggccttacttcgtggtgggaactgtgtgcgccatagccaacggaggattgcagccggcctttagcgtcatcttcagcgaaatcatcgccatcttcggaccaggggacgatgccgtcaagcaacaaaagtgtaacattttctcactgatcttcctgttcctggggatcatttcgttcttcaccttcttcttgcagggattcactttcggaaaggccggagagatcctgactcggcgcctgcgctcgatggcctttaaggccatgttgaggcaggacatgtcgtggttcgatgaccataagaactccactggagctctgtccacccggctcgcaaccgacgccgcccaagtgcaaggcgcaaccgggacccgcctcgctctgattgcccaaaacatcgcgaacctgggaaccggaatcatcatctcctttatctacggctggcaactcactttgctgcttctggccgtggtcccaatcattgcggtgtctggaatcgtcgaaatgaaactgctggccgggaacgccaagcgggataagaaagaactggaggcagcgggcaagatcgccaccgaggcaatcgaaaacatccggactgtggtgtcactgacccaagaacggaagttcgaatcgatgtacgtggagaagctctacggtccctacagaaactcagtgcaaaaggcgcatatctacggcatcaccttttccatctcacaggctttcatgtacttctcttacgctggatgcttcagattcggtgcgtacctgatcgtgaatggacacatgcgctttcgggacgtgatcctcgtgttctccgccatcgtctttggagctgtggctctgggacatgcatcgagcttcgccccagactacgccaaggcgaagttgtcggccgcacatctcttcatgctcttcgagagacagccgttgatcgacagctatagcgaggaaggtctgaagcctgataagttcgaaggcaacatcacgttcaacgaagtggttttcaattacccgaccagagctaacgtgccagtgctccagggcctgagccttgaggtgaagaagggacagactctggcgcttgtgggatccagcggatgtggaaaatctacggtggtgcagctcctggaacgcttctacgatccgcttgccggcaccgtctttgtggacttcggctttcagttgctcgatggacaagaggcgaagaaactgaacgtgcagtggctgcgcgcccaactgggaattgtgagccaggagcctatcctgtttgactgctccatcgctgaaaacatagcgtatggggacaactcgcgggtggtatctcaggacgagattgttagcgcagcgaaggcagccaacatccaccccttcatcgagactctgccgcataagtatgaaacccgcgtgggagataaaggcactcagctgtccggagggcagaaacagaggatcgcgattgctcgcgccctgattagacagccacagatcctgctcctcgacgaggcgacttcggcgctggatacggagagcgaaaaggtggttcaggaggccctcgataaggcccgggaaggccgcacgtgcatcgtgatcgctcaccggctgtcgaccatccagaatgctgacctgatcgtggtctttcagaacggaagggtcaaggagcacggtacgcatcagcagcttctggcccaaaagggaatttacttttcgatggtgtccgtgcaggcaggcacccagaatctt

SEQ ID NO: 7548 - DNA, 3858 bp, synthetic construct
  misc_feature 1..3858: note = source = /note="Description of Artificial Sequence: Synthetic coding sequence"
  source 1..3858: mol_type = other DNA
atggaccttgaggccgcgaagaacggaactgcctggcggccaacctcggcggaaggtgacttcgaactggggatttcgtcgaagcaaaagcgcaagaaaaccaagactgtgaaaatgattggagtccttaccctgtttcgctattcggactggcaagacaagctgttcatgtcactgggaaccatcatggcaatcgcgcacggcagcggtctgccgctgatgatgattgtgttcggagagatgaccgacaaatttgttgataccgcgggaaatttctctttccccgtcaacttctcgctctcgttgctgaaccccggaaagattctggaagaagaaatgactaggtacgcgtactactacagcggactgggagcgggtgtcttggtcgccgcatacatccaagtgtcattctggactttggcagcaggccggcagatcagaaagattagacaaaagttctttcatgctatcctgagacaagagatcggttggttcgacatcaacgacactaccgaactgaatactcgcctcaccgacgacatcagcaagatttccgaaggaatcggagacaaggtgggaatgttttttcaagcagtcgcaaccttcttcgcgggattcatcgtgggtttcatccggggctggaagctgaccctcgtgatcatggctatttccccgattctgggcctcagcgccgccgtgtgggccaagattttgtccgcatttagcgacaaagaattggcggcatacgcgaaggccggggccgtggctgaagaagcgctgggagccatcagaaccgtgatcgcattcggagggcaaaacaaggagctcgaaaggtaccagaaacatctggagaacgccaaagaaatcggaatcaagaaagctatcagcgcgaacatctcaatgggaatcgcgttcttgctcatctatgcctcctacgccctcgccttctggtacggatctaccctggttattagcaaggaatacacgatcggcaacgccatgactgtctttttcagcatccttattggagcattttccgtcggacaggcagcgccgtgcatcgacgctttcgcaaatgccaggggggcggcctacgtgatattcgacattatcgacaacaaccctaagatcgattccttttcggagcggggccataagccagactcaattaagggaaatctcgagttcaatgacgtgcacttctcgtacccttcccgagctaatgtgaagatcctcaaagggcttaatctcaaagtgcagtcaggacaaactgtcgctctcgtcggctcctccggctgcggcaaatccaccactgtgcagcttatccagcgcctgtacgatccggacgagggcactatcaacatagacggacaagatatcagaaatttcaatgtgaattatctgagagaaatcatcggggtggtgtcgcaggaaccggtgctgttctccacgacgatcgctgagaacatctgctacggccgagggaacgtgactatggatgagattaagaaggccgtgaaggaggccaacgcctacgagtttatcatgaagctcccgcagaagttcgataccctggtcggtgaacgcggggcgcagctttccggcggacaaaaacagcggattgcaatcgcgcgcgcgctggtccggaatcccaagattctcctgctggatgaggccacctccgcacttgacactgagagcgaagctgaagtgcaggctgcactggataaggcccgcgaggggcgcaccacgatcgtgattgcccataggctctcaacggtgagaaatgcggatgttatcgctggattcgaggacggggtgatcgtggagcagggatcacacagcgaattgatgaagaaggaaggcgtgtatttcaagctcgtcaacatgcagacttcaggctcccagatccagtccgaggagttcgagctgaatgacgagaaggccgcgactcgtatggccccaaatgggtggaagagcagactgttccgccattccactcaaaagaatcttaagaactcccagatgtgccagaagagcctcgacgtggaaaccgatggactggaagccaacgtgccgccggtgtcttttttgaaggtgctgaagctcaacaagactgaatggccgtacttcgtcgtcggcacggtgtgtgcgattgcaaacggagggctccagcctgcattctcagtgatcttctcggaaatcatagcgattttcggacccggagacgatgcagtcaagcaacagaaatgcaatatcttctcgctcatcttcctgtttctgggaatcatctcctttttcaccttcttcttgcaaggatttactttcgggaaggctggagagatcctgaccagacgcctcagaagcatggcgttcaaggcaatgctgcggcaggatatgtcttggttcgatgaccataagaattcgaccggagccctgtcgacgcgactggcaaccgatgccgcgcaggtgcaaggagctaccggaacccggctcgcgctgatcgcccagaacattgcgaatctgggaaccggcatcatcatctccttcatctacggatggcagctgaccctgctgctgttggccgtggtccccattattgcagtctcaggaatcgtggagatgaaactcctggctggcaacgcaaaacgggacaagaaggagcttgaagcagcgggaaagatcgcgactgaggctatcgagaatatccgcactgtggtgtcactgacccaggaaagaaagttcgaatccatgtacgtcgagaaactctatggaccgtaccgcaactcggtccagaaggcgcatatctacggcatcaccttttcaatcagccaggccttcatgtacttctcatacgcgggatgttttagattcggcgcctacctcatcgtgaacggacacatgagatttagagatgtcatcctggtgttctccgccatcgtgttcggagcggtcgcccttggacacgcctcatcctttgcgccggactacgcgaaggctaaactgtcagcagcccatctctttatgctgttcgaaagacagccgctcatcgattcgtactcagaggaaggtctgaagccagacaagttcgaaggaaacattacttttaacgaggtcgtgttcaattacccgaccagagcgaacgtcccagtgcttcagggcctctctctggaagtgaagaagggtcaaacgcttgctctggtcggatcatcgggctgcggaaagtccaccgtggtgcaactgctggagcgcttctacgatccattggcaggaactgtgttcgtggacttcggctttcagcttttggacgggcaggaggcgaagaagctcaatgtgcagtggctgcgggcccagttgggcatcgtctcgcaagaacccatcctgttcgactgctcgattgccgaaaacatcgcgtacggcgacaattcgagggtcgtgtcacaggacgaaatcgtgtccgccgccaaggcagccaacatccacccgtttatcgaaacgctgcctcacaagtacgaaactcgcgttggagacaaaggtactcagctgagcggaggccaaaagcagcggatcgccatagcccgcgctctcatccgccaaccacagatcttgttgctggacgaggccacttccgcattggacaccgagtccgagaaggtggtgcaagaagccttggataaggcgagagaagggcggacttgcatcgttatcgcgcacaggctttcgactatccagaacgcagatctgattgtggtgtttcagaatggacgggtcaaggaacacggaactcatcagcagctcctggcacaaaagggaatttacttctcgatggtgagcgtgcaggccgggactcaaaacctg

SEQ ID NO: 7549 - DNA, 3858 bp, synthetic construct
  misc_feature 1..3858: note = source = /note="Description of Artificial Sequence: Synthetic coding sequence"
  source 1..3858: mol_type = other DNA
atggatctggaggcagccaaaaacggcaccgcctggagacccaccagtgcagaaggggattttgagctgggaatcagtagcaaacagaagaggaagaagaccaaaactgtcaagatgattggggtgctgaccctgtttcggtattctgactggcaggacaaactttttatgtctctcggtacaatcatggccatcgcccatggcagcggcctgcctttgatgatgattgtgtttggcgaaatgactgacaaatttgttgacaccgctggaaacttctcttttcctgtgaatttctcactgtcattgctgaatcccggcaagatcctcgaagaggaaatgactcggtacgcctattactatagcgggctgggcgcaggcgtgcttgtggccgcatatatccaggtgtcattctggacactggccgccggccgacagattcggaagattaggcaaaagtttttccacgcaatcctcagacaagaaatcgggtggtttgatatcaatgataccaccgagctgaacactcggctgacagatgatatttctaagatttctgagggcatcggagacaaggtcgggatgtttttccaggccgtcgctaccttttttgctggattcatcgtcggctttatccgcggctggaagctgacgttggtgatcatggcgattagccctatcctcggcctgtccgccgccgtttgggcaaagattctgagtgcattttccgataaagaactcgccgcttatgccaaggctggggctgtcgccgaagaagcacttggagcaataagaacagtgattgcattcggtggtcaaaataaggagctggaacggtaccagaagcacctcgaaaacgccaaggagatcggcatcaaaaaggccatatctgcaaatattagcatggggatcgccttcctgctgatttacgcttcctacgcactggccttttggtatggaagcacactggtgatctccaaggaatatacgattggtaacgccatgaccgtcttctttagcatactgattggcgcgttctctgtaggacaggccgcgccatgcattgatgcattcgccaacgcccggggggcagcatacgttatattcgacatcatcgacaacaacccgaagatcgacagctttagtgagaggggtcacaaaccagattctataaaaggtaatcttgagtttaacgatgttcatttcagttaccccagccgagcgaacgtgaaaattcttaaagggcttaatctgaaggtccaatcaggacagacggtggcccttgtcgggtcctcaggatgcggcaaatctactaccgtccagcttatacagaggctctacgatcctgatgaaggtacgattaatatagatggccaggacattaggaattttaatgtgaattacctgagggaaatcatcggagtggtgtctcaagagcccgtgcttttctccaccactatcgcggagaacatttgttatgggagaggcaacgttaccatggatgagataaaaaaggccgtcaaggaagctaatgcgtatgagttcataatgaagctcccacagaagtttgatacactggtcggagagcgaggcgcacagctttcaggtggacagaaacagaggattgccatcgcacgagcgctggtcaggaaccccaaaattctgcttctggacgaagccacgagtgctctggacactgagtccgaagcagaggtgcaggccgccctggataaggctcgagagggaagaacgactatcgtgatagctcaccgcctgtccaccgtcaggaacgcagacgtgattgctgggtttgaggacggagtcatcgtggaacaggggagtcattcagagctgatgaaaaaggagggagtgtacttcaaactcgtcaatatgcagacaagcggcagccagatccagtctgaagagtttgagttgaatgatgagaaagcggctacacggatggcccccaacgggtggaagagccggcttttccgccattctactcagaaaaacctgaagaattcacaaatgtgccagaagtctttggacgtggagaccgacggcttggaagctaacgttcctccagtctcctttctgaaggtgctgaagctgaataaaactgaatggccttactttgtggtaggcaccgtctgcgcgatcgccaacggcgggcttcagcccgctttctctgttatatttagcgaaatcatcgctatctttgggcctggcgatgatgccgttaaacagcagaaatgtaatatattttccctgatcttcctgttcctgggaattatttccttctttacattctttttgcagggattcaccttcggtaaggcaggcgagatccttaccaggcggttgcgaagcatggcattcaaggctatgctgcggcaagatatgagctggttcgatgaccataagaactcaacaggggcactgagcactcgcttggctacagacgcagcccaggtgcaaggcgctactggaactaggcttgcgctgattgcacagaatatcgccaatctcggaaccggcattattatcagcttcatctacgggtggcagctcacgctgttgcttctggcagttgttccaataattgccgtctctggaatcgtggagatgaaactcctggcaggtaatgctaaaagggataaaaaagagctggaagccgcaggaaagattgcaacagaggccatagaaaacattcggaccgttgtgtctctgacccaggagcggaagttcgagagtatgtacgtggaaaaattgtacggaccgtacagaaatagcgtgcagaaggcccatatttatgggataacgttttccatctctcaggccttcatgtacttcagttacgccggttgcttcagattcggcgcctacctcattgtaaacggtcacatgaggtttcgggacgtgattttggtgttcagtgcaatcgtgtttggcgcagtggcactgggacacgcttcctcttttgcacctgactacgcgaaggccaaactgagcgccgctcacctgttcatgctcttcgagcggcagccacttatagactcctacagcgaggagggactgaagcccgataagttcgaaggaaatattacgttcaacgaagtcgtgttcaattacccaaccagagcaaatgtgcccgtgctgcaggggctctctctggaagttaagaaaggacagacattggccctggtgggttcttccggatgtggtaaaagtaccgttgtacagttgctcgaaaggttttacgatcccctggccggcacggtgtttgttgattttggctttcagctgctcgatggacaagaggccaaaaagctgaatgtgcagtggttgcgggctcagctgggaatagtgtcacaggagcctatcttgttcgactgctctatagccgaaaatattgcctatggggacaacagccgcgttgtgagtcaagatgagattgttagcgcggccaaagccgctaacatccatccttttatcgaaaccctgccccacaagtacgagaccagggtaggagacaagggtacccagctctccggcgggcagaagcagcggatcgctatcgcaagagcactgattaggcagccccagattttgctgctggacgaggccacctctgcgttggatactgagtctgaaaaagttgttcaggaagccttggacaaagcacgggaggggcggacctgtattgtgattgctcacagactctccactattcaaaacgcagacctgattgtagttttccaaaacgggagggtcaaagagcacggtacccaccaacagctgctcgcgcaaaaaggcatttacttttctatggttagcgtgcaagccggtactcagaacttg

SEQ ID NO: 7550 - DNA, 3858 bp, synthetic construct
  misc_feature 1..3858: note = source = /note="Description of Artificial Sequence: Synthetic coding sequence"
  source 1..3858: mol_type = other DNA
atggatctggaggcagcaaagaacgggaccgcatggaggccaacctcagcagaaggtgattttgaacttgggatttcatccaagcagaagagaaaaaagaccaaaaccgtcaagatgatcggagtgctcaccctgttccgatactcggattggcaagacaagctgttcatgtcgctcggcacgatcatggctatagcacacgggagcggactgccacttatgatgatagtgtttggcgagatgactgataagtttgtcgacactgcaggcaactttagctttccagtcaatttctctcttagcctgcttaatcccggaaaaatccttgaggaagagatgactaggtacgcatactactactcaggcctcggcgcaggagtactggtagctgcttacatccaagtgtctttttggactctggcggccggacgccaaatccggaagatccggcaaaagttttttcatgctattctccgtcaggaaatagggtggtttgatatcaacgatacgaccgagcttaacaccagattgacggatgatatcagcaaaatctcggaaggaattggggataaggtcggaatgtttttccaagctgtcgcaaccttttttgcaggattcatagtgggatttatcaggggatggaagttgaccctcgtcatcatggccatttcaccaatactgggactttccgccgcggtttgggcaaagatactttctgccttctccgacaaggagctggcagcctacgcaaaggcgggtgccgtggcagaagaagcccttggtgctattcgcacggtgattgcctttgggggtcaaaacaaagaacttgaacgctaccaaaagcatcttgaaaacgcaaaggaaattggaatcaagaaggctatttccgcaaatatctcaatgggaatagccttccttcttatctacgcatcctacgctctggcgttttggtatggttcgaccctggtgatctcgaaagagtacactattggcaacgcaatgaccgtctttttctccattctgattggagcctttagcgtcggccaagccgcgccctgcattgacgcatttgcaaacgcaagaggagccgcctacgtgattttcgatatcattgacaataacccaaaaatcgattcgttttcagaaagaggtcataaacctgattccatcaaggggaacttggagtttaatgacgtgcatttctcatatccatcgcgggcaaacgtgaaaatccttaaaggccttaatctgaaggtccaatccgggcagactgtggccctcgtgggaagctccggctgcggcaagagcactaccgtgcagctgattcagcgtctctatgatccggacgaagggacgataaacatcgatggccaggatattagaaactttaacgtcaattacctgcgtgagattattggagtggtgtcccaggaaccggtgctgttttcgaccaccattgcggaaaacatttgttacggacgggggaacgtgactatggatgagattaagaaggcggttaaagaggccaatgcttacgagttcattatgaagctgccacagaaattcgacaccctggtgggcgaaagaggggcccaactgagtggaggccagaagcaacggatcgccattgcaagggcactggtgcggaacccaaagatactgttgctcgacgaagcaacctctgcactggatactgaatcggaagcagaggttcaggccgccctcgacaaggcacgtgaaggacgcactactattgtgattgcacaccgactgtccaccgtgagaaacgcagatgtgattgcaggctttgaagatggtgttattgtcgagcagggatcacattcggaactcatgaagaaagagggtgtctactttaagctcgtcaatatgcaaacctcgggatcacagatacaatcggaagaatttgagctgaacgacgaaaaagccgccacccgtatggcgcctaatgggtggaagtccagactgtttcgccactccactcaaaagaaccttaagaattcgcagatgtgccaaaagtcgctggacgtggagacggatggtctggaagcaaacgtccccccagtgtcgtttctgaaagtgcttaagctgaacaaaactgaatggccctactttgtcgtcgggactgtgtgtgccatcgcaaacggaggattgcaacccgcattctcggtgatctttagcgagattatcgccatattcgggccaggagatgatgcagtgaagcaacagaaatgtaatatcttctcactcattttcctctttttgggaattatctcgttctttaccttcttcctgcaaggattcaccttcggtaaagccggcgaaatccttactcgacgcctgaggtcgatggcctttaaggccatgcttcgtcaggatatgagctggtttgatgaccataagaattctactggagcgctttccaccaggctggcaacggatgcggcccaagtccaaggagcaacgggaaccagactggcacttattgcacagaatatagctaacctgggcaccggaatcataatcagtttcatttacggctggcaacttaccctgctcctgttggcggtggtgcctatcattgcagtgtcaggtatcgttgaaatgaagttgcttgcggggaatgcaaaaagagacaagaaagagctcgaagcggccggcaagattgcaactgaagcaatcgagaacatccggaccgtggtgtctctgactcaggaacggaagtttgagtcgatgtatgtggagaagctgtacggaccataccggaactcggtccaaaaggcacatatctacggtatcactttttcaattagccaagcatttatgtacttttcttacgcagggtgtttcaggttcggtgcataccttattgtgaacgggcacatgaggtttcgggatgtgatccttgtgttcagcgcaattgtgttcggagcagtggcgctgggccatgcatcatcatttgcacctgattacgcaaaagccaagctgtcggctgcacaccttttcatgctgttcgaacgccaacctcttattgactcctattcggaggaggggctgaaacccgacaaattcgagggcaatatcacttttaacgaagtggtgtttaactacccaaccagagcgaatgtgccagtgcttcagggtctttccttggaggtgaagaagggtcagactctggccctggtcggatcgagcggttgtggtaagagcaccgtggttcagctgctcgaacggttttacgatcctctcgccggaacggtctttgtggattttggatttcaactcctcgatggacaagaagctaagaagctcaatgtacaatggctccgggcacaattgggaattgtttcacaggagcctattctgttcgactgttcaattgctgagaacattgcttacggagacaactccagggtcgtctcccaggatgagatcgtcagcgcggcaaaggcggccaatattcatccgttcatcgaaactctcccacacaagtacgaaactagggtcggagataagggcactcaactctccggaggacagaagcagcggattgccatcgccagggcgctgattcgacaacctcaaatacttctgcttgacgaggcaacctcagcacttgataccgaatcggaaaaagtggtgcaagaagcactcgataaggcccgggagggtagaacttgcattgtgatagcgcatcgtctttcgactattcagaacgcagatctgatcgtggtatttcagaacggccgggtgaaagagcacggcactcatcagcaactgcttgcgcagaaaggtatttacttctcgatggtcagtgtgcaggcaggtacccaaaatctc

SEQ ID NO: 7551 - DNA, 3858 bp, synthetic construct
  misc_feature 1..3858: note = source = /note="Description of Artificial Sequence: Synthetic coding sequence"
  source 1..3858: mol_type = other DNA
atggacctcgaagccgccaagaatgggacggcatggcgtcctacttccgcagaaggcgattttgagctagggatctcctctaaacagaaacgcaaaaaaaccaagacggttaaaatgattggcgtattgaccttattccgatatagtgattggcaggataaactttttatgtctctggggaccattatggccatcgcccatggttctggtctacccctgatgatgattgttttcggagagatgacagacaaattcgtggacacggcgggaaatttcagctttcctgtcaacttctctttgtccttgctaaacccaggcaaaatcttagaggaagaaatgaccagatatgcctactactattctggattgggggccggggtccttgttgcggcctatatccaggtatcattttggacacttgccgccggccgacagatccgcaagatccggcagaaattttttcatgccatcctgaggcaggaaataggctggtttgacatcaatgataccacagaattaaatacacgcttgaccgatgacatctctaagatatcagagggaattggagacaaggtggggatgttttttcaagcagttgcaacattcttcgccggctttatcgttggtttcatccgtggttggaaactcactctggtcatcatggctatttcacccattctcggcctgtccgccgccgtgtgggccaaaatcctttctgcattcagcgataaagaactggctgcttacgccaaagccggcgcagtggctgaggaggctctcggggccattcgaaccgtgatagcatttggcgggcagaataaggaattggagaggtaccagaagcacctggagaatgcaaaggaaataggtatcaagaaagccatttccgctaacatttcgatgggcattgccttcctgcttatttatgcatcatacgccctcgctttttggtatggcagcactcttgtgatatcaaaggagtacacaatcggcaacgccatgacagtctttttttctatactgataggtgctttttccgtaggtcaggcagcaccgtgcatcgacgcattcgcaaacgcaaggggagcagcctatgtaatttttgatataattgataacaacccgaaaatcgattcctttagcgaaagaggtcacaaacccgattctataaagggtaacctagagtttaacgacgtgcatttttcataccccagcagagcgaacgtcaagatactcaagggcttaaaccttaaagtccagtcaggacagaccgtagccctggtaggcagttccggctgcggaaagagcacaactgtccagttgattcaaagactgtatgacccagatgagggtacaattaacattgatgggcaggacatccgcaactttaatgtgaattatctgcgcgaaatcataggagttgtgagccaagagccagtattgtttagcactacgatcgccgaaaacatctgttatgggagaggaaatgtgacaatggatgagatcaagaaggcggtcaaagaggccaacgcttacgaattcataatgaagttgcctcagaagttcgacacccttgttggggagcggggtgctcagttgagtggaggccaaaagcaaagaatagccatagccagagccctggtgcggaatcccaaaatcctactcctggacgaagcgactagtgctctggacacagaaagtgaggcagaagtccaggccgcgctagataaggcaagagaaggccgcacaaccatcgtgatagcccacaggttgtccaccgtgcgcaacgcggacgtgatcgctgggttcgaggacggcgttattgtcgaacagggtagccactctgagcttatgaagaaggaaggagtctatttcaagctcgtgaacatgcaaacatctggaagccagatacagtcggaagagtttgagctgaatgacgaaaaagcggctaccaggatggccccgaatggttggaagtcccggctcttcagacacagcactcaaaagaatcttaagaattcacagatgtgccagaagagtctagacgtggagacggacgggctggaagctaatgttcccccggtctcttttctcaaggtactgaagctcaacaaaacagaatggccatattttgtcgtcggtacagtttgcgctatagccaacgggggcttgcagccagccttctccgtcatctttagtgagataatcgctattttcggaccaggggatgacgccgtgaaacagcagaaatgtaatattttctcactgatctttctcttccttggaataatttccttctttacctttttcctacagggtttcaccttcgggaaggcaggggagattctgaccagaagactacggtccatggccttcaaggccatgctgaggcaggacatgagctggttcgacgaccacaaaaattcgacgggcgcgctcagtacacgattagccacagatgcagcacaagtacagggagcaacaggcacacgactcgctttgatcgcacaaaacatcgccaacctcggcacggggatcatcataagcttcatatacggatggcagctgacacttctgctcctggctgtggtgccaatcatcgcagtttccggcattgttgagatgaagctgctggccggaaacgccaaacgggataagaaggaattggaagcagcaggaaagattgccacagaggctattgagaatatcagaactgtcgtctcgttgacacaagagcggaagtttgagagtatgtacgtggaaaagttgtatggtccttatcgaaatagcgttcagaaagctcacatatacggcatcacattttctatctctcaggcgttcatgtatttcagttatgctggctgcttcagattcggcgcttacctcattgtaaacgggcacatgcggttcagggacgtgattctggtgttttctgctattgtgttcggtgccgtcgccctgggtcacgcctcatcattcgcccccgactacgcaaaggcaaagctgtcggccgcacatctgttcatgttatttgagagacagccactgatcgactcttactctgaggagggcctcaaaccagataagtttgagggtaacattacttttaatgaggtggtatttaactaccccacacgtgcaaacgtgcccgtcttacagggtctctcactggaagtcaaaaagggacagactcttgcccttgtgggtagctcaggctgtggcaagagtaccgtagttcagctgctagagcggttttacgacccgctggcgggaactgtcttcgtcgatttcgggttccaactcttagatggccaagaagcaaagaagctcaatgtgcagtggctgcgagcccagctggggatagtatctcaggaacctatcttgttcgattgtagcattgctgaaaacatcgcttacggcgacaattcaagggtggtatctcaggacgagatcgtgtccgccgccaaggctgcaaacatacacccttttatcgagaccctgccgcacaaatacgagactcgtgtgggcgataagggaacgcagctttctggtgggcagaagcagcgcattgcaatagcccgggccttgatccgacaacctcagatcctcctgttggatgaggcaacgtcagctctagatacggagagcgaaaaagtggttcaggaggccctagataaagcccgcgagggacgcacatgcatcgttatcgcccatcgattaagcactatccagaacgctgatctcatcgtcgtgttccaaaatggacgcgtcaaggagcacgggacacaccagcagttgcttgcacagaaaggcatctacttcagcatggtgtcagtgcaggcagggacacagaacctc

SEQ ID NO: 7552 - DNA, 3858 bp, synthetic construct; identical to SEQ ID NO: 7508
  misc_feature 1..3858: note = source = /note="Description of Artificial Sequence: Synthetic coding sequence"
  source 1..3858: mol_type = other DNA

SEQ ID NO: 7553 - DNA, 3858 bp, synthetic construct
  misc_feature 1..3858: note = source = /note="Description of Artificial Sequence: Synthetic coding sequence"
  source 1..3858: mol_type = other DNA
atggatctcgaggcggccaagaatggaacggcttggaggccgacttccgccgaaggggactttgagctaggcatctctagcaagcaaaaacgcaaaaagactaagaccgttaaaatgataggggtgctcacactgttccgatactccgattggcaggacaaactgttcatgtccctggggaccattatggccatcgcccacggttcagggctgccgctcatgatgattgtattcggggagatgaccgataaatttgtggacacggcaggaaacttttcgttccctgtcaactttagcctttctctgctgaatccagggaaaattctcgaggaggagatgacgcggtacgcttattactatagcgggctgggcgctggcgtccttgttgcggcctacattcaggtgtccttctggactctagcagccggtaggcagattcgcaagatccgccagaagttcttccatgcaatcttgcgacaggagataggatggttcgacataaacgacaccaccgagctgaatacacgtctaacagacgacatctccaagatttctgaaggcatcggcgataaagtggggatgttctttcaggccgtggcaacctttttcgctgggtttatcgtgggcttcatcagggggtggaagctcaccctggtaattatggcaatctcaccaatccttgggttgtccgctgccgtgtgggccaaaatcctctcagcattctctgacaaggagctggccgcctacgcaaaagccggcgcggttgccgaggaagcccttggagcgattcgcaccgtgattgccttcggtggccaaaataaggagttggaaaggtaccagaagcatctggaaaacgcaaaggaaatcggaatcaagaaggccatctctgccaacatcagtatgggcattgcttttctactgatatacgcctcatacgcactggctttctggtacgggagtacactggtgatctctaaggaatacactataggcaatgcaatgacggtctttttttccatccttattggagccttctctgtgggtcaggccgccccatgcattgatgctttcgcgaatgccagaggagcggcatacgtcatctttgatattatcgacaataatcctaagattgacagcttctccgaacgaggccacaaaccagattccatcaaggggaatttggagtttaatgatgtgcacttctcttatcctagcagagccaacgtaaagattctcaagggactcaacctgaaggtgcagagcgggcagacggtcgctttagtcggctcgtcaggatgcggaaaatcaacaacagtccagctgattcagcggctgtacgaccctgatgaaggaactattaatatcgacggacaggatatccggaactttaatgtcaattacctcagagagattatcggggtagtttcccaggaacccgtgctgtttagcacgactattgctgaaaacatttgttatggaagaggaaacgtcaccatggatgagatcaagaaagccgtgaaagaagccaacgcatacgagttcatcatgaagttgccccagaaatttgatacactggtgggggagaggggcgctcagctctccggaggccagaaacagcgaatagctatcgcccgtgcattagtgaggaaccctaaaatcctgttattggacgaggccactagcgccctggataccgaatcagaggccgaagtgcaggccgcgctggataaagcccgtgagggacgcacgacaatcgtcattgcgcataggctgtccaccgtgcggaatgctgacgtgatcgccgggtttgaggatggcgtgatagtagaacaagggtcacactccgaactaatgaagaaggagggcgtgtacttcaaactggtaaacatgcagacttccggctctcagatccagtccgaggagtttgagctaaatgacgagaaggcagctaccaggatggctcccaacggctggaagtccaggctttttcggcacagcacccagaagaacctcaagaattcgcagatgtgtcagaagtctctggatgtcgagaccgatggactggaagcaaacgtgcctcctgtcagcttcctgaaagtgctcaagcttaacaagactgaatggccatattttgtggttggcactgtgtgtgccattgctaatggtggcctgcaaccggccttcagcgtcatattctcagagatcatagcaatattcggtcccggagacgatgcagtgaaacagcagaagtgcaatatcttcagcttaatctttctttttctgggaataatctctttctttactttcttcctgcagggattcacctttgggaaggctggcgaaatcctcacccgacgcttgcgttccatggcctttaaggctatgcttagacaggacatgtcatggtttgatgaccacaagaatagtaccggcgcattgagcactagattggcgacggacgcagctcaggttcagggggccaccggcacccggttggcactgatcgctcagaatattgccaacctgggtaccggcatcattattagcttcatctatggctggcagctgactctccttcttttagctgtagtcccaattatcgcagtcagcggcattgtggaaatgaaactactcgctggaaacgcaaagagggataaaaaggaattagaagccgctgggaaaatcgcgaccgaggccattgagaacattcgcacagtggtgagtctgacccaggaacgaaagtttgaatccatgtacgtcgaaaagctctatggcccttacaggaactccgtgcagaaagctcacatttacggaataacattctccatttctcaggcattcatgtacttcagttacgccggatgtttccggttcggagcttatctaatcgtaaatggccatatgcgcttcagggatgtaattctggtgtttagtgccattgtctttggagccgtggccttgggccacgcctcttcattcgcccctgattacgccaaagctaagttgagtgcggcccacctatttatgctgttcgaaagacagccactgattgatagctactccgaagagggccttaagccggataagttcgaagggaacattacgttcaacgaagttgtatttaactacccaactcgtgccaacgtgccagtgctgcagggcttaagtctggaggtcaagaaagggcagacgcttgcactggtcgggagtagtggctgcggaaagtctaccgtggttcaactgctggaacggttctatgatccattagcgggaacggtgttcgtggatttcgggtttcagctgctggacgggcaagaggccaaaaaactgaatgtgcagtggctgagagctcagctggggatcgtctctcaggagcccattctttttgattgcagtatagcagaaaatattgcatatggggacaatagtcgtgtcgtttcccaggacgaaattgtgagcgctgccaaagcagccaacattcatcctttcatcgaaaccttgccgcacaagtatgagacacgggtgggcgacaagggcacgcagttgagtggcgggcagaagcagagaatcgccatcgcccgggcgttaattaggcaaccccagattctgttgctggacgaggctacctccgctttggatacggaatccgaaaaggttgtccaggaagccctggataaagctcgggaaggcagaacttgcattgtcattgctcataggctgagtacgatccagaatgcagatctcattgtggtcttccagaatggcagagtcaaagagcacggcacacaccaacagctgctggcccagaaggggatttacttctctatggttagcgtgcaggccgggacgcagaacctg

SEQ ID NO: 7554 - DNA, 3858 bp, synthetic construct
  misc_feature 1..3858: note = source = /note="Description of Artificial Sequence: Synthetic coding sequence"
  source 1..3858: mol_type = other DNA
atggacctcgaggccgccaaaaacgggactgcatggcgcccaaccagcgccgaaggagattttgaactcggcattagcagcaagcaaaaacgcaaaaagacaaagaccgtaaaaatgataggcgtgctcaccctgttcaggtactctgactggcaggataagctgttcatgtctctcgggactattatggccatcgcacatggtagcggactgcccttgatgatgattgtcttcggcgaaatgactgataagttcgtcgacacggcgggaaacttcagtttcccagtgaatttttctttgagtctgctgaatcctggcaaaatcctcgaggaagagatgacgcgatacgcctactactacagtggactgggagcaggagtgctcgtcgccgcgtatattcaggtttctttttggactctggccgctgggcgccagatcagaaagattaggcagaagttttttcacgcgattctgaggcaggagatcgggtggttcgatatcaacgataccacagaactgaatactcggctgaccgatgacatcagtaagatttccgagggcatcggggataaggttggcatgttctttcaggcggtggccacctttttcgccgggttcattgtcggcttcattcgagggtggaaattgacattggttattatggccattagtcccatcctgggtctctccgccgctgtctgggctaaaattcttagtgccttttcagataaagagctcgccgcctacgctaaggccggagctgtggcagaagaggccctcggcgccattagaaccgtgatcgcattcggtgggcagaataaggaactcgaacgctaccaaaaacacttggagaacgctaaagaaattggaatcaagaaagcgattagcgctaatattagcatgggcattgccttcctgcttatctacgccagttacgcgctggccttttggtatggtagtacacttgtgatcagcaaggaatacactattggaaacgcaatgaccgtgttcttttcaattttgatcggtgcgttctccgtgggtcaagccgccccgtgcattgacgccttcgccaacgcaagaggggctgcttacgtaatattcgacattatcgataataatcccaaaatagactcattctcagagcgcggccacaaacccgattcaattaagggcaacctggagttcaatgacgtgcatttctcctacccctctcgggccaacgtgaagatccttaaaggactcaatctgaaggtgcagagcgggcagaccgtcgcgctggtgggaagcagcgggtgcggtaagagcacgaccgtccagctgattcagagactgtacgatccggacgaggggaccattaacattgacggccaggacataagaaatttcaacgtgaactatctgagagagatcattggcgtggtcagccaggagcccgtgcttttttccacgactattgcagagaacatctgctatggacggggcaatgtcaccatggatgaaataaagaaggcagtcaaagaggccaacgcatacgagtttataatgaagttgccgcagaagttcgacacgcttgtcggggagcggggcgcccagctgagtggtggccagaaacagcggatcgccatcgcaagagccctcgttagaaacccgaagattctcctgttggacgaagcaacttccgctctggacacggagagtgaggcagaggtgcaggctgcgctggataaagcgcgggaaggacgcactactatagtaattgcacataggcttagtacggttaggaatgctgatgttatcgcgggatttgaggatggcgtgatagtggaacagggtagtcattccgagttgatgaagaaggagggagtgtacttcaagcttgtgaacatgcagacgtcaggatcccagatccagagcgaggaattcgaactgaacgatgaaaaggccgctacccggatggctcctaatggatggaaaagccgcctgttccgccacagcacccagaagaatctcaaaaattcccagatgtgtcagaagtctcttgatgtggagactgacggcctggaagcaaacgtcccaccggtatctttcctgaaggtactcaagctgaacaagaccgaatggccctatttcgtcgtgggaacagtgtgcgcaatcgctaacggaggtctgcagcctgctttctccgttatcttttctgaaatcattgctattttcggacctggagacgatgcagttaaacagcaaaaatgtaacatctttagtctgatatttctctttctgggaataatctcttttttcactttttttctgcagggcttcacattcggaaaggccggcgagattttgacgcgaaggctccgaagcatggctttcaaggccatgttgagacaagacatgagctggttcgatgatcacaagaatagcaccggtgcccttagcacccgcctggccacagatgctgcgcaggtgcaaggcgcgacagggacccggttggccctcattgcccagaatatagccaacttgggaacaggtatcatcatctcctttatctacgggtggcaactgacccttctcctgctggccgtcgtccctattatagctgtgtccgggattgttgagatgaagcttttggctggcaatgctaagagagataaaaaggaactggaggctgccggaaaaatcgctacagaagccattgagaacatccggactgtcgtgagtcttacgcaggaacgcaagttcgagtcaatgtatgtggagaagctttacggcccttataggaattccgtccagaaggcccacatttacggcattacctttagcatttctcaggcattcatgtatttcagttatgccggctgctttcggtttggggcatacctcatcgtgaacggtcacatgaggttcagagatgtgatcctggtcttcagcgcaatcgttttcggcgctgtggcactggggcatgcttcaagtttcgctcctgactacgcaaaggccaaactgagcgccgctcacctcttcatgcttttcgagcggcagcctctgatcgatagttatagcgaggagggactgaaacccgacaagttcgaggggaacatcactttcaatgaagtggtctttaattatccaaccagagctaatgtgcctgtgctccagggactcagtctcgaagtgaagaaggggcagactctggccttggtaggcagctccggttgcggcaaaagtaccgtggttcagctcctggaacggttctacgaccctcttgccggtaccgtctttgtcgacttcgggttccaacttctggacggtcaggaggccaaaaagttgaatgttcagtggcttcgagcacagctgggcatcgtcagtcaggaacccattttgttcgattgtagcatcgccgaaaacattgcctatggcgataactctagggtggttagccaggacgagatagtctcagcagcgaaggccgccaacattcatcccttcatagaaacactccctcataagtacgaaactagggtgggcgataaaggaacccagctttctgggggccagaagcagaggattgcgatcgcaagggccctgattcgccagccccaaattttgctcctcgatgaggctacgtcagcgctggatacagagtctgagaaggttgtgcaagaggccctcgataaagcccgcgagggtagaacatgcattgtaattgcccaccgcctcagcacaattcagaatgcagacttgatagtcgtgttccagaatggccgagtcaaagaacacggaacccaccagcaactcctggcacagaaaggcatctatttctctatggtttccgttcaggccggtacccagaatttg

SEQ ID NO: 7555 - DNA, 3858 bp, synthetic construct
  misc_feature 1..3858: note = source = /note="Description of Artificial Sequence: Synthetic coding sequence"
  source 1..3858: mol_type = other DNA
atggaccttgaggcagccaaaaacggaaccgcatggcgtcccacgtcggcagaaggcgatttcgaacttggtatttccagtaaacaaaaacgcaaaaagaccaagaccgtgaagatgattggtgtattgactctgttccgatactcggactggcaagacaagctgttcatgtcactcggcactataatggccatcgcgcacggcagcggcctgccacttatgatgattgtgtttggcgagatgactgataagtttgtggacactgcaggaaatttcagctttcctgtgaacttttccctttccctccttaatcccgggaaaatactggaagaggagatgaccagatacgcatactactactccggactcggagctggagtgcttgtggcagcatacattcaagtctctttctggactctcgccgcaggacgtcaaattagaaagattcgacagaaattcttccatgctattttgaggcaagagattggatggttcgatatcaacgacaccaccgaactgaatactcgcctgaccgatgatatctctaaaatctcagaaggcatcggagataaggtcggcatgttttttcaggcggtggcaacctttttcgcaggttttatcgtgggattcatacgaggatggaaactcacccttgtgattatggccatatcccctatacttggactttcggcagcggtgtgggccaagatcctgtctgctttctcggataaggaacttgccgcatatgcaaaggccggtgcggtcgcagaagaggcgcttggggcaattagaacggtcatagcctttggaggtcagaacaaggagctggaacggtaccaaaagcatttggaaaatgccaaggaaattggaatcaaaaaggctatttccgcaaatatctcgatgggaatcgcctttcttctcatatacgcaagctacgcacttgcattttggtacggatcaactctggtcatttcgaaggagtacaccataggcaatgctatgacggtgtttttctcaattctcataggggcgttctccgtcgggcaagccgcaccttgtattgatgcatttgccaacgctcgtggagcagcgtacgtgatctttgatatcattgacaacaatcctaaaatcgactcgttttccgagcggggtcataaacctgatagcatcaagggaaaccttgagtttaatgacgtccatttctcctacccttcccgcgcgaacgttaagattttgaagggactgaacctcaaggtgcaatcaggacaaactgtcgctctggtgggatcgtcgggttgtggaaagagcaccacggtgcaactgattcaaaggctgtacgatccagatgaagggactataaacattgatggacaggacattcgcaactttaatgtgaactaccttcgagagatcattggggtcgtgagccaagaaccagtattgtttagtactaccattgccgagaacatctgctatgggcgcggtaatgttaccatggatgagatcaagaaggcagtgaaagaagcaaatgcctacgagttcatcatgaaactgccgcagaagtttgacactcttgttggtgaaagaggtgcacaacttagtggagggcagaagcaaaggatcgcaatcgcaagagctctggtgagaaaccctaagattctcttgcttgatgaggctacctccgccctggacactgagtccgaagcggaagtccaagcagcactcgataaggcacgagaaggtagaactaccattgtcattgcccataggctgagcactgtgcggaacgcagacgtgattgctggttttgaagatggagtaatcgtggaacaggggtcacatagcgagcttatgaaaaaggaaggagtgtactttaaacttgtcaatatgcagaccagtgggtcacaaattcaatccgaggaatttgagctgaacgacgaaaaggcggcaacgagaatggcccctaacggatggaagagcagactctttcgccactccacccagaagaatctcaagaattcgcaaatgtgtcaaaagagcctggacgtggaaaccgacggattggaagccaacgtaccacctgtgagctttctcaaagtgctgaagctgaacaagaccgagtggccgtactttgtcgtgggaaccgtgtgcgcaatagcaaacgggggacttcagccagcattcagcgtgattttctcagagattatagccatcttcggccccggagacgacgcggtgaagcagcaaaagtgcaacattttcagccttatctttctctttctgggtatcatatcgtttttcactttctttctgcaaggatttacctttggtaaggccggagaaattcttactaggcggttgagatccatggcgtttaaagcaatgttgagacaggatatgtcgtggttcgatgaccataagaactcaacgggtgcactgtcaacgcggctggctaccgacgcggcacaagtgcaaggcgctaccgggacccgactcgcactgattgcacagaatattgctaaccttggcactggaattatcattagcttcatttacggatggcaactgaccctccttctgctcgcagtggtccctattatcgcagttagcggtatcgtcgagatgaaacttctggcaggtaacgctaagagagacaaaaaagagcttgaagcggctggtaaaatcgcaaccgaggccatagaaaacattcgcactgtcgtctcactcacccaggaaaggaagtttgaatcgatgtacgtggaaaaactctacggtccataccggaattcagtgcaaaaggcacatatctatggaatcaccttttcgatctcgcaggcatttatgtacttttcgtacgcaggatgttttcgctttggtgcatacctgattgtgaacgggcacatgcgctttcgggatgtgattcttgtttttagtgcaatcgtgtttggggccgtggcactggggcacgcatcttcgttcgctcctgattacgcaaaggccaagctgtccgccgcacatcttttcatgctcttcgaaaggcaaccgctgatagattcatactccgaagaagggctgaagccagataagttcgaaggaaatatcaccttcaacgaggtcgtctttaactacccaactcgcgccaacgtgccagtgctccaaggcctgtcccttgaagtgaagaaaggccaaactcttgcgttggtgggcagctcaggctgcgggaaatctactgttgtgcaactgctggaaaggttttacgatccccttgcaggtaccgtctttgtggattttggttttcagctgctcgatggacaggaggcgaagaagctcaacgtgcagtggctgcgggcacagcttggtatagtgtcccaggaacccattctgttcgattgttcgatcgctgagaacattgcgtacggagataattccagagtcgtgtcccaggatgaaattgtgtcggcagcgaaggccgccaatattcacccttttatcgaaactctcccacataagtacgaaacgcgggtgggcgataagggcacccagctctccggtgggcaaaagcagagaatcgcaattgcacgcgcactgatccgtcagccccaaatactgctcctggacgaagcaacctcggcccttgatactgaatccgaaaaagtcgtacaggaggcccttgataaggcccgtgaaggtcggacttgtattgtgatcgcccatagactctccacgattcagaacgcagatcttatcgtggtgtttcagaatgggcgtgtcaaggaacacggaacccaccaacagctgcttgcgcaaaaaggaatctatttctctatggtgtcggtgcaagcgggcactcagaacctc

SEQ ID NO: 7556 - DNA, 3858 bp, synthetic construct
  misc_feature 1..3858: note = source = /note="Description of Artificial Sequence: Synthetic coding sequence"
  source 1..3858: mol_type = other DNA
atggatctggaagcggccaaaaatgggacagcttggcggcctacatccgccgaaggagacttcgaactcgggattagttcaaaacagaaaaggaaaaaaacaaaaactgttaaaatgataggagtattaactctatttcgatattctgattggcaggataagttattcatgtctttaggaacaataatggcaatcgcccatgggtccggacttcccctaatgatgatcgtatttggagagatgactgataagttcgtggatacagccggaaacttttctttccccgtgaacttttcactcagtctgctcaatccagggaaaatcttggaagaggagatgacaagatacgcttattactattcagggctaggggctggagtgcttgtggccgcctacatccaggtcagtttctggacactggccgctggaaggcagatcagaaaaataaggcagaaattcttccacgccatactgcggcaggagatagggtggtttgatataaacgatactactgagctaaatactcggcttacagatgatatatccaaaatctcggaagggatcggggataaggtagggatgttctttcaggctgtagcaactttcttcgctggattcatagtggggtttatcagggggtggaaactcactctagtcataatggcaatctctcccatcctaggactatctgccgcagtgtgggctaagatcttgagtgcattctccgataaagaacttgctgcctacgcaaaagccggggcagttgcagaagaagccttaggagccatcaggactgtgattgctttcgggggacagaataaagagctggagagatatcagaaacatctagaaaatgcgaaagaaatcgggatcaaaaaagccataagtgccaatatctccatgggaatagcgttcctcttaatatatgcatcttatgcactagcattctggtacgggtccactcttgtaatctcaaaagaatatacaattgggaacgcaatgactgtgtttttttccattctgatcggagcattctcggttgggcaggccgcaccctgtatcgatgcctttgccaatgcaagaggggctgcttacgttatttttgacattattgataacaaccctaaaattgatagtttcagtgagcgcggacacaaacctgatagtataaaaggaaacttggaattcaatgatgtacatttctcttatccttctcgagcaaatgtaaaaatcctaaaaggactcaatttgaaagtccagagtgggcagacagtcgctttggtaggaagttccggatgcggaaagagtacaacagtacagctcatccagcggctctatgatcccgatgaaggaactataaacatagacgggcaggatattcgaaacttcaatgtgaattatctcagggaaattataggagtcgtgtcacaggaacccgtcctcttttctacaacaatcgctgaaaacatttgttatggacgagggaatgtgacaatggacgagatcaaaaaggccgtgaaagaagctaacgcctatgaattcattatgaaactgccacagaaattcgatacactcgtcggggaaaggggggcccagctgtcaggagggcagaaacagcggatcgctatcgcacgggctctagtcaggaaccccaaaattcttcttttagatgaagccacttccgccctggatactgaatcagaggccgaagtacaggccgctcttgataaagcccgcgaaggaaggacaacaattgtgatagcccacaggctttccactgtgcgcaatgcagatgttatagctggatttgaagatggggtgatcgtggagcagggatctcattccgaactcatgaaaaaggaaggagtgtacttcaaattggtcaacatgcagacatcaggatctcaaatccagtccgaagagttcgaactaaatgacgaaaaggcagcaacacggatggctcccaacgggtggaaatctaggctgtttcgccattcgactcagaagaacttgaaaaatagtcagatgtgtcagaaatcactcgatgttgaaacagatgggcttgaagccaatgtgcccccagtctctttcctcaaggttttaaaactaaacaaaactgaatggccttattttgtggtcgggactgtgtgtgcaattgctaatggggggctgcagcccgcattcagtgttatattctctgaaattattgccatcttcggaccaggagatgatgcagtgaaacagcagaaatgtaacattttttcgctgatctttctgtttctgggaataatctcttttttcacgttttttctgcagggattcacttttggaaaagctggagaaattctcactcggagacttcgaagtatggcatttaaagccatgctcagacaggacatgtcgtggtttgatgatcataaaaattccacaggggcactatctactagactggccacagatgccgctcaggttcagggagcaactgggactcggttagccctcattgcccagaacatagcaaacttaggaacagggattatcatctcttttatatacggatggcagcttactctgctactactggcagtcgtccccattatcgccgtgtccgggatagtggagatgaagttactggctggaaatgcaaagcgagataaaaaagaactagaggctgctggaaaaatagcaacagaagctatcgaaaacatcaggacagtggtctcactaactcaggaaaggaaatttgaatccatgtatgttgagaaactttacggaccctatagaaacagtgtgcagaaagcacacatttatggaatcacattttcaataagtcaggcctttatgtattttagttatgcggggtgcttcagattcggagcttatctgatagttaacgggcacatgaggtttagagatgttatactcgtattttctgcaatcgtgttcggagccgtggccttagggcacgcttcttcgtttgcccctgactacgctaaagcgaagctctcagcagctcatttgttcatgttatttgaaaggcagcctctcattgattcttattctgaagaggggctcaaacccgataaattcgaaggaaacatcacattcaacgaggttgtgtttaattatcctacacgagctaacgtgcctgtgctacaggggctctctctcgaagtgaagaagggacagacactggccctcgtcgggtcgtccgggtgtgggaaatctacagtagtgcagctcctagagagattttatgacccactagctggaacagtttttgtggattttgggtttcagttactcgatggacaggaagctaaaaaactcaatgttcaatggctacgcgcccaactgggaatagtgagtcaggaaccgatattgtttgattgcagtatcgccgaaaacattgcatatggggataattctagggtggtgtcccaggatgagatcgtgtctgctgccaaagctgccaacatacatcccttcattgaaactcttccacataaatatgagacaagagtaggagataaaggaactcagctgtcaggagggcagaaacagcgcatagctatcgcacgggcactaatacggcagccccagatactactgctggacgaggccacgtcggctctcgatacagaatctgaaaaggtagttcaggaagccctcgataaagcccgcgaagggagaacttgcatcgtgatagcgcaccgcctttcaactattcagaatgctgatttgatagttgtttttcagaatggaagggtgaaagagcatggaacacatcagcagttattggctcagaaagggatatacttttctatggtgtcagtgcaggcaggaacacagaacctc

SEQ ID NO: 7557 - DNA, 3858 bp, synthetic construct
  misc_feature 1..3858: note = source = /note="Description of Artificial Sequence: Synthetic coding sequence"
  source 1..3858: mol_type = other DNA
atggatctcgaggccgctaaaaatggaactgcgtggcgacctacaagcgcggagggagacttcgaactgggcatctcaagcaaacagaagagaaaaaagaccaaaaccgtgaagatgattggagttctgactctttttcgctatagcgactggcaagacaaactctttatgtccctgggcaccatcatggctatcgcccatggttccggcctgccactgatgatgatcgtgttcggggagatgaccgacaagttcgtggataccgcgggcaacttcagtttccctgtcaatttttcccttagcctgcttaatccggggaagattcttgaagaggagatgacacggtacgcatactattactcagggttgggagcaggcgtactcgtggctgcatacatacaggtaagcttttggacgctggcagccgggcgccagatacgcaaaattcgccaaaaattttttcatgccatcctcagacaggagataggctggttcgacattaatgacacgacagaactgaacacacgactgactgacgacattagcaagatcagtgagggcatcggcgataaggttggtatgttttttcaggcagtggcaacctttttcgcaggtttcattgttggttttatccgcgggtggaagctcacccttgttatcatggccatctctcctattttaggcctcagtgctgccgtttgggccaagatcctgagtgccttctccgataaagaactggctgcctacgccaaagctggcgcagtggccgaagaggccctcggcgcaatccggacagtgatagcctttggaggccagaacaaggaactcgaaagataccagaaacatctggagaacgccaaggaaattgggattaagaaggctatttccgccaacattagcatgggcatcgcattcttgctgatctacgctagctatgccctggccttctggtacggttctacccttgtgatctctaaggagtataccatcggaaacgctatgaccgtctttttttcgatcttgattggcgcctttagcgttggtcaggccgccccttgtatcgacgctttcgcaaacgcacggggcgcagcgtatgtgatcttcgacatcatcgataacaatccaaagatcgattcattcagcgaaagaggccacaagccagactcaatcaagggaaacttggaatttaacgacgttcatttttcttatccatctcgggccaacgtgaagattctgaaggggttaaatctgaaggtacagagcgggcagacagttgctctggtgggcagctctggatgcggtaagtcaaccacggttcagttaatccaaagactctatgatccggatgaaggtaccataaacattgatggccaggacatccgcaactttaacgtgaattacctgcgagagattatcggggtcgtgtcccaggaacccgtcctcttttccaccaccatcgcggaaaacatctgttacgggcgtggaaatgtgaccatggacgagattaagaaagcggtgaaggaggccaacgcctatgagtttataatgaagctgccccaaaagttcgacactctggtgggtgagcgaggggcacagctctctggaggtcagaaacagaggatcgcaatcgcccgagccctggttcgaaaccccaagatcttgctgctcgatgaggccacttctgccctcgatacagagagtgaagccgaggtgcaggcggcgctggataaggcacgggagggtagaaccactatcgtcatagcgcacagactgtcaactgtgcgcaacgccgatgtgatagccggcttcgaagacggcgtcatagtggaacagggatctcatagcgagttaatgaagaaagaaggtgtgtacttcaaactggtgaacatgcaaacatctggaagccaaatccagagcgaggaattcgagcttaatgacgagaaggccgccaccaggatggcccctaacggatggaagtcccgactctttcgccactctactcaaaaaaaccttaaaaactctcagatgtgccaaaagagcctggatgtcgagaccgacgggctcgaagccaatgtgccccctgtctctttcctgaaggtgctcaagctgaacaaaacagagtggccctactttgtggtgggcacagtgtgcgccatcgccaacggaggtctccagcccgctttctccgttatcttctcagagatcatcgccatatttggtccaggcgatgatgccgtcaagcagcagaagtgcaacatcttcagcctgatattcctgtttctgggcattatttccttttttacctttttccttcagggctttaccttcggaaaggccggggagattcttactaggagacttcgttctatggcttttaaggccatgttacgtcaggatatgtcctggtttgacgaccataaaaacagtacaggagccctaagcacccgtctggcaaccgacgcggcccaggtgcagggtgccacaggtaccaggctggcacttatagcccagaacatcgccaatctgggcaccggtatcatcattagtttcatatatggctggcagctgaccctgctactcctggccgtagtacccatcattgccgtgtccgggattgtcgagatgaaattgctggccggcaatgcgaaacgggataagaaggaattggaggccgctgggaaaattgccacagaagctatcgaaaacatccggaccgtcgtttccctgacccaggagaggaaatttgaaagtatgtatgtggagaagctgtatggcccatatcgcaattctgtgcagaaggcccacatctatggcatcacgttcagtattagtcaggcatttatgtatttttcctatgctggttgcttccgtttcggtgcttacctaatcgtgaatggtcatatgagattcagagatgtgatcctggttttcagcgctattgtctttggcgctgtggcgctgggccatgcgagctcattcgcgcctgattatgccaaagcaaagctcagcgcggctcatcttttcatgctgtttgagaggcagccacttatagattcttattctgaggaggggcttaaacccgataaattcgagggaaacattactttcaacgaggtggtctttaattacccaacccgtgctaacgtgccggtccttcagggcctgtctcttgaggtaaagaaggggcagaccctggcattggtagggtctagcggatgcggcaagagcacggtggtacaactgctcgagcggttctacgacccactcgcgggcactgtgttcgtcgatttcgggtttcagctgctggatggccaagaagcgaaaaagctcaacgtccagtggctccgcgcgcagctggggatcgtgtctcaggaaccaatattgttcgactgcagcatagcagagaatatcgcatacggcgacaacagtagggtcgtaagtcaggacgagattgtgtccgctgccaaagctgcaaatattcacccattcatcgagaccctgccccataagtatgagactcgagtgggcgataagggaacccagcttagcggcggccaaaagcagaggatagccattgccagggctctcattaggcagccccagatcctgctgttggacgaggccacaagcgcactggatacggagtccgaaaaagtcgtgcaggaagctttagataaggcccgagagggaagaacttgtattgtgattgcacatcgccttagcaccatccagaatgcagacttaattgtcgtgtttcagaatgggagggtgaaggagcatggtacccaccagcagctattggcccagaagggcatctacttcagcatggtgtctgtccaagccggcacgcaaaacctg

SEQ ID NO: 7558 - DNA, 3858 bp, synthetic construct
  misc_feature 1..3858: note = source = /note="Description of Artificial Sequence: Synthetic coding sequence"
  source 1..3858: mol_type = other DNA
atggatctcgaagcggccaagaacggaactgcttggcggccaaccagcgcggagggggacttcgagctggggatctcatccaagcagaaacgcaagaaaacgaaaaccgtcaagatgatcggtgtgctcactttgttccgctactccgattggcaggacaaactcttcatgtctctgggtaccatcatggctattgcacatggttctggcctccccctgatgatgatcgtgttcggtgagatgactgacaagttcgtcgataccgcggggaacttcagcttccccgtgaacttctccctgtccctgctgaaccccggaaagatactggaggaggaaatgacgaggtacgcttactactacagcggcttgggagcaggagtgctcgtggccgcatacatacaagtctcattctggactctggcggccggacgacaaatcagaaagatccgccagaaattcttccacgcaatcctcagacaggaaatcggatggttcgatatcaatgacaccactgagttgaacacccgcttgactgacgacattagcaagatctccgagggaattggagacaaggtgggaatgttttttcaagcggttgctaccttcttcgccggcttcatcgtgggtttcatcagaggatggaagctgactctggtgatcatggctatctcgccaattctggggttgtcagccgccgtctgggcaaagatcctgtcggcgttctccgataaagaactggccgcttacgcaaaggccggcgcagttgccgaagaagccttgggagctatacggaccgttattgcctttggagggcagaataaggaactggagagataccagaaacacttggaaaatgctaaggagatcggtatcaagaaggccatttcggcgaacatcagcatgggcatagccttcctgctgatctacgcgagctacgcccttgcgttttggtacggctccaccctcgtgatctcaaaggaatacactatcggaaacgcgatgaccgtgttcttttcgatcctcattggggctttctcggtgggacaggcagctccctgtattgacgcattcgccaatgcccggggcgcggcatatgtgatcttcgatatcatcgataacaatccgaagatagattccttctccgaacgcggacataaaccggactcgatcaaagggaatctggagttcaatgatgtgcacttcagctacccatcgcgcgcaaacgtcaagatcctcaagggcctgaatctgaaagtgcagtcaggccagaccgtggctcttgtgggttcctcgggctgcggcaagtccactacggtgcagctcatccagcgcctgtacgaccctgacgaaggaactatcaacatcgacggccaagacattcgcaactttaacgtgaactatttgagagagatcatcggggtcgtcagccaggagccggtgctgttctcaaccaccatcgctgaaaacatctgctacgggagaggaaacgtgactatggacgaaatcaagaaggctgtgaaagaggccaacgcctacgagtttatcatgaagctgcctcaaaagttcgatacgctcgtcggcgagcggggtgcccaactgtcaggcgggcagaagcaacggatcgcaattgcccgcgcgctggtcaggaaccctaaaatcctgctcctcgatgaggccacctcggcgcttgacaccgaatcagaagccgaagtgcaggccgcacttgacaaagcaagggaaggccgcacgactatcgtgatcgcgcaccggctgtctaccgtgcgcaatgcagacgtgatcgcggggtttgaagatggagtcattgtcgagcagggatcgcactcagagctgatgaaaaaggagggagtgtacttcaaactggtgaacatgcaaaccagcggatcacagatccaatccgaggaattcgagctgaacgatgaaaaggccgccacgcggatggcgccaaacggatggaagagccgactgttccggcactcgacccagaaaaatcttaagaattcacaaatgtgtcaaaaatcgctcgacgttgagactgatggactggaagcaaacgtgcctccggtgtcgtttctcaaggtgctcaagttgaataagactgagtggccgtacttcgtggtgggaacggtgtgtgccatcgctaacggcggcttgcaacctgccttttcagtcatcttcagcgaaatcatcgcgatctttggaccgggcgacgacgcagttaagcaacagaaatgtaatatcttttcactgatcttcctctttctggggattatcagcttcttcaccttcttccttcaaggattcacctttggaaaagccggagaaatcctgactcgacggctcagatctatggctttcaaagcgatgctgaggcaggatatgtcttggtttgacgaccataagaattcgactggagctctgtcgaccagactcgccactgacgcggcccaggtccagggagccacgggtacccggttggccctgatcgcccaaaacatcgccaatctgggcaccgggatcattatctcatttatctatggatggcagctcaccctgcttctgctcgccgtcgtcccaattatcgccgtgtctggcatcgttgagatgaagctgcttgccgggaatgcaaagcgagataagaaggaacttgaagccgctggcaagatcgcgaccgaagcgatcgaaaacatccgcactgtcgtgtcgctcactcaggaaaggaagtttgaatccatgtacgtggagaagctgtacggaccatacagaaatagcgtgcagaaggcacacatctacggcatcactttctccatctcgcaagccttcatgtacttcagctacgcaggatgcttccgcttcggagcttacctgatcgtgaatggccacatgagattcagagacgtgatccttgtgttctcagccatcgtgttcggagcagtggcactcggacatgctagctccttcgccccggattacgcgaaggccaagctgtcagccgcgcatttgtttatgctgttcgaacgccagccgctgattgattcttactccgaggaaggtttgaaaccagataagttcgaaggaaacatcactttcaacgaagtggttttcaactacccgactcgcgctaacgtgccagtgctccaaggactctcgctggaggtgaaaaaggggcagaccctggcacttgtgggttcgtccggatgcggtaaaagcactgtggtccagctgctggaacggttctatgacccgctcgctgggactgtctttgtcgacttcggctttcagttgttggatggccaggaagctaagaagctcaacgtccaatggctccgagcccagctgggtatcgtctcccaagagccgattctttttgattgctccatagccgaaaacattgcttacggagataactcccgggtggtgagccaagacgagattgtctcggcggcaaaagccgcgaacatacatccgtttatcgaaactttgcctcacaagtacgaaaccagggtcggcgacaagggaacgcagctgtcgggaggacaaaagcaacgtattgcgattgctcgggcccttattcggcagccgcagatcctgctgcttgacgaagcgacctcggcattggacactgagtccgagaaagtcgtgcaggaggctttggacaaggcgcgcgaggggcgcacgtgcatcgtgatcgcacaccggctctccactatccagaatgccgacctcatcgtggtctttcagaacggaagggtgaaggagcacgggacccatcagcagcttctggcgcagaaaggcatctacttctctatggtttccgtgcaggcgggaacccaaaatctg

SEQ ID NO: 7559 - DNA, 3858 bp, synthetic construct
  misc_feature 1..3858: note = source = /note="Description of Artificial Sequence: Synthetic coding sequence"
  source 1..3858: mol_type = other DNA
atggatctggaggcagccaagaatggtactgcatggaggcccacttcagccgaaggagactttgagctggggatctcctccaagcagaagagaaagaaaacgaaaactgtcaaaatgattggagtgctcaccctttttagatactcagattggcaagacaagttgtttatgtcgctgggcactataatggcaattgcacatggcagcggacttcctctgatgatgatagtatttggggaaatgaccgataagtttgtggataccgcaggaaacttctcgtttccggtcaatttctccctgtcgcttctcaatccaggtaagattcttgaagaagaaatgacgagatacgcctactactactcgggacttggcgcgggagtgctggtcgcagcatacattcaagtgtccttctggaccctggccgcaggccggcagattcgaaaaatccgtcaaaagtttttccatgcaatccttcgtcaagaaattggttggttcgacattaacgacaccaccgagctgaatacccggcttaccgacgacatttcgaaaatctccgaggggattggcgataaagtcggaatgttttttcaagcagtggcaacgttttttgcgggtttcatcgtgggtttcattagaggatggaaacttaccctggtcataatggcgatttccccaatcctcggtctgtcggcagcagtgtgggcaaagatattgagcgccttctcagataaagagctggccgcgtacgcaaaggctggcgcagtggcggaggaagcccttggtgccattagaactgtgatcgcattcggtggtcagaataaggaactcgagcggtaccaaaaacatcttgaaaacgctaaagaaatcggtatcaagaaagcaatctctgcgaacatttcgatgggtatcgcttttctgctgatctacgcgagctacgcacttgcattttggtacgggtccactctggtcatatctaaggagtatactatcggtaacgccatgaccgtctttttcagcatcctgatcggagcattttccgtggggcaggcagcgccttgtattgatgcttttgcaaatgcaaggggagcagcatacgtcatatttgatatcatcgacaataacccaaagattgattcattttcagaacgcggacataagcccgattccattaaaggcaacctcgagtttaacgacgtgcatttctcctacccaagccgcgcaaacgtcaagatactcaaaggacttaacttgaaagtccaatccggacaaactgtcgccttggtcggatcctccggatgtggaaagtcaaccaccgtgcaactgatccaacgcctttacgatcctgacgaaggaacgatcaatatcgacggacaagatatacgaaatttcaatgtgaactacctcagagagataatcggcgtggtgagccaagaacctgtgcttttttcaaccactattgccgaaaacatctgctacggacgcggcaatgtgaccatggacgagattaagaaggctgtgaaggaagccaatgcctacgaattcattatgaaacttcctcagaagtttgatacccttgtgggtgagagaggcgcacaactctcagggggacagaaacagcggatagcaattgcacgcgcactggtccggaatcctaagattctccttctggatgaagctacttcggcacttgatactgagtcggaagccgaagtccaagcagcgcttgacaaagcaagagaaggacggactaccattgtgattgcacataggcttagcaccgtgcgtaacgccgatgtgatcgcaggttttgaggacggggtgatcgtggaacagggaagccactccgaacttatgaagaaggaaggggtgtactttaagctggtgaacatgcagaccagcgggtcgcagatacaatccgaagaatttgaactgaatgatgaaaaagcggcaacccgaatggcgccgaacgggtggaagtcacgcctgtttagacacagcactcaaaagaacctgaagaactcacagatgtgccagaagtcgcttgatgtggaaactgatggtcttgaagccaacgtgccccccgtctcgtttctgaaagtgctgaagctgaataagaccgaatggccttacttcgtggtgggaactgtgtgtgcgatcgcaaacggaggtctgcagccagcattttcagtgatcttttcggaaatcatcgcaatctttggccctggggatgatgcggttaagcaacaaaagtgtaacattttcagtttgatctttctgtttctgggtattatcagcttctttaccttttttcttcagggttttacctttggaaaggcaggcgaaatactcactagaaggcttagatccatggcgtttaaagccatgcttagacaggacatgtcatggttcgatgaccacaagaattcgaccggtgcactgtccactcggcttgcaaccgatgcagcacaggtgcagggagcaaccggtaccaggctcgcattgattgcgcagaacatagctaacctcgggacgggaatcatcatttcttttatctacggttggcaacttaccctccttctcctggccgtcgtccccattatcgcagtgtccggaatcgtggaaatgaaactccttgcaggtaatgcaaagcgagataagaaggagcttgaggcggcaggaaagatcgcaactgaagcaatcgagaatatcaggacggtggtgtcactgacccaggaacgcaagtttgaatcgatgtacgtggaaaagctgtatggaccataccggaattcggtccaaaaagcgcacatttacggaattaccttttcgataagccaagcgtttatgtactttagctacgccggttgttttaggtttggagcataccttattgtcaacggccatatgaggtttcgagacgtcattcttgtgttctcggcaatcgtctttggtgctgtcgcactgggacacgcgtcgagcttcgcgcccgattacgcaaaggcaaaactttcggcagcgcacctgtttatgctgttcgaacgacagccattgattgacagctactcggaagaaggccttaagcctgacaagttcgaaggtaatatcacttttaacgaggtggtgtttaactatcctacccgggccaacgtgccagtgcttcagggcttgagccttgaagtgaagaaaggacaaacccttgcactggtgggatccagcggttgcggcaagagcacggtggtccagttgttggaacggttttacgatcctcttgcaggaaccgtgttcgtcgacttcggtttccaacttctggatggacaggaagcaaagaaacttaacgtgcaatggctgcgggcacagcttggcattgtgtcgcaggaaccgatcctgtttgattgctcaatagcggaaaacatcgcatacggtgataattcgcgagtggttagccaggatgaaatcgtgtcggcggccaaagcagccaatattcacccgtttattgaaactttgccccacaagtacgagactcgggtgggcgataagggtactcagctttcaggaggccaaaagcagcgtatagcaatcgccagagcactgatcagacagccacaaattctgctgctcgatgaagccacctcggctctcgataccgagtccgaaaaggtggttcaagaggccctggataaggcaagagagggtcggacttgtattgtgatcgcacaccgactctcaactatacaaaacgcagaccttatcgtggtgttccaaaacggacgtgtgaaagagcatggtacccatcaacaactccttgcacagaagggaatttacttttccatggtgtcggtccaggccggcacccagaacctc

SEQ ID NO: 7560 - DNA, 3858 bp, synthetic construct
  misc_feature 1..3858: note = source = /note="Description of Artificial Sequence: Synthetic coding sequence"
  source 1..3858: mol_type = other DNA
atggacctcgaggctgccaagaatgggaccgcgtggaggcctaccagcgcggaaggagactttgagctgggtatctcctcaaaacaaaagcgtaagaaaactaagaccgtgaaaatgatcggtgtcctgacgctgttccgctactcagactggcaagacaagttgtttatgtcgctgggaacgatcatggccatcgcccatggatcgggactcccactgatgatgatcgtgttcggcgagatgactgacaaattcgtggacacggccggcaacttctccttcccggtgaactttagtctttcgttgttgaacccgggaaagatactcgaggaagaaatgacccgctacgcatactactactcaggactgggagctggggtgttggtggctgcatacatccaggtgtcattctggaccctggcggccgggagacaaattcgcaaaatccggcagaagttcttccatgccattctgagacaggagatcggatggttcgacattaatgacactaccgagctgaacaccagactcactgacgacatctctaagatttcggaaggcatcggggataaagtgggtatgttttttcaagctgtggcgaccttcttcgccgggtttatcgtcggattcataagaggctggaaactgactctcgtcatcatggcgatctctccaatcttgggcctgtcggctgctgtgtgggccaagatcttgtccgccttctcggacaaggaactggctgcgtacgccaaagcgggagcagtggcagaagaagctctcggcgccatcaggactgtcatcgcgttcggaggacaaaacaaggagctcgaaagataccagaaacacctcgaaaatgccaaggagatcggaatcaagaaggcgatctcagccaatatctcaatgggtatcgcgtttctgctgatctacgccagctacgcgctggcattctggtacggtagcaccctggtgatctcaaaggagtacactattgggaatgcgatgactgtgtttttcagcatactcatcggagccttcagcgtgggccaagctgctccttgcattgatgcatttgctaatgcgcggggcgccgcatacgtgatttttgacatcatcgacaataacccgaagatcgattccttcagcgaacgcggtcacaagccagatagcatcaaggggaatcttgaattcaatgatgtccatttctcatacccgagcagggcaaacgtaaagatcctcaagggactgaacctgaaggtgcagtccggccaaaccgtggcactggtggggagctccggatgcggcaagtcgactaccgtccagttgattcaacgcctctacgatcccgatgaaggcaccatcaacatcgacggacaggacatccggaactttaacgtgaattacctccgcgaaatcatcggggtggtatcgcaggagcctgtgcttttctcgaccactatcgctgagaacatctgttacggccgcggcaacgtgacgatggatgagatcaaaaaagcggtcaaggaagccaatgcctacgagtttatcatgaagctgccccagaagttcgacaccctggtcggcgaacgcggagcgcagctttcgggcggacagaagcaaagaattgcgattgcgcgcgcgctggtccgcaatccaaagatcttgttgctggacgaagccacgagcgctcttgacaccgaatcggaagcggaagtccaggcggcgctcgacaaagcgcgggagggccggactaccatcgtcattgcacatcggctgagcactgtgcggaacgccgacgtgatagctggatttgaagatggagttatcgtggagcagggaagccactctgagctcatgaaaaaggaaggtgtgtactttaaacttgtaaacatgcaaacttcagggtcccagatccagtccgaggagttcgagctgaatgacgagaaagccgccacccggatggcaccgaatggatggaaatccaggctgtttcgccattcgactcagaaaaacctgaagaactcccaaatgtgccaaaaatcgctcgacgtggaaaccgacggtttggaagcaaatgtccccccagtctcctttcttaaggtgctcaaactgaataagaccgagtggccttacttcgtcgtcgggaccgtgtgtgctatcgccaatggaggactccagccggctttctccgtcattttctcggagatcattgcgattttcgggccgggagatgatgcggtgaagcaacaaaagtgcaacattttcagcctcatcttcctgttcctcgggatcatcagcttcttcacgttcttcctgcagggattcaccttcgggaaggccggtgagatcctgacccggcgcctgcgctccatggcgttcaaagcaatgctcagacaagacatgtcgtggtttgatgatcacaagaactctaccggtgccctttcgactcgcttggcgactgacgccgcacaggtgcagggggccactggaactcgcctggcactcatcgcacagaacattgccaacctgggaactggaatcatcatctcctttatctacggctggcagctcacgctgctgcttctggccgtcgtccccatcatcgctgtgtccggaatcgttgaaatgaagctgttggccggcaacgccaagcgcgataagaaggaactggaggcggctggaaagatcgctactgaagctatcgaaaacattcggacggtggtgtcgctgacccaggagaggaaatttgaatccatgtacgtcgaaaaactgtatggtccgtacaggaactcggtgcaaaaggcccacatctacggtattactttctcgatctcgcaggccttcatgtacttctcatacgcagggtgcttccgcttcggcgcatatctgatcgtcaacggccacatgcgctttagagacgtgatcctcgtattctcggccattgtttttggagccgtggctttgggccacgccagctccttcgcccccgattacgccaaagcaaagctgtcggccgcccacctcttcatgctgttcgaacggcaaccgctgatcgactcctatagcgaggaaggacttaaaccggacaagttcgaggggaatatcacctttaatgaagtcgtgtttaactatccaactcgggccaatgttccagtgctccagggactttcattggaggtaaagaagggacagactttggccttggtgggatcaagcggatgtggtaagtcgaccgtcgtgcaactgcttgaacgcttttacgatcctctcgcgggaacggtgttcgtagatttcggattccagctgctcgacgggcaggaggccaagaaactgaacgtgcagtggctgagagcacagctgggtatcgtctcccaggagccgattctcttcgactgctccatcgctgaaaacatcgcctacggtgataactccagggttgtctcccaggacgaaattgtctcggcagccaaggccgcaaacatccacccgttcatcgaaactctgcctcacaagtacgaaaccagagtgggagataaaggaacccagcttagcggagggcagaagcagcgtatcgctattgcccgagcactgattcggcagccgcagatcctgctcctcgacgaggccacctcggccctggatacggagtcagaaaaggtcgtccaagaagccctggacaaggcgcgcgaaggacgcacttgcatcgtcatcgcacatagattgtccactatccagaacgcggatctcattgtggtgttccaaaacggacgggtgaaggagcatggaacccaccagcaattgcttgcccaaaaaggcatatacttctcaatggtgagcgtgcaagctggcacccagaacctg

SEQ ID NO: 7561 - DNA, 3858 bp, synthetic construct
  misc_feature 1..3858: note = source = /note="Description of Artificial Sequence: Synthetic coding sequence"
  source 1..3858: mol_type = other DNA
atggatctggaggctgcaaagaacggtacagcctggcgcccgacatcggcagaaggcgatttcgagttaggtatctcctccaagcagaagcggaaaaaaacaaagacggtgaaaatgattggagttctaacgctcttcaggtattctgactggcaagacaaactgtttatgagcttggggacgatcatggctatagcacacgggagcggcctgccgctgatgatgattgtgtttggcgagatgactgacaagtttgtcgataccgccggaaattttagttttccagtgaacttctcgctttcacttttaaaccctgggaagattttggaggaagaaatgacgaggtacgcctattactacagtggccttggggcaggagttctggttgcggcgtacatccaggtgtcattctggactttggcagcaggaagacagattagaaagatacgacagaaattcttccatgcaatcctaaggcaggaaatagggtggtttgacattaatgataccacggagctgaacacaaggctgactgacgatatttcaaaaatttctgagggcatcggggataaagttgggatgtttttccaagcagtcgccacgttcttcgccggcttcattgtggggtttattcggggatggaaactcactctcgtgatcatggcaatttctccaatcttgggactgtccgcagcagtctgggccaagatcctgtcagcgtttagtgacaaggaactggccgcatatgcgaaagctggcgctgttgcggaggaggctctgggagcaattcgaacagtgattgcctttggcgggcagaataaggagcttgagagatatcagaagcacttggagaatgctaaagagataggaatcaagaaagctatctcagccaacatctctatgggcattgcctttctgcttatctacgccagttatgcacttgccttctggtatgggagcactctggttatctcaaaggaatataccatcggtaatgctatgaccgtgtttttcagtattctgatcggggctttctctgtcggtcaagcggccccctgtatcgatgcctttgcgaatgcgcgcggggcagcctatgtcattttcgatatcattgataataatcccaagattgatagttttagcgaacggggccacaagccagactctataaagggtaatctcgagtttaacgacgttcacttctcctatccttcacgcgcaaatgtcaaaattttgaaaggcttgaatttaaaagtgcagagcggacagactgttgctctcgtgggaagcagcggatgtgggaagtccactaccgtacagttaatccagcggttgtacgacccggacgaggggaccattaacatcgatggacaggacattcggaacttcaatgtaaactacctaagagagattatcggagtggtgtctcaagagcctgtcctgttctctaccaccatagcagagaacatctgctacggtagggggaatgtaaccatggacgagataaagaaggccgtcaaggaagctaatgcgtacgagttcatcatgaaactaccacagaaatttgacactctcgttggtgagcgaggtgcgcaactaagcggcggacaaaaacagcggattgcaatcgctagggccttggttcggaaccccaaaattctgctgttggacgaagcaacctcagcccttgacaccgaatctgaagctgaggtgcaggctgcgttagataaggcacgcgaggggcgcaccactattgttatcgctcatcgcctaagcactgtacgcaacgctgacgtaattgcgggcttcgaggacggagtgatagtggagcaaggttctcattcagagctgatgaaaaaggagggggtttacttcaaactagtcaatatgcagacaagtggatcacagattcagtccgaggagttcgagttgaatgacgagaaagccgcaacaagaatggcgcctaacggctggaagtctcgccttttcaggcactctactcagaagaatctcaagaactcgcagatgtgtcagaagtcactcgacgtggagacggatggccttgaagccaacgttccgccagtgtcattcctgaaggttctgaaactgaataagaccgagtggccatactttgtagtagggaccgtgtgtgcaattgccaatggcgggctccagcccgcatttagtgtcatattctctgaaataatcgccatctttggcccaggcgatgatgcagtgaagcagcagaagtgtaatatctttagtctaatcttcctcttcttagggattattagtttttttacctttttcctgcagggtttcacctttggaaaagccggggagattctcacccggcgcctgagatctatggcttttaaggcgatgctgaggcaggatatgtcgtggtttgacgatcataagaactccaccggcgccctgtcgacgagactggcaactgacgctgcacaggttcagggcgccacgggtacccgactcgctctgatagctcaaaacatagccaatttgggcacaggcattattattagcttcatctacgggtggcagctgacgctactgcttttggccgtggtgcccattattgcagtgtcagggatcgtggaaatgaagttgttggccgggaacgcaaaaagggacaagaaggagctcgaggccgcaggaaaaatcgccacggaggcaatagaaaacatacgtacggtggtgagcctgacccaggagcgcaaattcgagagcatgtacgtggagaaactctatggtccgtaccgaaacagcgtgcagaaggcccacatctacggtataacattttcaatctcacaggcttttatgtacttctcttatgctgggtgttttagattcggagcatacttgatcgttaatggccacatgcgcttcagggacgtcatcctggtcttctctgcgatcgtcttcggagctgttgcgttgggacacgcgagctccttcgcccctgactatgccaaggcaaaactgagcgctgcacaccttttcatgctgttcgaaagacaaccactcatcgactcttactccgaagagggcctgaaacccgacaagttcgaaggtaacatcactttcaacgaggtggtgtttaattatcccacacgtgcgaacgtgcccgttctgcaagggctgtcgctggaggtgaagaaagggcaaaccttagccttggttggcagttccggttgtgggaaaagcaccgtggttcagctccttgaaagattttacgatcccctcgccggcacagtattcgtggactttggattccaattactagacgggcaggaggccaaaaaactcaacgtgcagtggctccgggcacaattggggatcgtgagtcaggagcctattctgttcgactgtagtatcgccgagaacatcgcgtacggcgataatagtagagttgtctcacaggacgagatcgtgtccgccgcgaaagcagcaaacattcacccctttatagaaacattgccacacaagtacgagactagagtgggtgacaagggcactcaattgtcagggggccagaaacagcggattgccattgcgcgtgcactgattcgacagccacagattctgttactggacgaggccacctcagccctagacactgaatctgagaaagttgtgcaggaagccctggacaaggcccgggaaggtagaacctgcatagttatcgcccatcggctctctactatccaaaacgctgatctcattgtagtgtttcagaacggacgtgtgaaggaacatggtactcatcagcaactgcttgcacagaaaggaatttactttagtatggtgagcgtccaggcaggcacacagaacttg

SEQ ID NO: 7562 - DNA, 3858 bp, synthetic construct
  misc_feature 1..3858: note = source = /note="Description of Artificial Sequence: Synthetic coding sequence"
  source 1..3858: mol_type = other DNA
atggatctcgaagctgcgaaaaacggtaccgcatggcgccccacctctgctgagggcgatttcgaactggggatatcatctaagcagaaacgaaagaagaccaagactgtgaaaatgattggtgtgctgactctttttagatacagtgattggcaggataagttatttatgagcctagggacaatcatggccatcgcccatgggtcgggactgcctctgatgatgatagtgttcggcgagatgacagacaagtttgtcgatactgctggtaacttttcatttcccgtgaacttcagccttagtctcttgaatcccggaaaaatactggaggaggaaatgactcgttacgcatactattactcagggctgggggccggtgtattagtggccgcgtatattcaagtctctttctggacgctcgccgccgggagacagattcgaaagatacggcagaagttcttccacgctattttgcgccaagagattggatggttcgatatcaatgacacaactgagctcaacaccagactgacagacgacattagtaagattagcgaggggataggcgacaaggtagggatgttcttccaagcagtcgccactttttttgccggattcatcgtcgggttcatcagaggttggaagttgacactggtgataatggccatttcacctatcctaggtctgtccgcggcggtgtgggctaaaattttgtccgcgttctccgacaaagagttggccgcatacgcaaaggccggagctgtggccgaggaagcgcttggcgccattcgtactgtgatagcttttggaggacagaacaaggagttggagagataccagaagcatctggagaatgccaaggagatcggaataaaaaaagcaatctctgctaatatttcaatgggcattgcatttctcttaatctacgccagttacgccctcgctttttggtatggcagtactctggtcattagcaaagaatacaccatcggtaacgccatgactgttttttttagtattctgatcggggctttcagtgtcggccaggctgccccctgcattgatgcctttgcaaatgctcgtggagccgcatatgtgatctttgacatcatcgataacaaccccaagatcgactcattctccgagaggggtcacaagcctgactctatcaagggaaacctggagtttaacgatgttcatttctcctacccttctagggccaacgtgaagattcttaaaggcctcaacttgaaagtgcaaagtggccaaaccgtggctctggtcggaagtagtggatgcggcaaatcaaccaccgtacaactgatccaacgactgtatgaccctgacgagggtaccatcaatatcgatggccaggatatccgaaattttaatgtgaattatttacgcgagattatcggagtcgttagccaggaaccagttttgttctccactaccatcgctgaaaatatctgttatggaagagggaacgtgacgatggacgagattaagaaggctgtcaaggaagccaacgcatatgagtttattatgaagctacctcagaagttcgataccctggtgggggagagaggcgcacagttgagcgggggacagaaacagagaatagcaatagcacgcgcgctggtccgaaacccgaagatactgttgcttgacgaggcgacctctgccttggacaccgaatcagaggcagaggtgcaagcagccctggacaaggcccgggaagggcgaacaacaatcgtgattgcccacagattaagtaccgtgaggaacgctgacgttatcgccggctttgaagatggcgtcattgtggagcaggggagtcattccgagctgatgaagaaagagggggtgtatttcaagctcgtcaacatgcagacttccgggtcacagatacagtccgaggaattcgaattgaacgacgaaaaggctgcaacgcggatggcccctaacgggtggaagtctaggctcttcaggcactcaacacagaaaaacctgaagaactcccagatgtgccaaaagtcccttgatgtggaaaccgacgggttggaagcaaacgtgccacccgtgtctttcctcaaagtacttaagctgaacaaaacagagtggccttactttgtcgtcggcaccgtgtgcgccatcgcaaacggcggattgcagcctgcgttttctgttatttttagcgagatcatcgcaattttcggacccggagatgatgcggttaaacagcaaaagtgcaatatcttttccctcatatttctgtttctggggatcatctctttctttaccttcttcctccaggggtttactttcgggaaggctggcgagatcctgactcgccgcctgaggagtatggcttttaaggcaatgctcaggcaggacatgtcgtggttcgatgatcataaaaatagtaccggggctctgtcgacccgcctggcgaccgacgcggcacaagtgcaaggcgcaacggggacacgtctggccctgattgcccaaaatatcgccaacctcggcaccggcatcatcattagctttatttatgggtggcagctaactctgctgttgctggccgttgtgcccataatcgcagtctcaggcatagtagagatgaaactactggccgggaatgccaaacgtgacaaaaaggagctcgaggctgcagggaaaattgcgactgaagctatagagaacatccgaaccgtagtgtccctgacgcaggaaaggaaatttgagtctatgtatgttgaaaagctctatgggccataccgaaactccgtgcagaaggcccacatctatggaattaccttctctatcagtcaggccttcatgtatttctcttatgctggctgcttcagatttggcgcctatcttattgtgaatgggcatatgagatttcgagatgttatattggtgttttccgccattgtgtttggagccgtggctttgggccacgcaagcagtttcgccccggactacgcaaaggccaagctgtctgccgcccatctgtttatgctgtttgagcgacagccactaatcgattcctactcagaagagggcctcaagcccgacaagttcgagggtaacattacttttaatgaggtggtgtttaattacccgactcgggccaatgttccggtcttgcagggactcagcctcgaggtgaagaagggacagaccttggctctagtgggaagctctggatgcggcaagtccacggtcgttcagcttctagagcggttttacgatcctctcgctggtacagttttcgttgactttggttttcaactactcgacggtcaggaagccaagaagttgaacgttcaatggctcagggcccaacttgggatcgtctcacaggaaccgattcttttcgattgcagcatcgccgagaatatcgcctatggagataattcccgtgttgtgagtcaggacgagatcgttagtgctgccaaggccgcaaatattcatccgtttatagagactctcccgcataaatacgaaaccagggtcggcgataagggcacacagttaagtgggggtcagaagcaaagaatcgcaatcgccagagcacttatcaggcaaccacaaattctcctgctggacgaggccacaagtgccctcgataccgagagcgaaaaggtcgtgcaggaggccctggacaaggccagagagggtcgcacatgcatagtgatcgcccatcggctgtctacaattcagaatgcggatcttatcgtggtgttccagaatggaagggtgaaagaacatgggacccaccaacagttgcttgctcagaagggcatctacttctctatggtatctgtgcaggctggaacacagaattta

SEQ ID NO: 7563 - DNA, 3858 bp, synthetic construct
  misc_feature 1..3858: note = source = /note="Description of Artificial Sequence: Synthetic coding sequence"
  source 1..3858: mol_type = other DNA
atggatcttgaggctgcgaaaaacggtacggcgtggcgcccaactagcgctgagggggacttcgagctgggaatcagctccaagcagaagcgcaagaagaccaagacggtcaaaatgatcggagtgctgaccctcttccgttactcggactggcaggataaactgttcatgtccttgggtaccataatggccatcgcacacgggtcgggactcccgctgatgatgatcgtgttcggagaaatgacggataaattcgtggacactgctggaaatttcagctttccagtcaacttttcactttcgctcctgaatcctggaaagatcctcgaggaggaaatgacgcggtacgcatactactactccgggctgggagcaggtgtgctggtcgccgcatacatccaggtgtccttctggacccttgcggctggaaggcagatacggaaaatccgccagaagtttttccatgcaatcctgagacaggagataggatggtttgacatcaacgacaccaccgaattgaatacccgcctgaccgatgacatctcgaagatctcggaaggcatcggtgataaggtgggcatgttctttcaggccgtggctactttctttgcggggtttatagtgggatttatccgcggttggaagctcactctggtgataatggccatatcaccaatccttggcttgagcgcagctgtttgggcaaaaatcctgtccgccttttcggataaggaactggctgcttatgccaaggctggagccgtagctgaagaagctctgggagccattcgcactgtgatcgcattcggaggccagaacaaggagttggagagataccagaagcacctggagaatgcaaaggaaatcggaatcaagaaagccatctccgccaatatctccatgggcattgcgttcctccttatctacgcttcgtacgcattggctttttggtatgggtcgactctggttatctctaaggagtatactatcgggaacgctatgactgtgttcttctcaattctgattggcgccttcagcgtggggcaagccgccccgtgcatcgacgccttcgcaaacgcgagaggtgctgcgtatgtcatcttcgacattatcgacaataatccgaagatcgacagcttctcggaacgggggcataaaccagattcgatcaagggcaacctcgaattcaacgatgtgcacttttcttaccccagccgcgctaacgtgaagattcttaagggactgaacctgaaggtgcaatctgggcaaaccgtggcgctggtgggatcttctggatgcggaaagtcgaccactgtgcagctcatccagcgcctgtacgatccagacgaggggactatcaacatcgacggacaagacatcagaaatttcaacgtgaactaccttagagagatcattggagtggtgagccaggagccggtgctctttagcacgaccatcgcggagaacatctgctacggcagaggaaacgtgactatggatgaaatcaagaaggcagtcaaggaagccaatgcttacgaattcatcatgaagttgcctcagaagtttgacaccctggttggagaacgcggcgcgcagctctcaggagggcagaaacagagaatcgcaatcgctagagccctcgtcaggaatcccaagatcctcctccttgacgaggccacctcagcactcgataccgaatcggaagcagaggtgcaagcggctctggacaaggcgagagaagggcgcaccaccatcgtgatcgcccaccggttgtcgaccgtgcggaatgcagacgtcatcgctggattcgaggatggtgtcatcgtcgaacagggatcgcactcagaactgatgaagaaagaaggtgtgtactttaagctcgtcaacatgcagaccagcggctcgcaaattcagtcagaagaatttgagctgaacgacgagaaggcagccaccagaatggccccgaatggatggaagtcgagactcttcaggcattcaacgcagaaaaaccttaagaactcacaaatgtgccagaaatcgctggatgtcgagactgacggacttgaagccaatgtcccaccagtctcatttctcaaggtgctcaaactgaacaagactgagtggccgtatttcgttgtgggaactgtctgtgccatcgccaatggtggactgcagccggccttctcagtgatcttcagcgaaatcattgctatcttcggccccggagatgatgcagtgaaacagcaaaagtgcaacattttttcactgatctttttgtttttgggaatcatttcatttttcaccttcttcctgcagggattcactttcgggaaagccggagagatcctgaccagaagactccgctccatggccttcaaagcgatgctccgccaggacatgtcgtggtttgatgaccacaagaattcaactggagcgctttccactcggctggccactgacgctgcacaggtccagggcgcaaccggtacccggctggcactgatcgcccaaaacatcgccaaccttggcaccggaattatcatctcgttcatctatggttggcagttgactctcctgttgctggccgtcgtgccgatcattgcagtgtccgggatcgtcgaaatgaaactccttgcgggaaatgcgaaacgcgataagaaggagctcgaagccgccggaaagatcgccaccgaggccatcgagaacatccggactgtggtgtcactgacccaagagcggaagtttgaaagcatgtatgtggagaaactgtacggcccgtaccggaattccgtgcaaaaggcgcacatctacggaatcactttctccatctcacaggcgttcatgtacttcagctacgctggctgtttccggttcggcgcctaccttatcgtgaatggacacatgaggttccgcgatgtcatcctggtgttcagcgcgattgtctttggagcagtagcgcttgggcatgcctcatcgttcgcccccgattacgcaaaggctaaactctccgcggcccacctgttcatgttgtttgagcgccagccgctcatcgatagttacagcgaggagggcctgaaacccgataagttcgaaggcaacatcaccttcaacgaggtcgtcttcaattacccaacccgggctaacgtgcctgtgctgcagggactctcattggaagtgaaaaagggacagactctggcacttgtcggcagcagcggatgcggaaaatccaccgtggtgcaacttctggaaagattctacgatcccctggcgggaaccgttttcgttgactttggattccagctgctggatgggcaggaggccaagaagttgaatgtgcaatggctgcgggcccaactcggaatcgtgtcgcaagaaccgattctgtttgactgctccattgccgagaacatcgcatacggcgataattccagggtcgtctcccaggacgagattgtgtccgccgcaaaggcagctaacatccatccgttcatcgaaaccttgccgcataaatacgaaaccagagtgggcgataaggggacccaactctccggcggtcagaaacaacgcattgccattgccagagccctcatccggcagcctcaaattcttttgctggatgaagctaccagcgcgctcgacactgagtccgagaaggtggtgcaggaagccctcgacaaagcccgcgagggacgaacgtgcatcgttatcgcccaccgcctctccaccatccaaaatgctgatctgatcgtggtgttccagaacggacgggtgaaggagcatgggactcaccagcagctcctggcccaaaagggaatttacttcagcatggtgtcagtccaggctggaacccaaaacctg

SEQ ID NO: 7564 - DNA, 3858 bp, synthetic construct
  misc_feature 1..3858: note = source = /note="Description of Artificial Sequence: Synthetic coding sequence"
  source 1..3858: mol_type = other DNA
atggacctcgaagcggccaagaatggtaccgcctggcgtccgacgagcgcggaaggtgattttgaacttggcatcagcagcaagcaaaagcgtaaaaagacgaaaaccgtcaagatgatcggtgtgctgaccctgttccggtatagtgactggcaggataaactgtttatgagcctggggaccatcatggcgattgcccacggctctggactgcctttaatgatgatcgtcttcggtgagatgaccgataaattcgtcgatacagccggcaatttcagcttcccagttaattttagcctgagcctgctgaacccgggcaagattcttgaagaagaaatgaccaggtatgcatattattactcagggctgggtgcaggagttctggtggctgcttacatacaggtgtcattttggaccctggccgccggcaggcaaatacgcaaaattcgtcagaagttttttcacgccattctgcgtcaggagattggctggttcgacatcaacgatacgaccgagctgaataccagattgacagatgacatttcaaagattagtgaaggtatcggtgataaagttggtatgttttttcaagccgttgccaccttttttgccggctttattgtgggcttcatcagaggctggaagctgacgttggtcatcatggcaattagcccaatcctgggactgtccgccgccgtttgggcaaagatcctgagcgcatttagcgacaaggagctggcggcctatgctaaagctggtgctgtcgcggaagaggccctgggtgcaatacggactgtgatcgccttcggcggccagaataaggagctggagcgctaccagaagcatttggaaaatgcgaaggagataggtataaaaaaggcaatcagcgcaaacattagcatgggtattgcgttcttgcttatctacgcgtcatacgcacttgcgttttggtacggtagtaccctcgttatctcgaaggagtataccatcggtaacgcgatgacagtgttttttagcattcttatcggtgctttcagcgtcggtcaagccgcgccttgcatcgatgcattcgcgaatgcacgaggagcggcatacgtcatcttcgacatcatcgataataatccgaaaattgacagttttagcgagcgtggtcataagccagactccatcaagggtaatctggaattcaatgacgtccactttagctatccctcacgcgcgaacgttaagattctgaagggactgaatctgaaagtgcagagcggccagactgtcgcgcttgtgggaagcagcggctgcggtaaatccaccaccgtccagctgatccagagattgtatgatccagacgaaggaaccattaacatcgacggccaggatatccgcaactttaatgtgaactatttgagagaaattatcggtgtggtgtctcaggaaccagtcctgttctctaccacgattgctgaaaacatatgttacgggcgcggtaacgttactatggatgagatcaagaaggctgttaaagaagccaacgcctatgaattcatcatgaaactgccccagaaattcgacaccttggttggtgagcgcggcgctcaactgagcggcggccaaaaacagcggatcgcgatcgcccgggccctggtccgcaacccgaagatcctgctgctggacgaagcgaccagcgctctcgacaccgagagcgaggccgaggttcaggctgctctggataaagcacgggagggtcgcacgacaatcgtgattgcgcatcgactttctaccgtgcgcaacgcggatgttatcgcgggttttgaagacggcgtgattgtggaacagggttctcacagcgaactcatgaagaaggagggtgtatatttcaagctcgtgaacatgcagaccagtggttcacaaatccaatctgaggagttcgagctcaacgacgagaaggcggcaacgcgtatggcgcccaacggctggaagtcccgcctgtttcgtcacagcacccaaaaaaaccttaaaaactcacaaatgtgccagaaatcattggacgtggaaactgatgggctggaagcgaatgtgcctccagtgagtttcctgaaggtcctgaagctgaacaagacggaatggccttattttgtcgttggtaccgtgtgcgctattgcgaatggcggcctgcagccggctttttctgtgattttcagcgagatcatcgctattttcgggcctggcgacgacgcagtcaagcagcagaagtgcaatatattctcgttgatcttcctgtttcttgggataatttccttttttaccttcttcttgcaaggcttcacctttggcaaagcgggcgagattttgactcgccgtctcagatctatggctttcaaggcaatgctgaggcaggacatgtcctggttcgacgaccacaagaacagtacaggcgccttgagtactcgactggcgaccgatgcagcacaggtgcagggagctaccggcacccgcctggctttaattgcccaaaacattgcaaatttaggaacgggtattattatttcctttatttatggctggcagctgacgctgctgctgctcgcggtggttccgattatcgccgtcagcggaattgttgaaatgaaactgctcgccggtaacgcaaagcgggataagaaggaactggaggcagcaggtaagatcgcaaccgaagctatcgaaaacatcaggaccgtggtctcgctgacccaggagcggaaatttgagtccatgtatgtcgaaaaactgtacggcccgtaccgtaacagcgtgcagaaagcccacatctatgggatcacgttcagcatctctcaagccttcatgtacttctcatacgcgggttgctttcgctttggagcatatctcattgtcaatgggcacatgaggttccgcgacgttatcctggtgtttagcgctattgtcttcggtgccgtggcactgggccatgcttcctcatttgcgccagattatgctaaagccaagctttccgccgcccatctgttcatgctgttcgagcgacagcctctgattgacagctattctgaagaggggctgaaaccggacaaatttgagggtaatattacttttaatgaggttgttttcaactatccaactcgcgcgaacgtgccggtcctccaaggcctcagcctggaggttaagaaaggccagactttggcgctggttggttccagcggatgtggtaagagtaccgttgtccagctgctggaacggttctacgatcccttggccggcaccgtattcgttgacttcggcttccaactcctggacggccaggaagccaaaaaactgaacgtccaatggctgcgcgcgcagctgggtattgtgagccaggagcccatcctttttgactgttcgattgcggagaacatagcctacggtgacaacagccgagttgtgagccaggacgaaattgtttcggctgccaaagcagctaatattcacccgtttatcgagactctgccgcataaatatgagacccgggtgggcgacaaaggcacccagttgagcggaggacagaagcaacggatcgctattgcgcgtgcactgatccgtcaaccacaaattctgctgctggatgaggctacgagcgcgctggacacggagagcgaaaaagtagtacaagaggccctggataaagcccgggaaggccgcacctgcatcgtgatagcgcatcgactgtcgaccattcagaatgcggacctcatcgttgtcttccagaacggtcgcgtgaaagagcacggtacccaccagcagctcttagcacaaaaaggcatctactttagcatggtctcagtccaggcgggaacccagaatctg

SEQ ID NO: 7565 - DNA, 3858 bp, synthetic construct
  misc_feature 1..3858: note = source = /note="Description of Artificial Sequence: Synthetic coding sequence"
  source 1..3858: mol_type = other DNA
atggacttagaggcagctaaaaatggcactgcttggcgcccaacctctgccgaaggcgattttgaactgggaatttctagcaagcagaaacgcaagaagaccaaaaccgtgaaaatgataggcgttctcactctctttagatattccgactggcaagataagctcttcatgtctctcgggacaataatggctatcgctcacggtagcggtctacctctcatgatgattgtctttggcgaaatgaccgataaattcgttgacacagccgggaattttagcttcccggtgaattttagccttagcctgctaaaccccggcaaaattctggaagaagagatgactcgatatgcctattactattctgggctaggcgccggagttctggtggcagcgtatatacaggtctccttctggactctggcggccggccgccaaatccgaaagatcaggcagaagtttttccacgccatactgagacaggagattggctggttcgatattaacgacactacggagctcaacacaagactgaccgacgatataagcaaaatctccgagggcataggggataaagtggggatgttctttcaggcagtagctactttcttcgccggttttattgtcggctttatccgaggctggaagctgacattagtgatcatggccatcagtccaattcttggtctgagcgccgcagtgtgggctaaaattctgagtgctttctcagataaagagctggcggcttacgccaaagcaggggccgtggcagaggaggcacttggcgctattaggacagtgattgccttcggcggacagaacaaggagctggagcgctaccaaaagcacctggagaatgcgaaagagattgggatcaagaaagccatcagtgcaaacatttcaatgggaattgcattcttactgatttatgcatcctatgccctggccttctggtatggttcaactctggtcatttctaaggaatacacgatcgggaacgccatgactgtcttcttctcgattctgattggcgcattttcagtggggcaggctgcgccatgcatcgatgcgtttgctaatgctagaggtgcggcttacgtaatctttgatatcatagacaacaacccaaaaattgacagtttttctgaacgtggccataagccggactctatcaaaggcaacctggaatttaatgacgtgcactttagctatccttcgcgagcaaacgtgaagatccttaaaggactgaacctgaaggtacaatctggccagaccgtggccctagttggatcctcagggtgtgggaagtctactactgtccaattaatccaacggttgtacgatccagatgaaggaacgataaatatcgacgggcaagatatcaggaatttcaacgtgaactatcttcgggaaataatcggcgtggtctcccaggaacccgttctattttcaacaacgatcgcagagaatatctgctatgggaggggtaacgtgacaatggacgaaataaaaaaggccgtaaaagaggcaaacgcatatgagttcattatgaagttgccacagaagttcgacaccttggtgggggaaaggggtgctcagctaagtggggggcagaagcaaagaattgctatcgctcgagcgttagtacgcaatcctaagatcttgctgctggacgaggccacttccgctctagacacagaatctgaggctgaggttcaagctgccctcgacaaggctcgggaggggcgcactacgatcgtgattgcacatagattgtccaccgtccgcaacgccgacgttatcgccggatttgaggatggcgtaatcgtagagcagggctcacactccgagttgatgaagaaagaaggagtgtactttaaattagtcaatatgcagacctcaggatctcaaatccaatctgaggaattcgaactgaatgacgagaaggcggccacacggatggccccaaatggatggaaatcacggctgtttagacacagcacgcagaagaatctcaaaaacagccagatgtgtcagaagtccctcgatgtcgaaacagacggcctggaggcgaatgtgccacccgtgtcttttttgaaagtcttgaagctaaataaaactgagtggccctacttcgtggtcggcaccgtgtgtgcaattgcaaatggaggcctacagccagctttcagcgtaatcttctctgaaattattgctatcttcggcccaggcgatgacgccgttaagcagcaaaaatgtaatatcttcagtctcatatttttgtttctgggaatcatttcattcttcactttctttttgcagggtttcaccttcggcaaagccggggagatcctgaccagaagactgaggtctatggctttcaaagccatgttgaggcaggatatgagctggttcgatgaccacaagaactccaccggagcgctttctactaggctggcgacagacgccgcccaggtccaaggcgcgaccggcacacgactagctctcatcgcacagaacattgcgaacctgggcacaggcatcattattagctttatttacggatggcagctcacacttctgctcctcgcagttgtgcccattattgcagtcagtggaattgtggaaatgaagctccttgcaggcaatgcgaagagggacaaaaaggagctggaggccgcaggcaaaatcgcgactgaagctattgagaacattcgcactgtcgtgagtttaacccaggaaagaaaattcgaatctatgtacgttgaaaagctatatggtccttaccgtaactccgtgcagaaggcgcacatttatggaataactttttcaatcagtcaggccttcatgtacttctcatatgctggatgttttcgatttggggcttacctcattgtcaacggacatatgcggttcagggatgttattctcgtattttctgccatagtgttcggcgctgtcgctctgggacatgcttcaagtttcgcccccgattatgccaaggccaagctgtccgccgcacatctcttcatgctattcgagcgacagcccttaatcgatagttattccgaagaaggcctcaagcctgataagttcgagggcaatataacatttaacgaagtcgtgtttaactatcctacgcgcgctaacgtgcccgtcttgcagggcctgtccctggaggtgaagaagggacaaaccctagctctggtcggttcgtcggggtgcggcaagtcaactgtcgtccagctcctggaacggttctacgaccccttggctggaactgtattcgtcgattttggtttccagctgctcgatggccaagaggccaaaaagctgaacgtccagtggctcagggcccagttaggtattgtgagtcaggaacctatactatttgactgctccatcgcagaaaatattgcttatggtgacaacagtagagtggtgagccaggatgagatagtgtctgccgccaaggccgctaacatacacccgttcatcgagactcttccacataaatatgaaacccgagtcggggacaaaggcactcagctcagcggagggcagaagcagcggatagctatcgctcgggcgctgataaggcagccacagatcctcctcttagacgaggctactagcgctttagacacagagtctgagaaagtggtgcaagaggccctggataaagcacgtgaaggacgcacgtgtatcgtgattgcccatagactgtctaccattcagaacgccgaccttattgtggtatttcaaaacggtcgggtgaaggagcacggaacacaccagcagcttctagctcagaagggtatctacttttctatggtcagtgtgcaagcaggtacacaaaatctc

SEQ ID NO: 7566 - DNA, 3858 bp, synthetic construct
  misc_feature 1..3858: note = source = /note="Description of Artificial Sequence: Synthetic coding sequence"
  source 1..3858: mol_type = other DNA
atggacttggaggctgccaagaacggcactgcatggcgccccacatccgctgagggagattttgaactgggcatcagttctaaacaaaagcgcaaaaaaacaaaaaccgtgaagatgatcggggtcctgactctctttagatacagcgactggcaagacaaactgtttatgtcattgggcactatcatggcaattgctcatggctccgggctgccattgatgatgatcgttttcggtgaaatgactgataagtttgtagacaccgctggcaacttcagttttcctgttaacttttcacttagcctgctgaaccccgggaaaatcttggaagaagaaatgaccaggtatgcatactactacagtggcctcggagctggggtcctggttgccgcctacatccaagtgtctttttggaccctggctgcaggcagacagattcgcaagataaggcagaaattcttccacgctatcctgcgtcaggaaattggctggttcgacataaatgatacaacagaactcaatactagactgaccgatgatattagtaaaatatcagaagggatcggagacaaagtgggaatgtttttccaggccgtcgccaccttttttgcaggcttcatcgttggattcatcagggggtggaagctgaccctagttatcatggcgatttcaccgatcctgggtctgtctgctgccgtttgggctaaaattttatctgctttcagcgataaggagctggctgcttacgccaaggctggagccgtcgcagaagaggccctcggagccatcagaaccgtcattgcgtttggtggccagaacaaagaacttgaaaggtaccaaaagcacttggaaaacgcaaaagagatcggaataaaaaaggcgatcagtgctaatatcagcatgggaatcgcattcttactgatctacgcaagctacgcgttagccttttggtatggtagcacacttgtgatttccaaagagtacactatcggcaacgctatgactgttttcttcagcatacttataggagcttttagcgtcggtcaggcagctccgtgcatagatgcgtttgctaacgctcggggcgccgcatacgttattttcgatatcattgacaacaaccctaagattgactcgttttctgaaaggggacacaagcctgactcaatcaagggtaacctggagttcaacgacgtacactttagctaccccagtagggctaacgttaaaattctaaagggcctaaaccttaaagtacagagcggacaaaccgtcgccctggtagggtcctcaggatgtgggaaatcgacaaccgtgcaactcatccagagactttacgacccagatgaaggcaccataaacattgatggccaagacatccggaacttcaatgtgaactacctgagagaaataatcggagtcgtgtctcaggaaccagtgcttttttcgaccacgattgccgaaaatatttgttatggcagagggaacgtgacaatggacgaaatcaaaaaagcagtgaaagaagctaacgcatacgagtttatcatgaaacttccccagaagtttgatacactcgtgggagaaagaggagctcaacttagcggtggacagaaacaaagaatcgcgatcgctcgtgcacttgtccggaaccctaagatattgttgctggacgaggctaccagcgcattggacaccgagagcgaagcagaggttcaggcagcacttgacaaagccagagaagggcgaactaccatcgtgatcgcccaccgcctctcaactgtccggaacgcggacgtcatcgcagggttcgaggatggcgtgattgtagagcagggatcacatagtgagttaatgaagaaagaaggcgtttattttaaactggtgaacatgcaaacatctggatctcagattcagagcgaagaatttgagttgaatgatgaaaaagcagccacgagaatggcgccgaacggatggaaaagtagactgttcagacactctacccagaaaaacctcaagaacagtcagatgtgtcaaaagagtttagacgtagaaaccgacggacttgaggctaacgtgcctcctgtaagctttctgaaggttctcaagttgaacaagaccgagtggccctactttgtcgttggcaccgtgtgcgccattgccaacggcggactgcaaccagcttttagcgtgattttcagcgaaatcattgctatctttgggcccggtgacgatgcagtcaaacaacaaaaatgtaatatcttcagtctgattttccttttcctgggcataatttccttcttcaccttctttctccaaggctttaccttcggcaaggcaggggaaatcctgactaggaggctcaggtccatggctttcaaagccatgctgaggcaggatatgagttggtttgacgatcacaagaactccaccggcgctctgtccacacgcctagccacagacgcggctcaggtccaaggggcaactgggacaaggttagccctgatagcccagaacatcgccaacttgggaaccggaatcatcatctctttcatatatggctggcaactcacacttttgttgctggcagttgtaccaatcatcgccgtatcaggaatcgtcgaaatgaaacttctcgctggaaatgctaagcgcgataaaaaggagctggaagccgctggtaaaatcgccacagaagctatcgagaatatccggactgtcgtgtcgcttacccaagagaggaaattcgaaagcatgtacgtagaaaagttgtatggcccatatagaaacagtgtccaaaaagctcacatttatggaataaccttttctatttcccaggcgtttatgtatttctcctacgctggctgttttcgatttggtgcatacctcatagtcaacggacacatgcggttccgggacgtcatattagtattctccgctatcgtgtttggcgccgtggccctggggcacgcctccagcttcgcacccgattacgcaaaagccaaactctccgctgctcacttatttatgctgttcgagaggcagccactaatcgatagctactccgaagaaggccttaagcccgataaatttgaaggtaacataacattcaatgaggtggtctttaactatcctacaagggcaaatgttccagtacttcagggcctcagcctggaagtgaagaagggacaaacactcgcgctggtgggaagctctggatgcggaaaatcaaccgtggttcagctgttggagcgtttttacgatccgctggcaggaacagttttcgtcgattttggcttccagctcctggacggccaagaagcaaaaaaacttaatgtgcagtggctgagggcccagcttggaatcgtgagtcaggagcctatcctcttcgattgctctatcgctgagaacattgcctatggggataactcaagagttgtgagtcaagatgaaattgtcagcgcagcaaaagctgctaacatccatccatttatcgagactcttcctcacaaatatgagaccagagtgggggacaaggggacgcagctctcgggtggtcagaagcaacgtatcgctatcgctagagccctcattcggcagccccaaattctgttgttagacgaggcaacatcagcgcttgatacagagtcagaaaaggtggtgcaagaagcacttgacaaagctcgcgaagggaggacatgcatagtgattgctcacaggttgagtaccatacagaacgcagatttgatcgtcgtctttcaaaatggtcgtgtgaaggagcacgggactcatcaacaactcttggcacagaaggggatctacttttctatggtttcggtacaggcagggacacaaaacctg

SEQ ID NO: 7567 - DNA, 3858 bp, synthetic construct
  misc_feature 1..3858: note = source = /note="Description of Artificial Sequence: Synthetic coding sequence"
  source 1..3858: mol_type = other DNA
atggacttggaggccgcgaaaaatggtaccgcttggcggcccaccagcgctgaaggagacttcgagcttggaatcagctcgaagcagaaacgcaagaaaactaagactgtgaaaatgatcggagtcctcaccctgtttcggtactcggattggcaggataagctgttcatgtccctggggaccatcatggccatcgcgcacggatcaggcctgccgctcatgatgatcgtctttggcgagatgaccgacaagttcgtggataccgcgggcaacttctcatttccagtgaacttctctctctcccttctgaatccgggcaaaatcctggaagaagagatgacgagatacgcgtactactactccggattgggagccggggtcctggtggccgcctacattcaggtgtcattctggactctcgccgcggggcgccaaatccggaaaatcagacagaagttcttccacgccatcctgcggcaggaaatcgggtggttcgatattaacgacactactgaactcaatacccgcctgactgatgatatcagcaaaattagcgaaggaatcggtgataaggtgggaatgttttttcaagccgtcgctactttcttcgccggatttatcgtgggattcatccgaggatggaagctgacccttgtcatcatggctatcagcccgattttgggacttagcgcagccgtctgggcgaaaattctgtcggctttctccgacaaggaactggcagcgtacgcgaaggccggagctgtggctgaggaggccctcggtgctatccgcaccgtgatcgcgtttggaggtcagaataaagagttggaaagataccaaaaacacctcgagaacgctaaggaaataggaatcaaaaaggcaatttctgctaacatcagtatgggcatcgctttcctcttgatctacgcgtcctatgcactcgcgttctggtacggctcgactctggtgatctccaaggaatacactatcgggaatgccatgaccgtcttttttagcatcctcattggagccttcagcgtcggacaggcggccccctgtatcgatgcattcgccaacgccaggggcgccgcctacgtcatcttcgacattattgataacaatcctaaaatcgactccttctccgaacggggccacaagccggacagtatcaagggaaacctggagtttaatgacgtccatttctcatacccctcccgggccaatgttaaaatcttgaagggactcaatctgaaggtgcagtcgggacagactgtggcactcgtcggatcgtcaggctgcggcaagtcaacgacggtgcagctcattcagcgcctgtatgatccagacgaaggaaccatcaatatcgacgggcaagatatccggaatttcaacgtcaactacttgcgagaaatcatcggtgtggtgtcgcaggaaccagtcctgttctcgactaccattgccgagaacatttgttacggccgcgggaacgtgactatggatgaaatcaagaaggcagtgaaggaagccaatgcgtacgagttcatcatgaaattgccgcagaagttcgacaccctggtgggtgagcggggagcgcagctgagcggaggacagaagcaaagaatcgccatcgcacgggcgctggtgcgcaaccctaagatcctgctgctggacgaagcaacttccgccctggacacggagtcagaggccgaggtgcaagctgcccttgacaaggccagagagggcaggaccacgattgtgatcgcccacagactgtcgaccgtccgaaacgctgatgtgatcgctggattcgaggacggagtcatcgttgagcaagggagccacagcgaactcatgaagaaggaaggcgtgtacttcaagctggtaaacatgcaaacgtccggttcccaaatccaatctgaggaattcgaactgaacgatgaaaaagcagcgactcgcatggcaccaaatggatggaagtcccgcctcttcagacactcaacccagaagaacctgaaaaattcgcagatgtgccagaagtcgcttgacgtcgaaaccgacggcctggaagcgaacgtgccgcctgtgtcgttcctgaaggtcctgaagctgaacaagaccgaatggccttacttcgtggtggggactgtctgcgctatcgctaatggcgggctccagccggccttctcagtgatcttcagcgagattatcgccatcttcggtccgggcgacgacgcggtgaagcaacagaagtgcaacattttttcgctcatctttctgttcctcggaatcatctcgtttttcaccttcttccttcaaggcttcacctttggtaaagcgggtgagatcctcactcggaggctgcggtcgatggcgttcaaagcaatgctccggcaggacatgtcgtggttcgacgatcacaagaatagcactggcgccctgtccactaggctcgccactgacgcggcccaagtgcagggagctactggaacccgcctggcgctcatcgcgcaaaatatcgcgaatctggggaccgggatcatcattagctttatctacgggtggcagctgactctcctgctgttggcggtggtgccgatcattgctgtgtcgggaattgtggagatgaagctcctggcaggcaacgccaagagggataagaaagagctggaggcagccggaaagatcgccaccgaagcaatcgagaacatccggaccgtcgtgtctctgactcaagaacgcaagttcgaatcaatgtacgtggaaaagctgtatggcccgtaccggaactcggtccagaaggcccacatctacggcatcactttctccatcagccaggccttcatgtacttttcatacgctggatgcttccgcttcggcgcatacctcatagtcaacggacacatgcgctttagggacgtgatactcgtgttttccgccatcgttttcggtgccgtggcactgggccatgcaagctcgttcgccccagactacgcgaaagcaaaactgtcggcggcccatctgttcatgctgtttgaacggcagccgcttattgactcgtactcagaggaaggactgaaacctgataagttcgagggaaatatcacctttaacgaagtcgttttcaactacccgactagagccaacgtgcccgtgctccaaggactctcattggaagtaaagaagggccaaaccctggccctggtcggaagctcgggatgcgggaagtccactgtcgtgcagctcttggagaggttttacgatccactggcgggcactgttttcgtggatttcggatttcaactcctggacggacaagaagccaaaaagctgaatgtccagtggcttagagcacagctgggaatcgtgtcacaagaaccaattctgttcgactgctcaatcgccgaaaacatcgcatacggggacaactcgcgcgtggtgtcccaggatgagatcgtctccgcggcaaaggctgccaacattcatcctttcatcgaaacgcttccgcataagtacgaaactcgcgtgggagacaaaggaacccaactgtccggtggacagaaacagcgtatcgcaatcgctagagctctcatacgccagccacagatcctcctgcttgatgaggccacgtccgcattggacaccgagagcgaaaaggtggtgcaagaggcgctggataaggcccgggaaggccgcacctgtatcgttatcgcacatcgcctttcaaccatccagaacgccgacctcatcgtggtgttccagaacggtagagtgaaggagcacggaacccatcaacagctgcttgcccagaagggaatctatttcagcatggtgtccgtgcaggctggaacccagaacctc

SEQ ID NO: 7568 - DNA, 3858 bp, synthetic construct
  misc_feature 1..3858: note = source = /note="Description of Artificial Sequence: Synthetic coding sequence"
  source 1..3858: mol_type = other DNA
atggacctggaagccgcaaagaacggcacggcatggaggcccacttcggcggagggcgatttcgaactcggtatttcctcgaagcagaaacggaagaaaaccaagacagtcaagatgataggggtacttacactgttcagatactccgactggcaggataagctatttatgtccttgggaactattatggcaatcgcccatggctccggactacccctgatgatgatagtcttcggcgagatgaccgacaaatttgtggacacggccgggaacttctctttcccagtcaacttttcactttctctgctgaatccagggaagattctcgaggaggagatgacacgttacgcatattactattccggactaggcgccggggtgctagtggcggcctacattcaggtgtctttctggacattagctgccgggcgccaaatcaggaagataagacagaaattttttcacgccatccttaggcaggaaattggatggttcgacatcaatgacacaacggaactgaatacccgcctaactgatgacataagtaagatctctgaaggcatcggggataaggtggggatgttttttcaggccgtcgcgacatttttcgccggatttattgttggctttatcaggggctggaaactcacactggttatcatggctatttcaccgattctcggcctgagtgccgctgtctgggctaaaattctcagcgctttttcggacaaggaactggccgcatacgccaaagcaggggccgtggcagaggaggctctgggcgcaatccggaccgtcattgcttttggaggacaaaataaagaactggagcggtatcaaaagcacttggaaaacgccaaggagataggcataaaaaaagccatctcagccaatatcagtatgggcatcgctttcctactgatctacgcgtcctatgctctcgcattttggtacggatcaaccctggtgattagcaaggaatatacaattggaaacgctatgaccgtattcttctccatcctcatcggtgccttcagcgtgggtcaggcagccccatgcatcgacgcctttgctaatgcaaggggggctgcctatgtgatcttcgatatcatcgataataaccctaaaatcgactcgtttagcgaaaggggtcataagcccgactcgattaaaggcaacctggaattcaacgacgtgcacttcagttaccctagccgggctaatgtgaagattctgaagggactcaacttgaaagtacaaagcggccagacagttgccctggtcggatctagtggctgcggtaaatcgacaaccgtccagctgattcagagactgtatgatccagacgaggggaccattaacattgacggtcaggatatccgcaatttcaacgtgaactacctacgggaaattatcggcgttgtgtctcaggaacccgtgttattctctacgaccatagcggagaacatttgttacggaagggggaacgtcacgatggacgaaatcaaaaaggcagtgaaggaggcgaatgcctacgagttcattatgaaacttccacaaaagtttgacaccctagtgggcgaacggggagctcagctttccggcggccagaagcagaggattgcaattgcacgcgcgctagtcaggaaccctaagatcctgctgttggacgaggctacatctgcacttgacacagaatccgaagcggaggtgcaggcagccttggacaaggcccgggagggcagaaccacaatcgtcatcgctcatagattaagcaccgtccgcaatgcagatgttatcgcgggcttcgaggacggggttattgtggagcaggggtcccacagcgagctgatgaagaaggagggggtttacttcaagctggttaatatgcagacttcagggtcgcagattcagagcgaagagtttgagctgaacgacgaaaaagctgccactaggatggctccaaacggatggaagtctcgactatttcgccactccacacagaagaatctgaagaactctcagatgtgtcagaaatctctcgatgtcgagactgacggcctggaggcaaatgtgccacccgtgtccttcttgaaagttcttaagctcaataaaaccgagtggccgtatttcgtagtaggcaccgtctgtgcaatcgccaacgggggcttgcagccagccttctcagtgatcttttctgagatcatagcaatctttgggcccggggacgatgctgtgaagcaacagaagtgcaatatcttcagccttattttcctcttcctcggcattatctcatttttcacatttttcctgcagggattcacattcggcaaagcgggggagatcttaacccgaagattacgaagcatggccttcaaggccatgttaaggcaggatatgtcttggttcgacgatcacaagaacagtaccggtgccctgagtacccgcctggcaacggatgccgcgcaagtccagggggcgactgggacaaggctggcactgatcgcgcagaatatcgccaatttagggacaggaattataatctcctttatatacggctggcaactgacacttctcctgctggcagtcgtgcccataatcgcagttagcggcatcgttgaaatgaagctgctggccgggaacgcaaagcgggacaagaaggagttggaggctgcaggaaagatagccactgaggcgatcgaaaacattaggacagtggtgtctctgacccaagagcggaagtttgagtccatgtacgtagagaaactgtatggtccctacagaaactccgtgcagaaggcacatatttacgggataaccttttcgatctcccaggcattcatgtacttttcctatgctggatgctttcggttcggcgcttacctgattgtgaatggtcatatgcgatttcgcgacgtaatactcgtattcagtgcgattgtgtttggggcggtcgcccttggccatgccagttcatttgctcctgattacgccaaggccaaactgtcagctgcgcacttgttcatgctgttcgaacgccagcccctcattgacagttacagcgaagaggggctaaaaccagataaattcgagggcaacattacgtttaacgaagtggtgttcaactatcccactagagcaaacgttcctgtcctgcagggcctttcactggaagttaaaaaaggccagacactggctctcgtgggcagttcaggatgcggaaagtccactgtcgtccagctgctagagcgtttctacgaccccctcgcaggcacggtttttgttgacttcggattccagctccttgacggccaggaggcgaaaaagcttaatgtacaatggctgagggcacagttgggaattgtcagccaagagccaatcctttttgactgcagtattgccgaaaacattgcgtatggggacaactcacgagttgtgagccaggacgagatcgtcagcgccgcaaaggcggcaaacatccacccattcatagaaactctgccccacaaatacgaaacacgagtgggtgacaaggggacccagctgtctggcggccagaaacagcggattgcgatagcaagagccctcattcggcagcctcagattttactactggatgaggcgacctccgctctggacacagagtcagaaaaggtcgttcaagaggcactggacaaggcccgggaagggcggacttgcatagtgattgcccatagactgagcacgatccagaacgctgatctcatcgtagtttttcaaaacgggagagtcaaggagcatgggacacaccagcagcttctggcgcagaaggggatctatttcagcatggtctctgtccaggcagggactcagaacctg

SEQ ID NO: 7569 - DNA, 3858 bp, synthetic construct
  misc_feature 1..3858: note = source = /note="Description of Artificial Sequence: Synthetic coding sequence"
  source 1..3858: mol_type = other DNA
atggacctggaagcagccaagaacggaaccgcatggcgtccaactagcgctgaaggagattttgaactgggtatatccagcaagcaaaagcgcaaaaagactaagaccgtgaagatgatcggcgtgctgaccctgttccgatactcggattggcaagataagctgtttatgagcctggggaccattatggcaattgcacatgggtccggcctgccacttatgatgatagtctttggagaaatgaccgacaagttcgtggatactgcgggaaacttttccttcccagtgaacttttccctttccctcctgaaccctgggaaaattcttgaagaggagatgactagatacgcatactactactcaggactgggagccggtgtccttgtggcggcctacatacaggtgtcattttggactctggctgcaggacgccaaattcgcaagattagacaaaagttcttccatgcaattctgcgacaggaaattggttggttcgatatcaacgacaccaccgaactgaatactcggttgaccgatgatatatccaagattagcgagggcattggtgataaagtgggaatgtttttccaggccgtggcaacttttttcgccggttttatcgtcggctttattcgcggatggaaactgaccctcgttatcatggccatcagcccaatactgggactctcggcggccgtctgggccaagattctgtccgcgttttcggataaggaactggcagcgtacgcaaaggcaggagcagtggcagaagaagccctgggagcaattagaactgtcatcgcctttggcgggcagaacaaagagttggaacggtaccaaaagcatcttgaaaatgcgaaagaaatcggaattaagaaggcgatttcggcaaacatctcaatgggcattgcatttctgttgatctacgccagctacgctcttgcgttttggtacgggtccacccttgtgatctcgaaggaatacaccatcggaaacgcaatgaccgtgtttttctccatacttattggtgctttttcggtggggcaggcagcgccctgtatcgatgcatttgcgaacgcacggggagccgcctacgtcatcttcgatatcatcgacaacaaccccaagattgacagctttagcgaacgaggtcataagcccgatagcattaagggtaatttggagtttaatgatgtccatttttcgtacccaagccgggctaatgtgaagattctgaagggacttaatctgaaagtgcaatctggtcagaccgtcgcccttgtgggtagcagcgggtgtggaaagtcaacgactgtgcaactgattcaacgcctttacgacccagacgaagggacgatcaacattgatggtcaggatatccggaactttaatgtgaactacctgcgtgaaatcattggcgtggtgtcgcaggagccagtgctgttttctactactattgctgaaaacatctgttacggtagaggaaacgtgactatggacgaaatcaaaaaggcggtgaaagaggcaaatgcatacgagttcattatgaaactccctcaaaagtttgacaccctcgtgggcgagagaggggcacaacttagcggaggtcagaaacagagaatagccatcgcccgtgctctcgtccgaaacccaaagatcctcctgctggatgaggcaacttcggcgctggatacggaaagcgaagcggaggtccaggcagccctggataaagcgcgcgaagggaggactacgatagtgattgcacatagactctccaccgtcaggaatgcagatgtgatcgcagggttcgaagatggtgtgattgtggagcagggttcgcatagcgaactcatgaagaaggaaggggtgtacttcaagctcgtgaatatgcaaacctctggttcacaaatccaatccgaggagtttgaacttaacgacgagaaagctgcaactagaatggcaccgaacgggtggaagtccaggctgttccgccattcgacccaaaagaacttgaaaaactcacagatgtgccaaaagtctcttgatgtcgaaaccgatggacttgaagccaatgttccgcctgtgtccttcctcaaagtgctcaaacttaacaaaacggaatggccctatttcgtggtgggtactgtgtgcgccatcgccaacgggggtctgcagcctgcattttcggtgattttctcagagatcatcgcaatctttgggcctggggacgacgcagtgaagcagcaaaagtgcaacatcttctcactgatctttctgtttcttgggatcattagcttctttacttttttcctgcaaggatttacctttggaaaggcaggtgaaattctcacccggagactgagatccatggcatttaaggcgatgcttagacaagacatgtcatggtttgatgatcacaagaattccactggagctctgtccaccaggctggctaccgacgccgcgcaagtccaaggtgcaacggggacccgtttggcacttattgcacagaacattgcaaacctcggcacgggaattatcatttcatttatctacgggtggcaactgaccctcctgctgctggcagtggtgcctattatcgccgtttcaggcatagttgaaatgaaactgctggcaggcaacgccaagagagataagaaagaactggaagctgcaggtaaaatcgctaccgaagcaattgaaaacatcagaactgtcgtgtcactgacccaggaaaggaaatttgagtccatgtacgtggagaagctgtacggtccttaccggaatagcgtgcagaaagcccatatctacggaattaccttcagcattagccaagcattcatgtatttctcctatgcaggttgttttcgatttggagcttacctcatcgttaatggtcacatgagatttagagacgtgatcctggtgttttccgcgattgtttttggtgcagtcgcactcgggcatgcatcatcattcgcaccagactacgcgaaggcgaaactgtcggcggcacatctgttcatgctgttcgagcgtcaacctctcattgatagctactcggaagagggtcttaagccagataagtttgaaggaaacatcactttcaatgaagtggtgttcaattaccccactcgagcaaatgtcccagtgcttcagggcctttccctggaagtgaaaaagggtcagactcttgccttggtgggatcgtcgggttgcggaaagtcgaccgtggtgcaactcctggaaagattctacgatcctctcgcagggactgtgtttgtggactttggattccaactcctcgatggacaagaagctaaaaagctcaatgtgcaatggctccgggcgcaattgggcattgtgtcccaagaacctatacttttcgactgttcaattgcagaaaacattgcttacggagacaacagccgggtggtgtcccaggatgaaattgtgtccgcagcgaaagccgcaaatatccatccttttatcgaaaccctgccccacaagtacgaaacccgggtgggtgacaaaggcactcagcttagcgggggtcaaaagcaacgcatcgcaattgcacgcgcgttgattaggcagccccagatcctcctgttggatgaagccacttctgccctcgacaccgaatccgaaaaggtggtccaagaggcactggataaagcacgcgaaggaagaacgtgcatcgtcatcgcacaccgactcagcactatccaaaacgctgatctgatcgtcgtctttcaaaacgggcgagtcaaagaacatggaactcaccaacagttgttggctcagaagggaatctactttagcatggtgtcagtgcaagccggtacccagaatttg

SEQ ID NO: 7570 - DNA, 3858 bp, synthetic construct
  misc_feature 1..3858: note = source = /note="Description of Artificial Sequence: Synthetic coding sequence"
  source 1..3858: mol_type = other DNA
atggatctcgaggctgcgaagaacggtacagcatggagacctacctctgcagaaggggattttgagctgggaatctcttctaaacagaagcgcaaaaaaaccaaaacagtaaagatgatcggcgtgctaactctctttcggtacagtgactggcaggacaagctgtttatgagcctggggacaattatggcaatcgcccacggatccggactgcccctgatgatgattgtgttcggcgaaatgaccgataagttcgtggatactgctgggaacttttctttccctgtcaatttttcgttgtcactgctgaaccctgggaaaatcctcgaggaggagatgactagatacgcttattattacagtggcctgggggcgggcgtactggtggccgcgtacattcaggtatctttctggactctcgctgcagggagacagatccgcaagataaggcagaaatttttccatgccattttgcggcaggaaatcggctggtttgatatcaatgataccacggaattgaacactcgtctaaccgacgatatctccaaaatcagtgaaggtatcggggataaagttggcatgttttttcaggccgtggctaccttcttcgccggattcatcgtcgggtttattagggggtggaaactgacactggtcatcatggcaatttccccgattctcggactgtctgcagcggtgtgggcgaagatactatcagcgttctctgataaggagctcgctgcttacgcaaaggccggcgctgtggctgaggaagcactgggggcaataagaacagtgatcgcatttggtggtcagaataaggagctcgagaggtatcagaagcatcttgagaatgctaaggagatcggaatcaagaaagcaatctcagctaatattagcatgggcattgcatttctgctaatctacgcctcatacgccctcgctttctggtacggatcgaccctagttattagcaaggagtacacgatcggcaatgctatgaccgtgtttttctcaattctgattggcgcgtttagcgtcggccaggctgcgccgtgcatcgatgccttcgcaaacgcgcgcggagcagcctacgtaattttcgacatcattgacaataatcccaaaatcgattccttcagtgagcgaggacataagccggactccattaaaggcaacctggaatttaatgatgtccacttctcctatccgtcgagggccaatgtaaagatccttaaggggctcaatcttaaggtgcagtctggacagacggtggccctggtgggttcaagcggctgtggtaagtctaccacggtccagctcattcagagattgtacgaccccgatgaaggaacaattaacatcgacggacaagatatccggaattttaacgtgaattacttgcgggagatcatcggagtggtgtcccaggaacccgtactcttcagcacgaccattgctgagaacatctgttacggcaggggaaacgtcactatggacgagatcaagaaggcagtgaaggaggccaacgcctacgagttcattatgaagctacctcagaagttcgacacgcttgtgggtgaaagaggagcacagctttccggcggccagaagcagcgaatcgcaattgctcgagccctggttcgcaaccccaagatactactgctggacgaagctacaagcgcccttgacaccgagagcgaggccgaagtgcaggctgccctggataaggcacgcgaggggaggaccactattgttatcgcccatcggctgtctaccgtgcgcaacgcagatgtgatcgcagggtttgaggacggggtgatcgtggaacagggatcacactcagaactcatgaagaaggagggtgtgtacttcaagctggtgaatatgcaaacctctggctcacagatccaatcagaggagtttgagctcaatgatgaaaaggccgcaacacggatggctccaaacggatggaagtccagactctttcggcactctacacagaagaacctcaaaaacagtcagatgtgtcagaaatcactggacgtagagacggacggcttggaggctaatgtcccccccgtgtcatttctcaaagtgctcaagcttaacaaaaccgagtggccctactttgtcgtcggaactgtgtgcgccatcgctaatggcgggctgcagccggctttctccgtcatcttctccgaaattatcgcaattttcggccccggggatgacgctgtgaaacagcagaagtgtaacatcttcagcctaatatttctgttcctgggcatcatcagcttctttacattcttccttcagggctttacatttggaaaagctggggagatattgaccaggaggctccgttctatggcgtttaaagcaatgctgaggcaggacatgagttggttcgatgaccacaaaaatagcactggagccttgagtacacggttggccaccgacgcagcgcaagtgcagggagccacgggcactagactggccctgatagcacagaacattgctaatttggggaccggcataatcatctcatttatctatggctggcaactcactttgttgctcctcgccgttgtccctatcatcgccgtctcaggaatcgtcgagatgaagctgttggcaggcaacgctaaacgagacaagaaagaactggaggcggccggaaagatcgctactgaggccatcgaaaacataaggacggtggtgtccctgacccaggagcgcaaatttgaatccatgtatgtagaaaagctgtacggaccttaccgaaactcggttcagaaggctcatatatacgggataacgttttccatctcccaggcctttatgtatttcagctacgccgggtgcttccggttcggagcctatctgatcgtgaacggccatatgagatttcgcgacgtgattctggtcttctctgctatcgtttttggagctgtggctctgggacatgcttctagttttgcacccgactacgccaaagccaagttaagcgctgcccacctcttcatgctgtttgagcgacagccactcatagactcgtacagcgaggaggggctgaagcctgacaagtttgaagggaacattaccttcaatgaggtggtgttcaactatccgacaagagccaatgtccccgtgctccaaggcctcagcttagaggttaagaagggccaaactctcgctcttgtggggtcatccggatgtggaaagagcactgtcgtgcaactgctggaacggttttatgacccactggccggaacagtgttcgtcgacttcgggttccaacttctggacggccaggaagctaaaaagctaaatgtgcagtggctgcgcgcccaactcggcatcgtgtcacaggaaccaatactcttcgactgcagcattgctgagaacatcgcctacggggataactcccgggtcgtgagtcaggatgaaattgtgtctgccgccaaagctgccaacatccacccattcattgagacgctcccccataaatatgagacaagggtgggggacaaagggacccagttgtccggcgggcagaaacaaagaatcgcgattgctagggcgctgatcaggcaaccccaaatactgctgctcgatgaggccacctccgccctggacaccgagtctgagaaggtggtacaggaagccctcgacaaagcacgcgagggtcgaacgtgtatagtcattgcccatcgcctgagtactatccagaatgctgatctgattgttgtgttccagaacggcagggtcaaggagcacggcactcaccagcaattgctggcgcagaaaggaatttacttctccatggtcagcgtgcaggcggggactcagaacctc

SEQ ID NO: 7571 - DNA, 3858 bp, synthetic construct
  misc_feature 1..3858: note = source = /note="Description of Artificial Sequence: Synthetic coding sequence"
  source 1..3858: mol_type = other DNA
atggatctggaggccgccaaaaatggaactgcttggcgcccaacctcggccgaaggagactttgaactgggtatatcctcaaagcaaaagcgcaaaaagaccaagaccgtgaaaatgattggagtccttaccctttttcgatattctgactggcaagacaaactgttcatgtcgcttggtactattatggccatagcccatgggtccggtctgcctcttatgatgatcgtgtttggagaaatgaccgacaagttcgtggacaccgcggggaacttctctttccccgtgaacttcagcctcagtctcctcaatccaggaaagattttggaagaagaaatgacccgctatgcatactactactcggggctgggcgcaggagtgctggtggctgcctacatccaggtgtccttttggaccctcgcggcgggcaggcagattcgaaagattagacagaagtttttccatgcgatcctgagacaagaaattggctggtttgacatcaacgatactactgagctgaacacccggctcaccgatgatatttcgaaaatctcggaaggcataggagataaggtgggtatgttttttcaagccgtggcaacgttctttgcgggattcatcgtcggttttatccgaggttggaaattgactctggtgattatggccatttcccctattttgggactctcggcagcggtttgggcaaagattctgtcggccttttccgataaagagctcgcagcctacgcgaaagccggcgccgtcgcagaggaagccctgggtgcaattaggaccgtgatcgcatttggtggacaaaacaaggaactcgagcgttaccagaagcacctcgagaacgcaaaggaaattggaattaagaaggccatatcggcaaacatctctatgggaattgcatttctcctgatctacgcttcatacgcactggccttttggtacggatcaaccctcgtcatttcgaaagaatacaccataggcaacgccatgactgtgttcttctctatattgattggtgcattttccgttggccaggccgcaccttgtattgatgcttttgcgaacgcaagaggagcagcatacgtcatatttgacattatagataacaatccaaagattgactcgttttccgaaagaggtcataagccggatagcatcaagggcaacctcgagtttaacgacgtgcacttttcatacccatcgagagcaaatgttaagatccttaagggactgaaccttaaggtgcagtccggacagaccgtcgccctcgtcggaagcagcggttgcggaaagtcgacgaccgtgcaacttatccaaagactttacgatcctgacgaaggaaccatcaacattgacggtcaggatatccgaaatttcaacgtgaactacctgcgggagattataggagtggtgtcgcaagaaccggtccttttctccacgactatcgctgagaacatctgttacggaagaggaaatgttaccatggacgagattaagaaggcggtgaaggaagcaaacgcctacgagttcataatgaaacttcctcaaaagttcgataccctggtcggtgagcggggcgcccaactgagcgggggtcagaaacaaaggattgcgattgcaagagccctcgtgagaaatcctaagattctgcttcttgatgaggctaccagcgcattggatactgaatcagaggcagaagtccaagcggcactggacaaggccagagagggtaggactactatcgtgatcgcacatcgcctctctactgtgcgcaacgcagacgttattgctggatttgaggacggtgtgattgtggagcaaggttcccactcagaactgatgaagaaggaaggagtctactttaaactcgtgaacatgcagactagcgggtcgcaaatccaaagcgaagaatttgaactgaacgatgaaaaagctgccactaggatggctcctaatggctggaaatcgcgccttttcaggcatagcacccaaaagaatcttaagaatagccagatgtgtcagaagtcgctcgatgtggaaactgatgggcttgaagctaacgtgccacccgtgtcctttctcaaagtgcttaagttgaacaagactgaatggccttacttcgttgtcggaacggtgtgcgcgattgcaaacggagggctccagcctgcattttcagtgattttcagcgaaatcatcgctatcttcggcccaggtgatgatgccgtgaagcaacaaaaatgtaacatattcagtcttatctttctctttctcggtatcatttcattcttcactttcttcctccaagggttcacttttggtaaagcgggggaaatccttactcgccgactgcgttccatggcattcaaagccatgcttagacaagatatgtcatggtttgatgaccacaagaattccaccggagccctcagtacgcgcctggcaaccgatgcggcacaagtccaaggtgctaccggcacccgcctggcactgattgctcagaacatagcaaatctgggaactggaattatcatatcatttatctacgggtggcagctcactctgctcctcctggctgtggtgccaatcattgctgtcagcggaattgtcgagatgaagctgctcgcaggtaacgccaagcgtgataagaaagaacttgaggcagccggaaagattgcaaccgaagctatcgaaaacatacgcaccgttgtctcgttgacccaagaacggaagtttgaatccatgtacgtggagaagctgtatggtccctatagaaactcggtgcagaaagcacatatctacgggataactttttccatctcacaagcatttatgtacttttcttacgcaggttgttttagatttggtgcatacctgatcgtgaacggtcacatgaggtttcgcgatgtgatactcgtcttttcggcaattgtgtttggagcagtggcacttggccacgcatcgtcatttgcccccgattacgcaaaagctaaattgtccgcagcacatcttttcatgctttttgaacgacaacctcttattgactcttactccgaggagggccttaagccagataagtttgaggggaacattacctttaacgaagtggtgtttaactacccaacccgggcgaacgtgccagttctgcagggactttctcttgaagtgaaaaaggggcagactctggcacttgtcgggagctcgggatgcggaaaatcgaccgtcgtccagcttcttgaacgcttctacgaccccctggcagggaccgtgtttgtggattttggtttccagctgcttgatggacaagaagctaagaagctcaacgtgcagtggctgcgtgcgcagttgggaattgtctcccaggaaccaattctttttgattgctccatcgccgagaatattgcatacggcgataattcgcgggtcgtgtcacaagacgaaattgtgagcgcagccaaggccgcaaacatccatccgtttatcgagactctgcctcataagtacgagactcgggtgggtgataaaggcacccaactttcaggaggtcaaaagcagagaatcgctattgcacgcgcactcatacgacaacctcaaattctgctgctcgatgaagcaacttccgcacttgacacggaatctgaaaaggtggtgcaggaagctctggataaagcgcgcgagggacgaacctgtatcgtcatcgcccatcggctttccacgattcaaaatgcagatctgatcgtcgtttttcaaaatggccgggtgaaagagcacggaacgcatcaacagttgctcgcccagaaagggatctacttttcgatggtgagtgttcaagcgggaactcagaacctt

SEQ ID NO: 7572 - DNA, 3858 bp, synthetic construct
  misc_feature 1..3858: note = source = /note="Description of Artificial Sequence: Synthetic coding sequence"
  source 1..3858: mol_type = other DNA
atggacctggaagcagccaagaatggcacagcctggcgtccgacaagtgcagaaggggattttgagcttggaatctcgtctaaacaaaaaagaaaaaaaactaaaacggttaaaatgattggcgtgttaacactgttccgctactctgattggcaagataaactgttcatgtctctaggcacaatcatggcgatagcacatgggtcgggcttaccgttgatgatgatcgtttttggagaaatgactgacaaattcgtagacactgcaggaaactttagctttccagtcaacttcagcctttccctgttaaacccgggtaagattctggaggaggaaatgacgcggtatgcctattattattcaggacttggagccggagttttggtcgcggcatatattcaggtgagcttctggacactggctgccgggcggcaaatccgcaaaattcgtcaaaaatttttccatgcaatcctccgtcaagagattggttggtttgatattaacgatacaacggaactcaatacacggttgacggatgatatttcaaagatatcggaaggcatcggtgataaggttggaatgttttttcaagcggttgctacattctttgcaggcttcatagtgggtttcatccgcggatggaaactgaccctggtgatcatggctattagtccgattttgggcttgtcagcggcggtgtgggctaagatcctttcagctttttcagacaaggaacttgctgcatatgcaaaagctggagcagtggcagaggaagctttaggagcaatccgcacagtgatcgcatttgggggccagaataaagaactggaaaggtatcagaaacaccttgagaatgcaaaggagattgggattaaaaaggcgattagcgctaatatttcaatgggtattgccttcttgcttatttatgcgtcatacgcgctggcattttggtatggttcgacgctcgtaatatcaaaggaatacacgattggtaatgctatgacagtttttttttcgattttaatcggagcatttagcgtaggacaggcagctccgtgtattgacgcgtttgccaatgcgagaggagcggcctatgttattttcgatattatcgacaataacccaaaaattgactcctttagcgagagaggccataagccggattccattaaaggaaatctcgaatttaatgatgtccatttcagctacccttctagagcgaatgtaaaaatcttgaagggactgaacctcaaagtccaaagtggccaaacggtcgccttagtgggaagtagcggctgcggcaagagcacaacggtacaattgatacaaagactctatgacccagacgagggaaccataaacattgatggccaggatatccgcaattttaacgtaaattatttacgggaaattattggagttgtgagtcaagagccggtactattttcaacaacaatcgccgaaaacatctgctatggacgcggaaacgtcaccatggacgaaattaaaaaggccgttaaagaggctaatgcgtatgaatttataatgaaactgcctcagaaatttgatacacttgttggagaaagaggggctcaattatcagggggccaaaaacaacgcattgcgatagctcgtgctctggtacggaaccctaaaatattacttctcgatgaggcgacaagcgcattagacactgaatcagaggctgaggtacaagccgcgcttgataaggcaagagaagggcgcacaacaatagtgatcgcgcatcgtctgtctacggttcgtaatgctgatgtgatagctggctttgaggacggcgtcatcgtggaacagggctcgcattccgaactgatgaaaaaagaaggtgtatactttaagttagtcaatatgcaaacatctgggagccagattcaatctgaggaatttgagcttaatgatgaaaaagcggctacacgaatggctcctaacggatggaaatcaagactatttaggcatagtacacaaaaaaatttaaagaatagccaaatgtgtcagaaaagcttagatgttgagacggacggccttgaagcgaatgtgccgccggtgagctttttgaaggttctgaagttgaataagacggagtggccttattttgttgtgggtaccgtctgcgctattgcaaatggggggctgcaaccagcattttctgtaattttttcagaaatcatcgcgattttcggaccaggagacgatgctgttaaacaacaaaaatgtaacatcttctcacttatttttctttttctcgggataatttcattttttacgttttttcttcaaggctttaccttcggcaaagcaggagagattctgacgcgacggttacgcagcatggcgttcaaagcaatgttaaggcaggacatgtcatggtttgacgaccataaaaattcaacgggagcgctttccacgcgcctcgccaccgatgcggcgcaggttcaaggcgcgacaggtactcgcttagcgctgattgcgcagaatattgctaatctaggcactggcatcatcataagcttcatttatggttggcagctgacgctgttattacttgcagtcgtgccaatcatagcagtttccggaatcgtggagatgaaactcttagctggcaacgcgaagcgagacaaaaaagaacttgaagcggcgggcaaaatcgcaacggaggcgattgaaaacattagaaccgttgtaagcttaacacaagagcgtaagtttgaatctatgtatgttgaaaaactgtacgggccttacagaaattcagttcagaaagcacatatatatggaatcacttttagcatcagccaagcatttatgtacttttcctacgctggatgttttagatttggtgcttatttaattgttaatggacatatgcgctttcgagacgtgatccttgtattttccgccatcgtttttggcgctgttgcgttaggacatgcgtcatcatttgcccccgattacgcaaaagcgaaactatctgcagcgcatttgtttatgctgtttgaacgccaaccgctgatcgatagctactcagaagaaggattgaaaccggataaattcgagggaaacattacatttaatgaggtagtatttaattacccaacacgggcaaatgtacccgtcttacagggtctgtcgttagaggttaaaaagggtcagacattagcattggtcggatcaagcggctgtggcaaatcaactgtggtccagttacttgaaagattttatgatccgctggcgggcacagtatttgttgattttggttttcaattattagatgggcaggaagcgaaaaagttgaatgtgcagtggttgcgtgcgcaactggggatcgtctcacaagaacctattcttttcgactgctctattgctgaaaacattgcatacggtgataactcacgggtggtgagtcaagatgaaattgtgtccgcggcgaaagcggccaacatacatccatttatcgaaacactgccccataaatacgaaacgcgcgtcggcgataaagggacgcagttatctggcggacagaaacagagaatagcgatagcacgagcgctgatccgccagccgcagatattactgcttgacgaagcaactagcgcccttgatacagaatcagaaaaagtcgttcaagaagctctcgataaagctcgtgaaggccggacctgcatcgtcattgcgcataggttatccacgatccaaaatgcagacttaattgtcgtctttcagaacggtcgggtcaaggaacatggaacacatcagcaattgctagcacagaaaggaatttatttttcaatggtctccgttcaggcaggcacccagaatcta

SEQ ID NO: 7573 - DNA, 3858 bp, synthetic construct
  misc_feature 1..3858: note = source = /note="Description of Artificial Sequence: Synthetic coding sequence"
  source 1..3858: mol_type = other DNA
atggacctcgaggcggccaagaacggaaccgcatggcggcccacctcagccgaaggtgattttgagctcggaatctcgtcaaagcagaagagaaaaaagacgaaaactgtgaagatgatcggagtgttgaccctgttccggtactcggattggcaagataagctgtttatgtcgctgggcactattatggccattgctcacggttcaggcctccctctgatgatgatagtgtttggagaaatgaccgataagttcgtggacaccgcaggaaacttttccttcccggtgaatttctcgctctcccttttgaacccaggtaagatcctggaggaagaaatgactcgatacgcatactactactccggactcggtgccggagtcctcgtggccgcttacatccaagtgagcttttggaccctcgctgcaggtcgccaaatccggaagattaggcagaaattcttccatgcaattctccgccaagagattggatggttcgatatcaatgacactacggaactcaacactcgactgactgatgatatctccaagatttcggaaggtatcggagacaaggtgggcatgttctttcaagcagtcgcaacttttttcgcaggattcatagtcggtttcattagaggttggaagttgacccttgtgataatggccatctcccccattcttggtctgagcgcagccgtgtgggcaaaaatcctttcagcattctccgataaagagctggcagcatacgcgaaggcaggagccgtggcagaggaggcacttggcgccatacgtactgtgattgcctttgggggtcagaacaaagagctggagcggtatcaaaaacacttggagaacgcaaaggagataggcatcaagaaggcgattagcgcaaacattagcatgggtatcgcgttccttcttatctacgcgtcgtatgcgttggcattttggtacggatctaccctggtcatttctaaagagtacactattggtaacgcaatgacggtgtttttctccattcttattggagcattttcagtcggacaagcagcgccatgtatcgacgcatttgcaaacgcaagaggcgcagcttacgtgatttttgatatcattgacaacaaccctaagattgactcgttctcggaacgggggcacaaacctgattctattaagggaaacctggaattcaacgatgtgcatttttcgtatccatccagagctaacgtgaagattctgaagggtctgaatctcaaggtccaatcgggccaaaccgtggcactcgtggggtccagcggatgcggcaagtcgaccactgtgcaattgatacagagactttacgatcctgacgaagggaccattaacattgatggtcaggatatcaggaatttcaatgtgaactacctgagagagattattggtgtggtgagccaggagccagtgctgttcagcaccacgatcgcagagaacatctgttacggtcggggcaacgtcactatggacgagatcaagaaggccgtgaaggaggcaaacgcatacgaattcataatgaaacttccacagaaatttgatacccttgtgggggagagaggtgcgcaactctcaggtggccaaaagcagcgcattgccattgcacgagcacttgtgagaaatcctaagattctcctgctggatgaggctacgtcggcacttgacacggaaagcgaggcagaggtccaagcagccctggataaggccagagaaggacgcaccactattgtgatcgcacatcgtttgagcactgtgcgcaatgctgatgtcattgcgggttttgaagatggcgtgattgtggaacaagggagccattcggaacttatgaagaaggaaggcgtgtactttaaacttgtgaatatgcagacgtccggaagccaaatacagagcgaggagtttgaacttaacgatgagaaagcagcaacccggatggcaccgaacggatggaaatctaggctttttagacattcaactcagaaaaaccttaagaatagccaaatgtgccagaaatcgctcgatgttgaaaccgatggactggaggcaaacgtgcctccagtgagctttctgaaagtgctgaaactcaataagactgaatggccatactttgtggttggcaccgtctgtgctattgcaaatggtgggctgcagccagctttctcagtgattttctctgaaatcatcgcaattttcggtcctggggatgacgcagtgaagcagcaaaagtgcaacattttcagcctcatctttcttttccttggtatcatctcgtttttcactttctttctgcaaggctttacgtttgggaaggcaggagaaattctcactcgaagattgcgatcgatggcatttaaggcgatgctgagacaagatatgtcgtggtttgacgatcacaagaattccaccggtgcattgtcgactaggctcgcaaccgacgcagcacaggtgcagggagcaaccggaacccgcctcgcactgatcgcccaaaacatcgcaaacctgggtaccggcatcatcatctccttcatatatggttggcagctcaccttgcttcttcttgctgtcgtgcccataattgcagtcagcgggattgttgagatgaaacttcttgcgggaaacgcaaagagagacaaaaaggaactggaagcagccggcaagatcgcaaccgaggcaatagaaaacatacggaccgttgtctcccttactcaggagcgcaagtttgagtcgatgtacgtcgaaaaactttatgggccatacaggaatagcgtgcagaaagcccacatctacggtattacctttagcatctcgcaggcctttatgtatttctcatacgcgggatgttttcgtttcggagcatacctgattgtcaatggtcacatgagatttcgggatgtcattctcgtgttctctgccatcgtctttggagcagtcgcccttggacatgcttcatcattcgctcccgactacgccaaggcaaaactttcagcagcacatctgttcatgctgttcgaacgtcagcccctgatcgattcgtactcagaggaaggactcaagcctgacaagtttgaaggaaacatcaccttcaatgaggtcgtattcaactaccctacccgggccaacgtcccggtccttcagggactttccttggaagtcaagaagggccaaaccctggccctggtcggaagctcgggatgtgggaagtcgactgtggtgcaacttctggaaagattttacgacccgctggcgggaactgtttttgtggatttcgggttccaactccttgatgggcaagaggcaaaaaagctcaacgtccaatggctccgggcacaactcggaatagtgtcgcaggaaccgatcctgtttgactgctctatcgcagaaaacattgcctacggagataactcgagagtggtgtcgcaagatgaaattgtgtctgcagccaaggctgctaacatccaccccttcattgagactcttccacataagtacgagactcgtgtgggtgataagggaacgcagctttcgggtggacaaaaacaacgcattgctattgcgagggcactcattagacagcctcagattctgctgcttgacgaagcaacctcggcgctcgacaccgagtcggagaaggtggtgcaggaagcattggataaagcccgggaaggtcggacctgtatcgtcatcgctcatcgcctgtcgactattcagaatgcggatctcattgtcgtgttccaaaatggtcgtgtgaaggagcatggcacgcatcagcaactgcttgcacagaagggaatttacttctcaatggtttcggtccaggcaggaacgcagaacctg

SEQ ID NO: 7574 - DNA, 3858 bp, synthetic construct
  misc_feature 1..3858: note = source = /note="Description of Artificial Sequence: Synthetic coding sequence"
  source 1..3858: mol_type = other DNA
atggacctggaggcggctaaaaatggcacagcatggcgacctacctcagcggagggcgacttcgagctggggataagctcaaagcaaaaacggaaaaaaactaagacagttaaaatgatcggagtgctcacccttttccggtacagtgattggcaggacaaacttttcatgtcacttggaacgattatggcgattgcacatggctcgggacttcctctcatgatgatagtctttggcgagatgaccgacaaatttgtcgataccgcaggaaacttttcttttcccgttaacttctcgctctccctgcttaaccccggtaagatccttgaagaggaaatgacacggtacgcttattactacagcggtcttggcgcgggagttctggtggcagcctatatccaagtaagcttctggacccttgctgctggcaggcaaatccgtaagatcaggcagaagttcttccatgctatcctgagacaagaaatcggttggtttgatatcaacgatacgacggaactcaatacaagactgacggatgatatctctaaaatcagtgagggtattggagacaaggtgggcatgttcttccaagccgtggccacattcttcgcagggttcattgttggttttattcgtggctggaagttgaccctggtcatcatggcaataagccccatccttggactgtctgccgcagtgtgggcaaagattctgagtgccttttcagataaagaacttgccgcctacgcaaaggctggtgccgtcgcagaagaagcccttggcgctattagaactgtgatcgcatttggtggtcagaataaagaattagagcggtatcagaaacacctggaaaacgcgaaggaaatcggaatcaagaaagccatctcggccaacatcagcatgggaattgcctttcttctgatctatgcatcctatgctttggcattctggtacggatcgaccctcgtgatttccaaggaatatacaatcggaaacgccatgactgtgtttttcagcatcctgatcggcgcgttcagtgtgggtcaggctgccccctgcatagacgctttcgccaatgcgcgtggggccgcctacgtgatcttcgacataatagacaacaaccctaagattgattcgttttccgagcgagggcataagccagactccataaaaggaaatctggagtttaatgatgtccacttctcctatccttccagagccaacgttaagatcctaaaaggactaaatctaaaggtgcagtcaggtcagactgtggccctggtggggtccagcggctgtggcaagtctactactgtgcagctaatacagagactgtacgatccggacgagggcaccatcaacattgatggacaagatatacgcaatttcaacgtgaactatctgcgcgagattatcggagtggtttcacaggagccggtactcttttcaactaccattgccgagaacatctgttacggcagagggaatgtcaccatggacgagattaagaaggctgtgaaagaggccaacgcctatgaattcattatgaaactccctcaaaagttcgacacattagttggcgagcgcggagcacagctgtcaggaggccagaaacagagaatcgcaatcgctcgggctctggtgaggaaccccaaaattcttctactcgacgaagccacctccgcccttgataccgagtccgaggctgaagtgcaggctgccctggacaaggcccgggagggaagaactaccatcgtcatagcccaccgcctcagtacagttcgcaatgccgacgtgatcgcaggcttcgaagatggcgtgatcgtggaacaaggcagccattccgaactcatgaagaaggaaggcgtgtatttcaagctggtcaatatgcaaacctcagggtctcagattcagtctgaggagtttgaactgaatgatgaaaaggcggccactcgaatggcccctaacggatggaagagcaggttgttcaggcactcaacgcagaagaatttaaaaaactcacagatgtgtcaaaagagtctggacgtggagactgacggcctcgaagccaacgtgccgcccgtctctttcttgaaggtgttgaagctgaacaaaaccgagtggccgtatttcgtggtaggcactgtttgcgccatagctaatggcgggttacagccagctttctccgttattttttcagaaattattgcaatttttgggcctggcgatgacgccgtgaagcagcagaagtgcaacatctttagtttgatcttcctcttcttaggcatcatcagcttttttacttttttcctacaggggtttacgttcggtaaggctggagagatcctcactaggagactgcgttccatggctttcaaggccatgctccggcaggatatgagctggtttgatgaccacaaaaacagcacaggtgctctcagtacccgcctggctactgacgcagcccaagtacagggggctaccggtactcggctggcccttatcgcccagaacattgcgaatctcggcactggcattataatctcatttatctacggttggcaacttactcttcttctgttagccgtcgtgcctattatcgccgtgagcggcatcgtagaaatgaaattgcttgcaggaaatgctaagcgggacaagaaggagttagaagcagctggtaagatcgccaccgaggcgattgaaaacatcaggaccgttgtcagccttactcaggaacggaaatttgagtctatgtacgtggagaaactgtatggcccttataggaactctgtacagaaggcacacatttacgggatcacgttcagcatctctcaggccttcatgtacttcagctatgcaggctgttttcggtttggagcgtacctcattgtcaatggccacatgcgattccgcgacgtgatactcgtgttcagcgcaattgttttcggagcagtggccctgggacacgctagttctttcgcccctgactatgccaaagccaagctatccgctgcgcacttgttcatgctgtttgaacgccagccacttattgatagttacagcgaggaaggccttaaacccgacaagtttgaagggaacatcactttcaatgaagtggtcttcaactatccgacccgggcaaacgtcccagtccttcagggcctcagcttggaggtcaaaaagggccagactctggccctggtgggatctagtgggtgcggaaaatctactgtggtccagctgttggagagattttatgaccctcttgctgggaccgttttcgtggacttcgggtttcagctcctagatgggcaggaagccaagaaattgaacgttcagtggcttcgagctcagctgggcatagtttcccaggagcccattcttttcgactgctccatcgccgagaacatcgcctacggcgacaattctagggtggtctctcaggacgagatcgtgtctgctgcgaaagccgccaatattcaccccttcatcgaaactctgccacacaaatacgaaaccagggtgggtgacaaaggaactcagcttagtggtgggcaaaagcaacggatagcaatcgcccgcgccctcatccgccaaccgcagattctcttattggatgaggcaacatccgctctcgacacagagtccgagaaggtggtgcaggaagcgctggacaaggcccgagagggtcggacatgcattgtcatcgcacaccgtctgtcaacgatccaaaatgccgatctgatcgtcgtgtttcagaatggcagggtgaaagagcacggaacacatcagcagctcctggcccagaagggaatttatttttcaatggtgtcggtgcaagcgggcacgcaaaatctt

SEQ ID NO: 7575 - DNA, 3858 bp, synthetic construct
  misc_feature 1..3858: note = source = /note="Description of Artificial Sequence: Synthetic coding sequence"
  source 1..3858: mol_type = other DNA
atggatctggaggctgcaaagaacggtactgcttggcgacctacatcagctgaaggcgacttcgaactgggaatctcctcgaagcagaagcggaagaagacgaaaaccgtcaaaatgataggagttctcacactgttcaggtattcagactggcaggacaagctgtttatgtccctgggaacaatcatggccattgcacatggcagcggcttgcccttaatgatgattgtgtttggcgagatgaccgataagttcgtcgataccgccggaaatttcagctttcctgtaaatttctccctaagccttctgaatccaggcaaaatcctcgaagaagaaatgacgaggtacgcctactactattccggtctcggcgccggggtgctcgtggcagcctacatccaagtgtctttctggacgttagcagcgggtaggcagatccgtaaaatcaggcaaaagtttttccatgctattttaaggcaggagatcggctggttcgatatcaatgatacaaccgagctgaacaccaggttgacggacgacatctctaaaataagcgagggcattggggacaaagtcggtatgttcttccaggccgtcgctactttttttgctgggtttattgtggggtttatccggggttggaagctgacactcgtgatcatggctatatcaccgatcctgggactgtccgcagcagtttgggctaaaatcctgtctgccttttctgacaaggaactggccgcctacgccaaggctggcgctgtcgcagaggaggcccttggtgcaataagaacagtgatagccttcggcggtcagaacaaggagctggagaggtatcagaaacacttggaaaacgcaaaagagattgggatcaagaaggctatttcggctaatattagcatggggatcgcctttctgcttatatacgcatcatatgcacttgcattttggtatggaagcaccctcgttatttccaaagagtatactatcggcaacgcgatgactgtgttcttctccatcctcatcggggccttctcagtgggacaggccgctccatgcattgatgcctttgccaatgccagaggcgcagcctacgtcatttttgacataatcgataataatccaaaaatcgatagtttctctgaaaggggtcacaagccagacagcattaagggcaatctcgagttcaacgatgtccactttagctaccccagtagagccaacgtgaagatattgaaggggttgaatctaaaagtgcagagcggccagactgtcgccctggtggggtcttcaggctgtggaaagagtaccacagtgcaacttattcagcgcctttacgatccagacgagggcaccatcaacattgacgggcaagatattagaaattttaacgttaactatctgcgcgagatcataggtgttgtgtcacaggagcctgttctcttttccaccacgatcgcagagaacatatgttacgggcgaggaaacgtaactatggatgagatcaagaaggccgtgaaggaggccaacgcctatgagtttatcatgaagctgccccagaagttcgataccctggtcggagagaggggcgcccagctgtcagggggacagaagcagcggatcgcaatcgccagggcactggtgaggaatccaaagattcttttgctagacgaagccactagtgctttagataccgagagcgaggctgaggtgcaggccgcattagacaaagctcgcgaaggacgtactacaatcgtcatcgctcacagacttagcactgtgcggaatgcggatgttatagccggcttcgaggacggtgtcatcgtggagcaggggtcgcattctgagctgatgaagaaggaaggtgtgtattttaagctagtaaacatgcagacctctggctctcagatccagagcgaggagtttgagctaaatgacgagaaagcagctacacgtatggcaccaaacggttggaagagccggctgtttcgacatagtactcagaaaaatctgaaaaactcccagatgtgtcagaagtctctcgatgtggaaacggatggactcgaagccaatgtgcctccagtgagttttctcaaggtcttgaagctgaacaaaaccgagtggccgtattttgtggttggcacagtgtgcgctattgccaatggggggctccagccagccttctctgttatcttctcggagatcattgcaatattcgggcctggcgatgacgctgtgaagcagcagaagtgtaatatctttagtctcatcttcctttttctcggaattatttcttttttcacttttttcctgcagggattcaccttcggaaaggcaggggaaatcctgacccggaggctgcgtagcatggcattcaaggcgatgttgagacaggacatgtcatggttcgatgatcacaagaactctactggcgcgctcagcactaggctcgctacagacgctgctcaggtgcaaggcgcaactggaactagattggcacttattgcgcagaacatagccaatctggggacgggcatcatcatcagttttatttacggctggcagcttacactgctcctactggcagtggtccctattatcgccgtctccgggattgtcgaaatgaagctgctagccggcaatgccaagagggataaaaaagagctggaggcggcgggcaagatcgccacagaagcgattgagaatatcagaaccgtcgtgtctctaactcaggaacgaaagtttgaaagtatgtacgtcgagaaactctatggcccatacaggaatagcgtgcagaaagcacatatctatgggataactttctccatttctcaagcattcatgtacttcagttacgctggctgttttcgtttcggcgcctatctaatcgtgaacggccatatgagattcagggacgtcatcctggtcttttccgccatagtgtttggagccgtcgcgctcggccacgcatcaagctttgcaccagactacgccaaagctaagctgtctgccgcccacctgttcatgctcttcgaaaggcagcctcttattgacagttattcagaggaaggccttaaacctgacaaatttgagggtaatattaccttcaacgaggttgtctttaattatccaaccagagctaatgttccggtgttacaggggctaagcctagaagtaaagaagggacaaacgttagctttagttggctcttctggatgcgggaagagtactgtagtgcaactgttggagagattttacgatcccctggcgggcactgtgtttgtggactttggatttcagttgctagacggccaggaggccaagaagctgaatgtgcagtggcttcgcgctcagctcggcatcgtgtcccaggaaccaatcttatttgactgcagcattgccgagaacatcgcgtatggggataatagcagagttgtaagccaagacgagatcgtgtccgcggccaaggcagcgaatattcatccctttatcgaaaccctgccccataagtatgaaactcgtgtcggggataaggggacccagctttctggggggcagaagcagagaatcgcaatcgccagggctctgattcggcagcctcagatcttgctgctggatgaggctacgtccgcactggacactgagagtgagaaggtggtccaggaggcccttgataaggccagggaagggcggacctgcatcgtgattgcacaccgcctgtcaactattcagaatgccgacttgattgtggtcttccagaatggccgggtgaaggaacacggcactcaccaacagctcctggctcagaagggcatctatttcagcatggtctctgtccaggccggcactcagaatctg

SEQ ID NO: 7576 - DNA, 3858 bp, synthetic construct
  misc_feature 1..3858: note = source = /note="Description of Artificial Sequence: Synthetic coding sequence"
  source 1..3858: mol_type = other DNA
atggacctggaggcagccaagaatggaacagcatggcgcccgaccagtgcagaaggggactttgaactcggcatttcttccaaacagaagcgcaaaaagacgaagactgtaaagatgatcggtgtgctgacactgtttcgatattctgattggcaggacaaactctttatgtcactggggaccatcatggcaatcgcacatggaagcggactgcctttaatgatgatcgtgttcggggaaatgacagataaatttgtggacacggcaggcaacttttcatttccagtgaatttctctttaagtttgcttaatcccgggaagattctggaagaggaaatgacaaggtacgcctattattactctggtctcggtgccggggtgttggtggccgcgtatatccaggtgtccttctggaccttagccgctggtaggcagattcgaaagataagacagaaattctttcatgctattctgaggcaggagatcggctggtttgacattaatgataccacagagttgaacacccgcctgaccgacgatatatccaaaatctcagaagggatcggggataaggtcgggatgttctttcaggcagtggctacttttttcgctgggttcatcgtcgggtttattcgaggatggaaactaactttggtgatcatggctatttccccaattttgggactgagcgcagccgtgtgggctaaaatcctcagtgccttttctgacaaggagctggccgcttacgctaaagccggtgcagtagcggaagaagccctcggggccattcgaaccgtgatcgctttcggtgggcagaataaagagctggaaaggtaccaaaaacatctggagaatgctaaggagatcggaataaagaaagccataagtgctaacatcagcatgggtatcgcctttttgctgatctacgcaagctacgcactagccttctggtatgggtctactctcgttatttcgaaggaatataccatcggaaatgctatgactgtatttttctctatcctgatcggagcatttagcgtaggacaagccgccccttgtatagacgcattcgcaaacgcccggggcgccgcatacgttatcttcgatatcatagataataaccccaaaatagactctttctcagagagaggacacaagccagactcgatcaagggcaacctagagtttaacgacgttcacttttcttacccttcacgggccaatgtcaaaatccttaaaggtctcaatctcaaggttcagagtgggcagacggtcgctctagtagggtcctccggatgtgggaagtccaccaccgtacaactcatccagagactatatgatccagatgagggtaccatcaacatagatggacaggatatcagaaactttaacgtgaattatttgcgggagataattggagtggtgagtcaagagccagttctttttagcacaactatcgcagagaatatttgctacggacgcgggaacgtaactatggatgagatcaagaaggccgtgaaagaggcaaatgcctacgagtttatcatgaagcttccccagaaattcgacaccctcgttggagagaggggagcccaactctctgggggccagaaacagcgaatcgctatcgcaagagccctcgtacgtaatcccaaaattctcctgctcgacgaggccacttcggccctagacaccgagtctgaagcagaagttcaagcagccctggacaaggccagagagggtaggacaactatagtgatcgcccacaggctctccacagtgagaaacgcggacgtcattgcaggattcgaggacggagtcatcgtggagcagggtagtcacagcgagctgatgaagaaggaaggagtgtattttaagctagtaaatatgcagacatcgggctctcagatccagagcgaggagtttgagttgaacgatgagaaagctgccaccaggatggctcccaacggctggaagagccgcttgttccggcacagtacccagaaaaatttgaagaattcccagatgtgccaaaagagtctggatgtggagacagatggactcgaggccaacgtgcctcccgtgtccttcctgaaagtgctcaaattgaataagacggagtggccctacttcgtggttggtacggtgtgtgcaattgcgaatggcgggctccagcccgcattcagtgtaatattttctgagatcattgccatctttggacccggggatgacgccgtcaagcagcagaaatgtaatattttttctctgatatttctttttttggggatcatctccttcttcacctttttcctgcagggcttcactttcggaaaagccggcgagattttaacaaggaggctgcggtctatggcattcaaagcaatgcttcggcaggatatgagctggtttgacgaccacaaaaactctaccggcgccctgtcaacaaggctggccacagatgccgcgcaggtacagggtgctacaggcacccgcctggcgctgatagcccagaacattgccaatctgggcacgggaattatcatttccttcatttatggctggcagcttactctcctgctccttgccgttgttcctattatagccgtctctggtatcgtcgaaatgaagctgctggctgggaatgccaagcgcgacaaaaaggagttggaagccgccgggaagatagccacagaggccatcgagaatattcggaccgtggtgtctctgactcaggaacgaaaattcgagtcgatgtatgtggagaaattgtacggcccgtatcgaaactcagtgcagaaggctcatatttatgggatcacattttccatctcccaggcattcatgtatttctcctatgctggttgctttcgctttggagcttatctgattgtcaacggtcatatgcgctttcgagacgtaatactcgtgtttagcgcaattgtgttcggagctgtagctcttgggcatgcgagcagcttcgcacctgactacgcaaaggccaagctctccgctgcgcacctattcatgttgtttgagcggcagcctctgatcgatagctacagcgaagaaggattaaagcccgataagttcgagggtaatataacttttaacgaagtggtgtttaactatcccactcgcgccaacgtcccggtgctgcagggcctatctctcgaagtcaaaaagggacagacattggccttagttggttcttcagggtgcggtaagtcaacagtggtgcagctactggaacgcttttatgaccccctagccggtacagtatttgtggattttggctttcagctgctggacgggcaggaggctaagaagctgaacgtacagtggctgcgtgcccagctcggcattgtcagccaggagccaattttgtttgattgttctattgcggaaaacatcgcctacggagacaactcccgcgtggtgtctcaggacgagattgtgagcgccgccaaggccgccaatattcacccattcattgagaccctgccacataaatatgagactcgcgttggagataaaggcacccaacttagcggaggacagaagcagagaatcgccatcgctcgggcactgatccggcaacctcagattctgctgctcgatgaagccacaagcgccctggacacagagagtgaaaaggtcgtgcaggaggctctggataaagctagggaggggaggacatgcatagtcatcgcccatagacttagtaccatccaaaatgctgatctaatagtggtttttcagaatggtcgtgtgaaggagcatggcacacatcaacaattgctggcccaaaaaggcatatactttagcatggtcagcgtgcaggccggaacacagaatctg

SEQ ID NO: 7577 - DNA, 3858 bp, synthetic construct
  misc_feature 1..3858: note = source = /note="Description of Artificial Sequence: Synthetic coding sequence"
  source 1..3858: mol_type = other DNA
atggacttggaagccgcaaaaaatggtacggcctggcggcccacttctgccgaaggggacttcgaattaggcatcagcagcaagcaaaaaaggaaaaagacaaaaactgtgaagatgatcggggtgttgaccttgttccgatatagcgattggcaggacaagttatttatgtccttaggcaccatcatggctatcgctcacggctcaggcctgccactcatgatgattgtgtttggcgagatgactgacaagtttgttgacactgcaggaaacttcagctttcctgtcaatttcagtctgtcacttctcaaccctggaaaaatactggaagaggaaatgacaagatatgcctactactactcaggactaggggctggagttctggttgctgcttacattcaggtatccttttggacattggccgcaggccgccagatacgaaaaattcgccagaagttttttcacgcaatcctgcgacaagaaatcgggtggtttgatattaacgacaccacggagctgaacacccgactgactgacgacatcagtaagatatcagagggtataggggacaaggtagggatgttttttcaggcggtagctacctttttcgcaggttttattgtcggatttatccgagggtggaagctcaccctggttattatggcaatcagccctatcttggggctgtcagcagctgtgtgggcgaagatcctctcggccttttcagacaaagaactcgcggcctacgcaaaggccggcgctgtggctgaggaggccctgggggcaatacggacagttatcgccttcgggggccagaacaaggagctggagagatatcagaaacatttagagaatgctaaggaaataggaatcaaaaaggcaatcagtgccaatatttccatgggcatagcttttctgctgatatatgcaagctacgcgcttgccttttggtacgggtctacattagtgatcagcaaagaatacactattggcaatgcaatgactgtgtttttttccatactaatcggggcattttccgtgggccaggccgccccctgtattgacgctttcgctaatgctcgtggcgcagcttatgtcatattcgacattatcgacaacaatcccaaaatagattctttctcggagcgaggacataagcctgactccataaagggaaatctggaattcaatgacgtgcatttctcttacccgagtcgggcaaatgtgaagatccttaagggactgaacttgaaggtacaaagtgggcagaccgtcgccctggtgggcagctctggctgcgggaaatctaccaccgtgcaactcattcaacgtctttacgacccagacgaaggaacaatcaatattgacggccaggatatcaggaattttaacgtgaattacctgcgggagatcatcggagtcgtgagtcaggaaccggtcctgttttcaactactatcgcggaaaacatttgctatggaaggggaaacgtcacaatggatgaaatcaagaaagccgtcaaggaggcgaatgcatatgaattcatcatgaaactgccccagaagttcgacacccttgtcggggagagaggtgcccagctatccgggggtcagaagcaaaggattgcaatcgcccgggcactggtaagaaatcctaaaatactcctactcgacgaggctacttcggccctggacacagagtcagaggcagaagttcaggctgccttggataaagctagggaaggcagaacgaccatagtgattgcccatcgtctgtctaccgtgcgcaacgcggacgtaattgcagggttcgaagatggcgtcatagttgaacaggggagtcactctgaactaatgaagaaagagggggtatatttcaagctggtgaacatgcagacatcaggcagtcagatccagagtgaggagttcgaattgaacgacgaaaaggccgcaaccagaatggctcccaacggttggaagagccgtctttttaggcactctacccaaaagaatctcaaaaattcacagatgtgtcaaaagtcattggacgtggagacggatggactggaagccaatgtgcctccggtttcttttttgaaagtcttaaaactgaacaagaccgaatggccttacttcgtcgtcgggacagtgtgcgccatcgcaaacggcggtctgcaacctgcgttctccgtgatctttagtgagattattgcaatctttggccctggcgatgatgcagtgaagcaacagaagtgcaatatcttctcactcattttcttgtttttgggcatcatatcgttttttacgttcttcctgcaaggtttcactttcgggaaggcaggcgaaattctaactagaagattgcgcagtatggcttttaaggcaatgctgcggcaggacatgagctggtttgacgaccataagaactccaccggtgctctgtctacaagactggctacagatgctgcccaggtccagggggccaccggcaccaggcttgcgctgattgctcaaaatatcgcaaatctgggcaccggcataatcatttcgttcatttacggctggcaattgaccctcctccttctggccgtcgtgcccatcattgctgtgagtggcatcgtggagatgaaactgcttgcaggaaacgctaaaagagataaaaaagagctggaagccgccgggaagatcgccaccgaagctatagaaaatatccgcacggtcgttagtctaactcaggaaagaaaatttgaatctatgtatgtggaaaaactgtatggtccctaccgcaactctgtgcagaaggcacacatatatggaatcacgttttcaatctcacaggctttcatgtacttctcctacgccggctgttttcggttcggtgcatacctgatcgtcaacgggcacatgagattccgtgatgtcattctggtgttcagtgctatcgtgtttggggccgtcgccctcggccatgccagctcctttgcccctgactacgcaaaagccaaactctctgcagctcaccttttcatgctcttcgaacggcagcccctgattgattcttactccgaggaggggctaaagccagataagttcgagggaaatatcacctttaatgaggtcgtattcaactaccccacacgggctaacgttcctgttctacagggtctatctctggaggtgaagaaggggcagaccctagcgttagtaggcagctccggctgcggaaaaagtacagtggtccaactactggagagattttatgatcccctggcggggaccgtgttcgtggatttcggttttcaactgctcgacggacaggaggcgaaaaaactcaacgtacagtggctgcgcgcacaattgggcattgtatcgcaagagccgattctttttgattgtagcatcgccgagaacatagcatacggagataatagtcgcgttgtgtcccaggacgagatcgtttccgcagcaaaagccgctaacatccatccttttattgagactctcccacacaaatacgaaacgagggtgggtgataaggggacccaactctcgggagggcagaaacagagaattgccatcgccagggcactgattcggcagccacagatcctgctgctggacgaagctactagcgcgttggacaccgagagcgaaaaagtagttcaggaggcccttgacaaagcccgtgaaggccggacgtgcatcgtgattgctcatcgtttatcaacaatccagaatgccgacttgatcgtggtcttccagaacggtagagttaaggaacatggaacccaccagcaactcctggcgcagaaaggaatctattttagtatggtgagcgttcaagcaggaactcagaacctt

SEQ ID NO: 7578 - DNA, 3858 bp, synthetic construct
  misc_feature 1..3858: note = source = /note="Description of Artificial Sequence: Synthetic coding sequence"
  source 1..3858: mol_type = other DNA
atggatctggaggccgcgaagaacggcaccgcctggcgcccgacttcggcggagggtgacttcgaactgggaatctcgtctaaacagaagagaaagaaaaccaaaaccgtcaaaatgatcggagtcctgaccctcttcagatacagcgattggcaagataagctctttatgtccctgggaacgatcatggccattgcacatggaagcggcctccctctcatgatgatcgtgttcggagaaatgactgataagttcgttgatactgctgggaacttctctttccctgtcaatttctccctgtccctgctgaaccccggtaagatcctggaagaagagatgaccaggtacgcatactactactccggcctgggagccggagtgctcgtcgcagcatacatccaagtctcgttttggaccctggctgcgggcagacagattaggaagatccggcagaagtttttccatgccatcctgcgccaagagatcggatggtttgacattaacgataccaccgaattgaacactcggctgactgacgacatctctaagatctccgaaggtatcggcgacaaggtgggcatgttcttccaggctgtggcgacctttttcgcgggattcattgtcggtttcatccgaggttggaaactcaccctggtcatcatggctatttcgccgatccttggcttgtcggctgcagtgtgggccaagatcctgtccgcattctccgacaaggaactggccgcctacgccaaagcaggcgcagtggccgaagaggcgctgggagccatcagaactgtcatcgcattcggtggccagaataaggagctcgaaagataccagaaacatctcgaaaatgcaaaggagatcggaatcaagaaggctatctccgccaacatctcaatgggaattgccttcctcctgatctacgcttcgtacgccctcgccttctggtacggttcgacccttgtgatctcaaaggaatacaccatcggaaacgcaatgaccgtgttcttttcaatccttattggtgcctttagcgtggggcaggcagcaccgtgtatcgacgcttttgcgaacgcacggggcgccgcatatgtgatcttcgacatcatcgacaataaccccaaaattgatagcttttcggagcggggacataagcccgacagcatcaaggggaacctggagtttaacgacgttcacttcagctacccaagtcgcgccaacgtcaaaatccttaagggattgaaccttaaggtgcagagcggacaaaccgtggcgctggtcggaagctccggctgtggaaagtcaactactgtgcagctgatccaacggctgtacgacccggacgagggaactataaacattgatggacaagacattcggaatttcaacgtgaactacctgcgcgaaatcatcggggtggtgtcgcaagagccagtcctgttcagcaccactattgcagaaaacatctgctacggacgcggaaacgtgaccatggatgaaatcaaaaaggctgtcaaggaagccaacgcctacgaattcattatgaagctgccgcagaagtttgacaccctggtcggggaacgcggagcccagctctcgggagggcagaagcagagaatcgccatcgcgagagccctggtgcgcaatccaaagatcctgctgctcgacgaggcaacttcggcactggacactgagtccgaagctgaagtgcaggccgccctggacaaagcccgggaaggacgcaccacgattgtcattgctcacagactgtcaaccgtgcggaatgccgatgtcatcgcgggattcgaagatggggtgattgtggagcagggcagccattccgagctgatgaagaaggagggggtctacttcaagctggtcaacatgcagactagcggtagccaaatccagagcgaggagtttgaactgaacgatgaaaaggctgccactcggatggcacctaacggatggaaatcccggctgttccgccatagcacgcagaagaacctgaagaactcccagatgtgtcaaaaatccctggacgtcgaaactgacggactcgaagcaaacgtgcctccagtgtccttcttgaaagtcctgaaactgaacaagactgagtggccctacttcgtggtgggtaccgtttgtgctatcgccaacggaggattgcagccggcgttctcggtcatcttttctgagatcatcgccatcttcggtcctggggacgacgcggtgaagcagcaaaaatgcaacatcttctcactcatctttttgttcctggggattatctcgtttttcaccttcttcctccaaggatttactttcgggaaggccggagagatcctgacccggcgcctgcgctctatggcgttcaaggctatgctccggcaggatatgtcctggttcgatgaccacaaaaactcgactggagcccttagtacccggctggcgactgacgctgcgcaggtgcagggggccactggaacgcgcctcgccctgatcgcgcaaaacatcgcaaacctgggaaccggcatcatcatctccttcatctacggatggcagctgactcttctcctgctggccgtggtccctatcatcgctgtcagcgggatcgtggaaatgaaactccttgccggtaatgcaaagcgggacaaaaaggagctggaggctgctggaaagatcgctaccgaagcgatcgagaacattagaaccgtcgtcagcctgacgcaagaacgcaaatttgagtccatgtacgtggaaaagttgtacggaccctataggaattccgttcagaaggcccacatatacggaattaccttttcgatctcgcaggccttcatgtacttttcgtacgcaggctgcttcagattcggagcctacttgatcgtgaacggacacatgcggtttcgcgatgttatcctggtgttctccgccatcgtgtttggagcagttgctttgggccatgcctcaagtttcgccccagactacgcaaaggccaaactgtccgcggcccacctcttcatgctgtttgaacgccagcctctcattgactcatacagcgaagaaggcctcaaaccagataagttcgaaggtaacattaccttcaatgaagtcgtctttaactacccgacccgggcgaacgtccctgtgttgcaaggcctgagcctcgaggtgaagaaagggcagactctggcccttgtgggttcttccggttgcggaaaatcgactgtggttcaactcctcgagaggttctacgacccccttgcgggaaccgtgttcgtggacttcggcttccagctcttggatggtcaggaagccaagaagctgaatgtccagtggcttcgcgcccaactcggaatcgtgtcccaggaaccaatcctcttcgattgctccatcgccgaaaacatcgcctacggagataattcgcgggtggtgagccaggacgaaatcgtgtcagctgctaaggccgccaacatccaccctttcatcgaaaccctcccacacaagtacgaaacccgcgtgggggacaaaggcacccagctgtcaggcggacaaaagcaacgcattgccattgctcgcgccctgattaggcagccacagatactcctgctggacgaggcgacctccgccctcgatactgaatcagaaaaggtcgtgcaggaagcgctcgataaagcgcgggaagggagaacctgcattgtgatcgcccaccgcctgtccactatccagaacgctgatctcatcgtcgtctttcagaacgggagagtgaaagaacacggaactcatcaacaattgcttgcacagaaggggatctacttttccatggtttccgtgcaggccgggacccaaaatctg

SEQ ID NO: 7579 - DNA, 3858 bp, synthetic construct
  misc_feature 1..3858: note = source = /note="Description of Artificial Sequence: Synthetic coding sequence"
  source 1..3858: mol_type = other DNA
atggacctggaggcggcgaagaacggaaccgcgtggcgtccaaccagcgccgagggagatttcgaactggggatctcctcgaagcagaagcgcaagaaaacgaaaaccgtcaagatgatcggggtgctgactctctttcgctactcggactggcaagataagttgttcatgtccctgggtactatcatggctattgcacacggaagcgggctgccgctgatgatgatcgtgtttggtgagatgaccgacaagttcgttgacactgctggaaatttctcatttcctgtgaacttctcgctgtccctcttgaatcctgggaaaatcctggaggaagaaatgaccagatacgcttattactactcaggactgggagcgggagtgctggtggccgcctacatccaagtctcgttttggaccttggctgctggtaggcagatcaggaaaatccgccagaagtttttccacgcaatactccggcaagaaataggatggtttgatatcaatgatactaccgaactgaacactcgcttgactgatgacatctccaaaatctcggagggaatcggcgacaaggtcggaatgtttttccaagctgtggcgacttttttcgccggctttatcgttggatttatcagaggatggaaactgacgttggtgatcatggctatctctcctatcctcggactttctgcagccgtgtgggcaaagatcctgtccgccttttccgataaggaactggccgcgtacgcgaaggcaggggctgtggccgaagaggcactgggagccatcagaaccgtgatcgcgttcggcgggcagaataaggaactcgagcgttaccagaaacatctcgaaaatgcgaaagaaattgggatcaaaaaggcgatctctgccaatatcagcatgggcatcgcgtttctgctgatctacgccagctacgcgcttgcattctggtacggatcaactttggtcatctcgaaggagtacaccattggcaacgccatgaccgtgttcttctcaatcctgattggggcgttctcagtaggccaggccgcgccgtgcatcgatgcttttgccaacgcgagaggggccgcctacgtgatcttcgatatcattgataacaatccgaaaatcgattcattttccgaacgcgggcacaagccagatagcatcaagggaaatctggagttcaatgacgtccacttctcgtacccgtctcgggccaacgtcaaaattctgaaggggctcaatctgaaggtgcaatccggccagaccgtggctcttgtcggcagcagcgggtgcggaaagtcgactactgtccagctcatccagagactctacgaccccgacgaaggcaccatcaatatcgacggacaggatattcggaactttaacgtgaattatctgcgcgagatcatcggagtagtctcccaagaaccggtgttgttttccactactatcgccgagaacatttgctacggaagaggaaatgtcactatggatgagatcaagaaggcagtcaaggaagccaatgcctacgaattcatcatgaaactgccccagaagttcgacactctggtgggggagcgcggcgcccagctctccggaggacagaagcagcgcatcgcaattgcgcgggcgttggtgcgcaacccgaagattctgctgctggatgaagcgacttcggcccttgacactgaatccgaagcggaggtgcaggccgccctggataaggctagagagggaagaaccactatcgtgatcgcccaccgcctgtcaacggtccgcaacgccgacgtgatcgccggattcgaggatggtgtgattgtggaacagggatcacattcggagctgatgaaaaaagaaggagtgtacttcaaactggtcaatatgcaaacttctggatcgcagattcaatctgaggaattcgaattgaacgacgaaaaggccgcgacccgaatggcgcccaatggttggaagtcgcgactcttccgccattcgacccagaagaacctgaagaatagccagatgtgccagaagtcgcttgacgttgagacggatggactcgaggccaatgtgcctccggtgtccttcctcaaagttctgaagctcaataagactgagtggccatacttcgtggtgggaactgtttgcgcgatcgccaacggagggctgcaacccgccttcagcgtcatcttctcagaaatcatcgcgatttttggcccgggagacgacgcggtgaaacagcaaaaatgtaatatcttctcgctgatcttcttgttcctgggtattatcagcttcttcaccttcttcctgcaaggattcactttcggaaaagcgggagagatcctgacccggcggcttcgctcgatggccttcaaggcgatgttgagacaggacatgtcatggttcgatgatcataagaactcgaccggcgccctctcgacccggctggcgaccgacgctgcacaggtgcaaggggcaaccgggactcgcctggccctgatcgctcaaaacatcgcaaacttgggcaccggaatcatcatctcctttatctacggttggcagttgaccctcctgcttctggccgtggtgccgatcatcgcggtgagtgggatcgtggaaatgaagctgctggccggtaacgccaagagagacaaaaaggagttggaggcggcaggaaagattgccaccgaagccatcgaaaacatccgcaccgtcgtgagcctgactcaggagcgcaagttcgagtcgatgtacgtggagaagctgtatggcccgtaccgcaacagcgtccagaaggcccatatctacgggatcaccttctctatctcacaggcctttatgtacttctcgtacgccggatgcttcagattcggagcgtacctgattgtcaatggacacatgcgattcagagacgtgatcctcgtgttctcagctattgtgttcggagccgtcgctcttggtcacgcttccagtttcgcaccggactatgcgaaggcaaaactgagcgccgctcacctgtttatgctcttcgaacggcaaccgctcatcgactcctactcggaagaggggctgaagccagataagttcgaaggaaacatcaccttcaacgaggtcgttttcaattatccgacccgcgcaaacgtgccggtgctgcaagggctttcgttggaggtcaaaaagggacaaaccttggccctggtcggatccagcggttgcgggaagtcaactgtggtccaactgttggaacgcttctacgacccactggcaggaactgtgtttgtggatttcggtttccagctcttggacggccaggaagctaagaaactcaatgtgcagtggctcagggctcagctgggtatcgtgtcgcaagagcccattcttttcgactgcagcatcgctgagaacatagcttacggcgataactcccgggtggtgtcgcaggacgagatagtgtccgccgcgaaagcggcaaatatccacccgttcatcgaaaccctcccacacaagtacgaaaccagagtgggagacaaggggactcaactgtcaggcggacagaaacaaagaatcgcgattgcgcgggccctgatccgccagccacagattttgctgctcgacgaggccactagcgccctggacaccgaatccgaaaaggtggtgcaagaggcgctcgacaaggccagagaaggacgcacctgtattgtcatcgcccaccggctgtccaccatccagaatgccgacctgatcgtggtgtttcagaacggaagagtcaaagagcatggaactcatcagcaactgctcgctcagaaaggcatctacttctccatggtgtcggtgcaagccggaacccagaacctg

SEQ ID NO: 7580 - DNA, 3858 bp, synthetic construct
  misc_feature 1..3858: note = source = /note="Description of Artificial Sequence: Synthetic coding sequence"
  source 1..3858: mol_type = other DNA
atggacttagaggcagccaagaacggaacagcatggaggccaaccagcgccgagggcgatttcgaattgggcatcagttcaaagcagaaaaggaagaagaccaaaactgttaagatgatcggcgtcctcactctctttcggtatagtgactggcaggataagctatttatgtcacttggcacgattatggccatcgcccatggcagcggcttgccactcatgatgatagtcttcggagaaatgaccgacaagttcgtggacacagccggcaactttagtttcccagtgaacttctccctctcactccttaacccaggaaaaatccttgaggaagagatgacccgttacgcatattattacagcggtttgggggctggcgtactcgtcgctgcctacatccaggtgagcttctggaccctggctgccggaaggcagatccgcaaaatcagacagaagttttttcacgctatacttcgacaagagatcggatggttcgacatcaatgacaccactgaactcaataccaggctgacagacgatatatccaagatctctgagggaataggcgataaggtgggtatgttcttccaggcagtcgccactttcttcgccggatttatcgtcggcttcattagagggtggaaactcactctcgtgatcatggcaatatccccgatcctggggctgagcgccgctgtttgggcgaaaatcctgagcgctttttcagacaaagagctggccgcttacgccaaagcaggcgccgttgctgaagaggccctgggagcaatacggaccgtcattgctttcggaggccagaacaaagagttagagaggtaccaaaagcacctggagaatgctaaagagattggaattaagaaggctattagtgcaaatatttccatgggcatcgcttttctccttatttacgcctcctatgccctcgcgttctggtacggcagcaccctcgtcatatcaaaagagtacacaattggcaatgcgatgaccgtgttcttttcaattctcattggcgctttcagtgtcggacaggccgccccttgtatagatgcctttgcaaacgctagaggagcagcatacgttatcttcgacatcatcgacaataaccccaagatcgatagcttttctgagagagggcataagcctgactcgatcaaggggaacctggagtttaacgacgttcacttctcctacccgagtagagccaacgtgaaaatcctgaaggggctgaacctgaaggttcagagcggccaaactgtcgccctggtgggcagcagcggctgtggtaagagtaccactgtgcagctcatccagcgcctatacgaccctgacgagggcaccataaatatagacggacaggacattcggaactttaacgtgaactatttgagagaaatcatcggcgtagtctcacaggaacccgtgctgttcagtactaccatcgcggaaaacatttgctacggccggggtaacgttactatggacgaaattaaaaaggccgttaaggaggccaatgcctatgagttcatcatgaagcttccccagaagtttgacacacttgtgggcgagcggggtgcacagctgagtggaggtcagaagcagcggatcgccattgcccgagcgctcgtaaggaatcctaaaatcttacttctggacgaggctacatctgcattagataccgagagcgaggcggaagttcaggccgccctcgacaaggcaagagaaggccgcacaacaattgtcatagcacacaggctgtccactgtgaggaacgccgacgtcatcgctggctttgaggacggcgttatcgtcgagcagggatctcactctgaactgatgaagaaggaaggagtctactttaaactggtcaacatgcagacctcagggtctcaaattcaatcagaggaatttgagcttaatgacgaaaaggccgccacgagaatggcccccaatggctggaagtctcgcctcttccgtcacagtacgcagaagaacctgaagaactctcagatgtgccagaagagtctcgacgtggaaactgacggcctggaagccaatgtgcccccggtatcatttctaaaggtgctcaaattgaataagacagaatggccatacttcgttgtggggaccgtgtgcgccatagccaatggggggctgcaacccgctttttctgtgatctttagcgagatcattgctatctttggtcccggggacgacgccgtcaaacagcagaaatgcaatatcttcagtctgatcttcctgttcctgggtataattagcttcttcacattctttctgcaggggttcacatttggaaaagctggcgagatcctgacaaggcgactccggagcatggcatttaaggcaatgctgaggcaggacatgagctggttcgacgatcataagaactctactggcgcactgagcactcgcttagccaccgacgccgcccaggtgcaaggggcaactgggacgcgcctggcattaatcgcccagaacatagcaaatctgggcaccgggattattatttcattcatctacggatggcaacttaccctgcttctgctggcagtggtgcctatcattgctgtgtcaggtatcgtggagatgaaactgcttgccggcaacgccaagagagacaaaaaggaactggaagcggccggtaaaattgccacagaggccattgaaaacattaggaccgttgtgagtctgacacaggaacgcaaatttgagtcaatgtacgtggagaagctgtatggtccctacaggaatagtgtgcagaaggcccacatctatggcattacatttagtatatcacaggctttcatgtacttctcctatgccggctgtttcaggttcggtgcctacctgatcgtgaatgggcatatgaggttccgcgacgtcatcctcgttttttccgctattgtttttggcgcagtcgcactggggcacgcatcttcattcgcccctgattacgcaaaggcgaaactatccgccgcgcacctgtttatgctgtttgaacggcagcctctgattgacagttactctgaggagggcctgaagcccgataagttcgaggggaacattactttcaacgaagtggtgttcaattatcctaccagagctaacgtccccgtactacaggggctgtcacttgaagtgaagaaaggccagacgctggcccttgtaggttcttccggttgcggtaaatctacagtggtacagctacttgaacgattctacgatccactggcaggcactgtctttgtggattttggatttcagttgcttgacgggcaggaagcgaaaaagctcaatgttcagtggctgcgggcccaactcggtatcgttagtcaggagccaattctgttcgattgcagtatcgccgagaacattgcatacggggataactcccgtgtggtgagtcaggatgagatcgtgagcgccgccaaagcggcaaacatacatccattcatcgagactcttcctcacaagtacgagactcgggtgggcgataaaggaacacagctgtcaggggggcaaaaacaacgaattgctattgcacgggccctcatccgccagcctcaaattctgctgctggatgaagctacaagcgcactcgatacagaatccgaaaaagtcgtgcaagaggctctggataaggctcgtgagggtcggacatgcattgtgatcgcacatagattatctacaattcagaatgctgacctgatcgtcgtcttccagaacggcagagtgaaggagcacggcacccaccagcaactgttggcacaaaaaggtatctacttttcaatggttagcgttcaggccggaacacagaacctc

SEQ ID NO: 7581 - DNA, 3858 bp, synthetic construct
  misc_feature 1..3858: note = source = /note="Description of Artificial Sequence: Synthetic coding sequence"
  source 1..3858: mol_type = other DNA
atggacctcgaagccgcaaagaatggaactgcctggcggccaacctcggcagaaggagattttgaactgggaataagctccaaacaaaaacgcaagaaaacgaagacagtgaaaatgatcggggtgttaacccttttcagatacagtgattggcaggataagctctttatgtccctaggaactataatggctattgctcatgggtccggactgcccctgatgatgattgtgtttggggaaatgacagacaagttcgttgacaccgccggaaatttcagtttccctgtaaatttcagcctttccctcctcaatcctggtaaaattcttgaagaggaaatgacaaggtacgcgtattattactctggtcttggtgccggagtccttgtcgccgcttacatccaggtctccttctggaccctagcggccgggcggcaaatcagaaagatccgacagaagtttttccatgcgatcctgaggcaagaaataggttggttcgatatcaacgatacaacagaactcaacactcgcctgaccgatgacatcagtaagatatccgagggcataggtgacaaggtaggaatgtttttccaagccgtggcaacatttttcgctggttttattgtcgggtttatcagaggttggaaactgaccctggttataatggccattagtcctatcctagggctatccgctgctgtgtgggcaaagattctctcggcattcagtgataaggagctggcagcgtatgcaaaagctggtgctgtagccgaggaagcactgggggcaatcaggaccgtgattgctttcggaggccagaacaaagagctagaaagataccagaaacatctcgaaaacgccaaggaaattgggatcaagaaggcgataagcgcgaatatcagtatgggcatcgccttcctgctgatctacgcatcatatgccctggctttttggtacgggtccaccctagtgatatctaaagagtatactataggaaacgcgatgactgtgtttttcagtatcctcattggtgccttctcagttggacaggccgctccatgtatcgacgccttcgccaacgctagaggagcagcttatgtcatattcgatatcattgacaacaatcccaagatcgattctttctccgaacgtggtcataagcccgacagcatcaagggtaacctggagttcaatgacgtgcatttctcctatcccagccgcgccaatgtgaagatcctgaagggcctcaatctgaaggtgcaatcaggccagaccgtggcgctagtggggagctcaggatgtggaaagagtactactgtccagctgattcaaagactgtacgatcctgatgaaggcactattaacatcgatgggcaggatatccggaactttaacgtgaattacctgcgagaaatcatcggcgtggtgagccaagaaccagtactcttttcaacaacgatcgccgaaaacatctgctatggccggggcaacgtgacaatggatgagatcaagaaggccgtcaaggaagccaatgcctacgagtttataatgaaacttccacaaaaatttgataccctggtaggggagagaggggcccagctgtcaggggggcagaagcaacggattgcaatcgcaagagcactcgttagaaatcctaaaattttgctgcttgatgaagctacgagcgctttggataccgaatccgaggcggaggtgcaggccgcactcgacaaggctagagaaggtagaaccaccatcgtgatcgcacatagactcagcacggtaaggaacgcggacgtgatcgccgggttcgaggatggcgtgatcgtggagcagggaagccacagtgagctgatgaagaaagagggggtttattttaaactggtgaacatgcagacaagcggatctcagattcagtctgaagagttcgagctcaatgacgaaaaggccgctaccagaatggcaccgaatggttggaagtccaggctattcagacacagtacccaaaaaaatttaaagaactcccagatgtgccaaaaatccctagatgtggagacagatggattagaagcgaacgttccaccagtgtctttcctgaaggtgttgaagttaaataaaaccgaatggccgtacttcgttgtgggtacagtatgcgctattgcaaacgggggacttcagccagcattctctgtgattttttcagaaatcatagccatattcggccccggggatgacgctgtgaagcagcagaaatgtaacattttttccctgatttttctttttttgggcattattagtttctttacctttttcttgcaagggttcacgtttggaaaggcgggggagattttgaccaggagattgcgctcaatggccttcaaagccatgctgcggcaagatatgtcatggttcgacgaccataagaactccacaggggcactgtccacccgcctggccaccgacgctgcacaggtacagggtgctacagggacccgcttggcgctgatcgctcagaatatcgcaaatcttggtacggggatcatcatcagttttatatatgggtggcagctgacattactgctcttagcagtcgtgcccatcatcgccgtctccgggatcgtggaaatgaaactactggccggcaatgctaagagggataagaaagagcttgaggccgcaggcaaaatcgctaccgaggccatcgagaacatcagaacagtcgtgtcgctaacccaggagcgcaagttcgaaagcatgtatgtggagaagctgtacggaccctacaggaactctgtacagaaagctcacatttatggaataaccttctcaatctcacaggcgttcatgtacttttcgtacgccgggtgcttccgatttggggcttacttgatcgtgaacgggcacatgcggtttcgggacgtgatcctggtattctcagctatagtcttcggggccgtggcactgggacacgccagttctttcgctccagattatgcaaaagccaaattgtcagcagctcatctgtttatgctcttcgagcgacagcccctgatcgactcttattcagaggagggcctgaaacctgacaaattcgaggggaatatcacctttaacgaagtggtgttcaattacccaactagggcgaatgtgccagttctgcagggattgtctctagaggtgaagaaaggccaaactttagcgcttgttgggagtagcggatgcggaaaaagtactgttgttcagttgcttgagaggttctacgacccccttgccggcacagtctttgtagatttcgggtttcagctgctggacggccaggaggccaagaagctgaacgtgcagtggctaagagctcagctcgggatcgtgtcacaggagcccatcctgtttgattgcagcattgcagagaatatcgcgtatggagataattccagggtagtgagccaagacgagattgttagcgcggcaaaagccgccaatatccatccatttattgagactctccctcacaaatatgagacacgcgtgggcgataagggtacacagctgtccggaggccagaagcagcgaattgcaatcgcccgtgcgctgataaggcagcctcagattctactgctggatgaggctacgtctgctctggacaccgagtccgaaaaggtagtgcaagaagctctggataaggctcgagagggccggacctgcatcgtgatagcccaccgactgagtactattcagaacgcagacctcatagtcgtgttccagaacggcagagttaaagagcatggaacccaccagcaactgcttgctcagaagggaatttactttagcatggtctcagtgcaagcaggaacgcagaatctt

SEQ ID NO: 7582 - DNA, 3858 bp, synthetic construct
  misc_feature 1..3858: note = source = /note="Description of Artificial Sequence: Synthetic coding sequence"
  source 1..3858: mol_type = other DNA
atggacctggaagcggccaaaaatggaaccgcatggaggcccacttctgcggagggggactttgagctggggatcagtagcaaacaaaaacggaagaaaaccaaaacagtaaagatgatcggtgttctgacactattcaggtactctgattggcaggataagctgtttatgtctctgggaacgataatggctattgctcacgggtccggtcttccccttatgatgatagtctttggggaaatgacagataagttcgtggataccgccgggaattttagtttccctgtcaatttttcactatctctgctcaaccccgggaaaatactggaagaagagatgacccgttatgcatactactactccggtttaggcgccggtgtgttagtggccgcctacatacaggtgtctttctggaccctggctgcgggacggcagattcggaaaatccgtcagaagtttttccacgccatcttgcgacaggagattggctggttcgacataaatgatacaaccgagcttaacaccaggttaaccgatgatatatccaaaattagcgaagggattggcgataaagtgggaatgtttttccaggctgtagctaccttttttgccggtttcatagtcggtttcattcgcggatggaaactgaccttagttatcatggccatatctccaatcctagggctgagcgctgctgtgtgggcaaaaattctcagcgcctttagtgataaggagctcgccgcatacgctaaggcaggtgcagtggcagaggaagccctcggagcgatcagaactgtaattgcctttgggggacagaacaaggaattggaaagataccagaaacacctcgaaaatgcaaaagagatagggatcaaaaaagcgatctccgcaaatatttccatgggtattgccttcctgcttatctatgctagttacgcattggccttttggtacggctccactcttgtgatcagcaaggaatacacaattggaaacgccatgaccgtttttttctcaatccttatcggggcgtttagtgttggacaggccgcgccttgcatagatgcctttgcaaatgcaagaggcgcagcctacgtgatctttgacataatcgacaacaaccctaaaatcgactctttctccgaacggggccataaacctgacagtataaagggcaatctggagtttaatgatgtgcacttttcataccccagccgagctaatgtaaagatcttgaagggacttaatctcaaggtccagagcggccagaccgttgcccttgttggatcctctggatgcggcaaaagtactactgtccagctgatccagaggctgtatgaccccgatgaggggaccatcaacattgatggccaggacattcgcaatttcaacgtaaactacttacgagaaattatcggggtcgtgagccaggaaccggtactgttctccacaaccatcgctgagaatatttgttatgggcgcggcaatgtcactatggacgagatcaaaaaggcggttaaagaggccaacgcctatgaatttataatgaaattaccccagaagtttgacacattggttggcgagagaggcgcccagctgtcgggaggccaaaaacagcgtatcgccattgcccgcgccttagttcgaaatccgaagatattgctgctggatgaagctacctccgctcttgacacagaaagcgaggctgaggtacaggctgcgctggacaaggcacgcgagggaagaaccactatcgtcattgctcaccgcctgagtacagtgaggaatgcagacgttatcgcggggtttgaggacggggttatagtggaacagggcagtcattctgagctgatgaagaaagagggcgtgtatttcaaactggtgaatatgcagacaagtggctctcagattcagtcggaggaatttgaactaaacgacgaaaaagccgcgaccagaatggccccgaacggatggaaatcaaggcttttccggcacagcacccagaaaaacctgaaaaactcccagatgtgtcagaagtcacttgacgtagagactgacggcctggaagcgaatgttcctcccgtgagttttctgaaagtgttgaagctgaataagaccgaatggccatacttcgtcgtcgggacagtctgcgctatcgccaatgggggtttacagcctgcatttagtgttatctttagcgaaatcattgctatcttcggacctggagatgacgcggtcaagcagcagaagtgtaacatcttttccctcatctttctgttcctgggtatcatctccttctttacattttttctgcagggcttcaccttcggcaaagcaggtgagattctgactcggcggttgcggagcatggccttcaaggccatgctgaggcaggacatgtcttggtttgatgaccacaagaattctacgggcgccttatccacccgactagccaccgacgctgcccaggtgcagggagctacaggaacccgcctcgcactgatcgcccagaacatcgctaacctcggaacagggataataatttcattcatctacggctggcagctcactttgcttctgctggctgtagtgcctatcatagccgtttccggaatagttgagatgaagctgctcgctggcaacgccaagcgggataaaaaagaattggaggcagctggcaagatcgctactgaggcaatcgaaaacatccggactgtggtgagcctgacacaagaaagaaaatttgagtctatgtatgtggagaagctgtacggaccatatcgcaatagcgtgcagaaggcccacatctacggtatcacgtttagcataagtcaggccttcatgtacttctcatacgctggttgcttccgctttggcgcataccttatcgtgaacggccacatgagatttcgcgatgtcatcttggtttttagcgccattgtttttggggccgtggcacttggacatgcctcaagttttgcacccgactacgccaaagctaagctgtccgccgcccacctgtttatgcttttcgagcgacagccacttatcgatagctactctgaagagggccttaaaccagacaaattcgaaggcaatattacgtttaacgaggtcgttttcaactacccgactcgtgccaacgtaccggtccttcaggggctgagccttgaagtaaaaaagggacagactcttgctctcgtcggcagttctgggtgcggcaagtctactgtggtgcaactgttagaacggttttacgatccactggccggaacagtatttgtggactttggctttcagctgttagatggccaagaagccaaaaagctgaatgtgcagtggttgcgcgcacagctgggcattgtcagccaggagccaatactgttcgattgtagcatcgcagagaatattgcctacggagataactccagagtcgtttctcaggacgaaatcgtgagcgcggccaaagccgccaacatccacccgttcatcgagaccttgccccacaaatatgaaacccgagtcggcgacaagggtacccagctttccgggggccagaagcaacgcatagctatcgcacgggcattaataaggcagcctcagatactgctgctggacgaagctacctccgccctcgacaccgagtctgagaaggtcgtccaagaagccctggataaagcaagggaaggacgcacctgtattgtaattgcacacaggctctccaccattcagaatgccgacctcatagtcgtgtttcagaacgggcgggtcaaggagcacgggactcaccagcagcttctggcccagaaaggtatatattttagtatggtgagtgtgcaagcggggacgcaaaatctg

SEQ ID NO: 7583 - DNA, 3858 bp, synthetic construct
  misc_feature 1..3858: note = source = /note="Description of Artificial Sequence: Synthetic coding sequence"
  source 1..3858: mol_type = other DNA
atggatttagaagcggcgaaaaatggtacggcgtggcgtccgacgtcggcggaaggtgattttgaattaggtatatcgtcgaaacaaaaacgaaaaaaaacgaaaacggtaaaaatgataggtgttttaacgttatttcgatattcggattggcaagataaactatttatgtcgttaggtacgataatggcgatagcgcatggttcgggtctaccgttaatgatgatagtttttggtgaaatgacggataaatttgtagatacggcgggtaatttttcgtttccggtaaatttttcgctatcgctattaaatccgggtaaaatactagaagaagaaatgacgcgttatgcgtattattattcgggtctaggtgcgggtgtattagttgcggcgtatatacaagtatcgttttggacgttagcggcgggtcgtcaaatacgaaaaatacgacaaaaattttttcatgcgatactacgtcaagaaataggttggtttgatataaatgatacgacggaactaaatacgcgattaacggatgatatatcgaaaatatcggaaggtataggtgataaagtaggtatgttttttcaagcggttgcgacgttttttgcgggttttatagttggttttatacgaggttggaaactaacgctagttataatggcgatatcgccgatattaggtttatcggcggcggtatgggcgaaaatactatcggcgttttcggataaagaactagcggcgtatgcgaaagcgggtgcggtagcggaagaagcgctaggtgcgatacgtacggttatagcgtttggtggtcaaaataaagaattagaacgttatcaaaaacatctagaaaatgcgaaagaaataggtataaaaaaagcgatatcggcgaatatatcgatgggtatagcgtttctactaatatatgcgtcgtatgcgttagcgttttggtatggttcgacgctagtaatatcgaaagaatatacgataggtaatgcgatgacggtatttttttcgatactaataggtgcgttttcggttggtcaagcggcgccgtgtatagatgcgtttgcgaatgcgcgaggtgcggcgtatgttatatttgatataatagataataatccgaaaatagattcgttttcggaacgaggtcataaaccggattcgataaaaggtaatttagaatttaatgatgtacatttttcgtatccgtcgcgagcgaatgtaaaaatattaaaaggtctaaatctaaaagttcaatcgggtcaaacggtagcgctagtaggttcgtcgggttgtggtaaatcgacgacggtacaattaatacaacgactatatgatccggatgaaggtacgataaatatagatggtcaagatatacgaaattttaatgtaaattatttacgtgaaataataggtgttgtttcgcaagaaccggttttattttcgacgacgatagcggaaaatatatgttatggtcgaggtaatgtaacgatggatgaaataaaaaaagcggttaaagaagcgaatgcgtatgaatttataatgaaactaccgcaaaaatttgatacgttagtaggtgaacgtggtgcgcaactatcgggtggtcaaaaacaacgtatagcgatagcgcgtgcgttagttcgaaatccgaaaatattactactagatgaagcgacgtcggcgctagatacggaatcggaagcggaagttcaagcggcgctagataaagcgcgtgaaggtcgtacgacgatagtaatagcgcatcgtttatcgacggtacgtaatgcggatgtaatagcgggttttgaagatggtgttatagttgaacaaggttcgcattcggaactaatgaaaaaagaaggtgtttattttaaattagtaaatatgcaaacgtcgggttcgcaaatacaatcggaagaatttgaattaaatgatgaaaaagcggcgacgcgaatggcgccgaatggttggaaatcgcgtctatttcgacattcgacgcaaaaaaatctaaaaaattcgcaaatgtgtcaaaaatcgctagatgttgaaacggatggtttagaagcgaatgtaccgccggtttcgtttttaaaagtattaaaattaaataaaacggaatggccgtattttgttgtaggtacggtttgtgcgatagcgaatggtggtttacaaccggcgttttcggttatattttcggaaataatagcgatatttggtccgggtgatgatgcggtaaaacaacaaaaatgtaatatattttcgctaatatttctatttctaggtataatatcgttttttacgttttttttacaaggttttacgtttggtaaagcgggtgaaatactaacgcgtcgattacgttcgatggcgtttaaagcgatgttacgacaagatatgtcgtggtttgatgatcataaaaattcgacgggtgcgttatcgacgcgtctagcgacggatgcggcgcaagttcaaggtgcgacgggtacgcgtctagcgctaatagcgcaaaatatagcgaatttaggtacgggtataataatatcgtttatatatggttggcaactaacgttactactactagcggtagttccgataatagcggtatcgggtatagttgaaatgaaactattagcgggtaatgcgaaacgagataaaaaagaattagaagcggcgggtaaaatagcgacggaagcgatagaaaatatacgaacggtagtttcgttaacgcaagaacgtaaatttgaatcgatgtatgtagaaaaactatatggtccgtatcgaaattcggtacaaaaagcgcatatatatggtataacgttttcgatatcgcaagcgtttatgtatttttcgtatgcgggttgttttcgatttggtgcgtatctaatagtaaatggtcatatgcgttttcgtgatgtaatattagtattttcggcgatagtatttggtgcggttgcgttaggtcatgcgtcgtcgtttgcgccggattatgcgaaagcgaaactatcggcggcgcatttatttatgttatttgaacgacaaccgctaatagattcgtattcggaagaaggtctaaaaccggataaatttgaaggtaatataacgtttaatgaagtagtatttaattatccgacgcgtgcgaatgtaccggttttacaaggtctatcgttagaagtaaaaaaaggtcaaacgctagcgttagttggttcgtcgggttgtggtaaatcgacggtagtacaattactagaacgtttttatgatccgctagcgggtacggtatttgtagattttggttttcaattattagatggtcaagaagcgaaaaaattaaatgttcaatggctacgagcgcaactaggtatagtatcgcaagaaccgatattatttgattgttcgatagcggaaaatatagcgtatggtgataattcgcgagtagtatcgcaagatgaaatagtatcggcggcgaaagcggcgaatatacatccgtttatagaaacgttaccgcataaatatgaaacgcgtgtaggtgataaaggtacgcaattatcgggtggtcaaaaacaacgaatagcgatagcgcgtgcgctaatacgacaaccgcaaatactattattagatgaagcgacgtcggcgttagatacggaatcggaaaaagtagtacaagaagcgttagataaagcgcgtgaaggtcgtacgtgtatagtaatagcgcatcgtctatcgacgatacaaaatgcggatttaatagtagtttttcaaaatggtcgagtaaaagaacatggtacgcatcaacaactattagcgcaaaaaggtatatatttttcgatggtatcggtacaagcgggtacgcaaaatcta

SEQ ID NO: 7584 - DNA, 3858 bp, synthetic construct
  misc_feature 1..3858: note = source = /note="Description of Artificial Sequence: Synthetic coding sequence"
  source 1..3858: mol_type = other DNA
atggatttggaggctgcgaaaaacggtacagcttggcgaccaacctcggccgaaggagacttcgagctggggattagctcaaaacagaaaaggaaaaagaccaagaccgtaaaaatgattggcgtcctgactctgttccggtattcagactggcaggataagctgtttatgtctctcggtactatcatggctattgcgcacggctcagggctcccgctgatgatgatagtcttcggtgaaatgaccgacaaattcgtggacaccgccggcaacttctcctttccagtcaattttagtctgtctttactgaaccccggaaagattcttgaggaggaaatgacaagatacgcatactactactctgggctcggtgcaggcgtgttggtggccgcctatatccaggtatctttctggaccctggccgcaggtcggcagattaggaaaatccggcagaagttctttcacgccattctcagacaggagatcggttggtttgacatcaacgacaccaccgagctcaatacaaggctgacagacgatatctctaagatctccgagggtattggagataaggtaggtatgttcttccaggcagtcgcaacctttttcgcgggtttcattgtcggcttcatacgcgggtggaaactcacactggtaattatggctattagccctattctcggcctttcagctgccgtctgggccaaaattttgagcgcgttctcagacaaagagctggctgcctacgcaaaggcaggggcagttgcagaagaggctttgggagccatcaggactgtgatcgcttttgggggccagaacaaagagttggaaagatatcaaaaacatctcgaaaacgcaaaagagatcggcatcaagaaagccatctccgccaacataagtatgggaattgcctttctgctcatatatgcctcctacgctctggccttctggtatggcagcaccctcgtgattagcaaggagtatacaatcgggaatgccatgactgtctttttcagcatcctcatcggagcctttagcgtgggccaggctgcgccatgcatcgacgccttcgcaaacgccaggggggccgcctatgtgatttttgacataatcgataacaaccccaagatagattcattctctgaacgcggccacaaacctgattccattaaggggaaccttgagtttaacgacgtccacttctcgtacccttctagagctaacgtaaagatcctgaagggcctgaatttgaaagtacagagcggtcagaccgttgccctcgtggggtcctccggctgtggaaaaagtaccaccgtccagcttattcagagactgtacgacccggatgaaggcaccattaatatagatggacaggacattcggaattttaatgttaactacctgcgagagattattggggtggtgtctcaagaacctgtgttgttttcgaccaccattgccgagaacatctgctatgggaggggcaacgttaccatggacgaaatcaaaaaagccgtgaaggaggcaaacgcatatgagtttatcatgaaactgccacagaagttcgacacgctggtcggcgaaagaggcgcacagctgagcggaggccagaaacagcgcattgcaatagcaagagccttggtgcgaaaccccaagattctattgttggatgaagcgacgagtgccctggacactgaaagcgaagctgaggtgcaagccgccttagacaaagcgcgcgaggggagaactaccatcgtgatcgctcaccgactttccactgtcagaaatgccgacgtcatcgccggctttgaggacggggtaatagttgaacagggatcgcatagcgagctaatgaagaaggaaggagtgtactttaaactcgtcaatatgcagactagcggcagtcagatacagtcagaggagttcgagctaaatgatgaaaaagccgccacaaggatggcccctaatggatggaaaagcagattgtttagacattcaacccagaagaacctgaagaattctcagatgtgccagaagtccctggatgttgaaacggacggtctggaagctaatgtgccccctgtcagtttcctgaaggtgctcaagcttaacaagaccgaatggccctattttgttgtaggtactgtttgtgctatcgccaacggagggctgcagccagccttcagtgtaattttctcagagattatcgccatttttggccctggggatgatgccgttaaacaacaaaaatgcaatatcttcagtctgatattcttgttcctcggtattatatcctttttcaccttctttctacaaggctttacctttgggaaagcaggagaaatcctcacacgtcgtttacggtcaatggccttcaaagcaatgttgcgccaggacatgagctggttcgatgaccacaaaaacagtaccggcgcgttgagtacgcgcctggcgacagacgccgctcaggtgcagggtgctactgggaccaggctcgcccttattgcccagaatatcgccaatcttggaactggcattattatcagttttatctacggttggcagctgacactgttactacttgctgttgtcccgatcatcgccgtaagcggtattgtggagatgaagctactggcgggaaatgctaagagggacaaaaaggagctcgaggcagcaggaaaaattgcaacagaggcaattgagaatattcgtaccgtggtatcattaacccaggagcgcaagttcgagtccatgtatgtcgaaaagctttatggcccgtataggaacagcgtgcagaaggcccacatatatgggatcacctttagcatcagtcaggccttcatgtatttctcgtatgctgggtgttttcgctttggagcctaccttattgtgaacggccatatgaggttccgggatgtgatcctggtgttttctgccatcgtgtttggggccgtggctctgggtcatgcgagctcattcgcccctgattatgctaaggccaagctttccgctgcccacctgtttatgctgttcgagagacagccactgattgattcatactcagaggaggggctaaagcccgacaagtttgagggaaacatcacattcaatgaggttgtctttaactatccaactagggccaacgtcccagttctgcaaggactgagtcttgaggttaaaaagggccaaaccctcgccttagttggatctagcggctgcgggaagagtaccgtcgtccagctcctggaacggttttatgatccactagcagggacagtttttgttgatttcggttttcagcttctggacggccaagaagcaaaaaagttgaatgtccagtggctgagggctcagctaggaatcgtctctcaggagcccattctgttcgactgttctattgccgagaacatcgcttacggtgacaatagcagagtggtctcccaggatgaaatagtgtccgcagccaaagcagccaatattcacccatttatagagacactgccccacaaatatgagacccgtgtgggcgataaaggtacacagctcagtggcggtcaaaagcagcggatcgccattgctagggcgttgatcagacagccgcagatcctgttgctggacgaagctacgtccgcattggacactgaatcagagaaggtagttcaggaggctcttgacaaggctcgtgaaggacgcacatgtatcgttatcgctcacagattgtccacaatccaaaatgccgacctgatcgtggtgttccagaacggaagggtcaaggagcacgggacacatcagcagttgctggcacaaaaaggaatatatttctcaatggtctccgttcaggcgggcacacagaatctg

SEQ ID NO: 7585 - DNA, 3858 bp, synthetic construct
  misc_feature 1..3858: note = source = /note="Description of Artificial Sequence: Synthetic coding sequence"
  source 1..3858: mol_type = other DNA
atggacctcgaagcagcgaagaacggaaccgcgtggcgcccgacctccgccgagggagactttgaattgggaatctcgtcaaaacagaaaagaaagaaaaccaaaaccgtgaaaatgataggagtgttgactttgttccggtactcggactggcaagacaagctgtttatgtcactgggtaccataatggctattgcccacgggtccgggctgccgctgatgatgatcgtctttggggagatgaccgacaagttcgtggatactgccggaaacttttccttcccggtcaacttttccctgtcactgctgaatccagggaagattttggaggaagagatgacgcggtacgcctactactactcaggcctcggagcgggagtgctggtcgctgcatacattcaagtgagcttttggactcttgccgccggccgccagatcaggaagatccggcagaagttcttccatgccatcttgcggcaagagatcggctggtttgatatcaacgatacgaccgagcttaatactaggctgactgatgacatttcaaagatcagcgaaggaatcggagacaaggtcggcatgttcttccaagccgtggccactttcttcgccggcttcatcgtcggtttcatacgcggatggaagctcaccctcgtgatcatggccatttcccccatccttggcctctcagccgccgtgtgggcaaaaatcctgtcggcttttagcgacaaggaactggccgcgtacgctaaggcaggcgctgtggccgaagaagcgctcggggcgattcggacggtgatcgcgtttggagggcagaacaaagagctggaaagataccagaagcatctggaaaatgccaaagaaatcggcatcaagaaggctatttccgctaacatctcgatgggcatcgccttcctgctgatctatgcatcatacgcgcttgcgttttggtacgggtccactcttgttatcagcaaagaatacactatagggaacgccatgactgtctttttctccattcttatcggagccttttccgtgggccaggctgcgccgtgcatcgacgccttcgcaaatgctcggggcgccgcctacgtgatcttcgacatcatcgacaacaaccctaagatcgattcgttctccgagaggggacacaagcctgacagcatcaagggcaacctcgagtttaacgatgtccatttcagctacccatcccgcgctaacgttaagatcctcaaaggactgaatctgaaggtccagagcggccaaactgtggccctggtgggttcaagcggctgcggaaagtcgaccaccgtgcagctgatccagcgactgtacgacccggatgagggaaccattaacatcgacggacaggacatcagaaacttcaatgtcaactacctgcgtgagatcatcggcgtggtgtcccaggagcctgtcctcttttccactaccatcgcggagaatatctgctacggacggggaaatgtcactatggacgagatcaagaaagccgtgaaggaagccaacgcgtacgagttcatcatgaaactgccgcagaaatttgataccctggtgggagaaagaggagctcagctctcgggcggacaaaagcagcgcattgcaatcgccagagcccttgtgcggaaccccaaaattctgctcctcgacgaagcaaccagcgccctggacaccgagtcggaagccgaggtgcaagcagctttggataaggctcgcgagggtcgcaccactatcgttattgcacatcggctgtcaacggtgcgcaacgccgacgtgatcgccggattcgaggacggagtgatcgtggagcaggggtcacactcagaacttatgaagaaagaaggagtgtacttcaaactcgttaacatgcaaacctcgggttcgcagatccaatcggaggaatttgaacttaatgatgaaaaggccgctacgaggatggcaccgaatggatggaagtcaagactgttcagacactccactcaaaagaatctcaagaattcccagatgtgtcagaagtcattggatgtcgaaaccgacggactggaagcaaacgtccctcccgtgtcctttctcaaggtcctgaagctgaataagactgagtggccatacttcgttgtcggaacggtctgcgccatcgcgaatggaggactgcagccggccttctcggtcatcttcagcgaaatcatcgcgatctttggtccaggagacgatgcagtgaaacagcagaagtgtaacatcttctccctgatcttcctgttcttgggaatcatctcctttttcactttctttctgcaagggtttactttcgggaaggcgggggaaattctgactcgccggctccggagcatggcgttcaaggccatgctgcgccaagacatgtcatggttcgatgatcacaaaaactccaccggtgccctgtccacgagactggcgacggacgcagctcaggttcaaggagccactggaactagactggcacttatagcacagaacatcgctaatcttggaactggaatcatcatatcgttcatctatggctggcagctgaccctgctgctgctcgcggtcgtgccgatcatcgcagtgtcggggatcgtcgagatgaagctgctcgcgggaaacgccaagcgggataagaaggaactggaggccgcgggaaagattgcgaccgaggccatcgagaacattcggactgtcgtctccctcacccaggagcgcaaattcgaaagcatgtacgtggaaaagctctacggtccgtaccgaaactcggtccagaaagcccacatttacggaatcaccttctcaattagccaggccttcatgtatttctcatacgcaggctgcttccggttcggagcgtatttgatcgtgaatggacacatgagattccgcgatgtgattcttgtgttctcagccatcgtgttcggggcggtggccctgggccatgcttcatcgttcgccccagactacgcaaaggctaagctgtcagcggcgcacttgttcatgctgtttgaacggcagccgctcatagacagctactcagaagaggggctcaagccggacaagtttgagggcaacatcaccttcaacgaagtggtgttcaattatcccaccagggcgaatgtgcctgtgctgcagggcctcagcttggaggtcaagaaaggtcaaactctggctctcgtgggatcttctggatgcggaaaatccacggtggtgcaactcctcgaacgcttctacgatccactcgcgggaactgttttcgtggactttggtttccagcttcttgacgggcaagaagccaagaagctcaacgtgcaatggctgagagcacaactgggtattgtgagccaagagccaatccttttcgactgttcgatcgctgagaacatcgcgtacggtgataattctcgcgtcgtgtcacaagatgaaattgtctcggccgcgaaagcagccaatatccacccgttcatcgaaaccctccctcacaaatacgagactcgcgtgggagacaagggcacccagctgtctggggggcaaaagcaaagaatcgccatcgcccgcgctctcatacgccagccacagattctgctgttggacgaagcgacctcagctctggatactgagtctgagaaagtggtccaggaagccctcgacaaggcccgggaaggacggacttgcatcgtcatcgcacatcgcctcagcactatccagaacgctgatcttatcgtggtgttccagaacggccgagtgaaagaacacggcacccatcaacagctgctggctcagaagggaatctacttctcgatggtttccgtgcaggccggaactcaaaatctg

SEQ ID NO: 7586 - DNA, 3858 bp, synthetic construct
  misc_feature 1..3858: note = source = /note="Description of Artificial Sequence: Synthetic coding sequence"
  source 1..3858: mol_type = other DNA
atggatttggaggccgccaagaacgggaccgcctggaggcccacatccgccgagggcgactttgaactgggcatatctagtaaacagaaaagaaagaaaacaaagaccgtgaaaatgataggtgtcttgactctttttaggtactcagactggcaggacaagttatttatgagtctgggcacaattatggccatcgcgcatggcagcggcctccctttgatgatgatcgtgtttggcgagatgactgacaaattcgtggataccgccggtaacttttctttcccggtaaactttagtcttagcctgttgaaccccgggaagatcctggaggaagagatgacccggtatgcttattattattcgggcctgggagccggcgttctggttgccgcatatatccaggtgagtttttggacccttgctgctgggcggcagatccgcaagatacggcaaaagttcttccacgccatcctcagacaggaaattggctggttcgatattaatgacactacggaattgaataccagacttaccgacgatatttcaaagattagcgagggcatcggcgataaggtaggcatgttttttcaggccgtagccacatttttcgcgggatttattgtggggtttattcgaggatggaagctgacactggttattatggcgattagcccaattctggggctgtctgccgccgtttgggccaaaatactgtctgccttcagcgacaaggagctggctgcatatgctaaggcgggagctgtcgcagaggaggctctcggcgcaattagaaccgtgatagcttttggcggtcaaaataaagagctagagcgttaccagaagcatctagagaacgctaaggaaatagggataaagaaagcaatttctgctaacatatctatgggcattgcattcctgctgatctatgcttcttacgcccttgccttttggtacggcagtactcttgttatctccaaagagtacacaatcggcaatgctatgaccgtcttctttagcatcctgattggagcttttagtgtcgggcaggcagccccatgcattgatgcatttgcaaacgccaggggggccgcatatgttatcttcgacatcatcgataataaccctaagatcgattccttttctgagagaggccacaaaccggactctattaagggcaacttggagttcaatgatgttcatttcagctacccgtctcgcgccaatgtcaaaatcctgaaagggctaaaccttaaagttcagtcgggacagacagtggctctggttggttccagcgggtgcggtaagtccaccaccgtgcagctcattcagcggctgtacgatcccgatgagggcacaatcaacattgatggacaagatattcggaacttcaacgttaattacctgcgcgaaataattggtgtcgtgtctcaggagcctgtgctgttctcaaccacgatagcagaaaatatctgttacgggcgtggcaatgtaactatggatgagatcaagaaagcggtgaaggaggctaatgcctacgagtttataatgaagctgccccaaaagtttgatactttggtgggcgaaaggggagcccagttgtccggcgggcagaagcagagaattgctatcgcaagggcactggtgagaaatcctaagatactgctgctagatgaggctacctccgcactggacactgaatccgaggctgaggttcaggccgccttggataaggcaagggagggacggactactatcgtcatagcccaccgcttgtcgaccgtgagaaacgccgatgtgatcgccggctttgaagacggcgtgattgtcgagcagggtagccactcagagttaatgaagaaagagggcgtgtactttaaattagtgaacatgcagacatctggaagtcaaatccagtccgaagaattcgagctgaatgatgagaaagcagcaacccggatggcccctaatgggtggaaatcacgcctgtttcgccattccactcagaagaaccttaagaactctcagatgtgtcagaaatcactagacgtggagaccgatggtctggaagcgaacgttccccccgttagcttcttgaaagtgctgaaactgaataaaaccgaatggccctatttcgtggtgggcacagtctgcgcgatcgccaacggcggactccaacccgccttcagcgtgatttttagtgaaattatagctatctttgggccaggggacgatgcagttaagcaacaaaaatgtaatatttttagtctgatttttcttttcctgggtattatatcgtttttcacttttttcttgcagggattcacgttcggaaaggcgggtgagattctcactcgccggctccgctccatggctttcaaagccatgcttcggcaggacatgtcctggttcgacgaccacaagaacagtacgggtgcccttagcacacgtctggctacggatgcagctcaggttcagggagctaccggcacacggttggccttgatagctcaaaacatcgccaacctggggacaggcattattatatccttcatttatgggtggcagctaacacttctgctgttggcggtggtgcctattatcgctgtgagtggaatcgtggaaatgaaactgcttgcgggtaatgccaagagggacaaaaaggaattggaggcagctggcaagatcgctacggaggcgatcgagaacattcgcacagtcgtctccctgactcaagagcgcaagttcgaaagcatgtatgtggagaagctgtacgggccttaccgaaattcagtgcagaaggcccacatatacggaattactttctccatatctcaggcattcatgtacttcagttacgctgggtgcttccgtttcggtgcctacctcattgtgaacgggcacatgaggtttagagacgtgatactggtgttttcggcgatagttttcggtgctgtggccttgggccatgcaagcagctttgcgcccgactacgccaaggctaaactgtcagcggcccacttatttatgttgtttgagaggcagccgctaatcgactcctattctgaagagggcctcaagccagacaagtttgaagggaacattacctttaatgaggtggtcttcaactatccgactcgagcaaacgttcccgtcttgcaaggactgtcactcgaggttaagaagggacagaccctcgcgttggtaggatcctcaggatgtggcaaatctacagtggtgcagttgctggagaggttttatgacccattggccggaacagtgtttgtggacttcggctttcagctgctggacgggcaagaagctaagaagctgaacgttcagtggctgagagcccaattgggtatcgtgagtcaggagccaatcctgtttgattgtagcatcgccgagaatattgcatacggagacaacagcagagttgtaagccaggatgagattgtgagcgcggcgaaggcagccaatatacaccccttcatagaaaccctgcctcataaatatgagacccgagtaggggataaaggaacccagcttagtggagggcaaaagcaacgcattgcaatcgcgcgtgctcttattagacagcctcaaattctgctcttggacgaggccacttctgctctcgataccgagtccgaaaaggtagtgcaggaggcgcttgacaaagcacgagaggggaggacttgcatcgttatagctcatcgcctgagtactatccaaaacgcagatctgattgtggtgttccagaacgggcgggtgaaggaacatggaacccatcagcaactactcgcgcaaaagggcatctatttctccatggtgtcagtgcaggcaggcacgcaaaatctc

SEQ ID NO: 7587 - DNA, 3858 bp, synthetic construct
  misc_feature 1..3858: note = source = /note="Description of Artificial Sequence: Synthetic coding sequence"
  source 1..3858: mol_type = other DNA
atggatctcgaagccgccaaaaatggcaccgcctggcgccctacttccgccgagggcgacttcgagttgggaatcagctcaaagcagaagagaaagaaaaccaaaacggtgaagatgatcggggtcctgacactcttccggtactcagactggcaggataaactgtttatgtccctcggcacaattatggccatcgcccacgggtccgggcttccgctgatgatgattgttttcggcgaaatgaccgataaattcgttgatactgccggcaatttcagctttcctgttaatttctcccttagtctgctgaatccaggaaaaatcctggaagaggagatgaccaggtatgcgtactattatagtggcctgggagctggggttctcgttgctgcctacatacaggtgtctttctggaccttggctgccggtagacaaatcaggaagattcgccagaaattctttcacgctatcctcaggcaggagatcggctggttcgacatcaacgacacaactgagctcaacacccgactcaccgacgacatatctaagatctccgaggggattggggacaaggtaggcatgttcttccaggcagtcgcaaccttttttgctgggttcattgttgggttcatccggggttggaagctgaccctggtgattatggccatctctccaatattggggttgtcagctgctgtttgggccaagattttgagtgcttttagcgacaaggagctggccgcttacgccaaggctggggccgtggctgaggaggccttgggagctattcgcaccgtgatcgccttcggaggtcaaaataaggaattggaaaggtaccagaaacacctggagaacgccaaggaaatcggaattaagaaagccatctcagccaatatctccatgggaatcgctttcctgctgatctacgccagttacgcactggccttttggtacggatctactttggttattagtaaggagtacactatcggtaatgctatgacggtgtttttctccattctgattggagccttcagcgtgggtcaggcggctccgtgcatcgacgcatttgccaacgctcggggcgctgcatatgtgatcttcgacatcatcgataacaacccaaaaattgacagtttctcagagaggggccacaagcccgattccattaagggaaatctcgaattcaacgatgtgcactttagttaccccagtagggccaatgtaaaaattctgaagggactcaatctcaaggtgcagtcaggccagacagttgcattggtggggtcctccggatgtggcaagtccaccactgttcagctgattcagcgcctttatgacccagatgagggcacgattaacattgatgggcaagatatacgcaattttaatgtgaattacctgcgggagatcatcggtgtggtgagccaggagcctgtcctgtttagtactacaatcgccgagaacatttgttacgggcgcggaaatgtcaccatggacgaaatcaagaaagccgttaaagaggctaatgcctacgaatttattatgaaattgccccaaaagtttgatacgttggttggtgagaggggagcccaactcagcggcgggcagaagcaacggatcgcgatagccagagccctcgtacgcaaccccaaaattcttctcctggatgaggccacgtctgcccttgacaccgagtcagaggctgaagttcaggccgcactggacaaggcccgggaaggaagaactaccatcgttatcgcccatagactgtctaccgtccgaaacgccgacgtgattgcgggcttcgaggatggcgtaatcgtggaacaagggagccacagtgagctcatgaagaaagagggtgtctattttaaacttgtgaacatgcagacatcaggcagccaaatccaatctgaggagtttgagcttaacgacgaaaaggcagctactcggatggcacctaatggctggaagagtaggctttttcgccattcaactcagaaaaacctgaagaacagccagatgtgccaaaagtccctggatgttgaaaccgatggcctcgaggcgaatgtgcctcccgtgtcattcctcaaggttctcaagctgaataagaccgagtggccttattttgtggtgggaaccgtctgcgctatcgcgaatggcggcctgcagcctgcattttccgtaattttcagcgagatcatcgctatcttcggcccgggagacgacgccgtgaagcagcagaaatgcaacatcttctccttgatctttctgttccttggaattatcagctttttcacatttttcctccaaggcttcacctttggaaaagccggagagattctcacccggaggttgcgatctatggctttcaaggctatgctcagacaggatatgagctggtttgacgatcacaagaactcaaccggcgccctctcaacgcggctggcaaccgatgcagcccaggttcaaggggccaccgggacccggctggccctgattgcacagaatatcgcaaatctggggacggggatcattatctcttttatctacggttggcagctgaccctcctgctgcttgccgtagttcccattatcgccgtcagcgggatcgtagaaatgaagctgctggccggcaacgccaagcgcgacaaaaaggagctggaagccgctggcaagatcgcaaccgaggccattgagaacattagaacagtagtttcactgacacaggagcggaaattcgagagcatgtatgtggaaaaactgtatggaccatatcgcaacagcgttcagaaggcacatatctacggcataactttcagcatcagccaggcttttatgtacttttcttatgccgggtgttttcgattcggcgcttacctgatcgtgaatggtcacatgcgctttagggacgtgatactcgttttctcagccatcgtcttcggggccgttgcgctgggacatgcctcctcttttgcccctgactatgccaaagcgaaattgtctgctgcgcatttgttcatgctgtttgagagacaacctctcattgactcctacagtgaagagggcctgaagcctgataagtttgagggcaatataacattcaatgaagttgtgttcaactatcccacccgggcaaatgtccccgtcttgcagggcctgtccctcgaggtgaaaaaaggccaaactcttgccctggtgggcagctccggttgtggcaagagcactgtggtgcagctgctggagcgcttttacgacccactcgcaggaactgtgttcgtggattttggctttcagctgctcgatggacaggaggccaagaagctcaatgtgcagtggctccgagcacaattggggattgtgagtcaagagcccatactcttcgactgctcaattgccgaaaacatcgcgtacggagacaatagccgggttgtgagccaagacgaaatcgtgagtgccgcaaaagccgcgaatattcacccctttatcgagacccttcctcacaagtacgagacaagagtgggagataaaggcacacaactctccggtggccaaaaacaacgaattgccatcgcccgagctctgatccggcagccccagatcctgctcctcgatgaagccacttcagccctggatactgaatcagagaaggtcgtgcaggaggctctcgacaaggctcgggagggtaggacatgtattgtgattgcgcacaggctgtccacgatacagaatgcagatctgatcgtggtgttccagaatggcagagttaaagaacatggcacccaccagcagcttcttgctcagaagggcatctacttcagcatggtcagtgtacaggccggaacgcagaacctg

SEQ ID NO: 7588 - DNA, 3858 bp, synthetic construct
  misc_feature 1..3858: note = source = /note="Description of Artificial Sequence: Synthetic coding sequence"
  source 1..3858: mol_type = other DNA
atggatctggaggccgctaaaaacggtacagcttggcgtcccacctccgctgaaggggacttcgagctcggcataagttccaagcagaagaggaagaagacaaagacagtcaagatgatcggagtgctgaccttgttccgctactctgactggcaggataagttgttcatgtccctgggaactattatggccattgcccatggcagcggcctgccattaatgatgattgtgtttggggagatgaccgacaagtttgtggatactgcaggcaatttcagcttccctgtcaatttttccctctctctgctgaatcctggaaaaattctcgaagaagagatgactcggtatgcttattactactctggcctcggggccggcgtgctggtggccgcctatattcaggtctcgttttggacactggctgctgggagacagattcgaaaaatcagacagaagttcttccatgccatcctgcgacaggagatcgggtggttcgatattaatgacaccacggaactcaacacaagactgaccgacgatatctctaagatctctgaaggtatcggcgacaaggtaggtatgttctttcaggctgtcgctacctttttcgctggctttattgtcggattcatcagaggttggaaactcacgctcgtcatcatggctattagccccatcctcgggctgtctgctgccgtgtgggccaagattctcagtgccttcagcgataaggaattagcagcctacgcaaaagcaggggcggtcgccgaagaggcccttggcgctatccggacggtgatcgcttttgggggacagaataaagagctggagagataccagaagcatttggaaaacgccaaagaaataggtattaaaaaggctattagcgcaaacatatcaatgggaattgcctttcttcttatctacgctagttatgctcttgccttttggtacggatccactctggtcatttcaaaggagtacaccattggcaatgcgatgaccgttttcttctcaatcctgatcggtgcctttagcgtgggccaggccgcaccctgcatcgatgccttcgccaacgcgagaggtgccgcctacgtgatattcgacataatcgataacaatccaaagatcgacagcttctctgaaaggggtcacaagccagacagcatcaagggcaatctcgaattcaacgacgtgcactttagctatccaagccgggccaacgtcaagatccttaaggggcttaatctgaaggtccaatccgggcagacagtcgcactggtggggtcaagcggttgtggaaagtcgactaccgtccagctgatccagaggctatacgatcctgacgagggaaccatcaatatcgacggtcaagatatccgcaatttcaacgtcaactacctgcgtgagattatcggagttgtctctcaggagcccgttctgttttcgaccactattgcggagaacatatgttatggaaggggtaatgtgacaatggatgaaatcaaaaaagctgtaaaggaggccaacgcctatgagttcattatgaagctgcctcagaagttcgataccctggttggagaacgcggcgcccagctgtctgggggccagaagcagcgcatcgcaattgcgcgggcccttgtgagaaaccccaagatattattactggatgaggcaaccagtgcactggacaccgagtcagaagctgaggtccaggctgccttggataaagcacgggaaggcaggacaaccatcgtgatcgcccaccgattgagcaccgtacggaacgccgatgtaattgctggctttgaagatggagtgatcgtggagcaagggtcccatagcgaactcatgaagaaggagggcgtctacttcaagctggtgaacatgcaaacctctgggagccagatccagtctgaggaattcgagctgaacgacgagaaagcagcgactaggatggctccaaatgggtggaagagtcgtctgttccgacactcaacgcaaaaaaacctgaagaactcgcagatgtgtcagaagtcgctggatgtcgaaacggacggcttggaggctaacgtgcccccagtgtcgtttcttaaggtccttaaactaaacaaaactgagtggccatatttcgtggttgggactgtgtgcgccatcgcgaatggcgggctgcagcccgcttttagcgtgattttttctgaaataattgccatcttcggacccggcgatgatgctgttaaacagcaaaagtgcaatatttttagcctaatttttttgttcttaggcatcatcagcttttttaccttcttcctgcaagggttcaccttcggtaaagctggggagattcttacgagacgattgcgcagtatggcattcaaggccatgctccgtcaggacatgtcttggttcgacgatcataagaacagcactggcgctcttagtactcggctggctactgatgctgcccaggttcagggcgcaaccggcactcgtctggccttgatcgcccagaacatcgctaacctcggtactggaatcatcatctcttttatttacggatggcagctgaccctgctgcttctggccgtagttcctataattgccgtgtccgggattgtggagatgaagctcctcgctggcaacgcaaagagggacaagaaggagctcgaagccgctggaaagattgctactgaggcaatagagaatattcggactgtggtctctctcacccaggaacgtaagttcgagtccatgtatgtagagaagctgtacggaccttatcggaactctgttcaaaaagcacacatctacggcatcacgttcagtatcagccaggcttttatgtatttctcctacgcaggatgcttccgctttggagcatacctcattgtgaatgggcatatgcgttttagggacgtcatcctggtattttccgcaatcgtgttcggagccgtggcacttggccacgcctcctcttttgcgccggattatgccaaggccaaactgtccgccgcccacctctttatgctttttgagaggcagccgctgatagattcttattccgaggaaggcctgaagccagataagtttgaaggcaatatcactttcaacgaagtggttttcaattaccctacgcgggctaacgtgcccgtgctccagggactctcgctggaagtgaaaaaaggacagaccctagctctggtgggttcaagtgggtgcggaaaatccaccgtcgtccaacttctggagcggttttatgaccctctggccggcactgtctttgttgattttggttttcagcttctggatgggcaagaagccaaaaaacttaacgtgcagtggttaagggcacagttaggaatcgtgagtcaagagcctatactgttcgattgctccatcgctgagaatatcgcctacggcgataactctcgagtggtgtcacaggatgagatagtttctgctgccaaagctgccaatattcacccttttattgagaccctaccacacaagtacgagacgcgagtgggcgacaagggcactcaactctccgggggacagaagcagcgaatagccatcgctcgtgctttaattcgacagccccagatcctcttgctcgacgaggcaacaagtgcacttgatactgaatctgagaaggtggtacaggaagccttggataaagcacgcgaaggccgtacatgtattgtaatagcccaccgccttagtacaattcaaaatgccgacctgatagtggtgtttcagaatgggcgggtcaaagagcatggaacgcaccagcagcttctggcgcaaaaggggatatattttagcatggtctccgtgcaagctggaacgcaaaatctg

SEQ ID NO: 7589 - DNA, 3858 bp, synthetic construct
  misc_feature 1..3858: note = source = /note="Description of Artificial Sequence: Synthetic coding sequence"
  source 1..3858: mol_type = other DNA
atggatcttgaggcggcaaagaatggaactgcatggcgcccaactagcgcagaaggagatttcgaactgggaatctcgtcaaagcagaaacgcaagaaaaccaaaactgtgaagatgattggtgtgcttactctcttcagatacagcgactggcaggataagttgtttatgtcccttggaactatcatggcaatagcacacgggagcggactcccactcatgatgatcgttttcggcgaaatgactgataagtttgtcgacactgccggcaacttctcgtttccagtcaacttttccttgtcattgctgaatcccggaaagattctcgaagaagaaatgactcgctatgcatactactacagcggccttggggcgggtgtgcttgtggcggcatacattcaagttagcttttggaccctcgcagcgggccggcaaattagaaaaatcagacagaagtttttccatgcaattctgcgacaagaaatcgggtggttcgacataaacgacaccacggaactgaacacccgcttgaccgatgatatctccaagatctcagaaggtattggagacaaggtggggatgttttttcaagcagtcgcaaccttttttgctggattcatagtcggattcataagaggctggaagctgactctcgtcatcatggcgatttcacctattctcgggctgtcagccgcggtgtgggccaaaatcctgtccgcctttagcgataaggagctggcggcttacgcgaaagccggagcagtggcagaagaggcgctgggtgcgattcgaaccgtgatcgcatttggcggccagaataaggaactggagagataccagaagcatcttgaaaatgccaaggaaattggaattaagaaagcaatttcggccaatatctccatgggcatagcgtttcttctgatatacgcatcctacgcacttgcgttttggtacggaagcacccttgtgatttcaaaggaatacacgattggaaacgcgatgactgtgttcttttccattcttattggcgcgttttcggtgggacaagcagcaccctgcattgatgcatttgccaacgcacggggagccgcttacgtgatttttgacattatcgacaacaatcctaagattgatagcttttcagaaagaggtcacaagccagattccattaagggtaatcttgagtttaacgatgtgcattttagctacccaagccgggcaaatgtgaagattctcaagggtcttaacctgaaagtgcaaagcggtcaaaccgtggcgctggtgggttcgtcaggatgtggtaaatcgaccactgtgcaactgatacaaagactctacgaccccgacgaaggtaccatcaatatcgatgggcaggatattcgcaacttcaatgtgaactacctgagagaaatcatcggtgtcgtgagtcaggagcccgtgcttttctcgaccaccatcgcagagaacatttgttacgggcgagggaatgtgactatggatgagatcaaaaaggcagtgaaggaagcaaacgcatacgaattcatcatgaaacttcctcagaaattcgacactctcgtgggagaacgtggtgcgcaactgtccggaggtcaaaagcaaaggatagccattgcgcgggcccttgtcaggaaccctaagatactgcttctggacgaggccactagtgcacttgacaccgaatccgaggccgaggtccaggcagcgttggacaaagctcgggaagggaggaccacgattgtcatcgcccatcgtctctcaaccgtgcgtaatgcagacgtgatagcaggatttgaggatggagttattgtggagcaaggatcccactccgaactcatgaagaaggagggagtctactttaagctggtgaatatgcaaaccagcggtagccaaattcagtccgaagaattcgagctgaacgacgagaaggcagccacccgaatggcgccaaatggatggaagtcgagactctttcggcattccacgcagaaaaacctgaagaatagccaaatgtgtcagaaatccctggatgtcgaaaccgatggactggaagcaaacgtccccccagtgtctttcctgaaagtgctgaaacttaacaaaaccgagtggccttatttcgtggtgggtactgtgtgtgcaatagctaacgggggactccaacctgcattcagcgtcatattcagcgagattatcgcaattttcggtccaggagatgatgcagtgaaacagcagaaatgcaacatcttttccttgatattcctgttccttgggattatctcctttttcaccttttttctgcaaggtttcacttttggtaaagcaggtgaaatccttaccagaaggctgcggtctatggcctttaaagcgatgctgaggcaggacatgagctggtttgatgaccataagaattcaactggcgcactctccacccgcctggcgactgacgccgcgcaggtgcaaggtgcaaccgggactcgcctggctcttatcgctcagaacatcgcaaatctcggaactgggattatcatttccttcatctacggctggcagctgaccctgcttcttcttgccgtggtgcctatcatcgcagtcagcggtattgtggaaatgaagctgctcgcagggaacgcgaagagagataagaaagaactggaggcagccggcaagatagctacggaagcaatagaaaacattcgtacggtcgttagcctcacccaggaacgcaagttcgaatcgatgtacgtggaaaagctctacggaccataccggaatagcgtgcaaaaggctcacatttacggtataaccttttcgatatcacaagcatttatgtacttctcctacgccggttgttttcgcttcggcgcctacttgatcgtcaatggtcatatgcgttttagagatgtcattcttgtgttttccgcgatagtgttcggcgcagtcgctctcggacatgcatcctcgtttgcgccagactacgcgaaggcaaagctgagcgccgcacaccttttcatgctctttgaaaggcaaccactgatcgattcatactcggaggaaggactgaagccagataagtttgagggcaacattacgtttaatgaagtggtgttcaactaccctactagggcaaacgtgcctgtgcttcagggcctctcactcgaagtgaagaagggtcaaactctggcactggtcggatcgagcggctgtggcaagtcaactgtggtgcagcttttggaacgtttttacgatcctctcgcgggaaccgtctttgtcgacttcggattccaactgctggacggccaagaagccaagaagctcaatgtgcaatggcttagagcacaacttggaattgtgtcccaagaacctattttgtttgactgctccatagcagagaatattgcatacggtgataatagcagggtggtcagccaagatgaaattgtgtcggcagcgaaggctgccaatattcaccctttcattgagactctcccgcacaagtacgaaacccgtgtgggggacaagggaacccaactgtcgggaggacaaaaacagcgcattgcaatagctcgtgcactcatccggcaacctcaaattcttctcctcgatgaagccacttccgccctcgatactgagagcgaaaaggtcgtccaagaagcgctcgacaaggcccgagaaggcagaacctgtattgtgatagcgcaccgcctttcgactattcagaatgcagatcttatcgtggtgttccaaaacggaagagtgaaggagcatggcactcatcagcagcttcttgcacaaaagggaatttactttagcatggtcagtgtgcaggccggtactcaaaacctg

SEQ ID NO: 7590 - DNA, 3858 bp, synthetic construct
  misc_feature 1..3858: note = source = /note="Description of Artificial Sequence: Synthetic coding sequence"
  source 1..3858: mol_type = other DNA
atggacctcgaggcagcgaagaatggaaccgcatggcgaccgacctcagcagagggtgactttgaactcggaattagctcgaagcaaaagaggaagaaaactaagactgtgaagatgatcggtgtgctgactctttttcggtacagcgattggcaagataagctgttcatgtcactggggaccattatggcaatcgcccatggttcaggactgcctctcatgatgatagtgtttggagaaatgaccgataagttcgtggatactgcaggtaacttttcctttccagtgaatttctccctcagccttttgaatcctggcaaaatactggaggaggaaatgactaggtatgcctactactactcaggactgggcgcgggagtgcttgtcgccgcatacattcaggtgtcattttggactctggcagcaggtagacagattcggaagattagacaaaagtttttccacgcgatccttcgccaagaaatcgggtggtttgacattaatgacactactgaacttaacaccaggcttactgatgatattagcaagatcagtgaaggtatcggagataaagtgggtatgttttttcaggcagtggctacgttctttgcgggattcatagtgggatttatccgcggatggaagctgaccctggttatcatggccatttcgcccattctggggctttccgcagcggtgtgggcgaagatcttgtcagcctttagcgacaaggaattggcagcatacgcaaaagcaggggctgtggcagaagaagccctcggagcgattcgcactgtcattgccttcggaggacagaataaggaactggaaaggtatcagaagcatctggaaaacgcaaaagaaattggtattaagaaggctattagcgcaaacatcagcatgggaattgcatttctcctgatatatgcgtcctacgccctggcattttggtacggatccacccttgtcatctcgaaggagtacactatcgggaatgcaatgaccgtgtttttcagcattctgattggagcattttccgtggggcaggccgccccttgtattgatgcgttcgccaatgcaagaggtgcggcctacgtcatttttgatatcatcgataacaatccgaaaatagactcgttttccgaaagaggtcataagccggatagtataaagggaaacctggagtttaacgacgtgcatttctcataccctagcagagcaaacgtgaagatattgaagggtctgaatcttaaggtgcaaagcggccagactgtggcacttgttggctcgtccggatgtggcaagtccaccactgtccaactgatacagcggctgtacgacccggacgaaggaacgattaacattgatgggcaagacattcgcaactttaatgtcaactaccttcgggagataatcggcgtcgtatcgcaagaacccgtgctgtttagcactacgattgccgagaacatttgttacggtagaggtaacgtgacgatggacgagattaagaaagcagtgaaggaagcaaacgcatacgagtttatcatgaaacttcctcagaaatttgacaccttggtgggagaacgcggtgcacaactttcaggtggtcaaaagcaacgcattgctatcgcccgcgctctcgtcagaaatccaaagatacttcttttggatgaagcgaccagcgcactggatactgagtcggaagcagaagtgcaggcagcactggataaggcacgagagggaagaaccaccattgtgattgcacataggctctccactgtccgcaacgcagatgtgattgcaggctttgaggacggggtgattgtggaacaaggcagccattcggaacttatgaagaaagaaggagtgtactttaagttggtcaacatgcagacgtccggctcccagattcaatcggaagaatttgagctgaatgatgaaaaggcagcaaccagaatggctcctaatggttggaagtccagactcttccgccactcaactcaaaagaacctcaagaacagccaaatgtgccaaaagtcacttgacgtggaaactgacggactggaagcaaacgtgcccccagtctccttccttaaggtgctgaagctgaacaagactgaatggccctattttgtcgtcgggactgtctgtgcgattgccaatgggggactgcagccagcattttcagtgatcttttcagagataatagcaatctttggacctggcgacgatgcagtgaagcaacaaaaatgtaacatcttttcgctcatttttctttttctgggaattatctcgtttttcaccttttttcttcagggatttacttttggtaaagccggcgaaattctcacccgtagactgcgatcgatggccttcaaagcaatgctgcgacaggatatgagctggttcgatgatcacaaaaactcgaccggcgcactgtccacgaggctggcaaccgatgcagcacaagtgcagggcgccactggtactaggctggcccttatcgcacaaaacattgccaatctcggtactggaattatcattagcttcatctacggctggcagctgactcttctgctgcttgcagtggtgccgatcattgcagtctcaggaatcgttgagatgaaacttcttgcgggaaatgctaagcgcgacaaaaaagagctggaagcagcaggcaagatcgcaactgaggcaatcgaaaacatccggacggtggtgtcgcttacccaagagcgcaagtttgaatccatgtacgtggagaagctgtatgggccttaccgcaactcggtgcaaaaagcacatatctacgggattaccttttctatatcacaggccttcatgtactttagctacgcaggttgttttcgctttggcgcctacctgattgtgaatggtcatatgcgattcagagatgtgatacttgtgttcagcgcaattgtctttggagcggtggcacttggacatgcatcgtcattcgctcctgactacgcaaaggcaaagctgagcgcagcccatctgttcatgctgtttgaaagacagcctcttatagactcctactcggaggagggtctgaaacctgataagttcgaagggaatatcacctttaacgaggtggtgtttaactaccccaccagggcaaatgtccccgtgcttcaaggactgtcactcgaggtgaagaaaggacaaactctggcgcttgtggggagcagcggctgcggaaagtcaactgtcgtgcagcttctggaacggttttacgaccctcttgccggtactgtctttgtggactttggctttcagctgctcgatggacaagaagcaaaaaagctcaatgtccaatggctgcgtgctcaactgggtatagtctcccaggagccgatcctgtttgattgctcaattgcagaaaacatcgcgtacggcgataactcaagagtcgtgagccaagatgaaatcgtgtcggcagccaaggccgcaaacattcatccctttatagagactcttccacacaagtatgagacgcgggtgggcgataaggggactcagctttcgggaggccaaaagcaacggattgccattgccagagcattgattagacaacctcagatacttctgctcgatgaagcaacttcggcactggacaccgagtccgagaaggtggtgcaagaggcactcgacaaggcaagagaaggcagaacttgtatcgtcatcgcacatagacttagcaccattcaaaacgctgatctgatagtggtgttccagaatggtagagtcaaggagcacggtacccatcagcaactgctggcccagaagggtatatacttttccatggtgtctgtgcaggcgggcacccaaaatctc

SEQ ID NO: 7591 - DNA, 3858 bp, synthetic construct
  misc_feature 1..3858: note = source = /note="Description of Artificial Sequence: Synthetic coding sequence"
  source 1..3858: mol_type = other DNA
atggatcttgaagctgcaaagaatggcacagcttggagacccacctcggctgaaggtgatttcgaactcggcatttcaagcaaacagaaacgaaaaaaaactaaaacagtcaagatgattggagtgcttacgctttttaggtacagcgactggcaggataagttgtttatgtctctgggcacaattatggcgattgctcacggaagtggcttaccccttatgatgattgtctttggagagatgacggacaaatttgttgacacagctggaaactttagcttcccggttaacttcagcctttcacttcttaatcctggaaaaattttagaggaagagatgacaagatatgcttactattattcaggattgggcgcaggagtcttggtcgccgcctatatccaagttagcttttggacgctcgcggctggtcgccagatcaggaaaatccggcaaaaattttttcatgctatcttgcgtcaggaaattggctggtttgacattaacgatacgacagagttaaacactcgtttgactgatgatatttcaaaaatttcagaaggtattggcgataaggtgggaatgttctttcaagcagttgcaacgttttttgccggattcattgtagggtttatacgcgggtggaagttaaccttggtgattatggcaatctcacccattctgggactgagcgctgcggtgtgggccaaaattctttctgccttctcggataaagaactcgccgcctatgcgaaagcaggcgcagttgcggaagaagctttaggcgcaatccgtacggtaattgcctttggtggtcagaataaggagttggaacgatatcaaaaacatcttgaaaatgctaaagaaattggtatcaagaaagctatctctgcaaatattagcatggggatcgcgttcttattaatttatgcgagttacgctctggcgttttggtacggcagtacacttgtcatctcaaaagagtacacgatcggaaacgctatgactgtatttttctctattcttattggcgcgttctctgtggggcaagctgccccttgcatcgatgcgtttgcgaacgcgagaggagctgcctatgtcatctttgacattatcgacaacaacccgaaaattgacagctttagtgaacggggacataaacctgattcaattaagggaaatttggagtttaatgacgtacattttagctacccttctcgcgctaatgtcaagatactaaaagggttaaacttgaaagtacagagcgggcaaacagttgctcttgtaggctcgtctggatgcggaaaatctaccacggtgcaacttattcagcgtctgtacgatccggatgagggaacaattaatattgatggacaagacattcggaattttaatgtgaactatcttcgcgaaattatcggtgtggtttctcaagaaccagttttattctccacgaccatagcagaaaatatttgttatggacggggcaacgtgacaatggacgaaattaaaaaagcggttaaagaagcgaatgcctacgagtttatcatgaaactgccacagaaattcgacacgctggtaggcgaacgaggtgctcaattatctggaggccagaagcagagaatcgctatcgccagagcgttagttaggaaccctaagatcttactgcttgatgaagcgacaagcgcgttagatacagaaagtgaagcggaggttcaagcggctctggataaggcgcgggaaggaagaacgaccatcgtaatagcacatagattgtctactgtcagaaacgctgatgttattgcgggattcgaagacggggtcattgtcgaacaaggaagccattctgaattgatgaagaaagaaggagtctattttaagctagtgaacatgcagacttcaggctcccagatacagtctgaggaatttgaacttaacgacgaaaaagccgcgacgagaatggcaccaaacggttggaaatctagattgtttcgccacagcacccagaaaaatttaaaaaattctcagatgtgtcagaaatcgttagatgtcgaaaccgatggcctcgaagcgaacgtcccaccggtttcattcttaaaagttctgaagttaaacaaaactgagtggccatattttgttgtaggaaccgtttgcgcgattgctaatggtgggttacaaccggctttcagcgtgattttctcggaaataattgccatcttcggaccgggtgatgacgccgtaaaacaacagaaatgcaacattttttcacttatttttttatttttaggcattattagctttttcacattttttcttcagggatttacatttggcaaggcgggagagatcttaactcgtagactcagatcaatggcattcaaagctatgttacgccaggacatgagttggtttgatgatcataaaaattcaacaggtgcgttgagcacacggttagccacagacgcggcgcaagttcaaggagccacaggcacgcgcctagcactcatcgcacaaaatattgcaaatctggggacgggaattatcatcagttttatttacgggtggcaattgacgctcctgttgcttgcagttgtcccgattatcgctgtgtcaggcattgtggagatgaaattacttgctgggaatgccaaaagagataagaaggaattagaagcggctggaaaaattgcgacggaagcaattgagaatattagaacagttgtgagccttacgcaggagagaaaattcgagtctatgtatgttgagaaattatatggaccgtatcggaattctgttcagaaagctcatatctacgggatcacattcagcatttcgcaagcctttatgtatttttcttatgcgggctgtttccggtttggtgcatacctgattgtcaatggccatatgcgtttcagggacgttatccttgtcttttcagcaattgtcttcggggctgtagctctgggccacgctagctcttttgctccggattatgcgaaggcaaaactctcagctgcacatcttttcatgctcttcgaaagacaaccacttattgactcatatagtgaagagggcctcaaaccggataaattcgaaggaaacataacgtttaatgaagtcgtgtttaattatcctacgagagctaatgtaccggtcctgcagggactatccctcgaggtgaaaaaagggcaaactctggcgcttgttgggtctagcgggtgcggtaaatcaacagttgtgcagcttttggaacgtttttatgacccacttgcaggcacagtctttgttgactttggttttcaacttctggatggacaagaagctaaaaaactgaatgttcaatggcttagagcgcaacttgggattgtttcacaagaaccgatattgtttgattgtagtattgcagaaaacatcgcttacggcgataattctcgggttgtcagccaggacgaaatcgtgtctgcagcgaaggctgctaatatacacccgttcatagaaacactgccgcataagtatgagacaagagtaggagacaaaggaacgcaactctctgggggccaaaagcaaagaattgcaatagcaagagccctgatccgccaaccgcagatccttctcttggatgaagcgacctccgcgctcgataccgaatccgaaaaagtggtccaagaagcgctggataaggcacgggagggacgcacgtgcattgtgatagctcaccgtttatcaacgattcagaatgcggatttaatcgtggtatttcagaacggtagggttaaagaacacggcacacatcagcaacttttggcacaaaaaggaatctacttttcgatggtcagtgttcaggcgggaactcaaaacctt

SEQ ID NO: 7592 - DNA, 3858 bp, synthetic construct
  misc_feature 1..3858: note = source = /note="Description of Artificial Sequence: Synthetic coding sequence"
  source 1..3858: mol_type = other DNA
atggacctcgaggccgcgaagaacggaaccgcctggcggcccacttctgccgagggagatttcgagcttggtatttcctcaaagcagaaaagaaagaaaaccaaaaccgtaaagatgattggagtcctgaccctgttccgatactccgattggcaggacaagttgtttatgagcctcggaactatcatggccatcgcccacggctcaggactacctcttatgatgatagtgtttggggaaatgactgacaaattcgttgatacagcgggtaatttcagttttcccgttaattttagtctttcactgcttaacccaggaaaaatacttgaggaggagatgacaaggtacgcttattattactcaggactcggagcaggtgttctcgtggctgcatatatccaggtctctttttggactctggctgcagggcgccagatacgcaaaatcagacagaaattctttcacgcaattctgcgccaggagatcggttggttcgatatcaacgataccactgagttgaatacccgtctcaccgatgacattagcaagatctccgaaggcattggagacaaagtcgggatgtttttccaagccgtcgccaccttctttgccgggttcatcgtgggcttcatccggggctggaaactgaccttagtgatcatggctatctccccaattttgggccttagcgcggctgtctgggctaagatactgtcagctttttctgacaaggaactcgcagcatatgccaaggcaggagctgtcgctgaggaggccttgggggcaatcaggactgtgattgcatttggtggccagaacaaggagttggagcgctatcaaaagcaccttgaaaatgcaaaggaaatcgggattaagaaggccataagcgctaacatcagtatgggcattgccttcctgctgatttacgcttcctatgctctggccttctggtacggctctactctggttatcagcaaggaatacactataggtaatgccatgacggtattcttcagcatcctgatcggagctttttcagtcggtcaggctgcaccctgtatagacgcctttgcgaatgcccgaggcgccgcctatgttattttcgatataatcgacaacaaccctaagatcgactctttttcagagcggggccacaagccggactccattaagggcaatcttgaatttaacgacgtgcattttagttacccatcacgcgcgaatgtaaagatcctgaagggtctgaatctgaaggtccagtcaggccagacagtcgccctcgtaggcagcagcggatgtggtaaatccaccaccgttcaattaattcagagactatatgaccccgatgagggtactattaacatcgatgggcaggacatcaggaactttaacgtgaattacctaagggaaattatcggagtggtttcacaggagccggttctgttttcgaccacaatcgccgaaaacatctgttacggcagaggcaatgtcaccatggacgaaataaagaaagctgtgaaggaggcaaatgcatacgagtttatcatgaaactccctcaaaagtttgacaccttagtcggcgaaaggggggcccagttaagcggtggccaaaaacagcggattgcaattgccagggccctggtgcgaaaccccaaaatcctccttttggatgaagccacgtcagccttggacacagaatccgaagcagaggtccaggccgccctggacaaagctcgggaaggccgaaccactattgtgatcgcacatcggctcagcaccgttaggaacgctgatgtgattgcgggatttgaggatggcgtgattgttgaacaggggtcacactctgaacttatgaaaaaagaaggcgtctatttcaagttggtcaacatgcaaaccagcggaagccagatccaaagcgaggagttcgagctcaatgacgaaaaagccgcgacgaggatggcccctaatgggtggaagtcacgcctctttcggcatagcacacagaagaacttgaaaaactctcaaatgtgtcagaagtccctggacgttgagactgacgggttggaagccaacgtgcccccggtttctttcctaaaggttctaaaactaaataaaactgagtggccgtattttgttgttggaactgtctgtgccattgccaacggcggcctccagccggctttctccgtgatattctccgaaattatcgcaatttttggcccgggcgatgacgccgttaaacagcagaagtgcaatatcttctcactcattttcctcttcttgggtattattagcttttttactttctttctccagggctttacttttgggaaagcaggcgagattctaacgagaaggttaagatccatggcctttaaggccatgctccgccaggacatgagctggtttgacgatcacaagaattcaaccggcgccctgtcaacccggttggcgactgacgcggcccaggtgcagggagcaacaggaactaggctagcattgatcgcacagaacatcgccaatcttgggactggcataataattagcttcatctatggctggcagctcactttgcttttgctggctgtggtgcctatcatcgctgtgtcgggtatcgtcgagatgaagctgctcgcgggcaacgccaaacgcgacaagaaagagctggaagccgccgggaagattgctaccgaagccattgagaatattaggactgtggtaagcctgactcaagagagaaaattcgagtctatgtacgtggagaagttgtatggtccatatcgaaactccgtacagaaggcgcacatatacggaatcactttcagtatctcccaggccttcatgtacttctcctatgcggggtgcttccgctttggcgcgtacctgattgtgaacggacatatgagattcagagacgttatcttggttttctcggctatcgtgttcggcgccgtggcattagggcatgcttcttccttcgcacccgactacgctaaagcaaagctcagtgccgcacacctgttcatgctgtttgaaagacaacccttaattgactcttattccgaagaaggattgaagccagataagtttgaggggaatataactttcaatgaggtagtctttaactacccgactagggccaacgttccagtcctccaggggctctcactcgaagtgaaaaaagggcaaactctggcactagtggggtcttccggatgtggcaagagcactgtagtgcagctcctggaacgtttctatgacccattggccggcacagtttttgtggattttggtttccaactgctggatggtcaggaagcaaagaagctgaatgtccagtggttgcgcgcacaactgggaattgtctcccaagaacctattctgtttgattgtagtatagctgaaaatattgcatacggcgacaactcacgagtagtgagccaagatgagattgttagcgctgctaaggctgccaatattcatccctttatcgaaactctacctcataagtacgagacccgggtgggagataagggtacgcagctgtcagggggacagaaacagagaattgcaattgcccgggcactcatccgacagccacagattttgctattggacgaagctacctccgctctggacacagagtctgagaaagtggtgcaggaggcactggacaaggcccgagagggccgcacttgcatcgttatcgcccatcggttatctaccatccagaacgctgatcttattgtggtttttcagaacggacgagtcaaagaacacgggacccaccagcagctgttggcacagaagggaatctatttttccatggttagtgtgcaagccgggacccagaacctg

SEQ ID NO: 7593 - DNA, 3858 bp, synthetic construct
  misc_feature 1..3858: note = source = /note="Description of Artificial Sequence: Synthetic coding sequence"
  source 1..3858: mol_type = other DNA
atggatttggaggctgccaaaaatggtacagcctggagacccactagcgcagagggagatttcgagctgggcattagtagcaagcagaaaagaaagaagactaagactgtcaaaatgatcggtgtcttaacactcttccggtactccgattggcaagacaagttatttatgtcactggggacaataatggctatcgcacacggctcaggactccctcttatgatgatcgtgttcggggagatgacagacaagttcgttgatactgctgggaacttcagcttccccgtgaacttctccctgtcacttctgaatccagggaaaatcctcgaagaagagatgacgagatacgcctattattattccggcttgggggccggtgtgcttgtggccgcatacatacaagtatctttttggactctggcggcgggccgtcagattcggaaaatcaggcagaaattcttccacgctatacttcgtcaggagatcggctggtttgatattaatgacactactgagcttaacacccggctgacagacgatatttcgaaaatttcagagggcatcggcgacaaagtgggcatgttctttcaggctgtggctacctttttcgccggctttatcgtcggctttatacgcggctggaaattaacgcttgtaatcatggcgatttccccgatcctaggactgtccgccgctgtgtgggccaaaatcctgagcgctttttctgacaaggagttagcggcgtacgctaaggcaggagccgtggccgaggaggcactgggggctattcgaacggtcatcgccttcggcggccagaataaggagctcgaacgctaccagaagcacctagaaaacgccaaggagatcgggattaaaaaagctataagcgctaacatcagcatggggatcgcttttctcctgatctacgcttcttacgcgttagctttttggtacggttccactcttgttatctcaaaggagtacacgatcggcaatgcaatgacagtgtttttttcaatcctcatcggcgcattctccgtcggtcaggctgccccttgtatcgacgcctttgctaatgcccgaggcgctgcttatgttatctttgacatcattgacaacaatcccaaaatagactcatttagcgagcggggccacaagccagactcaattaaaggaaatcttgagttcaacgacgtgcatttttcttacccttccagagctaacgtgaagatcctgaaaggattaaatctcaaggttcagtctgggcaaaccgtggccttggttggctctagtgggtgcggcaagtctaccaccgtccagctcattcagaggctgtacgaccccgacgaaggcaccatcaatattgacgggcaggatattagaaattttaatgtaaattacctgagagaaataatcggggtggtgtctcaagaaccggtgcttttctcaacaacaattgccgagaatatttgctatggtaggggtaatgtcactatggacgaaatcaagaaggcagtcaaagaagcaaatgcctatgaattcatcatgaaactgccccagaaatttgataccctcgttggcgaacggggagcgcagctcagcggagggcaaaaacagaggatagccattgcaagggccttggttcgcaatccaaagatcctactcctagatgaggctacttccgctctcgacactgagtctgaagccgaagtccaagccgccctcgacaaagctagggagggtcgtactacgatcgtgatcgcacaccggttgtcaactgtgcgcaatgccgatgttattgctgggtttgaggacggagtcattgtggagcagggttcccactccgaacttatgaaaaaggagggtgtttactttaaactggtgaatatgcagacatctggcagccagatacagtctgaggagttcgaactgaacgatgaaaaagccgccacacggatggcaccgaatggttggaagtcacgtctctttaggcatagcacccagaagaatcttaaaaatagccaaatgtgtcagaagtctctggatgttgagacggacgggctggaagccaacgtgcccccggtgagttttcttaaagttctcaaacttaacaagaccgagtggccatattttgtagtcggaaccgtgtgcgctatcgcaaatggggggctgcaaccagccttctcggttatattcagtgagatcatcgcaatttttggcccaggtgacgacgctgtaaagcagcagaaatgtaacattttctctctgatctttttgtttttaggcatcatctcatttttcacattttttctgcagggctttacttttggcaaagccggagaaatcttgaccagaagattaaggtctatggcctttaaggctatgttacgacaggatatgtcttggtttgatgatcataagaactcgaccggtgccttgagtacccggctggcgactgacgctgcccaggtgcaaggagcaacgggcacacgactggctcttattgctcagaatatcgccaatctcggtactggcatcatcattagttttatctacggttggcagcttaccctactcctgctcgccgtggtacccattattgccgtgtctggtatagtcgaaatgaagctcctggccgggaacgcaaaaagagataagaaggagctcgaggcagcgggcaaaatcgcaacagaagcaattgaaaacattcggactgtggtgagcctaacccaggagcgtaagttcgaatcaatgtacgtggaaaagctgtacggcccctacaggaactccgtccagaaagcacacatctatggtatcacattttccatttcgcaggcttttatgtactttagctacgccggatgctttcgcttcggtgcttatctgattgtaaatggccacatgcgctttcgggatgtgatcctggtgttctctgctatagtgtttggggccgtggctctgggtcacgcctcttcttttgcgccagactacgccaaggccaagctgtcagcggcccacctcttcatgctctttgaacggcagccactcattgatagttacagcgaagaaggactaaaacccgataagttcgaagggaacataaccttcaatgaagtcgtgtttaactaccccacccgtgccaacgttcctgtgctgcagggtctcagtctagaggtgaaaaaaggccagacactggctcttgttggatccagcggatgtggaaaatccactgttgtccagctgttagaacgcttttacgatcccctcgccggcacggtgttcgttgattttggcttccaattgctggatggacaggaagcgaagaaactgaatgtccaatggctaagagctcagctgggaattgtaagtcaggagccaattctgttcgattgctctatcgctgagaacatcgcctatggcgataactcacgggttgttagtcaggatgagatcgtaagtgcagctaaggccgctaatatccaccccttcatcgagacccttccgcacaagtacgaaacacgcgtcggggacaaaggcactcagctgtccggagggcagaagcaaagaattgcgatcgcccgcgctctgattcgtcagcctcagattctgctcctggacgaagctacttccgcgctagatacagaatccgagaaagtggtgcaggaagcccttgataaggcgagagagggcagaacttgcatagtgattgcccatcggctctcaaccattcaaaatgccgatcttatcgttgttttccagaacggtcgggtcaaggaacacggcactcaccaacagctgctcgctcaaaagggaatttacttttctatggttagcgtgcaggccgggactcagaatctc

SEQ ID NO: 7594 - DNA, 3858 bp, synthetic construct
  misc_feature 1..3858: note = source = /note="Description of Artificial Sequence: Synthetic coding sequence"
  source 1..3858: mol_type = other DNA
atggacctggaagctgctaaaaacggaacagcatggcggccaacttcagccgaaggagactttgaactaggcatttcatcgaaacaaaaacgtaagaagactaagacagtcaaaatgattggagtactaacacttttccgctatagtgactggcaagacaaattgtttatgagtttgggaaccattatggccatagctcatgggtcaggactcccattaatgatgatagtttttggggaaatgactgataagttcgtcgatactgcgggaaatttctcatttcccgttaatttttccctttcactcctgaatcctggaaagatactcgaagaagaaatgacgagatatgcctattattacagcggactcggagctggagtcttagtggcagcatatattcaagtttcattttggacactcgcggcgggaagacaaattcgtaagattcgtcagaagttttttcacgcgatactccgacaggaaatcggatggtttgacataaacgatactacagagttgaacacgagattgacggatgatattagcaaaatttcagaaggcattggggataaggtaggcatgttttttcaggcagtcgctacgttcttcgctgggtttatagttggatttattagaggttggaagttaacgttggtcatcatggctatctcgcctatcttaggattgagtgcagctgtgtgggctaagatccttagcgcattctctgacaaggaacttgcggcatatgcaaaagcaggggctgttgctgaagaggcccttggagctatccggacagtgattgcattcggaggacaaaataaagagctggaaagataccaaaagcatctcgaaaatgcgaaagaaattggaatcaagaaagctatctctgctaacatttctatgggcattgctttcttgctcatttatgcttcctatgcgcttgcattctggtatggatccacgcttgttatttctaaagaatatacgattggaaacgcaatgaccgtcttcttcagtatccttattggagcgttttcggtaggtcaggcggccccatgcatagatgctttcgctaacgcacgtggagcagcatatgttatatttgatataattgataacaatccaaagattgactcattttcagaaagaggacataaaccagattcaatcaagggaaatttggagtttaatgatgtgcatttctcgtatccatcaagagctaatgtaaaaatcctgaagggattgaatctgaaagtgcaatcgggtcaaacggtggctttagttggttcttccggttgcggtaaatcgactaccgtacaattgatccaacgtctgtacgatcccgacgaaggtaccatcaatattgacggacaagacatcagaaacttcaacgtcaactatcttcgtgaaattataggagttgtgtctcaggaaccagtgctgttctccactacaatcgctgaaaatatttgctatggaaggggcaacgttacaatggatgagatcaaaaaagccgttaaggaagccaatgcttatgaattcatcatgaaactccctcaaaagttcgatacgttggtgggtgaaagaggagctcaactttctggaggacaaaaacaaagaattgctattgcaagagctctcgtgaggaacccgaaaatcctgctgcttgatgaagcaacttcagctttagacactgaatccgaggcagaggtccaagcagcattggataaggctagagaaggacggactaccatagtcatcgcacaccgactcagtaccgttcgtaatgcagacgttatcgcgggttttgaggacggtgttattgtcgaacaaggatcccattcagaattgatgaaaaaagagggcgtgtacttcaagctcgtaaatatgcaaacgtctggatcgcaaattcaatctgaagaattcgagctcaatgatgagaaggcagcgacgcgaatggcaccaaacggatggaaatcacgtctgttccgacactctactcaaaagaatctcaaaaactcacaaatgtgtcaaaagtcattagatgtggaaactgacggtttggaagcaaacgttccacctgttagtttcttgaaagttttaaaattaaataagactgaatggccgtactttgttgtcgggacagtgtgtgcgattgctaacggaggactacaaccagcattttcagttattttcagcgagattattgctattttcggacctggagatgatgctgttaaacagcaaaagtgtaacatcttctcactgattttcctttttttgggaattatctcgtttttcactttcttcctccaaggattcactttcggaaaagctggcgaaatactgactcgacgattacgttcgatggcgttcaaagctatgcttcgacaggatatgtcttggtttgatgaccacaagaacagtacaggtgctctgtcaaccagactagcaacagacgcggcacaggtccaaggcgccacaggaacacgattggccttgatcgcccaaaacatcgcaaacttgggaactggaattattataagttttatttacggatggcaacttacacttcttctcttagctgtggtccccataattgcggtctcgggtatcgtggaaatgaaactgttggccggaaacgccaaaagggataagaaagaactggaagctgctggaaagattgcaactgaagcaattgagaacattagaacggtcgttagcctcacccaagaacggaaattcgaatctatgtatgtagaaaagctctatggtccgtaccggaactcagttcagaaggcacacatttatggaataacgttttctattagtcaggcctttatgtacttctcttacgcagggtgtttcagatttggagcctaccttattgttaatggtcatatgcggtttagagatgtcatcttggtgttttccgcaatagtgtttggagcagttgcgctaggacatgcatcgtcctttgcaccagattatgctaaagctaagctctcagctgctcatctgtttatgttgttcgaacgacagccattgatagatagttactcagaagaagggctcaagccggacaaattcgaaggaaatattacttttaatgaggttgtattcaattacccgacgcgcgcaaacgtcccagttctccaaggattgtcgttagaagttaagaagggtcaaacattggctctcgtcggttcaagcggatgtggaaagtcaaccgttgttcagctgttggagcgtttttatgatccgctcgcaggaacggtcttcgttgactttggatttcagcttctggatggacaagaagctaaaaagcttaacgttcaatggttgagagcccaactcggaatcgtctcccaggaaccaattcttttcgactgctcgattgctgaaaatattgcctacggagacaattcgcgcgtcgttagtcaggacgaaatagtctcggcggcgaaagctgccaatatccatccctttatcgaaactcttccacacaaatacgaaacgcgggtaggcgataagggcactcagcttagtggaggacaaaaacaaagaattgccattgctcgagctctaattcgtcaacctcagatactcttgcttgatgaggctacttcagctttagacacagaatccgagaaggtagttcaagaagctttggacaaagcaagagaaggtagaacttgcatcgttatcgcccatcgactctctacaattcaaaacgcagatttgattgtagttttccaaaacggaagagttaaagagcatggcactcaccaacagcttcttgctcagaaaggaatatacttttcaatggtttcggttcaagctggaacccaaaacctg

SEQ ID NO: 7595 - DNA, 3858 bp, synthetic construct
  misc_feature 1..3858: note = source = /note="Description of Artificial Sequence: Synthetic coding sequence"
  source 1..3858: mol_type = other DNA
atggaccttgaggccgctaaaaacggcacggcatggaggccaacgtcagcagaaggtgactttgaacttggcatctcctcaaagcagaaaagaaagaagaccaagacagttaagatgatcggcgtccttacattgttcaggtattccgactggcaggacaaactttttatgtcactggggactatcatggccattgctcacggttctggtttgcctttgatgatgatagtgtttggagagatgacggataagttcgtggacaccgctgggaacttcagctttccagtcaacttctcactctccttgcttaacccgggtaagatcctagaggaggaaatgacacgctatgcttattattattccggacttggcgctggcgttcttgtggcggcatatatccaggtctcgttctggactcttgctgctggccgccaaattcgcaagatccgacaaaagttctttcacgctattctacgccaggaaataggctggtttgacatcaacgatacaactgagttgaacactaggcttactgacgacatctccaagatctcagaaggaatcggtgacaaggttggcatgttcttccaggcggttgccactttctttgcaggcttcatcgtcggattcatccgtggatggaaattgactctagtgattatggccatcagtccaatccttgggttatcggcggccgtctgggcaaaaattctgtctgccttctcggacaaggaattagctgcatacgcgaaggcgggtgcagtggccgaagaagctcttggggcaatccgtacggtgattgcatttggtggccagaataaagagcttgaacggtaccagaaacaccttgaaaatgcaaaggagatcggaatcaagaaggccatctccgctaacatctcaatgggcattgctttcctcctcatctatgcaagttacgcgttagctttctggtacggatctacactagttatcagcaaggaatacacgatcggtaacgctatgaccgtcttcttctctatcttgatcggagcgttttccgtcgggcaggcggccccttgcatcgatgccttcgcgaatgcgcgaggcgctgcgtatgttattttcgatatcatcgacaacaatcctaagatcgactctttttccgagcgtggccacaagcctgatagtattaagggtaatttggaattcaatgacgtccatttctcatacccctctcgggctaatgttaagatcctcaagggattaaatttgaaagtccagagcggacagaccgtggctctcgtcggctcctctggttgcggtaagagcacgacagtgcagcttattcagcgattgtacgaccccgatgagggaacgatcaacatcgacgggcaggatataaggaatttcaatgtcaactacctccgagagatcatcggggtcgtttctcaagaaccagtcttgtttagtaccacgatcgcggagaatatttgttatggacgtggcaatgtgacgatggatgagataaagaaggcggtcaaggaagctaatgcatatgaattcattatgaagctcccacaaaagtttgatacattggtcggcgagcgcggggctcaattgagtgggggacagaagcaacgtattgcaatagcaagggcgctggttcgtaaccccaagattttgcttctggatgaggcgacgtccgccctagacactgagtctgaggctgaggtgcaagctgccctggacaaagcacgggaaggtcggacgacgatcgtaatagcgcaccggttaagtaccgtaaggaatgccgatgttattgcaggatttgaagacggtgtcatagtcgaacaaggctcgcacagtgagctcatgaagaaagaaggtgtctatttcaaattggtaaacatgcagacgtcaggaagtcagatacaatcagaagagtttgagttaaacgacgagaaagctgcgacgcgtatggctccaaatggatggaaaagtcgtctgtttcgacattccacccagaaaaacctaaagaactcgcaaatgtgtcagaaatcacttgacgtggagacagatggcttagaggccaacgtaccgccggtctcgtttcttaaagtgctcaaactaaacaaaaccgaatggccatacttcgtcgtagggaccgtctgcgctattgctaacggtgggttgcagccagcattttcggttatattttcggagataattgcgatttttggtccgggtgatgatgccgtgaagcagcaaaagtgtaacatcttctcccttatttttctcttcctcggcataataagctttttcacattcttccttcaaggttttacattcgggaaagccggcgagattttgacccgacgcctgcgctcaatggcctttaaggcaatgctccgccaggatatgtcttggttcgacgaccataagaacagcacgggtgcattgagcacaagactggcgactgacgccgcgcaggttcagggagcaactggaacacgtctcgctctcatcgcgcagaatatcgcaaatctcggaaccgggatcataatttccttcatttacggttggcaactgaccttgctcttgctcgccgttgttcctattattgctgtctcaggaatagtcgaaatgaaactgttggccggtaatgctaaacgtgataagaaggagttggaggcagctgggaagatcgcgaccgaagccatagaaaatatccggacggttgtgtccttgacgcaagagcgcaagttcgagtcgatgtatgtagaaaagttatatggaccgtatcgaaactctgtccagaaggcacatatttatggtatcaccttcagtatatcacaggcgttcatgtatttctcttatgctggttgctttcgattcggagcttacttaatagtcaacggccatatgcgatttcgcgacgttatcctcgtgttctcggctattgtctttggtgcagtcgcgctcggccatgcttcgtccttcgcgccagactatgccaaggccaagctttcggccgctcacttatttatgctgtttgagcgtcagccgctgattgactcatactccgaagaagggctcaaacccgataagtttgagggtaatattacatttaacgaggttgtcttcaactacccaaccagggccaatgtcccggtgttgcaagggttgtcgcttgaggttaagaagggccaaaccctggccctcgtgggtagtagcggatgtggaaagtcaactgtagtacaactactggaaaggttttatgacccactggccggtactgtctttgtcgactttggtttccaactgctggacggacaggaggctaagaagcttaatgtacaatggttgcgagctcagcttggaatcgtttcgcaggagccgattctcttcgattgctccattgctgaaaatattgcgtacggagataacagccgcgtggtctcgcaggacgagatcgtgtcggcagcgaaggctgctaatatccatccatttatcgaaaccttaccccacaaatatgagactagggtcggggataaaggtacacagttgtccggcggtcagaaacaacgcatcgcgattgcccgtgcgttaatcagacaaccccagatcctgctgctcgatgaggcaaccagcgctcttgacactgaatcggagaaggtcgttcaagaagcgttggacaaagcacgtgaggggcgtacctgcattgtcattgcacatagactctcaacgatccagaacgctgatctgatcgttgtctttcagaatggacgcgtcaaggaacatggcacgcatcagcaattactagcacagaagggaatttacttctcaatggtctctgtgcaggcgggcacacagaacctt

SEQ ID NO: 7596 - DNA, 3858 bp, synthetic construct
  misc_feature 1..3858: note = source = /note="Description of Artificial Sequence: Synthetic coding sequence"
  source 1..3858: mol_type = other DNA
atggacctggaagcagctaagaacggtaccgcctggcggccgacctccgccgaaggtgacttcgaactgggtattagctcaaagcagaagcgtaagaaaaccaaaaccgtgaagatgattggggtcctgactctgttccgctactcggactggcaggacaagctcttcatgtcactcgggactattatggccatcgcacatgggagcggcctgccgctcatgatgatcgttttcggtgagatgaccgacaagttcgtggatactgcaggcaactttagttttcctgtgaacttttctctgtcgctgctgaaccccggaaagatacttgaagaagaaatgacccggtatgcctactactacagcggactcggagcgggtgtgctggttgctgcctacattcaggtatcattctggaccctggccgccggccggcagattcgtaaaatccggcaaaagttcttccatgccatccttagacaagagatcggatggttcgatatcaatgatactactgagctcaacacccggctgactgacgatatctcgaagatctcagaagggatcggcgataaagtgggaatgttttttcaggcggtggccacttttttcgctggattcatcgtggggttcattaggggatggaaactgacgctggttatcatggcgatctccccaattctgggcctctcagccgcagtttgggccaagatcctctcagccttcagcgataaagaactcgccgcctacgccaaggcgggcgccgtcgcggaggaagcgttgggagccatccggacggtgatcgcttttggaggccaaaacaaagaacttgagcgctaccagaagcacctcgagaacgccaaagaaatcggtatcaagaaggcgatctcagcaaatatctcaatggggatcgcgttcctgttgatctacgcatcctacgccctggctttttggtatggatctaccctggtgatcagcaaggagtacactatcggaaatgccatgactgttttcttcagcatcctgattggagccttctcggtggggcaggcggcaccgtgtatcgacgcgttcgcgaatgccagaggagctgcgtacgtgatcttcgatatcatcgacaataatcctaagattgactcgttctcagaacgggggcataagcctgatagcattaagggcaatctcgagtttaacgacgtccatttctcctacccgtcccgagctaatgtcaaaatcctcaagggcttgaatctcaaggtgcagtccggacaaacggttgccctggtaggttcaagcgggtgtggaaagtcgaccacggtccagctcatccaacgcctctatgacccagatgagggaaccattaacatcgacggacaggatatcaggaactttaacgtgaactacctcagggagatcatcggcgtggtgtcacaagaaccggtgctgttctcgactacgatcgctgagaacatctgctacggtcgcggcaacgtgaccatggatgaaatcaaaaaggccgtgaaggaggcgaacgcatacgaattcatcatgaagctgccacagaagttcgacactctggtgggcgagcggggagcccagttgtcgggaggacagaagcaaaggatcgcaattgcccgcgctcttgtccgcaatcccaaaatcctgctcctggacgaggccaccagcgcgctcgacaccgaatctgaggcagaagtacaagctgccctggataaggcgcgcgaaggccgcaccacgatcgtcatcgcacaccgcctgtcaaccgtccgtaacgcggacgtcatcgcaggcttcgaggatggagtgatcgtggaacaaggctcgcatagcgagcttatgaaaaaggagggcgtgtacttcaaactggtgaacatgcagacttccggctctcagatccagtcggaagaatttgaactgaatgatgaaaaggcagcgacccgcatggcaccgaatggatggaagagccgccttttcagacacagtacccagaaaaacttgaagaattcgcagatgtgccaaaagtcgctcgacgtcgaaactgacggtctggaagcaaacgtcccgcctgtctcgttcctcaaagtgctgaagctcaataagactgagtggccttacttcgtggtcggtactgtgtgcgcaatcgctaatgggggcctgcagccggcattctcagtcatcttctccgagattatcgctatcttcggaccgggcgatgacgcagttaaacaacagaagtgcaacatcttctccctgatcttcctttttctgggcattatctcgttctttactttcttcctccaaggattcactttcggtaaagccggagagatcttgacgcggcgcctgcggtccatggccttcaaagcgatgttgcgacaagatatgtcctggttcgacgatcacaagaactccaccggagcactctcgacgcgcctcgccaccgatgccgcgcaagtgcaaggcgctactggcacgcggctcgccctcatcgcccagaatatagccaacctgggcaccggaattatcatctcgttcatctacggatggcagctcactctgttgctcctcgccgtggtgccgattatcgcagtgtccggaatcgtagagatgaagctgctggccggcaatgcaaagcgggacaagaaagagcttgaggccgccggcaagatcgcgaccgaagcaatcgagaatattcgcaccgtggtttcgctcacccaggaacgcaaatttgagtcaatgtacgtcgaaaaactgtacggaccgtacaggaactcggtccaaaaggctcacatctacggaatcactttctcgatttcccaggcgtttatgtacttttcatacgccgggtgcttccggtttggcgcttatttgatcgtgaacggacatatgcggttccgcgatgtgatcctggtgttcagcgccatcgtgtttggagccgtggcccttggccacgccagctcgttcgcaccggattacgcgaaggctaagttgtccgctgcgcacctcttcatgctttttgagagacaaccattgatagactcgtactcagaggaaggactgaagccagacaaattcgaaggaaacattactttcaacgaggtcgtgttcaattaccctacccgcgctaacgtcccagtgctccagggcctgtccttggaagtgaagaaaggtcaaactctggcactggtcggaagcagcggctgtggaaagagcaccgtggttcagctgctggaacgcttttacgacccgttggccggtacggtctttgtggacttcggatttcagcttctggacggacaagaagccaagaagctgaacgtgcagtggctgcgggcgcagctgggtatcgtcagccaggaaccaatcctgttcgattgctcaatcgcggagaatatcgcgtacggcgataactcgcgggtggtgtcccaggacgaaattgtttccgctgcgaaggccgccaacatccacccctttattgaaactctcccacataagtacgagactagagtcggagacaagggcacccagctcagcggaggacaaaagcagcggatagccattgcacgtgctctgatccgccagccccaaatcctgttgcttgacgaggccacttcggccctcgacactgagtcagaaaaagtggtgcaagaagcgcttgacaaggcacgcgaaggaagaacctgcatcgtgattgctcaccgactctccactatccaaaacgccgacttgattgtcgtgtttcagaacggccgggtcaaagaacacggaacccaccaacagttgttggcgcagaagggtatctacttctcgatggtcagcgtgcaagctgggacccagaatctg

SEQ ID NO: 7597 - DNA, 3858 bp, synthetic construct
  misc_feature 1..3858: note = source = /note="Description of Artificial Sequence: Synthetic coding sequence"
  source 1..3858: mol_type = other DNA
atggatctcgaagccgcaaagaacggaaccgcatggcgacccaccagcgcagaaggagattttgaactgggaatctcgagtaagcaaaagcggaaaaagactaagaccgttaagatgatcggggtgcttactttgtttcggtactccgattggcaagataagctgttcatgtcgctgggtactataatggctattgcacacggcagcgggctccctcttatgatgatcgtgtttggagaaatgactgacaaatttgtggatactgcggggaatttctcattccccgtgaacttttcacttagccttctgaatcctgggaagattctcgaagaagaaatgacccgttatgcatactactattcgggactgggggcaggagtgctggttgccgcttacatacaagtgtccttttggactttggccgcgggacggcaaattcggaagattaggcagaaattctttcatgccattttgcggcaggaaatcggttggtttgacattaatgataccactgaactgaacacccggcttaccgacgatatctcgaagatttcagaaggaatcggagataaggtgggaatgttttttcaagcagtggccacgttctttgcaggtttcatcgtgggattcattcgaggctggaagctcactcttgtcattatggcgatttccccgattctgggccttagcgcagcagtgtgggcaaagatactgtccgcattctccgataaggaactggcagcatatgccaaggcaggggctgtggccgaggaagcgctgggagcgataaggaccgtcattgcatttggaggacagaataaggaacttgagagataccaaaagcacctcgaaaatgcaaaggagattggtattaagaaagccatttcggcaaacataagtatggggattgccttcctgcttatctacgcgagctacgccctggcgttttggtacggcagcactcttgtaatatcaaaggaatacaccatcggaaacgcgatgacggtgttcttttcgattctcattggtgcattctcagtgggtcaagctgctccttgcatcgatgcctttgccaacgcacgcggcgcagcctacgtgatcttcgacattattgataacaatcccaaaattgattccttctccgaacgcggtcataaaccggacagcataaagggtaatcttgagtttaacgacgtccacttttcgtacccctcaagggcaaacgtgaagatactgaagggtctgaatcttaaggtgcagtctgggcagaccgtggcgctcgtcggtagctccgggtgcggaaaatccacgactgtacagctgatacaacgcttgtacgatccagatgaaggcactattaacattgacggacaagacattagaaatttcaatgtgaattacctgagggaaatcataggagtagtctcccaagaacctgtccttttttcaaccacgattgccgaaaacatttgctacggtagaggtaatgtaaccatggatgaaatcaaaaaggccgtcaaggaagcaaacgcatacgagtttatcatgaaacttccgcagaagttcgataccctggtgggagagcgcggcgcacagctgtccggtggccagaagcagcgtatagcaattgcacgcgcacttgttcggaacccaaaaatcttgctgctggacgaggctacttctgcactggatactgagagcgaagcagaggtccaagccgcacttgataaggcgagagaaggccgtaccaccattgtcattgcacatcgtctgtccaccgtgagaaatgcggacgttattgcaggatttgaagatggcgttattgtggagcaaggatctcactctgaattgatgaagaaagagggggtgtatttcaaactcgtgaatatgcagacttcaggatctcagattcagtcggaggaattcgagctgaacgatgaaaaggcagcaacgagaatggcccccaacggctggaagagcaggctgtttcgacactcaactcagaaaaaccttaagaactcccaaatgtgtcagaagagcctggacgtggagacggatggtcttgaggctaacgtgccacctgtgtcgttcctgaaggtgctgaaactgaacaaaactgagtggccgtactttgtggtgggtaccgtgtgtgcaattgcaaatggtggactgcaacccgcgttcagcgtgatcttttccgaaatcatagccatctttggcccaggagatgacgcggtcaagcagcaaaagtgcaacatctttagcctgatatttcttttcctcggaattatctcgttctttaccttctttctccaggggtttactttcgggaaagcaggtgagatcctcactcgacgtttgagatccatggcatttaaggcaatgctcagacaagatatgagctggtttgatgaccacaagaattcgaccggagcactctcaaccaggcttgctaccgacgcagcacaagtgcaaggcgcaacgggcactcgactcgcactgattgcacaaaacatcgccaatcttggtaccggaattatcatttcctttatctacggttggcagttgactctgctcctcctggcggtggtgccaatcatcgcagtctcgggtatcgtggaaatgaaactgcttgctggtaatgcaaagagagataagaaggaactcgaggcggcaggaaagatcgcaactgaggcaattgagaacatcagaactgtggtcagtctcactcaggaacgcaaatttgaatccatgtacgtcgaaaagttgtacggaccttaccgcaacagcgtgcaaaaggcccatatctacggcatcacctttagtatctcgcaggcctttatgtacttctcgtacgcaggatgttttcgttttggtgcctaccttatcgtcaatggacatatgagatttcgcgatgtgatacttgtgttcagcgctatagtctttggagcggtggcactggggcatgcctccagcttcgcacctgattacgcaaaggcgaaacttagcgccgcacatctgttcatgctttttgaacgccagcctctgatcgatagctactccgaggagggacttaagccagacaaatttgaaggaaacatcacttttaacgaagtggtgttcaactacccaaccagggcaaacgtcccagtccttcaggggctctccctcgaagtcaagaaaggtcaaaccctcgcactggtgggatcgtccggatgcggtaagtcgactgtcgtccaactccttgaacgattttacgaccctttggcaggaaccgtgtttgtggacttcgggtttcaactgcttgatggccaagaagccaaaaagctgaatgtccaatggctccgagcacaactcggtatcgtgtcccaagagccaattctgttcgactgttccattgctgaaaacatcgcttacggggataacagccgcgtcgtcagtcaagacgagatcgttagcgctgcaaaagctgcgaacatccatccattcatagaaacccttcctcataagtacgagactagagtgggtgataaaggtactcaactgagcggaggacagaaacagcgcattgcgatcgcccgcgccctgattcggcagcctcagattctgctgttggacgaagcgaccagcgcacttgacactgaatcagaaaaggtggtccaggaggcgctcgacaaagcaagagaaggtagaacctgtattgttattgcacacagactgtccaccatacaaaacgcagatcttatagtggtgtttcaaaatggcagggttaaggagcatggcacccatcaacaacttctggcccaaaagggaatatacttttccatggtgagcgtccaggccggaactcagaacctt

SEQ ID NO: 7598 - DNA, 3858 bp, synthetic construct
  misc_feature 1..3858: note = source = /note="Description of Artificial Sequence: Synthetic coding sequence"
  source 1..3858: mol_type = other DNA
atggaccttgaagccgcaaagaatggaaccgcttggcgccccacttccgctgaaggagacttcgaactggggatctccagcaagcaaaaacggaagaaaactaaaactgtcaagatgatcggagtgctgactctcttcaggtactcggactggcaagataaactcttcatgtcgctggggaccataatggcgatcgcacacggttccggactgcctcttatgatgatcgtctttggcgagatgaccgacaagtttgtggacaccgcggggaatttctcattcccagtgaacttcagcctttctctcttgaatccaggaaagattctggaagaggagatgacgcgatacgcatattactactccgggctgggagcgggagtgctggtggcagcatatatccaggtgtcattctggactttggcggccggacggcaaatcaggaaaatccggcagaaattcttccatgccatcctccggcaggaaatcggctggttcgacatcaacgacaccactgagctgaacacgcgcctgaccgacgatatcagcaagatcagcgaagggatcggagataaagtcggaatgttcttccaggcagtggccaccttctttgcgggcttcatcgtgggattcatccgcggctggaagctcacgctcgtgataatggccatttcgccgatcctgggcctgagcgcggccgtgtgggctaagatcctctcagccttcagcgacaaagagctggcagcctacgcaaaggccggagcggtggcggaagaggcgctgggtgctattagaaccgtcattgcattcggaggacagaataaagagctcgaaaggtaccagaagcacctcgagaacgccaaggagatcggaatcaaaaaggcgatctcggccaacatttccatgggtattgcgttcctcttgatttacgccagctacgcactcgccttctggtacggatccaccttggtaatctcgaaggaatacactatcggaaatgccatgaccgtgttcttcagcattcttatcggcgccttctccgtgggacaagccgccccgtgtatcgacgcgttcgcaaatgcccgcggcgcggcttacgtgatcttcgatatcatcgacaacaatccaaagatcgacagcttcagcgaaagaggacataaacctgattcgattaagggaaacctggaattcaacgatgtccacttctcgtacccatcccgggccaacgtgaaaatcttgaagggtctgaacctgaaggtgcagtcgggccagactgtggcgctggtcggatcgtcagggtgcggcaagtccactaccgtgcagttgattcaacggctttatgacccggacgagggcactatcaacattgacggccaggacatccgcaacttcaatgtgaactacctgcgggagatcattggcgtggtcagtcaagagccggtgctgttctccaccactatcgcggaaaacatctgctacggcaggggaaatgtcactatggacgagatcaagaaggcggtcaaagaggcaaatgcctacgaattcatcatgaagctccctcagaaattcgataccctggtgggtgaacgcggagcacaactgtccggaggacaaaagcaacgcatcgccattgcgagagcgctggtcaggaacccaaagattctgctcctggacgaagccacctcagcacttgataccgagtccgaagcggaagtccaagccgccttggacaaagccagggaggggagaaccactattgtgatcgcccatcgcctttccactgtgcgcaacgccgacgtgatcgccggattcgaagatggcgtgatcgtcgagcagggatcacactcagaacttatgaagaaagaaggagtgtacttcaaactcgtgaacatgcaaacgtctggctcgcaaatccagtccgaggagtttgaactgaacgacgaaaaggccgccacccgaatggcccctaacggatggaagagcagactgttccgccattcgacccagaagaacctgaagaactcgcagatgtgtcaaaaatcactcgatgtggaaaccgatggtctggaagcaaacgtgccgccagtgtcatttctgaaggtccttaagctcaacaagactgagtggccttacttcgtcgtgggtaccgtgtgtgcgattgcgaacgggggcctgcagccggcgttcagcgttatcttctcggaaatcatcgccatcttcggcccgggagatgatgcggtgaagcaacaaaaatgtaatatcttctccctgatcttcctcttcctcggaatcatctcattcttcaccttttttctgcagggtttcaccttcggaaaggccggagaaatcctgacgaggcgcctgaggtcgatggctttcaaggctatgctccgccaggacatgtcgtggtttgacgaccacaagaatagcaccggtgcactgagcacccggctggctactgacgcggcccaggtccaaggcgccactggaacccgcctcgcactcatcgcgcaaaacatcgccaacctcggaaccggcatcatcatcagctttatctacgggtggcagctgactctgctgcttctcgctgtcgtgcctatcatcgcggtgtccggaattgtggagatgaagctgctggcgggcaatgcgaaacgggacaaaaaggaactcgaagcggcggggaaaattgccactgaggcaatcgaaaacatccggactgtcgtcagcctcacccaggaacggaaattcgaaagcatgtacgttgagaaactgtatggaccgtaccggaactcggtgcagaaggcacacatttacggaatcaccttcagcatttcccaggccttcatgtacttcagctacgcaggatgcttccgattcggggcctacctgatcgtgaacgggcatatgcgcttcagggacgtcatcctggtgttcagcgccatcgtgttcggggccgtggccctggggcacgcttcctcattcgcaccggactacgccaaagcaaagctgtcggcggcgcacctcttcatgctgttcgagcgccagcccctcatcgactcctactcggaagaaggcctgaagccggataagttcgaaggtaacataaccttcaacgaggtcgtgttcaattacccgactagagccaacgtcccggtgctccagggactttccctcgaagtcaagaaaggacagaccttggcactcgtgggatcaagcggatgcgggaaatccactgtggtgcagctgctggaacgcttttacgacccgctggccggaactgtgttcgtagatttcggatttcaactccttgatggtcaggaagccaagaagctgaacgtccagtggctccgcgcccagctgggaatcgtgtcgcaggaaccaatactgttcgactgctccatcgctgagaacatcgcctacggggataattcccgggtggtgtcacaagacgaaatcgtgtccgcagccaaagctgctaacatccaccctttcatcgaaaccctcccccacaaatacgaaactcgggtcggagacaagggaacgcaactctctgggggacagaaacagcggattgctatcgctagagcacttatccggcagccgcaaatccttttgctggacgaggctactagcgcgcttgacaccgaatccgagaaagtggtccaagaggctctggacaaagcaagagaagggcggacctgcatcgtcatcgcacatcgactgtcgacgatccagaacgcagacctgattgtggttttccaaaacggacgggtgaaggagcacggtacgcaccaacagctgcttgcgcaaaagggtatctacttttcgatggtgagcgtgcaggcaggaactcaaaacctg

SEQ ID NO: 7599 - DNA, 3858 bp, synthetic construct
  misc_feature 1..3858: note = source = /note="Description of Artificial Sequence: Synthetic coding sequence"
  source 1..3858: mol_type = other DNA
atggacctggaggcagccaaaaacggcacagcctggaggcctacgtccgccgagggagatttcgaactgggaatatcaagcaaacagaagagaaaaaagacgaaaactgtcaagatgatcggcgtacttaccctgttccggtactccgactggcaggataagctgtttatgagcctcggcactattatggcaatcgcccatgggtcaggcctgcccctcatgatgatagtctttggagaaatgacggacaaattcgtggacacagccggcaatttttcttttcctgtaaacttcagcctctcactcttgaatcctggaaagattttggaagaggaaatgacccgctacgcatactactactcagggctcggagcgggagtgctggtcgctgcttatatacaggtttccttctggacgctcgccgcaggaaggcagattagaaagatacggcagaagttcttccacgccatcctcaggcaggagatcggatggttcgatatcaacgataccactgagctcaacactcgccttacggacgacatcagtaaaatatcagagggcatcggggataaggtggggatgttctttcaagctgtggctacgttcttcgctgggttcattgtaggatttattaggggatggaagctgacactcgtcataatggctatctctccgattctgggcctgtctgctgctgtgtgggccaagattctgtccgcctttagcgacaaagaactcgccgcctacgcgaaagccggggctgtcgcggaggaagccctgggtgcaattcgcacagttattgctttcggagggcaaaataaagaactcgaaagatatcagaaacacctggagaacgcaaaagaaattggaatcaagaaagctatttccgcaaacatcagtatgggcatcgcatttcttcttatttatgcttcctatgctctcgcgttctggtacgggagtacacttgtgattagcaaggagtatactattggtaatgccatgacagtgttcttctccattctgattggcgccttcagcgttggccaggctgcaccttgcatagacgccttcgccaacgcacgaggcgctgcctacgtgatattcgacatcatcgataataatcccaaaatcgacagtttctccgagcggggccataaaccagacagcatcaagggcaatttggaatttaatgatgtgcactttagctatccctcccgagccaatgtgaagatactcaaagggctcaacttgaaggtgcaaagcgggcaaacggtggccctcgtggggagttcaggatgtggcaagagtaccactgtacagctcatccagcggctgtatgacccagatgaagggacaatcaatatcgatggccaggacattaggaacttcaatgtgaattatctgcgagagatcatcggggtggtgagccaggaacccgtcctgttctccactaccatcgccgagaacatatgctatggaagagggaacgtcaccatggacgaaattaaaaaagcagtgaaagaggcaaacgcgtatgaattcatcatgaagctgccacaaaagttcgacaccctggtgggggagcggggcgcccagctgtccggcggacagaagcagcgaattgctatcgcgcgggctctggtacggaaccccaaaatcctgttgctggatgaagctacatccgccctcgatacagaatctgaggctgaggtgcaggccgctctcgacaaagcaagagaggggcgaacaaccatagtgatcgcacacagactttccacggttaggaacgccgatgtcatagctggcttcgaagatggcgtgatagtggaacagggcagtcactccgaacttatgaagaaagagggggtttactttaagctcgtgaacatgcagacaagcggctctcagattcagagtgaggaattcgagctcaacgatgagaaagcagccacgcggatggcacccaacggttggaagtcccggctctttaggcattctactcaaaaaaatctcaagaattcccagatgtgccagaagtccttggatgtggagacagatggactggaggccaatgtgccaccggtgtcattcctgaaggtgctcaagttgaataaaacagagtggccatacttcgtggtgggcacagtatgcgctatagcgaacggaggcctgcagcctgccttttctgtgatattcagtgagataattgccattttcggacccggcgatgatgccgttaagcagcagaaatgcaacatcttttctctcatcttcttgtttctcggaattatttcttttttcacttttttcctgcaaggttttacgttcgggaaagccggcgagattctgacacggcgactgcggagcatggctttcaaagccatgctgaggcaggatatgagctggttcgatgatcacaagaattctaccggtgctttgtctacccggcttgcaaccgatgccgcgcaggtccagggagcaaccggtactaggctcgctctcattgcccagaacattgccaacctcggaaccggcattattatctccttcatctacggatggcagctgactttgttgttgttggccgtggtgccaatcatcgctgtctcaggcatcgtagagatgaaactgctcgctgggaatgcgaaaagggataagaaagaactcgaagcggccgggaagatagctacagaggctatcgagaacatccggaccgtcgtcagtctgacccaggaacgaaagtttgaatcaatgtatgtggagaaactttacggaccctacagaaatagtgtgcagaaggcccatatttacgggattactttcagcatctcacaggcattcatgtatttctcttacgctggctgttttcgctttggtgcatacctgatagtgaacggacatatgagattccgggatgtgatattggtcttctctgccatagtgttcggagctgtggctctggggcatgcgtcttcattcgcacctgattacgctaaagcaaagctcagcgctgcccacctgttcatgttgtttgaacgccagccgctgatcgattcctattccgaagagggtttgaagcctgataagttcgaggggaatatcacgtttaacgaagttgtgttcaactaccctacaagagcgaatgttccagtgctgcaggggctgtccctcgaggtgaaaaaaggacagacgctggcccttgtcggaagcagtgggtgtggaaagtcaacagtggttcaactcctcgagcgcttctatgacccattggctggaacagtgtttgtcgattttgggtttcagctcctggacgggcaggaagccaagaagttgaatgtgcagtggctgcgagcccagcttgggattgtttctcaggagccaatcttgttcgactgctctattgctgaaaacatcgcgtatggagacaattccagggtcgtgtcacaggacgagattgtgtccgcagctaaagcagcaaacattcacccattcattgagacgctgcctcacaagtatgagactagggtgggggataaaggaacgcagctgtccggggggcagaagcagaggatagccattgcccgcgctcttatacgccagcctcaaatcctgctgctggatgaggccaccagtgctctggatactgaatccgaaaaggtggtgcaggaggcgctcgataaggctcgcgaagggagaacttgtatcgttatcgcccaccgactcagtaccattcagaacgccgatctgatcgtggtcttccagaatggccgagtgaaagagcacggcacccaccagcagctgctggcccaaaaagggatctacttttcaatggtgtcagttcaagctgggacccagaacttg

SEQ ID NO: 7600 - DNA, 3858 bp, synthetic construct
  misc_feature 1..3858: note = source = /note="Description of Artificial Sequence: Synthetic coding sequence"
  source 1..3858: mol_type = other DNA
atggacctggaggcagctaagaacggcaccgcttggcggcctacctctgctgaaggagacttcgaactgggaatctcgtccaaacagaagcggaaaaagactaagactgtcaaaatgatcggtgtactgactctgttccgctacagcgattggcaagacaagctctttatgtcgctgggaaccattatggcaatcgcacacgggtcagggctgcccctcatgatgatcgtctttggagagatgactgataagttcgtggacactgcaggaaactttagcttccctgtcaacttcagcctttcattgctgaaccctggaaagatccttgaagaagaaatgacgcggtacgcctactactactctgggctcggggcaggcgtgcttgtggcggcgtacatccaggtgtccttctggactctggccgcgggcagacagatcaggaagattcggcagaaattctttcacgcgattctgcggcaggaaatcggatggtttgacatcaacgacaccaccgaattgaatacccgcctgactgacgacatctccaagatatcggaggggattggagacaaggtcgggatgttcttccaggcggtcgccaccttttttgccgggttcatcgtgggattcatccgcggctggaagctgactttggtcattatggctatctcgccgatcctgggtctgtccgccgccgtgtgggcaaagatcctcagcgcgttcagtgataaggagctggctgcctacgccaaagctggagccgtggccgaggaagcgctcggtgcgatcagaacggtgatcgctttcggagggcagaataaagaactggaacgataccaaaaacatttggaaaatgcaaaagagatcggaatcaaaaaagctatcagcgcgaacatttcgatgggaatcgccttcctcctgatctatgctagctatgccttggccttctggtacggatcaactctcgtgatctcaaaggagtacactatcggcaacgcaatgaccgtctttttcagcattctcatcggagccttctccgtcggccaggccgcaccgtgtatcgacgcgtttgcgaacgcccggggcgcggcatacgtgatcttcgacatcattgacaacaaccccaaaattgattccttcagtgagcgcggacacaagccagattctatcaaaggcaatctggagtttaatgacgtgcacttctcctacccttctcgggccaacgtgaaaatcctcaagggcctcaacctgaaggtgcaatctggacaaactgtcgcgctcgtgggttcgtccggatgtggaaaatcgaccaccgttcagctcatacagcggctgtacgacccagatgaaggaaccatcaacatcgatggtcaggatatccggaatttcaacgtcaattaccttagagaaatcatcggagtcgtgtcgcaagaacccgtgctcttctctacgaccatagcggaaaacatttgctacggacgcggaaacgtgaccatggacgaaatcaagaaggctgttaaggaggccaacgcctacgaattcatcatgaaactcccacagaagtttgacactctggtgggagaaagaggagctcaactgtcaggcggccaaaagcagcggatcgccatcgcacgggctctcgtccgcaatccgaaaatcctgcttcttgatgaagcgacgagtgctctggacactgagtccgaagccgaagtgcaggccgctttggataaagcaagagagggccgaaccacgatcgtcatcgcacatagactctctactgtgcgaaatgccgatgtcatagcaggattcgaggacggcgtcatcgtggaacaaggctcgcacagtgagctcatgaagaaggagggagtgtacttcaagctggtgaatatgcagaccagcggcagccagatccagtccgaggagtttgaacttaacgacgaaaaggccgctacccgcatggcgccaaacggctggaaaagccggttgttcagacactccacccagaagaacctgaagaacagccagatgtgccagaagagcctggatgtggagactgatggactggaggccaacgtcccgccggtgtcctttctgaaagtgctgaagctgaacaagacggaatggccgtactttgtggtgggaaccgtttgcgctattgctaacggaggtctgcaaccggccttctcagtgatcttttcggaaatcatcgcgattttcggaccaggtgatgacgcggtcaaacagcagaaatgtaatatcttctccttgatcttcctttttcttggcattatctcgttcttcaccttctttctccagggattcaccttcgggaaggctggagagatcctcactaggcggctcagatccatggcattcaaggctatgctgcgccaggacatgagctggttcgacgaccataagaattcaactggggcgctcagcactcgcctggcaaccgacgcagcccaggtgcagggggcgactggaacccgtctggccctgatcgcgcaaaacatcgccaatctcggcacggggatcatcatttcgttcatttacgggtggcaacttacccttcttcttctcgccgtggtgccgatcatcgctgtctccggaatcgtcgaaatgaaattgctggcaggtaacgccaagcgcgataagaaagagttggaggcggccggaaagatcgctactgaggcgattgagaacatacgcaccgttgtgtccctgacgcaagagaggaagttcgaatccatgtacgtggaaaagttgtacggcccgtaccgcaacagcgtccaaaaggcccacatttacggtattaccttctccatcagccaagcattcatgtacttctcatacgcaggatgctttcgcttcggcgcgtaccttatcgtgaacggccacatgaggttccgcgacgtgatcctcgtgttcagcgcaatcgtgttcggagcggtggcactgggccatgcttcatcattcgccccggactacgcaaaggccaaactgtcggcagcacaccttttcatgctcttcgagagacagccattgatcgattcatattcggaggagggactgaagccggacaagttcgaagggaacattactttcaacgaagtggtgttcaattatccgaccagagcaaatgtgcccgtgctccagggcttgtccctggaagtgaagaagggacaaacccttgccctcgtcggtagctcgggatgcggaaaatcaacggtcgtgcaactgctggaacgcttttacgatccgctcgcgggcactgtgtttgtggacttcgggtttcaactcctggacggtcaggaagccaagaagctcaatgtccaatggctgcgcgcccaactcggtatcgtgagtcaggaaccaatcctctttgattgctcgatcgccgagaatatcgcgtacggtgacaattcgagggtggtatctcaagacgagattgtttctgccgcaaaagcggcgaacatccatcccttcatcgaaaccctcccacacaagtacgagacgagagtcggagataaaggtactcaactgtcgggcgggcagaagcagcgcattgcgatcgcccgcgccctgatccgccagcctcaaatcttgctcctcgacgaggcaacctccgcccttgatactgaatcagagaaggtggtgcaggaagctctggataaggcacgcgaaggaaggacttgcatcgttatcgcccataggctctcgaccattcagaatgcagatctgatcgtggtgtttcagaatggccgggttaaggaacacggcacccatcagcagctgttggcccaaaagggaatatacttctcaatggtttccgtgcaagccggaacccagaacctg

SEQ ID NO: 7601 - DNA, 3858 bp, synthetic construct
  misc_feature 1..3858: note = source = /note="Description of Artificial Sequence: Synthetic coding sequence"
  source 1..3858: mol_type = other DNA
atggacctggaggctgcgaaaaacggcaccgcttggcggcccacttcagccgaaggagatttcgaactcggtatcagctccaaacagaagcgaaaaaagacaaaaaccgtgaaaatgatcggcgtcttgaccctgttccgctattcagattggcaggataaactttttatgagccttggcactatcatggccatcgcccatggcagcggtctgccactgatgatgattgtcttcggtgaaatgactgataagtttgtggacactgctggaaacttttcttttccggttaatttctccctgtcgctacttaatccaggcaagatactcgaagaggaaatgaccaggtatgcatattattactctgggttgggggcaggcgttttagttgccgcatacatccaagtgtccttctggacgctagcggccgggaggcagattcgcaaaattcgacagaagtttttccacgcaatcctgcgacaagaaatcggttggttcgatataaatgacacgaccgagcttaacaccaggcttaccgacgacatctctaaaatttctgagggtattggggataaagtcgggatgttctttcaggctgttgccacttttttcgcgggatttatcgtaggattcatcagggggtggaaactcaccctagtcattatggccatctctccgattctgggtttgtctgctgcagtctgggctaagatcctgtctgccttttccgataaagagctggccgcctacgccaaggctggcgctgttgccgaagaggctctaggcgcaattcgcacagttatcgccttcggaggacagaacaaggagctggagcgctaccagaaacatctggagaatgcaaaggagatcggaattaagaaggcgatatccgctaatataagcatgggcattgcattcctgctgatctacgcttcttacgccctcgcgttctggtatgggagcacacttgtgattagcaaagaatacacaattggcaacgccatgactgtgttctttagcatcctgattggtgcattcagtgtaggccaagctgccccttgcattgatgccttcgccaacgcccggggggccgcatatgttatcttcgacattatagacaacaaccccaagatagatagctttagtgagagggggcacaagcccgactctataaagggtaatctggagtttaacgacgtgcatttttcttatccttccagagccaatgtgaagatcctcaagggactgaatctcaaagtgcagtctggacagacagtggctcttgtgggtagctcaggctgcggtaagtcaactaccgtgcaactgatccagcgtctgtacgaccctgatgagggcaccatcaacattgatggccaagacattcggaacttcaatgtcaactacttacgcgaaatcatcggggttgttagccaggaacccgtcctctttagtaccaccatagcagaaaacatctgttacggtcgggggaatgtcacaatggatgaaattaagaaggctgtaaaagaggcgaacgcgtacgagtttataatgaaactgccccagaaattcgataccttagtgggcgagagaggggcccagctctcaggggggcagaagcaacggatagccattgctagggcactggtccggaacccaaaaatattgctgcttgacgaagcgaccagtgctctcgacacggagagtgaggctgaagttcaggccgctctggacaaggctcgcgagggccgaactaccatcgtaatcgcacaccgcctttccacggtgagaaacgccgatgtgatcgctggttttgaagacggggttatcgtcgagcaaggcagccactctgagctgatgaagaaggaaggtgtctacttcaagttagtgaacatgcagacttctggatcacagattcaaagtgaagagtttgagctcaacgatgaaaaagccgccacacggatggctcccaatgggtggaaaagtcgactttttagacatagcacacagaagaacctaaaaaacagccagatgtgtcagaaatctctggatgtggagactgatggacttgaggcaaatgtgcctcctgtcagttttttgaaggtcctcaaactgaacaagaccgaatggccatatttcgtcgtgggcacagtatgcgccattgccaacggagggctccagcctgcgttttctgtcatattctctgagatcatcgctattttcgggcccggcgacgatgccgttaagcagcagaaatgcaatatcttctcccttatttttttatttctggggatcattagcttcttcaccttctttctgcagggcttcacattcggtaaggctggggagattctgactaggaggcttcgctccatggccttcaaggcaatgctgcggcaagacatgagttggtttgatgatcacaagaattccaccggcgctctaagtaccagactggctactgacgcagcacaagtgcaaggggctaccggcacccggttggccttgattgcgcagaacattgctaatcttggaaccgggatcattatcagcttcatctatggctggcagttgacactgctgctgcttgctgtcgtccctattattgcagtctcggggatcgtggagatgaagctgcttgccggcaacgcaaagcgggacaagaaagagttggaagctgccgggaagatcgccaccgaagcaatagaaaatattcggactgtggtgagcctcacccaggaaagaaaattcgagtccatgtatgtagaaaagctctatggaccgtaccgcaactcggtgcagaaagctcacatttatggcattaccttttccatttctcaggcatttatgtacttttcatatgcaggctgctttcgatttggcgcctatctgatagtcaatgggcatatgcgtttcagggatgtgattttagtcttctcagccatagtcttcggggccgtagcccttggccatgcctccagttttgcccctgactacgccaaggcaaaactaagcgcagcgcacctatttatgctctttgagaggcagccactcatcgattcatattcagaggaaggcttgaagcccgataagtttgaaggaaatataacctttaatgaagtggtgttcaattatcccacacgagctaatgttccggtgctgcagggtctgtccctggaggttaagaagggccaaactttggccctcgttggatcatctggctgcggaaaatctaccgtcgttcaactccttgagagattctacgacccacttgcgggcaccgtatttgtggatttcggttttcagttgcttgatggccaagaagctaaaaagttgaatgttcagtggcttcgggcacagctcggtatcgtctcgcaggagcccattctgttcgactgttcaatcgcggaaaacattgcctatggcgataacagccgcgtggtcagtcaggatgagatcgtctccgcagccaaagccgcaaacatccacccctttatagaaacgttgcctcacaagtacgaaacaagagtgggtgataaggggacccagctgagtggcggccagaaacaaaggattgccatcgctagagcgttaatacgccagccccagattctattgttggatgaagctacctccgccctagacacagaatctgagaaggtcgtccaggaagcactggataaggccagggagggccggacttgcattgtgattgcccacagattatcaacaattcagaatgctgatctcatcgtggtcttccagaacggaagagtaaaggaacacgggacacatcagcagcttctggctcagaagggcatctatttctcaatggttagtgtgcaggctggaacacagaatctc

SEQ ID NO: 7602 - DNA, 3858 bp, synthetic construct
  misc_feature 1..3858: note = source = /note="Description of Artificial Sequence: Synthetic coding sequence"
  source 1..3858: mol_type = other DNA
atggatctcgaggccgcaaaaaacgggactgcctggaggccgacttcagcagagggagattttgaactcggcatcagcagcaagcagaaacgcaaaaagactaaaaccgtcaagatgattggagtcctgactctgttccgatacagcgattggcaagacaagctcttcatgtcactgggaactatcatggccattgcccacggatcaggactgccactgatgatgattgtgttcggagagatgactgacaagttcgtggacaccgcggggaacttctcattcccggtgaacttttcgctgtccctgctgaatcctggaaagatcctggaggaggagatgactaggtacgcctactactactcgggactgggcgcgggggtgctggtggcggcgtacattcaagtttccttctggaccctggcagctggacgtcagatcaggaagatcagacagaagttctttcacgcaattctgcgccaggaaatcggctggttcgacatcaacgatactactgagcttaacacgagactgactgacgacatttcgaagatcagcgaaggaatcggagacaaagtggggatgtttttccaagcagtggcaactttcttcgcagggttcattgtgggctttatccgaggatggaagctgactctggtcatcatggccatcagccctatcctcgggctgtcggccgccgtgtgggcgaaaatcctgtcagccttctccgataaagagctggccgcgtacgccaaggctggcgctgtggccgaagaagccctcggtgcgatcagaaccgtgatcgccttcggcggccagaacaaggagctcgagcggtaccaaaagcacctggagaatgcgaaggagatcggtatcaaaaaggcgatctccgcaaatatctcgatgggtatcgcgttcctcctgatatacgcttcatacgctctggcgttctggtacgggtcgaccttggtgatatccaaggaatataccatcggaaatgccatgaccgtgttcttcagcatccttattggagcattctcggtcggccaagcggccccttgcatcgatgccttcgcgaacgctagaggagctgcctacgtgatctttgatatcatcgacaataacccaaagattgactcattctctgaacgcgggcataagcctgactctatcaagggaaacctggagttcaatgacgtgcatttctcgtacccgtcaagagctaacgtcaagatccttaaaggcttgaatctgaaagtccaatctggccaaactgtggccctcgtgggttcgtcaggatgcggaaagtcgaccaccgtgcagctcatccaacgcctgtacgatcccgatgagggaaccatcaacatcgatggacaggacatccggaacttcaacgtgaactacctgcgggaaatcattggtgtcgtgtcacaagaaccggtgctcttctcgacgaccatcgctgaaaacatctgctacggacgcggcaacgtcaccatggacgagatcaagaaagctgtgaaggaagcaaatgcctacgaattcatcatgaagctgccgcagaaatttgacacgctggtgggggaacgaggcgcccagctgtcaggcggacaaaagcagcgcatcgccatcgcccgggccctggtacggaatccaaaaatcttgctgttggacgaagccacttcagctctcgacaccgagtcagaagctgaggtgcaggccgctctcgacaaggcccgggaagggaggaccacgattgtcatcgcccatcggctgtcgactgtccggaacgctgacgtgatcgccggatttgaggacggagtgatcgtggaacaaggatctcactcggagctgatgaaaaaagagggggtgtacttcaaacttgtgaatatgcagacttccggatcgcagatccagtccgaggagttcgaacttaacgacgagaaggcggcgacccgcatggctccgaacggctggaaatcgaggctgttccggcattcaactcagaagaacctgaagaattcccagatgtgtcagaaaagcctggacgtcgaaaccgacggattggaggccaacgtcccgcctgtgagctttctcaaggtcctgaagctgaacaaaactgagtggccatactttgtggtgggaacggtgtgtgccattgccaatggcggactgcaaccagccttttccgtgatcttctccgaaatcatcgctatctttggacccggagacgacgccgtgaagcagcaaaagtgtaacatcttcagcctcatctttctgttcctgggtatcatctcattcttcactttcttcctgcagggcttcaccttcggaaaagctggagaaatcctgactcgccgcttgagatccatggccttcaaagcgatgttgcggcaagacatgtcgtggtttgacgatcacaagaactcgaccggagccctgtccacccgcctggccaccgacgccgcccaagtgcagggtgccaccggaactagactggcgctgattgcccagaacattgcgaacctcggaactggcatcatcatctccttcatatacggatggcagctgactctgctgctgctggctgtggtgcccattattgccgtgagcggaatcgtggaaatgaagctcctggccggcaatgcgaagcgggataagaaagagctggaggcagcgggtaagatcgcgactgaggccatcgagaacatccgcactgtggtgagcctgactcaggaacggaagtttgaatcaatgtacgtggagaagctctatggtccataccggaactcagtccagaaggcacatatctacggcattactttttcaatttcgcaagcgttcatgtacttctcatacgccggatgctttcgcttcggagcatacctgatcgtcaacgggcacatgcggtttcgggatgtgatcttggtgttttctgctatcgtctttggagcggtggcattgggacacgcgagtagcttcgcacctgactacgcaaaagcaaagctcagcgcggcccacctgttcatgctgttcgaacgccagccgcttatcgatagctattcggaagagggcctgaagccggacaaattcgagggcaatatcactttcaacgaagtggtgttcaactacccgacccgcgccaatgtgccagtgctgcaaggtctttcactggaggtgaagaagggacagaccttggcactggtgggatcctcaggatgcggcaagtctaccgtggtgcagctcctggaaaggttctacgatcctcttgcgggcaccgtgttcgtcgactttggcttccagctgcttgacggacaagaagccaagaagttgaacgtgcagtggctgagagcgcaactcggaatcgtgtcacaggagcctatcctgtttgactgctcaatcgcagaaaacatcgcgtacggagacaattcccgcgtcgtctcacaggacgagatcgtgtcagcagccaaggccgccaatatccatcccttcattgaaactttgccacataagtacgagactagagtgggtgacaagggtactcagctgtccggaggacagaagcagcggatcgcaatcgcgcgcgccctcatccgccagccacagattctcctcttggacgaagcaaccagcgccctggacactgaatcggagaaagtcgtccaggaagccctcgataaggccagagagggacgcacgtgcatcgtcatcgcacacaggctcagcactattcaaaacgcagatctgatcgtggtgtttcaaaacggccgggtgaaggaacacggaacccaccagcagctgctcgcgcagaagggtatctacttttcaatggtgtcagtgcaggcaggcacccagaacttg

SEQ ID NO: 7603 - DNA, 3858 bp, synthetic construct
  misc_feature 1..3858: note = source = /note="Description of Artificial Sequence: Synthetic coding sequence"
  source 1..3858: mol_type = other DNA
atggacctggaagcagcaaagaatggaaccgcgtggcggccgacaagcgcggaaggtgacttcgaactgggaatctcctctaagcagaagcggaaaaagacaaagaccgtgaagatgattggagttctcaccctgttccggtactcggattggcaggataagctgtttatgtcgcttggcaccataatggccattgcccatggctccggcctgccactgatgatgatcgtgtttggtgagatgacggataagttcgtcgacaccgcgggtaacttctcgtttccagtgaacttttcattgtctctgctcaatcccgggaagatcttagaggaagagatgacccggtatgcctattactacagcggtctaggtgcaggggtcctggtggctgcctatatccaggtgtccttctggaccctggctgctgggagacaaatacggaaaataaggcagaagtttttccacgccatactccgtcaggaaatcgggtggtttgacattaacgataccactgaactgaatactcgcttgacagatgacatctcgaaaatcagcgaaggcataggggacaaggtgggaatgttctttcaggccgttgctacattctttgccggcttcattgtcggattcattcggggatggaagctgacacttgtaatcatggccatcagccctattctagggttgtcagcagccgtctgggccaagatcctgtccgcgttcagcgataaggagttggccgcatatgccaaggcaggagccgtggccgaggaggcactgggagctatccgaacggtgatcgcgttcggtggccagaataaagagttagaaagataccagaagcacttggaaaatgccaaggaaattggcataaagaaggccatctctgcgaatatcagcatgggaattgcgttcctgctgatctacgcctcttacgcccttgctttctggtatggcagtacacttgtgatctccaaggaatacacaatcggaaacgcaatgaccgtgtttttctccatccttatcggagccttctccgtgggacaggccgctccgtgcattgacgcttttgcgaatgcaaggggagctgcctacgtcatctttgatattatagataataatccaaagatcgattcatttagtgagcggggccataagcctgatagcatcaagggtaacctggaatttaacgacgtccacttttcatatccatccagggcaaatgtgaagatactcaaggggttaaacctgaaagtacagtcgggacagacagtcgctcttgtaggcagctccgggtgtgggaagtccacaacagtgcagctgatccaacggctctatgacccagatgagggcacgatcaatatagacgggcaggatatccggaatttcaatgtgaattatctcagagagatcatcggcgtcgtcagccaggaaccagtacttttctcaactacaatagccgagaatatttgctacggccgggggaacgtgaccatggacgagatcaagaaggcagtaaaggaggccaacgcttatgaattcatcatgaaactccctcagaagtttgatacactcgttggggagcgaggtgcacaactgtccggaggccagaaacaacgaattgctatcgccagagcccttgtccgcaatccaaagatccttttactcgatgaggcaacgtctgctctcgataccgaatcagaagcagaagtgcaggcagccctagataaagctcgcgagggtcgcacgactatcgtgatcgcacataggttatctacagtaagaaacgcagatgtgattgccggcttcgaagacggtgtgatcgtggagcaggggagtcattcagagctcatgaaaaaggagggtgtgtactttaagctggtaaatatgcagacttctgggtcgcagatacaatccgaggagttcgagctgaacgacgagaaagccgccacgcggatggctcccaacggatggaagtctcgcctttttcgtcattccacgcagaaaaatctgaagaattcccagatgtgtcagaaatctcttgacgttgagacagacggtctcgaggctaacgtacctccggtgagctttcttaaggttctgaagctcaacaagaccgaatggccatatttcgtcgtcggcaccgtctgtgcaatcgcgaacggcgggctgcagcccgcgttcagcgtaatcttttctgaaatcattgccatctttggtcctggcgacgatgccgttaaacagcagaagtgcaacattttcagtctgatattcctgttcctcggaattatctcatttttcacgtttttccttcagggattcactttcgggaaggcgggcgaaatactgacccggaggttaaggagcatggctttcaaggccatgctgcgccaggatatgtcatggttcgacgaccataagaatagcactggcgccctgagcaccaggctggccaccgacgcggcccaggtccagggggccacgggaacacggctggcgcttatagcccagaatatcgccaacctgggaaccggtatcataatttcttttatctatggctggcagctcacactgctactcctggccgtggttccaataatcgccgtctcgggcatcgtggaaatgaagttgttagcgggcaacgccaagcgagacaagaaagagttagaggccgctggcaagattgccactgaagctatcgaaaacatccggaccgtcgtatccctcacacaggaacgtaaatttgaaagcatgtatgtcgagaagctttatggaccctaccgcaattcggtgcagaaggcccacatttacggtatcactttttcaatctctcaggcctttatgtatttttcttatgctgggtgcttcagattcggagcatatttgatcgttaacggtcacatgaggtttcgggatgtgattttagtgttctctgccatagttttcggtgccgtcgctctcggtcacgcgagcagcttcgcacctgattacgccaaggccaaactctcagccgcccacttattcatgctgtttgagcgacagcccctgattgatagctattccgaggaggggttaaagcccgataaattcgaaggcaacataacctttaacgaagtcgtgttcaattatcctacacgcgccaatgtgcctgtcctgcagggtctgtcactagaggttaagaagggacagacccttgctttggttggatcatccgggtgcggaaagtccaccgtggtccaactgttggagaggttctacgatcctttggccggcacagtgtttgttgattttggattccagttactggatggacaagaagctaaaaagctcaatgtgcagtggctgcgcgcacagctgggcatcgtctcccaggagcctatactgtttgactgctcaatcgctgagaatatcgcgtatggcgataactccagggtcgtgagccaggatgagatagtgtcggctgcaaaggcggccaacattcatcctttcatagagaccctgccccacaagtacgagactagagtgggtgacaaagggactcaactgagcgggggacagaaacagaggatcgcaatcgcgagggccctcatcaggcagcctcagatccttttgttggacgaggccacctccgccttggataccgagtctgaaaaagtagtgcaggaggcactggataaggctcgggaggggcgcacatgcatcgtcatcgcccatcggctcagtacgatccaaaatgccgacctgattgtggtctttcagaatgggagggtgaaggagcacggcactcatcagcagctgcttgctcaaaaggggatttatttttcaatggtgtctgtccaggccggcacccagaacctg

SEQ ID NO: 7604 - DNA, 3858 bp, synthetic construct
  misc_feature 1..3858: note = source = /note="Description of Artificial Sequence: Synthetic coding sequence"
  source 1..3858: mol_type = other DNA
atggatcttgaagcggcgaagaatggcaccgcgtggaggccgacctcggctgaaggcgacttcgaactgggaatctcgtccaagcaaaaacggaagaaaactaagacggtcaaaatgatcggagtgctcactttgtttaggtactccgattggcaagacaagctcttcatgtccctgggaactatcatggccattgctcacgggtccggcctgccactgatgatgatcgttttcggagagatgactgataagttcgtggataccgcgggcaatttctctttcccggtgaatttctccttgtcgcttctcaacccaggaaaaatcctcgaggaggagatgacgagatacgcctactactactcgggactgggagccggcgtgctcgtcgcggcgtacattcaggtgtccttttggactctggcagctggacggcaaatccggaagatccgccagaagtttttccatgctatcctccgacaagaaatcggttggttcgacataaacgataccacggagctgaacacgcgactgaccgatgacatctcgaagatctcggagggtatcggagataaggtcggaatgtttttccaggcggtggcgactttcttcgcaggcttcatcgtgggattcatccgaggctggaagttgacgctggtgatcatggcgatctcaccgatcttgggactctccgccgcggtgtgggccaagatcctgtcggccttttcggacaaggaacttgccgcctacgccaaggccggagcagtggctgaggaagccctgggggcgatccgcaccgtcattgcgttcggcggacagaacaaagaacttgagagataccagaagcacctggaaaacgcgaaggaaatcgggatcaagaaagctataagcgctaatatctcgatgggcatcgctttcctgctgatctacgcatcgtacgccctcgcattctggtacggatcgactcttgtgatcagcaaggagtacactatcggaaatgctatgaccgtctttttctccatcctcatcggagcgttctccgtgggccaggcagcgccgtgcattgacgccttcgcaaacgcgcggggcgccgcctatgttatcttcgacatcattgacaacaatcccaagattgattctttctcggaacgcggccacaaaccggacagcatcaaggggaatctggagtttaacgacgtgcatttctcatacccgtcgcgcgcaaacgtgaagatactcaaaggtctgaatctgaaggtgcagagcggccaaaccgtggctctggttggatccagcggctgcggaaagagcaccaccgtccagctcatccagaggctttacgacccggatgagggaactatcaatatcgatggacaagatatccgcaacttcaatgtgaactacctgcgcgaaatcatcggcgtggtgagccaggagccagtcctcttttcaactactattgccgagaacatttgctacggacgcggcaatgtcacgatggatgaaatcaagaaggcggttaaagaagcgaacgcgtacgagtttatcatgaagctgcctcaaaagtttgatactctggtcggagaacggggagcccagctctccggcgggcagaagcaacggatcgccattgcccgagccctcgtgcgcaaccccaaaatcctcctcctcgatgaggcaacgtcggctctggacaccgaatccgaagccgaagtccaagcggccctcgacaaggctagagagggcaggaccaccatcgtgatcgctcaccggctttccactgtgcgcaatgccgatgtgattgccggattcgaagatggcgtgatcgtggaacagggatcacactcagagttgatgaaaaaggagggtgtgtactttaaactcgtcaatatgcaaacttccggatcgcaaatccagtccgaagaattcgaactgaacgatgagaaggccgccacccggatggcacccaatggatggaaaagccggttgttccgccatagcactcaaaagaatctgaagaacagtcagatgtgtcaaaagagcctggatgtggagacggatgggctggaggcaaatgtgccgccggtgtccttcctcaaagtgctgaagctcaataagacggaatggccctacttcgtcgtgggtactgtgtgtgcaatcgcgaatggaggtttgcagccggcattcagcgtgatcttttcagaaatcatcgctatctttggaccgggcgatgacgcggtcaagcagcaaaagtgcaatatcttctccctgatcttccttttcctgggcatcatctccttctttacctttttcctgcagggattcaccttcggcaaggcgggagagattttgacccggagattgcggtcgatggccttcaaggcgatgcttcgccaggatatgtcctggttcgatgatcacaagaattccactggggcactgagcacccgcctcgcgaccgacgcggcgcaagtgcagggggccactggtacgcgcctggcattgatcgctcagaacattgcaaacctgggaactggaatcatcatctcgttcatctacggctggcagctcactctgctcctgctggccgtggtgccgattatcgcggtgtcgggaatcgtggaaatgaagctcctcgccggaaatgccaagcgggacaagaaggaactcgaggctgccgggaagattgccacggaggctatcgaaaacatccggaccgtcgtctccctgacccaggaacggaagttcgaatctatgtacgtggaaaaactttacggaccgtaccggaactcagtgcaaaaggcgcatatctatggcatcacgttctcaatctcccaggcattcatgtatttctcgtacgccggatgtttccggttcggggcctaccttatcgtgaacggacatatgcggttccgcgatgtgatcctcgtgttttcggctatcgtgttcggcgccgtcgccctgggacatgcctctagcttcgcacctgattacgcgaaggccaagctgtcagcggcccatctcttcatgctcttcgaacgccagcccttgatcgattcgtattcagaggagggactcaagcccgacaagtttgagggaaacatcaccttcaatgaagtcgtgttcaattacccgactcgcgcgaacgttccagtgctccagggccttagcttggaggtgaagaaaggacagaccctcgcattggtcggctcgtcgggatgcggaaagtcgaccgtggtgcagctgcttgagcgcttctacgaccccctggctggaaccgttttcgttgattttggattccagctcctggatggacaggaagcgaagaaactgaacgtgcaatggctgcgcgctcagctgggaatcgtgtcccaggaacctatcctgttcgactgctcgatcgctgaaaacatcgcatacggcgacaatagccgcgtcgtgagccaggatgagatcgtgtcagccgccaaagccgcgaatatccacccattcatcgaaactctcccacataagtacgagactcgggtgggtgacaaggggacccagctgtcaggaggacaaaaacaacggattgccatcgcccgggctctgatccggcagccgcagatcctgctcctggacgaagcaacctcggcactggacactgaaagcgaaaaggtcgtccaagaagccctggataaagctcgagaaggtcggacctgcattgtcatcgcacatagactgtcgaccatccagaacgcggacctgatcgtcgtattccagaacgggcgcgtcaaagaacacgggactcatcaacaacttttggcacaaaaaggaatttacttctcaatggtgtcagtgcaggctggtactcaaaacctg

SEQ ID NO: 7605 - DNA, 3858 bp, synthetic construct
  misc_feature 1..3858: note = source = /note="Description of Artificial Sequence: Synthetic coding sequence"
  source 1..3858: mol_type = other DNA
atggatcttgaagcagccaaaaatgggactgcatggaggcctacctcagcggaaggagattttgagctcggaataagctcgaagcaaaagcgtaagaaaactaagaccgtgaagatgattggtgtactgaccttgttccggtacagcgattggcaggataagctgtttatgtcgcttggtactattatggctattgcacatggaagcggcctgcctttgatgatgatagtgtttggtgaaatgaccgacaagtttgtggatacggccggcaatttctcatttccagtcaacttttccctttcgttgctcaatccgggcaagattcttgaagaagaaatgaccagatacgcatattactatagcggtcttggtgccggtgtgttggtcgcagcctacatccaggtcagcttttggactctcgctgcgggtagacaaattagaaaaatcagacaaaagttttttcatgccattcttcggcaagagattggttggtttgacataaacgatactaccgaactgaacactcggctcactgacgatatctccaagatttcggaaggcatcggggataaagtgggaatgttctttcaagcagtggctaccttttttgccggatttatcgtcgggttcatccgcggttggaagctcaccttggtgatcatggcaataagccctatcctgggtctttccgcggcggtctgggcgaagattctgtcggctttctccgataaggagttggcggcatacgctaaagcaggagcggtggcagaggaggcactgggagcaatacggacggttattgccttcggaggccagaacaaagaactcgaacgataccagaaacacctcgaaaacgcaaaggagataggaataaagaaagcgatatccgcgaacatctccatggggatcgcttttctcttgatttacgcatcctacgcgctcgcattttggtacggatctactctcgtcatttcgaaggaatacactattgggaacgctatgactgtctttttctcaattctcattggtgcgttttcagtcgggcaagccgctccttgcattgatgcttttgcaaacgcaagaggcgcagcatacgtgatctttgacatcatcgataacaatccaaagatagactcgttttcggaacgaggacataaacctgactcgatcaaagggaacctggagtttaacgatgtgcatttttcgtacccatcgcgggcaaatgtcaagattctcaaaggcctgaacctgaaagtgcaaagcggtcaaaccgtcgcgctggtgggttcgtccggatgtgggaaatccaccactgtgcaactcattcagcggctgtacgatcctgatgagggaaccattaacatagacgggcaagatatccggaactttaacgtcaactaccttcgcgagatcatcggtgtcgtctcccaagagccggtgcttttttcaaccactattgcggaaaacatttgttatggacggggcaatgtgactatggacgaaatcaagaaagcggtcaaggaggcaaatgcgtacgagttcattatgaaacttcctcaaaagtttgataccttggtgggagagaggggagctcaactgtcgggtggacagaagcagagaattgcaatcgcccgcgccctggtcagaaatccgaagatccttctccttgatgaagccacttccgccctggatactgagtcggaggctgaagtccaagccgcactggacaaggcaagagagggtcggaccaccattgtgatagcacaccgcctctcaactgtgagaaatgctgatgtgattgcgggtttcgaagatggtgtgatagtggaacaaggatcccactcggagctgatgaagaaagaaggcgtttactttaagctggtgaatatgcaaacttcgggatcgcaaatccagtctgaagagttcgagctcaacgacgaaaaggcagctactcggatggcaccaaacggatggaaatctcgtctgttcagacatagcacgcaaaagaaccttaagaactcgcagatgtgtcagaagtcacttgacgtggaaaccgacggactcgaagcgaacgtgcctcccgtttcctttcttaaggtgctgaagctgaacaaaactgaatggccctactttgtggtgggaaccgtgtgcgcgatcgcaaacggtggacttcaacccgcatttagcgtaatcttctccgaaatcatcgcaattttcgggcctggggatgatgccgtgaagcagcaaaaatgtaatatctttagcctgatctttctctttctcggcatcatttcatttttcaccttttttctccagggttttacgttcggaaaagccggtgaaatccttacgcgacggctgcgaagtatggctttcaaggccatgctgcggcaggacatgtcatggtttgatgatcataagaactcgacgggcgcactgagcacccgacttgcgaccgatgcggcacaggtgcaaggtgcgaccggaacgcgtcttgcactgatagcgcagaacatagcgaatctgggaaccgggattatcatttcctttatctacggatggcaacttactcttttgcttcttgcggttgtgcccatcattgccgtgagcggtattgtcgaaatgaagctgctggcaggaaatgccaagagagacaagaaggagctggaagcggcaggtaaaatcgctactgaagccatcgaaaacatcaggactgtcgtgtcgcttacccaggaaaggaagtttgaaagcatgtacgttgagaagctgtacgggccataccgcaattcagtgcagaaagctcacatatatggaataactttttcaatttcgcaagcattcatgtacttctcgtacgccggatgctttaggttcggagcgtaccttattgtgaatggacatatgcggttcagggatgttatacttgtgttcagcgcaattgtgttcggtgcggtggcattgggacacgcctcttcgttcgcacctgattacgccaaagcgaaactgagcgccgcccaccttttcatgctttttgaacgccaaccacttatagattcttacagcgaggagggacttaagccagataagttcgaaggtaacatcacctttaacgaagttgtgttcaactaccctaccagagccaatgtccctgtgctccaaggactctccctcgaagtgaaaaagggacaaacgctggccctggtcggatctagcggctgcggaaaaagcacggtggtgcaacttctggagcgtttttacgatccacttgccggtaccgtctttgtggacttcgggttccaacttctcgacggtcaggaagcaaagaaactgaacgtccagtggctgagggcgcaattgggaattgtgtcccaggaaccaatacttttcgactgttcgattgcagagaatatcgcatatggtgacaattcccgcgtggtgtcccaggatgagattgtgtctgccgcaaaggctgccaatattcatccgtttatagaaactcttcctcataagtacgaaactcgcgtcggagataagggaactcagctttctggaggccaaaagcaaagaatcgcaattgcgcgcgccctcatacgccagccacagattctgctgctggacgaagcaacgtctgcactcgataccgaatcggagaaggtggtccaggaagcactcgacaaggcacgagaaggtcgcacctgtattgtgattgcacacagactgagcaccattcaaaacgcagacctgattgttgtttttcaaaatggcagagtgaaggaacatggcacccatcagcagctgctcgcacaaaagggcatttacttttcgatggtttccgtacaggccggcactcagaacctc

SEQ ID NO: 7606 - DNA, 3858 bp, synthetic construct
  misc_feature 1..3858: note = source = /note="Description of Artificial Sequence: Synthetic coding sequence"
  source 1..3858: mol_type = other DNA
atggacctcgaggccgctaagaacggcaccgcctggcgaccaactagtgccgagggcgacttcgaattaggcatttcgtcaaaacagaagcggaagaaaacaaagactgttaagatgatcggggtgttgacccttttcaggtactctgactggcaggacaagctgttcatgagcctcggcacaatcatggccattgcgcacgggtcaggcctaccgttaatgatgatagtattcggtgaaatgactgataaatttgtggacacggccgggaacttctccttcccagtgaacttctccctatctctcctcaatcccggtaagatcctggaggaagaaatgacccgatatgcgtactattacagcggcctgggagccggagtgctggtggccgcgtacatccaggtctccttctggactctggctgctggccgacagattcgaaagatcaggcagaaattcttccacgccatcctgcgacaggagatcgggtggtttgatattaacgatactaccgagctcaacaccagactaaccgacgacatttctaagatcagcgaaggaatcggggacaaagtgggtatgttttttcaggcggttgctactttcttcgctgggtttatcgtcggctttatcaggggatggaaactgacacttgtgatcatggctatttcaccgatacttgggctaagcgccgctgtttgggccaaaatcctcagtgcattttccgacaaagaattggcggcctacgctaaggcaggcgcagtcgccgaggaagcactcggcgccattaggactgtgatcgcatttggaggacagaataaggagctggaacgctaccagaagcacctggaaaatgccaaagaaatcggcatcaaaaaagctattagcgcaaacattagcatgggcatcgccttcctgcttatctacgctagctatgctttagctttctggtacggctcaactctggttatcagcaaggagtacactattggaaatgccatgacggtgttcttctcaatcctgatcggggccttctccgttggccaagcagcaccatgcatcgatgcgttcgccaacgcaaggggcgcagcttacgttatcttcgacatcatcgacaataaccccaagatcgattccttctctgaaagagggcataaacccgacagcatcaaggggaaccttgagttcaacgatgtacatttctcttatcccagccgcgctaatgtaaagatactaaaaggcttaaatctgaaagttcagtcaggccagaccgttgcgctcgtaggttcttcgggttgcggtaaaagtaccacggtccaacttatccagagactctatgatccagacgaaggcacaataaatattgacggccaagatattagaaactttaatgtcaattacttaagggagattatcggagtggtctcacaggagccggtgctattctccactacaatcgcagagaacatctgctacggacgaggcaacgtcactatggatgaaattaagaaagccgtgaaggaagccaacgcatatgagttcatcatgaaattaccccaaaaattcgataccttagtcggcgagaggggcgctcaactttccggtggccaaaagcaaagaattgccatcgcaagagcactcgtccggaacccgaaaatccttctgctggatgaagccacgagcgccctggacaccgaaagcgaggcagaggttcaagcggcactcgataaagctcgagagggtaggactactatcgtcattgctcacaggctcagcacagttcgaaacgctgatgtcatcgctggcttcgaagacggcgttatcgtggaacagggcagccactcagagctcatgaagaaagaaggcgtttactttaaactggtgaacatgcagacttctggctcccaaattcagtccgaagagttcgagctgaatgatgagaaagctgcgaccaggatggcacccaatgggtggaagagcaggctttttcgccactctactcagaagaacctaaagaactcgcagatgtgtcagaaaagtctggatgtggaaactgacggcctagaagccaatgttcccccagtgagttttttgaaagtgctgaagctgaataagactgagtggccatacttcgtggtgggaaccgtctgcgctatagctaatggcgggctccagcccgcctttagcgtgatcttttccgaaattatcgccatcttcggacccggagatgatgcagtgaagcagcagaaatgtaacatcttctccttgatcttcttattccttggaatcatcagttttttcaccttcttcctacaggggttcacatttggcaaagcaggggaaatcctgaccaggaggctcaggtcgatggccttcaaagctatgctgaggcaggatatgtcatggtttgatgatcacaagaactcgaccggcgcactgtccaccaggttggcaacagatgctgcacaggtgcagggcgccactggtacgcgactcgcactcattgcccagaacatcgctaatctggggactggtatcataattagctttatctatgggtggcagctgacactgctgctactagccgtggtgcctattattgctgtctctgggatcgtggaaatgaagctattagccggcaatgccaagagggacaaaaaggagcttgaagcggccggtaagatcgcgactgaagccattgaaaatatcaggactgtggtgagcctgacccaggagagaaaattcgaaagtatgtacgtagagaagctctacgggccttatagaaactccgtgcagaaggcacatatctacggaattacattctcaattagccaggcttttatgtatttcagctacgcaggttgcttcagattcggcgcttacctgatcgtgaatggccatatgagattcagagatgtgatcctggtgttttcggctatcgtgtttggtgcggtggccctgggccacgcatcaagtttcgctccagactacgcgaaagctaaactctctgcagcccatctgtttatgttgtttgaaaggcaacctctgatagatagctacagcgaggaaggtctcaaacccgacaagtttgagggaaacatcaccttcaacgaggttgtctttaactacccaaccagagcaaacgtgcccgtgctgcagggcctgagcttggaggtgaagaagggacaaaccctggcactcgtcggctcctccggatgcgggaagtcaaccgtcgttcagctgttggagcgcttctacgacccgctggccggcactgtctttgtggacttcggcttccagctactcgatggccaggaggctaaaaaactgaacgtgcagtggcttcgagcgcagctcggcattgtgagtcaggagcccattttattcgactgttctatcgcagagaatatagcctacggagacaattcgagggtggtgagtcaggacgaaatcgtttcagccgcaaaagccgccaatattcacccattcattgaaacattgccccataagtacgaaactcgagtaggtgacaaggggactcagctgtccggaggacagaagcaacgaattgctatagcaagagctctgattcgccagccgcagatcctgctgctcgatgaggcaacaagcgcgctggatacagagtccgaaaaagttgtgcaagaagctttagacaaggccagggaagggcgaacatgcatagtaattgcacacaggctgtcaacaatccagaatgctgatctgatcgtggtgtttcagaacgggcgtgtcaaagagcacgggacacaccagcagctcctcgcccagaaaggcatctacttctcgatggtatcagtccaggcaggaacgcaaaacctg

SEQ ID NO: 7607 - DNA, 3858 bp, synthetic construct
  misc_feature 1..3858: note = source = /note="Description of Artificial Sequence: Synthetic coding sequence"
  source 1..3858: mol_type = other DNA
atggacttggaagcggctaaaaatggaactgcatggaggcctacatcagccgaaggagacttcgagctcggaatttcctccaagcagaaacgcaagaagactaagacggtgaagatgattggagttttgactctgtttaggtactctgattggcaggacaaacttttcatgtccttgggcacgatcatggcaatcgcacatggttcaggcctgcctttgatgatgattgtgttcggtgagatgactgacaagtttgttgataccgctggtaactttagttttccagtcaattttagcctgtcccttctgaatcctggtaagatccttgaagaagaaatgacacgctacgcatattactattcaggtctcggcgctggagtcctcgtcgctgcttatatacaagtgtctttttggaccctggcagcaggcagacagattaggaaaattcgccagaaattcttccatgcaatcctcaggcaggagataggttggttcgacatcaacgacaccaccgaattgaataccaggctgacagacgacatctcaaagatctccgagggtattggagataaagtgggtatgtttttccaggctgtggctactttcttcgcgggttttattgtgggcttcatccgcggttggaagttgacactggtcattatggcaattagccccatcctgggcttgagtgctgctgtgtgggcaaagatactgagtgccttctccgacaaggaactcgctgcttacgccaaggcgggagccgtggcggaagaggcattgggtgccatcaggaccgtcatcgcttttggcggccagaataaagagctggaacgctaccagaaacatctggagaacgccaaggaaattggcattaaaaaagccattagcgcaaacatttctatgggtatcgcttttttgctcatctatgccagctacgctctggcattctggtacggtagcactttggtaatctccaaggaatacactataggaaatgctatgaccgtattcttttctattcttatcggcgctttttctgtgggccaagccgcgccgtgcattgacgcctttgccaatgcgcgcggcgcggcgtatgtgattttcgacataatcgataacaacccaaaaatcgacagcttcagcgaacgcggacataaacccgactcaatcaagggcaacctcgagttcaatgacgtgcacttctcttacccgagccgcgcgaatgtcaaaattctcaagggactgaatctcaaggtacagagcggtcaaactgttgccttggtgggcagctctggttgtggcaaatccacaaccgtgcagctcatccagagactgtatgatcccgacgagggaactattaatatcgacggacaggatattaggaacttcaacgtcaactacctgcgcgagattatcggtgtggtatctcaggaacccgtgctgttctccaccacaatagcagaaaatatatgttacggccgcggaaacgtgacaatggacgagattaagaaagccgtcaaggaagccaacgcatatgaattcatcatgaagcttccccagaaatttgacaccctcgtgggagaaagaggagcacaactgtctggaggtcagaagcaaagaattgcgattgcaagagctctcgtgcgcaacccgaagattctcttgctcgatgaagccacttctgccctggataccgaaagcgaggcggaagttcaggccgcactggataaggctcgcgagggacgcaccaccattgtcatagcccacaggctctccaccgtgaggaacgctgatgtgatcgctggattcgaggacggcgttatcgtcgagcagggctcacacagcgaactgatgaagaaagagggagtgtatttcaagttggtgaacatgcagacgtccggtagccagattcagagtgaagagtttgaattgaatgatgagaaggctgccactcgcatggctcctaacggctggaagtccaggcttttcagacactccacccaaaagaacctcaaaaacagccagatgtgccagaaatccctcgatgtcgaaactgacggtctggaggcgaacgtgccaccagtgagtttcctcaaggtgctcaaactcaacaagacagaatggccttatttcgttgttggaactgtctgtgctattgcgaatggtggcttgcaacccgcgttcagtgtaatcttcagcgagatcatagctatcttcggtccaggtgacgacgcagtaaaacagcaaaagtgtaacattttcagtctgattttcttgttcctgggcatcatcagcttcttcactttcttcctgcaaggtttcacattcggtaaggcaggtgagatattgaccagacgcctgcgcagtatggccttcaaagccatgctgcgccaggatatgagttggttcgacgaccataagaatagcactggagcgttgtccacgaggctcgctaccgacgcggctcaggtgcagggtgctactggaaccaggcttgctctcattgcccaaaacattgctaacctgggcactggcatcatcatctcctttatttacggttggcaactcacccttcttttgctcgctgtcgtccctatcatcgccgtgtccggaattgtcgaaatgaaattgctggcgggaaacgctaaaagggacaaaaaggaattggaagcagccggtaagattgcaaccgaagcaatcgaaaacattagaaccgtagtgtccctcacccaagaaaggaagtttgaatccatgtacgtggagaaattgtatggcccgtatcgcaactctgtgcagaaggctcacatttacggtatcaccttctccatctcacaagcttttatgtacttctcctacgccggttgcttcaggtttggtgcatacctgatcgtgaatggccacatgaggtttagagacgtcattctggtatttagtgcgattgtcttcggcgcggtggctctcggccacgcatctagcttcgccccagattatgctaaggctaagctgtcagcggcccaccttttcatgttgtttgagcgccagccgctgatcgattcttacagcgaagagggcctcaagccggataagttcgagggtaatattacattcaacgaggtggtctttaattaccctacaagagctaacgttcctgtcctccagggtctctcactcgaggtcaaaaagggccagaccctcgctctggtgggtagtagtggatgcggtaaaagcaccgtcgtccagctgctcgaacgcttttacgaccccttggcgggaactgtgttcgttgattttggtttccagctgctggatggtcaggaagccaagaaactcaatgttcaatggctgagggcccaactgggaatcgttagccaagagcctattctgtttgattgcagcatcgctgagaacatagcttatggtgacaattctcgcgtcgtatctcaggatgaaatcgttagcgccgccaaggcggctaacatccacccttttattgagactttgccgcataaatatgagacgagagtgggagataagggaacccagctctctggaggccagaagcaaagaatcgcaatagcgcgcgccctcatcagacaacctcaaatactcctcctggacgaggctacttctgccctcgacactgaatctgagaaggtcgtccaagaggctttggataaagcgcgcgagggtcgcacctgcatcgtcattgctcaccgcctgtcaaccatccagaacgcagatctgattgtcgtgttccagaacggaagagtgaaggaacacggtacccatcaacaactgctggcacagaaaggaatctacttcagcatggtatcagttcaggccggtacacaaaacctc

SEQ ID NO: 7608 - DNA, 3858 bp, synthetic construct
  misc_feature 1..3858: note = source = /note="Description of Artificial Sequence: Synthetic coding sequence"
  source 1..3858: mol_type = other DNA
atggatctcgaggctgctaagaacggaaccgcgtggaggccgactagcgccgagggagacttcgagctcggcatctcgtccaagcagaaacggaaaaagaccaagactgtcaagatgatcggagtgctcaccttgttcagatactcggactggcaggacaagctcttcatgtcccttggcaccattatggcaatcgcccacggatccggactgcctctcatgatgatcgtgttcggggaaatgactgacaagttcgtcgatactgcaggaaacttttccttcccggtgaacttttcactgagcctccttaatccgggcaagatactggaggaagagatgacgcggtatgcgtactactactcgggcctcggcgccggtgtgctggtcgctgcatacatccaagtgtctttctggactttggcggcgggtcgccagatccgtaagatcagacagaagtttttccatgccattctgaggcaggaaatcggctggttcgacatcaatgatactaccgagctgaataccagactcactgatgacatctcgaagatctccgagggcatcggcgacaaggtgggcatgttcttccaagccgtcgcaaccttcttcgccgggttcatcgtgggttttatcagaggatggaagctgaccctggtcatcatggctatctcccctattctgggcctgtcggccgccgtgtgggccaagatcctcagcgcgttctccgacaaggagttggcagcctacgcgaaggccggagccgtggccgaggaagccctgggagcaattaggaccgtgatagcatttggaggtcagaataaagagttggaacgctaccaaaagcaccttgaaaacgctaaggagattggtataaagaaggccatctcggccaacatatccatgggaattgcatttttgttgatctacgcttcctacgctcttgccttctggtacggaagcaccctggtgatcagcaaggagtacaccattggaaacgctatgactgtgttcttttcgatcctcatcggagccttcagcgtgggccaggcggcaccatgcatcgacgcgttcgcgaatgcaagaggggcagcctacgtgatcttcgatatcatcgacaataacccgaagatcgattccttcagcgagagaggacataaaccggactcaattaagggaaatctcgagttcaacgacgtccactttagctacccgagcagagccaacgtcaaaatcctcaagggcctgaacctcaaggtgcagtcggggcagactgtggcactggtgggctccagcggatgtggaaagtctaccacggtgcagctgatacaacgcctgtacgacccggacgaaggaacgattaacattgacggacaggacatccggaatttcaacgtgaattacctccgggaaatcattggagtcgtcagccaagaaccggtgctctttagcactactatcgctgagaacatatgctacggacggggcaacgtgactatggatgagatcaagaaggcagtgaaggaagccaacgcgtacgaattcatcatgaagctcccccagaagtttgacactctggtgggggagaggggagctcagctctcgggtgggcaaaaacaacgcatcgcaatcgcacgggcgcttgtgcgcaacccaaaaatcctcctccttgatgaagctacgtcggccctggataccgaaagcgaagccgaggtccaggcggctctggacaaagctcgggaaggaagaaccaccatcgttatcgctcaccggttgtcgaccgtccgaaatgcggatgtgattgccggatttgaagatggggtgatcgtggaacaaggatcacactcggagctgatgaagaaggaaggagtctacttcaagctggtgaacatgcaaacgtcgggcagccagatccagtcagaagaattcgagctcaatgacgaaaaggccgccactcggatggcgccaaacggatggaagagtcgcttgtttcggcactccacccagaagaacttgaaaaactcacagatgtgccagaagagtctggatgtggagactgacggacttgaagcgaatgtgccgccggtgtccttcttgaaggtcctcaaactcaataagactgagtggccgtacttcgtggtcggaactgtgtgcgccatcgccaatggtggactgcaaccggcgttcagcgtgatcttctcggaaatcatagccatctttggacctggcgatgacgccgtgaaacaacaaaaatgtaacattttctcactgatcttcctctttctgggaataatcagctttttcacgtttttcttgcaggggttcactttcgggaaagccggagaaatcctgaccagaaggctgcgcagcatggcattcaaagccatgctgcggcaggacatgtcgtggttcgacgatcataagaattcaaccggagccctgtcgacccggctcgcaaccgacgccgctcaagtgcagggcgccacgggcacccgcctggctctgatcgcccagaatatcgccaatcttggcactggcattatcatctcgtttatctatggatggcagctcacccttctgctgctggctgtggtcccaataatcgcagtcagcggtatcgtcgaaatgaagctgctggcgggaaacgcgaaacgagacaagaaggaactggaagcggctggaaagattgccactgaagccatcgagaatatccggaccgtggtttcgctgacccaagaacggaagtttgagagcatgtatgtcgagaaactttacggcccctacagaaactcggtgcaaaaggcgcacatctatggaatcacctttagcatctcccaggcattcatgtacttctcctacgctggatgcttccgcttcggagcgtacctgatcgtgaacggtcacatgaggttccgggacgtcatcctggtgttctcagcaattgtgttcggagcggtcgcgttgggacatgcctcgtcattcgcgccagattacgccaaagcgaaattgtcggcagcacacctgttcatgctcttcgaacgccagccactcatcgattcatactcagaagaaggtctgaagcccgataagttcgaaggcaacatcacttttaacgaagttgtctttaactacccgacgagggcaaatgtgcctgtgctccagggtctgtcgcttgaggtgaaaaagggccagactttggcgctggtggggagctcggggtgcggaaagtccactgtggtgcagctgctggagcgcttctacgatcccctggctggaaccgtgtttgtcgacttcggtttccagctgctggacggtcaagaggctaagaaactgaacgtgcaatggctgcgcgcccaactgggtatcgtgtcacaagagccgatactgttcgattgctcaattgccgaaaacattgcatatggagacaattcccgcgtagtgtcccaagatgaaatcgtttccgcagccaaggccgctaacatccacccgttcatcgagactctgccacataagtacgagactcgggtgggggacaaaggaactcagctctccggaggacagaagcaacggattgccattgcgagagccctgattcgccagccgcagatcctgctcttggatgaagccacttccgctctggacaccgaaagcgagaaagtcgtgcaggaagctctggataaagccagagagggtaggacctgtatcgtgatcgcacatcgcctgtccaccatccagaacgcggacctgatcgtggtgttccaaaatggccgcgtgaaggaacatggcactcatcagcaactgctggcccagaagggaatctacttctcgatggtgtccgtgcaggcagggacccaaaatctg

SEQ ID NO: 7609 - DNA, 3858 bp, synthetic construct
  misc_feature 1..3858: note = source = /note="Description of Artificial Sequence: Synthetic coding sequence"
  source 1..3858: mol_type = other DNA
atggacctggaggctgctaaaaatggaactgcatggcggccgacatcagccgaaggtgacttcgagttaggaatttcaagcaaacagaagcggaagaagacgaagacagtgaagatgatcggagtcctgacccttttccggtactccgattggcaggataaactttttatgtccctgggaactataatggccatcgctcatgggtcgggcctccctctgatgatgatcgttttcggggagatgacagataagttcgtggatacagctggaaacttctccttccctgtcaatttcagcctatccctgctcaaccccggtaagatccttgaagaggaaatgaccagatatgcctattattattcagggctgggggctggggtgttggtcgcggcttatattcaggtgtccttctggacccttgccgcagggaggcagataaggaaaatcagacagaagttctttcacgccatcttgcggcaggagatcggatggtttgatataaacgataccaccgagctgaatacgaggctgacagacgacattagtaagatcagcgaggggattggagataaggtaggtatgttcttccaggctgtggctacttttttcgcaggctttatagttgggttcatcagagggtggaaactaacgctagtcattatggctatcagccctatcctaggactgagcgctgccgtgtgggctaaaatcttgtcggcgttctctgataaagaattggccgcgtatgcgaaggccggagcggtagctgaggaggctctgggagctattagaacagtaatcgcctttggcggccagaacaaggaactggagcggtaccagaagcaccttgagaacgcaaaggagataggcattaagaaggcgatttctgcaaacatttccatggggatagcatttctcttgatctacgcttcttatgctctggcgttctggtacgggagcactctggtgatatcaaaagaatacacaatcggaaatgcaatgacagtgttttttagcatcctcatcggggctttcagcgtcgggcaggcagccccgtgcatagacgcctttgctaacgcccggggcgcggcctatgtgatttttgacatcatcgataataacccaaaaattgacagcttctctgaacggggacacaaaccagacagcatcaaaggcaacctggaattcaatgacgttcacttttcttaccctagcagggcaaatgtgaagattctgaaagggctcaacttgaaagttcaatcagggcagactgttgccctggttgggtcatcagggtgcgggaagtccaccactgtacagctgatacaaagattgtatgaccctgacgagggtaccatcaacatcgacggccaggatattagaaattttaacgtgaactacctgcgtgaaatcatcggggtggtgtcccaagaacccgtcctgttttctacaactatcgctgaaaatatttgttacggccgtggcaatgtcacaatggacgaaattaaaaaggctgtgaaagaagcaaacgcctatgagtttattatgaaactcccacagaagttcgacactctggttggcgagcgaggggctcagttgagcggcgggcaaaagcagaggatagcaatcgcccgcgccttggtgcggaaccctaagatactattactggacgaggctacctctgcactcgacaccgaaagcgaggccgaagttcaggctgctctcgataaagccagggagggacggacaaccatcgttatcgcccaccggctctccactgtcaggaacgccgacgtcatagccggatttgaggatggtgtgattgtcgagcaagggtcacactccgagttgatgaaaaaagagggcgtttattttaagctagtgaacatgcagacgtcaggttcgcagattcagtctgaggaatttgagctgaatgatgagaaagccgctacgcgtatggcgccaaacggttggaagagccgactcttccggcattcaacccagaagaatctcaaaaactcacagatgtgccaaaaatcactagacgttgagactgatggactggaggcaaacgtgccaccggtatcattcctcaaggttctgaagttgaacaagacagaatggccttattttgtcgtcggcaccgtctgcgctatagccaatggagggctgcagcccgccttcagcgtgatttttagtgaaataattgctatcttcggccctggggatgatgccgtaaagcagcaaaagtgcaatatcttttctcttatcttcctgttcttaggcatcatttcctttttcacattcttcctgcaagggtttacctttggtaaagccggcgagatactgacccggaggctgaggtcgatggcattcaaggcaatgctgcgtcaggacatgtcttggtttgacgatcacaagaacagtactggagctctgtccactcggttagcgacagacgctgctcaagtacagggggccacgggaacgagattggcccttattgcccagaacattgctaacctcggaacaggcattatcatctcatttatttatgggtggcagctaacattgctgctgctcgccgttgtgcctatcatcgctgtgtccggcatagtcgaaatgaaactgctggcaggcaatgcaaaacgggacaagaaggagcttgaggccgctgggaaaattgctaccgaggccatcgagaatattagaacggtcgtttccctgacccaggagcgtaaattcgagtctatgtacgtggagaagctgtacggaccgtatcgaaacagtgttcaaaaggcccacatttatggaatcactttttccatcagccaggccttcatgtatttcagttacgcaggatgtttcagattcggtgcctaccttattgtgaatggtcatatgcggttccgggatgttatcctggtgttctcagccatcgtcttcggggctgttgcgttgggacacgcatccagttttgcacccgattatgctaaggccaagctgtcagccgctcatctgtttatgctgttcgaacggcagcccctcattgactcctactcagaggagggcctcaaacctgacaagttcgaaggcaacataacttttaacgaggtggtgttcaattatcctacaagagccaatgtgccagtcctccaaggactttctttggaagtcaagaaggggcagactcttgccctggtgggatcctcagggtgcggcaaaagcaccgtggtgcagttactggaacgcttctatgacccactcgcggggaccgtctttgtcgatttcgggtttcagctcctggacggtcaggaggctaagaaattgaatgttcagtggctgcgagcccaacttggaattgtttctcaggagccaattcttttcgattgtagtattgccgagaacattgcgtacggcgacaattctcgcgtagtctcacaggatgagatcgtgtcagctgcgaaagctgctaacattcacccatttatcgagactctgccgcacaagtacgagactagagtgggtgataaggggacacagctgtctggcggtcaaaagcaaaggattgcgattgctcgcgcattgattagacagccccagatcctactccttgacgaggctacaagcgcacttgacaccgagtcagagaaggtggtacaggaagcgctggacaaggcaagggaagggcgaacctgcattgtcattgctcatcgactatccacaattcagaatgccgacctcatcgtcgtgttccagaatggcagagtaaaagaacatggaacccaccaacagctgttggcccagaagggaatctactttagtatggtgtcagtccaagccgggacccagaatctg

SEQ ID NO: 7610 - DNA, 3858 bp, synthetic construct
  misc_feature 1..3858: note = source = /note="Description of Artificial Sequence: Synthetic coding sequence"
  source 1..3858: mol_type = other DNA
atggatctggaagcagcaaagaacggcaccgcatggcgcccaacgtctgccgagggtgattttgagctcggcatttcgtccaagcaaaagcgaaagaaaaccaagaccgtgaagatgatcggtgtgctgaccctgtttagatactcggactggcaagacaaactcttcatgtcactgggaacgattatggcgatcgcacatggtagcggcctgcctctcatgatgattgtgtttggggaaatgactgataagttcgtcgacactgcaggaaatttctcattcccagtgaacttctccctctcactgcttaatccaggtaagatccttgaagaagagatgactcggtatgcatactactactcgggactcggagcaggagtcctggtcgcggcttacattcaggtttcattctggacccttgcagcaggaaggcaaatccgaaagatccgccaaaagttctttcatgcaatcctccgtcaagaaattggctggtttgatatcaacgacaccactgagcttaatactagacttactgatgatatatcgaagatttcggaaggaattggggataaagtgggaatgttcttccaggccgtggccacctttttcgcaggattcatcgtcggtttcatccggggctggaagttgactctcgtgatcatggcaatctccccaattctgggactctcagccgcagtgtgggcaaagattctgagcgcgttttccgacaaggagttggcagcgtacgcaaaggccggagcggtggcagaggaggcgctgggagcaattagaaccgtcatagcatttggcggtcagaacaaagaactggaaaggtaccagaaacatctggaaaatgcaaaggagattggaattaagaaagcaatttcggctaacatatccatgggtattgcattccttttgatctacgcgtcatacgcacttgctttttggtacggttccacccttgtcatttcaaaagaatacactattggaaatgcaatgaccgtctttttctcgatcctgataggagccttttcggtggggcaggccgcaccgtgcattgatgcattcgcaaacgcccggggagcagcctacgtgatttttgacatcatagataacaacccaaagatagattcatttagcgaaagaggtcataagcctgacagcattaagggaaacctggagtttaatgacgtccacttcagctatccttcccgggccaacgtgaagatccttaagggtcttaatcttaaagttcagtcaggccagactgttgcgctggttgggtcgtcgggctgcggtaaaagcaccaccgtccagcttattcagcgactttacgatcctgatgaaggaaccattaacattgacgggcaagatattcggaatttcaatgttaactacctccgagaaatcataggggtggtgtcacaagaaccagtgctcttttcaaccacgattgcagaaaacatctgttatggccgcgggaacgtgactatggatgagattaagaaagccgtgaaggaggcaaacgcatacgaattcatcatgaagctccctcaaaagtttgacacgcttgtgggggagagaggagcacaactgtcaggaggccaaaaacagcgaatcgcaatcgcccgagccctggtccgtaacccgaagattcttctcctggatgaggccacttccgcccttgacactgaatccgaagcagaggtccaggcagccctggacaaggcacgcgagggccgcaccactatcgtgatcgcccatcggctttccaccgtccggaatgcagatgtgatcgccggtttcgaagatggtgtcattgtggagcaagggtcacattccgaacttatgaagaaggaaggggtctacttcaagttggtgaatatgcaaacctcgggtagccagatccaatcagaagaattcgaactcaacgatgaaaaggccgcaactagaatggcacccaacgggtggaagtcgagattgttccgacattcgacccaaaagaatctgaagaattcccaaatgtgtcagaagtcactggatgtcgagactgatggacttgaggccaacgtgcctcctgtcagctttctgaaggtcctgaagctcaacaaaactgagtggccttactttgtggtcggcaccgtgtgtgctatcgcaaacggcggactccaaccagcgttttccgtgatcttttccgagattattgcgatattcggacctggagacgatgcggtgaaacaacagaagtgcaacatcttttctctgatttttctttttctgggtataatctcgtttttcacttttttccttcaaggtttcacttttgggaaggcgggagagattctgacccggcgccttcgttccatggcctttaaagcaatgctccggcaggacatgtcatggtttgatgatcataagaactcgactggagcactcagcaccagactcgccacggatgcagctcaggtccaaggggctaccggcactcgcctggcactcattgcacagaacattgccaatctgggtactgggattatcatctcgttcatctacggatggcagctgacccttttgctgctggccgtggtccccattatagccgtttcaggtattgtggagatgaagctcctggcaggtaacgcaaaacgggacaagaaagaacttgaggccgccgggaagatcgccaccgaagcaattgagaacatccgcactgtcgtgtcactgacgcaggaacggaaattcgaatccatgtacgtcgaaaagttgtacggaccctacagaaactccgtgcagaaggcgcacatctacgggataactttctcgatttcccaggcttttatgtacttctcatacgcgggctgctttcgctttggagcatacctgatagtgaatgggcatatgcgctttagagacgtgattctggtgttctccgccattgtgtttggcgcagtcgcactcggtcacgcatcgtccttcgcaccagactacgcgaaagcaaagctctcagcagcacatctcttcatgctgtttgaacggcagccccttatcgatagctacagcgaagaaggtctgaagcccgataagtttgaagggaatatcacctttaatgaggtggtctttaactaccctacccgtgcaaatgtgcctgtgcttcagggactcagcctcgaggtgaagaaggggcaaaccctggcactggtcggttcgtcagggtgcggtaaatcgactgtcgtgcaactgcttgagcggttctatgatcctctcgcaggaactgtgtttgtggactttggatttcagctgttggatgggcaagaggcaaagaagctgaatgtgcaatggttgagagcacagcttggtattgtcagccaggaaccaatcctctttgattgttcaatcgcagagaacatcgcctacggagataactcccgcgttgtctcgcaggatgagatagttagcgccgccaaggcagcaaacattcaccctttcatcgaaaccctgcctcataagtacgaaactagggtgggtgacaaaggtactcaactctccggaggacagaagcaaaggattgcaatcgctagagcgttgatccgccaaccccagatcctgcttcttgatgaggcaacctccgcactggacactgaatcagaaaaggtcgtgcaagaagcattggataaggcgagagagggacgcacttgtattgtgattgcacacagactgtccactattcaaaacgcggatctgatcgtggtctttcaaaatggtcgcgtgaaggaacatggtacccatcagcagctgctcgcgcagaagggcatctacttttcaatggtcagcgtgcaggcaggaactcagaacctg

SEQ ID NO: 7611 - DNA, 3858 bp, synthetic construct
  misc_feature 1..3858: note = source = /note="Description of Artificial Sequence: Synthetic coding sequence"
  source 1..3858: mol_type = other DNA
atggatctagaggcagccaagaacggcaccgcttggcgccccacctccgcagaaggggattttgaactgggaatcagtagcaaacagaaaaggaagaagaccaagactgtgaaaatgataggggttttaacgctttttagatattccgattggcaggacaaattattcatgtcacttgggactattatggccatcgcccacgggtccggtctgcctcttatgatgatcgtctttggagagatgaccgacaagtttgtcgataccgcaggaaatttcagctttcccgtgaatttttctctgagcttactgaatccaggcaagattctggaagaagagatgactcgctatgcgtattattatagcggcttgggcgctggggtgctggtggccgcatatatccaggtatccttctggaccctggccgccgggcgacagataaggaagatcagacagaaatttttccatgccattttacgacaggagattgggtggttcgatatcaacgatactacagaattgaatacacgtctgacagatgatatttcgaagatctccgagggtataggcgataaagttggcatgttctttcaggctgtggctacgttttttgccgggtttattgtaggattcatccgaggatggaagcttacccttgtgatcatggccatctctcctatcctgggactgagcgccgcagtatgggcaaaaatactctcagccttttcagataaggagctggccgcttacgccaaggccggggccgtggccgaagaagctctgggtgccattcggaccgtgattgccttcgggggccagaataaggaactagagcggtatcagaaacatctggaaaacgcgaaggagattggaatcaagaaggccattagcgccaacatctcgatgggaattgcgtttttattgatctatgccagctatgctctggccttctggtacggctcgaccctggtgatctccaaggagtacactattggcaatgcaatgacggtgttcttcagtattctgataggcgcatttagcgtgggtcaagcggccccctgcatcgatgccttcgccaacgcgcgcggcgcagcctatgtgatcttcgacattattgataacaatcccaaaattgatagcttcagtgaacggggacacaagcctgactcaattaaggggaatttggaattcaatgacgtgcatttctcataccccagtcgggccaatgtgaaaatacttaagggcctgaatctgaaagtccagtctggacagaccgtggctcttgtcggcagtagcggatgcgggaaatctacaacagtacaattaatccagagattatatgatcctgacgaaggcaccattaatatcgatggccaggacatcagaaactttaacgtgaactacctgcgcgagattatcggagtggtgagccaagagcccgttctgttttcgaccacaatcgccgagaacatctgctacggtcgagggaatgtgaccatggacgagattaaaaaggcagtgaaagaggccaacgcgtacgagttcattatgaagctgcctcagaaattcgacactcttgtcggcgaaaggggcgcccaactttctggcggacagaagcagcggatcgctatagcccgggccttggtgcgaaatcctaagatccttttgttagacgaagccacatccgctttggacacggaatcagaggcggaggtccaagctgcactggataaggctcgagaggggcggacgaccatcgtaattgctcatagattgagcacagtgcgcaatgcagatgttatcgcagggtttgaggatggtgtgattgtcgagcaggggagccatagcgagttgatgaaaaaggaaggcgtttacttcaagctggtgaatatgcagactagtgggtcgcaaattcaaagcgaggagttcgaactcaatgatgaaaaagctgctactcgcatggcccccaacggctggaagagccgactgtttagacattccacgcaaaagaatctgaaaaattcacaaatgtgtcagaaatcactcgatgtcgagactgatggattagaagctaacgttcctccggttagtttcctgaaagtactcaagctgaataagaccgaatggccctattttgtggtgggcacggtgtgcgctatcgctaacgggggcttacaaccagcgttttccgttatcttctctgagattattgccatcttcgggcccggggacgacgctgtgaaacagcagaaatgcaatattttctccctgattttcctgttcctgggaattatctcctttttcacctttttcctgcagggattcacattcggaaaagctggggagatcttaacacgccggctgagatcgatggcctttaaggctatgctcagacaggacatgagctggttcgatgaccacaaaaattccacaggggccctgagtactcgcctggccaccgacgctgcccaggtgcagggggctacaggaacaagactcgcactcatcgctcagaacattgcgaatcttggaaccggcattattatctctttcatttacggatggcaacttactctgctgctcctcgctgttgtacccattatagcagttagcggcattgtggaaatgaagctgttggcagggaacgcaaaaagggataagaaggagctagaagctgccggcaagatagcaacagaagccatagagaacattcggacagtggtgagcttgacacaggagaggaagtttgagagtatgtacgtggagaaactgtatggcccatatcgcaactccgtccagaaagcacacatctacggtattactttctccattagtcaggcctttatgtacttcagctatgctggctgcttcagatttggcgcctacctcattgtgaacggtcatatgcggttccgtgacgttattctggttttctctgctattgtcttcggtgcggtcgccctgggccacgctagcagctttgctcctgattatgccaaggcaaagctcagcgccgctcacctgttcatgctgttcgagagacaacccctcatcgattcatatagcgaagaaggtctcaaacctgacaagttcgagggaaatattacctttaatgaagtggtgttcaactatccaacccgggcgaacgtaccagtgctgcagggattgtcgctcgaagtgaaaaaaggtcagaccctggccctggtcggctcttctggctgtggtaagtccactgtggtgcagctgttggaaaggttttacgatcccttggccggtacagtgttcgtggatttcggattccagctacttgacggacaggaggcgaagaaactcaatgtccagtggctgagggctcagctgggcatcgtgagccaggaacccatcctttttgactgttctatcgccgagaatatcgcatacggagacaactcacgagttgtgtctcaggatgaaatcgtctcagcggcaaaagccgccaacatccatccttttattgagacacttcctcataaatacgagaccagagttggcgataaaggaacccagctcagcggggggcagaagcaacggattgccatagctagggcccttatacggcaaccccagatcctgttgctggatgaggccacatctgccctggacacagagtctgaaaaggtggtgcaggaagccctcgacaaggcacgcgaaggccgtacgtgcatcgtcatagcacaccggctgagcaccatacagaacgccgatctgattgtcgtgttccaaaatggacgcgtgaaggagcacgggacccaccagcagttgttggcacaaaaaggcatctattttagcatggttagcgtacaggcaggcacgcaaaatctt

SEQ ID NO: 7612 - DNA, 3858 bp, synthetic construct
  misc_feature 1..3858: note = source = /note="Description of Artificial Sequence: Synthetic coding sequence"
  source 1..3858: mol_type = other DNA
atggacctcgaggccgccaagaacggaacggcatggcgtccgacctcggctgaaggtgactttgagctcggaatctcgtccaaacagaagcggaagaaaactaagacggtgaaaatgatcggtgtattgaccctgttccggtactcagattggcaagacaaactcttcatgtcgcttggaactattatggccatcgcccacggctcagggcttcccttgatgatgattgtgttcggcgagatgaccgacaagttcgttgacaccgcaggtaacttttcctttccagtcaacttctccctgagcctgctgaacccggggaagattttggaagaggaaatgactcggtacgcctactactactccgggcttggagccggagtgttggtggctgcatacatccaggtgtccttctggaccctcgcggcaggccgccaaatccggaagatcaggcaaaagtttttccatgcgatcctgcgccaagagatcggttggtttgatatcaatgacaccactgaactgaataccagactgacggatgacatctcgaagatcagcgaaggcatcggagataaagtcggaatgttcttccaggcagtggccaccttcttcgcgggattcatcgtgggcttcattcggggatggaagctgaccctggtgatcatggcaatctcgccgatcctgggcctcagcgccgcggtctgggcgaagatcttgtctgcattctccgacaaggagctcgccgcctacgccaaagcgggagcagtcgcagaggaagcgctcggcgcaattcggactgtgatcgcgttcggagggcagaacaaggaactggagagataccagaagcacctcgagaacgccaaggaaatcggcatcaagaaagccatcagtgccaatatctccatgggaatcgcgttcctgctgatttacgcgtcatacgcgctggctttttggtacggctcgaccttggtcatctccaaagaatacaccattggaaatgctatgactgttttcttctccatcctgatcggagcattctccgtaggacaagcagcaccgtgtatcgacgcctttgcgaacgcccggggagctgcctacgtgattttcgacattattgacaacaaccctaagatcgactcattctcagagcgcggacacaagcctgatagcatcaaggggaacctggagtttaacgatgtgcacttctcgtacccttcgcgcgcaaacgttaagatcctgaaaggactcaacctgaaggtgcaatcggggcaaactgtcgccctggtgggaagcagtgggtgcggtaagagcaccaccgtgcaactgatccagagactgtacgatccggacgagggtactatcaatatcgacgggcaggatatccgaaactttaacgtcaattacctgagagagatcatcggtgtcgtgtcccaggagccagtcctgttttcaaccaccattgctgaaaacatttgttacgggcgtggaaacgtgacgatggacgaaatcaaaaaggccgtcaaggaagcaaatgcgtacgaattcatcatgaagctgccgcagaaatttgacaccttggtgggagaacgcggggcccaactgagcggtggtcagaaacaacggatcgctatcgcaagagccctggtccgcaatccgaaaatcctgctcctggatgaggctaccagcgcattggataccgaatccgaagctgaagtgcaggccgcactcgataaggcacgcgaaggaaggactaccatcgtgattgcccatcggctctcaactgtgcgcaatgccgacgtcatcgccggtttcgaggacggagtgatagtggagcaaggatctcatagcgagctcatgaagaaggaaggtgtgtacttcaaactggtgaacatgcaaactagcggatctcagatccaaagcgaggaatttgagctgaacgacgaaaaggcagccacgcggatggcgccaaacggatggaaatccaggctgttcagacacagtactcagaagaatttgaaaaactcccagatgtgccaaaaatcactggatgtggaaactgatggactggaggcgaacgtgccaccagtgtcattcctgaaggtcctcaaactgaacaaaacggagtggccatatttcgtcgtcggcactgtgtgtgctatcgctaacgggggactgcagcctgcgttctccgtgatcttctcggagatcatcgctatcttcggccccggagacgacgccgtgaaacagcagaagtgtaacatcttttctctgatctttctgttccttggcatcatctcgtttttcacttttttcttgcaaggattcaccttcggaaaggccggcgaaattctcactagacggctgaggtcgatggcatttaaggccatgctgcggcaggacatgtcatggtttgacgaccataagaactctactggggctttgtccaccaggctggccaccgacgcggcgcaggtgcagggcgctaccggcactcgactggcgctcatcgcgcaaaacattgcaaatctgggaactgggatcatcatcagcttcatctacggatggcagctgaccctgctcctgctcgccgtggtgcccatcatcgccgtcagcgggatcgtggaaatgaagctcctggccggaaacgcgaaacgcgacaaaaaggaacttgaggccgcagggaagatagccactgaagccattgagaatatccgcaccgtcgtgtcgcttacccaggagcgcaagttcgaaagtatgtatgttgaaaagctgtatggcccgtaccgcaacagcgtacagaaggcgcacatatacggaatcaccttctcgatctcacaggcttttatgtacttcagctacgccggttgcttccggtttggagcctacctcattgtcaatgggcacatgcgatttagagatgtcattctcgtgtttagcgccatcgtgttcggagcggtggccctgggacatgcctcctccttcgccccggattacgctaaggccaagctgtctgccgcgcacctgttcatgctgttcgagcgccagcccctgatcgattcctactcggaagagggcttgaagcctgacaagttcgaaggcaacatcaccttcaatgaagtggtgttcaactacccgacccgcgcaaatgtgccggtcctgcaagggctctcgctggaagtgaagaagggacagactctggccttggtcggctcgtcagggtgcggaaagtcaactgtagtgcagcttctcgagcgcttctacgacccgctggccggaaccgtgttcgtcgactttggattccaacttctggatggacaggaagccaagaagctcaatgtccagtggttgagggcgcagcttggcattgtgtcacaggagcctatcctcttcgactgcagcatcgccgagaacatagcctatggggataattcgcgcgtggtttcgcaggacgagatcgtgtccgccgcgaaggcggcaaatatccacccattcatcgaaaccctcccacacaaatacgaaactcgggtcggcgacaaaggaacccagctctcaggaggccagaagcaacggattgccatcgcacgtgctctcatccggcagccgcaaattctccttctcgatgaagctacctcggctctggacacggagagcgaaaaggttgtgcaggaagccttggataaggcgcgcgagggtaggacgtgcatcgtgatcgcacaccggttgtccactatccagaacgccgatctgattgtggtgttccaaaatggccgcgtgaaggaacatggtacgcatcagcagctccttgcgcaaaaaggaatctacttctcgatggtgtccgtacaagctggcacgcagaacctg

SEQ ID NO: 7613 - DNA, 3858 bp, synthetic construct
  misc_feature 1..3858: note = source = /note="Description of Artificial Sequence: Synthetic coding sequence"
  source 1..3858: mol_type = other DNA
atggatctggaggccgcaaaaaacggaactgcatggaggcctacgtccgccgaaggtgacttcgaactcggaatctcgagcaaacagaaacggaaaaagactaaaacggtgaagatgattggagtgctcactctgttccgctactcggactggcaggataaactgttcatgtccttgggaaccatcatggcaatcgcccatgggagcggactcccccttatgatgattgtattcggcgagatgaccgataagttcgtcgataccgccggaaatttctctttccctgtcaatttctccctttcactgctgaacccgggaaagatccttgaagaagaaatgactcgctatgcatactactacagcggattgggggccggcgtgttggtcgccgcgtacatccaagtgagcttctggaccctggcggccggacggcagatcagaaaaatccgccagaagttctttcacgccatacttcgccaggagattggatggttcgacatcaatgatactaccgaactgaacactcggcttaccgacgatatctcaaagatctcggagggaatcggagacaaagtcggtatgttcttccaggccgtggcgactttcttcgccggattcatcgtggggttcatccgaggctggaagttgaccctcgtgatcatggcaatttcccctattctgggtctgagcgcggccgtgtgggctaagatcctgtccgccttctcggataaggaactcgcggcctacgccaaggctggggctgtggccgaagaagccctgggcgccatccgcaccgtaattgcatttggaggccagaacaaagaattggaaaggtaccagaaacatctggagaatgcaaaggagatcggcatcaagaaagccatctcggcgaacatttcgatgggtatcgcctttttgctcatctacgcgtcgtacgctctggccttctggtacggcagcacccttgtgatctccaaggagtacaccatcggaaacgccatgaccgtgttcttttcaatccttatcggggcgtttagcgtgggacaggcggccccgtgcatcgacgctttcgcaaacgcccgcggcgccgcttacgtcatattcgacataattgacaacaatcccaagatcgattccttctccgagagaggacacaaacctgattcgatcaaaggcaatctggagtttaacgacgtgcatttctcctacccttcacgcgcaaatgtgaagatcctgaagggtctgaacctgaaggtgcaatcgggacaaactgttgctctcgtcggatcgtctggatgcgggaagagcactacggtccaattgatccagagactctatgacccggatgagggaacgattaacatcgatgggcaggacattcggaatttcaacgtgaattacctgagggagatcatcggggtcgtctcccaagaaccagtgcttttctccactaccatcgcggaaaacatctgctacggaaggggaaacgttaccatggacgaaatcaagaaggcagtgaaggaggccaacgcctacgagtttatcatgaaattgccacaaaagtttgatactctggtgggagaaagaggcgcacagctctcggggggacagaagcagcgcatcgcaattgcgcgggctctggtccgtaatccaaagattctgctcctcgacgaggcaaccagcgcccttgataccgagagtgaagctgaagtccaagccgcactggataaggcccgcgaaggaagaactaccatcgtgatcgcccataggctctcgactgttcggaacgctgatgtgatcgcgggctttgaggacggcgttatcgtcgaacaaggatcacactccgaactgatgaaaaaagaaggagtgtacttcaagctcgtgaatatgcaaacttcgggctcgcaaatccaatcggaagagtttgagctgaatgatgaaaaggcagccaccaggatggcgccgaacggatggaagtcgaggttgttccggcactcgacccagaagaatctcaaaaactctcagatgtgccagaagtccctggacgtggaaacggatggacttgaagctaacgtgcccccggtttcattcttgaaggtcttgaagctgaacaaaacggaatggccgtatttcgtggtcggaaccgtgtgtgccatcgccaacggggggctccaaccggccttctccgtaatcttcagcgaaatcatcgccatctttggtccgggagacgacgcggtcaagcagcaaaagtgcaatatcttctccctgattttcctgttcctgggcatcatcagcttctttactttcttcttgcaggggtttacttttgggaaagcaggagagatcctgaccagacggctgagatctatggcatttaaggccatgctccgccaggatatgtcatggttcgacgatcataagaattcaactggagccctcagcaccaggctcgcaacggacgcggcccaggtccagggagcgactggaactcgcctggccctcatagcgcagaatattgccaacctcggaaccggcatcatcatctcattcatctacggatggcagctgacgctgctgctgcttgctgtggtgccgatcattgcggtgtctggaattgtggaaatgaagctgttggcaggaaatgcgaaacgggataagaaggaactggaggctgcgggaaagattgcgactgaggctatcgagaacatcagaactgtggtgtcgctgacccaggaacgcaaatttgagagcatgtacgtggagaaactgtatggtccatacaggaactcggtccagaaggcccacatatacggaatcaccttctccattagccaggcgtttatgtacttttcgtacgccgggtgttttcggttcggggcgtacctgatcgtgaacggccacatgcggttccgcgacgtgatcctcgtgttctcggcaatcgtttttggagctgtggcgttgggccacgcgtcatcattcgcaccggactacgcaaaagccaagctgtcggcggcgcacctgttcatgctgtttgaacggcagcccctcatcgacagctactccgaggaaggcttgaagccagataagttcgaaggcaacatcactttcaacgaggtggttttcaactacccaacccgcgctaatgtcccggtgctgcaaggactgtccctggaggtgaagaaggggcagactttggccctggtcggctcttccggatgtggcaagtccacggtggtccagctccttgaacgcttttacgacccgctggcgggaacggtattcgtcgacttcggtttccagctgctcgatggccaggaggccaagaaattgaacgtgcaatggctgagagcccaattgggtattgtgtcccaggaaccaatcctcttcgactgctccattgctgaaaacatcgcctacggcgacaacagtagagtggtgtctcaggacgaaatcgtgtcggctgctaaggcagctaacattcacccattcatcgaaacccttccacacaagtatgaaactcgggtgggagacaagggaacgcagctgagtggcggtcaaaaacaacggattgcgatcgcccgggcacttattcggcagcctcaaatcctgctgctggacgaagcgacttcagctctggacaccgaatcagagaaagtggtgcaagaggcactggacaaggccagagagggccgtacctgcatcgtcatcgcccatcggctgtccaccatccagaacgctgacctgatcgtggtgttccaaaacggcagagtgaaggagcacgggacccatcaacaactcctcgcacagaagggaatctacttctcaatggtttccgtgcaggcgggaactcagaatctg

SEQ ID NO: 7614 - DNA, 3858 bp, synthetic construct
  misc_feature 1..3858: note = source = /note="Description of Artificial Sequence: Synthetic coding sequence"
  source 1..3858: mol_type = other DNA
atggaccttgaagcagctaagaatgggaccgcgtggcggccaactagcgcagaaggagactttgagctggggatctcgagcaagcagaagcgaaaaaagactaagactgtgaaaatgattggagtgttgacccttttccgctacagcgactggcaggacaaactgttcatgtcactggggactattatggcgatcgcgcacggctcaggactccctcttatgatgatcgtgtttggcgaaatgaccgacaagtttgtggataccgcaggaaatttctctttcccagtgaacttttcactttccctgttgaacccgggaaagatactggaagaagagatgactcgctacgcatactactacagcggactgggagcaggcgtgttggtggcagcctacatacaagtctcgttctggactcttgcagccggccggcaaatccgcaagattcggcaaaagttctttcatgcgattctgcgccaggagattggatggttcgacattaatgatactactgaacttaacaccagactgactgacgatatctccaagatatccgaagggattggggacaaggtgggcatgttttttcaagcggtcgccacctttttcgccgggtttatagtgggtttcatacggggctggaaacttactcttgtgattatggccatctccccaattctcggtctttccgccgctgtgtgggccaagattctgtcggcgtttagcgataaggaacttgcagcctacgccaaggccggggcagtcgctgaagaggcgctgggggcgatcagaacggtcattgcctttggaggtcaaaacaaagaactcgaacgttaccaaaaacatttggagaacgcgaaggagattggaatcaaaaaagcaataagcgcaaacatttcaatgggaattgccttccttctcatttacgcatcgtacgcacttgcattttggtacggcagcacccttgtgatttccaaggagtacactatcggaaatgcaatgaccgtgttcttctccatcttgataggcgccttttccgtgggccaagcagctccatgtattgatgcattcgcaaacgcccgtggagccgcatacgtgatttttgatatcatagataacaatcccaagattgactcatttagcgaacggggacataagcctgatagcatcaaaggtaacctggagttcaacgacgtgcatttcagctaccctagcagggcaaacgtgaagatccttaagggactgaaccttaaggtgcagagcggccagaccgtcgctttggtcggctctagcggttgtggcaagtcaaccaccgtgcagctgatccaaagactctatgatcctgatgaagggaccattaacatagacggccaagatatcagaaacttcaacgtgaattacctcagagagatcataggagttgtgtcgcaggaaccagtccttttctcgacgaccattgccgagaatatctgttacggacgtgggaacgtgactatggacgagattaagaaagctgtcaaggaagccaacgcctacgagtttatcatgaaactcccacagaagtttgataccctggtgggcgaaaggggagcccaactttccggtggtcagaaacaaagaatcgcaattgcaagagccctcgtgcgaaatcctaaaatcctccttctcgatgaggcaacctccgcactggatacggaatccgaagcggaagtgcaggctgctctcgataaagccagggagggaagaactactattgttatagctcatcgcttgtcgacggttcgcaacgcggatgtcatcgcgggatttgaggacggagtgatcgtggagcagggatcgcattccgaactgatgaagaaggaaggggtctactttaaactggtgaatatgcagacctcgggctcacagatccagtccgaggaatttgagcttaatgatgaaaaggccgctactcggatggcccctaacggttggaagtcacgcctttttcgtcactccacgcaaaagaacctcaaaaactcgcaaatgtgtcaaaagtcgctggatgtggaaactgatggattggaagcaaatgtgccgcccgtctcctttcttaaagtgcttaagctcaataagaccgaatggccctacttcgtggtcggcactgtgtgtgcaatcgcaaacggaggactgcagccagctttctctgtgatcttttccgagattatcgctatattcggtcccggtgacgacgcagtgaagcagcagaagtgcaacattttcagcctcatcttcctgtttctggggataatcagcttctttacttttttcctccaaggatttacttttggaaaagccggggagattctgacgcggagactcaggagcatggcctttaaagcgatgttgcgtcaggatatgtcatggttcgatgatcataagaattcgaccggtgcgctttccactaggcttgccaccgacgctgcacaagttcaaggagcaaccgggactcgtctggcgcttatagcgcaaaacattgcaaatctgggcactggaattatcatttcttttatctatggctggcaactgaccctgctcctcctcgcagtggtgcccatcatcgcagtcagcggtattgtcgagatgaaactccttgccggaaacgccaagagagataagaaggagctcgaagcagctgggaagatcgcaaccgaggcaattgaaaacatccgaactgtggtttcccttacccaagaacgaaagttcgaatcgatgtacgtcgagaagctgtacggcccttaccgaaattctgtgcaaaaggctcacatttacggcataaccttttcgatttcacaagcattcatgtacttttcgtacgcaggatgctttcgatttggtgcttacctgatagtgaacgggcatatgcgttttcgggatgttatcttggtgttttccgcgattgtctttggagcagtggcactcgggcatgcaagctcgttcgcgcctgattacgcaaaggccaagctgtcggcagcgcacctgttcatgctttttgaacgccaaccgctcatcgattcctacagcgaggagggtctgaagccagataagttcgagggaaacatcacgtttaacgaggtcgtgttcaattaccccactcgcgcaaatgtcccagtgcttcaagggctttcactcgaagtcaagaagggtcaaaccctcgcacttgtgggatcatcggggtgcggaaaatccactgtggtccaactccttgagagattttacgatccccttgcgggtaccgtttttgtggactttggttttcagctgctggacggacaagaagccaagaaattgaatgtccaatggctgagagcccaactgggaatagtgtcacaggagcctattctgtttgactgttccattgcagaaaacatcgcatatggagataattctcgcgtggtcagccaagacgaaattgtgtcggctgcaaaggcggctaacatacatcctttcatagaaacgcttccccacaagtatgaaacccgcgttggtgacaaaggcacccagctctctgggggtcaaaaacagaggattgcaatcgcccgtgcacttatccgccaacctcagattctgttgttggatgaagctacctcggcacttgataccgaaagcgaaaaggtcgtccaggaagcactggacaaggcacgcgaaggtcggacgtgcattgtcatcgctcacagactttcaaccatccagaatgcagatcttatagtggtctttcagaacggacgggtgaaggaacacggtacgcatcaacagcttctggcccagaaggggatttacttctctatggtgtcagtgcaggcaggtacccaaaacttg

SEQ ID NO: 7615 - DNA, 3858 bp, synthetic construct
  misc_feature 1..3858: note = source = /note="Description of Artificial Sequence: Synthetic coding sequence"
  source 1..3858: mol_type = other DNA
atggatcttgaggcagcgaaaaatggaaccgcgtggcgcccaacttcggcagaaggcgatttcgagctcggaatttcgtcgaagcagaagcggaaaaagactaagactgtaaagatgatcggcgtgcttaccctcttcagatacagcgactggcaggataagctgtttatgtcactgggaactattatggcaatcgcccatgggtccggccttccacttatgatgatagtgttcggagaaatgactgataagttcgtggatacggccgggaatttctcgttcccagttaacttttcgctttcgctccttaatccaggtaagatcctcgaagaggagatgactagatacgcctactactactcggggctcggcgcgggcgtgctcgttgcagcatacattcaggtgagcttctggactttggcagccggacggcagataaggaagatccgccaaaagtttttccacgcaattctgcgccaagaaataggctggttcgatatcaatgataccaccgagctcaacaccaggctcactgatgatatttccaagatatcggaaggcatcggggataaggtggggatgtttttccaggcagtggcaaccttctttgccggattcattgtggggtttatcagaggctggaagctcactttggtgattatggcgatctcgccaattctcggactctcggcagccgtgtgggcgaagattttgtcggccttttcggacaaggagcttgccgcatatgcaaaagccggagctgtggcagaagaggcacttggtgctataaggaccgtgattgcatttggaggtcaaaacaaggagctggaacgatatcagaaacacctggagaacgcaaaggagatcggcatcaagaaggctatttcggcgaacatttcgatgggtattgctttccttctcatttacgcaagctatgcactggccttctggtacggttccacgcttgtcatctcgaaggaatacaccattggtaacgcaatgactgtgttcttttccatcttgattggcgcatttagcgtgggccaggcggcaccttgtattgatgcattcgcaaatgcgagaggtgcagcttacgtgatctttgacataatcgacaataaccccaaaatagactcctttagcgaacggggccataagcccgatagcattaagggaaaccttgaattcaacgatgtgcatttttcctacccaagccgggcaaatgtgaagatattgaagggacttaacctgaaggttcaatcgggccaaacggtcgcactcgtcgggtccagcggatgcggcaaatccaccactgtgcaactgattcaaagactctatgaccccgatgaaggaaccataaacatcgatggacaggatatccgtaatttcaatgttaactacctcagagagataattggagtcgtgagccaggagcctgtgctttttagcactactattgcggagaacatctgttacggaaggggaaatgtgaccatggatgaaatcaagaaggccgtgaaggaggcaaacgcatacgaattcatcatgaagctgccacagaagttcgacactctcgtcggagaacgaggagcacagctgtcgggaggtcaaaagcagcggatcgcgattgcccgcgccctggtgcgaaaccctaagatcctgctgctcgatgaagcaacgtcggcgctggatactgagagcgaagccgaagttcaggctgcactggataaggcaagagagggtcgaaccaccattgtgatagcgcatagattgtcaactgtccggaacgcggacgtgattgcgggttttgaggatggcgtcatcgtcgagcaagggtcacattcggaactcatgaaaaaggaaggcgtgtacttcaagctggtgaacatgcaaacctcagggtcccagatacaatccgaggaatttgagctgaatgacgagaaggcggcaaccagaatggctccaaacggatggaagtcccgactttttcggcattccactcagaagaacttgaagaactcccagatgtgtcaaaagtccctcgacgtggagacggacggcctggaagccaacgtgcctccagtgtccttcctgaaagtgttgaaacttaacaagaccgaatggccgtacttcgtcgtgggtaccgtgtgtgcaatagcgaatggaggactgcaaccagcattctccgtgatcttttcggagattattgccatctttggccccggtgatgatgctgtgaaacagcaaaaatgtaacatcttttcacttatctttctttttcttggtatcatttcattctttaccttttttctccagggatttacctttggaaaggcaggcgagattcttaccagacgacttcgctccatggcatttaaggccatgcttagacaggatatgtcgtggtttgatgatcacaaaaactcgaccggagcactctccacgagactggcaacggatgcagcgcaggtgcagggagcaaccggtaccaggctggccctcatcgcccagaacattgcaaacttgggaaccggaatcataatctcgttcatttacggttggcagctgaccctcttgctcctcgcggtcgtgcccataattgcagtgtcagggatcgtcgaaatgaaactgctggcgggaaatgccaagcgagataagaaggagttggaagctgccggtaagatcgcgactgaggcaatcgagaatattcgtactgtggtttcccttacccaggagagaaagtttgagtcgatgtacgtggagaaactttacggcccttacaggaattccgtgcagaaggcccatatctacggcatcacgttttccatttcacaagcgtttatgtacttttcctacgcaggttgtttccgcttcggtgcatacctgattgttaacggacacatgagatttcgcgacgtcatccttgtgtttagtgccattgtgtttggggcagttgcattgggtcatgcaagctcttttgcccctgactacgcaaaagcaaagctctcggccgcgcatttgtttatgctgtttgaacgacagccgctcattgattcatacagcgaagaaggtttgaaacctgacaaatttgaaggtaacattacttttaacgaagtcgtgtttaactacccaacccgagccaatgtgcctgtcctgcaaggactgtcgctggaagtgaagaaaggccaaactctggcattggtgggttcctctggctgcggtaagagcaccgtcgtccaacttcttgaacgcttttacgaccccctggccggtaccgtgtttgtggattttggcttccaactgctcgatggacaagaagcgaaaaaacttaacgtgcaatggctcagagcacaacttgggattgtgtcacaagagcctatactgtttgactgcagtatagctgagaatatcgcgtacggtgataatagccgtgtggtgagccaagacgaaattgtctccgccgcgaaggctgcaaacattcatcccttcattgagactctgccacataagtacgaaacccgcgtgggagacaaaggtacgcaactttcgggcggacagaagcaacggatcgccatcgcaagggcactcatcagacagcctcaaatacttcttcttgatgaagccacttcagcacttgatactgaatcggaaaaagtggtgcaggaggcgctcgacaaggccagggaagggcggacctgcattgtgattgcacatagactctcgacgattcagaacgcagatctgattgtggtgttccagaatggtagagtcaaggaacacggaactcaccaacaattgcttgcacaaaagggcatctacttctccatggtgtcggtgcaagctggtacccaaaacctt

SEQ ID NO: 7616 - DNA, 3858 bp, synthetic construct
  misc_feature 1..3858: note = source = /note="Description of Artificial Sequence: Synthetic coding sequence"
  source 1..3858: mol_type = other DNA
atggatttggaagccgccaaaaatggaactgcttggcgaccaacgagcgcagagggcgacttcgaactgggaatcagcagtaagcaaaagcgtaagaagactaagactgtgaagatgataggcgtcctgaccctattccgttacagcgactggcaagacaagctgttcatgtctttaggcactatcatggccatagcacacgggtctggcctacctctcatgatgatagtgttcggggaaatgaccgataagttcgtggatactgctggcaacttttctttccccgtcaatttctccttatcactgctgaaccctggtaagatccttgaagaagagatgacaaggtatgcctactattattctggcttaggtgccggagttttggttgctgcatacattcaggtctctttctggactcttgcggcgggtcgtcagattcgtaaaatacgccagaaattttttcatgctatccttaggcaggagataggctggttcgatattaatgacaccactgagctgaatacacgtcttactgacgatatttccaagattagcgaggggatcggagacaaggtgggaatgttctttcaagcagtagctacttttttcgccggattcatagtgggattcatccgcgggtggaagctaactctggtgatcatggctatcagccccatactggggctatcagccgctgtgtgggccaagattttgagcgcattcagtgataaggaacttgcagcatacgctaaggccggggcagttgccgaagaggcgctgggcgcgatacgcactgtcatcgctttcggaggccaaaacaaggaactagagagatatcagaagcacctcgagaatgcgaaggagattgggataaaaaaggctatctcagccaacatcagcatggggatagcctttcttcttatttacgcctcttatgcgttagccttctggtacggtagcacactggttatcagcaaagagtacacgatcgggaatgcgatgaccgtgtttttcagcatccttatcggagcattttcggtgggtcaagcggccccttgcatagacgcgtttgctaatgcacgaggtgctgcgtatgtgattttcgacattattgataacaatcccaagatcgactcgttctctgagaggggccataagcctgatagcatcaagggaaacctggagtttaacgacgtacatttcagttacccctctcgcgctaacgttaagatactcaaaggcttaaacctgaaggtacagagtggacagacagtggcgctagtggggtctagtggttgtgggaaatccacgacagtccaactgattcaacggctctatgaccctgatgaggggactattaatatagacggacaggatattcggaactttaatgtaaattatctccgggagatcattggggtagtatcacaagaaccagtcctcttttctactacaatcgctgaaaatatttgctatgggcggggaaacgtgaccatggatgaaatcaagaaggccgtgaaagaggccaacgcctatgaattcatcatgaagctgccacaaaagttcgacaccttggtgggggagcggggggcccagctctcaggagggcagaagcagcggattgcaatcgcccgagctctggttagaaacccaaagattctactgctcgatgaggcgacctccgccctggatactgaatcagaagcggaggttcaggccgcactcgataaagctcgcgaaggtcgcaccacaattgtaattgcccacagactgagcaccgttaggaacgcggatgtgatagccggcttcgaagatggggtgatcgtggaacaaggatcccattctgaactgatgaagaaagaaggtgtgtatttcaaactggtgaatatgcagacatccggctcacagatccagagtgaagaatttgagcttaacgacgaaaaagcggccacaaggatggctccgaatggctggaagagtcgactgtttcgtcacagtacacagaagaacctgaagaactcccaaatgtgtcaaaagtccttggatgttgagactgatgggcttgaggcaaatgtgcccccggtctcatttctgaaggtgctgaagctgaacaagacagaatggccctactttgttgtaggcacagtttgtgccatagccaacggaggtcttcagcctgccttcagcgtgatttttagtgaaattatcgctattttcggtccgggcgatgatgcagtgaagcagcaaaagtgtaacatatttagcctcatctttctttttctgggaatcatttcattttttacatttttcctccaggggtttacgttcggtaaagcaggtgaaatcctcacgcggaggttgagatctatggcgttcaaggccatgcttaggcaggacatgtcatggtttgacgatcataaaaatagcacaggagctctttcaaccaggctggccaccgatgcggcacaagtccagggggccactggaacgaggctggctctgattgcccaaaatattgcaaacttgggtacaggcatcatcatttcctttatctacggctggcagttaacactcctgttactggccgttgtgcccatcatcgctgtgagtggcatcgtagagatgaagctgctcgccgggaacgccaagcgggacaaaaaggagctggaagcggcagggaagatcgcaaccgaggcgatcgaaaacatccggaccgttgtgagccttacccaggagcgcaaattcgaatctatgtatgtcgagaagctctatgggccataccgcaattccgttcagaaggcccacatctacggcattacttttagcatctcacaagcctttatgtacttctcctacgctgggtgttttcggtttggtgcctatctaatcgtgaatggccacatgaggttccgggatgtgattctagttttctcggcgatcgttttcggtgccgtcgccctgggtcatgctagctcatttgcacccgattacgccaaggcgaagctctctgctgctcatctgttcatgctgtttgagaggcagccactgatagacagttattcagaggaaggtttgaaacctgacaagttcgaaggcaacataacttttaatgaggtagtgtttaactaccccaccagggcaaacgtgccagttctgcagggattatccttggaagtgaaaaaaggacagaccttggcattggtaggcagctctggatgcggcaaatccactgtggtacagctgcttgagaggttttatgatccactggccggcactgtatttgttgactttggcttccagctcttggatggccaggaagcaaaaaagctcaacgtacagtggctccgagcgcagttaggcatcgttagccaggagcccatattgttcgactgttctattgccgaaaacattgcctacggagataattcgcgcgtcgtaagccaggacgagattgtctcggctgccaaagctgccaatatccaccctttcattgaaacactgcctcataagtacgaaacacgcgtgggcgataagggaacgcaactctctggcggccaaaaacagaggatcgctatagcaagggcactcattcggcagccgcagatacttttgctcgacgaggcgacttccgcccttgacaccgagagtgagaaagtagtgcaggaagcgcttgacaaggctagggaaggcaggacatgtatcgtgatcgcccataggttatcaacaatccaaaatgctgacctgatcgtcgtatttcagaacggaagggtgaaagagcacggcactcaccaacaactgctcgcccaaaaaggcatttacttttccatggtgtccgtgcaagccggcacacagaacctt

SEQ ID NO: 7617 - DNA, 3858 bp, synthetic construct
  misc_feature 1..3858: note = source = /note="Description of Artificial Sequence: Synthetic coding sequence"
  source 1..3858: mol_type = other DNA
atggacctggaagccgccaagaacggcaccgcctggaggccgacatccgccgaaggagacttcgaactaggaataagcagcaaacagaagcgaaaaaagaccaaaacagttaaaatgatcggtgtgctgacactgttccggtacagtgattggcaagacaagctgtttatgtctctgggtaccatcatggccattgcacacgggagcggcttgcccctcatgatgatcgtgttcggcgagatgaccgacaagttcgttgacacagccggtaatttctcatttccagtgaacttttccctgagcttactcaacccagggaaaatactggaagaggaaatgacacgctacgcttattactacagcgggctgggcgccggagttctggtggcagcatatatacaggtcagtttctggaccctggccgccggaagacagatcagaaagataagacagaaattctttcatgccatcctgaggcaggagattggatggttcgacattaacgacactactgaactgaatacaagactcaccgacgatatctcaaagatatccgaaggtattggcgataaggtcggaatgttctttcaagcagttgccacctttttcgccggattcatcgtcggtttcattcgcggatggaaattgacactagttattatggccatttcccctatactcggcttgagtgctgcagtgtgggccaagattctgagtgcattttccgacaaagagttagcagcctacgccaaggctggggctgttgccgaagaggccctgggagctattcggaccgtgatcgctttcggtgggcagaataaagagctcgagcggtaccagaagcacctggaaaacgccaaggagatagggatcaagaaggctattagtgccaacatatccatgggcattgcctttcttctgatttacgctagttatgctctagcattttggtatggctctaccctggtgatctctaaggagtatactattggcaacgccatgacagtgttcttctctatcctgatcggagctttttccgttgggcaggctgccccatgcatcgatgccttcgctaatgcccgtggcgccgcatatgttatattcgacattattgacaacaatccaaaaatcgattcctttagcgaaagaggccataagccagacagcatcaagggcaatctggagtttaacgatgtgcattttagttatccatctcgagcaaatgtcaagattctaaagggcttaaacttaaaggtccagagtgggcagactgtggccttggttggcagttcagggtgtggaaagtctaccactgtccagctgattcagcgactctacgaccccgatgaaggcaccatcaacatagatggacaagacatacgaaattttaatgttaactatttacgagagattatcggtgttgtgagccaggagccagtgcttttttctacaactatagcagagaatatctgctatgggcgcggtaacgtgactatggatgagattaagaaagctgtcaaggaagccaatgcctacgaattcattatgaaacttccacagaagtttgatacactagttggcgaacgaggggctcagctgagtggggggcagaaacagcgtattgccatagctcgcgcactggttagaaaccccaagattctgctgctggacgaagccacaagtgccctagacaccgagtccgaagcagaggtacaagccgcactggacaaagcacgggagggcagaactacaattgttattgcccatcgtctctctaccgtgaggaatgcagatgtgatcgctggatttgaggacggcgtgatagttgagcaaggctctcactccgagctgatgaagaaggagggggtatactttaaactggtgaatatgcagacatctggctcccagatccagagcgaggaattcgaacttaacgatgagaaagcagctactcgaatggcaccaaatggctggaagtcccggctatttagacattcaacccagaagaacttaaagaacagccagatgtgccagaagtctctggatgtggaaaccgatggcctggaagccaatgtgccacctgtgtccttcctgaaggttttgaagttgaacaagacagagtggccctacttcgtcgttggaaccgtgtgtgccattgcaaatggcggcctgcagcccgctttcagtgtgattttctctgagatcatcgccatatttggccccggcgacgatgcagtcaagcaacagaagtgcaacatcttcagcctgatcttcctgttcctgggaattataagctttttcacatttttcctgcaagggtttactttcggcaaggccggggagatcctaactcgacgtctgagaagcatggcttttaaggccatgctgcggcaggatatgtcttggttcgacgaccataagaactctactggtgccttatcaacccggttagccacagacgctgctcaggtgcagggcgctaccgggacccggctagccctgattgctcagaatattgccaatctgggcactggcatcattatatcttttatctacggctggcagctcactctgttgctactggctgtggtgcctatcatagctgtgtccggaatagttgaaatgaagctactggcaggcaatgcaaaaagggataaaaaagaactggaggctgccggcaaaatagccaccgaagccatcgaaaatattaggacagtggtcagtctgacacaggagcggaagttcgaaagtatgtacgtggagaagttatacgggccataccgtaatagcgtccaaaaggcacacatttacggcatcactttttctattagccaagctttcatgtatttctcttacgccgggtgcttccgcttcggcgcttacctgattgtcaatggtcacatgaggtttagggacgtcattctggtgttttctgcaatagtgttcggggccgttgccctgggacatgcctcatcattcgccccagactatgcaaaggctaagctctccgcagcccacctattcatgctcttcgagcggcaaccactcatagacagctactctgaggaggggttaaagcccgacaaattcgagggcaacataacttttaatgaggtggtgtttaactatcctactcgcgcaaatgtgcccgttctgcagggcctgtccttagaagtgaagaagggtcagactctagctctagtgggcagtagcggatgtggcaagtctactgtcgttcagttactggagcgcttctacgaccctttggccggtacagtgttcgtagattttgggttccagctgctggatgggcaggaggccaagaagcttaatgtgcagtggctacgagcccaacttgggatcgttagtcaggagccaattctattcgactgctctattgcagaaaatatcgcatacggagataacagtcgggtggtatctcaggatgaaatcgtgagtgccgccaaggctgccaacattcaccccttcatagagactttacctcacaagtatgagacccgtgttggagacaagggtacacagctgtctggcgggcagaaacagagaattgcaattgcccgcgcattaattcgccagcctcaaatcctgctgttagacgaagccacttccgcactcgacaccgaaagtgagaaggtagtgcaagaggcacttgataaagccagagagggccggacttgcatcgttatagcccatcgtctgagcacaatacaaaacgccgatctgatagtggtttttcaaaatgggagggtcaaagagcatggcacccaccagcagttactggcacagaaaggcatatatttcagcatggtgagcgtccaggccggcacacagaatctc

SEQ ID NO: 7618 - DNA, 3858 bp, synthetic construct
  misc_feature 1..3858: note = source = /note="Description of Artificial Sequence: Synthetic coding sequence"
  source 1..3858: mol_type = other DNA
atggatctggaagccgcaaagaacggtacggcatggcggccgacctcggcggaaggtgattttgagctgggaatttcctcaaaacaaaagagaaagaaaaccaagactgtgaagatgattggtgtcctgaccctcttcaggtacagcgattggcaggacaagttgtttatgtcgctgggtactatcatggcaatagcacacggatcaggcttgcccctcatgatgatcgtgtttggggaaatgactgacaaattcgtggacaccgccggaaacttctcctttccggtgaacttctccctttcccttctcaatcccggcaagattttggaggaagagatgacgcgatatgcatactactactccggtcttggagctggagttctggtggctgcatacatccaggtttccttctggactctggcagctggacggcaaatccggaagatacgccagaagttctttcacgcaattcttcgtcaagaaataggctggtttgatatcaatgacaccaccgagcttaacacccgactgaccgatgatatctcgaagatttcagaaggaattggtgataaagttggaatgttctttcaagccgtggccaccttctttgccggattcatagtggggtttattcggggttggaaactcactctggtgatcatggccattagccctatcctcggtctttcggcagctgtgtgggctaagatactctccgcgtttagcgataaggaactggcggcatacgcaaaggctggcgcagtggcagaggaagcgctgggcgcaatcagaactgtgattgcattcggaggccaaaacaaagaactcgaaagataccagaaacatcttgaaaatgcaaaggagattggcataaagaaagcaatctcagcgaacatatcgatgggtatcgcttttctgctgatttacgcttcatacgcactggcattttggtacggttcgaccctggttatttccaaggaatacaccatcgggaacgcaatgactgtgttctttagtattcttatcggggcattttcggtgggacaagctgcaccatgtattgatgcatttgcaaacgcaagaggagcagcatacgtgattttcgacataatcgacaataacccaaagatcgattcgttttctgagcgtggacacaagccagactccattaaaggaaatcttgagtttaatgatgtgcatttctcatacccatccagagctaacgtgaagattcttaagggactgaatctgaaggtgcagtccggtcagactgtcgcccttgtaggatcctcggggtgcggtaagtctactactgttcaacttatacagcgcctttacgatccagacgaaggtaccatcaacatcgacggtcaggatatacgtaacttcaatgtgaactacttgagggagatcatcggcgtggtatcccaagagcctgtcctgttttcgaccaccatagcggagaacatatgctacgggagaggtaatgtcactatggacgaaatcaagaaggcagtcaaggaagcaaacgcatacgagtttatcatgaagctcccacagaagtttgacacccttgtgggagaaagaggggcccaactgtccggagggcagaagcagagaattgcaatcgcacgtgccctcgtgcggaaccctaagatactccttctggatgaggcaacctccgcacttgatactgaatcggaagctgaggtacaggcagcacttgataaagcgcgggagggccgaaccactattgtgattgcacatagattgagtactgtccgaaatgccgatgtcattgccggattcgaagatggggtgattgtcgaacagggatcgcacagcgagcttatgaagaaggagggagtgtacttcaaactggtcaacatgcagacttcaggatcccaaatccagtctgaagagttcgagctgaatgacgaaaaagcagcgactcgcatggctcccaatggatggaagagcagacttttccgacattcaacgcaaaagaacctgaagaacagtcaaatgtgtcaaaagtcactggatgtcgaaactgatggtcttgaggcaaacgtgccccctgtgtccttcctgaaggtgcttaagctgaataagacggaatggccgtactttgtcgtcgggaccgtatgcgccatagccaacggcggactccaacctgctttttcagtcatattctctgagataattgccatttttggtcctggagatgacgccgtgaaacaacagaaatgtaacatcttttcgttgatatttctgttccttggaatcatttcctttttcacgtttttccttcaagggtttacttttggaaaagccggcgaaatcctgactcgcagactgcgcagcatggcattcaaggccatgctcaggcaagatatgagctggtttgatgaccacaagaatagcaccggtgcacttagcacccgcctggcaaccgacgccgctcaggtgcaaggagcaactggtaccaggcttgcacttattgcccaaaacatcgctaatcttgggacgggtatcataatcagcttcatttacggctggcaacttacccttttgctgctcgcagtggtgcccatcattgcggtgtcgggaattgtggaaatgaaactgctggccgggaacgcaaagagggataagaaggaacttgaggcggctggtaagattgcgaccgaagccattgaaaacattcggaccgtcgtgtcgcttacccaggaacgcaagtttgaaagcatgtatgtggaaaagttgtacggaccgtaccgaaattcggtgcaaaaagcacacatttacggcatcacttttagcatttcccaggcattcatgtatttctcatacgccggatgtttccggtttggggcctaccttattgttaatggccacatgcgcttcagagacgtcattctcgtcttttccgcaatcgtctttggtgcagtggcactcggccatgcctcatcgtttgctcccgattacgcaaaagcgaagctgtccgctgctcatctgtttatgttgttcgaacgccaacctcttatcgactcgtactcggaagagggccttaagcctgacaagtttgaaggaaacattaccttcaatgaagtggtctttaactacccaactagggcaaacgtccccgtgctgcaaggtttgtcacttgaagtgaagaaaggccagacgctggcactcgtgggatcatccggttgtgggaagagcactgtggtgcagctccttgaacgcttttacgatccgctggctggaaccgtgtttgtggattttggatttcagttgctggacggtcaggaagcaaaaaagctcaacgtccaatggctgagggcacaactgggtattgtctcccaggaacctattctttttgattgcagcatcgccgaaaacatcgcttatggcgacaatagcagagttgtgtcccaagacgaaatcgtcagcgcagctaaagcggcaaacatccatccctttattgaaacgctccctcataagtatgaaactcgcgtgggggataagggaacccagctgtcgggaggacaaaaacaacgcattgcgattgcgcgggcgctcatccgccaacctcaaattctcctcctggacgaggccacttctgcactcgataccgaatcggaaaaggtcgtgcaggaggcactggataaagcacgggaggggagaacttgtatcgtgattgcccatagactgagcactattcaaaatgcggatttgattgtggtgtttcaaaacggcagagtaaaagaacacggaacccatcagcagcttctcgcacaaaaaggtatttacttttcgatggtaagcgtccaggcgggaacccaaaacctc

SEQ ID NO: 7619 - DNA, 3858 bp, synthetic construct
  misc_feature 1..3858: note = source = /note="Description of Artificial Sequence: Synthetic coding sequence"
  source 1..3858: mol_type = other DNA
atggacctggaagctgctaagaacggaaccgcctggcggccaacatccgccgagggcgacttcgagcttggaatatcctctaagcagaagcgcaaaaaaaccaagaccgtgaaaatgatcggagtcctgacactgttccgatacagcgactggcaggataaactctttatgtcacttggtactatcatggcaattgctcacggctctgggctgcctctcatgatgatcgtcttcggcgagatgactgataaatttgtggatactgccgggaattttagttttccggtcaattttagtctcagcctcctcaacccaggcaaaattcttgaagaagagatgacacgctatgcttattactacagcggactaggcgccggcgtcctcgtagccgcctatatccaggtgagcttctggaccctcgcagcgggcaggcagatcaggaagatcagacagaagttcttccacgcgatcctgcgccaggaaatcggctggtttgacataaacgatactacagagctgaatacccgactcacagacgacatttcgaaaatatcagagggaataggcgataaagtgggaatgtttttccaggctgtagccaccttcttcgcgggtttcatcgtgggattcataagagggtggaaactcacactcgtgataatggctatctctcccatcctgggactcagcgcagccgtctgggctaagatcctcagtgcctttagtgacaaggaactagcggcatacgccaaagcaggggccgtggcagaggaggccctcggggcaattcggactgtcatagcctttggaggccagaataaggagctcgaacgatatcagaaacatctggaaaacgctaaggagattggaattaaaaaggcaatatctgcaaacatctccatgggtattgctttcctactgatctatgctagttacgccttggcattttggtatggatcaacactggtcatctccaaagaatacactattggcaacgccatgactgtattcttttccattctgataggtgctttctccgtcggacaggctgctccctgcattgacgcatttgctaacgcccgtggagcagcttacgtgatcttcgatatcatcgacaataaccctaaaatcgattcgttctctgaacggggacacaagcctgatagcataaaaggaaatctggaattcaacgacgtacacttcagctatccaagtagagctaatgtgaaaatcctcaaggggcttaacttgaaggttcagtctggacagacagtggcacttgtaggcagctcaggctgtggtaagtccacgaccgtgcaacttatccagagactatatgatcctgacgaaggcaccataaatatcgatggacaagacatccgtaattttaatgtcaattacctgagagaaattatcggcgtggtcagccaggagccagtgttattttcaacgaccatcgccgagaatatttgctacgggagggggaatgtaacgatggatgagattaaaaaggctgtgaaggaggccaatgcatatgagttcatcatgaagcttccccaaaagttcgacactctggtaggggagagaggcgcccagctgagcggcggtcagaaacagcggattgccattgcccgggcccttgtgcgcaatccgaaaatactccttctggacgaggcaacatctgcattggacacggaatccgaggctgaggtgcaggccgccctggataaagcaagggaaggtcggaccaccatagtgatcgcacatagattgtcgactgtaaggaatgccgatgtcatagctggcttcgaggacggagtcatcgtcgagcaggggtctcatagcgaactgatgaagaaggagggagtctacttcaagctagtcaatatgcagacctcaggttcgcaaatacaatcagaggagttcgaactgaacgacgagaaagccgcaacccgcatggccccaaacggatggaagtcccgcctttttcggcatagcacccagaaaaacttgaaaaacagccagatgtgtcagaaatccttagacgtggaaaccgacgggctcgaggccaatgtgccccctgtctcctttctgaaagtcttaaaattaaacaaaaccgagtggccatacttcgttgtgggcactgtttgcgctatcgcaaacggtgggctccagccagccttctcggttatattcagcgagatcattgccattttcgggcccggagacgatgccgtgaaacagcagaagtgtaatatcttttctctgatctttctgtttctaggcatcatcagcttcttcacattttttctccaggggtttacctttggcaaagcaggggagatccttaccaggagactcagaagcatggcctttaaggccatgcttagacaggatatgagctggtttgatgaccacaaaaatagcaccggagctctctccactagactggcgacagacgccgcccaggttcagggggcaaccgggacccggctggcacttatcgctcagaatattgccaacctagggaccggaatcattatttcgttcatatatggttggcaactgaccctgctcctgttggcggtcgttccaatcatcgcagtctccgggattgtcgagatgaagctgctggcaggaaatgccaagcgcgataaaaaagaattagaagccgccggaaagatcgccacggaggccatcgagaatattagaaccgttgtgtccctgacccaggagcgtaagttcgaatctatgtatgtagaaaaattgtatggaccttataggaatagcgtacagaaggctcacatctatggaattaccttcagtatttcccaggcattcatgtatttttcttacgccggatgctttcgttttggtgcttacctaatagtgaatggccatatgaggttccgcgacgtgatactggtgttcagtgctattgtgtttggtgctgttgctctgggccacgcaagctcattcgccccagactacgcaaaggcgaagctcagcgctgcccatttgtttatgctgttcgagcggcagccactgatcgatagctatagcgaagaagggcttaagccagataaatttgagggcaacattacttttaacgaggtcgtcttcaactaccccacgagagcaaatgtccccgtgctgcaaggcctctcgcttgaggtgaagaaaggacaaacactagccctcgtgggatcaagcggatgcggaaaaagtacggtggttcagctgctggagaggttttatgatccgttggcaggcacagtgttcgtggacttcgggtttcagctattagatgggcaggaggcaaagaagcttaatgtgcaatggctgagagcccagctgggcatcgtgtcccaggagccaatcctcttcgactgttcaatcgcagaaaacatcgcatatggcgataactcaagagtggtgtctcaagacgaaattgtgtccgcagctaaggctgccaatattcatccattcatagaaacattaccccacaagtatgagactcgcgtgggggacaaagggactcaattgtctggtggccagaagcagcggatagctatcgcccgggcactcatccggcagccacaaatcctactgctcgacgaggccactagtgcccttgataccgaatcagaaaaagttgtccaggaagcacttgataaagctcgggaggggcgcacctgcatcgtaatagcccataggctgagcacaattcagaatgctgacttgattgtggtgttccagaatggcagggtcaaggaacatgggacacatcagcagttgctggcacagaaaggaatatactttagcatggtgagcgttcaggccgggactcaaaacctc

SEQ ID NO: 7620 - DNA, 3858 bp, synthetic construct
  misc_feature 1..3858: note = source = /note="Description of Artificial Sequence: Synthetic coding sequence"
  source 1..3858: mol_type = other DNA
atggacttagaagcagcaaagaatggtactgcctggaggccaacatctgctgaaggcgattttgaattaggcatctcctctaagcagaaaaggaagaagactaagacagtgaaaatgatcggcgtgcttactttgtttcgttattcggattggcaagacaagctgttcatgtctctcggcacaataatggccattgctcatggatctggtctcccgttgatgatgattgtgttcggtgagatgaccgacaagttcgttgatacagcaggcaacttttcattccctgtcaactttagcctctcgttgctaaatcccggaaagattctggaggaagagatgactaggtacgcttactactactccggtttgggagctggcgtgttggtcgctgcgtatatccaagtttcattttggactctcgcagcaggacggcaaatccgtaaaatccgtcaaaagttctttcacgctatactaagacaggaaattggatggttcgatataaacgatactacagaacttaacacacgcctgactgatgacatttctaaaatttctgaaggtattggtgacaaggttggaatgttcttccaggctgtggccactttctttgctggttttattgttggctttataaggggttggaagctcaccttagtgataatggcaatatcccctattttgggactaagcgcggctgtttgggctaagatactttcagcttttagtgataaggaactcgctgcttatgctaaggctggtgctgttgctgaagaggctcttggggccattcgtaccgtcatcgcatttggtggccaaaacaaagaacttgaacgatatcaaaaacacctagagaatgccaaagaaatcggaattaaaaaggcaatatctgctaacatatcgatgggtattgcttttctccttatatatgctagttacgctttggccttctggtacgggtcgacccttgtaatctccaaagaatatacaatcggcaatgctatgaccgtttttttttccattctgatcggcgctttttctgtcggacaagcggctccctgcattgatgccttcgcaaatgctcgtggtgcagcttacgtgattttcgacataatcgataataaccctaaaattgatagcttctccgagaggggacacaagcccgattcaattaagggcaatctcgagtttaatgatgttcacttttcgtaccctagtagagccaacgttaagatcttgaaaggccttaacctgaaagttcagtcagggcaaactgtggctttggttggcagtagcggctgcgggaagagcaccaccgttcaattgattcagaggttgtacgacccggatgaaggtacaattaatatcgatggacaagacatacggaatttcaacgttaactatttacgtgaaatcatcggtgttgtttcccaagaaccagtgctgttctcgaccacaatcgctgaaaacatctgctacgggaggggaaacgtgactatggacgaaatcaagaaagcagttaaagaggctaatgcatacgaattcatcatgaaattgcctcaaaaatttgatacactggtgggagagaggggtgctcagttatccggaggccaaaaacagcgaatcgctatcgctagagcattggttagaaatcctaaaattttgctcctggatgaagctacatctgctcttgatactgaatctgaggctgaggttcaggctgcacttgacaaggcaagggaaggaaggacaactattgttatagcacacaggttgagcacagtgcgtaatgccgatgtgattgctggatttgaagatggcgttatcgtggaacaaggatcacactctgagttgatgaagaaggaaggtgtgtactttaagttggtgaacatgcagacttcaggttcccaaatacagtcagaggaatttgagctcaatgatgaaaaagccgcaacaagaatggcacccaacgggtggaaatccaggctgtttcgacatagtacccagaaaaatttgaagaactctcaaatgtgccaaaaatccttggacgtcgaaaccgatggccttgaagcgaacgtccctcccgtgagtttcctaaaagtactgaaactaaataaaacagaatggccttattttgtagttggcactgtgtgtgctattgctaatggtggacttcaaccagcttttagcgttatattttctgaaataatagctatcttcggccctggtgatgatgcggttaagcaacaaaagtgcaatattttctcactcattttcctctttttgggtataatttcatttttcacattttttttgcaaggtttcacattcggtaaagccggtgagattctcacgaggcgtcttagatctatggcctttaaggctatgctacgtcaggatatgtcttggttcgatgatcataaaaactcaactggtgcccttagtacaaggcttgctaccgatgctgcacaagttcagggtgctacaggtactcgtttggcattgattgctcagaacattgctaatcttggaacaggtatcataatatccttcatttacgggtggcagttaacattgttgctgcttgcagtggtccctatcatcgcggtctccgggatcgttgaaatgaaattactagctgggaatgctaaacgagacaaaaaggagctcgaagcagccggaaagattgccaccgaggcaatcgaaaatattaggactgtagtttcattgacgcaggaaaggaaatttgaaagcatgtacgtcgagaaactttatggaccataccgaaatagcgtgcagaaggcgcacatctacggtatcactttttctattagccaggcatttatgtatttcagctacgcaggttgctttaggttcggagcttacttgatcgtaaatggacacatgaggttcagagacgttattcttgtctttagtgcaattgttttcggagcggttgccctcggtcacgccagttctttcgctcccgattatgccaaagccaagctttccgctgctcatttgttcatgctatttgaacgccagcctcttattgattcttattcggaagaaggattaaagcctgacaagtttgaaggcaacatcactttcaatgaggttgtgttcaactacccaaccagggcaaacgttcctgttcttcagggactatcattagaggttaagaagggccaaaccctagcgctcgttggatcgtctggttgcgggaaaagtaccgtagttcaactcctcgaacgcttctatgatcctctagctggcacagtgtttgttgacttcggattccaacttctggacggtcaggaagctaaaaagcttaatgttcagtggttacgtgctcaactagggattgtgagtcaggagccaattcttttcgattgcagtatagcagaaaatatagcctatggtgataattccagagtggttagtcaagatgagatcgtgtcagccgctaaagctgctaacatccatcccttcatcgagacattgcctcacaagtacgagacacgtgttggggacaaaggtacgcaactaagcggtggacagaagcagagaattgctatagccagggcactcatcagacaaccacagatattgttgctggatgaagctacttccgctttggacaccgaaagtgagaaggtggttcaggaggctcttgataaggctagagaggggaggacctgcatcgtcattgctcacaggctaagcacaattcaaaacgcggacctcatcgtagttttccaaaatggtcgtgttaaggaacatggcacccatcagcaacttctcgcacaaaaggggatctatttttcaatggtcagcgttcaggccgggacccagaacttg

SEQ ID NO: 7621 - DNA, 3858 bp, synthetic construct
  misc_feature 1..3858: note = source = /note="Description of Artificial Sequence: Synthetic coding sequence"
  source 1..3858: mol_type = other DNA
atggaccttgaagccgcgaaaaatggcactgcgtggaggccaacctctgcagaaggtgattttgagctgggcatctcaagtaagcagaaacggaagaaaaccaagacagttaaaatgataggcgtcctgacgctgtttagatacagcgactggcaagacaagcttttcatgagccttggaactatcatggctattgcccacggatctggcttgccactcatgatgatagtttttggagagatgacggataagttcgtggacacggccggcaattttagctttccggtgaacttcagtctcagtctgctcaatcccggcaagatcctggaggaagaaatgaccaggtacgcttattattactcgggcttgggagccggtgtcctcgtggcagcctatattcaggtttctttctggacacttgctgccggtagacagatacggaaaatccggcagaaattctttcacgccattctaagacaggagatcggctggtttgatattaacgatacgacggaactgaacacaaggttgaccgacgatatctccaaaatctccgagggtataggggacaaggtgggaatgtttttccaagcggtagccacattctttgcaggcttcattgtgggctttatccggggatggaagctgacactggtcattatggccatttcgcctatcctgggcctgtcagctgccgtgtgggccaaaatactaagcgccttctctgataaagaacttgcagcctacgcgaaggcaggagcagtagccgaagaggcactcggagccatccgcactgttattgcatttggtggccagaataaggagctggaaagatatcagaaacacttagagaatgcaaaggaaatcggaattaagaaagctatctcagccaacatctctatgggaattgcatttcttctcatatatgcatcctacgccctcgcattttggtatggatctacgctggttatctcaaaagaatacacaataggcaacgcaatgactgtgtttttttctatcctcattggtgccttcagtgtgggacaggccgcaccgtgcattgatgcctttgctaatgcgagaggagccgcatatgttatttttgacattatcgacaacaaccctaaaatcgacagttttagcgagaggggtcacaagccagattccatcaagggcaatctcgagttcaatgatgttcacttctcatatcctagtcgtgccaacgtgaaaatactgaaagggctgaacctgaaggtccagtcagggcagaccgtcgccttggtcggaagcagtggatgcggaaaaagtacgaccgttcaactgatccagcggctatatgatcccgatgaaggcacgatcaatattgatggccaagacatcagaaactttaacgtcaactacctcagggaaatcataggcgtggtttctcaggagcctgtgctgttctcaaccactattgccgaaaatatctgttacgggcgcgggaacgtaacaatggatgagatcaagaaagctgtgaaagaagcaaacgcctatgagttcataatgaaactgccacagaaatttgacacattggttggcgagagaggagcacagttgagcgggggccagaagcagagaattgctattgcgcgcgcgctcgtacggaaccccaaaatcctgttactggacgaggccacgagtgcccttgacacagagagtgaggccgaggtgcaagctgcgctggacaaggcccgtgaagggcgtactaccatagtgatagctcaccgtctctccacagtccgcaatgctgatgtcattgcggggttcgaagatggagttatcgtggagcaaggctctcacagcgagcttatgaagaaagagggcgtctacttcaaactcgtcaacatgcagacgtctggctcacagattcagagcgaagagttcgagttaaacgacgaaaaggctgcaacccgaatggctccaaatggatggaaaagtaggctgtttaggcattcgactcaaaagaacttgaaaaattcacagatgtgccaaaagagtctggatgtggagaccgatggattggaggctaatgtcccccctgtgagtttccttaaagtactcaaactgaacaagacagagtggccgtacttcgtggtaggtactgtctgcgctatcgcaaatgggggattgcagccggccttttctgtgatcttcagcgagatcattgctatttttggacccggagacgatgccgttaagcagcagaagtgcaatatctttagcctgatatttctatttctcgggattatttcctttttcacgtttttcttgcagggatttactttcggaaaagccggagaaattttaactcgccgccttcgaagcatggcatttaaagcaatgctgcggcaggatatgtcctggttcgatgatcacaagaattccactggagctttaagcacgaggttggcaaccgatgccgcccaggtgcagggtgccacggggacccgcctcgcattaattgctcagaatattgccaacctgggaacagggatcattattagttttatttatgggtggcaactcaccttactgctgctggccgtggtccccatcattgcagtttccggaattgttgagatgaaactcttagcgggaaatgccaaaagggataaaaaggaactcgaagctgcgggtaaaattgcaacagaggccatagaaaacatacggacagtagtgtctttaacccaagaacgaaaattcgaatcaatgtacgtggagaagctctatggtccttatcgtaacagcgtgcaaaaagcccacatatatggcatcacgttcagcatttcacaagcatttatgtattttagctatgcggggtgcttccggttcggggcctacttaatcgtgaatggacatatgagatttcgggacgtgattctggtttttagtgccatcgtgttcggagccgtggctctgggccatgcaagttccttcgcccctgattatgctaaggccaagttgtccgccgcacatctattcatgctcttcgagcggcagcccctcatagacagctattcagaagagggcctcaaacccgataagtttgaggggaatataacctttaatgaggtggtcttcaactacccgactagagcgaatgtacctgtcctccaaggactgtcactcgaagttaaaaaaggccaaacgcttgccttagtgggcagttccggttgcggaaagtcaacggtcgtgcagttgctggaacggttttatgacccgctggctgggactgtgtttgtagactttggctttcagttgttagatggccaagaagcaaagaaactgaatgtgcagtggctgcgcgcccagttgggaatcgtgtcccaagaaccaatcctctttgattgttctatcgcagagaatattgcctatggcgataactctagagtggtgagtcaggacgagatcgtgtctgcggcgaaagccgccaacatccacccattcattgaaactttaccccacaaatatgagacccgcgtcggagacaaaggaactcaactgtcagggggtcagaaacagcgaatcgctattgctagagctttgattcgacagccccaaatattgctcctggatgaagccacatctgcgctggacaccgaatcagaaaaagtagtgcaggaggcgctggacaaggctcgtgaggggcggacttgcattgtgatcgctcataggctcagcactattcagaacgccgacctgattgtggtattccagaatgggcgtgtgaaggaacatggcacacatcaacagctgctcgcccagaagggaatttatttcagcatggtatcggtccaggcaggcacccagaatctc

SEQ ID NO: 7622 - DNA, 3858 bp, synthetic construct
  misc_feature 1..3858: note = source = /note="Description of Artificial Sequence: Synthetic coding sequence"
  source 1..3858: mol_type = other DNA
atggatctcgaagccgcaaaaaacggtacagcctggaggccaacatctgccgagggtgactttgaactgggcatctcttccaagcagaagaggaagaagactaaaactgtgaagatgatcggtgttctgaccctttttcgttactctgactggcaggacaaactgtttatgagcctcggtaccattatggccatagcccacggctccggactgcctttgatgatgatagtcttcggcgagatgaccgataagtttgtggacaccgcaggaaatttctctttccctgtgaacttcagtctctctttgctgaatcccggcaagattctggaggaagagatgaccaggtacgcttactattattccggtttgggcgcaggtgtcctcgtagctgcctacattcaagtatctttttggactctggccgcaggccgccagattcgcaagattcgccagaagttctttcatgccattttgcgccaagaaattggttggtttgacataaatgatacaaccgagctgaacactaggctgaccgatgacatcagtaaaatctccgagggtataggtgataaagtgggtatgttcttccaggctgttgccaccttcttcgctggtttcatcgtgggcttcatcagaggatggaagcttaccttggttatcatggccatctcccctatcctgggcttgtccgctgcagtgtgggccaaaattctcagtgcctttagcgataaggagctggcagcttatgccaaagcaggagctgtagccgaagaggcccttggcgctatcagaactgttatcgccttcggcggacaaaacaaggagctggaaaggtaccagaagcacctggagaacgctaaggagataggtatcaagaaggccatctctgccaacatcagcatgggaatcgcttttctgctgatttatgcctcttacgccctcgctttttggtacggatccactctggttatcagcaaggagtacaccatcggcaacgctatgaccgtgtttttctccattctgattggagccttttccgttggacaagcagctccatgtattgacgctttcgctaacgccaggggagctgcctatgtcattttcgacataatcgataataatcctaagatcgactccttctcagagcgcggtcataagcctgactcaatcaaaggtaatcttgagttcaacgatgttcatttttcctacccttcaagggctaatgtgaaaattctgaagggactgaacctcaaagtgcaatctggacagaccgtagcactggtgggatctagcggttgtggtaagtctactaccgtccaattgatccaacgtctctacgacccagatgagggtactattaacatagatggccaggatatcaggaattttaatgtgaactacctgagggagattatcggtgtggtttctcaggagccagtgctcttctccacaacaattgcagaaaacatctgttatggaagaggaaacgttaccatggatgagatcaaaaaggccgtcaaggaggccaacgcttacgagttcatcatgaaattgccccagaagttcgataccctggtgggcgagcgcggcgcacaactctcaggcggtcagaagcaacgtatcgccatcgcacgtgcccttgtacgcaaccctaagatcctgctccttgacgaagctaccagcgcacttgacacagaatctgaggctgaagttcaagccgcactcgacaaagctagagaaggacgtacaactattgtcatagctcacagactgtctacagtccgtaatgctgatgtgattgctggattcgaagacggagtcatagtggagcagggatcccattccgaactgatgaaaaaggaaggagtttactttaaactggttaacatgcagacctctggttcacagatccagtccgaggagtttgagctcaacgacgagaaggccgccaccaggatggcccccaatggttggaagtcccgcttgttcagacactctactcaaaagaatcttaagaactctcagatgtgtcagaagagcctcgacgtcgagacagacggtctggaggccaatgtgccacctgtctcattcctcaaggtactgaagctgaacaagaccgagtggccttattttgtcgtcggaactgtatgcgccattgctaacggcggcctgcagcccgcattctccgtaatcttctcagaaatcattgcaatcttcggacctggagacgatgccgtcaagcagcagaagtgcaatatcttcagtcttatcttcctctttctcggtataatctctttcttcactttttttctgcaaggcttcaccttcggtaaagctggagagatcctgactaggagactcaggtctatggctttcaaggccatgctgagacaggacatgagttggtttgacgaccataagaactccacaggcgcactcagcaccaggttggcaacagatgcagcacaagtgcagggtgctaccggaactagactggctcttattgcccaaaacattgccaatctcggaactggtattataatcagctttatttatggttggcaattgacactcctgttgcttgccgtggtgccaatcattgctgtctcaggaatcgtagaaatgaagcttctggcaggcaatgcaaagagggataagaaggagcttgaggccgctggaaaaattgctactgaggcaatcgagaacattcgcacagttgtatccctcacacaggaacgcaagttcgaaagcatgtacgtagagaaactttacggaccctaccgcaactccgtgcagaaggcccacatctacggcattactttctcaatttcacaggccttcatgtacttttcatacgctggctgcttcaggttcggcgcctacctcatcgtgaatggccatatgcgtttccgcgatgttatcttggtcttctctgccattgtgttcggtgctgttgccctgggtcacgcttcatctttcgctcctgattacgccaaggccaaactgagtgccgcccacttgttcatgttgttcgagagacagccactcatcgattcttactctgaggagggcctgaagcctgataaattcgaaggcaatataaccttcaatgaagtagtgtttaactatcccacacgcgctaatgtgcccgtgcttcagggcctgagcctggaagtcaagaagggacagactctcgctctggtgggatcaagtggctgcggcaagtcaactgtggtgcagctcctcgagaggttctacgacccacttgccggcacagtttttgtggatttcggcttccaactcctcgatggtcaagaagccaaaaagttgaacgtgcaatggctgagggcccagctgggtatcgtgagccaagagcccatattgttcgattgttcaatcgccgagaacatcgcttacggcgacaattcaagagtagtgtcacaggacgagatcgtcagcgcagccaaggcagctaacattcacccttttattgagaccctgccacataagtatgaaacaagggtaggcgacaaaggaacccagctttccggcggacagaagcagaggattgctattgcaagagccttgatcagacagccacaaatccttctcctcgacgaggcaacaagtgcacttgacacagagtctgagaaggtcgttcaggaagctcttgacaaggcccgcgagggacgcacctgtatcgttatcgcccaccgcttgtccaccatccagaacgccgatttgatagtcgtgtttcaaaacggacgtgtgaaggaacacggcactcaccagcaactgctcgcacagaagggtatatatttcagtatggtaagtgtgcaggctggtacccagaacctc

SEQ ID NO: 7623 - DNA, 3858 bp, synthetic construct
  misc_feature 1..3858: note = source = /note="Description of Artificial Sequence: Synthetic coding sequence"
  source 1..3858: mol_type = other DNA
atggacttggaggctgccaagaatggtacagcttggaggcccacatccgcagagggcgacttcgagttgggaattagttcaaaacagaagagaaaaaagactaagaccgtgaaaatgattggtgtcctgactctgttccgttattccgactggcaggataaactttttatgagtttaggtactataatggctattgcacatggatcaggactgcctcttatgatgattgtttttggcgaaatgacagataagttcgtcgacaccgcgggcaatttcagttttcccgtgaacttctctctttctttgctcaaccccggaaaaatactcgaggaagaaatgacccggtatgcttattactatagcggattgggtgccggcgtgctcgtcgccgcctacatccaggtgtctttctggacgctcgcggccggaagacagattaggaagatcagacagaaattttttcacgctattcttcgccaggagattggatggtttgacattaacgacactacagaattgaacacccgcttaactgacgatattagtaaaatttccgaaggaatcggcgacaaggtgggaatgttttttcaggcggtggctacgttctttgcagggtttattgttggattcataagaggatggaagctcaccctggtaattatggccattagtcccattttgggcctgtccgcagccgtgtgggccaagattttaagtgccttcagtgacaaggagctcgcagcgtacgccaaggcgggcgccgttgccgaggaggccctgggcgctatccgcacagtgattgcctttggcggccagaacaaagaattggagaggtaccaaaagcatttggagaatgcaaaggaaatcggcattaagaaggcaatttctgcaaatatctctatgggtatagcattcctgcttatatacgcttcttatgcccttgctttttggtacgggagtactctggtgatcagtaaggagtacaccattggcaatgccatgacagtcttcttcagtattctcatcggagcctttagcgttggacaggcagcaccctgtattgatgccttcgccaacgcgcggggcgccgcttacgtgattttcgatataatagacaataatcccaaaatcgatagtttcagtgaacgcggccacaagcctgattcaatcaagggcaatcttgaatttaacgatgtgcacttttcatatccctccagagccaatgtgaagatactcaagggcctaaacctgaaggtgcagtctggacagacagtggctctggtcggttcttccggatgtgggaagagcaccaccgtgcagcttattcagcgtctgtatgatcccgacgagggaactattaacatcgatgggcaggatataaggaacttcaatgtcaactaccttagggagatcattggcgtggtctcgcaggaacccgtccttttttcaaccaccatagctgagaacatatgttatggaaggggcaacgtgacaatggatgaaataaagaaggccgtgaaagaagctaacgcctatgaatttatcatgaagctcccacagaagttcgatacccttgtaggtgagaggggagcccaattgtctggtgggcaaaagcagcgtatagctatagctagagcactggttaggaaccccaaaattctactcttagatgaagccacatcggctctggacaccgaatctgaggctgaagtccaagccgcactggacaaggctcgcgagggcagaactaccatcgttatcgctcacaggctgtccacggtgcggaatgcagacgtgattgcgggatttgaggatggcgtcattgtcgagcaggggtcccatagtgaattgatgaagaaagagggtgtttatttcaagctggtcaacatgcagacatccggatcccagattcagtccgaggagttcgaactgaacgacgagaaggcagccacgcggatggctccaaacggatggaagtcccgactgttcaggcattctacacaaaaaaaccttaaaaattctcagatgtgccagaagagcctcgacgtggagaccgatggtctggaggctaatgttccacccgtgagctttctgaaagtgctaaagctcaacaagactgagtggccctacttcgtggtaggcactgtgtgcgcaatcgccaatggtgggctgcagccagccttctcagtaatctttagcgagatcattgcgatttttggacctggtgacgacgcagtgaagcagcagaagtgcaacatcttctccctgatctttttgttcctaggaattatttcgttcttcacattttttctccaaggctttactttcgggaaagctggcgagatcctaacccggcgcttgcgttctatggcattcaaagctatgctcagacaagatatgagttggtttgacgaccataagaattccacaggagccctcagtacacgcctagcaactgacgcagcccaggtacagggcgccacaggaacgcgtctggccctcatagcccaaaatatagccaaccttggcacaggcattattatctcctttatatatgggtggcagctgacgctgctgctgctggctgtcgtccctatcatcgccgtgtcagggattgtcgaaatgaagctcctggccgggaatgctaagagggataaaaaggagctggaggcggccggcaaaatcgccacggaggcaatagagaacatcagaacagtggtgtctttaacccaggaacgcaagttcgagagcatgtacgtggagaaactttatggtccatatagaaacagtgtgcagaaagcccacatttatggtattaccttctctatctcccaggctttcatgtatttttcgtatgccggctgctttcggtttggtgcatatctaattgtcaatggtcatatgcggttcagagatgtgatattggtgttttcggcgatagtctttggtgcggttgccctgggccacgcttccagctttgctcctgactacgccaaagcaaaactgagcgccgcccacctgtttatgctctttgaaaggcagcccttgattgatagttacagtgaggaagggttaaaacccgacaaattcgaggggaatatcacgtttaatgaggttgtgttcaactacccgaccagggctaacgtgcctgtcctgcagggactgagcctcgaagtgaagaaaggccagactctagccttagtcggcagttccgggtgcggcaagtcaacagtggtccaactgctcgaaaggttctacgatccacttgcaggtacagtctttgtggattttggattccagttgttagacggtcaggaggccaaaaagctgaacgtccagtggttgcgcgctcagttaggaattgtgtcccaggagccaattctgtttgattgtagcatcgcagagaatatcgcctatggcgacaatagtagagtggtaagccaggacgaaattgtatcagccgccaaggccgctaacattcatcccttcatcgagaccctacctcacaaatatgagactagagtcggagataaggggacgcagctgtccggcggccaaaagcaacgaatagcgatcgcaagagcactcatcaggcagccccaaatcctgctgcttgacgaggcgaccagcgcccttgacaccgagtcggagaaggttgtgcaggaggctctcgataaagcccgcgaaggacggacctgtatcgtaatcgctcacaggctatctaccattcagaatgcggacctcattgtagtctttcagaatgggcgagttaaggaacacgggacacatcaacagcttttagcacaaaaaggcatctacttttccatggtgagcgtccaggccggaactcaaaacctc

SEQ ID NO: 7624 - DNA, 3858 bp, synthetic construct
  misc_feature 1..3858: note = source = /note="Description of Artificial Sequence: Synthetic coding sequence"
  source 1..3858: mol_type = other DNA
atggaccttgaagcagcgaagaatggcactgcgtggcgtcctaccagcgcagagggtgactttgaactcgggatatcaagcaagcagaagcgaaaaaagactaaaactgtcaagatgattggagtcttgaccctgttcagatacagcgactggcaggacaagctgtttatgtcgctgggcactattatggcaattgcccatgggtcgggactgccgctgatgatgattgtctttggagaaatgaccgataagttcgtggacacggccggaaacttttcctttcccgtcaacttcagcctttcgctgttgaaccctggaaaaatcttggaagaggaaatgacccgatacgcatactactactcgggcctcggagcaggagtccttgtggcagcctacattcaagtgagcttctggactctggcagccgggcgccaaattcgcaagatcagacagaaattctttcatgcgattctgcgtcaagaaattggatggtttgacataaatgacactactgaattgaacactagacttaccgatgatatttccaagatcagcgagggaataggggacaaggtggggatgttttttcaagcagtggcaacttttttcgcaggatttatcgtgggtttcattagggggtggaagctgaccctggtgattatggcaatctcgccaattctgggactgtcggctgcagtctgggctaagattctgtcggcattcagcgacaaggagctggcagcatacgcaaaagcaggtgcagtcgcagaagaagccctcggcgccattaggacggtgattgcattcggagggcaaaacaaggaactggaacgataccagaagcacctggaaaacgccaaagagatcgggattaagaaagcaatttccgcaaacattagcatgggtattgcgtttctcctcatctacgcatcctacgcccttgcattttggtacggcagcacgctcgtgatttcgaaggaatacaccatcgggaacgcaatgaccgtctttttctctattcttatcggtgcattttcagtcggacaggcggcaccgtgtatcgacgcttttgcaaatgcacggggtgcagcttacgtgattttcgacataatcgacaataacccgaaaattgattccttttccgaacgcggacataaaccagactccattaagggcaaccttgagtttaacgacgtccattttagctacccttcgagagcaaacgtgaagatcctgaaaggactcaatctgaaggttcaaagcggccagaccgtggcattggtgggaagctcggggtgtggtaagagcactactgtgcagctgatccagcgcctgtacgatcccgatgagggaacgatcaatattgacggacaagatatcaggaactttaatgtcaactaccttagagagattataggtgtggtttcgcaagagcccgtcctgttttcaaccaccatagctgaaaacatttgctacggccgtgggaacgtgaccatggatgaaatcaaaaaggcagtgaaggaggctaatgcatacgaattcattatgaagctcccccagaaattcgataccctggtcggagagcgcggggcacaactgtctggtggacagaaacaacgtattgccattgcacgcgcactcgtgagaaaccccaaaattcttcttttggatgaggcaaccagcgcactggacactgagtcagaagctgaggtgcaagcagcccttgacaaagctagagagggtcgaaccactatcgtgatcgcacatcggctttctaccgtgcgaaacgctgacgtcattgcaggattcgaagatggggtgattgtggagcagggctcgcattcagagttgatgaagaaagaaggcgtgtactttaagttggtcaacatgcaaacctccggttctcaaattcagtcggaggaatttgaactgaacgatgagaaggcagccaccagaatggcaccaaatggatggaaatcccggctttttaggcactcgacgcaaaagaacctgaagaactcccaaatgtgtcagaagtcccttgatgtcgaaactgatgggcttgaggcaaacgtgccacccgtgtcgtttctcaaagtgctgaaactcaataagaccgaatggccttactttgtggtgggtaccgtgtgcgcaatcgcaaacggaggactgcagcctgcgttctccgtgatcttttcagagatcattgccatttttggaccgggggatgatgcagtgaaacagcagaagtgcaacattttctcgcttatctttctgtttctcggtatcattagcttctttaccttttttctgcagggatttactttcggtaaagcaggtgaaatacttaccaggcggcttagatcgatggcattcaaggcgatgctgcgccaagatatgtcatggttcgacgatcacaagaactccaccggtgccctgtcaacccgcttggcaaccgatgcagcacaagtccaaggcgcaactgggacccggcttgcactgatcgcacaaaacattgccaacttgggtactgggatcatcatctcgttcatttatgggtggcaactgaccttgttgctgctggcggtcgtgccgatcatagccgtgagcggtatcgtggaaatgaaactgctcgcaggaaacgcaaagcgggacaaaaaggagctggaggccgccggtaagatcgcaactgaggcaattgaaaacattagaaccgtggtgtcccttactcaagaaaggaaatttgaatccatgtacgtcgaaaaactttacggaccttatagaaattcggtgcagaaggcgcacatttatggaattacgttcagcatctcgcaggcattcatgtacttctcgtacgcgggatgttttaggtttggtgcatacctcatagtgaacggtcatatgagatttagagacgtgatcctggtgttctcggccattgtgttcggagcagtggccctgggccatgcaagctcctttgcaccagactatgcaaaggccaagctgtcagcagcacatcttttcatgctgttcgaacgacaaccacttatcgattcgtactccgaagaaggtctgaagccagacaaattcgaaggaaacataacctttaatgaggtcgtctttaactatcctacgcgggcaaatgtgcctgtcctccagggtctgtcactcgaagtcaagaagggtcaaacgcttgccctggtggggagctccggatgtgggaaaagcaccgtggtgcaattgctcgaaagattttacgatcccctcgcgggtaccgtttttgtggactttggatttcagctgttggacggtcaggaagcaaagaagctgaacgtgcaatggctgagggcccaactggggatcgtctcccaggaacctatcctctttgattgttcaattgcggagaacattgcgtatggcgataactcgcgcgtagtgtcgcaggatgagattgtttccgcagcaaaagccgcaaatatccatccgtttatagaaacccttccccataagtacgaaacgcgggtgggtgacaagggtacccaactctccggcggccagaaacaacggattgccatcgctcgtgcacttatcagacagcctcagatactgctgttggacgaagcaacctcggcccttgatactgaaagcgagaaagtggtccaggaagcacttgataaagccagagaaggtcgtacctgtattgtcattgcgcatagactgtcaactatccaaaatgcagatttgattgtcgtctttcaaaacggccgagtgaaggagcacggcacccatcaacagctgctcgcccagaagggaatctacttttcaatggtgtcggtgcaggcgggaacccaaaacctc

SEQ ID NO: 7625 - DNA, 3858 bp, synthetic construct
  misc_feature 1..3858: note = source = /note="Description of Artificial Sequence: Synthetic coding sequence"
  source 1..3858: mol_type = other DNA
atggatcttgaggcagcgaagaatggtaccgcatggcggcctacctcagcagagggtgacttcgaactgggcattagtagcaagcagaagaggaaaaagactaagaccgtcaagatgattggtgtgctgacgctgtttagatactcagactggcaagataagctgttcatgtcccttggtactattatggctattgcccacggctcggggcttcccctgatgatgattgtgtttggggagatgactgataagtttgtggacaccgcgggaaacttctcgttccctgtgaatttctcgctttcccttctgaaccctggtaagattcttgaagaagagatgaccaggtacgcatactactactccggactgggcgcgggggtgctggtcgcggcgtatatacaggtcagcttctggactctcgctgcaggtagacagatccggaagattcgccagaaattcttccatgccattctgagacaagaaatcgggtggtttgacattaacgatactaccgaactcaatacccgcctcactgatgacataagcaagattagcgagggaattggggataaggtgggaatgttctttcaggcagtggccaccttttttgccggatttatcgtgggattcattaggggatggaaacttactcttgtaatcatggccatttcaccaattctcggtctgtcggcagcagtgtgggcaaagatactttcggcattttccgataaggaactggccgcatacgcaaaggccggagcagtggcagaagaagccctgggggcaattaggactgtgatcgcattcggcggacaaaacaaggaactggaaaggtaccagaagcaccttgagaacgccaaagagatcggtattaagaaagcgatttcagcgaacattagcatgggaattgcgtttctgctcatctacgcctcgtacgcactcgcattttggtacgggtctaccctggtcatttcaaaggaatacacgattggaaacgcgatgaccgtgttcttcagcatcctgataggtgcattttccgtgggacaagcagcaccttgtattgatgcatttgccaatgcaaggggagcagcgtacgtgatttttgacattattgacaacaaccctaaaatcgactcgttctccgaaagaggtcataagcctgattcaatcaagggaaacctcgagttcaatgatgtgcacttttcgtacccatcgcgagccaacgtgaagatccttaagggactgaatcttaaggtgcagtccggccaaactgtcgcccttgtcggatctagcggctgcgggaagtcaaccaccgtgcaattgattcaaagactctacgatcctgacgaaggaaccataaacattgatggacaagatatcagaaatttcaacgtgaactacctgcgcgagataattggcgtggtgtcacaggaacctgtcctcttttccactaccatcgcagaaaacatatgttacggccgtggtaatgttaccatggatgagattaagaaggcagtgaaggaagcaaacgcatacgaattcattatgaaactccctcagaaatttgataccctggtgggtgagcgaggagcgcagctgtccggagggcaaaagcagcggatcgctatcgcgcgcgcactggttagaaaccccaaaatcctgctgctggatgaggcaactagcgcactcgatacggagagcgaggcagaagtgcaagctgctttggataaggcccgcgagggtcgtactactattgtgattgcccataggctgtcgaccgtgcgcaatgcggacgtcatcgcaggattcgaagatggcgtgattgtggaacaaggttcccatagcgagcttatgaaaaaggagggagtgtactttaaactggtgaatatgcagacctcgggatcccaaatccaatccgaggaatttgagcttaatgatgagaaggcagccacccgcatggcaccgaatggatggaagtcccgtctctttagacattccactcagaagaatctgaagaatagccagatgtgtcaaaagtcgcttgatgtggagactgacgggcttgaagcaaacgtgccaccagtgtcctttcttaaggtgctgaaactcaacaagaccgaatggccctactttgtcgtcgggaccgtgtgtgccattgccaacggcggtttgcagcccgcattctcggtgatattcagtgaaatcatcgcaattttcggaccaggagatgatgcagttaaacaacaaaaatgtaatatcttttcactgatttttctgtttctcggcatcatctcgtttttcaccttttttctgcagggattcacttttggaaaggcaggagaaattctgactcggcgactgagaagcatggcgttcaaagcgatgttgaggcaagacatgtcgtggtttgatgatcacaagaactccactggagccctctcaacgagactcgcaaccgatgcagcgcaagtgcagggggcaaccgggaccaggcttgcactgattgctcagaacattgcaaacctgggaactggaattatcatttcgttcatttatgggtggcagcttactcttcttttgcttgcggtcgtccccatcatcgctgtgagcggcatcgtggaaatgaagctccttgcaggtaatgccaaaagagataagaaggagctcgaagccgcaggaaaaatcgcaaccgaggcgatcgagaacattaggactgtcgtcagccttactcaagagcgcaagttcgagagcatgtacgtggaaaaactgtacgggccttaccgcaattcggttcaaaaggcacatatctacggaattactttttcgatatcgcaggcattcatgtacttttcctacgcaggttgtttcagatttggggcatacctcatcgtgaatggacatatgcgctttcgtgacgtgattttggtcttttccgccattgtgttcggcgcggtggccctcggtcatgcatccagctttgcacctgattacgcaaaggcaaagttgtcggccgcccatctgtttatgttgtttgagaggcaacctctgatagatagctactccgaggagggtctgaaaccggataagtttgaaggaaacatcacctttaacgaggtcgtgttcaactacccaacgcgtgcaaatgtgcctgtccttcagggactctcacttgaagtgaaaaaggggcaaaccttggcacttgtgggttcatcgggatgtggaaaatccaccgtggtccaattgcttgagcgcttctacgatccccttgccggaaccgtgttcgtggacttcgggtttcagcttcttgacgggcaagaagcaaagaaactgaatgtgcagtggctcagagctcaactgggcatcgtctcccaagagcctatactgtttgattgttccatcgcggaaaacatcgcatacggcgataattcacgcgtcgtttcccaagacgaaatagtttccgccgcaaaagcagcaaacatacacccttttatcgagactctccctcacaagtacgaaacccgagtgggagacaagggtactcaactgtcgggtggccaaaagcaaaggattgcaatagcaagagcactcatccgccagccgcagatactcttgctggacgaggctacttcggcacttgacactgagagtgaaaaggtggtccaagaagcactcgataaggcaagggaaggtcggacttgtatagtgatcgcacaccggcttagcactatccagaatgccgatcttattgtggtgttccaaaatggacgtgtcaaagaacacgggactcatcaacagttgctggcacaaaagggaatttacttttcaatggtgtcggtacaagcaggtacccaaaacctt

SEQ ID NO: 7626 - DNA, 3858 bp, synthetic construct
  misc_feature 1..3858: note = source = /note="Description of Artificial Sequence: Synthetic coding sequence"
  source 1..3858: mol_type = other DNA
atggatcttgaggctgcaaaaaacgggaccgcttggcgtccgacctccgcagaaggtgacttcgagctcggcatttcgagcaagcagaagagaaaaaagactaaaaccgtcaaaatgataggggtgcttacgctcttccgatactctgattggcaggacaagctcttcatgtctctggggaccattatggcgattgcccacggctccgggctcccacttatgatgatcgtgttcggagaaatgaccgataagtttgtcgacactgccggcaacttttcgttcccggtgaacttctccctctcccttttgaatcccggaaagattctggaagaagaaatgactagatatgcctattactactcggggctgggagcaggtgttctggtggcagcctacattcaagtgtccttttggaccctcgccgccggtagacaaattcggaagattcgacaaaagtttttccatgctatactgaggcaagagatcggatggttcgatatcaacgacactaccgaactgaataccagactcactgatgacatctccaagatttcggaaggaatcggcgataaggtcggaatgtttttccaagcggtggccaccttttttgctggttttatcgtgggtttcatacgggggtggaaactgacgctcgtgatcatggcaatttctcctattctgggacttagcgccgcagtgtgggcaaaaatcctgtccgcgttcagcgacaaagaactggcagcatacgcaaaggccggggccgtcgcagaagaggcccttggagcaatccgtactgtgattgcgtttgggggtcagaacaaagaacttgagcggtaccaaaagcacctcgaaaacgcgaaggaaattgggatcaaaaaagcaatttccgccaacatttcaatggggatcgcattccttctgatttacgcatcatacgcgctggccttctggtatggatccacgcttgtcatttccaaggaatacaccattggaaacgcaatgaccgtgtttttctccatccttattggagcattttccgtcggacaggcggcgccctgtattgatgctttcgccaatgcccgcggtgcagcatacgtgatctttgacataatagacaacaaccccaagatcgattcctttagcgaacggggtcacaaacccgactcgataaagggcaatctcgaattcaacgacgtccactttagctacccctcgagagcgaacgtgaaaatcctcaagggtctgaatctgaaggtgcaatccggtcagactgtggcactggtgggcagctcaggctgtggaaaatcgactaccgtgcaactgattcaacgcctctacgatccagacgaaggaaccattaacattgatggacaagacatcagaaatttcaacgtgaactaccttcgagagatcattggtgttgtgtcgcaagagcctgttctgttcagcactactatagcagagaacatttgttacggacgaggcaatgtcacgatggatgagattaagaaggcagtgaaagaggccaatgcttatgaattcatcatgaagttgccacaaaagttcgataccctcgtgggggagcggggtgctcagctttcgggcggtcaaaagcagcgtatcgcaatcgcaagggccctggtgagaaacccaaagattctgctccttgatgaggcaactagcgccctggatacggagtccgaagccgaagtccaggcagcacttgataaagcacgcgaaggacgcactaccatcgtcatcgcacatcgactttcgactgtgagaaacgccgacgtgatcgctggctttgaggatggggtgatagtggagcagggttcacattcggaactcatgaagaaggaaggggtgtactttaaacttgtcaacatgcaaacttcaggaagccaaattcaaagcgaggagttcgagttgaacgacgaaaaggcagccacgaggatggcacctaacgggtggaaatcgcgtctctttcgccattcaacccaaaagaatctcaaaaactcgcagatgtgccaaaagtccctggatgtggaaaccgatggtctggaagcgaacgtccctcccgtctcattccttaaggtgcttaagctgaacaagactgagtggccttacttcgtggtgggtactgtctgtgcgatcgccaacggtggccttcagcccgcatttagcgtcatctttagcgaaatcatcgcaattttcggcccgggtgatgatgcggtcaagcaacaaaagtgtaacatcttttcgctgatctttctctttttgggcatcatctcattctttacctttttcttgcaaggctttacgtttggcaaggcaggagagattttgacccgtcgcctccgttcaatggcgtttaaggcaatgcttcgtcaggatatgagctggtttgatgaccataagaattcgaccggagcactcagcactagattggccaccgatgcggcccaagtccaaggagcgactggaacccggctggcacttattgcacaaaacattgcgaatcttgggaccgggatcattatctcgttcatctacggatggcagctgaccctcctgctcctggcagtcgtcccgataattgcagtgtcaggtatcgtggagatgaaacttttggccggcaacgccaaacgcgataagaaggaattggaagcagcaggaaagattgccaccgaggcgattgaaaacattaggaccgtggtgtcactgacccaggaaagaaagtttgaatcaatgtacgtcgagaagctctatggtccttaccgaaactccgtccagaaggcacatatctacggtataacgttttcaatctcccaagcatttatgtactttagctacgcaggatgttttcgcttcggagcctacctgattgttaatgggcatatgcgattcagagatgtgattctggtcttttccgcaattgtgtttggggctgtggccctcgggcacgcctcgtcgttcgcaccagattacgcaaaagcaaagctgtccgcggctcaccttttcatgctttttgaacgccaaccactgatcgattcctacagcgaagaagggctcaagcctgacaaatttgaaggcaacattactttcaatgaggtggtgtttaactatcctacgcgcgccaacgtgccggtgctgcagggtctttcgctggaagttaagaaagggcaaaccctggcactggtcggttccagcggctgtggcaagtcgaccgtggttcagcttctggaaaggttttacgatccactggcaggtactgtctttgtggacttcggtttccaacttctggacgggcaagaggcaaaaaagttgaatgtgcaatggcttagagcccagctcggtattgtgtcccaggagccaatcctttttgattgcagcatagccgagaacattgcatacggagacaatagccgggtcgtttcccaagatgaaattgtgagcgccgcaaaggcggcaaatatccacccattcatcgaaaccctcccccataagtacgagactcgtgtgggtgataaaggtactcagctctcgggtggacagaagcaaagaatcgcaatagcccgggcactcattagacagcctcaaatccttctgctggacgaagcaacctcggctctggacaccgagtccgaaaaggtggtgcaagaggcacttgataaggcgagggagggcagaacctgcattgtgatagcccatcgcctttctacgattcaaaatgctgatctcatagtggtgtttcaaaatggacgcgttaaggaacatggaacccaccaacagcttctcgcgcaaaaggggatctacttcagcatggtgagcgtccaggcaggaactcagaacctt

SEQ ID NO: 7627 - DNA, 3858 bp, synthetic construct
  misc_feature 1..3858: note = source = /note="Description of Artificial Sequence: Synthetic coding sequence"
  source 1..3858: mol_type = other DNA
atggatctcgaagctgccaaaaacgggactgcttggcggccgacctccgcagagggggacttcgagctgggaatctcgtcgaagcagaagcgcaagaaaaccaagaccgtcaagatgatcggcgtcctcaccttgtttcgatacagcgattggcaggataagttgttcatgtcgctgggtaccattatggccatcgcacatggatccggtctgccactgatgatgatcgtgttcggagaaatgaccgacaagttcgtggataccgctggcaatttctcattcccggtgaacttttctcttagcctcctgaacccggggaagatcctggaggaagagatgacgcgctacgcctactactactcggggctcggagcgggcgtgctcgtcgcggcgtacatccaggtcagcttttggaccctcgcggcaggccggcagatacgcaaaatcaggcaaaagttcttccacgcgatcctccggcaggaaattggatggttcgacatcaacgatactactgagttgaacacgcgcctgaccgacgacatctccaagatctcggaagggatcggcgacaaggtcggcatgttctttcaggccgtggctaccttctttgctggatttatcgtcggcttcatccgaggctggaagttgaccctggtgatcatggcaatctccccgatcttgggactgtccgccgcagtgtgggctaagatcctttccgctttctcagacaaggaactcgctgcatacgccaaggcaggagctgtggccgaagaagcgctgggtgccattagaactgtgatcgccttcggaggccagaacaaagaactggagcgctaccagaagcatctggaaaacgccaaggagatcggaatcaagaaagctatcagcgctaatatctcgatgggcatcgcgttcctgctgatctacgcctcctacgccttggcattctggtacggatccacgctggtgatcagcaaagagtacaccatcggaaatgccatgaccgtctttttcagcattctgatcggcgcgttctcagtcggacaagccgcaccatgcatcgacgcattcgcaaacgcacggggtgcggcatatgtcattttcgatatcatcgataacaacccgaaaatcgactccttttcggagcggggccacaagccggattcgatcaaggggaatctggaattcaatgacgtccatttctcgtacccgagccgggcgaatgtgaagatcttgaagggacttaacctgaaggtgcaatcgggacaaactgtcgcccttgtgggatcctcaggatgtggaaagtcgaccactgtgcaactgatccaaaggctctacgacccagacgagggaactattaacatcgatggacaggatatccgcaactttaatgtcaattacctccgcgagatcatcggcgtggtgtcccaagagcccgtgctgttcagcaccaccatcgctgagaacatctgctacggccgcggaaatgtgaccatggacgagatcaaaaaggctgtcaaggaggccaacgcttacgaattcattatgaagctgccgcagaaattcgatactcttgtgggagaacggggagctcagttgtcaggcgggcagaaacaacgcatagccattgctcgggccctcgtccgcaaccctaagatcctcctcctggacgaagcgacttccgcactcgacacggaaagcgaagccgaggtgcaggccgccttggacaaggcccgggagggtaggacgaccatcgtcatcgcgcacagactttccaccgtgaggaacgccgatgtgattgcaggtttcgaggacggggtgattgtcgaacaagggagccatagcgagctgatgaagaaggagggagtgtatttcaagctcgtcaacatgcaaactagcgggtcacagattcagtcagaggaattcgagttgaatgacgaaaaagccgcgactaggatggcgccaaatggctggaaatcccgcctctttcggcatagcacgcagaagaacctcaagaattcccagatgtgccaaaagagcctcgatgtcgaaacggatggtctggaggccaacgtgccgcccgtgtcttttctgaaggtactgaaactgaacaagacggagtggccatacttcgtcgtcggcaccgtttgcgccatcgcgaatggtggactccaaccggccttttcggttatcttctcggagattattgcaattttcggcccgggagacgacgcggtgaaacaacagaagtgcaacatcttttcccttatcttcctgtttctcggtatcatctccttcttcaccttcttcctgcaggggttcacctttggtaaggcgggtgaaatccttacccggcgcctcagatcgatggcatttaaggccatgctcagacaggatatgtcgtggttcgacgaccacaagaacagcactggggcgttgtcaactcggttggcgacggatgcggcccaggtgcagggagctaccggaacgaggctggctctcatcgcgcaaaacatcgcgaacctcggaactggcatcatcatatcctttatctacggctggcaactgaccctgctgttgctggcggtggtgccgatcattgcagtctctggaatcgtggagatgaagctgctcgccggcaatgccaagcgggacaagaaagaattggaagcggctggaaaaatcgccactgaggcaatcgaaaacattcggactgtcgtctccctcactcaggagagaaagttcgagtccatgtacgtggaaaagttgtacggcccttatcggaattcggtgcagaaggctcacatctatggtatcactttctcgatctcccaggcctttatgtacttctcgtatgccggatgttttcggttcggcgcgtacctgatcgtgaacggacatatgcggtttcgcgacgtcattttggtgttctctgctattgtctttggagcagtggctctcggccacgccagctcattcgctccagattacgctaaagccaagttgtccgctgcgcacctcttcatgctgttcgaacgccagcctctgatcgactcatactcggaagagggtcttaagccggacaaattcgagggcaacattactttcaatgaggtggtctttaactatccgactcgcgccaatgtgcctgtgctgcagggtctgtcactggaagtgaagaagggtcaaactctcgctttggtggggtccagcggctgtggcaaatcgaccgtggtgcaacttcttgagagattctacgacccgctggcagggacggtgttcgtcgattttggatttcaactcctggacggacaggaagccaagaagttgaacgtccagtggctgcgcgcccaactcggaatcgtgagccaggagccgatcctgttcgattgttcgatcgcggagaatatcgcgtacggggacaacagcagagtcgtgagccaagacgagattgtgtccgctgccaaagcagccaacatccaccctttcatcgaaaccctgcctcacaagtacgaaactcgcgtgggcgataaaggtacccagttgtccgggggtcaaaaacagcgaatcgccatcgcaagagcacttatcagacagccgcagatcctgcttctggatgaagctacgtccgccctcgacactgagtccgaaaaagtggtccaagaagccttggacaaagcacgcgagggaaggacttgtatcgtgatcgcccaccgtctctcaaccatccaaaatgccgatctgatcgtcgtgtttcaaaacggacgcgtgaaggaacacggtacccaccaacagctcctggcgcagaaggggatctacttctccatggtgtcggtccaagcgggaacccagaatctg

SEQ ID NO: 7628 - DNA, 3858 bp, synthetic construct
  misc_feature 1..3858: note = source = /note="Description of Artificial Sequence: Synthetic coding sequence"
  source 1..3858: mol_type = other DNA
atggaccttgaggcagcaaagaacggaaccgcgtggcggccaacgtccgcagagggagattttgaactcgggatctcatcaaaacaaaagaggaaaaagactaaaaccgtgaagatgataggtgtgctgaccctttttagatacagcgactggcaggataagctgtttatgtcattggggaccatcatggcaatagctcatggctcgggcttgccgctgatgatgatagtgttcggagaaatgaccgacaagtttgtcgatactgcgggaaactttagcttcccagtgaacttttcgctgtccctgctgaacccaggaaagatactggaggaagaaatgactagatacgcatattactactctggtctgggagcaggagtgctggtggcggcctacatacaagtgtcgttttggactctggcagcgggtaggcaaattcgtaagattagacagaagttcttccacgccatactccgtcaagaaatcggatggtttgacataaatgacaccaccgaacttaacacccgcctgaccgatgatatttcaaagatttcggaaggaattggggataaggttggaatgtttttccaggctgtggcaacgtttttcgcaggattcattgtgggtttcattcggggttggaaacttactctggtgattatggccatttcgcccattttgggcctctcggcagcggtgtgggcaaaaatccttagcgccttttccgataaggagcttgcggcctacgcaaaggctggagcagtggcagaagaagccctcggtgcgattagaacggtcatcgccttcgggggacagaataaagagcttgaacgctatcaaaaacatctggagaacgcaaaggagattgggattaagaaggcaatttccgcaaacatctccatgggcatagcatttcttctcatatacgctagctatgcattggccttttggtacgggtctactcttgtcatcagcaaggagtacacgattggaaacgcaatgaccgtctttttcagcatcctcataggtgcgttttcggtgggacaagcagcaccttgtatcgacgcattcgcaaatgcacggggggcggcatatgttatcttcgacattattgataacaatcctaagattgatagctttagtgaacgcgggcataaaccagattcgatcaaaggtaaccttgagttcaacgatgtgcatttctcctacccctcccgggcgaacgtcaagattctcaaaggtttgaacctgaaggtccaaagcggacaaacggtcgcattggtcgggtctagtggctgcggaaagtctactacggtgcagctgattcagcgcctttacgaccctgatgagggcacgattaacattgatggccaagacatccgcaacttcaacgtcaactacctgagagaaatcattggtgtggtgtcgcaggagcccgtgctcttttccacgactatagcggagaatatctgttacggccggggaaacgtcactatggatgaaatcaaaaaagccgtgaaggaggctaacgcttacgagtttatcatgaagttgcctcaaaagtttgacacccttgttggggagcgcggcgctcagctttccggtggacagaaacaacggattgcaattgccagagctcttgtaagaaatccaaagatccttcttcttgacgaagccacctcggctctcgacactgaatcggaagcagaagtgcaggcagcactggacaaggcacgtgaagggcggactactattgtgatcgcccatagactttcaactgtaagaaacgcggatgtcatagccggcttcgaagatggggtgatcgtggagcaggggtcacattcagaactcatgaagaaggaaggcgtgtactttaagctcgtgaacatgcaaacttcaggtagtcaaatccaatccgaagaattcgaattgaatgacgagaaggccgcgactagaatggcccctaacggatggaagtcgagacttttcaggcactcgacccagaaaaatcttaagaatagccagatgtgccaaaaatccctcgatgtcgaaactgatggtctggaggcgaatgtccctcctgtgagtttcctgaaagtcctcaagctgaataagaccgaatggccttacttcgtggtaggaaccgtctgtgccattgcaaatggaggtttgcagcccgcattttcggtgatcttttcggaaatcatcgcaatcttcggacctggtgacgatgctgtcaagcaacaaaaatgcaacatcttctcattgatttttctgtttcttggcattatctcattcttcactttctttttgcagggctttacgttcggaaaagctggggaaattcttactcgaaggcttagatcgatggcttttaaggcaatgctgagacaggacatgagttggttcgatgatcataagaattcgactggagcactgtcgacccgtctcgcgactgacgcagcccaagtgcagggagccactgggacccgactggccctcattgcccaaaacatcgcgaatctcggcaccggtataatcatcagttttatctacggttggcagcttaccctcctccttcttgcagtggtgccaattatcgcagtgtccggcatcgtcgaaatgaaactgctggcaggtaacgcgaaacgggataagaaggaactggaagccgcggggaaaattgcaaccgaggcaattgaaaacattagaactgtggtgtctctgacccaagaacgaaagtttgaatcaatgtacgtcgaaaagctgtacggaccgtatcgcaattccgtccagaaagcacacatttacggtattaccttcagcatttcccaagcatttatgtacttctcctacgctgggtgctttcggtttggtgcataccttattgtgaatggacatatgaggtttagggatgtgattctcgtgttttcagccattgtttttggtgcagtcgcacttggacatgcttcatcgttcgctcctgattacgcaaaggccaagctgtccgctgcacatctgtttatgctttttgaaagacagcctttgatagatagctactccgaggaaggtctgaagccggataagtttgaggggaacatcacttttaacgaagtggtgttcaattatcctactcgcgccaacgtgccagtcctccagggattgagcctggaggtgaagaagggtcaaactctcgccctggtgggaagctcgggctgtggtaagtcgaccgttgtgcaactgctggagaggttttacgatccccttgcaggaaccgtgtttgtggattttggatttcaactgctggatggacaagaagccaaaaaactcaacgtgcagtggcttcgagcccaacttggcatcgtgtcacaagaaccaattcttttcgattgttcaatcgcagaaaacattgcatacggggataattcgcgggtggtatcccaggacgagatagtttcggcggcaaaggcagcaaacatccacccctttattgaaaccctcccacataagtacgaaacccgcgtgggcgacaagggtacccaactgtccggcggacaaaagcagcgtattgccatcgcccgcgcccttatccgccagccgcaaatacttctgctggatgaggcaacgagcgccctggacaccgagtccgagaaggtcgtgcaggaggcactcgataaggccagagaaggtagaacgtgtattgtgattgcacaccggctgagcaccattcaaaatgcggacttgattgtcgtctttcaaaacggtagggtcaaagaacacggcactcaccagcagcttcttgcgcaaaagggaatttactttagcatggtgtcggtgcaagcgggaactcagaatctg

SEQ ID NO: 7629 - DNA, 3858 bp, synthetic construct
  misc_feature 1..3858: note = source = /note="Description of Artificial Sequence: Synthetic coding sequence"
  source 1..3858: mol_type = other DNA
atggatctggaggcagccaaaaacggcaccgcatggagaccaacctcagccgagggggattttgaactcggcatatctagcaagcaaaagagaaaaaaaacaaaaacagtaaagatgatcggagtgctaacgctgtttcgttattcagactggcaagataaactgttcatgtcgcttgggactataatggcgatagcccacgggagcggtctgcctctgatgatgatagtgttcggagagatgactgacaagtttgtggatactgccggaaatttcagcttcccagtaaatttctctctgagtcttctcaatcccggcaagatcctcgaagaggagatgactcggtatgcttattactacagcggccttggcgctggcgttctcgtagcggcttacatccaggtgtcattctggactcttgccgccgggaggcagatacgaaagatccgtcagaaattcttccatgcaatcttgaggcaggaaatcggctggttcgatattaatgacacgaccgagctcaacacccgcctcactgacgatatttccaagatatccgaggggatcggcgataaagtgggcatgttcttccaagctgtcgctaccttttttgctggcttcatcgtgggcttcatccgcggatggaagctcacactggtaattatggctatttcacccattctagggctctccgccgctgtgtgggccaaaattctttcggcttttagtgataaagaattagccgcctatgccaaggctggggccgtcgcagaggaggccctaggcgcgattaggactgtgatcgcctttgggggccagaacaaggagttggagcgttatcaaaagcacctagaaaacgccaaggagatcggaatcaagaaggcgatctccgctaatatctcaatggggatcgcgttcctgcttatttacgcctcttacgccctcgctttctggtatggcagcactctggtaattagcaaagaatatacgatcggcaatgccatgactgtgttctttagtatcctcatcggagccttctccgtgggccaagcggcaccctgcatagatgcattcgccaatgcaaggggggctgcttatgtcatattcgatataatcgacaataatccaaaaattgatagcttctcagaacgcggtcataaaccggatagtattaagggaaatctcgagtttaacgatgtgcatttctcctatccaagccgggccaacgtgaagatactgaagggactcaacttgaaggtgcagagtggacagactgtcgcactagttggttctagcggctgcggaaagtccaccaccgttcagctaatacagagattgtacgatccagacgagggtaccataaatatcgatgggcaggacatccggaacttcaatgtcaattacctcagggaaataattggcgtggtgtcccaggagcccgtgctcttctccaccactattgccgagaacatctgttatggaagggggaatgtgacaatggacgagattaagaaggctgtgaaagaagctaatgcttacgagtttatcatgaaattgccccagaaattcgacacacttgtgggggaaaggggcgcccagttatccggaggccagaagcagcggattgccattgcgcgggctttggtccgtaatccaaaaatccttctcttagacgaagccacatcagccctggacactgagagtgaggccgaagttcaggccgcgctcgacaaggcacgggaaggccgaacgaccatcgtgatcgcccatcgactctccactgttagaaacgccgacgttatagccggcttcgaggacggagtcattgtcgaacagggctcacactctgagctcatgaagaaagaaggcgtctactttaagttagtgaatatgcagaccagcggttcacagattcagagcgaggaatttgagctaaatgacgaaaaagcagccacccgcatggcccccaacggatggaagagccggcttttccgccacagcacacaaaaaaacctaaagaattcacagatgtgtcagaaatccctggatgttgagacagacggcctggaggccaacgtgccacccgtgtctttcctgaaagtcctcaaattgaacaagacagaatggccttactttgtagtcggcactgtgtgcgccattgccaacgggggtttgcaacctgcattctccgtgatctttagcgagatcatcgcaatcttcggccctggtgacgacgcagtgaagcagcagaagtgtaatattttttcgctgatctttctgtttctcggcattattagcttctttaccttttttctccagggctttacatttggaaaggctggtgaaatcctaacccgtcgccttcggagcatggcctttaaggccatgctgaggcaagacatgtcatggttcgatgaccacaagaactctaccggagccttatccacccgcctcgcaactgatgcggctcaggtgcaaggggctacaggcacacgcttggcactgattgctcagaatattgcaaacctgggcacgggcatcattatctcttttatctatggatggcagctgaccctcttactgctggctgtggtgcccatcattgctgtctcaggtattgtagaaatgaaactgttagcagggaacgcaaaacgcgataagaaggaactagaggcagctggaaagatcgctaccgaagcaattgagaacatcagaaccgtcgtgagcctgacacaggaacgtaagttcgaaagcatgtacgttgagaaactgtacgggccttacagaaattcagtgcagaaagcccacatctacggcatcacattcagcatctctcaagcatttatgtactttagttacgctgggtgttttcgatttggcgcctacctcattgtgaacggtcatatgcgcttcagggacgtcatactggtgtttagcgctatcgtatttggcgctgtggctctgggccatgcgtcctcctttgcccctgactatgcaaaggccaaactatctgccgcgcatttgtttatgttgtttgagcgacaacccctgattgacagttattctgaggaagggctgaaacccgacaaatttgaggggaatattacatttaatgaagtggtctttaattatcctacgcgggctaatgtgccagtcctccaaggcctttccctagaggtgaagaagggccagaccttggccctggttggcagttcagggtgcggtaagagcacggtagtgcaactgttggagaggttctacgaccccctagcgggtacggtatttgttgacttcggtttccagctgctggatgggcaggaggctaaaaaactgaacgttcagtggttaagagcccaactaggaattgtgtctcaagaaccaatcctgtttgattgctcaatagctgagaacatcgcctacggtgataactcaagggttgttagtcaggatgaaattgtgagcgcagccaaggcggcgaatatccacccattcatcgagaccctcccgcacaagtatgagacacgcgtgggtgataagggcactcagcttagtggaggccagaagcaacgcatcgccatagcccgagcactgattagacagccccagattctactgctggatgaggcaacttccgcactggacactgaatcggagaaagtggtgcaggaagctttggataaggccagagagggacgcacctgcatagtgatagcccacagactgtctaccattcagaatgcagacctcatagtcgtgtttcaaaacggcagggtgaaagagcacggaactcaccagcaattactcgcccagaaagggatctactttagcatggtgtcagtgcaggctggtacccaaaacttg

SEQ ID NO: 7630 - DNA, 3858 bp, synthetic construct
  misc_feature 1..3858: note = source = /note="Description of Artificial Sequence: Synthetic coding sequence"
  source 1..3858: mol_type = other DNA
atggatttggaagcagctaaaaatggaactgcatggaggccaacatctgccgaaggggacttcgaattgggaatctcgtccaaacagaaaaggaaaaagacaaaaacagtgaaaatgatcggagtgctcacgctgttcagatattccgattggcaggataaactattcatgagtttagggactataatggccatcgctcatgggagtggacttcctctaatgatgattgtgtttggagaaatgactgataaatttgtggatactgccgggaatttttcattcccagtcaattttagtctatctttgctcaaccccgggaaaattctcgaagaagagatgactaggtacgcctattattatagtggactcggggccggagtcctcgttgcggcctatatccaggtgtctttttggactctggcagcagggcgccagatccggaagatcaggcagaaattttttcacgctatcctacgacaggaaattgggtggttcgatatcaacgatactacagaactaaacactagactgactgatgatatctctaaaattagtgaaggaataggggataaagtgggaatgttttttcaggctgtagctacattcttcgccggattcattgttggattcatcagaggatggaaacttacactggtgatcatggcaataagtcccatcctcggattgtccgctgccgtctgggccaaaatcctctcggccttttctgataaagaattagctgcgtacgctaaggcaggagccgtcgccgaagaagccttaggggccattcggactgtgatcgcttttggggggcagaataaagagttagagcggtatcagaaacaccttgaaaatgctaaagagataggaataaaaaaagccatatcagctaacatctcaatgggaattgcgtttctcctaatctatgcgtcttatgcactcgcattttggtacggatcaactctggttatctccaaagaatacactatcggaaacgccatgacagtgttcttctctatactgataggagctttttctgtaggacaggccgccccatgtatagacgcatttgctaatgcccgcggggccgcctatgtgatcttcgatatcatcgataacaatcccaaaatcgactctttttccgaaagagggcacaaacctgattctataaaagggaatctcgaattcaacgatgtgcatttctcatatccttcaagagccaatgtaaaaatccttaaagggcttaacctgaaagtgcagagtgggcagactgtcgcactggttggatctagtgggtgtggaaagtctacaactgttcaactcatccagcggctgtatgaccctgatgagggaactattaatattgatggacaggatatccgaaatttcaatgtgaactatctacgcgaaattataggggtagttagtcaggaaccagtcctattttctacaacaatagctgaaaatatctgttatggaagaggaaacgtcacaatggatgaaatcaaaaaagcagttaaagaagctaacgcctacgaatttatcatgaaattaccccagaaatttgatactcttgtaggagagaggggagcccagctctctggagggcagaaacagcgcatagccatcgctagggccctggtgaggaatcccaaaatactcctcctggacgaagccacttcagcactagatacagaatctgaagcagaagtacaagccgcgctggataaagccagggaaggacgaactacaatagtcatcgcacatagactttccacagtgcggaacgcggatgtgatcgctgggtttgaagatggggtcatagtggagcagggatcccattctgaattgatgaaaaaagaaggggtgtatttcaagctggtgaatatgcagacatccggatctcagatacagtccgaggaatttgaactcaatgatgaaaaagccgccacacgcatggcacctaacggatggaaatccaggctattcagacattctactcaaaaaaatctaaaaaattcccagatgtgccagaaatcattagatgtcgaaactgatggactcgaagccaatgtcccccctgtctcctttctgaaagtcctcaaattaaacaaaacagaatggccatatttcgtcgtcggaacggtgtgtgccatagcaaatggagggctgcagccagctttttcagtcatattttcagagattatagccatctttgggccaggagatgatgccgtcaagcagcagaaatgcaatatattctctctaatattcctctttctgggaatcatctccttcttcactttttttctccaggggttcacattcgggaaagctggggaaatccttacacgccggctcagaagtatggcgttcaaagcaatgcttaggcaggacatgtcttggtttgatgatcacaagaacagtactggggcattgtctactcgactagccacagatgccgcccaggtccagggagcaactgggacaaggcttgctctgatcgcacagaatatagccaatcttggaactggaatcatcatctctttcatttatggatggcagctcacactcctcctcctggccgtcgtgccaataatcgctgtttctggaatagtcgaaatgaagctgcttgctgggaacgccaagagagataaaaaagaactagaagccgctggaaaaatagcaactgaagctatcgaaaatatcagaacagtggttagtctaacacaggaacggaagttcgaatcaatgtacgtagaaaaactttatggaccttatcggaatagtgtacagaaagcacatatatatgggataacattcagtatctcacaggcctttatgtattttagttatgctgggtgtttcaggttcggagcgtatttaatcgttaacggacacatgaggttcagggatgtcattctggtattctctgccatagttttcggggcagtggctctcgggcatgcttcttccttcgcacctgattatgcaaaggccaaattatccgccgcgcatcttttcatgctgttcgagcgccagcctttaattgattcctacagtgaagaagggctaaagcctgataaatttgaagggaacataacttttaatgaggtagtgtttaattaccccacaagggccaacgttcctgttctacagggactgtctctggaggtaaaaaaaggacagacactcgctctagtcggatcatctgggtgtgggaaatctacagtcgtacagctgctggaaaggttctatgatccactcgctggaactgttttcgttgatttcggattccagctattggatggacaggaagcgaaaaagctcaatgtccagtggctaagagcgcagctggggattgtgtctcaggaacccatactcttcgattgctccattgcagaaaatatagcatacggggataattcacgggtggtgtcccaggatgaaatcgtgtcagcagctaaggctgctaacatccaccccttcatagaaactcttccccataaatatgagacacgcgttggggataaaggaactcagctttctggaggacagaaacagaggatagccatcgcaagagcactcatccgacagcctcagatcctattacttgatgaagccacgtctgccctcgatactgaatctgaaaaagtggttcaggaagcattggataaggcccgagaagggcgcacttgtattgttatagctcatcggctatctacaatccagaacgcagatctcatagtagtatttcaaaatgggagagtgaaagagcatgggacacaccagcagctcctggcccagaaagggatctacttctctatggtgtccgtgcaggcagggactcaaaacctt

SEQ ID NO: 7631 - DNA, 3858 bp, synthetic construct
  misc_feature 1..3858: note = source = /note="Description of Artificial Sequence: Synthetic coding sequence"
  source 1..3858: mol_type = other DNA
atggacctggaggcagctaagaatggtacggcctggcgcccgacgagcgccgaaggagacttcgagctggggatctcttccaagcagaaacggaaaaagaccaagacggttaagatgattggcgtgcttactctctttcgctacagcgactggcaggacaaactctttatgtccttggggactatcatggcaatcgcccacggatcgggacttccactcatgatgatcgttttcggggagatgacggacaaatttgtggacaccgcgggtaacttctccttcccagttaactttagtctctccctgctgaaccccggaaagatcctggaagaggaaatgactcgctacgcatactactactcgggactcggagccggcgtgctcgtggccgcgtacatccaggtgtcgttctggaccctggctgccggacgccagattcgcaaaatccggcaaaagttcttccatgcaatcctgagacaagagatcggttggtttgacatcaacgataccaccgaactcaacactaggctgactgatgacatcagcaagatcagcgagggaatcggtgataaggtcggaatgttcttccaagccgtggcaacgttctttgcggggttcatcgtgggattcatcagaggctggaagctgactctggtcattatggccatctcaccgatcctcggcctctcagccgccgtgtgggcgaaaatcctgagcgcgttcagtgacaaggaactcgccgcgtacgcaaaggcaggcgccgtcgcggaggaggccctcggagcgatccgcactgtgattgcgtttgggggccaaaacaaggaattggaaagataccagaaacacctggagaacgcgaaggagatcggcatcaagaaggcgatttccgcgaacatatcgatgggaattgccttcttgttgatctacgcttcctacgcgctggccttctggtacgggtctactctcgtgatcagcaaggaatatactattggcaacgccatgactgtgttcttctccatcttgatcggcgccttctccgtcggccaggctgcaccgtgcatcgacgccttcgcgaatgcgcgcggcgcggcatacgtcatattcgacataattgataacaatccgaagatcgactcgttctcggagcgcggccacaagcctgattcgatcaaaggcaacctcgaattcaatgacgttcacttttcctacccgagccgcgccaatgtcaaaatcctgaagggactgaatctcaaagttcagtccggacaaaccgttgcactggtgggaagcagcggctgcggaaagagcactaccgtccagctgattcaaagactctacgatccggacgaaggaacgattaacatcgacggacaagatattcgcaacttcaatgtcaactacctccgggagattatcggtgtggtgtcacaggaacccgtgttgttctcaaccactatcgcagagaacatttgttacggacgcggtaacgtcaccatggacgagatcaagaaagcggtgaaggaagctaatgcctacgagtttatcatgaagctgccgcagaaattcgatactctcgtgggggaacgtggagcgcagctttccggaggacagaagcagcgcattgccatcgctcgcgcattggtccgcaacccaaagattctccttctggacgaggctacctcagccctggatactgaatcggaagctgaggtccaggctgccctggacaaggctcgggagggacggactaccatcgtaatcgcccataggctgagcactgtccggaacgccgatgtgattgccgggttcgaggacggggtcatcgtggaacagggctcccactctgagctcatgaagaaggaaggcgtgtactttaaactggtcaacatgcaaacctcgggatcccagatccagagcgaggaattcgagctgaatgatgaaaaggccgccacccgaatggcccctaacggctggaagagcaggctttttagacactcaactcaaaagaacttgaagaactcccagatgtgccagaaatccctggatgtcgaaaccgacggactggaagccaatgtccccccagtgtcgttcctgaaagtgctgaagctgaacaaaaccgaatggccgtatttcgtggtgggcaccgtgtgcgccatcgcgaatggcggcctgcaaccggctttttcggtgatcttctcggaaatcattgcgatcttcggaccgggcgacgacgccgtgaagcagcaaaagtgcaacatcttctcactcattttcttgttcctgggaatcatctcctttttcaccttctttctgcaaggcttcaccttcggaaaagcaggagaaatcctgaccagacggctgaggtcaatggcttttaaggcgatgttgaggcaggatatgagttggtttgatgaccataagaactcaactggagccctgtcgacgagactggccacggacgccgcccaggtccagggcgcgacgggtactagactggcactgatcgcccagaatattgccaacctgggtaccggaatcatcatatcctttatctacgggtggcagctcactctgctgctgctggcagtggtgcctatcattgcggtgtcaggcatcgtggagatgaagctccttgcgggaaacgcaaagcgagataagaaagagctggaagccgcgggaaagatcgccactgaagcgatcgaaaacatcagaaccgtggttagcctgacccaggagcgtaagtttgagtccatgtacgtggaaaagctgtacggaccgtatagaaatagcgtccagaaagcccatatctatggaatcaccttcagcatctcgcaagcctttatgtacttctcctacgcaggatgcttccggtttggagcctacctgattgtcaacggacatatgaggtttcgggacgtgatcctggttttctccgccatcgtgtttggggcggtcgcacttggtcacgccagctcgttcgcccctgactacgctaaagcaaaattgtctgcagctcaccttttcatgctgtttgaacggcagcccctcattgactcgtacagcgaggaaggcctcaaacctgacaaattcgaaggtaacatcacctttaatgaagtggtattcaattacccgacccgcgcaaacgtccctgtgctgcaaggcctgtcacttgaagtcaagaagggacagactctcgccctggtcggatccagtgggtgcgggaagtcaaccgtggtccagctcctggaaaggttctatgacccgctcgcaggtaccgtctttgtcgatttcggatttcagcttctggatggacaagaggcgaagaaacttaacgtgcagtggctcagagcacaactgggaatcgtatcgcaggagccgatcctcttcgattgctcgatcgccgaaaacatcgcctacggagacaattcaagagtggtgtcccaagatgaaatcgtttcagccgcaaaggctgcaaacatccatccgttcatcgaaaccttgccgcacaagtacgaaactcgcgtgggggataagggtactcaactcagcggtggtcagaaacaacggattgcgatcgcccgggcccttattcgccagccgcagatcctcctgctcgatgaggctactagcgccctggacaccgagtcggagaaggttgtgcaggaggcgcttgacaaagcccgggaaggcagaacctgcatagtgatcgcccaccggctttcgacgatccagaacgcagacttgatcgtggtgttccagaacgggcgagtgaaggaacatggcacgcaccaacaactcctggcacagaaaggaatctacttcagcatggtgtcggtccaggcaggtactcagaacctg

SEQ ID NO: 7632 - DNA, 3858 bp, synthetic construct
  misc_feature 1..3858: note = source = /note="Description of Artificial Sequence: Synthetic coding sequence"
  source 1..3858: mol_type = other DNA
atggatctggaagcagccaaaaatgggacagcatggcggccaaccagcgccgaaggggatttcgagctgggaattagctccaagcagaaacgcaaaaagaccaagactgtgaaaatgatcggagtgcttactcttttccggtattcggactggcaagacaagttattcatgagtctgggcaccattatggccatcgctcatgggtctggtctgccgctgatgatgatagtgtttggagaaatgaccgataagttcgttgacactgcgggaaactttagctttccagtgaatttttccctgtctctgctgaacccaggtaagattctcgaagaagaaatgacccgttacgcttactattattcaggactgggcgctggggtcctggtcgcagcgtacatacaagtcagcttctggaccctggctgcaggtcgccagattcggaaaatcagacagaagttctttcacgcgattctaagacaggaaattgggtggttcgacataaacgataccacagagcttaacacgcgtctcacagacgacatctcaaaaattagtgaggggatcggggataaggtcggtatgttttttcaggccgttgcaaccttcttcgccggttttattgtgggattcattcgaggctggaagctgactctggtgatcatggcaatctcacccattctaggattgtccgcggccgtgtgggccaaaatactgagcgccttcagcgacaaggagcttgccgcctacgccaaagccggagccgtggcagaggaagcgttgggcgccattcgcactgtcatagcttttggaggccagaacaaggagctcgagcggtaccagaaacatctcgagaatgctaaggagattggcataaaaaaagccatctccgccaatatttcgatgggaattgcgttccttctgatttacgctagctacgccctggcgttctggtatggctctaccctggtgatctctaaggagtacactatcgggaatgcaatgacagtgttcttttctattcttatcggagctttcagcgtggggcaggctgcgccctgtatcgatgccttcgccaacgcccgaggcgccgcttatgtgatttttgatattatcgacaacaacccgaagatcgatagtttctcagagagaggacacaaacccgatagcatcaagggaaatctcgagttcaacgacgtgcacttttcctacccgagccgggccaacgtcaaaatcctaaagggtctgaacctgaaggtgcagagcgggcagacagtggccctggtgggctcctccgggtgcggcaaaagcaccaccgtccagctcattcaaaggctgtacgatcccgatgaaggcacgattaacattgacgggcaggatatacgcaactttaacgtgaattatctgcgcgagattatcggggtcgtgagccaggagccggtgctattctcaactaccattgccgagaatatctgctatggtaggggcaatgtgaccatggacgaaattaaaaaagccgtgaaagaggctaatgcttacgagttcattatgaaacttccacagaagttcgacaccttggtcggcgagagaggcgcccagctgtcaggcggccaaaagcagcgtatcgccattgccagagctttggtccgcaatcctaagatcctactgctggacgaggctacaagcgctctggacactgagtctgaggccgaggtgcaggcagccctggataaagcgcgcgaaggcagaaccaccattgtgatcgcccaccggttgagcacggtccggaatgccgacgtgattgctggctttgaagatggggtaatcgtcgaacaaggatcgcattctgagctgatgaaaaaagagggagtctatttcaagctggttaatatgcagacaagtggtagccagatccagtctgaggagtttgagttgaacgacgaaaaggccgccaccaggatggcccccaatggttggaagagcagacttttccgccatagcacgcaaaagaacctgaagaattcacagatgtgccaaaaatccctggatgttgaaaccgatggactggaagccaacgttccacccgtgtctttcctgaaggtgcttaaactgaacaagaccgaatggccatacttcgtggtggggaccgtatgtgctattgcgaacggcggccttcagcccgccttcagcgtgatcttctccgaaatcattgccatctttgggcctggcgacgacgccgtcaaacagcagaagtgcaatatctttagcctgatcttcctcttcctcggcatcataagctttttcaccttcttcctgcaggggtttacctttggcaaagccggcgagatcctcacaaggcggctcagatcaatggcattcaaagctatgctgaggcaggatatgagctggtttgacgatcataaaaactcgacgggcgctttgagtacacgcctcgctaccgatgccgcacaagtacagggagcaacggggacgagactggccctgatagctcagaatattgccaatttaggtaccggtatcatcataagctttatctacggctggcagctgactctgcttctgctggcagttgttcccatcatcgctgttagcgggatcgtggaaatgaagttgctggctgggaacgcgaagagagacaagaaggaattggaagctgcagggaaaatcgccacagaagccattgagaacattaggacagtcgttagtctcacccaagagcggaaattcgagtctatgtacgtggagaagctgtacggcccttaccgaaatagtgttcagaaggctcacatatatgggatcaccttcagtataagccaggcttttatgtacttctcttacgccggctgctttcgatttggtgcttacctcatagttaacggccacatgcgcttccgggatgtgatcctggtgttctccgcaattgtgttcggagctgtggcgctcgggcacgcgtcctcatttgcacctgactatgccaaggcaaaactgtccgctgcacacttatttatgctgttcgagcggcagcccctcatagactcatatagtgaagaaggtctgaaacccgataagttcgagggaaatatcactttcaatgaagtcgtgtttaattatcctacccgggccaacgtgcccgtgctgcaggggcttagccttgaggtcaaaaaggggcagaccctggcgttggtgggctcgagtgggtgcggaaagagcaccgtggtgcagctgctcgagcgcttttacgaccccctcgccgggactgtctttgtggattttggcttccagcttttggacgggcaggaagccaaaaagctcaatgtgcaatggctgcgagcccaattgggtatcgtatctcaagagccaattctgttcgactgctccattgccgaaaacattgcctacggggacaactcccgtgttgtctctcaagatgaaattgtcagtgcagctaaagctgccaacatccatccgttcatagagacgctacctcacaagtatgagactcgggtgggtgacaagggcacgcagctgtccggtgggcagaaacagcgcatcgctatcgcaagagcacttatcaggcagccccaaatactcctcctggatgaggccactagtgcactcgatactgagtctgagaaggtcgtgcaagaggctctggataaggcccgggaagggcgcacctgtatagtcatcgcacatcgcctgagtacgattcaaaacgcggaccttatcgtcgtcttccagaatggccgagtcaaggagcatggaactcatcagcagttgctcgctcagaaggggatctatttctctatggtgagtgtccaggcagggacacagaatctc

SEQ ID NO: 7633 - DNA, 3858 bp, synthetic construct
  misc_feature 1..3858: note = source = /note="Description of Artificial Sequence: Synthetic coding sequence"
  source 1..3858: mol_type = other DNA
atggatctggaagctgctaaaaacggcacagcttggaggcctacctctgcagagggcgatttcgaactgggcatatcctccaaacaaaaaagaaagaagaccaaaacagtaaaaatgataggggtgttgaccctgtttcggtactccgactggcaggataaactgttcatgagtctcggtacaatcatggcgattgcccatggatctggactgccgctaatgatgatcgtatttggagagatgacggataagtttgtcgatactgcgggaaacttctcattccctgttaacttctccctctcattgttgaatcctggcaagatattggaagaagagatgactaggtacgcctactactattctggcctgggcgcaggtgtgctggtagctgcatacattcaggtgtcgttttggaccctggctgcgggcagacaaatcagaaagatccgacagaaatttttccacgcgatactgcgccaggaaattgggtggtttgatattaacgacactaccgaactgaacacccgccttacagatgatatttccaaaatcagcgaaggtattggagacaaggttggcatgttttttcaggcagtcgcgactttctttgccgggtttattgtcgggttcattagaggctggaagctgactcttgtgattatggccataagcccaattttggggctttccgccgccgtgtgggcgaaaatcctgtccgcattctctgacaaggagttagccgcttatgcgaaagccggcgccgtcgccgaagaagccctaggtgctatcaggaccgtaattgcctttggcggtcagaacaaggagctggagcgataccagaagcatctcgagaatgctaaagaaattggaatcaagaaggccatttcagccaacatcagcatggggatcgctttcctactgatctatgcctcctacgctctagcattctggtatgggtcaacactcgtgatcagcaaggagtacacaattgggaacgccatgacagttttcttttcaatcttaattggggcattttctgtcggtcaggccgctccctgcatagacgcattcgcaaacgctcgaggggccgcctacgttatcttcgatataatcgataacaaccccaaaatcgacagtttctcggagcgtgggcataagccagactccatcaaggggaatctagagtttaacgacgtgcacttctcttatcctagcagggccaacgtcaaaattctgaaggggctgaacctgaaggtgcagtccggccagaccgtggcactcgttgggtcatcaggttgcggcaagagtaccacagtgcagctgattcagcgtctgtacgaccccgacgaaggaaccataaatatagatgggcaggatatacggaacttcaatgtaaattacctccgagagattataggagtagtgtcacaagagccggtcctcttttccaccacaatcgctgagaatatttgttacgggaggggaaatgtcacaatggatgaaatcaaaaaggcggtgaaggaagccaacgcatacgagtttataatgaagttgccccagaaatttgacactctcgtgggagaacgaggagcacagttgagtgggggccaaaagcagagaattgcaatcgccagggcacttgtacgcaatcctaaaattctgctactggacgaagctacctctgctctggacacggaatcagaagctgaggtacaagcagccctggataaggcccgcgaagggcgaacaaccatcgtgatcgcacacaggctgtccacagtgcgtaacgccgacgttatcgctggctttgaagatggggtcattgtggaacagggttcacattccgaattgatgaaaaaggaaggagtctactttaaactggtaaacatgcagaccagtggttcccaaatacagtctgaggaattcgaattaaatgatgagaaggccgctacacgaatggcccccaacggatggaaaagcaggctattccgccactctactcaaaaaaatctgaaaaatagccagatgtgccagaaatccctggatgtggaaaccgatggtttggaggcaaatgtgccacctgtgagcttcctgaaggtcctcaaactgaacaaaacggaatggccatacttcgtcgtggggaccgtctgtgccattgctaatggtggcctacaaccagcgttctccgtgatttttagtgagattatagcgatcttcgggccaggcgacgacgccgtcaaacagcagaagtgtaatatattctccctgatttttcttttcctgggaatcattagcttcttcacgttctttcttcagggcttcactttcggcaaggccggggagatcctcacacgaaggttaagatccatggcttttaaggcaatgttaagacaggacatgtcttggttcgacgaccacaagaatagcacaggggctctgagtacaaggttagccactgacgctgctcaagtccaaggggccacaggcactcgactggcgctaattgcgcagaacatcgcaaatctcgggaccggtatcataatttcttttatatacggttggcagctgactctgctgttgctggctgtggtccccataatcgccgtgtccggtattgtcgaaatgaaactgttggccggaaacgctaagcgagacaaaaaagagctagaagcggccgggaaaattgccacggaagcgattgaaaatattagaaccgtcgtgtctctgactcaagagcgcaaatttgagagtatgtatgtggaaaaactttacggaccctatagaaacagtgtccagaaagcacacatttacgggatcacattttccatttcccaggcctttatgtacttcagctacgctgggtgcttcaggttcggcgcttatttaattgttaacgggcacatgagattcagggacgttattttagtgttctccgcgatcgtctttggcgctgttgccttgggccatgcctcatccttcgcccccgactacgcgaaggcgaaactatctgcggcccatctgtttatgctgtttgagcgtcagcccctgattgactcctattccgaggagggactgaaacccgataaattcgaaggcaacatcaccttcaacgaagtcgtgtttaattatcctacgagagccaacgtgccggtgctgcagggcctgagcctggaagtcaagaaaggacaaacacttgccctggtcgggagcagcggctgtggcaagtctaccgtcgtgcagcttttggagcgattctatgatccccttgcaggaacagtattcgtggatttcggcttccagttgctcgatggccaagaagcaaaaaaattgaacgtgcaatggctacgagctcaacttggtatcgtgtcccaggagccgattctcttcgattgtagtatcgcagaaaacatcgcttatggcgacaactcacgagttgtatcacaggacgaaatcgtcagcgcagctaaggctgccaatatccacccatttatcgagaccctaccacacaagtatgaaacccgggtcggtgacaaggggactcagctgtctggggggcagaaacaacgcatcgcgattgccagagcgctgatacgtcagcctcaaatcctgcttctggatgaggcaacttctgcgctggataccgaatccgagaaagtggtgcaggaagccctggacaaggcaagagaaggccgaacatgcatcgtgatagctcacaggctcagcaccatccaaaatgccgatctgattgtggtttttcaaaatggccgggtgaaggagcatggcacgcatcaacagctgttggctcagaaaggcatctacttcagcatggtgtccgttcaggctggaacccagaattta

SEQ ID NO: 7634 - DNA, 3858 bp, synthetic construct
  misc_feature 1..3858: note = source = /note="Description of Artificial Sequence: Synthetic coding sequence"
  source 1..3858: mol_type = other DNA
atggacctggaagccgccaaaaatggaactgcctggcgccccacttctgcagaaggggactttgaactggggatttctagtaaacagaaacggaaaaagactaagacagtcaaaatgataggagttctcactttgtttaggtacagtgattggcaggataaactgtttatgtcccttgggacaatcatggctatcgctcacggaagtgggctacccctaatgatgatcgtgttcggggagatgactgataaattcgtggatactgccgggaacttttcatttcccgtgaacttctctctttcattactaaaccctggaaaaatcctcgaggaggaaatgactcgctatgcctactactattcggggctcggagctggggtgctcgtggctgcttatatacaggtgtcattttggacactcgccgcagggcggcagatccgcaaaattagacagaaatttttccacgcaattttgcgacaggagatcgggtggtttgatataaacgatacaactgaactgaatacacgcctcacagatgatatatccaaaatctcagaagggatcggggataaggtgggaatgttcttccaggccgtcgccacttttttcgcagggttcatcgtcgggttcatcaggggatggaaacttacattagtcataatggccatctcaccaatacttgggctctctgccgcggtatgggccaaaatcctctcggcgttctctgacaaggaacttgctgcatatgccaaagctggggccgtagctgaggaagctttaggagctatccggactgtgatcgcatttggaggacagaacaaagagttggagcgatatcagaaacatctcgaaaatgccaaggaaatcggaatcaaaaaagctatctccgcaaatatctccatggggatcgcattcctgttaatatatgcaagttatgccttagccttctggtatggatctacattagtgatttccaaagaatatacaattggaaacgctatgacggtgttcttttccatcctgatcggggctttctcagtggggcaggccgccccttgtatcgatgcctttgctaacgcccgcggggccgcttacgtgatattcgatatcatcgataataatccgaaaatcgattctttcagtgaaaggggacacaaaccagatagtatcaagggaaatttggagttcaacgacgtgcactttagttacccatcaagggctaacgtaaaaattctcaaggggcttaacctcaaagttcagtctgggcaaactgtggcactcgttgggagttctggatgcggaaaatcaactactgtgcagctcatacagcgactctacgacccagatgagggaacaatcaatattgatgggcaagatatccggaacttcaatgtgaactatctgcgagaaataatcggggttgtctctcaggaacctgtcttattcagtactacaatcgccgaaaatatctgttatgggagggggaacgtgacaatggatgaaatcaaaaaggcagtgaaagaagctaatgcttacgagtttataatgaaactgcctcagaaattcgacactcttgtgggagaaaggggggcccagctatcaggagggcaaaagcagcgaatcgcaatagctagagccctagtgaggaacccaaaaatactcctactagatgaagccacatcagcgttggatacagaatcagaggcggaagtacaggctgctctcgataaagcccgggaaggaagaactacaatcgtgatcgctcacagattgtccacagttcggaatgccgatgtcatagcagggttcgaagatggagtcatcgtcgaacagggatcccattcagagctaatgaaaaaagaaggggtttattttaaacttgtcaatatgcagacttctgggtcacagatccagtcagaagaattcgaactgaatgatgaaaaagccgctacacgcatggccccaaatgggtggaaatcgagactgttccgacattcaactcaaaaaaatcttaaaaattcgcagatgtgtcagaaatctctagatgtcgaaacagatgggctcgaagctaatgtgccccctgttagttttcttaaagtcttaaagctgaacaaaactgaatggccctacttcgtagtcggaacagtctgcgctatcgctaatggaggacttcagccagctttttctgttatcttctccgaaataatagctatatttgggcccggggatgatgctgttaaacagcagaaatgtaatatcttttctctcatctttcttttcttaggaattataagtttcttcacattctttctccaggggttcacttttgggaaagctggagagatactaactcgccgactgaggagtatggccttcaaagctatgctccggcaggatatgtcctggttcgatgatcacaaaaactcaactggagctctatcaacacgcctcgcaactgatgctgcgcaggtccagggggctactggaacaaggctcgctctcatcgcacagaacatcgctaatttgggaacagggattatcatatcctttatctatgggtggcagcttacactattgttacttgccgtggtacctataatagctgtttccgggattgtggaaatgaaactgctcgccggaaacgcaaagagggataaaaaggaactcgaagccgcgggaaaaatcgcaactgaagctattgaaaatatacgcactgtagtgtctctgacacaggaacgcaaattcgaatccatgtatgttgaaaaactctacgggccatacaggaacagtgtccaaaaagcccatatttatggaattacattctcaatctctcaggcctttatgtacttctcatatgctggatgttttcgctttggagcatatctaatcgttaacggacacatgagattccgggacgtcatcttggtgttttctgctatcgtgtttggggccgtggctctggggcacgcctcctcctttgcacctgattatgccaaagctaaactctccgccgcacatctctttatgctatttgaaagacagcccctcatcgactcttactctgaagaaggactcaaacccgataaatttgaaggaaatataacatttaacgaggtcgtattcaattatccaacaagggctaacgtaccagtactccagggactatcccttgaagttaaaaaggggcagacacttgctttggtggggtcttccgggtgcggaaaaagtacagtggtgcaactccttgaaagattctatgatcctctagctggaacagtgtttgtcgattttgggttccagctcctggatggacaggaagccaaaaaacttaacgtacagtggctccgcgctcagctcggaatcgtatcacaggaaccaatccttttcgattgttccatcgctgaaaacattgcctatggggacaattcgagagtggtgtcccaggatgaaatagtgtccgcagccaaagctgccaatatacaccctttcatcgaaacactgccacataaatatgaaacaagagtcggggataagggaacacagttgtcaggaggacagaaacagaggatagctatcgccagagccctcattagacagccacagatcctgcttctagatgaagcaacaagtgccctagatacagaatcggaaaaagtcgtgcaagaagccctggataaagctcgggagggaagaacatgcatagtcatcgctcatcgcctatccacgatccagaacgctgatttaattgtggtgttccagaacgggcgagttaaagaacacggaacacaccagcaactcttggcacagaaagggatttatttctccatggtgtcggttcaggcagggactcagaacctt

SEQ ID NO: 7635 - DNA, 3858 bp, synthetic construct
  misc_feature 1..3858: note = source = /note="Description of Artificial Sequence: Synthetic coding sequence"
  source 1..3858: mol_type = other DNA
atggacctcgaagcagccaaaaacggtacagcctggcggcctacgagcgctgaaggggatttcgaactagggatctctagcaaacagaagcggaagaaaacaaaaaccgtgaaaatgataggcgtgcttacactttttaggtactctgactggcaagacaagctattcatgtcgctgggaacaataatggcaatcgcacatggcagcggactgcctctgatgatgattgtcttcggcgagatgactgataaattcgtggatactgcgggcaatttctcatttcctgttaacttcagtctgagcctcctaaacccaggtaaaattctcgaagaggaaatgactaggtacgcatactattatagtggcctcggagctggggtgctcgtagctgcctacattcaggtgagtttctggactctagccgccgggcgccagatccgaaagattagacagaagttctttcatgcgattctgcggcaagaaattgggtggttcgatattaatgacactaccgagctaaacacaagactcaccgacgacattagcaaaatctccgagggaattggtgataaagttggaatgttctttcaggccgttgcaacctttttcgcgggatttatcgtgggtttcattcgtggttggaaactcacccttgtgattatggctatatcccctattcttgggctgtccgcggcggtgtgggcaaagatcttgagtgcgttttcagacaaggagctggctgcctacgcaaaggcaggggcagtcgcggaggaggccctcggtgcaataaggacagtgatcgcattcggtggtcaaaacaaagagttggagaggtatcagaaacacctggaaaatgctaaggagattggaataaagaaggcaatatctgccaacatcagcatggggatcgcctttctcctgatctacgcatcctatgcattagccttctggtacggctccaccctagtgatttccaaggagtacactattggcaacgcaatgaccgtgttcttttctatacttatcggtgcctttagtgtggggcaggccgccccctgcatcgacgctttcgccaatgcacgcggcgccgcttacgtgatttttgatataatcgacaacaatcccaaaattgactccttcagcgagagaggccacaaacccgactctatcaaagggaacctcgagtttaacgatgtgcacttttcctacccttctcgcgccaacgtgaagatactgaaagggctgaatctgaaggttcagtccggccagacagtggcacttgtgggttctagcggatgcgggaagtccaccactgttcagcttattcagcgactgtatgaccctgatgagggcacaatcaacattgacggtcaggacatcaggaattttaacgtcaattatctcagggagatcatcggggtggtgtctcaggagcccgtcttgtttagcacaacgattgccgagaacatctgctatgggcggggcaacgtgactatggatgaaattaagaaagctgttaaagaggctaacgcctatgagttcatcatgaaacttccgcagaagttcgacactttagtgggggaacggggcgctcagctgtccggcggtcagaagcagcgcattgcaattgcccgcgccctggtgaggaatccaaagattttgctcctggatgaagctacatcagctctggataccgagagtgaagcagaagtgcaagctgctcttgataaggccagggaaggccgcacaaccatcgtgatcgcccatcgcttgagcactgttaggaacgctgatgttattgccggcttcgaggatggggtgatcgtagaacaaggctcacacagtgagttaatgaagaaagagggggtctactttaagctagtgaacatgcagacaagcgggtcccagatccagagtgaagagttcgagcttaacgacgagaaggcagcaacacgcatggcgcctaatggttggaagagccgactcttcaggcactcaacccagaagaatctcaaaaactcccagatgtgccaaaagtctctcgacgtcgagacagatggcttggaggccaacgtaccaccagttagttttctgaaggtgctcaaactgaataaaaccgagtggccatattttgtggtgggaaccgtctgcgcaatagccaatgggggcctgcaaccagcattttccgttattttctcggagatcatagcaatctttggccccggtgacgatgcagtgaaacagcagaaatgcaatatcttcagcttaatcttcctgtttctcgggataattagcttttttacattctttttgcaggggttcacttttggtaaagccggggaaatcctgacgcgccgtctccgtagcatggcatttaaagccatgttaagacaggacatgagttggtttgacgaccataagaattccaccggggccctttcaactaggttggctactgatgcagctcaggtgcagggtgcaactggtacgagactggcgctgattgctcagaacatagcaaatcttggaactgggataataatttccttcatttacggatggcagttaactctgctccttctggctgttgtgccgatcattgcagtgagtggaatcgtggagatgaaactactggctggtaatgcgaagagggataagaaagaactcgaggcagcgggcaagatagcaactgaggcaatagagaatatcagaaccgttgtgagtcttacccaggaaaggaaatttgagagcatgtatgtggaaaagctgtacgggccttacaggaacagcgtacagaaggcgcacatctatggtatcacattttctattagccaagctttcatgtattttagctatgcaggatgtttccgtttcggggcatacttgatcgttaatggtcatatgcgattcagggatgtgatccttgttttttccgctatcgtgttcggtgcagttgctctggggcatgcaagctcattcgcccctgattatgcgaaagctaaactgtcggctgcccacctgttcatgctgttcgagcgccagcccctgatcgactcctattccgaggaagggctgaagccagataagttcgagggcaacattacattcaacgaggtggtatttaactatcccacccgggccaacgtgccagtgctccaaggcctgtcactggaagtgaaaaaggggcagactctggcactcgtggggagctccggctgcggaaagagtaccgtcgtgcaactcctggagcggttctatgacccattggccggaacagtcttcgtggatttcggcttccagcttctcgatgggcaggaggctaagaaactgaatgtacaatggctgagggctcagctcggtattgtcagccaagagccaatcctcttcgactgctctattgctgaaaatatcgcttatggggataattcacgggtggtgagtcaggatgagattgtatccgccgccaaagccgcaaatattcaccccttcattgagacccttcctcataaatatgaaacccgagttggggacaaaggcactcagctgagcggcgggcaaaaacaacggatcgctatcgctagagccctaataagacagcctcagattctacttttagacgaggctacaagcgccttggacactgagagcgagaaagtagtgcaggaagctctcgacaaggcgagagagggacgaacctgcatagtgatcgcccatagactgtcaaccatccagaacgctgatcttattgtggtgttccaaaacggcagagtgaaggaacatggaacacatcagcagcttttggcccaaaaaggaatctatttctcaatggtgagcgtgcaggctggaacccagaatctg

SEQ ID NO: 7636 - DNA, 3858 bp, synthetic construct
  misc_feature 1..3858: note = source = /note="Description of Artificial Sequence: Synthetic coding sequence"
  source 1..3858: mol_type = other DNA
atggatcttgaggcagccaagaacggcaccgcctggcggcctacaagtgcggaaggggatttcgaactcggcatcagctcaaagcagaaacgtaaaaagactaagactgttaaaatgatcggagtgctgactctcttcaggtactccgattggcaggataagctattcatgtccctgggaaccatcatggctatcgcgcacggatctggtctaccgctgatgatgattgtcttcggggagatgaccgataagtttgtggacaccgcaggaaacttctctttccctgtgaacttttccctgtctcttcttaacccaggaaagatccttgaagaagagatgacaaggtacgcttactattatagcggcctcggagcaggcgtcttagtggctgcatatatccaagtcagcttttggaccctggccgctgggcgccaaattaggaaaatcaggcagaagtttttccacgcaatccttcgccaggaaattggatggtttgatataaatgacaccaccgagctcaacacgaggctcacagatgacatcagcaagatcagtgagggtataggcgataaggtcggaatgttcttccaggcagtcgctacattctttgcaggtttcatcgtgggttttatacgcggctggaaactcacacttgtgattatggcgattagcccaatcttgggactcagcgctgcggtgtgggctaaaatcttgagcgcttttagtgataaagagttggccgcgtatgccaaagccggcgcggtagcggaggaagctcttggagctatcagaaccgtgattgcgttcggaggccaaaacaaagaactggagagatatcagaaacacctggaaaatgcaaaagaaatcggaattaagaaagccatctccgctaatatctcaatggggattgccttcctcctgatttacgctagctacgctcttgccttttggtacggaagcacacttgtcatctctaaggaatacactatcggcaatgccatgacggttttttttagcattctcatcggagcttttagcgttgggcaggccgctccatgtattgacgccttcgccaacgcgcgcggtgcagcttacgtcatcttcgatatcattgacaacaatcctaagatcgatagcttcagcgaacgcggtcacaagccagactccataaaaggcaacctggagtttaatgatgttcatttctcatatccttctcgggccaatgtaaaaatcttgaaaggcctcaacctgaaggtgcaaagcgggcaaactgtggccctggtcggctcctcaggctgtggaaaatcaaccaccgtgcaactgattcaaagactgtacgatccagatgagggaaccattaacatagatgggcaggacatccggaacttcaacgttaactacctgcgggagatcatcggtgtggtgtcacaggagccggtcctcttcagcacaacaatcgcagagaacatttgctatggaagaggaaacgtaaccatggatgagattaaaaaagctgtgaaggaagcaaatgcttacgagtttatcatgaaactgcctcagaaattcgatacactggtaggcgagcgtggcgcccaactgtccggtggccaaaagcagaggatcgcgatcgctcgtgcactggtgagaaatcctaagatcctgcttctggatgaggcaaccagcgccctggacacagagagtgaagcggaagtacaggctgccctagacaaagctcgggagggaaggaccaccattgtgattgcgcaccgcctttcgactgttagaaatgctgatgtgattgcaggattcgaagacggagtcatcgtggaacaggggtctcattctgaactgatgaaaaaggaaggcgtctactttaagcttgttaatatgcagacttcaggttcacaaatccaaagcgaggagttcgagctcaacgatgaaaaggccgcaacaagaatggcacccaatggctggaagtcgagactttttcggcattctacccagaaaaacctgaagaactctcagatgtgccaaaaaagtctcgatgtggagactgatggccttgaggctaacgtgccacccgtctcctttctgaaggtcctgaaactgaacaagacagagtggccatattttgttgtcgggactgtatgcgcaatcgccaacggcggtctgcaaccagctttcagcgtcatcttcagcgaaattattgccatttttggtccaggcgacgatgccgtcaagcagcagaaatgcaacatcttttcactcatttttctctttctgggaataatttcatttttcacattctttctgcaagggttcaccttcggaaaggctggagaaatccttacgagaaggttaagatcaatggcatttaaggcgatgttgcgacaagatatgagctggtttgatgaccacaagaacagcactggcgctctttccacccggctggctaccgatgccgcccaagtacaaggcgcaactggaacaaggctggccctgattgcacagaatatcgccaacttaggaacaggcataatcatcagcttcatttacggctggcaactgacgctgctccttctggctgtggtgccgattatcgcggttagtggaatagtggagatgaagctattggccgggaacgccaaaagggacaaaaaggaactggaagccgcaggaaaaattgccaccgaggccatagaaaacattcgaactgttgtatcgttaactcaagaacgcaaatttgagtcaatgtacgtggagaaactgtacggtccctatcgtaactccgtgcagaaagcacatatatacggaattacttttagcataagtcaagcattcatgtacttttcttatgccgggtgtttcagattcggagcctatcttatcgtaaatggccatatgagattcagagatgtgatcttagtgttttctgccatcgtgttcggcgctgtagctcttggccacgcctcctccttcgctcctgattatgccaaggctaagttatccgctgctcacctgtttatgctgttcgagagacagccacttatcgatagctactcagaggagggacttaaaccagataaattcgagggaaatatcacatttaacgaagttgtgttcaactaccccacaagggctaatgtaccagtgcttcagggcctgtcactggaggtaaaaaagggccagaccctggctctcgtcggcagttcaggatgcggaaagagcaccgtcgtccaattactggagaggttctacgaccccttggctggcacggtatttgtggattttggctttcagctcctggatggacaggaggctaaaaagctgaacgttcagtggctccgcgcacagcttggaatcgtgagtcaggaacccatcttatttgactgttccatcgcagagaacattgcatatggggataactcgcgggtggtgtcacaggacgagatagtgtcagctgctaaagctgctaacatccacccgtttattgagacactcccacataagtatgaaaccagggtcggcgacaagggtacccagctgagtggagggcaaaaacagagaattgctattgctcgtgctctcatcaggcagccccagatcctgctgctggacgaggctacttcagcgctggacactgagtctgaaaaagtggtgcaagaggcgttagacaaggcaagagaggggcggacctgtattgtgatcgcacacaggttgtctaccatccaaaacgctgaccttattgtcgtctttcaaaatgggagagtcaaggaacacggcacacatcagcaacttcttgcccaaaaaggaatctacttttctatggtgtctgtgcaggcaggtacacagaactta

SEQ ID NO: 7637 - DNA, 3858 bp, synthetic construct
  misc_feature 1..3858: note = source = /note="Description of Artificial Sequence: Synthetic coding sequence"
  source 1..3858: mol_type = other DNA
atggatttggaagctgcaaaaaatggtacggcctggagaccaacttcagccgaaggagatttcgaacttggtatttcgtctaaacaaaaaagaaaaaaaactaaaaccgttaaaatgattggagttcttacactttttcgatatagtgattggcaagataaacttttcatgagtcttggtacaataatggctattgctcatggttctggacttccattaatgatgatagtctttggagagatgacagataaatttgttgatacagctggaaatttcagttttccagttaattttagtctttctttactaaacccaggtaaaattcttgaagaagaaatgactagatatgcttattattatagtggattaggagcaggagttttggtagcagcttatatacaagtttcattttggacattggctgctggacgacaaattagaaaaattagacaaaaattttttcatgctattcttagacaggagataggatggttcgacataaatgatacaacagaactaaatacaagacttactgatgatatttcaaagatttcagaaggaattggagataaagttggaatgtttttccaagctgttgctacattttttgctggatttatagttggatttattagaggatggaaattaactttagttataatggctatttcaccaattttaggtttatcagctgctgtctgggcaaaaatattaagtgcattcagtgacaaagagctcgcagcatacgctaaagctggagctgttgccgaggaggctttgggagctatacgtactgttattgcatttggaggacaaaataaagagcttgaacgttatcaaaagcatcttgagaacgctaaagaaattgggattaaaaaagcaatttcagcaaatatttcaatgggtattgcttttcttttaatttatgcttcatatgcattagctttttggtatggaagtactcttgttatttctaaggaatatactattggaaatgcaatgactgtttttttcagtatacttattggagcattttcagttggacaagctgctccttgtattgacgcttttgcaaatgcaagaggagcagcttatgtcatttttgatataatagataacaatccaaagattgatagtttttcagaacgagggcataaaccagattcaattaagggtaatttagaatttaatgatgttcatttttcatatccatcacgtgctaatgttaaaatattaaaaggtttaaatctaaaggttcaatctggacaaacagtagcattagttggatcttcaggatgtggaaaatcaactacagttcagcttattcaaagattatatgatccagacgaaggaacaattaatattgatggacaagacattagaaattttaatgttaactatttaagagaaataattggggttgtttcacaagaaccagttttattctcaacaactattgctgaaaatatttgttatggacgagggaacgttacaatggatgaaattaaaaaagcagtcaaggaagcaaatgcatatgaatttattatgaagttaccacaaaaatttgatacattagttggagaaagaggtgctcaattatcaggaggacaaaaacaaagaattgcaattgctagagcacttgtaagaaatccaaaaattcttctattagacgaagctacaagtgcacttgatactgaatcagaagctgaagttcaagcagctttggataaagctagagaaggacgaacaactatagttattgcacatagattatctacagttcgaaacgctgatgttattgcaggtttcgaagatggtgttattgttgaacaaggatctcatagcgaacttatgaaaaaggagggagtatattttaaattggtaaatatgcaaacttcaggatctcaaattcaatctgaagaatttgaattaaatgatgaaaaagcagcaactagaatggcacctaatggatggaaatcaagactttttagacattctacacaaaaaaatttgaaaaattctcaaatgtgtcaaaaatcactcgatgtagaaacagacggattagaagcaaatgtaccaccagtttcatttcttaaagtattgaagctaaacaaaactgaatggccatattttgttgttggaacagtttgtgcaatagctaatggaggacttcaacctgcattttcagtaattttttcagaaattattgctatcttcggaccaggtgatgatgctgttaagcaacaaaaatgtaatattttcagtttaatttttctatttttaggaattatttcattttttacattttttttgcaaggatttacattcggaaaagctggtgaaatattgacaagaagattaagatcgatggcttttaaagcaatgttgagacaagatatgtcttggtttgatgatcataaaaattcgacaggtgcattatctacacgtttagcaacagatgcagcacaagttcaaggagcaacaggaacaagattagcattaattgctcaaaatattgcaaatttaggaacaggaattattattagttttatttatggttggcaattaactttattacttcttgcagtagtcccaattatagcagtttctgggattgtagaaatgaagttacttgctggaaatgcaaaaagagacaaaaaggaacttgaagctgctggaaaaattgctaccgaagcaatagaaaatattagaactgttgtttcacttacacaagaaagaaagttcgaatcaatgtatgtagaaaaattatatggtccatatagaaatagtgtacaaaaggcacatatttatggaattacattttcaatttcacaagcattcatgtattttagttatgcaggatgttttagatttggtgcttatttaatcgttaacggtcatatgcgttttagagatgttattttagttttctcagctattgtttttggagctgttgcattaggacatgcatcatcgtttgccccagattatgctaaagcaaaattaagtgcagcacatttatttatgctttttgaacgacaaccattaattgatagttattcagaagaaggacttaagccagacaaatttgaaggaaatattactttcaacgaagttgtttttaattatccaacaagagctaatgttccagtattacaaggattatctcttgaagtaaaaaaaggacaaacattagcccttgtaggatcaagtggatgtggaaaatctactgttgttcaattattagaaagattttatgatccattagctggaacagtttttgttgatttcggtttccaattacttgacggacaagaagcaaaaaaacttaatgttcaatggttacgagcacaattaggtattgtaagtcaagaaccaattcttttcgattgttcaattgctgaaaatattgcttatggagataatagtagagttgtatcacaagatgaaattgtttcagctgctaaagcagccaatattcatccatttattgaaactcttccacataaatatgaaacgagagttggtgacaaaggtacacaattatcaggaggacaaaaacaaagaattgcaatagcaagggctcttattagacaacctcaaattttattattagatgaagcaacaagtgctttagatacagaaagtgaaaaagttgttcaagaagctttagacaaagcacgtgaaggtagaacttgtattgttatagctcatcgtttatcaactatacaaaatgcagatttaatcgtcgtttttcaaaacggtagagttaaagaacatggtactcatcaacaattattagctcaaaaaggaatttatttcagtatggtttctgtacaagccggtactcaaaattta

SEQ ID NO: 7638 - DNA, 3858 bp, synthetic construct
  misc_feature 1..3858: note = source = /note="Description of Artificial Sequence: Synthetic coding sequence"
  source 1..3858: mol_type = other DNA
atggacttggaagccgcaaaaaacggaactgcctggcgcccgactagcgccgagggcgactttgaactcggaatctcatccaagcaaaaacgcaagaaaaccaagaccgttaagatgatcggtgtgctgaccctgttccgctactcggattggcaggacaaactctttatgtcgctgggaactattatggcaatcgcccacggatccggactgccgctgatgatgatcgtgtttggcgaaatgaccgacaagttcgtggataccgcgggcaacttctcattcccggtcaatttcagcctctcgctgctcaacccaggcaagatcctggaggaagagatgactcgctacgcctactactattccggactcggggctggagtgctcgtggcagcttacattcaagtctccttttggacccttgcagcaggacggcagatccgcaaaatccggcagaaattcttccacgcgatcctgcggcaggagatcggatggttcgacatcaacgacactaccgagctgaataccaggctgactgatgacatctccaagatcagcgaaggaatcggcgacaaggtcgggatgttcttccaggcggtggctacttttttcgcaggttttatcgtgggcttcatccgtggctggaagctgactttggtgatcatggccatctcacccatccttggcctttccgctgcagtgtgggccaagatcttgtcggcgttctcggataaagagctggcggcgtacgcaaaggccggcgccgtggcggaggaggcgctcggcgccatccgcaccgtgatcgccttcggagggcaaaacaaggagctcgagagataccagaagcatctggagaacgccaaagagatcggcatcaagaaagcaatctcagccaacatctcgatgggcatcgctttcctgctcatctacgcttcgtacgcccttgctttctggtacggctccaccctggtgataagcaaagagtatactatcggtaatgcgatgactgtctttttctcgatcctgatcggagcgttctccgtcggacaggcggcaccgtgcatcgacgcgtttgcgaacgctaggggcgctgcctacgtgatctttgacatcatcgataacaacccaaagatagattcgtttagcgaacgcggacacaagccagactcaatcaagggaaacctggagtttaatgacgtgcacttctcctacccatcacgggccaacgtgaagatcctcaagggactcaatttgaaagtccaatccggacagaccgtggcgctcgtcggatccagcggatgtggaaagtcgactactgtccagcttatccagcgcctttacgacccagacgaaggaactatcaacatcgacggccaggatatccgcaatttcaacgtgaattacctcagggagatcatcggagtcgtctcccaggaacccgtgctcttctccacgactattgcggagaacatttgctatggccgcggaaacgtgactatggacgaaatcaagaaggcagtgaaagaggcgaacgcgtacgaattcatcatgaaactgcctcagaaattcgacactttggtgggcgaacggggtgcacaactttcgggaggccagaaacagcggatcgcgatagcgcgtgcgctggtcagaaacccgaaaatcttgttgttggacgaggcgacgtcggcgctggatactgaatccgaggctgaggtgcaagctgcactggataaagcacgggaaggccgcactaccatcgtcatcgcccaccgcctttccaccgtgcgcaacgccgatgtgatcgccggattcgaggacggagtgatcgtggaacaaggatcgcattcagagctcatgaagaaagaaggggtgtacttcaagctggtgaatatgcagacctccgggtcccaaatccaatcggaagagttcgaattgaacgatgaaaaggcggcgaccagaatggccccgaacggatggaagtcccggctgttccgccactccacccagaagaatctcaagaacagccagatgtgtcaaaaatcgctggacgttgaaactgatggcctggaagctaacgtgccgccagtgtcatttctgaaggtcttgaagctgaataagaccgagtggccctacttcgtggtggggactgtgtgcgcaatcgcgaacggaggattgcagccagccttcagcgtgattttcagcgagatcatcgcaattttcggacctggagatgatgccgtgaagcagcagaaatgcaatatcttctcgctgatttttctctttcttggcattatctcgtttttcaccttcttcctccaaggtttcaccttcggaaaagcgggcgaaatcctcacgagacgcctgcgctcaatggcgttcaaggcgatgctgagacaggacatgtcttggtttgacgatcataagaatagcaccggggcgctgtcgaccaggctcgccaccgatgcggcccaagtccagggagcaactggaacccggctggcgctgatcgcacagaacattgccaacctcggcactgggatcatcatctcctttatctacggttggcaactgactcttctgctcttggccgtcgttcccatcatcgcggtgagcggcatcgtggaaatgaagctcctcgccggaaacgctaaaagggataagaaggaactggaagccgcgggtaagatcgcaactgaggccatcgaaaacatccgcactgtggtgtcgctgacccaagaacggaagttcgagtcaatgtacgtcgagaagctctacggtccttaccggaactcggtgcagaaggcgcacatctacggaatcactttcagcatcagccaagccttcatgtacttcagctacgccggatgctttagattcggagcgtacctcatcgtgaatggccacatgcggttcagagacgtgatcctggtgttctcggccatcgtattcggggctgtggcactgggacacgcctcctcatttgccccagactacgcaaaggcgaaactgagtgcggcacatttgttcatgctcttcgaaaggcagccgttgatagatagctactcagaagagggactgaagccagataagttcgaaggaaatatcactttcaacgaagttgtctttaactacccgaccagagcaaacgtgccagtcctccaaggactctccctcgaagtgaagaaggggcagaccctcgcactggtgggttcctccggttgcggtaagtcgaccgtcgtgcaactgttggagcgcttctacgatcccctggccggaactgtgttcgtcgatttcggatttcaactgctggatggacaagaagctaagaagctcaacgtccaatggctgcgagcccaactcggaatcgtgtcgcaagaaccaatcctctttgactgctccattgccgagaacattgcttacggtgataactcccgcgttgtgtcccaggacgaaatcgtgtcagccgccaaggcggccaacattcatccgtttatcgaaaccctgccgcacaagtacgaaacccgcgtcggagataaagggacccagctctctggagggcagaagcaaaggatcgccatcgcgcgcgccctcatccgtcagccgcaaattctgctgctggacgaggctacttccgctctggacaccgaaagcgagaaagtggtccaagaagcgctggacaaggcgcgggaaggaagaacgtgcatcgtgatcgcacatcgcctgtcgactattcaaaacgccgatctgatcgtggttttccagaatggaagggtcaaagagcatggaacccatcaacaactcttggcacaaaagggcatttacttctccatggtttcagtccaggctggaacccaaaacctg

SEQ ID NO: 7639 - DNA, 3858 bp, synthetic construct
  misc_feature 1..3858: note = source = /note="Description of Artificial Sequence: Synthetic coding sequence"
  source 1..3858: mol_type = other DNA
atggaccttgaggctgctaagaatgggacagcatggcggcccacctcagctgagggtgactttgagttggggatcagttcaaaacaaaaacgcaagaaaactaagactgtgaagatgattggcgttttgacattgttccgttattcggactggcaggacaaactgtttatgtccctcgggactataatggcgattgcgcacggctctggcttgccattgatgatgatcgtctttggggaaatgactgacaagttcgttgacaccgcaggcaatttttcttttcccgtaaacttttcactatcccttctgaatccaggaaagatactcgaagaagaaatgacgcggtacgcctattactatagcgggcttggagcgggcgtgttagtggcagcctacattcaggtgtcgttctggacccttgccgcaggccggcagataagaaagatacgtcagaagttctttcatgccatactcagacaggagatcggctggttcgacataaacgatacaaccgagttgaacactagactaacggacgacatttcgaaaatatctgaggggattggtgataaggttggcatgtttttccaggcagtggccacattctttgctggttttatagtgggattcatcagggggtggaaattgaccctcgtaatcatggccatttctccaattctgggcctttctgctgccgtgtgggcaaagatcctgagtgcattttccgacaaggaattagccgcttatgccaaggccggcgccgtggcagaagaggcactgggggcaatccgcacagttattgcgttcggcggccagaataaggaactcgagcgctatcagaagcatcttgagaacgccaaggagataggtatcaaaaaggccatatcagccaacatttccatgggaatagcctttctgctgatctatgcctcctacgcgttagctttttggtacggttccacgctggtgatcagtaaggagtatactataggaaatgcgatgacagtgttttttagcattctgattggcgcgttctccgtggggcaggccgctccctgcattgatgctttcgctaatgccagaggagcggcatacgtaattttcgacatcattgacaataaccctaagattgatagcttctctgagagaggacataaaccggactcaattaagggcaatctggagtttaatgacgtgcatttctcctaccccagtcgggccaacgttaaaatcttgaaggggctgaacctgaaggtgcagagcggacaaacagtagcactggtggggagctctggttgtggcaaatcaaccaccgtccagctgattcagaggctgtatgatcctgatgagggcacgattaacatagatggtcaagatatccggaattttaacgtgaactacctccgagaaataataggtgtggtgagccaagagccagtgctcttttcgaccacaattgctgagaacatttgctacgggcggggtaatgtgactatggatgaaataaagaaggccgtgaaggaggcaaatgcgtatgaattcattatgaagctgccgcagaagtttgacactctggtgggcgagcgcggggctcaactctccggggggcagaaacagaggatcgcaatcgccagagcgttagtgcggaacccgaagatactcctgcttgatgaagctacatccgcattggatactgaatccgaggcagaagtgcaggctgctttggataaggccagagaaggtcggaccaccatagtaatcgcacacaggctcagcactgtgcggaatgctgacgtgattgccggattcgaggatggcgtgatagtggaacagggatcacattccgagctgatgaaaaaggaaggtgtttactttaagttagtgaatatgcagacttccggaagtcagattcagtctgaagagttcgagctgaacgacgagaaagccgccacacgcatggcccccaacggctggaaatcgcgcctcttcaggcattctacacagaaaaatttaaaaaatagccaaatgtgccagaaatccctggatgtggaaacggacggcctggaggctaacgtcccgcccgtttcttttttaaaagtccttaagctgaataaaacagaatggccttattttgtagtgggtacggtttgcgctattgcgaatggagggctccaaccagctttttcagtgatatttagtgagattatcgcgatatttggccccggcgacgatgctgtgaaacagcagaaatgtaatatcttttccctgatcttcttgttcctgggcatcatctcgttttttacattcttcctacagggcttcaccttcggtaaggccggcgaaatccttactaggagattacgcagtatggcattcaaagctatgctccggcaggatatgagctggtttgacgatcacaaaaactccacgggcgccctatccacccgcctggcaaccgatgctgctcaagtgcaaggcgctacaggcacaaggctggcccttattgcccagaacatcgccaacctgggaaccggcataataatatcttttatttacggttggcagttgaccctgttactgctggctgttgtgccaatcattgccgtctcagggatcgtcgagatgaagctgctggcaggcaatgcgaagcgcgataagaaggaacttgaagcagccggtaagatagctacagaggctattgagaacatcaggaccgtcgtttcccttacgcaggaacggaaattcgagtctatgtacgtagagaagctgtatgggccgtacagaaattcggtccaaaaggcccacatctacggaatcaccttctcgatctcacaggctttcatgtatttttcatatgccggctgttttcggtttggggcatatctaatcgtgaacgggcacatgagattccgggacgtaatactcgtattctcagcgattgtgttcggcgcggttgcactgggtcacgcgtcttcgttcgctccggattatgccaaggctaagctatccgcggcccatttatttatgctgtttgagcgccagccactcattgacagttactccgaagaggggcttaaacccgataagtttgagggcaatataacattcaacgaagtagttttcaactacccaacacgggcaaatgttcccgttctacaggggctgtcgctggaagtaaagaaaggccagacgctggctctggtcggctcctccggttgtggaaagtccacggtggtacagttactagagagattttatgacccattggctggaaccgtatttgtggacttcggctttcagctgttggacgggcaggaagctaaaaagttgaatgtccagtggcttagggcacaactcgggatagtgtcgcaagaaccaatactcttcgactgttcaatagcagagaacattgcttatggcgataatagtcgggtggtctcccaagatgaaatcgtgtccgcagcaaaagccgcaaatattcacccttttatcgagaccctgccccacaagtacgagactagggttggcgacaaaggcacccagctgagtggaggccagaagcagagaatagctattgctagggccctgataaggcagccacagattttgctgctggacgaggcaacttcggccttggatacggagtcagagaaggtggtccaggaagcattggacaaggcgcgggaggggagaacctgcatcgtcatcgcccacagactgagcaccatccaaaatgcggatctcattgtcgtctttcagaacgggcgggttaaggaacacgggacccatcaacagctgctcgcacagaaaggcatatatttttctatggtgagcgtacaggcgggaacccagaacttg

SEQ ID NO: 7640 - DNA, 3858 bp, synthetic construct
  misc_feature 1..3858: note = source = /note="Description of Artificial Sequence: Synthetic coding sequence"
  source 1..3858: mol_type = other DNA
atggatctggaggccgctaagaatggcacggcctggcgacccacgtccgcggagggagactttgagctgggaatctccagtaagcagaaacgcaaaaagaccaaaacagtgaagatgatcggcgttcttaccctcttccgctactcagattggcaggacaagctgtttatgtctctggggaccataatggccatagcacacggatctggcttgcccctcatgatgatcgtttttggagaaatgactgataaattcgtggacaccgctggtaactttagtttccctgtcaattttagcctgtctttgcttaaccccggaaagatcctggaggaagagatgacacggtacgcttattactacagcggtctgggagcaggagtgttggtcgcagcctacatccaggtctccttctggactttggcagcaggacggcaaatcagaaagatacggcaaaaattttttcatgccatccttcggcaggagatcgggtggttcgacattaacgatacaactgagctgaacacgcgattgaccgacgacatctctaagattagtgagggcatcggcgataaggtaggaatgttcttccaggccgtcgcaacattcttcgcagggttcatcgtgggattcatccgaggctggaagctcaccctggtgattatggcaattagtccaatactgggtctctccgcagctgtgtgggctaaaattctgagtgccttttcagacaaggaacttgcggcttatgccaaggctggagctgtggccgaggaggcgctgggcgccatccgcaccgtgatcgctttcgggggacagaacaaggagctggaacgatatcaaaagcatctggagaacgcaaaggagattgggatcaagaaggcaatttcagccaacatatcaatgggcattgccttcctgctgatatacgcgtcctatgcactggccttctggtacggcagcacattggtcatctcaaaggagtatacaatagggaacgcgatgaccgtgtttttttccatcttgattggggccttcagcgttggccaggccgccccgtgcatcgatgcctttgctaacgcccgaggagctgcatatgtgattttcgatatcattgacaataatcccaagatcgatagctttagcgaacgcggacataagccagattctatcaagggcaacctggagttcaacgatgtgcattttagttacccaagtcgcgctaatgtgaagatcctgaagggtctcaatttgaaggtccagtccggacagacagttgccctggttggatctagcggatgtggcaagtccaccactgttcagctgatccagagactgtacgaccctgacgaaggaacaattaacattgacgggcaagacatcagaaacttcaacgtgaactacctgcgcgagattatcggagtggtgtcacaggaacccgtgttgtttagcactaccatagcggagaacatttgctatgggagaggcaatgtgactatggatgaaatcaaaaaggccgtgaaggaagctaacgcctacgaatttatcatgaagcttccccagaagttcgatacgctcgtcggtgagcgcggagcacagctgtcaggcgggcagaagcagagaatcgcgatcgctcgagctctcgttagaaacccaaaaatattgctgctggacgaggctaccagcgccttggacaccgagtccgaggctgaagtgcaggctgcgttggataaggcacgggagggccgcaccacgatcgttattgcacaccgcctgtctaccgtcaggaatgcagacgttattgctggctttgaagatggagtcatagtggaacaagggtcccactcagaacttatgaagaaagagggagtctatttcaagctggtcaatatgcagacgtccgggtcacagatccaaagcgaagagttcgaattgaacgacgaaaaagccgccacacgcatggcccctaatggctggaagagcaggctcttcagacattctacacaaaagaatctgaagaatagccagatgtgtcaaaaaagtctggatgtggagacggacggcctcgaagccaacgtgcctccagtctcattcttgaaggtcctcaaattgaacaaaacagaatggccctacttcgttgtgggcacagtatgtgcaatcgcaaacggcggtctgcagcccgcattttctgtaatattctcagagattattgctatattcggaccaggcgacgatgccgtgaaacaacagaagtgcaacattttttctctgatctttctctttttgggtatcatttcatttttcaccttttttctgcaagggtttacgttcggaaaggccggggagattctgacaaggaggctgagatccatggccttcaaggctatgctcaggcaggatatgagctggtttgacgaccataagaattctaccggggccctttctaccagactcgccactgatgctgcacaggtccagggcgctacgggtacgcgactcgcactcatagcccagaacattgctaatctgggaacaggtatcatcatttccttcatctatggctggcagcttacactcctgctgctggctgtggttccaatcatcgccgtgtcaggaatcgtggagatgaagctgctggccggaaatgcaaagcgcgataaaaaagaactggaggcagccggcaaaatcgcaaccgaagcaattgagaacatccgcacagtcgtatcactcacgcaggaaaggaagttcgaatcaatgtacgtcgaaaaactgtacggcccatatcggaatagtgtgcagaaggctcatatttatggcattacattcagtatttcccaggctttcatgtatttctcctatgcagggtgcttccgctttggggcttacctgatagtcaatgggcacatgcggttccgagatgtgatcctggttttctcagccattgttttcggcgctgtcgcacttgggcacgcctcctccttcgctcccgattacgccaaggccaaactgagcgccgcccacttgtttatgctgtttgaacgccagccattgatcgatagctatagtgaagagggcttgaagcctgacaagttcgaggggaatattactttcaatgaggtagtgttcaattatcctactagagccaatgtgccagtactgcaaggcctgagtctggaggtcaaaaaaggccagacccttgcattggtggggtcctccggatgtggcaaatctactgtggtgcagcttttggagcgcttttacgaccccctggctggaactgtgttcgtggacttcggcttccaactgctggatggccaggaagccaaaaaactgaatgtgcagtggctgcgggctcagctcggcatagttagccaagagccgatccttttcgactgttctatcgcggaaaatatcgcatacggcgacaattctcgagtggtgtctcaggacgaaatcgtgtcagctgctaaggccgccaatatccacccctttatcgaaacactgccacacaagtatgagaccagggtgggggataaagggacccaactttccggcggccagaagcaaaggattgccatcgcccgggcgctgattcgccaaccgcagattctgttgctggatgaggccacaagcgcccttgacactgaatcagagaaggtcgtgcaggaggcactcgacaaggctcgggaggggaggacctgtatcgtgatcgctcatcgcctgagcaccattcagaatgcagatctcatagtcgttttccagaatggccgagtcaaagaacacggaacgcatcagcaactgttggctcaaaaaggcatatactttagtatggtcagcgtgcaggcaggaactcagaacctg

SEQ ID NO: 7641 - DNA, 3858 bp, synthetic construct
  misc_feature 1..3858: note = source = /note="Description of Artificial Sequence: Synthetic coding sequence"
  source 1..3858: mol_type = other DNA
atggatctggaagcagcaaagaacggtaccgcctggcgccctacctccgcggaaggggattttgaattgggcatctcgtctaagcagaagaggaaaaagaccaaaactgtcaagatgatcggagtgctgaccctgttccggtactcagactggcaggataagctgttcatgtcacttggtaccatcatggccatcgcccacggatccggactcccactcatgatgatcgtgtttggagagatgaccgacaagtttgtggatacggccggaaacttttctttcccggtgaatttctccctgtccctgctcaatcccggaaagatcctcgaggaggagatgacccgctacgcctactattacagcggcctgggtgccggagtgctcgtggccgcttacatccaagtctcgttctggactctcgcagcaggacggcaaatccgtaaaatccgacagaaattcttccatgcaatcctccggcaggaaatcggttggttcgacattaacgatacgactgaactgaatacccgcctgacggatgacatctctaagattagcgagggtatcggcgataaggtgggaatgttctttcaagctgtggcgaccttcttcgctggcttcatcgtgggattcatcaggggctggaagctgactctggtgatcatggcaatctccccgatcctgggcctgtcagcggctgtctgggctaagatactgtcggccttctccgacaaggaactcgcagcatacgccaaagcgggcgccgttgctgaagaagcccttggcgccattcgcacggtgatcgcctttggaggccaaaacaaagaactggagagataccaaaaacaccttgaaaatgccaaggagatcggcatcaagaaggcaatctctgccaatatcagcatgggtatcgcgtttttgctgatttacgcgtcctatgcgctggcgttctggtacgggtccaccctcgtgatcagcaaggaatacaccatcggaaacgccatgactgtgttcttctccatcttgattggagccttctccgtggggcaggccgccccgtgcatcgatgctttcgcgaacgctcggggagctgcgtatgtcatctttgacatcatcgacaacaaccctaagattgactcgttctcggaaagaggacacaagcccgactccatcaagggcaatctcgagttcaacgatgtgcacttctcgtacccttcccgcgccaacgtgaagatactcaagggccttaacctcaaggtgcagtcgggccagaccgtcgccctcgtgggaagcagcggttgtggaaagtctaccaccgtccaactcatccagcgcctgtacgacccagacgagggcaccatcaacattgatgggcaggacatcaggaacttcaatgtgaattacctgcgcgagatcatcggggtggtgtcacaggaacccgtgttgttcagcactactatcgccgaaaacatctgctacggacggggaaatgtcacgatggacgagatcaagaaggccgtgaaggaggcaaatgcttacgagtttatcatgaagctgcctcagaaattcgacactttggtcggcgaacggggcgcccagctctcggggggacaaaagcagaggattgcaatcgcacgcgcgctggtgaggaacccgaagatcctgctcctggacgaagcaacctcagcacttgataccgaatccgaagccgaagtgcaggcggcattggataaagcaagggaaggaagaactactattgtgattgcccatcgactgtcgaccgtgaggaacgccgacgtgatcgcaggattcgaggacggagtcatcgtcgaacaggggtcccattcggagttgatgaagaaggagggagtgtacttcaaacttgtcaacatgcagacgtccgggtcgcagatccagtcggaagagtttgagctcaatgacgagaaggcggcgactcggatggccccaaatggatggaaatcgcggcttttccgccactccactcaaaagaacctcaagaactcacaaatgtgccagaaatccctcgacgtggaaactgacggacttgaggccaacgtccctcctgtctcgtttctgaaggtcctgaagttgaacaaaactgagtggccgtatttcgttgtcggcaccgtttgtgctatcgcaaatggggggctccaaccggccttctcggtgatcttctcagagatcatcgcaattttcggacctggcgatgatgcagtgaaacaacaaaagtgcaatatcttctcactgattttcctcttcctcggcataatctcattcttcactttctttctgcaagggtttactttcggtaaggcgggcgaaatcctcactcgcagactgcgcagcatggcctttaaggccatgcttcgacaggatatgtcgtggttcgatgaccataagaactcgactggagcgctgagcacccgcctcgctacggacgctgcccaggttcagggtgcgaccggcacccggcttgcgcttatcgcccagaacatcgcgaacctgggtaccggaattatcatcagcttcatctacggctggcaattgacgttgctcctgctggctgtggttccgatcattgccgtgagcggaatcgtggagatgaagctgttggccggaaacgcgaagcgggacaaaaaggaactggaggccgcaggaaaaatcgccaccgaagcaatcgaaaacatcaggaccgtcgtgagcctgacgcaggagcgcaaattcgaatccatgtatgtcgagaagctgtatggaccctaccgaaattcagtgcagaaggcacacatttacggaatcactttcagcatttcccaagcgtttatgtacttttcatacgctggatgtttccgctttggagcctacctgattgttaacggacatatgaggttccgggacgtgatcttggtgttctcagctatcgtgttcggcgctgttgcactgggacatgcgagcagcttcgcccccgactacgccaaagcaaaactgtcggcggctcacctcttcatgctgttcgaacgccaaccgctgatcgattcatactctgaggaagggttgaaacccgacaaattcgagggaaatatcaccttcaatgaggtcgtctttaactacccgactcgggcgaacgtccccgttctgcaaggcctctccctcgaggtcaagaaggggcaaactctggctctggttggaagctccggatgcggcaaatcgaccgtggtccaactccttgagcgcttttacgatccactggctgggaccgtgtttgtggacttcggctttcagctcttggacgggcaggaggcaaagaaacttaatgtgcagtggctgagggctcagctcggtatcgtgagccaggaaccgatcctctttgattgctcaatcgcagagaacatcgcgtacggagacaactcccgcgtggtgtcacaagacgagattgtgtccgccgccaaggcagctaacatccacccgttcatcgaaaccctcccacacaagtacgaaacgcgcgttggtgataagggtactcagctgtctgggggacagaagcagcgtatcgccattgcgcgcgccctgatccggcagccacaaattctgctgctggatgaggccacttcagccctggatactgagagcgagaaggtggtgcaggaggccctggacaaagcgagagaaggccggacctgtatcgtcattgcccaccggttgtcgactatccagaacgccgatctgatcgtcgtgttccaaaatgggcgggtcaaagaacacggaacgcatcagcaactgcttgcccaaaaaggaatctacttctcgatggtgtccgtgcaagcaggcacgcagaatctg

SEQ ID NO: 7642 - DNA, 3858 bp, synthetic construct
  misc_feature 1..3858: note = source = /note="Description of Artificial Sequence: Synthetic coding sequence"
  source 1..3858: mol_type = other DNA
atggatctggaagccgcaaagaatgggactgcatggcgcccaacgagtgcggagggcgacttcgaactcggtatctcgtcgaagcaaaagcggaaaaagactaagaccgtgaaaatgatcggagtgctgaccctcttccgctactcagactggcaggacaagctctttatgtcgctgggaactataatggcaatcgctcacggatccggtctgccgttgatgatgatcgttttcggcgaaatgacggataagttcgtggacaccgcggggaatttctcctttcccgtgaacttttcactctcgctcctcaatccaggaaagatcctggaagaagagatgacgcgctacgcgtactactactctggactgggcgccggtgtgctggtcgccgcatacatccaggtgtccttctggactctggcagccggacggcagatccgcaaaattcggcagaaattcttccatgccatcctccggcaggaaattggatggttcgacatcaacgataccactgagctgaacacccgcctgactgatgatatctcaaagatttcggaaggaatcggggacaaagtgggcatgttttttcaggctgtggctactttcttcgccgggtttatcgtggggtttatcaggggttggaaattgacgcttgttatcatggcgatctcgccgattttgggactgtcggccgccgtgtgggcgaaaatcctgtctgcgttttccgacaaagaactcgccgcgtacgcaaaggcaggggctgtcgcagaagaggcactcggagcgatccgcacggtgatcgctttcggtggacagaataaagagctggaaaggtatcagaaacatctcgagaatgctaaggaaattggaataaagaaggctatcagcgccaatatcagcatgggaatcgcctttctcttgatctacgcctcgtacgcactggccttctggtacggatcgaccctcgtcatctccaaggagtataccatcggcaatgccatgaccgtgttcttctcgattctgattggagccttctcggtcggtcaggcggccccttgcatcgacgccttcgcaaacgccagaggcgcagcgtacgtgatcttcgacattattgataacaacccgaagattgacagcttctccgagaggggtcacaaaccggattcaatcaagggcaatctggaattcaacgacgtgcacttttcgtacccgtcacgagccaacgtcaagattcttaaaggcctcaatctgaaagtgcagtctggacagactgttgctctggtcggctcgtcaggatgtgggaaaagcactaccgtgcaactgatccaacggctctacgacccggacgaagggaccattaacatagacgggcaggacatccgcaactttaacgtcaattacctgcgcgagattattggggtggtgagtcaggagccagtgctgttctccaccaccatcgcggaaaacatctgctatggacggggcaatgtgaccatggatgaaatcaaaaaggccgtgaaggaagcgaacgcctacgagttcatcatgaagctccctcaaaagttcgacactctcgtgggtgaacggggtgcacagttgagcggagggcaaaagcaacggatcgccatcgcgagggctctggttcgcaaccctaaaatcctgctgctggatgaggctacgtcagcgttggacaccgagtcggaagctgaggtccaagccgccctggacaaggcccgggagggacgaaccactatcgtgatcgcacatcggctgtccaccgtgcgaaacgccgacgtgatcgccggattcgaggacggcgtgatcgtggagcagggctcccactccgaattgatgaaaaaggaaggcgtgtactttaaactcgtgaacatgcagacctccgggtcccagatccagagcgaagagttcgagctcaatgatgagaaggccgccactagaatggcaccaaacggatggaagtcccggcttttcagacactcaactcaaaagaacctcaaaaactcccagatgtgccaaaaatcactggacgtggaaactgatggacttgaagccaacgtgcccccggtgtcattcctcaaggtgctcaaactgaacaagaccgaatggccatacttcgtggtgggcacggtgtgcgctatcgcgaatggaggccttcagccggctttctccgtcattttcagcgaaatcatcgccatcttcggaccaggtgatgacgccgtcaagcagcaaaaatgtaatatcttctctctcatcttcctgttccttgggataatctccttctttactttctttctgcagggcttcaccttcggaaaggcgggagaaatcttgactcggcggctcagatcaatggccttcaaagcgatgctgcggcaagatatgtcctggttcgatgaccacaagaactccaccggtgcactctctaccagactcgctaccgacgcggcccaggttcagggggccaccggaacgagactcgcgctcattgctcaaaacatcgcgaacctcggcaccggcattatcatctccttcatttacggatggcaacttactctcctgttgttggctgtcgtgccaatcatcgcggtgtcaggtattgtcgagatgaaactgctcgccggaaacgccaaaagagacaagaaggaacttgaggcggcgggaaaaatcgccaccgaagcgatagagaatatccggaccgtagtgtccctgacccaagaacgcaagtttgaatcaatgtacgtggagaaactgtacggcccgtatagaaatagcgttcaaaaggctcatatctacggaatcaccttttcgatctcccaggcgttcatgtacttctcctacgcaggttgctttcggttcggagcgtaccttatcgtgaatggacatatgcgctttagagacgtgatcttggtcttttccgctatcgtgttcggagccgtcgcgcttggacacgcctcatccttcgcccctgactacgcgaaggcgaagttgagcgcggcgcacctgttcatgctcttcgagagacagccgctgatcgattcgtactcggaggagggactgaagcccgacaagttcgaaggtaacatcaccttcaacgaggtcgttttcaactaccctacgagagccaacgtcccagtcctccaaggactttcgttggaagtcaaaaagggccagactttggccctcgtgggcagctctggctgcggcaagtcgacggtcgtgcagctgctggaaaggttctatgaccccctggcgggaaccgtttttgtggatttcggtttccagctcctcgacgggcaagaggccaagaaactgaacgttcaatggctgagagcgcagctgggcatcgtgtcacaagagccaatcctcttcgattgcagcatcgccgagaacatcgcctacggggacaacagccgcgtggtgtcacaggacgagatcgtctcggccgcgaaagccgccaacatccacccgttcatcgaaaccctgcctcacaagtatgaaactagagtgggagacaagggaactcagttgagcggcggtcagaagcagcgcattgccatcgccagggcgctgatccgccagccgcaaattctgttgcttgacgaagccacctcggctctcgacaccgaatcggagaaagtggtgcaggaagcgctcgacaaggccagagaagggagaacctgtattgtgatcgctcataggctcagcacgatccagaatgccgatctgatcgtggtgttccaaaatggacgcgtcaaggagcatgggacccaccaacagcttctggcccaaaaagggatatacttcagcatggtgagcgtgcaagcgggaactcagaacctg

SEQ ID NO: 7643 - DNA, 3858 bp, synthetic construct
  misc_feature 1..3858: note = source = /note="Description of Artificial Sequence: Synthetic coding sequence"
  source 1..3858: mol_type = other DNA
atggatcttgaggcagccaaaaacggaacagcatggcgccccacctccgcagagggggactttgagcttggaatttcatctaagcagaaaagaaagaaaaccaaaacggtgaagatgatcggtgttctgaccctcttcagatattcagattggcaggataagctctttatgtctctgggcaccattatggccatcgcccacgggtcagggctgccccttatgatgattgtcttcggcgaaatgacagacaaatttgtggacaccgctgggaacttcagcttccctgtcaacttctctttgagcctccttaatccgggcaagatcctggaggaggagatgactcgatacgcatactactactcggggttgggagcgggcgtactggtagcggcctatatccaggtgtccttctggacactcgccgccggccgccaaattaggaagatccgccagaagttcttccatgcgatcctgagacaggagattggttggttcgacataaacgacactaccgagttgaacacccggttaacagacgacatatcgaagatctccgaaggcatcggagacaaggtaggtatgttttttcaggccgttgctacgttcttcgcgggctttattgttggcttcatccgagggtggaaactcacactggtgatcatggcgattagccctatcttagggctctctgcagccgtctgggcaaagattctgtccgccttttcagataaggaactggccgcttatgctaaggccggggccgtcgccgaggaggccctgggtgcaattaggaccgtgattgcttttgggggtcagaataaggagctcgagagataccagaaacatcttgagaatgctaaggaaatcggtattaagaaggcgattagcgccaacatctcaatggggattgctttcttactgatttatgctagctatgccctggccttttggtatgggtcaaccctggtcatatccaaggagtacacaatcggcaacgccatgacggtgttcttctcgatcttaataggggcttttagtgtcggccaagctgccccatgtatcgatgcatttgcgaatgcacggggcgccgcctacgtcatttttgatataatcgacaacaatcctaaaattgacagtttcagtgaacgcggacataaaccggatagcatcaagggtaatttggaattcaatgatgttcatttctcttatccctcccgtgccaatgttaagatactaaaaggccttaacttgaaggtgcagtctgggcaaactgtggctctggtcgggagttccggatgcggcaagtctaccacagtgcaacttatccaacggctgtacgatccagacgagggtaccataaatattgacggccaggacattaggaatttcaacgtgaactatctgagggaaattataggcgtggtctcacaggaaccagttttgttcagcacgactatcgcagagaacatatgttatggccgcggcaacgttactatggatgaaatcaagaaggctgtgaaggaagcaaatgcctatgagtttatcatgaagctcccccagaagtttgatactctcgtcggtgaacgaggagctcaactgtcgggcggccagaagcaaagaatcgctattgctcgtgctttggttaggaatcctaagatcctccttctcgatgaggccacatctgccctagacacggagtctgaagcggaagtgcaagctgctctagataaggcccgtgagggccggaccactatagtcattgctcacaggctctctacagtccgcaacgccgatgtgattgccggcttcgaagacggcgtgattgtggaacagggatcccacagcgagctcatgaagaaggagggggtgtacttcaagctagtgaatatgcagactagcggctctcagatccagtccgaggagtttgagctaaacgacgagaaagctgcaacacgaatggcgcctaatgggtggaagtcccgcctttttcgccacagcacacagaagaacctcaaaaactcgcagatgtgccaaaaaagcttggacgtcgagaccgatggactggaggccaatgtgccacccgtgtccttcctgaaggtgctgaagcttaataagacggagtggccttattttgtggtaggtacagtgtgcgctatcgccaacggcgggcttcaaccagccttctctgtgattttctccgaaattattgccatcttcggaccgggcgacgatgccgtgaagcaacagaagtgtaacattttcagtctaatcttcctgttccttggcataatttctttctttacgttcttcctgcaggggtttacgtttggcaaggccggtgaaatcctgacgcggagattgaggtcaatggcctttaaggccatgctgaggcaggatatgtcttggtttgacgaccacaaaaactcaacaggcgccctcagcaccagactcgctacagacgcagcccaggtgcagggggcaaccggtactcggctggcactgattgcccagaatatcgctaatctgggaaccggaattatcatctctttcatctacggatggcaacttactttactgcttctcgccgtcgtgcccattatcgctgtaagcggcattgtggaaatgaaacttctagcaggaaatgcgaagcgcgataagaaagaactggaggcagctgggaaaattgctaccgaggctatcgagaacattcggacagtcgtgtcactcacacaggagagaaaattcgaaagtatgtacgtagagaagttgtacggaccttaccggaactcagtacagaaggctcatatctacggcatcacattttccatcagccaggctttcatgtacttctcatacgctggctgctttaggttcggagcctacttgattgtgaacggtcacatgcggttccgcgatgtcatacttgtgttctccgccattgtattcggggcagtggcactgggtcacgccagcagcttcgccccagactacgcgaaggccaaattgtctgccgcccacttgttcatgctatttgaaaggcagccgcttatagactcgtattccgaagagggcctaaaacctgataaattcgagggtaacatcactttcaacgaggtcgtgtttaactatcccacacgcgccaacgtgccggtgctgcaagggctcagcctggaggttaagaaggggcagacactcgcgcttgttggctcctccggctgcggaaagtcaactgtggtccagctccttgaaagattctacgatcccctcgctggcaccgtgttcgttgatttcggatttcaactcttggacgggcaggaagcgaagaagcttaacgtgcagtggttgcgagcccagctgggcattgtcagccaggagcccatcctctttgactgctctatcgccgaaaatatcgcgtacggcgataactcacgcgtggttagccaggatgagatcgtctccgctgctaaggcggccaacatacatccgttcatagagacactcccacataagtatgaaacccgcgtgggcgataaaggtacacagctgagcggaggccagaagcagcggatcgcaatagcccgagcgctgattagacaaccccaaatcctattgctggacgaggccacgtctgccctcgatacagaatcagagaaggtggtgcaggaggctttagacaaagcccgcgagggccgtacgtgcatcgtgatcgcacacagactgtcgacgattcagaatgctgatctgatcgtagtgttccagaatggtcgggtcaaggaacatgggacccatcagcaacttctggcacaaaagggcatctacttctccatggtgtctgtccaggccggaacccaaaatctc

SEQ ID NO: 7644 - DNA, 3858 bp, synthetic construct
  misc_feature 1..3858: note = source = /note="Description of Artificial Sequence: Synthetic coding sequence"
  source 1..3858: mol_type = other DNA
atggatctcgaggccgcaaaaaacggaacagcctggcgaccaacctcagctgaaggcgacttcgagctaggtatctcctcaaagcaaaaaaggaagaagacaaagaccgtcaaaatgatcggcgtactgaccctcttcagatacagcgactggcaggataagttgttcatgtcactcgggactatcatggcaatcgcacacggatcaggcctccctctgatgatgattgtgtttggagaaatgacagacaagtttgttgatactgccggtaacttttcttttcctgtcaacttttccctcagcctgttaaaccccggaaagattctggaagaggagatgaccaggtacgcttactattactcaggcctgggtgctggagtactggtggccgcttatatacaagtgtctttttggacactcgccgcaggccgacagatacgcaaaataagacagaagttcttccacgcgattctgcgccaggagatcggctggttcgacatcaatgacactaccgaactgaataccaggctcactgatgatatcagcaaaatcagtgaaggaataggagataaggtgggtatgttttttcaggctgttgcgactttctttgcgggattcatagtgggatttatacgcggttggaaattgaccctggttatcatggccattagccccatcctgggactatcggcggcagtttgggctaagattctgagcgccttcagtgacaaggagctcgccgcgtacgccaaggctggcgctgtggccgaggaggcgttgggagcaatcagaacggtaatcgcttttggcgggcagaataaggagctggaacggtatcagaagcacctggaaaatgctaaggagatcggcatcaagaaggctatctctgcaaatatcagcatggggatcgcctttctgctcatttatgcctcttatgcgctggccttctggtacgggtcaacactggtcatttctaaagaatatacaattgggaacgctatgaccgtcttttttagcattctcatcggagcttttagtgtgggtcaggccgctccctgcatcgacgcttttgccaatgctagaggagctgcctacgtcatcttcgacatcatcgacaataaccctaaaatcgacagcttcagcgaacggggccataaacctgactccatcaagggcaacctcgagttcaacgacgtccatttttcctacccatctagagctaacgtgaaaatcctgaaggggctcaacttgaaggtccagtccggccagactgtggccttggttggctctagtggctgtggcaagagtactaccgtgcagctcatacaacgcctctacgatccagacgagggcacaatcaacatcgatggacaggacatcagaaacttcaacgtgaactatcttcgcgagatcatcggcgtggtaagccaggagccagtgctctttagcacaactatagcagagaacatctgctatgggaggggcaacgtgactatggatgagatcaaaaaagccgtaaaggaagctaatgcttacgagtttatcatgaagctccctcaaaagttcgatactttggttggagagagaggagcccagctttccggcggacagaagcaacgaatcgccatcgcaagggcccttgtgagaaatccaaagatcctgttactggacgaggcaaccagtgcactcgataccgagagcgaagccgaagtccaagctgctcttgacaaagctcgtgaaggaaggaccaccatcgttatcgcacaccggctgtctactgtccggaacgccgacgtgatcgcaggctttgaggatggagtcattgtggaacaggggagccacagcgagctgatgaaaaaggagggagtgtattttaagctcgttaacatgcagacatccgggtctcagatccaaagcgaagagttcgaactgaatgatgagaaggccgctacccgaatggcacctaatggctggaagagccgactctttagacatagcacacaaaagaaccttaaaaacagccaaatgtgccagaagtccctggatgtggaaaccgacgggcttgaggcaaacgtgccacctgtgtcattcctgaaggtcctgaaactgaacaagacggagtggccatatttcgtcgtgggcacagtctgtgcgatcgcaaacggtggcttgcagcccgcttttagcgtcatttttagcgagatcatagcaatctttggccccggagatgacgcagttaaacagcagaagtgcaacattttctccctcattttcctcttcctgggtatcatcagcttctttacattcttcctgcagggattcacattcggaaaagcaggggaaatcctgactagacgattacgcagcatggctttcaaagctatgttgagacaagacatgtcatggtttgatgatcacaagaattccaccggggctctgagcacaagattggcgaccgacgctgcccaggtgcagggagccaccgggactagattggcactcatcgcccagaatatagccaacctcgggactggaattattatatcattcatttatggctggcaacttacccttcttttgctggcggtggtgcctattattgccgtgagcggaatcgtggaaatgaaacttctcgctggcaacgcaaaaagggacaagaaggagctggaggctgcgggaaaaatcgccaccgaggccatagagaacatccgtaccgtggttagtcttacacaagaacggaaattcgaatccatgtatgtagagaaactctatgggccttatcggaatagcgtgcaaaaggcgcatatctacggcataacttttagtatctctcaggcgtttatgtatttctcctacgctggatgcttccgatttggcgcctacctaatcgtgaacggccacatgcggttcagggacgttatacttgtgttctcagccatcgtcttcggagccgtggcccttggccacgcttcgtccttcgcgccggactatgctaaggcaaaactgtctgctgcgcatctcttcatgctctttgaacgccagcctctgatcgacagctacagtgaagagggcctgaaaccagataagttcgagggaaacattacatttaatgaagtggtctttaactaccccactcgggctaacgtgccagtcctacaaggattgtcgctggaagtcaaaaaaggacaaactctcgctctcgtcggcagttcgggatgcggcaagtcaacagtcgtgcagttgcttgaaagattctacgatccactggccggaaccgtgtttgtggattttgggttccaattgctcgacggacaggaggcaaaaaagctcaatgtgcaatggctgcgcgctcaactgggcatagtcagccaggagcctatcttattcgactgcagcatcgctgagaacatcgcatacggtgacaacagcagggtcgttagtcaggatgaaatagtgtctgccgctaaggctgctaacattcacccttttattgaaactctgccacacaaatacgaaacacgagtcggggataagggtacacaactgagcggtggtcaaaaacagcgaatcgccattgcccgcgccctcatcaggcaaccccaaatcttgctgcttgacgaagctacaagtgcgcttgacaccgagtccgagaaagtagtccaagaggccctggacaaggcaagagaaggaagaacctgtatcgttatcgcccacaggctctcaacaatacagaacgctgacctgattgttgtttttcagaatggaagggtcaaggaacatggcacgcaccaacagctgctggcacaaaaaggaatttatttcagcatggtgagcgttcaagccggaacccagaacctg

SEQ ID NO: 7645 - DNA, 3858 bp, synthetic construct
  misc_feature 1..3858: note = source = /note="Description of Artificial Sequence: Synthetic coding sequence"
  source 1..3858: mol_type = other DNA
atggaccttgaagcggcgaaaaacgggaccgcctggaggccgacgagcgccgagggagacttcgaactcggcatctcttccaaacagaagcggaaaaagaccaaaaccgtcaagatgatcggcgtcctcaccctcttccggtattcggactggcaagataagctgttcatgtccctgggcactatcatggcaattgcgcacgggtcagggctgcctctgatgatgatcgtgttcggagaaatgaccgataagttcgtagataccgcaggaaacttctcgttcccggtcaacttctccctttcgctcctgaacccgggaaagatcctggaggaggaaatgacccggtacgcgtattactactcgggactgggggcaggcgtgctcgtggccgcttacatccaggtgtctttctggactttggctgcgggacggcagatccgcaaaattcgccagaagttcttccacgccatcctgcgccaggaaattggatggtttgacatcaatgacaccaccgaattgaacactcggctgactgatgacatctccaagatctcggaagggatcggagataaagtcggaatgttcttccaagccgtagcgactttctttgcaggcttcatcgtgggattcattcgcggatggaagctcacccttgtcatcatggccatcagccccattcttggcttgagcgcggcggtgtgggcaaaaattctctccgcgttctcagataaagagctcgctgcctacgcaaaggccggagctgtggcagaggaggcactcggtgcaatccgcactgtgatcgcctttggagggcagaacaaggaactggaacggtaccagaagcacctcgaaaacgccaaggaaatcgggattaagaaagccatctcagccaatatcagtatgggtatcgccttcttgctgatctacgcctcctacgctctcgctttttggtacggttcgaccctcgtgatctcaaaggaatacactatcggcaatgccatgactgtgttcttctcgatacttattggagcttttagcgtgggacaggcggcgccatgcattgacgcattcgccaacgcccggggagctgcttacgtgattttcgatatcatcgataacaacccgaagatcgactcattctcagagcgcggtcacaagcctgactccatcaaaggtaacctcgagtttaatgacgtccactttagctaccccagcagagccaacgtgaagatcctgaagggactgaacctcaaagtgcagagcggacaaactgtggcgctggttggttcctcgggctgcggtaaaagcaccaccgtgcaactgatccagagactttatgatccggacgaggggaccatcaatatcgacggtcaggacatccgaaatttcaatgtgaattacctgcgggagatcatcggtgtggtgtcccaggagccggtcctgttttccactacgatcgctgagaacatctgctacggtagaggaaatgtcactatggacgagattaagaaggcggttaaagaagccaatgcgtacgaattcattatgaagctcccacaaaagttcgacactttggtgggagagagaggagcgcaactgagcgggggccaaaagcaaaggattgctatcgcccgcgccctcgtgcgaaacccaaagatccttctgctggatgaagcgacttccgctttggataccgaatccgaggcggaggtgcaggccgccctcgataaggcgagagaaggaaggaccacgatagtgatcgcacatcgcctgtcgactgtccggaatgcagacgttatagcaggatttgaggacggagtcatcgtggagcagggctcccactcggaactgatgaagaaagagggcgtctacttcaaactggtcaacatgcaaacctcgggctcccagattcagtcagaggaattcgaactcaacgatgaaaaagcggctacccggatggcaccaaatggctggaaatcaagactgtttcgccatagcacgcagaagaatctgaaaaattcacagatgtgtcagaagtcactggacgtggaaactgatgggttggaagccaacgtcccaccggtgtccttcctgaaggtgttgaagctgaacaaaactgagtggccgtacttcgtggtgggcaccgtgtgcgctatcgccaacggcggtctgcaaccggccttctcggtgatcttctcagaaatcatcgccatcttcggaccaggagacgacgcggtgaagcagcagaagtgtaacatcttctcgcttatcttcctgttccttggcatcatctcttttttcaccttcttcctgcagggatttaccttcggcaaggcaggagagatccttacccggcgcttgcggtcgatggcctttaaagccatgttgagacaggacatgagctggtttgatgatcacaaaaattccactggagccctctccaccagacttgctactgacgcggcccaggtgcagggcgccaccggcacccgcctggcgctgatcgcccagaatatcgcaaatttgggaacgggaatcatcatctcattcatctacggctggcagctcactctgttgctcctcgccgtggtgccaatcatcgctgtctcgggaatcgtggaaatgaagctgctggccggcaacgcgaagagagacaagaaagagctggaggctgccggtaagatcgcaactgaagccatcgagaacatccgcaccgtggtcagtctgactcaagagaggaagttcgaatcgatgtacgtggaaaagctctacggaccgtaccggaacagcgtgcaaaaggcccatatatacggaatcactttttctatctcccaggcgttcatgtacttcagctacgccggttgctttcggttcggagcatacctgatcgtgaatggacacatgcgcttccgggacgtcatcctggtcttttcggccattgtctttggggcagtcgctctcggacacgcaagctcgtttgcgcccgactacgccaaggccaaactgtcggctgctcatctgtttatgctgttcgaacgccaaccgctcatcgacagttattcggaggaagggctgaagccggacaaatttgagggaaacatcaccttcaacgaagtggtgttcaactaccctactcgggcgaacgtccctgttttgcaaggactgtcgctggaagtgaagaaggggcaaaccctcgcgctggtgggatcctcggggtgcggaaagtccacggtcgtgcagctgctggagcgcttctacgatcctctggctgggactgttttcgtcgatttcggctttcagctgcttgacgggcaggaggcgaaaaagctgaatgtccagtggctgcgtgcccagctcggaatcgtctcccaagaacctatcctcttcgattgtagcatcgccgaaaacatcgcgtacggagataactcacgcgtggtgtcgcaggatgaaattgtgagcgcagccaaggcagctaatattcatccattcatcgaaaccctgccccataagtacgagactagagtgggcgacaagggaacgcagctgtccggcggccagaagcagaggattgccatcgcacgcgcactgatcaggcagccgcagatcctcctccttgatgaagcaacctcagccctcgacactgagagcgaaaaggtggtccaagaagccctggacaaggcgcgcgaaggtcgaacttgcattgtgattgcccatcgcctgagcaccatccaaaacgccgacctcatcgtcgtgttccaaaacggaagagtgaaggagcacggaacgcaccagcaactgctggcacaaaagggaatctacttctcaatggttagcgtgcaagccggaacccaaaacctc

SEQ ID NO: 7646 - DNA, 3858 bp, synthetic construct
  misc_feature 1..3858: note = source = /note="Description of Artificial Sequence: Synthetic coding sequence"
  source 1..3858: mol_type = other DNA
atggatctcgaagccgccaagaatggtaccgcatggcgcccgacttccgcagagggtgactttgaactgggtatttccagcaagcaaaagcggaagaagactaagaccgtcaagatgataggggttctgaccctgtttcgctatagcgactggcaagacaagctgttcatgtcgttaggaaccattatggccatcgcgcatggcagtgggctcccccttatgatgattgttttcggggaaatgaccgacaaatttgtggataccgccggcaactttagtttcccggtgaacttttctctgtccctactcaatcctggtaagatcctcgaggaagaaatgaccaggtatgcctactactattcgggactgggggcgggtgttttagtagcggcatatatccaggtgagtttttggactttggctgccggtcgacagatacgtaaaattagacagaagttctttcacgctatcctccgccaggaaattggctggtttgacatcaatgacaccacagaattgaatacccgtctgactgacgacatttcgaaaatcagtgagggcattggtgataaggttggtatgttctttcaagcggtcgctactttctttgcgggtttcatcgtcgggttcatacgtggatggaagctaacgttggttatcatggccatctctcctatcttgggtctgtccgcggcggtatgggctaagatcctgtctgcgttcagcgacaaggagctggccgcttatgcgaaggccggcgcagtcgccgaggaggcacttggcgctattcgcaccgtgattgcctttggaggtcaaaacaaagagctcgagcggtatcaaaagcatcttgagaacgcgaaggaaattggaattaaaaaagctatctcggcaaatattagcatgggtatcgcctttttgttgatttatgcctcttatgccctggccttctggtatggcagcaccctggtgatcagcaaagagtatactatcggcaacgctatgactgtttttttcagcattttgataggagccttctctgtgggtcaggcagccccatgcattgacgcctttgcaaacgcacggggtgcggcgtatgtgatctttgacatcatcgataacaacccaaagatcgacagcttttctgaaaggggccataagccagacagcatcaagggtaacttggaattcaacgatgtccacttcagctatccatcccgcgcgaatgttaagattctcaagggtctgaacctgaaggtgcaatctggacagactgtcgcacttgtcggtagtagcggctgtgggaagtctaccaccgtgcaattaattcagcgcctgtatgatcccgatgagggcaccattaacattgacggtcaggacatacgtaacttcaacgtgaactacctccgcgaaataattggagtcgtgtctcaggagccggtcctgttcagcacgactattgctgagaacatttgctacggccggggtaatgttactatggacgagatcaagaaggctgttaaggaggcgaacgcatatgagttcatcatgaaattgcctcaaaaatttgatactctggttggggagcgtggtgcgcagttgtccggaggtcagaaacaacgaattgctatcgcccgtgcgctcgtcaggaatccgaaaatcctattgctcgatgaggcgacctccgcactcgacaccgagagcgaagcggaggtccaagcggcactggacaaagcacgcgaaggtcggacgaccatcgtcattgcccatcgactgtcaacggtccgcaacgctgatgtgatagctggatttgaggacggcgttatagttgagcagggttcccatagcgagcttatgaaaaaagaaggcgtgtatttcaaactggttaacatgcaaacctctggcagtcaaatccaaagcgaagagtttgaactgaatgacgaaaaggccgcgacccgtatggcgcctaatggttggaaatctagactgttcagacatagtacgcagaagaatctgaaaaactctcagatgtgccagaagagcttggacgttgagacggacgggctggaagctaatgttcctccggtgtcatttctgaaagtcctgaagctgaacaagacggagtggccttatttcgttgtaggcacggtgtgtgcgattgcgaacggcggtctgcagccggccttcagcgtcatcttttcggagataatagctatcttcgggccgggtgacgacgcagtgaagcaacagaagtgcaatattttctccctgatcttcctgttcctgggcatcatttcattctttactttttttcttcaagggtttaccttcggcaaagcaggcgagatcctgacccgtcgcctgcggagcatggcgttcaaggcgatgctacggcaggacatgtcctggttcgacgaccacaaaaacagcaccggcgccctgagcacccgcctggctaccgatgccgctcaggttcaaggagccacgggaacccggcttgccttgattgcccagaacatcgcaaacctgggtaccggtattattatttcatttatatatgggtggcagttgaccttgctgctgctggcggtcgtaccaatcatagcagtctctggtatagtcgagatgaaactgttagccggaaacgctaagagggacaagaaagaactcgaggccgccggaaaaatcgcaacggaggcaattgagaacatccgcactgtcgtttctctaacgcaggagcgtaaattcgaatcaatgtatgtggagaagctgtacggtccttacagaaacagtgtccagaaagcgcacatttatggcattacattttcgatctcccaggcgtttatgtatttctcctatgcaggttgttttcgcttcggcgcttacctgatagttaacggccacatgaggtttcgcgatgttattctcgtgttctcagcgatcgtatttggagcagttgcattgggacatgcaagcagcttcgcgccggactacgccaaagctaagctcagtgctgcgcacttatttatgctgttcgagcggcagccgctgattgacagctactccgaggaaggcctgaagccagataaatttgaaggcaatatcacattcaacgaagtggtgtttaactacccgacgcgcgccaacgtcccagttctgcagggcttgtctctggaggtgaaaaaaggtcaaactctcgcgcttgtaggaagctctggatgcggtaagagcaccgtggttcaactgctggagcggttctatgacccgctcgccgggacagtatttgtggatttcgggtttcagctgctggacgggcaagaggcaaagaagcttaacgtgcagtggctacgggctcagctgggcattgttagtcaggagcctattttatttgattgctccatcgccgagaatatagcttatggcgataattccagggttgtgagtcaggatgagattgtgtctgcggcaaaggccgctaacattcatccttttattgaaactctcccgcacaaatatgaaacgcgggtcggtgataaaggcacccagctgtccggtggtcaaaaacagcggattgctattgcgcgcgcgttgatcagacagccgcagatcttgttgctggatgaggctacgtcagcgctggacacagaaagcgagaaggtggtacaagaagcattggacaaggcgcgcgagggccgcacatgtatcgtgattgcacaccgtctgtccactattcagaacgcagacctcatcgttgtgttccagaatggtcgggtaaaagagcatggtacccatcagcagctgctggcccagaagggtatttacttcagcatggttagcgtgcaggcgggcacccaaaatctg

SEQ ID NO: 7647 - DNA, 3858 bp, synthetic construct
  misc_feature 1..3858: note = source = /note="Description of Artificial Sequence: Synthetic coding sequence"
  source 1..3858: mol_type = other DNA
atggatctcgaggcagcaaagaacggaactgcatggcggccaacgtctgcagaaggcgactttgagctcggcatctcaagcaagcaaaaacggaaaaagactaagaccgtcaaaatgattggagtgctcactctgtttcggtacagcgactggcaggataagctgtttatgtcactcggtactatcatggccattgcacatggatcaggacttccgctcatgatgatagtgttcggtgaaatgactgataagttcgtagataccgccgggaacttttcatttcccgtcaatttctcgctctcactgcttaatccaggtaagatactggaagaggagatgactaggtatgcatactactacagcggccttggggccggagtccttgtggccgcatacattcaggtgtcattttggaccctcgcagctggcaggcaaatccggaagatcagacagaagtttttccatgcgatcctgaggcaggaaatcggttggttcgacataaacgatactaccgagcttaacacccggttgacggatgacatttcgaagatttcagaaggaatcggggataaggtgggcatgtttttccaagctgtcgcgacgttcttcgcaggcttcatcgtgggatttatccgcgggtggaagttgaccctggtgatcatggcgatctcacctatacttggactgtcagcagcagtctgggccaagatcctgagcgctttttcagataaggaactcgcggcttacgcaaaagctggcgcggtggcggaggaagcattgggcgctattcgaaccgtcatagcctttggaggccaaaacaaggaactcgaacgctaccagaaacatcttgaaaacgctaaggaaattggtatcaagaaggccattagcgcaaacatttccatgggaattgcctttctcctgatatacgcctcgtacgctctggccttttggtacggttcaactctggtgatttccaaagaatacactatcggcaatgcgatgaccgtgttcttttcaatacttattggagcattttcagtgggacaagcggctccgtgtatcgatgcattcgccaacgcgcggggggcggcatacgtcatcttcgacattatcgataacaaccctaagatagattcattctccgaaagaggtcataagccagactccattaagggaaacttggaattcaatgatgtgcatttttcctacccgtcccgcgccaatgtgaagatccttaaaggtctgaaccttaaggtgcaatcgggacagaccgtggctcttgtgggttcgtcgggttgcggaaagtccactaccgtgcaactgattcaacgactttacgatcctgacgaaggaacgatcaacattgatggtcaggacattagaaactttaatgtgaattatcttcgcgagataataggcgtcgtctcacaagaaccagtgcttttttcgaccaccatagccgaaaacatatgctacggcagagggaatgttacgatggatgaaatcaagaaggcagttaaggaggcaaacgcatacgagttcatcatgaaactgccccaaaagtttgataccctcgttggagaacgtggagctcaactcagcggtggtcagaaacagagaatagcgattgcaagagcactggtgcggaatccaaagattctgctgcttgacgaggctacttccgcacttgataccgaatctgaggccgaagtccaagcagcccttgataaggccagggaagggcgcactaccattgtgatcgcgcatcggctttcaactgtgagaaacgccgatgtgatcgccggatttgaggatggtgtgatcgtcgaacaaggtagccatagtgaacttatgaaaaaagaaggcgtgtactttaagctcgtcaacatgcagacttcaggatctcagattcaatcggaagagtttgaactgaacgatgaaaaggccgcaaccaggatggcccccaacggatggaagtcgcgtctgtttaggcactctacccaaaagaatctgaagaacagccagatgtgtcaaaaatcacttgatgtcgaaactgacggcctcgaagcgaacgtcccgccggtgtcgtttctgaaggtcctcaaactgaataagacggaatggccgtattttgtggtcgggaccgtgtgtgccattgcgaacggaggcctgcagcctgctttttcagtcattttcagcgagattattgcgatcttcggccctggtgatgatgcagtgaaacaacaaaaatgcaacattttcagcctgatttttctttttctcggaattatctcgtttttcaccttttttctgcagggatttactttcggaaaagctggagaaatactcaccagacgactgagaagcatggcatttaaggcaatgcttcgtcaagacatgtcgtggtttgatgatcataagaactcaaccggagcactctcgactaggctcgcaaccgatgcggcacaagttcaaggtgcaaccgggactcgtttggcccttatagcacaaaacatagcaaaccttgggactggaatcattatctcattcatctacggttggcaactcactttgctgctgttggccgtggtgcccattattgccgtgtccggtatagtggaaatgaagctgctggctgggaacgcaaaaagagacaagaaggaacttgaggccgcgggaaagattgcaacggaagctatcgaaaacattcggaccgtggtgagcctgacccaggagcgcaagtttgaatcgatgtacgtggagaagttgtacggcccctacaggaacagcgtccagaaggcccacatttacggaattactttttcgatttcacaggcgtttatgtacttctcgtacgccggttgtttccgcttcggagcatacctcatcgtgaacggacatatgaggtttcgggacgttattctggtgttttccgcaattgtgtttggagccgtggctctgggacatgcatcgtcctttgcccctgactacgctaaggcaaagttgtccgcagcccatctgtttatgctgtttgaaagacaaccacttattgattcgtactcggaagaaggtctgaaacctgacaagttcgaaggcaacatcacttttaacgaggtggtgttcaactacccgaccagagctaacgttccagtgcttcaaggactttcgctggaggtgaagaagggacagaccctggccctcgttggttccagcggatgtggtaagtcgaccgtggtgcaacttctggagagattctatgaccccctcgccgggactgtctttgtggacttcggatttcagttgctggacggacaggaagcgaagaagctgaacgtgcagtggctcagagcacaactgggcatagtctcccaggaaccaatcttgtttgactgctccatcgcagagaatatcgcatacggggataactccagggtggtgtctcaagatgagatagtctccgcagcaaaagcagctaacattcatccctttattgagactctccctcacaagtacgagactcgcgtgggagacaaggggacccaattgtcgggcggacagaagcaaaggatcgcaatcgctagggctctgatccgacaacctcaaatactgctgctcgatgaggcgacgtccgccctcgacactgaatcggaaaaggttgtgcaagaagcacttgataaggcacgcgaaggtcggacctgtattgtgattgcccatcgactgtccactattcagaatgcagatcttattgtcgtgtttcagaacggtagggtgaaagagcacggtacccatcagcagctgttggcacagaagggaatctacttttcgatggtttcggtgcaggcgggaacccagaatctt

SEQ ID NO: 7648 - DNA, 3858 bp, synthetic construct
  misc_feature 1..3858: note = source = /note="Description of Artificial Sequence: Synthetic coding sequence"
  source 1..3858: mol_type = other DNA
atggacttggaggccgcgaagaacggcaccgcgtggcggcccacgagtgccgagggggactttgagctcggcatcagctccaaacagaagcgcaagaagacgaagaccgttaagatgattggtgttctcaccctgttccgctactcggactggcaggataagctgttcatgtcactaggcacaatcatggccatcgcgcacgggtccggattgccgctaatgatgatcgtgtttggcgagatgaccgataagtttgttgataccgccggcaacttcagctttcctgttaacttctccctcagcctcctgaatccgggcaagatccttgaggaggagatgacccgctatgcgtactactactctggcctcggagctggagttttagtggcagcctacatccaagtgtccttctggactctcgctgctggacgccagatccggaagatccggcagaagttcttccacgcaattttgcgtcaagagatcggttggttcgatatcaatgacacgacagagctgaacacccgcctgaccgatgatatttctaagatctcggaggggatcggtgacaaggtgggcatgttcttccaagcggtggctaccttcttcgcgggtttcatcgtagggttcatccgcggttggaagttgacgctagtgattatggctatctcgccaattttgggactgtccgccgctgtgtgggccaagatcctgagcgccttctccgataaggagctggcagcttatgcaaaggccggtgcggtggcagaggaggctctgggagccattcgtacggtcatagccttcggcggccagaacaaggagctcgagaggtaccaaaagcacctggagaacgccaaagagatcggcatcaaaaaggctatcagcgcaaacatttccatgggcatcgcatttctcctgatttatgcttcttacgcgcttgccttctggtatggctccacccttgtgattagtaaggagtacaccattgggaatgccatgaccgtcttcttttcgattctgatcggtgcattctccgtcggtcaagccgcgccctgcattgatgccttcgcgaatgcccgtggtgccgcatacgttatttttgacatcattgataacaaccctaagatcgattccttcagcgagcgtggtcacaaaccggattctatcaagggcaacctcgaattcaatgatgtccacttctcataccccagtcgcgctaacgttaagatcttgaagggcttgaatttaaaggtgcagagtggccagaccgtcgctcttgttggctcatccggctgcggtaaatccaccaccgttcaactgattcagcggctgtacgatcccgatgagggcacaatcaacatcgatggccaagacatccgaaactttaacgtcaactacctccgggagatcatcggcgtcgtcagccaggagccggtcctgtttagcaccaccattgccgagaatatatgctacggccgcggcaacgtgactatggatgagatcaaaaaggctgtgaaggaggcaaatgcctacgagttcattatgaagctgccgcagaagttcgataccctggtcggtgagcgcggcgcgcagctttctggtggtcagaagcaacgtattgccatagctcgagcgctcgtgcgcaatccgaagatcctgctcttggacgaggccacgtctgctctggacacggaaagcgaagccgaggtccaagcggcccttgacaaggctagagagggtcgcactacaatcgttattgcccacaggctcagtaccgtgcgaaatgctgatgtcattgccggattcgaggacggtgtgatcgtcgagcagggatcacacagcgagctcatgaagaaggagggagtgtactttaaactggttaacatgcaaaccagcggcagccaaatccaatccgaagagttcgagctaaacgacgagaaggccgccacccgtatggcacccaacggatggaaaagccgcctctttcgacactcgacccagaagaacctcaagaattcccagatgtgccagaaatccctcgatgtcgagacggacggcctcgaggccaacgtccctccggtcagcttcttgaaggtcttgaaattgaacaagacagaatggccctacttcgtcgtggggacggtctgcgccatcgcgaacggcgggttgcaaccggcattcagtgtcatcttctccgaaatcattgccatttttggcccgggtgatgacgccgtaaagcagcagaagtgcaacatttttagcctcatcttcctttttttgggaatcatatcgttctttacattcttcttgcaggggttcactttcggcaaagcgggcgagattcttacccggagactgcgctctatggcatttaaggctatgcttcgtcaagacatgtcctggtttgacgaccacaagaatagcaccggagccttgtccacccgtttggccactgatgccgctcaagtgcaaggagcgacaggaacccgtctggccctcatcgcccagaacatcgcaaatctgggcacaggtatcattatctctttcatttacgggtggcagctgacgctcctacttttggccgtcgtgcctattattgcagtctctggtatcgttgagatgaagcttcttgccggcaatgcaaagcgagacaagaaggagctcgaagccgccggaaagatagctaccgaagccatcgagaacatccgcaccgtggtctctctcacccaggaaagaaagtttgaatcgatgtacgttgagaagctttatggcccttatagaaactccgtccagaaggctcacatttatggcatcactttctccatctcgcaagcattcatgtacttttcctacgccggctgctttcgcttcggcgcctatcttatcgtcaacggccacatgagattccgcgacgttatcctggtgttcagtgccatcgtgtttggggccgttgccctgggacatgcttcctccttcgcgcctgattacgcgaaggcaaagctgtcagctgctcatcttttcatgttgtttgaacgccagcctctgattgactcctactccgaggagggccttaagccggacaagttcgaaggtaacatcacctttaacgaggttgtctttaactatcccacgcgagccaacgtgcctgtgctccagggactcagcctggaggtcaagaagggccagaccttggcccttgtgggttcctcgggatgcgggaagagcactgttgtgcagttgctggagcgtttttacgatccgcttgctggtaccgtcttcgttgacttcggcttccagctccttgacggtcaggaggcaaaaaagctgaacgttcagtggttgagggcccagcttggcatcgtgagccaggagccgatcctgtttgattgttccattgcagaaaacatcgcttacggcgataacagccgtgttgtctcccaggacgagatcgtctctgcggccaaggccgctaacatacacccttttatcgagacactcccccacaagtacgagacccgagtcggcgataagggcacccaactttcgggtggccagaagcagcgcatcgccatcgcccgcgcactaatcaggcaaccacagattttactgctggatgaggctaccagtgctctcgatacggagagcgagaaggttgtacaggaggcactggacaaggctagggaaggccgcacctgcattgtgattgcgcaccgcctgtccaccatccaaaacgcagatcttatagttgttttccaaaatggccgcgttaaggagcacggcacgcatcagcagttgctggcccaaaagggcatctatttctcgatggtcagcgttcaggcgggtacccagaacctc

SEQ ID NO: 7649 - DNA, 3858 bp, synthetic construct
  misc_feature 1..3858: note = source = /note="Description of Artificial Sequence: Synthetic coding sequence"
  source 1..3858: mol_type = other DNA
atggatctggaagcagccaagaatggaactgcgtggaggcccacctcggctgaaggcgattttgagctgggcatctcgtcgaagcagaaacgcaagaaaaccaagactgtgaaaatgattggcgtgcttactctcttcagatactccgactggcaagacaagctgttcatgtcactgggtaccattatggcaatcgcacacgggtcaggattgccacttatgatgatagtttttggggagatgactgacaagttcgtcgacacggctggaaatttctcgtttccagtgaacttctcactctcactgctgaatcccggaaaaatcctcgaagaagagatgacgcgctacgcctactactacagcgggctgggagctggagtcctcgtggccgcctacatacaagtgtcattctggaccctggccgcgggacggcaaatcaggaagattcgacaaaagttctttcacgctatccttcgccaagaaattggatggttcgacattaatgacacgactgagctgaatactcgccttaccgacgacatctcgaagataagtgaaggcattggagacaaggtcggaatgttcttccaggctgtggcaaccttcttcgccggattcatcgtcggatttatccggggatggaaactgaccctcgtgatcatggccatttcgcctatcctcggactctccgctgccgtgtgggcaaaaatcctgtccgccttctcagataaagaactggctgcgtatgctaaagcaggcgcggtggcggaggaggcactgggagcgatcaggactgtcatagcgttcggagggcagaacaaagaattggagaggtaccagaagcatcttgaaaacgcgaaagagatcggaatcaaaaaggctatcagcgccaacataagcatgggaattgccttcctgctcatctacgcttcgtatgcactggcattctggtacggctcgacgctggtgatctcgaaggaatacaccatcgggaatgccatgaccgtgtttttctccatcctgattggagcgttttcggtgggccaagcggccccgtgtatcgacgcattcgctaatgcacgcggcgcggcctacgttatctttgatatcatcgacaataacccgaagatcgactcgttctcggagagagggcacaagcccgactcgatcaaaggaaacctcgagtttaacgatgtccacttctcgtacccttcaagagcaaatgtcaaaatcctgaaggggctgaacctgaaggtgcagagcgggcagaccgtggcgttggtgggctcatccggctgtgggaagtctacgactgtgcagctcatccagcggctgtacgatccggacgaagggaccatcaatatcgacggacaggatatccgcaatttcaacgtgaactacctgcgggaaatcattggagtggtcagccaagagccggtgctgttttcgaccactatcgcggaaaacatctgctacggacgcggtaacgtcactatggatgagattaagaaagcggtcaaggaagcaaatgcctacgagttcatcatgaagctgccacagaagttcgacactttggtgggcgagcgcggggcacaacttagtggaggtcagaagcagcggatcgcaatcgcccgcgcgctcgtgagaaatcccaaaatcctgttgctcgacgaggcaacctccgccctggatacggagtccgaagccgaggttcaggctgccctcgacaaggcgcgcgagggccgcactaccatcgtgatcgcacacagactctccaccgtgaggaacgccgatgtgatcgcaggcttcgaggatggagtgatcgtggaacagggcagccactccgaactgatgaagaaggaaggtgtgtacttcaagttggtgaatatgcaaacctcaggatcacaaatccagtccgaagagttcgaactgaacgacgaaaaggccgccacgcggatggccccaaacggatggaaaagccgcctgttcaggcattccactcagaagaacctgaagaacagccagatgtgtcaaaagtcattggatgttgagacggacggcctcgaagccaacgtgccgcctgtgtcgttcttgaaagtgctcaaactgaataagactgaatggccgtacttcgtggtcggaactgtctgcgctatcgccaacggcgggttgcagccggcgtttagcgttatcttttcggagatcatcgcgatatttggccccggcgatgacgcagtgaagcagcaaaagtgcaacatcttctcccttatctttctgttcctcggaatcatctccttcttcactttcttcctgcagggcttcaccttcggcaaagctggcgaaatcttgacccggcggttgcggtccatggccttcaaagcgatgctgagacaggacatgtcatggttcgatgatcacaagaatagcaccggtgcactgtcaacccgcctggcaactgatgctgcccaggtgcaaggagcgaccggcactcgccttgccctcatcgcacagaacatcgccaacctgggtaccggaatcattatctcattcatatacggctggcagctcaccctgctgctgctggcagtggtgccaatcatcgcggtgagcggaatcgtggaaatgaagctgctggctgggaacgctaagcgcgacaaaaaagaacttgaggccgctggtaagatcgcgaccgaggcaatcgaaaacatccggaccgtcgtcagtctgactcaggagagaaagtttgaatcgatgtacgtggaaaaactctatggaccgtacaggaattcggtccagaaggcccacatctacggaatcactttctccatctcccaggctttcatgtacttctcatacgccggatgctttaggtttggagcctaccttatagtgaacggtcatatgcgtttccgggatgttattctggtgttctcagcaatagtgtttggggccgtagcgctggggcatgcgagctcttttgccccagactatgccaaggccaagttgtccgccgcccatctgtttatgctcttcgaaagacaacctctcattgactcttactccgaggaagggttgaagcccgataagtttgaaggaaatatcaccttcaatgaagtggtgttcaactacccgacccgagcgaacgtcccggtcctgcagggcctgtcgctggaagtcaagaaggggcagactctggctctggtgggatcatctggttgcggaaaatcaacggtggtgcaactgctggagcgattctacgacccacttgcaggaactgtgttcgtcgacttcggatttcaactgctggacggacaagaggccaagaagctcaacgtccagtggcttagagcacaattgggcatcgtgagccaggagccaatcctgttcgactgttctatcgccgagaacatcgcttacggcgataactccagggtcgtgtcccaggatgagatcgttagcgccgctaaagccgccaacattcatcctttcatcgaaactctgccgcacaagtacgaaaccagagtgggagacaagggaactcagctcagcggtggacagaagcaacggatcgccattgcccgggcgcttatcagacagccgcaaatcctcctccttgatgaagccacttcagctctggacactgagtcagagaaggtggtgcaggaagcacttgataaggctcgcgaaggccgcacttgtatcgtcattgcccaccgtctcagtaccatccagaacgccgaccttatcgtcgtctttcaaaatggacgggtcaaagaacacggcacccatcagcaactcctcgcccagaagggaatctacttctcgatggtgtcggtacaagctggtacccaaaacctg

SEQ ID NO: 7650 - DNA, 3858 bp, synthetic construct
  misc_feature 1..3858: note = source = /note="Description of Artificial Sequence: Synthetic coding sequence"
  source 1..3858: mol_type = other DNA
atggatttggaagctgccaagaacggtaccgcatggcgccccacgtccgcggaaggagactttgaacttggtatctccagcaagcaaaaacgcaagaaaaccaagactgtgaagatgatcggtgtccttactcttttccgttactcggattggcaggataaactctttatgtcattgggtactattatggcaatcgcacacggctctggacttcccctgatgatgatagtctttggggaaatgaccgataagtttgtggataccgctggtaacttttcgttccccgtgaactttagcctctcgctgctcaaccctggcaaaattctggaggaggaaatgaccagatatgcctactattacagcggactgggagcaggtgtcctggtggcggcatacattcaagtgtccttttggactctcgccgcggggaggcaaatccgcaagataagacaaaagttctttcatgccattctgcgacaggaaatcgggtggtttgatatcaatgatacgaccgaacttaataccagattgaccgacgatatttccaaaatctcagagggcattggtgacaaggtagggatgttttttcaagccgtcgcaaccttttttgcaggttttatcgtgggatttatcagaggctggaaacttactttggtgattatggccatttcaccaattctcggtctgtcggcagcagtttgggcaaagatcctgtcggctttttcggataaggaactggcagcttacgcaaaagcaggcgccgtggcagaagaagcgctcggagcaatcaggactgtcatcgcatttggtggacagaataaggagctcgaacgctaccagaagcatctcgaaaatgccaaggaaatcggaattaagaaggcaatttcggcaaacatctcgatgggaattgcatttctgctcatttacgcatcgtacgctctggcattctggtacggatccaccctggtgatctcaaaggaatacaccataggcaacgccatgaccgtctttttctcgattcttatcggagcattttcagtggggcaggcagcaccctgtatagatgcttttgccaacgcaagaggagcagcttacgtgatttttgacattatcgacaataaccctaagattgactcctttagcgaaagaggtcataagccagactccatcaagggcaacctcgaattcaatgatgtgcacttttcctacccctcacgcgctaatgtcaagattctcaagggactgaatttgaaggtccaatccggccagacggtggctttggtcggttcctcgggttgtggaaagtcaaccactgtgcagcttatccaaagactttacgatcctgacgaaggtactattaacattgatgggcaggacatcagaaacttcaacgtgaactacttgcgcgaaatcataggtgttgtgtcgcaagaacccgtcctttttagcactaccatcgctgaaaacatatgctacggacgtggtaacgtcactatggacgagatcaaaaaagccgtgaaggaagccaatgcctacgagtttatcatgaagctgccgcagaaatttgatactttggtgggggaacggggcgcacagctgtcaggcggtcaaaagcaaaggatagccatcgcaagggctcttgtgcggaatcctaagatccttcttctcgacgaggcaacgtcggccctcgacaccgaaagcgaagcagaagtgcaggcagcactggacaaagcccgggaagggcggactactatagtgatagctcaccgcctgtcgactgtgcggaatgcggatgtgatcgcaggattcgaggatggtgtgattgtcgaacagggtagccatagcgaactgatgaagaaggagggtgtgtacttcaagctggtgaatatgcagacttcaggcagtcagattcagtccgaggaatttgagctcaacgatgagaaagcggccaccaggatggcacctaatggttggaagtccagacttttcagacactccacccagaagaatctcaagaattcgcaaatgtgtcaaaagtcgcttgatgtcgagacggacggacttgaagcaaatgtgcctcctgtctctttccttaaagttctcaaactgaataagaccgagtggccatactttgtggtcgggactgtgtgcgcaattgcaaatgggggtttgcagccggcattttcggtcatcttttcggaaatcattgcaatctttggacccggagatgatgcggtgaagcagcaaaagtgtaacatcttctccctcatatttctgtttctgggaataatcagctttttcacgttttttctgcaaggctttacttttggtaaggccggagagatcctcactcgacgcttgcggtccatggcgtttaaagcaatgctcagacaggatatgtcctggttcgatgatcataagaatagcactggtgccctttccaccaggttggcaactgacgctgcgcaggtgcaaggagcaaccggaacccgcctcgcactgatagcccaaaacattgccaatctggggactgggattatcatttccttcatctacggatggcaacttaccctgctcctgcttgcagtggtccctattatcgccgtgtccggaattgtggagatgaaacttctcgcaggaaacgccaagcgcgataagaaagagctggaagcggcaggaaagatcgcaaccgaagcgattgagaacatccggaccgtggtcagccttacccaagagaggaagtttgagtcgatgtacgtggagaaactgtacggtccataccgaaacagcgtgcaaaaggcacatatctacggaatcacgttttcaatctcgcaagcattcatgtacttctcgtacgcaggctgttttagattcggagcatacctgatcgtgaacggacatatgcggtttcgtgatgtcattcttgtcttttcagcgattgtgtttggtgccgttgccctgggccatgcgtcgtcctttgcaccagattacgcaaaggcaaaactttcggcagcacacctgttcatgctctttgaacgacagccactgatagattcgtattcggaggaaggccttaagcccgataagttcgaaggtaatatcacttttaacgaggtggtctttaactatcctactagagctaatgtccctgttctgcaaggtctgagcctggaagtgaagaaggggcagaccctggcactggtgggatcgagcgggtgcggaaagtcaacggtggtgcagctgctggaaaggttctacgatcccctcgcaggtactgtctttgtcgactttggatttcagctgctcgatggccaggaagcgaaaaaacttaacgtccagtggctcagggcacaacttggcatagttagccaggaacccatcctttttgattgttcaattgcagaaaacatcgcatacggcgacaacagccgggtggtgtcacaagatgaaattgtgtcagcggcaaaggcagcaaacatacatccatttatcgaaactctgccacataagtacgagactagagtgggtgataagggtacccaactttcaggtggccagaagcaaagaatcgctattgcaagagcactcattaggcagccccagattttgctgttggacgaagcaacttctgcacttgatactgaaagcgaaaaggtggtgcaagaagcccttgacaaggccagggaggggcgcacttgtatcgtaattgcacatagactgtcaaccatccagaacgcagatctgattgtcgtgtttcagaatggaagagtgaaagaacatgggacccatcaacaacttctcgcccagaagggtatctacttttcaatggtgtcggtgcaggcaggaacgcaaaacctt

SEQ ID NO: 7651 - DNA, 3858 bp, synthetic construct
  misc_feature 1..3858: note = source = /note="Description of Artificial Sequence: Synthetic coding sequence"
  source 1..3858: mol_type = other DNA
atggatctagaggccgcaaagaacggtaccgcgtggcgaccaactagcgctgagggagacttcgaactgggaatctcctctaaacagaaacggaagaaaaccaagaccgttaaaatgattggcgtgctcacattgtttcggtactctgactggcaggacaaactttttatgtcactgggaaccattatggccattgctcatggatcgggcctgccactaatgatgatcgtgtttggggagatgaccgataagtttgtcgatacagccggtaatttttcttttccagtcaattttagcctgtctcttttgaaccctggcaagatcctggaagaggagatgacccgatacgcctattactattccggattgggcgccggtgtgctggtagcagcctacatccaggtttccttctggactttggcagccggaaggcagattcggaaaatccgccagaaatttttccacgcgatcctcagacaggagattggatggtttgatattaatgataccacggaactcaatactagactgactgatgatatttccaaaatatccgagggcattggcgataaagtgggaatgttttttcaggcggttgccactttttttgcagggtttatagttggtttcatccgcggatggaagctgacgcttgtaattatggctatctccccgatcttggggctcagcgctgccgtgtgggctaagatcctgtctgctttttcagataaagagctggccgcttacgccaaagcaggagcagtcgcagaggaggctttgggtgcaattaggacagtgatagctttcggaggtcagaataaggaactagaaaggtaccagaagcatcttgagaacgctaaggagatcggtataaaaaaagctatatccgcaaacattagtatgggaatagctttcctcctgatttacgcaagctatgcgctggctttttggtatggctcaactctcgtaatctccaaagaatataccataggcaacgctatgaccgtgtttttcagcattctgatcggagcttttagtgttggccaagctgcaccctgtattgatgccttcgcgaatgctcgtggggccgcatatgtgatctttgacattatagacaataatcctaagattgactctttcagtgaacgcggacacaaacccgattccatcaagggtaatctcgaattcaacgatgtacactttagctacccaagccgcgcgaacgtgaaaatcttaaaaggccttaacctgaaagtgcagtctggtcaaacagtcgctctggtcggcagctctggatgtggcaaatcaactaccgtgcaactaattcagaggctgtatgaccctgacgagggaacaattaacattgacggccaggacatcaggaacttcaatgtcaattacttgcgtgaaataataggtgtcgtttcacaggagcccgtgcttttctcgacaactatcgctgagaacatctgttatggcagaggaaatgtgacgatggatgagatcaagaaggctgtcaaggaagcaaatgcatacgagttcatcatgaagctccctcaaaaattcgatactctggtgggcgagaggggtgcccagctgagcgggggtcagaagcagaggatagccatcgctagggctctcgtccggaaccctaagattctcctgctcgatgaagccactagcgctctcgacactgaatcggaggccgaggtccaggcagctctggacaaggcccgtgaaggcaggaccactatagtgatcgcccaccgcctgagcaccgtccggaacgcagacgtaatcgccggctttgaggacggtgttatcgtggagcagggtagtcattccgagctgatgaaaaaggagggggtttactttaagttagtgaatatgcagacctctggctctcaaattcagagtgaggagtttgaattaaacgacgaaaaagccgcaacaagaatggctcccaatggatggaaatccaggctgttcaggcactccacccagaagaacctaaagaatagccaaatgtgtcaaaagagcctggatgtggaaactgatgggttagaagccaacgtgccacccgtttctttcttaaaggtgctgaagctcaataagaccgaatggccatactttgtcgtgggtacggtctgcgctattgccaacggaggcctgcagccagcctttagtgtcatcttctccgagattattgccatctttggaccaggggacgatgcggtcaagcagcagaaatgtaacattttctcgctgattttcctgttcctgggcattatctccttcttcacattcttcctgcagggttttactttcggcaaagcgggggagattctgacccgcaggctacgttcaatggccttcaaagcaatgctcaggcaggatatgagttggttcgatgaccacaaaaatagtactggagcactttccacgaggctggctactgacgccgctcaggtacaaggtgctaccggaacccggctcgctctcattgctcagaacatagcaaatctcggcactgggatcatcatcagtttcatttacgggtggcaattgacactgctgctgcttgcggtcgtgcccattattgctgtgagcgggattgtcgagatgaaactgctggccgggaatgctaagcgggacaaaaaggagttggaagccgccggtaagatcgcaactgaggctattgaaaacatcaggacagtggtgtccttgacccaggaacggaaatttgaaagtatgtacgtggagaagctctacggcccatatcggaactctgttcagaaggcacatatctatggtattacctttagtatttcgcaggcctttatgtacttttcctatgcaggctgtttccggtttggggcctatctgatcgtgaatggacacatgcgtttcagagacgtgatcctggtcttctctgccatcgttttcggggcagtggccctgggtcacgcaagctcattcgcccccgattatgccaaagccaaattgtccgccgctcacctgttcatgctgtttgagcgtcagccactgatcgacagctactcagaggagggtctgaagcccgataagttcgaaggtaacatcacattcaacgaggttgtgttcaattatcccacccgggctaacgtacctgtgctgcaggggctctcccttgaggtgaaaaagggacagacgctggccctggtcggcagcagtggatgtggcaagtctaccgtagtgcagctactcgaacgcttttacgatcctttggccgggactgtgttcgtggactttggctttcagctactggacggccaagaagccaagaagcttaatgtccagtggctgagagctcaactgggtattgtgagtcaggagcccattctttttgactgtagcatagccgaaaatatcgcctatggagacaactcaagggtagtgagccaggacgaaatagtctcagcggcaaaggctgcgaacattcacccatttatagaaacgctgccccataagtatgaaactagggtgggcgacaagggcacccagttatctggcggacagaagcagcgcatcgcgattgcgagagcgttgatccgtcaaccacagattcttctcctggatgaggccacttctgcccttgatactgaaagtgaaaaggtggtccaggaggccctggacaaggcccgcgagggtcgaacttgtatcgttatagcccatcggctgagcaccatccagaatgccgacctcatagttgtgttccagaacggtagggtaaaggaacacgggacacatcagcaattgctcgcacagaaaggtatttacttttctatggtcagtgtgcaagccggtacacagaatttg

SEQ ID NO: 7652 - DNA, 3858 bp, synthetic construct
  misc_feature 1..3858: note = source = /note="Description of Artificial Sequence: Synthetic coding sequence"
  source 1..3858: mol_type = other DNA
atggacctggaagccgcaaagaacggtaccgcatggagacctacttccgctgaaggcgacttcgagctgggtatctcaagtaaacagaaaagaaagaagaccaaaacagttaagatgataggcgttctgacacttttcaggtacagcgattggcaggacaaactcttcatgtctctgggcaccatcatggctattgctcacgggtcaggcttgcccctcatgatgatagtgttcggggagatgacagataaatttgtcgacaccgctgggaatttcagcttccctgtgaacttcagcctatcattgctgaatcctggcaagatcctggaagaggagatgactaggtatgcatactactattctggacttggagccggggtactggtggccgcttacattcaggtgagcttctggacgctggccgccggcagacagatcagaaaaatccgccaaaaattttttcacgccattctcagacaggagatagggtggtttgacataaacgatacaaccgagctcaatacaagactgactgacgatatctcgaaaatttctgaaggcattggggataaggtaggcatgtttttccaggcagttgccaccttcttcgccggattcatcgtgggcttcatccgcggctggaagttgactctcgtgattatggccatctcgccaattctgggactttcagccgccgtgtgggcaaaaatcttaagtgcattcagcgacaaggagctggctgcatacgccaaggcaggtgccgtcgcggaagaggccctgggagccattaggactgtgatcgccttcggaggccaaaacaaggaactcgagcgttatcagaagcacctggaaaacgccaaggagatcggcatcaagaaggcaatctcagcgaatataagcatgggcatcgcattcctattaatctatgcctcgtatgctttagccttttggtatgggagcactctggtcatttctaaggaatacactataggtaatgcgatgactgtgttcttcagcattctgattggggcgttttcggtaggacaagcggctccctgtattgacgcttttgctaacgcaaggggtgcagcctacgttattttcgacatcatcgacaataatccaaagatcgactccttctcagagagggggcacaagcccgattctattaaggggaatttggagtttaacgacgtgcattttagctatccgtcaagagcaaatgtcaagattctgaaaggcctcaacctcaaagtgcaatccggacagaccgttgcgttggtagggtcgtcggggtgtggaaagtccaccactgtgcagcttatccagcggctgtatgatcctgacgagggtacaatcaatattgacgggcaagacattaggaatttcaatgttaattacctgcgagagattatcggcgtcgtatctcaggaaccggtactgttctccacaacaatagcagaaaacatctgctacgggcgcgggaacgtgactatggatgagattaaaaaagcagttaaggaagccaatgcctatgaattcattatgaagttaccacagaaatttgatacgttggtaggagaaagaggcgcccagttatctggcgggcagaagcaacgcatagccattgcccgcgcccttgttcgaaatccaaagattctgttgctggatgaggctacctctgccttagataccgagtcggaggccgaagtacaagcagcgctcgataaggcacgagagggcaggacgacgatcgttattgcccaccggttgtccaccgttaggaatgctgatgtcattgccggctttgaagacggggtcattgttgagcagggctctcactcagaacttatgaaaaaagagggagtgtacttcaaactggtgaacatgcaaacttcaggaagccagattcagagcgaggaattcgagctgaacgatgaaaaggccgcaaccagaatggcccccaatggctggaagtccaggctttttagacactcaacccagaagaatctgaagaactcccagatgtgccaaaagagtctggatgtggagaccgacgggttagaagccaatgtccctccagtgtcatttttgaaggtgttgaagctgaacaaaaccgaatggccctattttgtcgtgggcacagtctgcgcgattgctaatgggggcctacagcccgcattttccgtgatattcagcgagataattgccatatttggccctggtgacgatgccgtgaaacagcaaaagtgtaatatattttcactaatattcctgtttcttgggattatctccttctttacattctttttgcaggggtttacgtttggtaaagcaggcgaaattctgactagacgccttaggagcatggcgttcaaggcgatgttgagacaggatatgtcctggttcgacgaccacaaaaattccaccggtgcactgagcacaaggctggccaccgatgccgcgcaggttcagggcgcaacaggaaccagactggctctaattgcccagaacatcgccaatttagggaccggcattatcatatccttcatatatgggtggcagttaactctattgcttttggctgtggtgcctattatagccgtgtctggcattgttgagatgaagctgctagccggaaacgccaaacgggacaaaaaggaacttgaggcggctgggaagatcgctacagaggctattgagaacataaggacagtggtgtcgcttactcaggagcgcaagttcgaatcaatgtacgtggagaaattgtatgggccttacagaaactctgtgcagaaagcccacatctatgggatcacttttagcatcagtcaggctttcatgtacttctcgtatgccggttgctttcgctttggggcctatctgatcgtcaatggtcatatgagattcagggatgttatcctggtcttctcagcgatcgtgtttggagcagtggccttgggtcatgcttcttctttcgcaccagactacgccaaagctaagttgagtgctgcgcatctgtttatgttattcgagaggcaacccctgattgacagctattctgaagaaggcttgaaacctgataaattcgaggggaatatcacattcaacgaggtggtgttcaactaccccacacgcgcaaatgtacccgtcttgcaaggtctgtcactcgaggttaaaaagggacaaacgctcgccctggtgggctcaagtggctgtggcaagagtacggtggtacagctgttggagaggttctacgatcccctagcaggaactgtgttcgtggacttcggatttcagcttctagacggccaggaggctaaaaagctcaatgtgcagtggctgagggcacagctgggaattgtctcacaagaacctatcctgttcgactgtagcattgctgagaacatagcctacggagacaattcgcgcgtggtatcccaggacgagattgtgagcgccgcaaaagccgccaacattcaccccttcatcgagacgcttccgcataaatacgagacgcgtgttggggataaggggacgcagctgagcggcggccagaaacaacggattgcaatcgcaagagccctgatacggcagccccagattctgctgcttgacgaggccacttctgctcttgatactgaatcagagaaggtggttcaggaggcgctggacaaggcgcgtgagggaaggacttgcattgtgatcgcccaccgcctgtctactatccagaatgcagacctgattgtggtcttccagaatggccgggtgaaggagcacggtacccaccagcagctcctggcccagaagggcatttacttttcaatggtttccgtgcaggccgggacacagaatctg

SEQ ID NO: 7653 - DNA, 3858 bp, synthetic construct
  misc_feature 1..3858: note = source = /note="Description of Artificial Sequence: Synthetic coding sequence"
  source 1..3858: mol_type = other DNA
atggacttggaggctgcaaagaatgggactgcttggaggccgacatccgccgaaggggactttgagctgggaataagctctaagcagaaaaggaagaaaactaagactgtgaagatgatcggcgtgttaaccctgttcagatactccgactggcaggacaagttattcatgtcactggggacaattatggctatcgcacatgggtcaggcttgccactgatgatgattgttttcggggaaatgactgataaatttgtggacactgccgggaacttttcttttcctgtcaatttctcgctcagccttcttaatcccggcaaaatcctcgaggaggagatgacacggtatgcctattattatagcggactgggggccggggtgctagtggccgcctatatccaggtatcattctggacacttgcagctggccgtcaaatccgcaagatacggcaaaagtttttccacgctatattgaggcaggagataggatggttcgatattaacgacactactgaactgaacaccagactgacagatgatatctccaagatcagcgagggtatcggcgataaggtgggcatgtttttccaggctgtggcaactttcttcgccgggttcatagtcgggtttatcagaggctggaagcttaccctcgtcatcatggccatctctcccatactcggtctctccgcagcggtgtgggccaagatactgagtgcgttctccgataaagagctcgcagcctacgctaaagctggagcggtagccgaagaagcattgggagcaatccgcaccgtgatagccttcggaggacagaacaaagagttagagcgctaccagaagcacttggaaaacgccaaggagatcgggatcaagaaggcaatttccgctaacatatctatgggcatcgcttttctgctgatttatgcttcctacgcattggcattttggtatggcagtacgcttgtgatctccaaagagtacaccataggtaacgccatgactgtgttctttagtatcctgataggggccttttcagtaggtcaggccgcaccgtgtatagatgcatttgcaaacgcccgcggcgctgcgtatgtgatattcgatatcattgacaacaaccctaagattgattcattctcggagagaggacacaaaccggattcgatcaaagggaatcttgagttcaacgatgtgcattttagttatccatctcgggccaacgtgaaaattctcaagggtctcaacctgaaagttcagtccggccagacagtggcactggtgggcagcagcggctgtggcaaatccactacagtgcagctgatccaaagactttatgaccccgatgaaggcactatcaatattgacggtcaggacattcggaactttaacgtaaattatttgcgtgagatcattggagtggtgtcgcaggagcccgtgctcttctccactacaatagcagaaaatatatgttatggaaggggtaacgtgaccatggacgagataaagaaggccgttaaggaagccaatgcatatgagttcataatgaagttaccacagaagttcgacacgctggtcggagagcggggagcacagctgtccggtggacagaagcagaggatcgcgatcgcgcgagcactggttcgtaaccctaaaatcctgctcctggatgaagccacatcagcactcgataccgaatccgaggccgaggtgcaggctgcattggacaaggcgagagaaggaagaactacaatcgtcatagcacaccgccttagcaccgtccgcaacgccgatgttatcgccgggtttgaagatggtgtgatcgtggagcagggtagccacagcgagttgatgaagaaagaaggtgtgtactttaaactggtgaacatgcagacatccggcagccagatacagtcagaggaattcgagctgaacgatgagaaagccgcgactcgcatggcacctaacgggtggaagtcaagactgttcaggcactccactcagaaaaaccttaaaaatagccagatgtgtcaaaagtccttggatgttgaaacagacggcttagaggctaacgtgcccccagtgtctttcctgaaagtacttaagctgaataagacggaatggccgtatttcgtggtcggcaccgtatgtgccatagctaacggaggcctccagccagcattctctgtgatcttcagcgaaataatcgctattttcggcccaggggacgatgcggtgaagcaacagaaatgcaacatcttttccctgatcttcctgtttctggggataatttctttcttcactttcttcctgcaggggttcaccttcgggaaggccggggagatcctgacccgcagactgagaagcatggcttttaaagccatgttgcgccaagatatgtcgtggttcgatgatcacaaaaacagtactggggcgctgagtacgaggctggccacggacgctgcccaggtgcaaggggccactggaacaaggctggcactgatagctcagaatatagcaaatctgggaaccggaataatcatttccttcatatacggatggcagcttacattattgcttctcgctgtggtgcccatcatcgccgtttccggtatcgtcgaaatgaaattgctcgcagggaacgcaaaaagagacaaaaaagaattggaagctgctggaaagatcgctacagaagccatcgagaatataagaacagtggtatcactgacccaggagaggaagttcgagtctatgtatgtcgaaaaactctacggcccataccggaactccgttcagaaagctcacatctacggaataacattttctattagtcaagcttttatgtacttttcctacgcaggctgcttccgctttggcgcttatctgatagttaacggccatatgcgatttcgtgacgtgatcttggttttttccgccattgtattcggggcagtagccctcggccacgccagttccttcgcaccagactacgctaaagctaaactaagcgcagcccatctattcatgttgtttgagcggcagccactgatagattcttactctgaggaaggcctgaagcctgacaagtttgagggtaatattaccttcaatgaggtggtctttaactaccctactcgagcaaacgtgcctgtcttgcagggactgtcactggaggtgaagaaaggccagaccctagccctcgttgggtcctctggctgcggcaagtccacagtggttcaactgctggaacggttttacgaccctcttgccggtacagtattcgtcgatttcggcttccaactcttggatgggcaggaggcaaagaagttgaacgtccagtggttgcgggcacagttagggatagtgtcacaggagcctattctcttcgactgctcaatcgccgagaacatcgcttacggggacaattccagagtagtgagccaggatgaaattgtgtctgccgcaaaagcagccaacatccatccctttatcgaaaccttgccacacaagtatgagactagggttggggacaagggcacccagctctccggcggacagaagcagcgcatagccatcgcaagagcactcatcaggcagccccagatcctgttgctggatgaggccacttccgctctggacacagaatcagagaaagtcgtgcaggaggcactcgacaaggctcgggaaggacgaacgtgtatagttatcgctcatagactgtctacgatccagaatgctgacctgattgttgtctttcagaatggacgagtaaaggagcacgggacacaccaacagttgctcgcccagaagggaatctacttctcaatggtgagcgtccaggccgggacacagaatctc

SEQ ID NO: 7654 - DNA, 3858 bp, synthetic construct
  misc_feature 1..3858: note = source = /note="Description of Artificial Sequence: Synthetic coding sequence"
  source 1..3858: mol_type = other DNA
atggacctcgaggccgctaagaatggtaccgcctggcgccccacttcggccgagggggacttcgagcttggaataagcagcaagcagaaacgcaagaaaactaagaccgtgaagatgattggcgttctgacactattccgttactcagattggcaagacaaattgttcatgtctctgggaacaatcatggccatcgcccatggcagcggcctgcctttgatgatgatcgtgtttggagaaatgacggacaagtttgtcgataccgccggtaatttcagctttccggtgaatttttctctcagtctgctaaaccccgggaaaatcctggaggaggagatgacccgctacgcatactactactcgggactgggggcaggtgttctcgtggccgcttacatccaggtgtctttctggactctggccgcaggcaggcagataagaaaaatacgacaaaaattcttccacgccatacttcgccaggagataggatggttcgatataaacgacaccactgagctgaatacccggctgacagatgacatcagcaagatctctgagggcatcggcgataaagttggcatgttcttccaggcagtcgctactttcttcgcgggctttatcgtgggcttcattcgaggatggaaactgacgctcgtcattatggcaattagtccgattctgggattgtccgccgccgtgtgggcaaaaatcctttcagcattcagtgataaggagctcgccgcatacgccaaggccggtgcagtggctgaagaggccttgggcgccattcgcacagtgatcgcttttggtggccagaacaaggagttggagagatatcagaagcatctggagaatgctaaggagataggaattaagaaggccatcagcgctaacatatcaatgggcatcgcttttcttctaatctatgcctcttatgcgctggccttctggtacggatccactctggtcatctcgaaggagtacacgattggaaacgccatgacggtgttctttagtatcctaatcggagccttctccgttggccaggcggcgccgtgcatagacgctttcgccaatgctcgcggtgccgcctacgttatttttgacatcatcgacaacaatcctaaaatcgattcattctctgaacgtggccataaacccgatagcatcaagggtaacctggaattcaatgatgttcatttctcgtatcctagccgcgccaacgtcaaaatacttaagggtctgaacctgaaggtgcagagtggccaaacggtggccctcgtgggcagtagcggctgtggtaagtcgacaacggtacagctcattcagcgactgtatgatcccgatgaaggaacgatcaacatagacggccaggatatacgcaattttaacgtaaattatctgcgtgaaataatcggcgtcgtgagccaagaaccagttctgttcagcacgacgatcgccgagaatatttgttatggccggggtaacgtgacgatggatgaaataaagaaggcggtgaaggaagccaatgcttatgaattcattatgaaactgccacagaaatttgacacgctggtcggtgagcgaggtgcgcagctaagcggcggacagaaacagcggatcgccatcgcacgagcattggtgcgcaacccgaaaattctgctgctggacgaggcaacctcggccctcgataccgagtctgaggcagaggtccaggcggccctggataaggccagagagggtcgcacaaccattgtgatcgcgcatcgtctctcgactgtgcgtaatgcggatgtgattgccggatttgaagacggtgttattgtagagcaaggttcccacagcgagctgatgaaaaaagaaggtgtgtacttcaagctagttaacatgcaaactagcggctcacagattcagtcggaggagtttgagctgaacgacgaaaaggcggccactcgtatggctccgaatggctggaagagccgcctgtttcgccattccacacagaaaaatctgaagaacagtcaaatgtgccagaaatccttggacgtagagacggatggactggaggcgaacgttccgccagtgagcttcctgaaggtccttaaattaaacaagaccgagtggccctatttcgtagtcggcaccgtgtgcgctatcgccaatggcggcctgcagccggctttttccgtgatcttctccgaaatcatcgccatatttggccccggtgatgacgccgtcaagcagcagaaatgcaacatattttctctgattttcttattcttggggataatcagcttcttcactttctttcttcagggcttcaccttcggcaaggctggcgagatattgactcgacgcctccgtagtatggccttcaaagctatgttgaggcaagatatgagctggttcgatgatcacaagaactcgacgggcgccctctccactcgactggccacggacgccgcccaggtccagggcgcaacgggaactcgactggcgttgattgcccagaatattgccaatttaggaaccggcataatcattagcttcatttacggttggcagctgaccctgttgctgcttgctgtggtccccattatcgcggtatcgggcattgttgagatgaagcttcttgccggaaacgcgaagcgcgacaaaaaggaactggaggcagcgggcaagatcgcgacagaggccattgaaaacattagaacagttgtttcgctcacccaagagagaaagtttgaatccatgtacgtcgagaaactttatggcccgtacaggaattcggtgcaaaaggcccatatctatggcattacattttcgattagtcaagcgtttatgtacttttcatacgctggttgttttcgtttcggtgcctaccttatcgtcaacggtcacatgaggttcagggatgtgatcttggtgttctcagcaatagtcttcggcgccgttgccttgggacacgcttccagctttgctcccgattatgccaaggctaagctgtctgccgcccacctcttcatgctttttgaacgccagccactgattgattcctactcagaagagggccttaagccagataaatttgagggaaatataacgttcaatgaggtggtgtttaactatccgacgcgcgccaatgtcccggtgctgcagggtctgtcccttgaggtaaagaagggccagaccctcgccttggtgggcagttcgggttgcgggaagagcaccgtcgtacaattgctggagcgcttctacgatcccttggccggcacggtgtttgtggacttcggctttcaactgctagatggtcaagaggcaaagaagcttaatgtgcaatggctgcgtgctcagctcggaattgtgtctcaggagccgatcctgtttgactgctcaattgccgagaatatcgcctacggcgataatagccgagtggtgtcgcaggacgagattgtgtccgctgccaaggctgcgaatattcacccctttatcgaaacgctgccccataaatatgagacaagagtcggagataagggcacgcaactatcaggcggccagaaacagcgcatcgctatcgcgagagctctgatccgccaacctcaaatcctgctgctggacgaggcgacctccgccttggatacagagtccgagaaagtcgtgcaggaggccttggataaggcacgagagggccgcacgtgcatagtgatcgcacaccgactatccaccatccagaatgccgaccttattgttgtcttccagaatggtcgcgtcaaggagcatggtacccaccagcagttgctggctcaaaagggaatctacttttctatggtgtccgtacaggctggtacacagaatctt

SEQ ID NO: 7655 - DNA, 3858 bp, synthetic construct
  misc_feature 1..3858: note = source = /note="Description of Artificial Sequence: Synthetic coding sequence"
  source 1..3858: mol_type = other DNA
atggatctggaagcggcaaagaatggcactgcatggaggccaacttccgcagaaggtgactttgaacttgggatttccagcaagcaaaaacgcaaaaagaccaagactgtcaagatgataggtgttctcaccctgtttagatattcagattggcaagacaaactctttatgtcactcgggactatcatggccatagcccatggttccggtctgccactgatgatgattgtgtttggagaaatgaccgacaaattcgtcgacacggctggaaacttttcctttcctgtcaatttctctctctctctgttgaacccaggcaaaatcctcgaagaagagatgactcgatacgcatactactacagcggccttggggctggcgtcctggtcgccgcatacatccaagtgtcgttctggaccctggcggcaggacgtcaaattcgaaagattcgtcaaaagttctttcatgctattctcagacaggaaatcggatggtttgatatcaacgacacgaccgaactcaataccagacttactgatgatatttcgaagatttcggagggcataggagataaggtgggaatgttttttcaagcggtcgcaaccttttttgctgggttcatcgtaggctttattcgcggatggaaactcactcttgtgataatggccatttcacctatactggggctgtccgctgcagtctgggctaagatactgtcggcattctcagacaaggaactcgcagcctacgcgaaggcaggtgctgtggcagaagaggccctgggtgcaattaggaccgtcattgcatttggtggtcagaacaaagagctcgaaagataccaaaagcatctggagaacgcaaaagagattggaatcaaaaaggcaatttcggcaaacatatcaatgggaattgcattcctgcttatctacgcatcgtacgcgctggctttttggtacgggagcactttggtgatttcgaaggagtataccattggaaacgcgatgaccgtattctttagtattctgataggtgctttctccgtcggtcaggctgccccttgtattgacgcatttgcaaacgcgaggggcgccgcatacgtgatctttgatatcattgacaataaccctaagatcgactccttcagcgagaggggacacaaacctgattccattaaagggaatctggaattcaatgatgtgcatttttcttacccgtcgcgagcaaacgtgaagattctgaaaggactgaatcttaaagtgcaaagcggacaaaccgtggccctcgtcggatcgagcggctgcggaaaatctaccactgtgcaactgattcaacggctgtacgatccggatgagggaacgatcaatatcgacggccaggacattcgcaatttcaacgtgaactacctgcgggagatcatcggtgtagtctcacaagaacccgtgctgttcagtaccactattgcggagaatatctgctacggaagagggaatgtgaccatggacgaaatcaagaaggcagtgaaggaagctaacgcatatgagttcatcatgaagctccctcaaaagtttgatacccttgtcggtgaaagaggtgcccagctgtcgggtgggcagaagcagagaatcgcaatcgcccgagcgcttgtgagaaaccctaagattcttcttcttgatgaggcaaccagcgccctcgacaccgagtcggaagcagaagtccaagccgcattggacaaggcgcgcgaggggcggactactatcgtgattgcacaccggctttctactgtacgcaacgccgatgtgatcgcaggttttgaagatggcgtgattgtggaacaaggaagccactccgaacttatgaagaaagagggagtgtactttaaactggtgaacatgcagacttcggggtcacaaattcagtcggaggaatttgaactgaacgacgaaaaagcagcgactagaatggcgcccaatggatggaaatccagacttttccggcattccacccagaagaatctgaagaactcccagatgtgtcaaaaatcgcttgatgttgaaactgatggtcttgaagccaatgtgccacctgtctcctttttgaaagtgctcaagctcaacaaaaccgaatggccatactttgtagtcggcaccgtgtgtgcgattgcaaacggaggccttcagcccgcattttcggttatcttctccgagataatcgcgattttcggccccggtgacgatgcagtgaagcagcagaagtgcaacatcttttcgcttatcttcttgtttttggggataatcagctttttcacctttttcctgcagggctttactttcggtaaggccggggaaatccttacccgacgtttgcggtcgatggcctttaaagcgatgctgcgccaagacatgtcctggtttgatgaccacaagaattcgactggagcactctcaactagactcgctactgatgccgcacaggtccaaggggccactggaaccagactcgcgctgatcgcgcagaatattgcaaatcttggaacgggcatcatcatttccttcatctacggttggcagcttacgctcctgttgctcgcagtggtgcctattatcgccgtgtcgggaatcgtcgaaatgaagctgctggcagggaatgctaagcgggataagaaagaactggaagccgcaggaaagatagcaaccgaagcgatagagaatatcagaaccgtcgtcagccttacccaagaacgcaagtttgagtccatgtacgtggaaaaactttacggaccttatcgcaacagcgttcagaaggcacatatctatggaataacttttagcatttcacaggcctttatgtacttttcctacgcaggatgttttaggttcggcgcctaccttattgtgaacggtcatatgcggttccgcgatgtgatacttgtgttcagcgctattgtgtttggcgcagtggcactgggacatgcgagcagttttgcacccgactacgcaaaggcaaagctgagcgcggcacatctgttcatgctgttcgaacgtcagcccctgatagattcctactcggaggaaggccttaagcctgataagtttgaagggaacattacttttaacgaagtcgttttcaactaccctacccgcgctaacgtaccagttcttcagggtctgtcactggaagtgaagaaggggcaaactctcgcattggtcggaagctcggggtgtggaaagagtactgtggttcaactgcttgagagattttacgacccacttgctggaaccgtgtttgtggattttggtttccaactgctggatggtcaggaggccaagaaacttaacgtgcagtggctccgggcacaactcggtattgtctcccaagaaccgattctgtttgactgctcaattgcagagaacattgcatacggtgataacagcagagtggtgtcccaggatgagattgtgagcgcagcaaaggcggctaacattcacccattcattgagactcttccgcataagtacgagactcgagtgggtgataagggaacccaactttcgggaggtcagaagcaacgcattgctattgcaagggcactgatcaggcaaccacaaatactgctgctggacgaagcaacgtcagctctcgatacggaatccgagaaggtggtgcaagaagcactggataaggcacgggaaggaaggacgtgtatcgtgatcgcccatcggctttcaaccattcaaaatgcagatcttatagttgtgtttcaaaacggcagagtgaaggaacacgggactcaccaacagcttcttgcccagaagggtatatacttttcgatggtcagcgtgcaagccgggacccagaacctc

SEQ ID NO: 7656 - DNA, 3858 bp, synthetic construct; identical to SEQ ID NO: 7577
  misc_feature 1..3858: note = source = /note="Description of Artificial Sequence: Synthetic coding sequence"
  source 1..3858: mol_type = other DNA

SEQ ID NO: 7657 - DNA, 3858 bp, synthetic construct
  misc_feature 1..3858: note = source = /note="Description of Artificial Sequence: Synthetic coding sequence"
  source 1..3858: mol_type = other DNA
atggacctggaggcggcgaagaacggaactgcctggaggcccacctcggcagaaggcgacttcgaactgggcatctcgagcaagcagaagagaaagaaaaccaagaccgtgaagatgataggagttctcaccctgttcagatacagcgattggcaagacaagctgttcatgtcgctgggaactatcatggcaatcgctcatggatcaggacttcctctcatgatgatcgtctttggagagatgaccgataaattcgtggacaccgctggcaacttctcgtttccagtgaatttctcattgagcctgttgaacccaggaaagatcctcgaagaggaaatgaccaggtacgcgtactattactcgggactgggagcaggcgtgctggtggccgcctacatccaggtatccttttggactctggctgccgggcgtcagattagaaaaatccgacagaaattcttccacgctatcctgcgtcaggaaattggctggttcgacatcaatgacactactgagctgaataccagactgactgacgacatcagcaagatctcagaaggtattggcgataaggtcggcatgttcttccaggctgtggcgaccttctttgcaggcttcattgtcggttttatcagaggatggaagttgactctggtgatcatggctatcagcccgattcttggactgtccgcggcggtgtgggccaagatccttagcgcattttcggacaaggaacttgccgcgtacgctaaggcgggagccgtggcagaagaagcactgggagcgatccgcaccgttattgcgttcggcggacagaataaggaactggaaaggtaccaaaagcatctggagaacgcaaaggaaatcggaatcaaaaaggcaatctccgccaacatctccatgggaatcgcattccttttgatctacgcgtcatacgctcttgctttctggtacggttcaaccctcgtgatctcaaaagagtacaccatcgggaacgctatgactgtgttcttctcgatactcatcggagcttttagcgtgggacaagctgccccttgcatcgacgcctttgccaacgcacgaggtgccgcttacgtcatcttcgacatcatcgacaataacccgaagattgattccttcagcgagcggggccataaaccggattctatcaaaggaaacctggagttcaatgacgtacacttttcctatccgtcgcgcgctaatgtgaagatcctgaaggggctcaacctgaaggtgcagtcgggtcagaccgtggccctcgttggatcctcggggtgtggaaaatcaactaccgtgcagctgatccagaggctgtacgacccggatgaaggcacgattaacatcgacggccaggacatccgcaacttcaatgtgaattacctgcgcgagatcatcggagtggtgtcgcaagaaccggtgctgttctcaactactatcgcggagaacatctgctacggccgcggtaatgtcacgatggacgagatcaaaaaagcagtgaaagaagccaacgcatacgagttcatcatgaaactgccacaaaagtttgataccctggtcggggaacggggcgcacaactgtcaggaggacaaaagcaacgcatcgcgattgccagagcgttggtgcggaacccgaagatcctcctgctggatgaagccaccagcgcgctcgacaccgaatccgaagccgaagtgcaggcggccctggataaagcccgggaggggcgaactaccatcgtgatcgcccaccgcctttccactgtgcggaacgcggatgtcatcgctgggttcgaagacggcgttatcgtggaacagggatcccactccgaactgatgaagaaagagggtgtctacttcaagttggtgaatatgcagacgtcaggatcacaaatccaatccgaggagtttgaactgaatgacgaaaaagccgccactagaatggcgcccaacggctggaagtctcggctcttcaggcacagcacccaaaagaaccttaagaactcgcagatgtgccagaagagcttggatgtcgaaactgatggcctcgaagctaacgtaccgccggtgagcttcctgaaggttctgaaactgaacaagactgaatggccttacttcgtggtggggactgtctgcgcaatcgctaacggtggcctccagccggcttttagcgtcattttctctgaaatcattgccatcttcggcccgggagatgatgccgtgaagcaacagaaatgtaatatcttctccttgatcttcctcttcctcggcattatatcgttcttcactttcttcctccagggatttacctttggtaaagcgggcgagatcctcactcggcgcctccggtccatggcgttcaaggcaatgttgcggcaagatatgtcatggttcgacgatcacaagaattccacgggcgctctgagtactcgccttgcgactgacgcagcacaggtgcagggcgccaccggcacccggttggcgctcattgcacaaaacattgcaaacctgggaacgggcatcatcatctccttcatctacggatggcagcttactctgctgctgctggcagtcgtgccaattattgccgtctcagggatcgtcgagatgaagctcctcgcgggaaatgcgaagcgggataagaaggagctggaggcagcgggaaagatcgcaaccgaggctatcgaaaacatccgaactgtggtgtccctgacccaagaacggaaatttgagtcaatgtacgtggagaagctgtacggcccataccgcaattcggtgcaaaaagcccacatttacggtatcaccttctcaatctcccaagccttcatgtattttagttacgccggatgtttccgcttcggagcctatttgatcgttaacggacatatgagattccgcgacgtgatcctcgtcttctccgccatcgtgttcggggcagtggcacttgggcacgccagctcgttcgcacctgactacgccaaggcgaagctgtccgctgcccatctgttcatgctgttcgagaggcagccactcatcgactcctactcggaggaagggttgaaaccagacaagtttgagggtaatatcacgtttaacgaagtcgtgtttaactacccgacccgggcgaacgtgcctgtgctgcaaggactgtcactcgaagtcaaaaagggtcagactctggcgctggtgggaagctcagggtgcggaaagtcgactgtggtccaacttcttgaacgcttctacgaccccctggctgggaccgtcttcgtggattttggattccagctgttggatggacaggaggcaaagaagctcaacgtgcagtggttgcgggcccagctcggaattgtgtcgcaggagcccattttgttcgattgctctatcgctgagaatattgcatatggggacaactcaagggtggtatctcaggatgagattgtgagcgcggccaaggccgcaaatatacacccgtttatcgaaactctccctcataagtacgaaacgcgtgtgggagataagggcacgcagctcagtggaggacagaagcagagaatcgccattgccagagccctgatccggcagccacaaatcttgctgcttgacgaagcgaccagcgcgcttgacactgagtccgaaaaggtcgtccaggaggctctcgacaaagctcgtgaaggtcggacctgcattgtgatcgcccatcgcctctcgaccatccagaatgccgacctgatcgtggtcttccagaacggcagggttaaggaacacggaacccaccagcaacttctcgcccaaaaaggaatatacttttccatggtcagcgtccaagccggaacccaaaacctg

SEQ ID NO: 7658 - DNA, 3858 bp, synthetic construct
  misc_feature 1..3858: note = source = /note="Description of Artificial Sequence: Synthetic coding sequence"
  source 1..3858: mol_type = other DNA
atggacctggaggccgctaaaaatggaacggcctggcgccccacctcagcagagggcgatttcgagctaggtatcagcagcaagcaaaaaagaaagaagactaagacggtgaaaatgataggcgtgctgacactgtttcggtactctgattggcaggataaactgtttatgagtctaggaacaataatggccattgcacacggttcaggtttgcccttgatgatgattgtgttcggcgagatgaccgataagttcgtggatacggctgggaactttagcttccctgtcaactttagtctcagcctgctcaaccctggaaagatattagaagaggaaatgactcggtacgcctattattattccggcctaggtgctggagtgcttgtcgctgcttatattcaggtcagtttttggactctggccgccggtaggcaaatccgaaaaatccggcagaaattcttccacgcaattcttcggcaggagatcggttggtttgacataaacgatacaactgagttgaataccaggctgaccgacgacatctccaagatctctgaaggcatcggagacaaggttggcatgttcttccaggctgtagccacattctttgccggctttatcgtgggattcatccggggctggaaactcaccctcgttattatggccatctccccaatcctgggactgtccgctgcggtctgggctaaaatccttagcgcattttccgataaggaactggcagcatacgcaaaggccggcgccgtagctgaggaagcgcttggggccatcaggaccgtgatcgcctttggaggccaaaacaaagagctggaacgttatcagaagcatctggagaacgctaaagagataggaattaaaaaggccatctcagccaatatctctatgggtattgcgtttctgctgatatacgcgtcctacgcgttagctttttggtatggctcaactctcgttatttccaaggaatatacaatcggcaacgcgatgaccgtctttttttctatactcataggagcctttagcgtgggtcaagctgcaccctgcatcgacgccttcgctaacgcccggggtgcggcgtacgtgatatttgacatcatcgacaataatccaaaaatagactccttctcagaaaggggacataagcccgacagtataaagggtaacctcgaattcaacgatgtgcacttctcatatccttctcgagccaatgtgaagattttgaagggcctgaatttgaaggttcagtcaggtcagacagtggcactggtggggtctagcgggtgcggaaagtccactaccgtgcagttaattcaaaggctgtacgaccctgatgagggaacgatcaatattgatggccaggacatccgcaattttaatgtgaactatttacgcgaaataataggagtggtgtcacaagagccagtgctgttttccaccaccatcgccgaaaacatatgctatggcagggggaatgtgacaatggatgaaattaagaaagcagtgaaagaggctaatgcctatgagttcatcatgaaactacctcagaaatttgacaccttagtcggagagcgaggtgcacagctcagcggggggcagaaacagcggatagcaatcgcaagggccctggtccgcaatccgaagatcttattgctggatgaggctactagtgctctggataccgagtctgaagccgaagtgcaggcagctctcgataaggctcgggaaggacgcacgactattgtaatcgctcatcggctttcaactgtgaggaacgccgacgtcatagccggttttgaggacggggtaatagtagagcagggcagtcactctgaacttatgaagaaggagggggtctatttcaagctggtgaatatgcagacctcaggtagtcagattcagagcgaagaatttgaactgaacgacgaaaaagccgcaacccgtatggcaccgaatggatggaaatcacggctgttcagacactccacacagaagaatctcaagaacagccagatgtgccagaagtcactcgacgtcgagacagatggcctggaggctaatgtgccgcctgtatcattccttaaggtactcaaactcaataagaccgagtggccttatttcgtggtgggcactgtttgcgcgatcgctaacggaggcctgcagcctgctttcagtgtcattttctcagaaattatagccatcttcggccctggagacgacgctgtcaagcagcagaagtgcaatatttttagcttgatttttctgttcctgggaatcatcagcttttttacttttttcctgcaaggctttactttcggtaaggccggcgaaatcctcacccggaggttacgttcaatggcatttaaagccatgttgagacaggatatgtcttggtttgatgatcacaagaatagcacgggggctctctctacacgtcttgcaaccgacgcggcccaagtgcagggtgctacagggacgcgcttggctctgatcgcacagaatatagcaaacctgggaactgggattattatctcatttatctatggatggcagttgaccctcctgctacttgctgtggtccctatcatcgctgtctcagggatagtggagatgaaacttttagcgggcaatgctaaaagagacaagaaggaacttgaggccgctggcaaaatcgctaccgaggcgatagaaaacatccggactgtggtgtctctcacacaagagcgcaaatttgagtctatgtacgtggaaaaactttacggaccttatagaaactcagtccagaaggctcatatctatggcatcacgttttcaatctcacaggcgtttatgtatttctcttatgccggatgcttcagatttggagcctatttgattgtgaacgggcacatgagattcagagacgtaatcttagtattctctgcgattgtatttggggcagtggccttggggcacgcttcctccttcgcccccgactatgctaaagctaaactttccgctgctcatctgttcatgttgtttgaaaggcaacctctgattgacagttactctgaagagggattaaagcctgacaagttcgagggtaacatcacttttaacgaggtggtgttcaattaccctactagggccaacgtgccggtgttacaggggctatccctggaagtgaagaaagggcagactttggctctggtgggttcttctggatgcggcaagtcaacggtggtccagctgctggagcgcttttatgatccactggccggaaccgtgttcgtcgactttgggtttcagctgctggacggacaagaggctaagaagttgaatgtgcagtggcttagggcgcagctcggcatcgtatctcaggaacccatactgtttgactgttccattgccgaaaacattgcgtacggcgacaatagtcgggtggtgtctcaggacgaaatcgtatctgccgcgaaagccgccaatattcatccctttattgaaactctgccacataagtatgagacccgagttggcgataagggaacgcagctgagcggggggcaaaagcagagaattgccattgcaagagctctgattcggcagcctcagatcttattgttggatgaagccacaagcgctttagacacagaatcggagaaggtggtacaggaggctctggacaaggctcgcgaaggcaggacatgcattgtgatcgcccatcgcctgagcacgatccaaaatgcagacctgatcgtggtttttcaaaacggcagggttaaggaacatggcacgcaccagcaactcctggcccagaagggcatttacttcagcatggtaagtgttcaggccggaactcaaaatctc

SEQ ID NO: 7659 - DNA, 3858 bp, synthetic construct
  misc_feature 1..3858: note = source = /note="Description of Artificial Sequence: Synthetic coding sequence"
  source 1..3858: mol_type = other DNA
atggatctggaagccgctaagaatggtaccgcatggcgacctacttccgccgaaggtgattttgaactgggcattagctccaaacaaaaacgaaaaaagaccaagacggtcaagatgattggagtgctcaccctgtttcgctactcggattggcaggataagctgttcatgtctctcgggaccatcatggcaatcgcacatggttccggactgccccttatgatgattgtttttggggaaatgactgataagtttgttgacactgcaggaaacttttcgttcccggtcaacttctccctgtcgcttcttaatcctggtaagattcttgaagaagagatgacccggtacgcgtactactacagtggcctgggagcaggggtgcttgtggcagcatacatccaggtgtcgttctggactcttgccgccggcagacagattagaaagattaggcaaaagtttttccatgcaatcctgcggcaggagattggatggtttgacattaatgataccactgaacttaacaccagactgactgatgatatctccaagattagcgaggggataggggacaaagtgggcatgttcttccaggcagtggcaaccttttttgcaggttttatcgtgggctttattcgagggtggaaactcacccttgtgattatggccatttcacctattcttggcttgtcggcggcggtctgggccaaaatactgtcggctttttcagacaaagaactcgccgcctacgccaaagcaggggcagtcgccgaagaagcgctgggagccattcgtactgtgatcgctttcggtggacagaataaggagctcgaacgataccaaaaacatcttgaaaacgctaaggaaattggaatcaaaaaagcaatctccgccaacatttcgatgggaattgcattcctgctgatttacgcaagctacgcactggctttttggtacggtagcactcttgtcatctcaaaggaatacactataggaaatgcaatgactgtgtttttctcgattcttattggtgccttttccgtgggacaagcagcaccctgtatcgatgcgtttgcaaatgctcgcggcgcagcttacgtgatctttgacataatagataacaaccccaagatcgattccttttcagaaagaggtcataaacctgatagcatcaaaggtaaccttgagttcaatgatgtgcatttctcgtacccgtcacgtgcgaacgtaaagatactcaagggtctgaatctgaaggtgcaatctgggcaaactgtggcccttgtggggtctagcggttgtggcaagagcaccactgtgcaactgatacaaagactgtacgatcctgatgagggcacgatcaatattgacgggcaggacatccggaactttaacgtgaactaccttagagaaatcattggagtggtgagccaggaaccagtactgttctccactaccattgcagaaaacatttgttacgggcgcggaaatgtgaccatggatgagattaagaaggccgtcaaggaagcaaacgcgtacgagttcattatgaagctgccgcaaaagtttgatactcttgtcggcgagaggggtgcccaactcagtggtggacaaaagcagcgtattgcaatagcacgggcgctcgtgcgaaatcccaagatcttgctgctcgatgaggcaacttcggccttggataccgaatcggaagcggaagtccaggccgctctcgacaaggccagagagggcagaactaccatcgtcatcgcacacagactgtcgactgtgagaaatgcagatgtgatagctggatttgaagatggagttattgtggagcaaggatcacatagtgagcttatgaaaaaggaaggagtctactttaagctcgttaacatgcaaacctcaggatctcaaattcagtcagaagagtttgaacttaatgacgaaaaggcggccacgaggatggcaccaaatggatggaagtccaggttgtttcgtcattcgacccaaaagaacttgaagaactcgcagatgtgccagaagtcgctggacgtggagactgacgggctggaagcaaacgtgccgccagtgtcgtttctcaaggtgctcaaactcaataagactgagtggccttactttgtggttggaactgtgtgcgcaattgcaaacggtgggctccaacctgcattcagcgtcatattctcggaaatcatagccatctttggtccaggtgacgatgcagtgaagcaacagaagtgtaatatcttttcgctgatttttcttttcctgggcatcattagcttctttaccttttttcttcaaggctttacctttggaaaagcaggtgaaatcttgacgcggagactgaggtccatggcatttaaggcaatgctccgccaggacatgtcgtggtttgatgatcacaagaatagcaccggagcactttctacccggctggccacggatgccgcgcaagtgcagggggcaaccggaactcgcttggctctgattgcccagaacattgcaaatctgggaacgggcatcattatctcgttcatttacgggtggcaacttacccttctgctgctcgcggtagtgccaatcatcgcagtcagtggaatagtggaaatgaagctgctcgcaggcaacgcaaaacgggacaaaaaagaactggaagcagctggcaagatcgcgactgaagcgatagagaatattcgaaccgtggtgtcactcactcaggaaaggaaattcgagagcatgtacgtggaaaagttgtacggaccctatagaaacagcgtgcaaaaggcacacatatacggcatcaccttctccatttcacaggcttttatgtatttctcctacgcgggttgttttcgcttcggtgcctaccttatcgtcaacgggcacatgcgtttcagggacgtcatcctcgtcttttccgccattgtgtttggagcagtggcactcggacacgcctcctcgtttgcacctgattacgctaaggctaagctgtccgcagctcaccttttcatgctttttgaacgccaaccactgatagattcctactctgaggagggtcttaagccagacaagttcgagggaaacattaccttcaacgaagtcgtctttaactatccgactcgcgccaacgtgccagttctgcagggtttgagcctggaagtgaagaagggccaaaccctcgcgctggtgggttccagcggttgcggaaaatccaccgttgtccaactgctcgagcgcttttacgacccactggccggaactgttttcgtcgactttggatttcagctgctggatggtcaagaagcgaagaagttgaacgtgcagtggctgcgggctcaacttggaattgtgagtcaagaacccattcttttcgactgctccatagcagagaacatcgcctacggagataactcgagagtggtgtcacaggatgagatcgtcagcgcggccaaagcggctaacatacatcctttcattgaaacccttcctcacaagtacgagactcgggtgggggataaaggaacgcaattgtccgggggacaaaaacaaaggattgccattgcgagagcacttatcaggcagcctcaaatcctgctcttggacgaggcaacgtccgccctggacaccgaatcagaaaaggtggtgcaggaagcacttgataaagcaagagagggtagaacctgtattgtgattgcccatcgccttagcaccattcaaaacgcggacctgattgtcgtgtttcaaaatggaagggtcaaagaacatgggactcatcagcaactgcttgcccagaaggggatctatttctcaatggtatccgttcaggcaggcacgcagaacctt

SEQ ID NO: 7660 - DNA, 660 bp, synthetic construct
  misc_feature 1..660: note = source = /note="Description of Artificial Sequence: Synthetic coding sequence"
  source 1..660: mol_type = other DNA
atgggagtgcggcaccctccctgcagccacaggcttctggcagtgtgtgccctggtgtcactcgcgactgcggccctcctggtcaacccgggagtcgttgttcgcatcagccaaaagggtttggactatgcgtcccaacaggggacggcagctctccagaaggagctgaagcgaatcaaaattccggattactcggactcattcaagatcaaacatcttggaaaaggacattactcgttctacagtatggacattagagaatttcaactgccaagcagtcagattagtatggtgccgaacgtcggtctgaagttctccatctcaaacgctaatatcaagatctctggaaaatggaaagcccagaagcggttcctcaagatgagcggcaatttcgatttgagcatagagggcatgagcataagcgcagacttgaagctgggtagcaacccaactagcggcaagccgactatcaccgcctcgtcatgctcttcgcatatcaattccgttcacgtgcacatctccaaatcgaaggtgggatggttgatccagctgttccacaaaaagatcgaatcagctctgcgcaacaagatgaattctcaagtgtgcgagaaggtcaccaactccgtgtcgagcgaactgcagccatactttcagaccttg

SEQ ID NO: 7661 - DNA, 660 bp, synthetic construct
  misc_feature 1..660: note = source = /note="Description of Artificial Sequence: Synthetic coding sequence"
  source 1..660: mol_type = other DNA
atgggagtaaggcatccaccttgctcccatcggttactcgccgtgtgcgctctggtcagcctggctacagcagccctgttggtcaacccgggagtggttgtgaggatctcgcaaaagggcctggattacgctagccaacagggcaccgctgctctgcagaaggaactcaaaaggatcaaaatccctgactacagtgactcttttaaaatcaagcacctgggcaaaggccattacagcttttactccatggacatcagggaatttcagctccctagctctcaaatcagcatggtgccaaacgtaggtctgaagttttctatcagcaatgctaatattaaaatctctggaaaatggaaagctcagaaacgcttccttaagatgagcggcaacttcgatctgagcattgagggaatgtccatcagcgccgatcttaaattgggaagcaaccctacaagtggcaagccaacaatcacagccagcagttgctcatcccatatcaacagcgtgcatgttcacatcagcaaatctaaggtgggatggctaatacagctttttcacaagaagatcgaatctgcattacgcaataaaatgaatagtcaggtttgcgagaaggttaccaactctgtcagcagcgagctgcagccttacttccagacactt

SEQ ID NO: 7662 - DNA, 660 bp, synthetic construct
  misc_feature 1..660: note = source = /note="Description of Artificial Sequence: Synthetic coding sequence"
  source 1..660: mol_type = other DNA
atgggggtacgtcatccaccatgtagccatagactgcttgcagtctgcgcactcgtgtcgctggcgactgcagctctgcttgttaaccctggtgtggtggtccgtattagccaaaaaggattggactacgccagtcaacagggcaccgcagcactccagaaagaacttaagagaattaagataccagattactcagactcatttaagataaagcaccttggcaagggtcattactcgttttactcaatggatattcgcgaatttcaactgccctcgtcgcagatctccatggtccctaacgtgggtcttaagttttcgatttcgaacgccaatatcaagattagcgggaagtggaaggctcaaaaaaggtttctcaaaatgtctgggaatttcgatctttctatcgaagggatgagcatttcagcagatctgaaacttggatcgaaccccacgtccggtaagcctaccataaccgccagcagctgttcctcgcatatcaactcagtccacgtgcacatttccaagtcaaaggtgggttggcttattcaattgttccataagaaaatagagtccgcactccgaaacaagatgaattcccaggtatgtgagaaggtgaccaattccgtgtcctcggaactccagccttactttcagactctg

SEQ ID NO: 7663 - DNA, 660 bp, synthetic construct
  misc_feature 1..660: note = source = /note="Description of Artificial Sequence: Synthetic coding sequence"
  source 1..660: mol_type = other DNA
atgggcgtacgacacccgccctgctctcaccgcctcctggcagtgtgcgctttggtgtccttagctacagctgccttgctggtaaacccaggtgtggtggtgaggatcagtcaaaagggcctggactatgctagccaacaaggcacagctgccctgcagaaggagttgaaaagaatcaagattccagactacagcgatagctttaagatcaaacacctgggcaaaggccactatagcttttacagcatggacataagggaattccagctgccttctagtcagattagcatggtgcccaatgtgggcctgaaatttagtattagtaatgcaaacattaaaattagcggtaagtggaaggcacaaaagcgcttcctcaagatgtctggtaactttgacttgtctatcgaggggatgagtattagtgctgacctcaagctcgggagcaaccccactagcgggaaacccacgatcaccgcttcctcgtgcagctcacacataaacagcgtccacgtgcacatttcaaaatccaaggttggctggctgatccagctatttcataaaaagatagaaagtgctctccgcaataagatgaactctcaggtttgcgagaaagtgaccaatagtgtgagctccgagttgcaaccctactttcagaccttg

SEQ ID NO: 7664 - DNA, 660 bp, synthetic construct
  misc_feature 1..660: note = source = /note="Description of Artificial Sequence: Synthetic coding sequence"
  source 1..660: mol_type = other DNA
atgggtgtgcgacaccctccctgtagccataggctgcttgcggtctgtgcactggtatcgctcgccacggcggctttactggtgaaccctggagtggtagtgcgaatctctcagaaggggctggactacgcctctcagcaagggaccgctgccctgcaaaaagagttaaagcgaatcaagattcccgactacagcgattccttcaaaatcaaacacctagggaaaggccactactccttctactccatggacatcagagagtttcagctcccatctagtcagatttcaatggtgcctaacgtgggactcaagttctcgattagtaacgccaacatcaaaatctccggaaagtggaaagctcagaaaagattccttaagatgagtggaaactttgacctctcaatcgaggggatgtccatttctgccgacttgaagctgggatctaatcccacatccggcaagcctactattacggcgtccagctgctcctcacacattaactccgtgcatgtgcacatctcgaagagcaaggttggctggttgatccaactcttccataagaagattgagtccgctctaagaaacaagatgaacagtcaagtttgcgaaaaagttacaaatagcgtaagctccgaactgcagccttactttcagactctt

SEQ ID NO: 7665 - DNA, 660 bp, synthetic construct
  misc_feature 1..660: note = source = /note="Description of Artificial Sequence: Synthetic coding sequence"
  source 1..660: mol_type = other DNA
atgggtgttcgacatccgccgtgttcgcatcgattattagcggtatgtgcgttagtatcgctagcgacggcggcgctactagtaaatccgggtgtagttgtacgtatatcgcaaaaaggtttagattatgcgtcgcaacaaggtacggcggcgttacaaaaagaactaaaacgaataaaaataccggattattcggattcgtttaaaataaaacatttaggtaaaggtcattattcgttttattcgatggatatacgtgaatttcaactaccgtcgtcgcaaatatcgatggtaccgaatgttggtttaaaattttcgatatcgaatgcgaatataaaaatatcgggtaaatggaaagcgcaaaaacgttttttaaaaatgtcgggtaattttgatctatcgatagaaggtatgtcgatatcggcggatctaaaattaggttcgaatccgacgtcgggtaaaccgacgataacggcgtcgtcgtgttcgtcgcatataaattcggtacatgttcatatatcgaaatcgaaagttggttggctaatacaattatttcataaaaaaatagaatcggcgttacgaaataaaatgaattcgcaagtatgtgaaaaagtaacgaattcggtttcgtcggaattacaaccgtattttcaaacgcta

SEQ ID NO: 7666 - DNA, 660 bp, synthetic construct
  misc_feature 1..660: note = source = /note="Description of Artificial Sequence: Synthetic coding sequence"
  source 1..660: mol_type = other DNA
atgggagtccgacatccaccatgcagccacagactgcttgcggtgtgcgctctcgtctcgctagctacggcagccctcctggtcaaccctggggtggtcgtgcgaatcagccaaaagggtttggactacgcttctcagcaggggaccgctgcgcttcagaaggagctgaagcgaatcaaaatcccagattacagcgatagcttcaagatcaaacatctcggaaaggggcactacagtttctactctatggacatccgagagttccaactccctagctcacaaatatcaatggtgcccaacgtaggtcttaagttctctatcagtaacgccaacattaagatctccggaaaatggaaggcccaaaaacgatttctcaaaatgagcggcaattttgacttgtcaatcgagggaatgagtatatctgccgacctgaagctcggatccaatccaacttcaggcaagccaaccatcactgcatcgagttgttcgagccatattaacagtgttcacgttcacatctctaagtctaaagtcggctggctcatccagctgtttcacaagaagattgaatctgccctaaggaacaaaatgaactcacaagtctgcgagaaggtcaccaacagcgtaagcagcgaactgcagccatattttcagacgctg

SEQ ID NO: 7667 - DNA, 660 bp, synthetic construct
  misc_feature 1..660: note = source = /note="Description of Artificial Sequence: Synthetic coding sequence"
  source 1..660: mol_type = other DNA
atgggggtgcgtcacccaccgtgctctcacagacttttggcagtgtgcgcactcgtgtccttagccacagctgcgctccttgtgaacccaggcgtggttgtgagaatctcacagaagggactggactatgctagccaacagggcacagctgctctgcagaaggagcttaaaagaattaagataccggactactctgattcctttaagataaagcatctaggtaaaggccactactctttctatagtatggatattcgtgagttccagctcccgtcttctcagatctccatggtcccaaacgtggggttaaaatttagcatctcaaatgccaacatcaagatcagcggcaaatggaaggcccaaaagcgctttctgaaaatgtcgggcaacttcgatctatctatcgagggcatgtcgatcagcgccgacctcaaactggggtccaatccaactagcggcaagccgactatcacagcgagttcctgcagtagccatatcaatagcgtgcatgtgcacattagcaaatccaaagtgggatggctgattcagctgttccacaagaagatcgagagcgccctgaggaataaaatgaattcacaggtctgcgagaaggtcactaacagcgttagttctgagctacagccttacttccagacgctc

SEQ ID NO: 7668 - DNA, 660 bp, synthetic construct
  misc_feature 1..660: note = source = /note="Description of Artificial Sequence: Synthetic coding sequence"
  source 1..660: mol_type = other DNA
atgggcgtgagacatccaccctgctctcaccgtctgctcgccgtttgcgccctcgtttcactggctactgcggcactgcttgtgaatccaggtgtggtggtccgcatctctcagaagggactggactacgcgagccagcagggcaccgctgcactgcagaaagaactcaagaggatcaagataccggattacagtgacagtttcaagataaaacaccttggcaaggggcattactccttttatagcatggacattcgtgagttccagctcccttcctctcagataagcatggtacccaatgtcggcctcaagttctctatctccaatgcaaacattaagatatctggtaaatggaaggcccagaagaggttcctgaaaatgagtggaaactttgacttgagcatagagggtatgagtattagcgcggatctgaagctgggaagcaatcccacctcaggaaagcccaccataaccgctagctcatgtagcagccacattaactctgttcacgtacatatctcaaaatctaaagtggggtggctgatccagctttttcacaaaaagattgagagcgctcttcgcaataaaatgaactctcaggtatgcgagaaagtgacaaactcagtgtcctctgaactccagccttatttccagacattg

SEQ ID NO: 7669 - DNA, 660 bp, synthetic construct
  misc_feature 1..660: note = source = /note="Description of Artificial Sequence: Synthetic coding sequence"
  source 1..660: mol_type = other DNA
atgggagtacgacatcctccatgcagccaccggttgctggctgtttgcgcacttgtgtccttggccacggctgcactcctggtaaacccgggcgtggttgtacgcatcagccaaaaaggcctggactacgcgagtcagcagggcacggcagctcttcagaaagaactgaagcgtatcaaaatccccgactacagcgacagctttaaaattaagcatctgggaaagggacattattcgttctactcaatggatatccgggagttccagctcccgtcctcccagattagcatggttcctaatgttggcctgaagttcagcattagcaatgctaacatcaagatttccggcaaatggaaagcacagaagaggtttctcaagatgtctggtaactttgatctgagcattgagggtatgtccatctcggcagatctgaaactcgggtctaacccaacctcaggtaagccaacgattaccgcatcctcctgtagctcccatattaactctgtgcatgtgcatataagtaagagcaaggttggatggctaatccagctatttcataagaagatagaatccgccttgcggaacaagatgaattctcaggtgtgcgagaaggtcacaaactctgtgtcctccgaactccagccgtacttccagacactg

SEQ ID NO: 7670 - DNA, 660 bp, synthetic construct
  misc_feature 1..660: note = source = /note="Description of Artificial Sequence: Synthetic coding sequence"
  source 1..660: mol_type = other DNA
atgggagtgcgccatccaccatgcagccatagacttctcgctgtgtgcgctttggtaagcctggccactgctgccctgctggtgaacccaggagtggttgttaggatttcacagaagggactggattacgcctctcagcagggtacagctgccctgcagaaagaactgaaaagaatcaagatcccagactacagtgacagctttaagatcaagcacctgggaaagggacactactccttctattctatggatattcgcgaattccagctgccttcttctcaaatttctatggtgcctaacgtcggccttaagttttccatcagtaatgctaacatcaaaatctctggaaaatggaaggctcagaagcgtttcctgaaaatgtccggcaactttgatctcagcattgagggtatgagtattagtgcagacctcaagcttggctccaatccaaccagcggcaagccaactatcacagctagtagctgctccagtcatattaactccgtccacgtgcatatttccaagtccaaagtgggttggctgatccagctgttccacaagaagatcgaatccgctctgcgcaacaaaatgaacagccaagtgtgcgaaaaggtgacaaactcagttagctccgagctgcaaccatactttcagaccctg

SEQ ID NO: 7671 - DNA, 660 bp, synthetic construct
  misc_feature 1..660: note = source = /note="Description of Artificial Sequence: Synthetic coding sequence"
  source 1..660: mol_type = other DNA
atgggagtccgacatcctccttgttcacacagacttctcgcagtatgtgctctcgttagcctcgctacggcagccttactggtcaacccaggcgtagtagttaggatctctcagaagggcctggattatgccagccagcagggaactgcggctttgcagaaagagcttaaacggattaagatcccagactattctgactcttttaagattaagcacttgggaaagggccactactccttttatagtatggacatccgagagtttcagttgccgagcagccaaatatcaatggtaccgaacgtgggcttaaagttcagcatctctaatgctaatattaagatatccggaaagtggaaggcccagaaacggtttctgaagatgtcgggcaacttcgacctgtccatcgaagggatgtctatatcagccgatttgaagctgggatcaaatccgaccagtggcaagcccaccatcaccgcctcctcctgttccagccacatcaatagcgttcatgtgcatatcagcaagtctaaggtgggttggctcattcagttgtttcataagaaaattgagtccgccttgcgcaataagatgaatagtcaggtctgtgagaaagtgaccaactccgtttccagtgaactacagccatacttccagaccctc

SEQ ID NO: 7672 - DNA, 660 bp, synthetic construct
  misc_feature 1..660: note = source = /note="Description of Artificial Sequence: Synthetic coding sequence"
  source 1..660: mol_type = other DNA
atgggtgtgagacatcctccgtgctctcataggctgctggctgtgtgcgcactggttagcctggcaaccgcggcacttcttgttaacccgggggtagtggtccggatttctcaaaaaggcctggactatgcgagtcagcaagggacagccgcacttcaaaaggaattgaaacgaataaaaataccggattactccgacagttttaaaatcaagcacctgggcaaggggcactacagtttttacagtatggacatccgggaattccagcttcccagtagccagatttcaatggtgcccaatgtgggcctgaaattctcaatcagcaacgccaacataaagattagtggaaaatggaaggcacagaagcgtttcctgaaaatgagtgggaatttcgacttatcgattgaaggcatgtccatttcagctgatctcaaactgggaagcaaccctacatctggaaagcccaccatcactgccagtagctgcagtagccacataaattctgtccatgtacacatttcgaaaagcaaagtaggctggctgatccagctttttcacaagaaaatcgaatcagccctcaggaacaagatgaacagtcaggtctgtgagaaggtgacaaactctgtttcctcggagctgcaaccctatttccagaccctc

SEQ ID NO: 7673 - DNA, 660 bp, synthetic construct
  misc_feature 1..660: note = source = /note="Description of Artificial Sequence: Synthetic coding sequence"
  source 1..660: mol_type = other DNA
atgggcgtccgccatccgccctgttctcaccggttacttgcagtttgtgcattggtgtctctagccacagcggcacttctggtcaaccctggggtcgtggtccgcattagccagaagggcttggactacgcatcacagcaggggacagccgccctccagaaggagctgaagagaataaagatacccgattatagcgatagctttaagatcaaacacttgggtaaggggcattactctttctatagtatggacatccgagagttccagctcccgtctagccagatctcgatggtgccaaacgttgggctgaagttttcaatttcaaacgccaatattaagatttctggaaaatggaaggcgcagaagcgtttcttgaagatgagcgggaacttcgacttgtccatagagggaatgtctatctccgccgatttgaagttgggcagcaaccccacaagcgggaagccaaccattactgcctcatcctgctccagccatattaacagcgtgcacgtgcacatcagcaaaagcaaggtaggctggctcatccagctcttccataagaagattgagtctgcgctcagaaataagatgaactcccaggtgtgcgagaaggttaccaattccgtgagtagcgagctccagccctacttccagaccttg

SEQ ID NO: 7674 - DNA, 660 bp, synthetic construct
  misc_feature 1..660: note = source = /note="Description of Artificial Sequence: Synthetic coding sequence"
  source 1..660: mol_type = other DNA
atgggtgttcgccacccaccctgcagccacaggcttcttgccgtatgcgcgctcgtgtctcttgctactgctgctttgctggtaaatcccggcgttgtggttaggatttcacagaaggggttagactacgcctctcagcagggcacagccgccctacagaaggagcttaaacggattaagatcccagattatagtgacagttttaagatcaaacatcttggcaaaggccactatagtttctactccatggatattcgggaattccagctgccatcttctcaaatctctatggttcctaatgtgggcctgaagttctcaatctcaaatgccaacatcaaaatttcgggtaagtggaaggcccagaagcgcttcctgaaaatgtctgggaactttgacctgagcatcgaaggaatgagcatcagcgccgatctgaaactgggcagtaatcccacgtcaggaaagccaacgatcacagcatcctcctgctcaagtcatattaattcagtgcacgtccacatttccaaatcaaaagtcggctggctgatccaactcttccacaagaagattgagtccgccttgagaaataaaatgaactctcaggtgtgcgagaaggtgactaattcagtgtcctcagagcttcaaccatactttcaaacgctt

SEQ ID NO: 7675 - DNA, 660 bp, synthetic construct
  misc_feature 1..660: note = source = /note="Description of Artificial Sequence: Synthetic coding sequence"
  source 1..660: mol_type = other DNA
atgggagtgagacaccctccgtgctcccatcgcctccttgcggtgtgcgctctggtgagcttggccactgccgctctccttgtgaacccgggagtggtggttcggatctcacaaaaaggcctcgactacgcctcacagcaaggcaccgccgccctgcaaaaagaacttaaacggatcaagatcccggattatagcgacagcttcaagattaaacacctgggcaagggacattactcgttctactcaatggacattagggagttccaactcccgtccagccagatctcaatggtgccgaacgtgggactcaagttttccatctctaacgccaacatcaagatttcggggaagtggaaagcccagaagcgcttcctgaagatgtctggaaatttcgacctgtcaattgaaggcatgagcatctcggctgatctcaagctggggtcgaatcctacctcgggtaagcctaccatcactgccagctcgtgctcgtcgcatatcaactcggtccacgttcatatttcgaaaagcaaggtgggctggctgatccagctgtttcataagaaaattgaatcagcgctgaggaacaagatgaatagccaggtctgcgagaaggtgaccaattccgtgtcctcagaactccagccttactttcagaccctg

SEQ ID NO: 7676 - DNA, 660 bp, synthetic construct
  misc_feature 1..660: note = source = /note="Description of Artificial Sequence: Synthetic coding sequence"
  source 1..660: mol_type = other DNA
atgggagtgcgacatcccccttgttcccacaggcttctggctgtgtgcgccctcgtttctctggccaccgccgctctccttgtgaatccaggtgtggttgtcaggattagtcagaaaggtctggattacgcttcacagcagggaacagccgcactgcagaaggaattgaagagaatcaaaatacccgactatagtgattcattcaaaatcaaacacctggggaagggacactattctttctactcaatggatattcgcgaattccaacttccatcaagccagatcagcatggttcccaacgtgggcctcaaattctccattagtaacgctaacatcaaaatcagtggaaagtggaaggcccagaagaggttcctcaaaatgtccgggaatttcgacctcagcatcgaagggatgtcaattagtgccgacctgaagctgggaagcaacccaacaagcggaaagcctaccattacagcatcttcatgcagctcacacatcaactctgtgcacgtccacattagcaaatcaaaggtgggctggttgatacagctttttcataagaaaattgagagcgccctgcggaacaaaatgaattcccaagtctgcgaaaaggtgaccaattctgtgtccagcgaactccagccctacttccagactctg

SEQ ID NO: 7677 - DNA, 660 bp, synthetic construct
  misc_feature 1..660: note = source = /note="Description of Artificial Sequence: Synthetic coding sequence"
  source 1..660: mol_type = other DNA
atgggggtccggcacccgccctgcagtcatcgcctgctcgccgtgtgcgctcttgtctccctcgcaaccgcagccctgctggtgaatccgggcgtcgtggtcagaatcagccagaaaggactcgactatgcctcccaacaaggtacggcggcgttgcagaaggagctcaagcggatcaagatcccagactactcagattcatttaagattaagcacctcggaaaaggtcactactcgttctacagcatggatatcagagaattccagttgccgtcgagccagatctcgatggtcccgaatgtgggcctgaaattctccatcagcaacgcaaacatcaaaatttcgggaaagtggaaggcccagaagaggtttctgaagatgagcggaaacttcgacctctcaattgaaggcatgagcatctccgcggacttgaaactgggatctaaccctacctcggggaagcctaccatcactgcctcctcgtgttcaagccatataaactcggttcacgtgcatatctccaagtcaaaggtgggatggctgatccaactgttccacaagaagatcgagtcagctctgcgcaataagatgaactcgcaggtgtgcgagaaagtgactaattccgtgtcgtccgaactgcaaccatacttccagactctt

SEQ ID NO: 7678 - DNA, 660 bp, synthetic construct
  misc_feature 1..660: note = source = /note="Description of Artificial Sequence: Synthetic coding sequence"
  source 1..660: mol_type = other DNA
atgggcgtaagacatccaccgtgctcacatagactcctagctgtttgtgctttggtgtccttagccactgccgccttgttagtaaaccccggggtggtggtcagaatctcacagaaggggctcgactatgccagccaacagggaacggccgccctgcagaaggagctgaagagaattaagattcccgattacagcgattccttcaaaatcaagcacttgggaaagggacattattccttctatagcatggacattcgcgagttccagctgcctagctcacagatttcgatggtccccaacgtggggctaaagtttagtatctctaatgccaacatcaagataagtggaaagtggaaggcacagaagcgttttcttaagatgtctggcaacttcgacctgtccattgagggcatgtccatctcagcagatctgaaactaggttcaaacccaacctctggcaagccaactatcactgcctccagctgttcgtcacatatcaactcagtccacgtgcatattagtaaatcaaaagttggatggctcattcagctctttcataaaaagatcgaatccgccctgaggaacaaaatgaactcccaagtgtgcgagaaagtgaccaactccgtcagtagtgaactgcagccttactttcaaaccctt

SEQ ID NO: 7679 - DNA, 660 bp, synthetic construct
  misc_feature 1..660: note = source = /note="Description of Artificial Sequence: Synthetic coding sequence"
  source 1..660: mol_type = other DNA
atgggggttcggcaccctccatgttcacataggcttcttgccgtgtgcgcgttggtgagccttgctaccgccgcattgctggtgaatccaggtgtcgtcgtcagaatctcccagaaggggcttgactacgcatcgcagcaaggtacggcagcgctccagaaggagctgaaacgtattaagatccctgattacagcgatagcttcaagataaagcacctcggaaagggacattattcgttttactccatggatatccgcgaatttcagctgccaagttcacagatttcgatggtgccaaacgtgggccttaagttttccatctcaaatgccaacattaagatttcgggtaagtggaaggcccagaaaagattcctgaagatgtcgggaaatttcgatctgtcaattgaaggcatgtccatttcggcagatctgaagctcggatcgaatcctacctcgggaaaacctaccattaccgcttcgagctgttccagccatatcaattccgtccatgtgcacatcagcaagtccaaggtgggctggctgattcagcttttccataagaagatagaatcggcactcagaaataagatgaactcgcaggtgtgtgaaaaagtgaccaactccgtctcctcggagctgcagccttactttcaaaccctg

SEQ ID NO: 7680 - DNA, 660 bp, synthetic construct
  misc_feature 1..660: note = source = /note="Description of Artificial Sequence: Synthetic coding sequence"
  source 1..660: mol_type = other DNA
atgggagtacgacatccgccttgtagccatagattactggctgtgtgtgcgcttgtgagccttgccacagccgctttactagttaatcccggcgttgtcgttcggatctcccaaaaagggctcgattatgcgagccaacaaggcactgccgccttacagaaggagctgaaacgaatcaaaatccctgattattctgattcatttaagattaaacatctcggtaaaggacattatagcttttattctatggatattagagaatttcaacttccgtctagccaaatcagcatggtgcctaatgtcgggctgaagttttcgattagtaacgcgaacattaaaatctcaggaaagtggaaagcccagaagagatttttgaaaatgtcaggcaactttgatctaagcatcgagggaatgtcaattagcgccgaccttaaattaggcagtaatccgacgtccgggaaaccgacaattaccgcatccagctgttcctcgcatattaattctgtccatgtacacatttcgaaatctaaggtaggatggctgatccagctcttccataaaaaaatcgaaagtgcgttacggaataagatgaattcgcaggtgtgtgaaaaagttacaaactccgtcagtagcgagcttcagccttattttcaaacccta

SEQ ID NO: 7681 - DNA, 660 bp, synthetic construct
  misc_feature 1..660: note = source = /note="Description of Artificial Sequence: Synthetic coding sequence"
  source 1..660: mol_type = other DNA
atgggcgttaggcatccaccatgtagccacagacttctggccgtatgcgccttggtgtcactggccactgctgcattgttggtcaatccaggtgtagtagttcgcatctctcaaaaaggactggactatgcttcacaacagggaacagccgcacttcagaaggagttgaagagaatcaagatcccagactactctgactctttcaagatcaagcatctgggcaagggtcattactccttttactccatggatattagagagtttcaactgccaagctcacagatttctatggtacccaacgtgggccttaagttttctatatcaaacgccaacattaagatttccggcaagtggaaggctcagaagcgcttcttgaagatgtctggtaactttgatctgtccatcgaaggcatgtctatcagcgccgatctcaagctgggaagcaaccccaccagcggaaaaccaactatcacggcgtcctcttgttctagtcacatcaactccgtacacgtgcatatctctaaaagtaaggttggctggttgatccagctgttccacaaaaaaatcgagtctgccctccgcaataagatgaatagccaagtatgtgagaaagtcacgaactcagtgtcttccgagttgcaaccatacttccagaccctg

SEQ ID NO: 7682 - DNA, 660 bp, synthetic construct
  misc_feature 1..660: note = source = /note="Description of Artificial Sequence: Synthetic coding sequence"
  source 1..660: mol_type = other DNA
atgggcgtcagacacccaccttgttcgcacaggttgctggccgtgtgtgccctggtgagccttgctaccgctgcccttcttgtaaaccccggagtcgtggtgcgaatctcccaaaaaggcctcgattacgcatcccaacaaggtacggcagcacttcagaaagaactgaagcggattaagattcctgattactcagattcctttaagattaagcatcttggcaaggggcattattccttttactccatggacatcagagaatttcaactgccctcgtcccaaattagcatggtgccgaatgtgggcttgaaattcagcatatctaacgcaaacatcaagatcagcggtaaatggaaggcgcagaaacgatttttgaaaatgagcggtaacttcgacctgtcgattgagggtatgtcaataagcgcggatctgaaacttgggtccaacccaacctctgggaagcctactattactgcatcgtcatgctcatctcacataaacagtgtccatgtgcacatttccaaatccaaggtgggatggctgatacagctcttccataagaagatagagtcggcactgcggaacaagatgaactcgcaggtgtgtgagaaagtgacgaactccgtttcgtccgagttgcagccatactttcagaccctg

SEQ ID NO: 7683 - DNA, 660 bp, synthetic construct
  misc_feature 1..660: note = source = /note="Description of Artificial Sequence: Synthetic coding sequence"
  source 1..660: mol_type = other DNA
atgggtgtgcggcaccctccttgctctcatcgcctgctggcagtctgcgccttagtatccctggcgaccgctgcgctgctcgtgaacccaggtgtcgtggtcagaattagtcagaaggggctggactacgcatcgcagcaggggaccgcagcactgcagaaggaacttaagcgtatcaagattccagattattccgattccttcaaaatcaagcacctcgggaaaggtcactatagcttttactcaatggatattagggaatttcagctgccgtcaagccagattagcatggtgcctaacgtgggcctcaaattctcgattagcaacgccaacataaagataagcggcaagtggaaagcacagaaacgttttctcaaaatgagcggcaacttcgacttaagcatcgaaggcatgagtatttctgctgacctcaagctgggctccaacccaactagtggcaaaccgaccatcaccgcctcctcatgctcaagtcacattaactcggtgcatgtccatatatctaaaagtaaggtcggctggctgatacaattattccacaagaagatagagtctgcgctgcgtaataaaatgaactcccaagtgtgcgagaaagtgaccaactcagtgtcttccgaactacagccttacttccagaccctt

SEQ ID NO: 7684 - DNA, 660 bp, synthetic construct
  misc_feature 1..660: note = source = /note="Description of Artificial Sequence: Synthetic coding sequence"
  source 1..660: mol_type = other DNA
atgggcgtccgtcatcccccctgcagccatcgactgctggcagtgtgtgccctggtcagtctcgcaaccgccgcactgcttgtgaacccaggggtggtggtcagaatcagccaaaaagggctcgactacgcttcgcagcaaggcaccgcagcactgcagaaggagcttaaaaggataaagataccagactactccgattcgtttaagatcaagcacctgggcaaaggacattattctttttacagtatggatataagagaatttcagctcccttcatcacaaatctcgatggtgccaaacgtgggtcttaagtttagcatctcaaatgccaatatcaaaatctccggtaaatggaaagctcaaaagagattcttgaagatgtccgggaacttcgatctgagcattgaaggcatgtcgatttccgcggatctcaagctcggttcgaaccccacgagcggaaagcccaccatcactgcctcttcatgctcgtcgcatatcaacagtgtgcatgtccacatttcaaagtcgaaggtcggatggctgattcaattgtttcacaagaaaattgagtccgcactccgcaacaagatgaattcgcaagtgtgtgaaaaagtgacgaactccgtctccagcgagttgcagccttacttccaaaccctt

SEQ ID NO: 7685 - DNA, 660 bp, synthetic construct
  misc_feature 1..660: note = source = /note="Description of Artificial Sequence: Synthetic coding sequence"
  source 1..660: mol_type = other DNA
atgggagtgcgccacccgccttgctcccacaggctgctcgccgtgtgcgcactggtatccctcgcaactgctgctctgttggtgaatccgggagtggtggtccgcattagccaaaaaggcctcgactatgcctcccaacaggggacggccgccctgcagaaagagctgaagcggatcaaaattccggactactcggattcgttcaagatcaagcacctgggtaaaggccattactcattttactcaatggacatccgcgaattccagctgccgtcctcgcagatatccatggtccccaatgtcggactgaagttctcaatctcgaacgcgaacatcaaaatctcaggtaaatggaaggctcagaagcggttccttaagatgtcaggaaacttcgacttgtccatcgaaggaatgagcattagtgccgatctgaagctggggtcgaacccaactagcggcaagcctaccatcactgcatccagctgctcaagccacatcaactcagtacatgtgcacatatcgaagagcaaggtcggatggctgatccaactctttcataagaaaatcgaatcggcgttgagaaataagatgaattcgcaggtgtgtgagaaggtgaccaacagcgttagcagtgagctccaaccatactttcagaccctc

SEQ ID NO: 7686 - DNA, 660 bp, synthetic construct
  misc_feature 1..660: note = source = /note="Description of Artificial Sequence: Synthetic coding sequence"
  source 1..660: mol_type = other DNA
atgggtgtccgtcaccccccttgttcacataggcttctggcagtgtgcgcccttgtgtcgcttgcaaccgcagcactgctcgtcaaccccggtgtcgtggtgcgcatctcccagaagggcttggactatgcatcgcaacaaggaaccgcggctctgcagaaagaactgaagcgcattaagatccccgattactccgattcattcaagatcaaacatctcggtaagggacactacagcttttactccatggatattagggaattccagctcccttcgtctcaaatttctatggtgccaaacgtcggacttaagttttcgatttcgaacgcgaacattaagatttcggggaagtggaaggcacagaaacgatttctgaagatgtctggtaactttgacctctcaatcgagggaatgtcgattagcgcagatcttaaacttggcagcaatcctacttcaggtaagccaaccataaccgcgagctcctgttcctcacacattaactccgtccacgtacatattagcaagtcaaaagtgggctggctcatccagctgtttcacaagaaaatagaatccgcacttcgaaacaagatgaactcacaagtctgtgaaaaggtcacgaacagcgtgagctcggagcttcagccatacttccaaactctg

SEQ ID NO: 7687 - DNA, 660 bp, synthetic construct
  misc_feature 1..660: note = source = /note="Description of Artificial Sequence: Synthetic coding sequence"
  source 1..660: mol_type = other DNA
atgggagtgagacacccgccctgttcccacagactgctggctgtttgcgctttggtgtccctcgccaccgctgcgttgctggtgaacccgggagtggtggtgagaatcagccagaaaggcctggactacgcctcacagcagggcacggccgcgctgcagaaggaactgaagagaatcaagatcccagactactcggactcttttaagatcaagcatctgggcaaaggccattattccttctactccatggatatccgagaatttcagctcccgtcctcccagatctccatggtcccgaacgtcggcctcaagttctcgatttcaaacgccaacatcaaaatctcaggaaagtggaaagcccagaagcgcttcctgaagatgtccggtaacttcgacctctccatcgaaggaatgtctatcagcgcagacctcaagttgggatcgaatccaactagcggaaaaccgactatcactgcatcctcatgctcctcccatatcaactccgtgcacgtccacatctccaagtcgaaggtgggatggcttattcagctgttccacaagaagattgaaagcgccctgcgcaataagatgaatagccaggtctgcgagaaagtgactaactcagtctcgagcgagcttcagccgtactttcaaacgctc

SEQ ID NO: 7688 - DNA, 660 bp, synthetic construct
  misc_feature 1..660: note = source = /note="Description of Artificial Sequence: Synthetic coding sequence"
  source 1..660: mol_type = other DNA
atgggagtgaggcaccccccatgctcacaccgtctgttggctgtgtgtgcattagtgtccttagccacagctgctctgctggtgaaccctggcgtggtagtgagaatatcacagaagggcctcgattatgcgtcgcagcaaggtaccgccgctctccagaaagaactgaaacgcatcaaaatccccgattactccgatagttttaaaatcaaacatctgggcaaagggcactattccttctattcgatggacataagagagtttcagctcccctcatctcagattagtatggtgccaaatgtgggccttaagtttagcatctctaatgccaatatcaagatatctggcaaatggaaagcccagaaacggttcctcaaaatgtcaggaaatttcgacttgtctatcgaaggtatgtccatctctgctgacttgaagctgggctctaatcccacctctggaaaaccaacaattacggctagctcatgcagttcccacatcaattctgtgcacgtgcacatctctaagtcaaaagttggttggttgatacagctgttccataagaaaattgagtctgccctgcggaacaaaatgaactcacaggtctgcgaaaaggttaccaacagcgtcagctctgaactgcagccgtatttccagacactc

SEQ ID NO: 7689 - DNA, 660 bp, synthetic construct
  misc_feature 1..660: note = source = /note="Description of Artificial Sequence: Synthetic coding sequence"
  source 1..660: mol_type = other DNA
atgggtgtgaggcaccctccttgctcgcatcggcttctggccgtgtgcgccctcgtgtcactggcaactgcagcacttctcgtcaacccaggagtcgtcgtgcggattagccaaaagggtctggattacgcatcgcaacagggtacggcagcgttgcagaaggaacttaagcggatcaagatacctgactacagcgattcattcaaaatcaaacatctcggtaagggacattacagcttttactcaatggatattagagagtttcagctcccatcctcgcagatatccatggtgcctaatgtgggccttaagttcagcatttccaacgccaacataaagatctcaggaaagtggaaggcacaaaagcggttcctgaaaatgagcggcaactttgatctttccatcgaagggatgtcgatttccgctgacctgaagctgggctcaaaccctacttcaggaaaacctactattacggcctcatcctgttccagccacattaactccgtgcatgtccatatatcgaagtctaaggtgggatggctgattcagctttttcataagaagattgagtcagcattgcgaaacaagatgaactcgcaggtgtgtgaaaaggtgaccaactccgtctcatccgaattgcagccatactttcaaactctg

SEQ ID NO: 7690 - DNA, 660 bp, synthetic construct
  misc_feature 1..660: note = source = /note="Description of Artificial Sequence: Synthetic coding sequence"
  source 1..660: mol_type = other DNA
atgggagtccgccaccctccctgctctcatcgcctgcttgcagtgtgcgccctcgtctcactggccacagcagcccttttggttaaccctggcgtggttgttcgcatttcccaaaaggggctagattacgcgtcacaacagggaactgccgcgctccagaaggagctcaaacggatcaaaatcccagattactccgattctttcaaaataaagcacctgggcaaaggacattacagtttttactctatggacattagagaattccagcttccttcttctcagattagcatggtgcctaacgtgggattgaagttctccatatctaacgccaacatcaagatttctgggaagtggaaagcccaaaagcgctttctcaagatgtcaggaaacttcgacctgtccattgagggcatgtccattagtgcagacctgaaactggggagcaatcctacatcaggaaagcctaccatcacagctagtagctgttcatcacacataaactccgtgcacgtccacatctctaagtctaaagtgggttggctcatccagctgttccacaaaaaaatagaaagcgctctgcgaaacaaaatgaactctcaagtgtgcgagaaagtgactaacagtgtgtcaagcgagctgcagccctacttccagactctt

SEQ ID NO: 7691 - DNA, 660 bp, synthetic construct
  misc_feature 1..660: note = source = /note="Description of Artificial Sequence: Synthetic coding sequence"
  source 1..660: mol_type = other DNA
atgggagtgcggcatcccccttgtagccatcggctgctggccgtctgtgccctggtatcgctcgctactgcagccctgcttgtcaatcccggcgtcgtcgtgagaataagccagaagggtttggattatgcgagtcagcagggcaccgccgctttgcagaaggagctgaaaaggataaagatccctgattacagcgattcctttaagattaaacatctcggcaagggccactactctttttacagcatggacatccgggagttccaactgcccagctcacaaatctctatggtacctaatgttggcttaaaatttagtatttccaacgccaatataaagatcagtggtaaatggaaagcccagaaacggtttctaaaaatgtcaggaaattttgatctgtccattgaaggcatgtcaatatctgctgatttgaaactgggttcaaaccccacaagcggaaagccaaccatcacggctagttcatgttcctctcacattaattccgtgcatgttcacatctccaagagcaaagttggatggcttatacagcttttccataagaagatcgagagcgccttacggaataaaatgaattctcaggtttgcgaaaaagtgacgaattctgtctcttctgagctgcagccttacttccagacacta

SEQ ID NO: 7692 - DNA, 660 bp, synthetic construct
  misc_feature 1..660: note = source = /note="Description of Artificial Sequence: Synthetic coding sequence"
  source 1..660: mol_type = other DNA
atgggtgtgcgacatcctccatgcagccacaggctgctggcggtctgtgccctggtgtcgctggccaccgctgctctgcttgtaaacccaggcgtggttgttcgcatctcccaaaaaggtctcgactacgccagccagcagggtaccgcagcgctgcagaaggagctgaagcggatcaagatcccagattactccgacagttttaagatcaagcacttgggtaaaggacactacagcttctattcaatggatattagagaattccagctgccaagctcccaaatctcgatggtgcctaacgtggggctcaaattctccatttccaacgccaacatcaagatctctggtaaatggaaagcgcagaagcgcttcctaaagatgagcgggaatttcgatttgagcatcgaaggtatgagtataagcgcggatttgaagctgggcagcaacccgaccagcggtaaaccgacgattactgcttctagctgcagtagtcatatcaacagcgttcacgttcacatctctaagagtaaggtaggttggctgattcaattgttccacaagaagatcgagagcgccctgcgtaacaaaatgaacagccaagtttgtgagaaggtgaccaacagcgtgagttccgagttgcagccctactttcaaacccta

SEQ ID NO: 7693 - DNA, 660 bp, synthetic construct
  misc_feature 1..660: note = source = /note="Description of Artificial Sequence: Synthetic coding sequence"
  source 1..660: mol_type = other DNA
atgggggtccggcaccccccatgcagccatcgcctgctggccgtctgtgcactggtcagcttggctacagctgccctcctggtcaatccgggagtggtggtgaggattagccagaaaggattggattacgcctcgcagcagggcaccgcggctcttcagaaagagttgaagagaatcaagattcctgattactcagattcctttaaaattaaacacctcggaaaaggacattactcgttttactccatggatattcgcgaatttcaattgccaagctcacagattagcatggtacccaacgtcgggcttaagttcagcatcagcaatgcaaacataaagatctccggcaagtggaaggcccagaagcgctttctaaaaatgagtggcaactttgacttaagtatcgaaggcatgagcattagtgccgatctgaaactgggcagtaatcccacctccggcaaacccaccattactgccagtagctgttcttctcacattaactccgtccatgtccacatctctaaatcaaaagtcggttggctcattcagcttttccataaaaagatcgagagcgcactgaggaacaaaatgaactcacaggtttgtgaaaaggtcacaaatagcgtgtccagtgaattgcagccctactttcagaccctg

SEQ ID NO: 7694 - DNA, 660 bp, synthetic construct
  misc_feature 1..660: note = source = /note="Description of Artificial Sequence: Synthetic coding sequence"
  source 1..660: mol_type = other DNA
atgggtgtgcgccatccgccgtgttcgcatcggctgctcgctgtctgtgcgctcgtctcactggcaacggctgcgctcctggtcaaccccggcgttgtggtccggatctcgcaaaagggtctggattacgcctcgcagcagggtactgcagccctgcaaaaagagctgaagaggataaagatcccagattattccgatagcttcaagatcaagcacctggggaaagggcattactcgttctacagtatggacatccgcgaattccagcttccgtcgtcgcagatctccatggtgccaaacgtgggactcaagttctcaatctccaacgcaaacatcaagatctcgggcaagtggaaagcacagaagagattcttgaagatgtcgggaaacttcgacttgtcaattgaaggaatgtctatctcggccgacttgaagctgggcagcaacccaaccagcggaaagccaactatcacggcctcatcctgctcgagccacattaactccgtgcatgtgcacatctctaagtctaaggtgggatggctgatccagctgtttcataagaaaatcgaatcagcgttgcgcaataagatgaacagccaggtttgcgaaaaagtgactaacagcgtctcgtccgaattgcagccttatttccaaaccctg

SEQ ID NO: 7695 - DNA, 660 bp, synthetic construct
  misc_feature 1..660: note = source = /note="Description of Artificial Sequence: Synthetic coding sequence"
  source 1..660: mol_type = other DNA
atgggggtgcgccacccaccctgctcccaccggcttctggcggtgtgcgccctggtgtcactcgcgaccgcggccttgctcgtgaatcccggagtggtggtgcgcatctcgcagaaaggcctggactacgccagccagcagggaaccgccgcgttgcagaaggaactgaagcggatcaagatccctgactacagcgactcgttcaagattaaacacctcggaaagggacactattcgttctactcgatggatatccgggagttccaactgccatcctcacagatctccatggtgccgaacgtcggtctgaaattctcaatctcgaacgcaaacatcaagatcagcggcaagtggaaagcacagaagcgcttcctcaagatgtcgggcaattttgacctttctatcgaaggaatgtcgatctcggcggaccttaagctgggatccaatcccacctcaggcaagcccactatcactgctagctcctgctcatcgcacattaactcagtccatgtccacatctccaagtcgaaggtgggatggctgattcagctgttccataagaagatcgagtcggccctgcggaacaagatgaactcccaagtctgtgaaaaagtgactaattcagtgagctccgaactgcagccgtacttccaaactctt

SEQ ID NO: 7696 - DNA, 660 bp, synthetic construct
  misc_feature 1..660: note = source = /note="Description of Artificial Sequence: Synthetic coding sequence"
  source 1..660: mol_type = other DNA
atgggcgtccgccatccgccatgttcgcaccggctgctggcggtgtgcgccctcgtgtcactggcaaccgcggcactgctggtgaacccaggagtggtcgtcaggatctcgcagaagggtttggactacgccagccagcaaggcaccgccgcattgcaaaaggaacttaaacgcatcaagattcccgattactccgacagctttaagattaaacatctgggaaaggggcattactcgttttactcgatggatattcgggagtttcaacttccatcttcgcaaatttcaatggttcctaacgtgggcctgaagttttcgatcagcaacgcgaacattaagatctcgggaaaatggaaggcacagaagcgttttctgaaaatgtcagggaactttgacctgtcgatcgagggaatgtcgatttcggccgatcttaaactgggtagcaacccaacttcaggtaagcccactatcactgcctcttcatgttcctcccacattaacagcgtgcatgtgcatatttccaagagcaaggtgggttggctcattcaactgtttcataagaagatcgaatccgccctgcggaacaagatgaattcccaagtctgtgaaaaggtgactaacagtgtgtcctccgaactccaaccatacttccaaaccctt

SEQ ID NO: 7697 - DNA, 660 bp, synthetic construct
  misc_feature 1..660: note = source = /note="Description of Artificial Sequence: Synthetic coding sequence"
  source 1..660: mol_type = other DNA
atgggtgtgaggcacccaccttgctctcaccggcttctcgcagtgtgtgcacttgtcagcctggcaacggctgccctgcttgtgaaccctggtgtcgtggtgagaatttcgcaaaagggcctggattatgcaagccaacagggaaccgctgcgcttcaaaaggagctgaaacggatcaagattcctgactattcagattcgttcaaaatcaaacacttgggcaaggggcattacagcttttactcgatggatatcagagagttccaacttccctcgtcgcagatttcgatggtccccaatgtggggctcaagttttctatttcaaatgccaacataaagatttcgggcaagtggaaagcacaaaagcgctttcttaagatgtccggtaacttcgacctgagcatagaaggcatgtcaatctcggccgatttgaagctgggatcaaaccccacttcgggtaaacctaccataaccgcaagcagctgttcgtcccatatcaatagcgtgcacgtgcatatctcaaaaagcaaggtcggctggctcattcaactttttcataagaaaattgaatccgccctccgaaacaagatgaactctcaagtctgcgaaaaggtgactaactcggtttccagcgaactgcagccatactttcaaactctt

SEQ ID NO: 7698 - DNA, 660 bp, synthetic construct
  misc_feature 1..660: note = source = /note="Description of Artificial Sequence: Synthetic coding sequence"
  source 1..660: mol_type = other DNA
atgggcgttaggcatcccccgtgttcccatagactcctggccgtgtgcgctctggtcagccttgctactgccgctcttcttgtaaatcccggcgtggtggtcaggatctcacagaagggcctggactacgcgtcccaacagggcacagccgcgctccagaaggagctgaaaaggatcaagattcctgactatagcgactcattcaagattaaacaccttggcaaaggccattatagcttttattcgatggacatcagggagtttcagttgccctccagccaaatctccatggtgcctaatgttggactgaaattcagtatatctaatgctaacattaaaatcagtggaaagtggaaggcacagaaaagattcctgaagatgtccggaaacttcgatctgtccattgagggtatgagcatttccgcggacttgaagttaggatccaacccaaccagtggcaaaccgaccatcaccgcgtcttcctgcagcagccacatcaactcggttcacgttcacatctccaaatctaaggtcgggtggctgattcagttatttcataaaaaaatcgaaagtgctctaagaaataaaatgaactcccaggtgtgtgagaaagtaactaactcggtgagtagtgaactgcagccgtatttccagactctg

SEQ ID NO: 7699 - DNA, 660 bp, synthetic construct
  misc_feature 1..660: note = source = /note="Description of Artificial Sequence: Synthetic coding sequence"
  source 1..660: mol_type = other DNA
atgggagtccgccacccaccttgtagccaccgcctgctggccgtgtgcgcccttgtcagcctggcaactgcggccctcctcgtgaatccgggtgtagtggtgcgcatttcccaaaagggcctggactacgcaagccaacagggaacggccgctctgcagaaggagctcaagcggatcaaaatcccagactattctgacagcttcaaaatcaagcacctcgggaaagggcattacagcttctatagcatggatatccgcgagttccagctgccgtcaagccagatcagcatggtgcccaacgtgggcctgaagttttccatctctaacgcgaacattaagatcagtggtaagtggaaagcgcaaaagcgctttctgaagatgtcaggaaacttcgatctctccatcgaaggtatgtcgatctccgctgacctgaagctcggatctaacccgacctcaggcaagcctacgatcaccgcctcgtcatgttcgtcgcatatcaacagcgtgcatgtccacatttccaagtcgaaggtgggttggctcatccagttgttccacaaaaagatcgaatccgcgctcagaaacaagatgaattcgcaggtttgcgagaaggtgactaattccgtttcgtcggaactccagccgtacttccagactttg

SEQ ID NO: 7700 - DNA, 660 bp, synthetic construct
  misc_feature 1..660: note = source = /note="Description of Artificial Sequence: Synthetic coding sequence"
  source 1..660: mol_type = other DNA
atgggcgttcgccacccaccgtgttctcatcggctgctggcagtgtgcgcccttgtgtccctggcaaccgctgcccttttggtgaaccctggcgtggtggtccggatttcgcagaagggattggattacgcttcgcaacagggtaccgcagccctccagaaggaactgaagaggatcaagattcctgattactccgatagctttaagatcaagcatctgggaaaggggcactactctttttactcaatggacattagggaatttcaactcccaagctcacagatttccatggtgccgaacgtgggattgaaattcagcatatccaatgcgaatatcaagatttcgggtaagtggaaggcacagaagcgctttcttaagatgagcggtaactttgatctgagcattgaaggaatgagcatttcagctgacctcaagttgggttcaaatcctactagcggcaaacccacgattactgcatcctcctgttcctcacatatcaacagcgtccatgtgcacatctcaaagagcaaagtcggttggttgattcaacttttccacaagaaaatcgagtccgcattgagaaataagatgaactcccaagtctgtgagaaagtaactaactccgtgtcgtcagaacttcaaccttactttcagactctt

SEQ ID NO: 7701 - DNA, 660 bp, synthetic construct
  misc_feature 1..660: note = source = /note="Description of Artificial Sequence: Synthetic coding sequence"
  source 1..660: mol_type = other DNA
atgggggtacggcaccccccatgtagtcatagactcctcgccgtctgtgctctagtttctcttgccactgctgccctcctagtgaatcctggagtcgttgtccggatatctcagaaaggacttgattatgcatcccagcaggggacagcagctctccagaaggaactaaaacggatcaaaatacccgattactctgattcattcaaaatcaaacatctgggaaaaggacactattctttttactctatggacattcgagaattccagctaccctcatcacagatctcaatggtcccaaacgttggattaaaatttagtatcagtaacgctaacataaaaataagtgggaaatggaaagcacagaaacggttcctcaaaatgtccgggaactttgatctctccatcgaagggatgtccatcagtgctgatctcaaactaggatccaatcctacttctggaaaacctacaataacagcttcttcctgcagttcacacataaattccgtccacgtgcacatcagtaaatcaaaggtagggtggctcattcagctgtttcacaaaaaaatagaatcagctcttcgaaacaaaatgaattcccaggtatgtgagaaagtcactaacagtgtgtcttctgagctacagccatatttccagacactg

SEQ ID NO: 7702 - DNA, 660 bp, synthetic construct
  misc_feature 1..660: note = source = /note="Description of Artificial Sequence: Synthetic coding sequence"
  source 1..660: mol_type = other DNA
atgggtgtgcgacaccccccctgcagtcacagactcctggccgtgtgtgcacttgtgtccttagccacggcagcactactggtcaacccaggggtggtcgtgcggatctcccaaaaaggccttgattacgctagtcaacagggcactgctgctcttcagaaggagctgaaaagaataaaaatcccggattattccgactcattcaagatcaaacatcttggaaagggacactattctttttattcaatggacatacgggagtttcagctgccgagctcccagatttccatggtgcctaatgtcggcctcaagttcagtattagcaacgcaaacattaagatctctgggaagtggaaagctcaaaaacgcttcctgaagatgagcgggaattttgaccttagcattgagggtatgagtatctcagccgacttgaaactaggttccaatcccacttctggcaaacctacgatcacagcctcctcttgctcgtcccacattaattctgtgcacgtgcacatctctaagagcaaagtgggatggctgatccagttgttccataagaagatcgagtctgctctgagaaacaagatgaactcccaggtgtgcgagaaagtcacaaattccgtaagcagcgaactgcagccttatttccagaccctt

SEQ ID NO: 7703 - DNA, 660 bp, synthetic construct
  misc_feature 1..660: note = source = /note="Description of Artificial Sequence: Synthetic coding sequence"
  source 1..660: mol_type = other DNA
atgggggtgcgacacccaccctgctcgcacaggcttctcgcagtgtgtgctttggtcagtctggccactgctgctctgttggttaatcccggggtggtggtcaggatatcccaaaaagggctcgattatgctagtcagcagggaactgccgcactgcagaaagaattaaaaagaataaagattccagattattctgattccttcaaaatcaaacatctcggaaaagggcactattccttttactcaatggacataagggaatttcagctcccctcatcacagatctcgatggtgcctaatgttggattaaaattttctatttcaaatgctaatataaaaataagtggaaaatggaaagctcagaaacggtttctcaaaatgtctgggaattttgatctatctatagaagggatgagtatatccgccgatcttaaactaggatctaaccctacttctggaaaacccacaatcactgcctcctcttgtagttcacatatcaacagtgtccacgtacacatatccaaatccaaagtaggatggttaatccagctctttcataaaaagatcgaatctgcccttcgaaataaaatgaactctcaggtgtgtgaaaaagtcacaaatagtgtgagttcagaactccaaccctattttcagactctg

SEQ ID NO: 7704 - DNA, 660 bp, synthetic construct
  misc_feature 1..660: note = source = /note="Description of Artificial Sequence: Synthetic coding sequence"
  source 1..660: mol_type = other DNA
atgggagtgcgccacccgccttgctcgcacaggctgttggcagtatgtgctctggtgtcattggctactgctgccctgctggtgaatcccggagtcgtggtgcgaatttcgcaaaaggggcttgactacgccagtcagcagggaaccgcggcactccaaaaagagctgaagcggattaagatcccggactactcagattcgttcaaaatcaagcatttgggcaaaggccactactccttctactccatggatatcagagaattccagctcccaagctcgcagatttctatggttccgaacgtcggcctgaagttttcgatcagcaatgctaacatcaagatctcagggaagtggaaggcccagaagcgcttcctcaagatgtctggtaacttcgacctctcgatcgagggaatgtccattagcgccgatctcaagctgggatcaaatcctacgtccggtaaaccaactatcaccgcatcttcatgttcatcgcacatcaattccgtgcacgtgcatatctcgaagtccaaagttggttggctcattcagcttttccataagaagatcgagtccgcgttgcgtaacaagatgaactcccaagtctgtgaaaaggtgactaactctgtcagctccgaacttcagccgtactttcaaaccctg

SEQ ID NO: 7705 - DNA, 660 bp, synthetic construct
  misc_feature 1..660: note = source = /note="Description of Artificial Sequence: Synthetic coding sequence"
  source 1..660: mol_type = other DNA
atgggagtgagacatcctccatgttcccatagacttcttgcagtgtgtgcactggtttcgttggcaaccgccgcactgcttgtgaacccgggtgtggtggtgaggatctcccagaaggggctcgattacgcgagccagcaaggtactgcagcgcttcaaaaggaacttaagcgcattaagattccggattacagcgattcctttaagatcaaacaccttggtaagggacattacagcttttactcgatggatataagagaatttcagctgccctcatcccaaatatcgatggtgcctaatgtcgggctgaagttttccatttcgaacgcaaacatcaagatttcggggaaatggaaggcacaaaagagatttctcaaaatgtccggaaatttcgatttgagcatcgagggaatgtcaatcagcgcagatctgaagttgggatccaatccaacttccgggaagcctactataaccgcatcatcgtgctcgtcccatatcaactcggtgcatgtgcatatctcgaagtccaaagtgggctggctgattcaactgtttcacaaaaagattgaaagcgcattgagaaacaagatgaactcgcaggtgtgtgagaaggtgacgaacagcgtctcgagcgaactgcaaccctactttcagaccctg

SEQ ID NO: 7706 - DNA, 660 bp, synthetic construct
  misc_feature 1..660: note = source = /note="Description of Artificial Sequence: Synthetic coding sequence"
  source 1..660: mol_type = other DNA
atgggagtcagacaccccccttgttcacacaggctcctggcagtctgtgctctggtaagcctggccaccgccgccttactggtgaacccaggggttgtggtgagaatctcacagaaagggttggattatgcctcgcagcagggaaccgcagcacttcaaaaggagttgaaacgaattaaaattccagattacagcgactccttcaaaatcaagcaccttggtaagggacattattcattctattctatggacatccgagaatttcagttgccaagtagccagatctccatggtccccaatgttggacttaagttcagcattagcaatgcgaacatcaaaataagcgggaagtggaaggctcaaaagcgattcctcaaaatgagtggcaacttcgacctgtcgatcgagggtatgagcatatccgctgatctaaaattgggctctaatcccactagcggtaaacctactattaccgcaagttcctgctcatcccatatcaattcagtgcacgttcacatatcaaagtctaaagtcggctggctcattcagctgttccataagaagatagaaagcgcactgcgtaataagatgaattcgcaggtgtgcgagaaagtcacaaactcagtgtctagtgaattgcagccgtatttccaaacactg

SEQ ID NO: 7707 - DNA, 660 bp, synthetic construct
  misc_feature 1..660: note = source = /note="Description of Artificial Sequence: Synthetic coding sequence"
  source 1..660: mol_type = other DNA
atgggagtgagacacccaccgtgtagtcaccgacttcttgctgtctgtgctttggtttcactggccacagcagctctgttagtcaatcctggagttgttgtaagaatttcacaaaaaggacttgactatgcatcccagcagggaacagctgcccttcaaaaggaattgaaacggattaaaattccagattactcagattcgtttaaaattaaacatcttgggaaaggacattatagtttttatagtatggatatccgagagtttcaattaccatcgagtcaaattagcatggttccaaatgttggattgaaattcagtatctcaaacgccaatatcaaaatctccgggaaatggaaagctcaaaaaagattcctcaaaatgtcgggaaacttcgatttgagtattgagggtatgtcaatttcagcagatctcaaattggggagtaatccaactagtggcaagccaactatcacggcgtcctcttgttcgtcccacattaatagtgttcatgttcatatttccaaaagcaaggtgggatggctcatccaactgttccataaaaaaattgaatcagccctgcgtaataaaatgaacagtcaggtatgcgagaaagttacgaattcggtctcttctgaattgcaaccctatttccagactctc

SEQ ID NO: 7708 - DNA, 660 bp, synthetic construct
  misc_feature 1..660: note = source = /note="Description of Artificial Sequence: Synthetic coding sequence"
  source 1..660: mol_type = other DNA
atgggcgtgaggcaccctccatgctcccaccgactgctagctgtgtgcgccctagtttcgctggcaaccgctgccctgctggtgaatcccggtgtggtggttaggattagtcaaaaagggctagactacgcttctcagcaaggtactgcggccctgcagaaagagttgaaacggattaagatcccagactacagcgattcttttaagataaaacacttgggaaaaggccattactccttttactctatggatattagggagtttcagcttccctcgtcccagatcagcatggtgccaaacgtgggactcaagttttcgatcagtaacgccaacatcaagatcagtggcaaatggaaggctcagaaacggtttctgaaaatgtcggggaattttgatctcagtattgagggcatgagcattagcgctgacctcaagcttgggtctaatcccacaagtgggaaacccactatcacagcatctagctgcagttcccatatcaactccgtgcatgttcacatatccaagtctaaggtggggtggctgattcagttgttccacaaaaaaattgaatccgctctgcggaacaagatgaactcccaggtgtgcgagaaagttactaatagtgtgtcttccgagctgcaaccatattttcagactctg

SEQ ID NO: 7709 - DNA, 660 bp, synthetic construct
  misc_feature 1..660: note = source = /note="Description of Artificial Sequence: Synthetic coding sequence"
  source 1..660: mol_type = other DNA
atgggcgttcggcacccgccttgcagccatcgcttgttggccgtgtgcgcactggtgtccctggctactgcagcactgctggtgaacccaggcgtcgttgtgcggatctcacagaagggactggactacgcttcccagcaggggactgcagcccttcagaaagaactgaaacgaataaagatacctgactattccgacagctttaagatcaagcacctgggaaagggacactactcgttctacagcatggatatccgcgagttccagttgccctcgtctcaaatcagcatggtgcccaatgtgggactgaagttctcgatttcaaacgccaacatcaaaatctccgggaagtggaaagctcaaaagcggttccttaagatgtcgggaaacttcgacctctcaatcgaaggcatgtcgatctccgcggatctgaaactcggatctaacccgacctcaggcaagccgactatcaccgcctcatcgtgttctagccacatcaatagtgtgcacgtccatatttctaaatcgaaggtgggctggcttatccagctgttccacaagaagattgagtcggccctgcgcaataagatgaatagccaagtgtgcgaaaaggtgacgaattccgtgtcctcggaactgcagccgtactttcagactctg

SEQ ID NO: 7710 - DNA, 660 bp, synthetic construct
  misc_feature 1..660: note = source = /note="Description of Artificial Sequence: Synthetic coding sequence"
  source 1..660: mol_type = other DNA
atgggagttaggcaccctccgtgctcacaccgcctcctcgccgtgtgcgctctggtgtcactggcgaccgctgccctcctcgtgaacccgggcgtggtggtccgcatcagccagaagggactggactatgcctcacaacagggcactgcggccctgcagaaggaactgaaacggatcaaaatcccggactactcggacagcttcaagatcaaacacctgggaaagggacactactcgttctacagcatggatattagagagtttcaactcccgtcgagccaaatctccatggtcccgaacgtgggtctgaaattctctatctccaacgccaacatcaagatcagcggaaaatggaaggctcagaaacggttcctgaagatgtcaggcaatttcgacctgagcattgaaggaatgagcatttccgcggatctcaagctcggaagcaatccgacctccggcaagccgactattaccgcatcgagctgctcgtctcatatcaattcagtgcacgtgcatatctcgaagtcaaaagtcggttggctcatccaactcttccataagaagattgaatcagcgctgagaaacaagatgaacagccaagtctgcgaaaaggtcaccaactcggtttccagcgagctgcagccatacttccagaccctc

SEQ ID NO: 7711 - DNA, 660 bp, synthetic construct
  misc_feature 1..660: note = source = /note="Description of Artificial Sequence: Synthetic coding sequence"
  source 1..660: mol_type = other DNA
atgggcgtgcgccaccccccctgcagccacagactcttagccgtttgcgccctcgtctcgctagcgacagccgccctcctggtcaaccccggagtggtcgtgcgcatttctcaaaagggcctcgattatgcgtcacagcaaggaacagccgcacttcagaaggaattgaagaggattaagatcccggattatagtgattccttcaagatcaagcacctgggcaagggccactacagtttttactcgatggacattcgcgagttccaactgccatcgagtcaaattagtatggtgccaaacgtcggactgaagttctccatcagcaatgcgaatataaagatctcgggcaaatggaaggctcagaagcgcttcctcaagatgtcgggcaactttgacctttcgatcgaagggatgagcatttcggctgacctgaagctaggttccaacccaacgagtggaaagccgacaatcaccgccagtagctgtagtagccacatcaatagcgttcacgtccatatatccaagtcaaaggtcggttggttaatccaactgtttcacaagaagattgagtcagccctccgcaacaagatgaactcgcaagtgtgtgagaaggtgaccaacagtgttagttctgagctgcaaccatactttcaaacgctg

SEQ ID NO: 7712 - DNA, 660 bp, synthetic construct
  misc_feature 1..660: note = source = /note="Description of Artificial Sequence: Synthetic coding sequence"
  source 1..660: mol_type = other DNA
atgggagtgcgtcaccctccatgcagccatcggctgctggcagtgtgcgcgttggtgtcacttgcaacggcagcactgcttgtgaaccccggagtggtcgttaggatttcccagaagggccttgactacgcctcgcagcaaggtaccgcagcacttcaaaaggagctcaagcggattaagattcctgattacagtgactcttttaagattaaacaccttggaaaaggtcactactcgttttactccatggatatccgtgaatttcaacttccttcgtcccagatttccatggtgcctaacgtgggccttaagttttcgatatccaacgcgaacattaagatttcagggaagtggaaggctcagaagagatttcttaagatgagcggaaacttcgacctgtccatcgaaggcatgagtatttcggcagaccttaagctcgggtcaaatccaacttctggtaaaccaactattaccgcctcgtcctgttcatcgcatatcaactcggtccatgtccatatctccaaatcaaaagtcggctggctgatccaactctttcacaagaagatcgaatcagccctgagaaacaagatgaactcgcaagtgtgcgagaaggttactaattcagtgtcatcagaattgcagccatactttcaaaccctt

SEQ ID NO: 7713 - DNA, 660 bp, synthetic construct
  misc_feature 1..660: note = source = /note="Description of Artificial Sequence: Synthetic coding sequence"
  source 1..660: mol_type = other DNA
atgggtgtgagacaccctccctgctcacatagacttcttgcagtctgtgcactcgtgtcgctcgccaccgccgcccttctggtcaatcccggtgtggtggtgcgcatcagccaaaagggacttgattacgcaagccagcagggcactgcagcacttcaaaaagaactgaagagaattaagattccggactattccgattcattcaagataaagcatctcggtaagggtcattattcattctactcaatggatatccgagaattccaacttccttcctcccaaatcagcatggtgccaaacgtcggcctgaagttcagcatcagcaacgcaaacatcaagatatctggtaagtggaaagctcaaaagcggttcctcaagatgagcggaaacttcgacctgagcatcgagggaatgtccatttcggcggatctgaaactgggatccaatccaacctcaggcaaacctaccataaccgcgtcctcgtgctcaagccacatcaattcggtgcacgttcatatctccaaatcaaaagtgggttggctgatccaactttttcataagaaaattgagtcggcgttgcgaaataagatgaactcccaggtctgcgagaaagtgactaactccgtgtcatcagaactccagccatacttccagactctg

SEQ ID NO: 7714 - DNA, 660 bp, synthetic construct
  misc_feature 1..660: note = source = /note="Description of Artificial Sequence: Synthetic coding sequence"
  source 1..660: mol_type = other DNA
atgggagtgcgccacccgccatgcagccaccggctgttggctgtgtgcgccctggtgtccctggccactgccgcccttctggtgaacccaggagtcgtggtcagaatctcccaaaagggcctggattacgcttcacagcaaggcaccgcagccctgcagaaagagctgaaaagaataaagatcccggattacagcgactcgtttaagattaaacacttgggaaagggtcattattccttctactccatggacattcgcgaatttcagcttccctcgagccaaatctctatggtgcctaacgtgggtcttaagttctcgatctccaacgcgaacatcaagatttcgggcaagtggaaggcccaaaaacgcttcctcaagatgtcgggaaacttcgatctctcgatcgaaggaatgtcgatctctgcagacctgaagctggggtccaacccgacttcggggaagccgacgattaccgcgagctcctgttcttctcatatcaattcagtacatgtccacatctcaaagtctaaggtcggatggctcatccaactcttccacaagaaaatcgagtcggcgctgcgcaacaaaatgaattcacaggtttgcgagaaggtgaccaattcggtgtcctccgaactccagccctacttccagactctg

SEQ ID NO: 7715 - DNA, 660 bp, synthetic construct
  misc_feature 1..660: note = source = /note="Description of Artificial Sequence: Synthetic coding sequence"
  source 1..660: mol_type = other DNA
atgggagtgaggcatccgccttgttcgcatcggcttctcgcggtctgcgcgctcgtctccctggctaccgccgctctgctggttaaccccggcgtggtggtcagaatttctcagaagggcctggattacgcgtcccaacaaggcacggccgctctccagaaggaactcaaacggatcaagatcccagactactcagattcctttaagatcaagcacctgggcaagggtcactactcattttacagcatggatatccgcgagttccagttgccttcatcgcaaatctcaatggtcccgaatgtcggcctgaaattctcgatcagcaacgcaaatatcaagatctcagggaaatggaaggcccagaagcgctttctcaaaatgtcaggcaatttcgacctgtccatcgaggggatgtccatctcagcggacctgaaactcggatccaacccaacctcaggcaaaccgaccatcactgcttcctcgtgcagcagccacataaactctgtgcatgtccatatttcgaagtcgaaggtggggtggttgatccagctgttccacaagaagattgagtctgcccttcgcaacaagatgaactcccaagtgtgcgaaaaggtgactaattctgtgagcagcgaactgcagccctatttccaaactttg

SEQ ID NO: 7716 - DNA, 660 bp, synthetic construct
  misc_feature 1..660: note = source = /note="Description of Artificial Sequence: Synthetic coding sequence"
  source 1..660: mol_type = other DNA
atgggagttcggcaccccccctgtagccacaggctgctggccgtgtgtgcccttgtgtctttagccaccgccgcgctgctcgtgaaccctggcgtggtggtgcgcataagccagaagggactagattacgcatctcagcaagggactgctgccctgcagaaggagctcaagcgtatcaagatccctgactatagcgacagttttaagattaaacatctagggaaaggtcactactcattctactctatggatattcgtgaatttcagctgccttcttctcaaatctctatggttccaaacgtggggttgaagtttagcatctcaaacgcgaacattaagatatcaggaaagtggaaagcccagaagcgatttctgaagatgtcagggaactttgatctgagtatcgagggcatgagtatttcagcggacctgaaattgggcagcaaccctacctcaggaaagccaaccatcacggcgagttcgtgtagtagccacatcaattcggtacacgtccacataagtaaatccaaggtcggttggttgattcagttgttccataaaaaaatagagagtgcactgaggaacaagatgaatagccaagtctgtgaaaaagtcactaatagtgtgtcttccgagctgcaaccctacttccagacactc

SEQ ID NO: 7717 - DNA, 660 bp, synthetic construct
  misc_feature 1..660: note = source = /note="Description of Artificial Sequence: Synthetic coding sequence"
  source 1..660: mol_type = other DNA
atgggagtcagacatccaccatgttcccacagattgcttgcggtgtgtgccctggtgtcacttgctaccgccgcacttctcgtaaatcctggtgtggtcgtgcgtataagccagaaaggcttggactacgcatcacaacaggggacggcagctctgcaaaaagagctgaagaggataaagattcccgattacagcgactcctttaagatcaaacatcttggtaagggacattattccttctacagcatggacatccgggaatttcaactcccctcgtcgcaaatttccatggtgccgaacgtgggactgaagttctcgatttccaacgctaacatcaagatttccggtaaatggaaggcacaaaaacgcttccttaagatgtccgggaattttgacctgagcattgagggaatgtcgatttcggccgacctcaaacttgggagcaaccctacctccggtaagccgaccattaccgcgtcgtcatgctcttcacatatcaacagcgtgcatgtgcacatttcgaagtcgaaggtcgggtggcttatccagttgtttcacaaaaagattgaatctgcactgcggaacaaaatgaattcgcaggtctgtgaaaaggtgactaattctgtttcttcggaacttcaaccttacttccagacgctt

SEQ ID NO: 7718 - DNA, 660 bp, synthetic construct
  misc_feature 1..660: note = source = /note="Description of Artificial Sequence: Synthetic coding sequence"
  source 1..660: mol_type = other DNA
atgggagtcagacatcctccatgctcacatcgactgcttgcagtctgcgccttggtgtcccttgcaaccgcagccctgttggtgaaccccggagtggtggtccgaatatcgcaaaaagggctggattacgcgtcgcaacagggtaccgccgcgcttcagaaagagcttaagaggatcaaaatccctgattactcggattcgtttaagataaaacacctgggcaaaggtcattactcgttctactctatggacattagggaattccaactgccctcgagccaaatctcgatggtgcctaacgtgggacttaagttttccatctctaatgcaaacattaagatttcgggaaagtggaaggcacagaaacggtttctgaagatgtcaggcaattttgatctctcgattgaagggatgtccatatcagcagacctcaagctgggctccaacccaactagcggaaagccaactattacggcaagctcgtgtagctcacatatcaactcggtccatgtgcacataagcaagagcaaggtgggttggttgatccagctgtttcacaagaaaatcgaaagcgcgcttaggaacaagatgaattctcaagtttgtgagaaagttactaattcagtgagcagcgaactgcagccttatttccaaaccctc

SEQ ID NO: 7719 - DNA, 660 bp, synthetic construct
  misc_feature 1..660: note = source = /note="Description of Artificial Sequence: Synthetic coding sequence"
  source 1..660: mol_type = other DNA
atgggagtgaggcatcctccctgctcccataggctcctggcagtctgcgcgctggtgagcctggcaactgcagcactccttgtgaaccctggtgtcgtcgtgcggatttcacagaagggtctggattacgcatcacaacagggtaccgccgcacttcaaaaagaactgaagagaatcaagattcctgattactccgattcgttcaagattaagcatcttggtaagggacactatagcttctactcaatggatatcagggaatttcaactcccctcgtcccaaatctcgatggtgccgaacgtgggtctgaagttctctatctcgaatgcaaacatcaagatatctggtaagtggaaggcgcagaagcgctttcttaagatgtcgggaaactttgaccttagcattgaaggaatgtccatctcggcagacctcaaattgggatcgaatccaacctccggaaaaccgaccatcacggcctccagctgtagctcacacattaactctgtccatgtgcatatctccaagtcaaaagtgggttggctcatccagctctttcataagaagatcgaatcggcacttagaaacaaaatgaacagccaagtgtgcgagaaagtcactaattccgtgtcgagcgaactgcaaccctactttcagactctg

SEQ ID NO: 7720 - DNA, 660 bp, synthetic construct
  misc_feature 1..660: note = source = /note="Description of Artificial Sequence: Synthetic coding sequence"
  source 1..660: mol_type = other DNA
atgggagtgaggcatccaccttgtagtcatagactgctggctgtttgcgctctcgttagtttggcaactgctgctctcctggtgaaccctggagttgtggttcggatttctcagaaggggttggactacgcttcacagcaggggaccgccgcactgcagaaggagctgaaaaggatcaaaatccccgactattccgactccttcaaaataaaacacctcgggaagggacactattcattttactccatggacatcagggagttccaactgccaagtagccaaatcagtatggtcccaaatgtcgggctgaagttttccatctctaatgccaatatcaagatcagcggaaagtggaaggcccagaaacggtttctcaaaatgtctggaaactttgacttgtcaatcgaaggaatgtcaatcagcgctgatctcaaattggggtcaaatccgacctccggaaagccaacgatcacagcatcttcctgctctagtcacataaactctgttcacgtacacataagcaaatctaaagtcggctggcttattcagctgttccacaaaaagatcgaaagcgccctccgaaacaagatgaactctcaggtctgcgagaaggtgaccaattccgtttctagcgagttgcagccctactttcaaaccttg

SEQ ID NO: 7721 - DNA, 660 bp, synthetic construct
  misc_feature 1..660: note = source = /note="Description of Artificial Sequence: Synthetic coding sequence"
  source 1..660: mol_type = other DNA
atgggagtgcgccaccctccctgcagccacagactactggcagtttgtgcactggtgtctctggctactgcagcgcttcttgtaaaccccggtgtcgtggtacggatctcccagaagggcctcgactacgcttctcagcaggggaccgcagcgttacaaaaagagctcaaaagaattaaaatcccggactattcagattccttcaagattaaacatctggggaaggggcactatagcttctattccatggatatacgcgaatttcagttgccctccagtcaaatcagtatggtgcctaatgtcgggctgaagttcagcatatcgaatgcaaatatcaaaatatctggcaagtggaaggctcaaaaaagattcctaaagatgtccggaaactttgatttgtctatagaagggatgtcaatatcagcggatctgaaactcggctcaaaccccacatctggtaagcctaccatcactgcgagctcatgttccagccacatcaattcagtacatgtccatatctccaagagcaaagtcggttggttaattcagttgtttcacaagaaaattgagtcagctttgcgcaataaaatgaacagtcaggtgtgtgagaaggtcacaaactcagtgtccagtgaactccagccttacttccagacactc

SEQ ID NO: 7722 - DNA, 660 bp, synthetic construct
  misc_feature 1..660: note = source = /note="Description of Artificial Sequence: Synthetic coding sequence"
  source 1..660: mol_type = other DNA
atgggcgtccgccaccccccctgtagccatcggctgctggcggtgtgcgccctggtgtccctcgctaccgcggccttgctggttaatcctggagtggttgtaaggatctctcagaagggactggactatgcgtcacagcaaggcacagcagccctgcagaaggaactgaagaggattaagatccccgactacagtgattcctttaagataaaacacttgggcaagggacactattccttttacagcatggatattcgggaatttcagctgccttcctctcagattagcatggtgcccaacgtggggctaaagttttctatcagtaatgcaaatatcaaaataagcggaaaatggaaggcccagaagcggttcttgaagatgtccgggaattttgatctcagtattgagggaatgagcatttccgccgacctgaagctgggcagtaatcccacatcaggcaagcctaccataacggctagtagctgttcctctcacataaatagtgtccacgtgcacatatctaagagcaaggtcgggtggttgattcagctgtttcataagaagatcgagtcggctcttcgtaacaagatgaactcacaggtgtgtgaaaaagtcactaatagcgtgagctccgaactacagccctacttccagacgtta

SEQ ID NO: 7723 - DNA, 660 bp, synthetic construct
  misc_feature 1..660: note = source = /note="Description of Artificial Sequence: Synthetic coding sequence"
  source 1..660: mol_type = other DNA
atgggtgttcgccaccctccttgcagtcacaggctcctggctgtgtgcgccctcgtgagcttggctactgctgccttgttggtcaaccccggagtggtggttaggatttcccaaaagggactggactacgcctcccaacagggaaccgcagctcttcaaaaggaactgaagcgcatcaaaattcccgactatagcgattccttcaagattaaacacctggggaagggccactattctttctattctatggatatccgagagttccaactgccttcctctcagatttcaatggttcctaatgtcggacttaaattttccatcagcaatgccaacatcaaaattagcggtaagtggaaggcccaaaagagatttctcaagatgagcggtaactttgacctctctattgaaggcatgtcaatctccgccgatttgaagctcggatctaatcctacctctgggaaacctacaattactgcaagcagttgctcctcccacataaacagtgttcacgtgcacataagtaagagtaaggtaggatggttgatccagctgttccataaaaaaatcgaaagtgccctgcgaaataagatgaactcccaggtgtgtgagaaagtgaccaacagcgtcagctccgaactccagccttacttccaaaccctt

SEQ ID NO: 7724 - DNA, 660 bp, synthetic construct
  misc_feature 1..660: note = source = /note="Description of Artificial Sequence: Synthetic coding sequence"
  source 1..660: mol_type = other DNA
atgggggtgcgccatccaccctgtagccaccggctgctagccgtttgcgcacttgtaagtttggcaactgctgcactcttagtgaacccaggggtggtggtaagaatatcccagaaaggactggactacgcgagtcagcagggaacggccgcgttgcaaaaagaattgaagagaatcaagattcctgattactccgacagcttcaaaattaaacatctgggaaaaggtcactactccttttattccatggatatcagggaatttcagcttccgtctagtcagatctccatggtcccaaatgtgggacttaagttcagtatctctaacgccaacatcaagatctctggcaaatggaaggcccagaagcgcttcctaaaaatgagcggaaacttcgacctgagtatagaaggcatgagcatatcagctgacctgaagctgggatcgaatccaacctctggcaagcccaccataaccgccagtagctgctctagtcacattaattcggtgcatgtgcacattagcaagtccaaggtggggtggcttatacagctgttccacaaaaaaatcgaaagtgccctgagaaataagatgaatagccaggtgtgcgagaaggtgaccaattccgtttcttcagagctgcagccttatttccagacattg

SEQ ID NO: 7725 - DNA, 660 bp, synthetic construct
  misc_feature 1..660: note = source = /note="Description of Artificial Sequence: Synthetic coding sequence"
  source 1..660: mol_type = other DNA
atgggggtgcggcatcctccgtgctcgcatcggctcctggcagtgtgtgccctggtgtcactggcgacggcggccctcctggtgaacccgggagttgtagtgcgcatctcccagaagggcctggattacgctagccaacaggggaccgccgcgctccagaaggaactcaaacggattaagattccagattacagcgatagtttcaagattaagcatctgggaaagggccactattcattctactctatggacatcagagaatttcaactcccgagttcacagatctcgatggtgccaaatgtcggtctgaagttttcaatcagcaacgcgaacattaagatcagcggaaagtggaaggcgcagaagcgattcttgaagatgagcggaaacttcgacctgtcaatcgagggtatgtccatctccgccgatctcaagctcggatcgaatccaactagtggcaaaccgactatcaccgcttcgtcatgctcctcgcacatcaactcggtgcacgtccatatttcgaagtccaaggtcggatggttgatccagctgtttcacaagaaaatcgagtcggcactccgcaacaaaatgaattctcaagtgtgtgaaaaggtcaccaattccgtgagctcggagctccaaccgtacttccaaaccttg

SEQ ID NO: 7726 - DNA, 660 bp, synthetic construct
  misc_feature 1..660: note = source = /note="Description of Artificial Sequence: Synthetic coding sequence"
  source 1..660: mol_type = other DNA
atgggagtcaggcaccctccctgttcccaccgcttgcttgcagtgtgtgctctggtgagcctcgcaaccgcagcccttctcgtgaaccccggcgtcgttgtaaggatcagtcagaagggattagattacgcatctcagcaaggcactgccgcccttcagaaggagctgaagaggattaagatcccggactactctgatagctttaaaattaaacacctgggtaagggtcattactcattttactctatggacatccgggaatttcagctcccgagttcacaaatttccatggtgcctaacgtaggattgaagttttctattagcaatgcgaacatcaaaatttcgggcaagtggaaagcccagaagcgctttctgaagatgtccggcaactttgatctcagtatcgaagggatgtcaatttcagctgatctaaaattagggagcaacccgacaagcggcaagccgaccattacagcaagcagttgcagtagtcacatcaattccgtccacgttcacataagtaaatccaaagtgggctggttgatccagttgttccacaagaagatagagagtgctcttagaaataagatgaacagccaggtctgcgagaaagtgacaaattccgtgagctccgagctgcaaccttacttccagactctg

SEQ ID NO: 7727 - DNA, 660 bp, synthetic construct
  misc_feature 1..660: note = source = /note="Description of Artificial Sequence: Synthetic coding sequence"
  source 1..660: mol_type = other DNA
atgggcgtgcgccaccccccctgctctcaccggcttcttgcggtgtgtgccttagtcagcctagccacagcagcactgctggtgaaccctggggtggtagtgcggatctcacagaaagggctagactacgcaagccagcaggggaccgccgctttacagaaggagctcaagagaattaaaatccccgactattcagactcctttaagataaaacatctgggaaaagggcattactctttttattccatggacattcgtgaattccagctgcccagttcccagatctcaatggtgcccaacgtgggactgaagttcagcatctctaacgccaatatcaagataagtggcaagtggaaagcccagaaaagattcctgaagatgagcggtaatttcgatctttccatcgaggggatgtcaatcagcgcggatttgaaactcgggtctaaccccactagtggcaagcctacgatcacggcgtctagttgtagttcccatattaatagcgttcatgtgcatatctccaagtccaaagtgggctggttgatccaactcttccataaaaagatcgagtccgcactcaggaataaaatgaatagccaggtctgcgagaaggtaacgaactcagtgtcttcggaactgcagccctactttcagacactc

SEQ ID NO: 7728 - DNA, 660 bp, synthetic construct
  misc_feature 1..660: note = source = /note="Description of Artificial Sequence: Synthetic coding sequence"
  source 1..660: mol_type = other DNA
atgggtgtcagacatccaccgtgtagccacagacttctggctgtgtgcgcactcgtgtcactggcgacggctgctctgctcgtgaaccctggagttgttgtgcgcatcagccaaaagggacttgattacgcaagtcagcaaggcaccgcagcgctccagaaggagctgaagcggataaagatcccagactattctgactcattcaagattaagcacctaggaaaaggtcactatagtttctactccatggacatccgggaatttcagctgccttcctcccagatctcaatggtaccaaacgttggattgaagttctcgatcagcaacgccaacataaaaataagcggaaaatggaaagcacagaagagattcctgaaaatgtccggcaatttcgacctcagcatcgaaggaatgagtatctctgcggatttgaagcttggaagcaaccctactagtggaaaacctactatcacggcaagtagctgttcaagccatatcaattccgtccacgttcacatttcaaaaagcaaggtaggatggttgatccagcttttccacaaaaaaattgagtctgcattgagaaacaaaatgaacagccaagtttgcgagaaggtgaccaactctgtcagcagtgagctgcagccatacttccagacattg

SEQ ID NO: 7729 - DNA, 660 bp, synthetic construct
  misc_feature 1..660: note = source = /note="Description of Artificial Sequence: Synthetic coding sequence"
  source 1..660: mol_type = other DNA
atgggtgtgagacaccctccctgctcacaccgcctgctggcagtgtgtgcgttggtgtccctggcaactgcagcactcctggtaaaccccggcgtagtcgtgcggatttcacaaaagggacttgattacgcatcccagcaaggtaccgccgcccttcagaaggaacttaagcggataaagataccagattatagcgactcatttaagattaaacatcttgggaaaggacattactcattttactcaatggacataagggaattccagcttccgtcgtcgcaaatttcgatggtgccaaacgtgggactcaagttttctatttcgaacgctaatatcaaaatctcgggtaagtggaaggctcaaaaaagatttctcaagatgtcgggtaactttgatttgtcaattgaggggatgagtatctcggcggatttgaaactcgggtcaaatccaactagcggcaagcctactatcaccgcatcttcctgttcatcccacatcaactcggtccatgttcatatatcgaagtccaaagtcggatggctcattcaacttttccacaagaagatcgaaagtgcactcaggaataagatgaacagccaggtctgcgaaaaggtgacgaacagcgtctcgagcgagcttcagccttacttccaaaccctt

SEQ ID NO: 7730 - DNA, 660 bp, synthetic construct
  misc_feature 1..660: note = source = /note="Description of Artificial Sequence: Synthetic coding sequence"
  source 1..660: mol_type = other DNA
atgggtgtcagacacccgccatgctcacacaggttacttgctgtctgtgcactcgtttcgttggcaacagccgctttattagtgaaccctggtgtcgtggtcaggatttctcaaaaaggcctggattatgcttctcagcaaggaactgctgccttgcaaaaggaacttaagagaatcaagatcccggattactctgattctttcaaaatcaaacacctaggtaaaggtcattactctttctactccatggatatcagagaatttcagcttcccagttcccaaatttcaatggttccaaatgtgggccttaaattctccatttcaaatgctaatattaaaatcagtggcaaatggaaggcacaaaagagattcctcaagatgtcaggtaacttcgacctttcaatagagggcatgagcattagcgcagatttgaaattaggtagtaaccctacctccgggaagccaactatcacagcttcctcgtgctcttctcatataaactctgttcacgttcatatatctaagagcaaggttggttggctcatccaattattccataaaaaaattgagtcagctctcaggaacaagatgaactcacaagtgtgtgaaaaagttacgaatagcgtgtcatcagaacttcaaccatattttcagactctt

SEQ ID NO: 7731 - DNA, 660 bp, synthetic construct
  misc_feature 1..660: note = source = /note="Description of Artificial Sequence: Synthetic coding sequence"
  source 1..660: mol_type = other DNA
atgggagtgcgtcaccccccttgtagccaccgattgctggctgtctgcgccctggtttcgcttgctacagcagcgttgctggtgaaccctggcgtggtggtgaggatcagccaaaagggtttggattacgcgtcgcagcaaggtactgcggctctacagaaggagctcaagcgtatcaagatccccgactactccgactcgttcaagatcaagcatctggggaagggtcactacagtttttactccatggacatccgtgagttccagctgcccagcagtcaaatctcgatggtcccgaacgtcggccttaagttttccatttctaacgccaacattaagatttccggtaagtggaaggcccagaagcggttcctgaagatgtccggtaacttcgatctgagtatcgagggtatgtctatctcggcagacctcaagctcggttccaaccccacttccggcaagcctacaatcaccgccagctcatgcagctcgcatatcaacagcgtccacgtccatatctccaagtctaaagtcgggtggctcattcaactgttccacaagaagatcgagtccgccctgcggaacaagatgaacagccaagtgtgtgagaaggttactaactccgtcagcagcgagctgcagccctacttccaaaccctc

SEQ ID NO: 7732 - DNA, 660 bp, synthetic construct
  misc_feature 1..660: note = source = /note="Description of Artificial Sequence: Synthetic coding sequence"
  source 1..660: mol_type = other DNA
atgggcgtacggcatcctccatgctctcatagactcctagctgtctgtgcgttggtgagcctagccaccgctgcccttttggtaaatcctggcgttgtagtgaggattagccagaagggcctcgattatgccagtcagcagggtaccgccgcactgcagaaagagctgaagagaattaaaattcccgactacagcgattcttttaaaatcaaacacctgggcaagggtcactactctttctatagcatggacattcgggagtttcaactcccctcctcccagatttccatggtacccaatgtgggtctgaagttttccattagtaatgccaacataaaaatatctggcaagtggaaggctcagaaacgcttcctgaaaatgtccggaaactttgacttgtctattgaaggcatgtcaatcagcgccgatctgaaacttgggtctaacccaacatcaggcaaacccacgatcacagcctctagttgctccagtcacataaactccgtgcatgtccatatcagcaagagcaaagtcggatggctcatacagttgttccacaaaaaaattgagtccgctctgcgtaataaaatgaacagtcaggtttgcgagaaagtgaccaattccgtgagctctgaactgcagccttactttcaaactctg

SEQ ID NO: 7733 - DNA, 660 bp, synthetic construct
  misc_feature 1..660: note = source = /note="Description of Artificial Sequence: Synthetic coding sequence"
  source 1..660: mol_type = other DNA
atgggcgtccgccatcccccgtgctcacatcgcctcctcgccgtctgtgctctcgtttcgcttgcaaccgccgcactcctcgttaatccaggagtggtcgtgagaatctcacagaagggcctggattacgcgtcgcagcaaggcactgccgcgctgcagaaggaactgaagagaatcaagatcccggattactccgacagctttaagatcaagcatctggggaagggacattatagcttctactctatggatatccgcgaattccaactgccgtccagccagatctcaatggtgccaaacgtgggactgaagttttccatatccaacgcgaacattaagatctcggggaagtggaaagcacagaaacggtttctgaagatgagcggaaacttcgacttgtccatcgagggaatgtcgatcagcgccgacctgaagttgggaagcaatccaaccagcggtaagccaacgatcaccgcgagctcgtgctcgagccatatcaattcggtccacgtccacatttcgaagtcaaaggtgggatggctgattcaactcttccacaagaagatcgagtcggccctgcgcaacaagatgaattcgcaagtttgcgaaaaggtgaccaattcggtgtcctccgaactccagccttactttcaaactctg

SEQ ID NO: 7734 - DNA, 660 bp, synthetic construct
  misc_feature 1..660: note = source = /note="Description of Artificial Sequence: Synthetic coding sequence"
  source 1..660: mol_type = other DNA
atgggagtaagacacccaccatgtagtcatagattattagcagtttgtgcattagtttctttagctactgcagcattattagttaatccaggagtagttgtaagaatctcacaaaaaggtcttgactatgcatctcaacaaggtacagcagcacttcaaaaagaattgaaacgtattaaaattccagattatagtgattctttcaagattaaacatttaggaaaaggacattatagtttttatagtatggatattcgtgaattccaattaccttcatcacagatttcaatggttcctaatgttgggttaaaattctcaatttcaaacgcaaatattaagatttctggtaaatggaaggcacaaaaaagatttttaaaaatgagtggaaattttgatttaagtattgaaggtatgtctatctcagcagatttaaagttgggaagtaatccaacttcagggaaacctacaattacagcaagttcatgtagtagtcatattaatagtgttcatgtacatatatctaaatcaaaagttgggtggttaattcaattatttcataagaaaattgaaagtgcattgagaaataaaatgaattcacaagtttgtgagaaagttactaatagtgtaagttcagaattacaaccatattttcaaacttta

SEQ ID NO: 7735 - DNA, 660 bp, synthetic construct
  misc_feature 1..660: note = source = /note="Description of Artificial Sequence: Synthetic coding sequence"
  source 1..660: mol_type = other DNA
atgggtgtgcgccatccaccctgtagccatcgactcctggctgtttgcgcactcgtgtccctggcaactgcagcgctcttggtcaatcccggagtcgtggtgaggatctcacagaaagggctggactacgcatcgcaacagggcaccgccgccctccagaaggaactgaagagaatcaaaataccagattatagcgattcgttcaagattaagcatctcggaaagggacattacagcttctacagcatggatatccgtgagttccaacttcccagctcgcaaataagcatggtcccaaacgttggactgaaattctctatttcaaatgcaaacattaagatcagcggaaagtggaaggctcaaaagcgctttctgaaaatgtccggtaacttcgatctgtccatcgaaggaatgtccatttcagctgatctgaagctgggctcgaacccaacgtccggaaagcctaccattactgcatcgtcgtgctcctcccatatcaactccgtgcatgtccatatctcgaagagcaaggtgggttggctgattcaactgttccataagaaaatagaatcggcgcttcgcaacaaaatgaattcccaggtctgtgaaaaagtgactaactcggtatcctccgagcttcaaccttactttcaaaccctt

SEQ ID NO: 7736 - DNA, 660 bp, synthetic construct
  misc_feature 1..660: note = source = /note="Description of Artificial Sequence: Synthetic coding sequence"
  source 1..660: mol_type = other DNA
atgggagtgagacaccccccatgttcccaccggctccttgctgtttgtgcacttgtgagcctcgctactgcagcacttcttgtgaaccctggagttgtggtgagaatttcgcagaagggcttggattacgcctcacagcagggcacagcagctttacagaaagagctgaaacgcatcaagattccggattattctgacagtttcaagatcaagcacctggggaaagggcattattccttttattccatggacatccgcgagttccagctgccatctagccagatcagcatggtgcctaacgtgggcctgaagttttcaatttctaatgcaaacatcaagatctcgggaaaatggaaggcgcagaagcggtttctgaagatgtccggaaactttgacctttctattgaaggaatgagcatttccgccgacctgaaattgggaagcaatcccacatcaggcaagccaactattacggcctcatcgtgttccagtcacattaactccgtccacgtacacatctccaaatctaaggtcggatggttgattcagctcttccataaaaagattgaatcggccttgcggaataagatgaatagccaggtgtgtgagaaggtaacaaactccgtgagtagtgagctgcagccttactttcagactctg

SEQ ID NO: 7737 - DNA, 660 bp, synthetic construct
  misc_feature 1..660: note = source = /note="Description of Artificial Sequence: Synthetic coding sequence"
  source 1..660: mol_type = other DNA
atgggagtgagacatcctccctgctcgcatagactgctggcagtgtgcgcccttgtgtccctggccactgccgccctgctggtgaaccccggggtggttgtgagaatctcacagaagggcctcgattacgcgtcccagcagggaaccgccgccctccagaaggagctgaaacggattaagatcccggactactcagactcgtttaagattaagcacttgggtaaaggacattactccttttactctatggacatccgggagttccagcttccatcgtcacagatcagcatggtgccgaatgtgggcttgaaattcagtatctcgaacgccaacatcaagatcagcgggaagtggaaagcacagaagcgttttctgaaaatgtcaggaaacttcgacctgtccatcgagggcatgtccatctcggcggatctcaagctgggctccaacccgacttcgggtaagccgaccatcactgcttcgtcgtgctcatcccacatcaattccgtgcacgtccacatttcaaaatctaaggttggatggcttatacaactgttccacaagaaaattgagtcagccctgcggaataagatgaatagccaggtgtgtgaaaaagtgactaattcagtctcctcagaactgcaaccatacttccaaacgctg

SEQ ID NO: 7738 - DNA, 660 bp, synthetic construct
  misc_feature 1..660: note = source = /note="Description of Artificial Sequence: Synthetic coding sequence"
  source 1..660: mol_type = other DNA
atgggcgtgcgccacccgccatgcagccatcgcttgctggctgtgtgtgcgctggtgtcactggccactgccgccctgttggtgaatcctggagtggtggtgcgcatatcgcagaagggcctcgattacgcgagccagcagggcaccgcagctttgcaaaaggaactgaagagaatcaaaattccggactattccgattcattcaaaatcaaacatctggggaaaggccattactccttttactccatggatatcagagaattccaactcccgagctcacagatcagcatggtcccaaacgtcggcctgaagtttagcatttcgaatgcgaacatcaagatctcaggaaaatggaaagcgcaaaagcgcttcctcaaaatgtcgggtaacttcgacctttctattgaaggtatgtcaatctcggcggatctgaagctggggtctaatccgactagcggaaagcctacgatcaccgcgtcgtcctgcagctcccacattaacagtgtccatgtgcacatcagcaagtccaaagtgggatggcttatccaactcttccacaagaagatcgagtccgctctgaggaacaagatgaattcccaagtgtgtgaaaaggtcactaattccgtgtcatccgaactgcaaccgtactttcaaacgctc

SEQ ID NO: 7739 - DNA, 660 bp, synthetic construct
  misc_feature 1..660: note = source = /note="Description of Artificial Sequence: Synthetic coding sequence"
  source 1..660: mol_type = other DNA
atgggcgtgcgccacccaccatgcagtcatagactgctcgcagtgtgtgcactggtatctcttgcgactgccgcactgctcgtcaaccccggcgtagttgtgagaattagccaaaagggactagactacgccagccagcagggaacagcagcgctccagaaggaattgaaaagaatcaagattcctgattattcagacagtttcaagattaaacacctgggcaaggggcactattctttttactctatggatatccgagaattccagctcccctcctcccaaatctccatggtacctaacgtcggtttgaagttctcaatcagcaacgccaacattaagatttccggaaaatggaaggcacagaaacgatttttaaaaatgtccggcaactttgacctgtctatcgagggtatgtcaatcagtgcagatctgaagctgggatcaaaccccacaagcggtaaaccaaccatcactgcatcctcatgtagctcccatattaactcagtgcacgtgcatatttctaagtctaaagtgggttggctgatacaactcttccacaagaaaatcgagtccgcacttagaaacaagatgaactctcaggtgtgtgagaaggtgacaaactccgtttcctccgagctccagccctatttccagactctt

SEQ ID NO: 7740 - DNA, 660 bp, synthetic construct
  misc_feature 1..660: note = source = /note="Description of Artificial Sequence: Synthetic coding sequence"
  source 1..660: mol_type = other DNA
atgggagtacgccacccaccgtgcagtcaccggcttctggcggtgtgcgctctggttagcctagcgactgccgctctcctcgttaacccaggtgtggtcgtccgcatttctcaaaagggactggattacgctagccagcaaggaacggctgcattacaaaaggaactgaagcggatcaagattcccgattacagtgatagtttcaaaattaagcacttaggtaaaggacattatagtttttatagtatggacatccgcgagttccagctgccttcaagccaaatttccatggtgcctaacgtgggcctcaagttcagcatatcgaacgctaacatcaaaatcagtggcaagtggaaagcccaaaaacgtttcctgaagatgtccggtaatttcgatttaagtattgagggcatgtcaatttcagcagatcttaagttaggttccaatccaacaagcggcaaaccaactattacagcgagctcgtgtagctctcatataaactcagttcacgtgcacatatctaaaagcaaggttggttggctgatccagctgtttcataaaaagattgagagcgcactgaggaataagatgaacagtcaagtgtgtgagaaagtaactaattcagtctctagcgagcttcagccatactttcaaaccctc

SEQ ID NO: 7741 - DNA, 660 bp, synthetic construct; identical to SEQ ID NO: 7667
  misc_feature 1..660: note = source = /note="Description of Artificial Sequence: Synthetic coding sequence"
  source 1..660: mol_type = other DNA

SEQ ID NO: 7742 - DNA, 660 bp, synthetic construct
  misc_feature 1..660: note = source = /note="Description of Artificial Sequence: Synthetic coding sequence"
  source 1..660: mol_type = other DNA
atgggcgtgcgtcatccaccctgttcccaccgcctcctggccgtgtgtgccttggtatctctggcaactgccgcactgctggtgaacccaggcgtggttgttcggatatctcagaagggactggattatgccagccaacagggcaccgccgccctgcaaaaggagctcaagaggattaagatcccagattattctgactcttttaagatcaagcatcttgggaagggacattactccttttactccatggacatacgcgagttccagcttcctagctcacagatctctatggttcctaacgttggcttaaaattcagtatctccaacgctaacattaagatcagcggcaagtggaaagcccagaaacgttttctgaaaatgtctgggaacttcgatttgtccatcgaggggatgtccatctctgcagacctaaagctgggttccaaccctacatctggtaaaccaaccatcaccgcttcaagctgctcttctcacattaatagtgtacacgtgcacatttccaaaagcaaagtcggttggctgattcagctgttccataaaaagattgaatctgctcttaggaataagatgaacagccaggtctgtgagaaagtcactaatagcgtcagctccgaactacagccctattttcagactctt

SEQ ID NO: 7743 - DNA, 660 bp, synthetic construct
  misc_feature 1..660: note = source = /note="Description of Artificial Sequence: Synthetic coding sequence"
  source 1..660: mol_type = other DNA
atgggtgtgaggcacccaccctgctctcatcgtctcctggctgtgtgcgcacttgtgtccctcgcaaccgcagcccttctggtgaaccctggcgtcgtggtcagaatctcacaaaaagggttggactatgcctcccagcaaggcaccgctgcactgcagaaagagttaaaaaggattaagattccggactatagcgattcctttaaaatcaagcatttggggaaggggcactatagtttctacagtatggacattcgggaattccagctgcctagttcccagattagtatggtgccaaacgtgggacttaagttctctattagcaacgcaaatatcaagattagcggcaaatggaaggcacagaagagatttctaaaaatgtccggcaatttcgatctgtcaatagaaggcatgagcatctctgctgacctcaagcttggatctaaccccacttctggtaagccaacaatcacagcctccagttgctcgagccacattaattcggtgcatgttcacatatccaaaagcaaagtcggatggctaatccagctgtttcacaagaagatcgaaagcgcccttaggaacaagatgaactctcaggtgtgtgagaaggtcaccaattcggtgtcttccgagttacaaccatacttccagactttg

SEQ ID NO: 7744 - DNA, 660 bp, synthetic construct
  misc_feature 1..660: note = source = /note="Description of Artificial Sequence: Synthetic coding sequence"
  source 1..660: mol_type = other DNA
atgggggtacgtcatccgccttgttcgcaccgtttgctcgctgtgtgcgcgttagtgtcccttgctacagcggctctcctcgtcaaccccggcgttgtggtacggatctcccagaagggcctggactatgcctcccaacaaggcacagccgcccttcagaaagaacttaagcgaatcaagattcccgactactcggactcgtttaagataaagcatcttggaaaagggcattattctttctactcaatggatattcgtgagttccaactcccgagctcacagatttcgatggtccctaacgtcggcttgaagtttagtattagcaacgcgaatatcaagatctctgggaagtggaaggctcagaagcgattcctcaagatgtccggtaacttcgacctgtctattgagggcatgtccatttctgcggacctcaaattgggttctaaccctacttccggtaagccgacaattactgcttcttcttgctcatctcacattaattcggttcacgtccatatctctaagtctaaggtcggttggctgatccagttattccataaaaagatagagtcagctttgcgaaataagatgaattcccaagtgtgtgagaaagtaacgaattccgtttcaagcgagctccagccttatttccagacactg

SEQ ID NO: 7745 - DNA, 660 bp, synthetic construct
  misc_feature 1..660: note = source = /note="Description of Artificial Sequence: Synthetic coding sequence"
  source 1..660: mol_type = other DNA
atgggagtccgccatccgccatgttcacataggcttctggccgtctgcgcactggtgtcgcttgcgaccgcggctctcctggtgaatcccggggtggtcgtgagaatctcacagaagggcctcgactacgcttcacaacaaggcaccgccgccttgcagaaggaactgaagagaataaagattccggactactctgactcgttcaagatcaaacaccttggtaaaggacactattccttctacagtatggacatccgcgaattccaactgcctagcagccagatctccatggtgccgaacgttggtctgaaattctccatctcgaacgccaacatcaaaatctcgggaaaatggaaggcgcagaagcggtttctgaagatgtctggaaatttcgatctcagtatcgaaggcatgtccatcagcgccgatttgaagctgggctcgaaccctacctcgggaaagccgactatcactgcaagttcttgcagcagtcatattaactccgttcacgtgcacatttcaaaaagcaaagtgggatggctgattcagctgttccacaaaaagatcgagtccgccctccggaacaagatgaactcccaggtttgcgagaaggtgacgaattccgtatcgagcgagctccaaccatactttcagactctc

SEQ ID NO: 7746 - DNA, 660 bp, synthetic construct
  misc_feature 1..660: note = source = /note="Description of Artificial Sequence: Synthetic coding sequence"
  source 1..660: mol_type = other DNA
atgggagtgcgccacccaccatgctcgcatcggctgctcgctgtgtgcgcactggtcagcctcgccacggctgccctcctcgtgaaccccggagtggtggtgcgcatctcccagaaaggactggactacgcatcccagcagggcaccgccgcactgcagaaagagctgaagaggattaagattcctgactactcggatagtttcaagatcaagcacctgggcaagggtcactattcgttttactcaatggacatccgggagttccagctgccttcgtcgcaaatctccatggtgccaaatgtggggctgaaattcagcattagcaacgccaatatcaagatctccggaaagtggaaggcccagaagcggtttctcaaaatgagcgggaatttcgatctgtcgatcgaaggaatgtccatatccgctgacctcaaactggggtccaacccaacttcgggaaaaccgacgatcactgcctcctcgtgttcgtcccacatcaactcggtccacgtgcatatctccaaatccaaggtgggttggctgatccagctttttcataagaagatcgaaagcgcactgcgcaacaaaatgaactcccaggtgtgcgaaaaggtaaccaattccgtgagcagcgaattgcagccgtacttccagaccctt

SEQ ID NO: 7747 - DNA, 1446 bp, synthetic construct
  misc_feature 1..1446: note = source = /note="Description of Artificial Sequence: Synthetic coding sequence"
  source 1..1446: mol_type = other DNA
atggacgaaggcatcccgcacctgcaggaacgacagctgttggagcatcgggatttcatcggactggactactcgtcactgtacatgtgcaagccgaaacggtccatgaagcgcgacgataccaaagacacttacaagctgccacaccgcttgatcgaaaagaaacgccgcgaccgcatcaatgaatgcatcgcacagctcaaagatttgcttccggaacacctgaagctgacgactcttggacatctggaaaaggcggtggtgctcgaacttaccctgaagcatctcaaagcactgactgccctcactgaacagcagcaccagaagatcatcgccctccagaacggagagaggtcccttaagtcgccaatccagtcggatctggatgcttttcactccggcttccagacttgcgcgaaggaggtcctgcagtatctgtcaaggttcgaatcatggaccccacgcgaacccaggtgcgtgcaactcattaatcatctgcatgcggtcgccacccagttcctgcctacgccgcaactccttacccagcaggtgccgctgtcgaagggaaccggcgctccctcagcggcgggatcggcagctgccccgtgcctggagcgggcgggacagaagctggagcccctcgcatactgtgtcccagttattcagcgcacccaaccgagcgctgaattggcggcagaaaatgacactgatactgattcgggatacgggggagaagccgaagcccgcccagacagggaaaagggtaaaggagccggagcatctcgggtgaccatcaagcaagaaccgcccggagaggactcccctgcccccaagcggatgaagctcgattcgcggggcggtggctcaggaggcggacccgggggaggtgcggccgccgctgcggcagcgctcctcggaccggatccggcggcagccgccgcactcctgcgtcctgatgcagcactgctctccagcctggtcgcttttggaggaggaggtggagccccgttcccacagcctgccgcggccgccgcgccgttttgcctgccgttctgcttcctcagcccctccgccgccgccgcctacgtccagcccttcctggataagtccgggctggaaaagtacctgtacccggcagccgcagccgcgccattcccattgttgtaccctggaatcccggcgccagcagcagcagcggctgcagcggctgcggccgcggcggctgcagctgccttcccgtgtttgtcaagcgtgttgagccctccaccggagaaggcaggggctgcggcagctactctcctgccacatgaggtcgcaccattgggagctccccatcctcaacatccgcatgggcgcactcatctcccttttgcgggaccacgggagcccggaaaccccgagtcgtcggcccaggaagatccatcacagcctggcaaggaagcgcct

SEQ ID NO: 7748 - DNA, 1446 bp, synthetic construct
  misc_feature 1..1446: note = source = /note="Description of Artificial Sequence: Synthetic coding sequence"
  source 1..1446: mol_type = other DNA
atggacgagggtattccccaccttcaggaacgccaattgcttgaacatagagacttcatcggactcgattacagcagtctctacatgtgtaagcccaagcggtcgatgaaacgcgatgatactaaggatacgtataagctgccccatcggctgatagagaaaaagcggagggaccgcatcaacgagtgtatcgcacaactgaaggatctgctccccgagcatctcaaactgactaccctgggacacctggaaaaagcggtggtgcttgagctcaccttgaagcatctgaaggctctgacggccctcactgaacagcagcaccagaagattatcgccctgcaaaatggagagcgctcgctgaagtcaccgatccagtcagacctcgacgccttccactcaggattccaaacctgcgccaaggaggtcctgcagtacttgtccagattcgaatcgtggaccccgcgcgagccgagatgcgtccagctgatcaaccacctgcatgccgtggcaactcagttcctgccgaccccgcagttgctcactcagcaagtgccactgagcaagggaaccggagcgccgtccgctgctggctcggcagcggccccgtgcttggaacgggccggtcaaaagttggaaccattggcgtactgcgtgcccgtcattcagcgtacccagccaagcgctgagctcgctgcggaaaatgataccgatactgactctggatacggtggggaggcagaagcccgccccgatcgggagaagggaaagggggcgggagcgtcgagggtgactatcaagcaagagcctccgggtgaggactcccctgccccaaagagaatgaagctggactccaggggaggagggtccggagggggaccgggagggggagcagcagccgccgcagcagcattgctgggaccggacccggccgccgccgcggctctgttgcgaccagacgcagcactcctcagcagcttggtggcttttggcggcggtggaggggctccattccctcaaccggcagcggcggccgctccgttttgcctgccgttctgcttcctgtctccatcggcggcagcagcttacgttcagccgttcctcgacaaatccggactcgaaaagtacctgtacccggccgcagctgccgcaccattccctttgctctaccccggaatccccgcaccggccgctgctgcggccgcggcagcggcagctgcagcagcggcggctgcgttcccttgcctctcctcggtgctgtccccgccgccggaaaaggctggagccgcagccgcaactctgctgccgcatgaggttgcccctctgggggccccgcacccccaacatccacacggtaggacccatctgccgttcgcaggaccacgcgaacctggaaacccggaaagctcggcgcaggaagatccctcgcagccaggaaaggaggcacct

SEQ ID NO: 7749 - DNA, 1446 bp, synthetic construct
  misc_feature 1..1446: note = source = /note="Description of Artificial Sequence: Synthetic coding sequence"
  source 1..1446: mol_type = other DNA
atggatgagggaatcccgcatctccaggaacggcagcttctggagcaccgggacttcatcggcctggactacagctccctgtacatgtgcaagccaaagagatcaatgaaacgcgatgacaccaaggacacctacaaactgccacacagactgatcgaaaagaaacgccgagatcgaatcaacgagtgcatcgcacaactgaaggacctgctgcctgagcacctgaaactcactaccttgggacatctggaaaaggccgtggtgctggagctgactttgaagcatctgaaggcattgaccgcactgactgaacagcaacaccagaagattatcgcactgcagaacggagaaagatcgctgaagtcgcccatccaatcggacctggatgcgttccacagcggattccagacctgcgcgaaggaggtgctgcaatacttgtcgcgcttcgagtcatggaccccacgcgagccgagatgcgtgcaactgatcaaccatctgcatgccgtggcaacccagtttctcccgactccgcagctgctgacgcaacaggttccgctgtcgaaggggacgggagccccgtcagctgcgggatcggccgcggccccatgtctcgaacgcgccgggcagaaattggaacctctcgcttactgcgtgccagtgatccagcgcactcagccatccgctgagctcgcggcagaaaatgatactgatactgactccggatacggtggagaggctgaagcaagacctgatcgcgaaaagggaaagggcgctggcgcgagccgcgtgactatcaagcaagaaccgccaggggaggactcaccggcccccaagcggatgaaacttgattcgcggggaggtggatccggaggcggtccaggcggaggcgccgcggcagcagctgccgcactgctgggaccagacccagcggcggcagccgctctgttgcgcccggacgccgccctgctgtccagcctcgtcgccttcggcggtggaggaggcgcaccatttccacaacctgctgctgcagccgcgccgttctgcctccctttttgctttttgtcgccctcggctgccgcggcctacgtccagccgttcctcgataagtcgggactggagaaatatctgtaccctgcggcagcggcggccccttttcctctgctctaccctggcatccccgcaccggcagcagcagcggctgcggcagccgcggccgccgccgctgcggcggcgttcccttgtctgtcgtcagtgctgtcgccccctccagagaaagcaggggcggcggcggcgactttgcttccgcacgaagtggccccgctcggagcacctcacccgcagcacccccatggcagaactcacctcccatttgccggaccgagagagcccggaaaccctgaatcgagcgcacaggaagatccatcgcagccggggaaggaggcgcca

SEQ ID NO: 7750 - DNA, 1446 bp, synthetic construct
  misc_feature 1..1446: note = source = /note="Description of Artificial Sequence: Synthetic coding sequence"
  source 1..1446: mol_type = other DNA
atggatgaggggataccacatctgcaggaacgacaactgctggagcatagagattttattggactcgactacagctcgctctacatgtgtaaacctaaaagaagcatgaagagagatgacacgaaagacacatacaagttgccccatagactcatcgagaagaaacggagagaccggatcaacgaatgtattgctcagctgaaagacctactgcctgagcatttgaaactgaccacattgggccatctagagaaggcagtagtgttggagctaacgctaaaacacctgaaggccctaacagccctcaccgaacagcaacatcagaagatcattgcgcttcaaaatggcgagcggtctctcaaatctccaatacagagcgatctggacgcatttcactctggcttccaaacctgtgctaaggaagtactgcagtatctcagccggttcgagtcttggactcctcgcgaacctcgatgcgtgcagctgatcaaccacctgcacgcggtcgccactcaatttctccctacgcctcaactattgacacaacaggtcccgctctcaaaggggactggagctccatcagccgcgggttctgccgccgctccatgtctcgaacgcgcagggcagaaacttgaacccctggcatactgtgttccagtgatacagagaacgcagccctctgcggaactggcggccgagaacgatactgacactgattctggctatggcggtgaagcagaagcacgtcctgaccgtgagaaggggaagggcgctggcgcatcacgtgttacaatcaagcaagagccacccggtgaggactcccctgcaccaaagcgaatgaaattagactcgagaggcggaggcagcggcggcggcccaggtggaggggccgcggctgctgccgccgcgctcctggggccagatcccgctgccgccgcggccttgctgcgcccagacgccgccctgctgagcagtctagttgcttttggcggggggggaggtgctccgttcccccaacctgctgcggcagctgcccctttttgtttaccattctgcttcctgtcgccgtcagccgccgcagcatacgtccagccattcttagacaagtccggcctcgagaagtatctgtacccagccgccgctgccgctccatttccccttctctacccaggcatcccggcgcccgctgcagccgctgcggccgcagctgccgccgccgcagcagcagccgccttcccatgcctgagttcagtgctgtcccccccccccgagaaggcaggagcagcggccgcaacgcttcttccccatgaagtggcccctttaggagccccacacccacagcaccctcacggcagaacacacctgccgtttgctgggccgcgggagccaggaaatcccgagagtagcgcccaggaggaccctagccaacccggcaaagaagccccc

SEQ ID NO: 7751 - DNA, 1446 bp, synthetic construct
  misc_feature 1..1446: note = source = /note="Description of Artificial Sequence: Synthetic coding sequence"
  source 1..1446: mol_type = other DNA
atggacgaaggtattcctcacttgcaagagcgtcagttgctagaacacagggactttattggactggattattcatccctgtatatgtgtaagcctaaaagatccatgaagcgcgacgacactaaagatacatacaagttacctcatagactcattgagaagaagcggagagatcgaattaacgagtgcatagctcaactcaaggacctacttcctgaacacctgaagctgacaactctgggccacctggaaaaagccgtggtgttagaactcacactgaagcatctgaaagctctgacggccctgacagagcagcagcaccagaaaattatcgcgctgcagaacggagagcgaagtctgaagtctcccatacagagtgacctcgatgccttccattcaggattccagacctgtgcaaaggaagtactgcaatacctgtcgcggttcgagtcctggacaccccgtgaaccgaggtgcgtgcagctgatcaatcacctgcatgcagttgccacgcagtttctccccaccccgcagctgctgacacagcaggtgccactcagcaagggcaccggtgcaccctcagccgccggcagtgctgctgccccgtgcttagaacgcgctgggcaaaaattagagccgcttgcctactgcgttcctgttattcagcgtactcagcccagcgccgagctcgccgccgaaaacgatactgacaccgatagcggatatgggggtgaagctgaggccagaccagatagagagaaagggaaaggggctggagcatccagagtaaccatcaaacaagagccacctggagaagattcacccgccccgaagagaatgaagttagatagtaggggaggcgggtctggaggaggtccaggcggcggcgcggccgcggcggcagctgcactcctgggtcctgatccggccgctgctgcagcactgttacggccagatgccgccctgctgagcagcctagtggctttcggaggtgggggcggcgccccattcccccagccagccgccgcagccgctccattctgtctcccattttgttttctgtcacccagcgccgcagccgcttacgttcagcctttcctggacaaatccgggttggaaaagtatctttatccagcagcagccgccgccccattccccttgctgtaccctggtattcccgcccccgccgcagccgcggccgccgccgccgctgcggcggctgcggctgccgcgttcccctgcctaagcagtgtgttatcccccccgcctgagaaggcgggggccgcagccgcaactcttctccctcacgaggtagcccccctaggagccccacacccccagcaccctcatgggcgaacacacctgccttttgccggcccccgcgagcccgggaatcctgaatcatctgcacaggaggatccgtcacagccaggaaaggaggctcct

SEQ ID NO: 7752 - DNA, 1446 bp, synthetic construct
  misc_feature 1..1446: note = source = /note="Description of Artificial Sequence: Synthetic coding sequence"
  source 1..1446: mol_type = other DNA
atggacgaggggattccccatctgcaggagagacagctgctcgagcatcgggattttataggcctcgactactcctcgctgtatatgtgcaaacctaaacgttccatgaaacgagatgacactaaagatacatacaaattgcctcaccgattgatcgagaagaagcgaagggatcgcattaacgagtgtatcgcccagctgaaggacctgttgcccgaacatctgaagcttactacgctcggtcacctggagaaggcagttgtgctggagctaaccctcaagcaccttaaggccttgacagctctgactgagcagcagcaccaaaagatcattgccctgcagaatggcgaaaggtccctcaaaagcccaatccagagtgacctcgatgctttccactctggctttcagacttgtgccaaggaagtgctgcagtatctttcccgctttgagtcttggacccctagagaaccgcgctgcgtgcagctgataaaccacttacatgccgtagccacccagtttctgccaaccccccagctgctcacccagcaagtgccattgtcgaaaggtacgggggcacctagcgctgcggggtcagcggccgcgccttgtctggagagagccggacagaagctagagcccttggcgtactgcgtgcctgttatccagcgcacacagcctagcgccgaacttgcagcagaaaacgatactgacacggacagcgggtacggcggggaagcagaggcgcggccagaccgggagaagggaaagggcgccggggcctctagggtcacaatcaagcaggagcccccaggcgaggactccccagcaccaaaacggatgaagcttgactcacggggcggaggcagcggcggaggtcctggcggaggcgctgccgctgccgccgcggctctgctggggccagaccccgccgccgcagctgccctgctccgacccgacgccgccttgctgagttctctggtcgccttcggaggcggcggtggggcccccttcccccaaccagcagccgcagctgcgccattctgcctacctttctgcttcctcagccctagtgcagccgctgcctatgtgcagccttttctcgacaagagtgggctggagaagtacctttacccggctgccgctgctgccccttttccattgctgtatccagggatccctgcacctgcagcagccgcagcagcagcggccgccgcggccgcagccgccgctgcttttccatgcttgtccagcgttcttagcccacctcctgagaaggcaggcgctgccgctgcaacactgttgccccatgaggtcgctccactgggggcgcctcaccctcagcacccccatggccgaacacatttaccatttgccggcccccgggagcctggcaatccagagtcaagcgcccaggaggaccccagccaaccgggcaaagaagctcct

SEQ ID NO: 7753 - DNA, 1446 bp, synthetic construct
  misc_feature 1..1446: note = source = /note="Description of Artificial Sequence: Synthetic coding sequence"
  source 1..1446: mol_type = other DNA
atggacgaagggatcccacaccttcaggaaagacagctacttgagcatagggatttcataggcctggactacagttcactgtacatgtgcaagccaaaaaggtctatgaagcgcgacgataccaaggacacttacaagctgccacaccgactgatcgaaaaaaaacggagggaccggatcaacgagtgtatagctcagttgaaagatctgctcccggaacacctgaagctcaccacacttggccatttggaaaaggctgtggtgctagaacttaccctgaagcacttgaaagcactgacggccttgactgagcagcaacatcagaaaatcatcgcccttcagaatggggaacgaagtctcaaatcacctattcagtccgatttggacgctttccattccggattccagacgtgcgcaaaggaagtactgcagtacctaagcaggtttgaatcctggactccacgggagccccgatgtgtgcagctaatcaaccatctccacgccgtggctactcagtttctgcctacaccacagttacttacccagcaggtgcctctctctaagggcacaggtgctcccagtgcagccggctccgctgccgctccctgtctggagcgtgcgggccagaagctggagccattagcttactgtgtcccggtcatccagcgaacccagccctccgcggagctcgcagcagagaatgatacagacacagacagtgggtacggcggggaagcagaagctcgccccgatcgggaaaagggtaagggagcaggcgcaagcagagtcacaataaagcaggaaccaccaggggaagactcaccggcccctaaacgcatgaagctagactctcggggcggagggtctggagggggccctggcgggggcgctgctgccgctgctgccgcactgctggggcccgatcccgctgctgcagccgccctattgcgcccggatgcagctctcctgagcagcttggtggcattcgggggcggcgggggggcaccctttccacagcctgctgccgcggccgcacctttttgtctcccattctgcttcctgtcgcccagtgccgctgctgcctatgtgcagccattcctcgataaaagtggcctggagaagtacctctaccccgctgctgccgccgctccgtttcccctgctttatcctggaattcccgcccctgcagcggcagcggccgccgccgctgctgctgccgcagccgcggccgcgtttccttgcttgtctagtgtgcttagtccaccccctgagaaggctggcgccgcagctgccaccttattgccccacgaggtcgcgcccctcggtgcacctcatcctcaacatcctcatggcagaacccatcttccgttcgccgggccaagggagcctggcaatccagaatcatccgctcaggaggatccatcccagccgggcaaggaggctcct

SEQ ID NO: 7754 - DNA, 1446 bp, synthetic construct
  misc_feature 1..1446: note = source = /note="Description of Artificial Sequence: Synthetic coding sequence"
  source 1..1446: mol_type = other DNA
atggatgaaggtataccgcatttacaagaacgacaattactagaacatcgtgattttataggtttagattattcgtcgctatatatgtgtaaaccgaaacgatcgatgaaacgtgatgatacgaaagatacgtataaactaccgcatcgactaatagaaaaaaaacgtcgagatcgaataaatgaatgtatagcgcaactaaaagatttactaccggaacatttaaaattaacgacgttaggtcatttagaaaaagcggtagtattagaactaacgctaaaacatttaaaagcgctaacggcgttaacggaacaacaacatcaaaaaataatagcgctacaaaatggtgaacgatcgttaaaatcgccgatacaatcggatttagatgcgtttcattcgggttttcaaacgtgtgcgaaagaagttttacaatatttatcgcgttttgaatcgtggacgccgcgtgaaccgcgatgtgttcaactaataaatcatctacatgcggttgcgacgcaatttttaccgacgccgcaactattaacgcaacaagtaccgttatcgaaaggtacgggtgcgccgtcggcggcgggttcggcggcggcgccgtgtctagaacgagcgggtcaaaaactagaaccgctagcgtattgtgttccggttatacaacgaacgcaaccgtcggcggaattagcggcggaaaatgatacggatacggattcgggttatggtggtgaagcggaagcgcgtccggatcgtgaaaaaggtaaaggtgcgggtgcgtcgcgtgtaacgataaaacaagaaccgccgggtgaagattcgccggcgccgaaacgaatgaaattagattcgcgtggtggtggttcgggtggtggtccgggtggtggtgcggcggcggcggcggcggcgttattaggtccggatccggcggcggcggcggcgttactacgaccggatgcggcgttattatcgtcgttagttgcgtttggtggtggtggtggtgcgccgtttccgcaaccggcggcggcggcggcgccgttttgtttaccgttttgttttttatcgccgtcggcggcggcggcgtatgtacaaccgtttttagataaatcgggtttagaaaaatatttatatccggcggcggcggcggcgccgtttccgctactatatccgggtataccggcgccggcggcggcggcggcggcggcggcggcggcggcggcggcggcggcggcgtttccgtgtctatcgtcggttttatcgccgccgccggaaaaagcgggtgcggcggcggcgacgttactaccgcatgaagtagcgccgctaggtgcgccgcatccgcaacatccgcatggtcgtacgcatctaccgtttgcgggtccgcgtgaaccgggtaatccggaatcgtcggcgcaagaagatccgtcgcaaccgggtaaagaagcgccg

SEQ ID NO: 7755 - DNA, 1446 bp, synthetic construct
  misc_feature 1..1446: note = source = /note="Description of Artificial Sequence: Synthetic coding sequence"
  source 1..1446: mol_type = other DNA
atggacgaaggaataccacatctccaggagcgccagttgctggagcatcgggacttcatcggtttggattacagttcgctgtacatgtgtaagcctaagcgaagcatgaagcgcgatgacaccaaagacacttacaaactgccccaccgtcttattgaaaagaaacgaagagatcgcatcaacgaatgcatcgcgcagctgaaagacttgctcccagaacatcttaagctcaccactctgggtcacctggagaaggcggtggtgctcgagctcactctgaaacacctgaaggccctgacggccctgactgaacaacagcaccaaaagatcatcgcactccaaaatggagagagatcccttaagtctccgatccagtccgacctggatgcgtttcacagcggcttccagacttgcgccaaggaggtgctccagtatctctcccgcttcgaaagctggactccgcgtgaacctcggtgcgtccagctcattaaccatctgcacgcggtcgccacgcagttcctgccaactccgcaactgctgacccaacaggtgccactctctaagggaacgggagcaccttcggcggcagggagcgcagccgccccatgcctcgagagggctgggcagaagctcgaacctcttgcgtactgtgtccctgtgatccaacggacccaaccatccgcggagctggcggccgaaaacgacaccgataccgattcgggttacggaggagaagccgaagcccggcccgacagagaaaaaggcaagggggccggagcttcacgggtgactatcaagcaggaacctccaggtgaagattcgcctgcgcctaaaagaatgaaattggactcgagaggaggcggatcgggaggcggacccggaggaggcgctgcggcggccgcagcagctctgctcggccccgacccggcagcagctgccgcccttctgcgcccagacgctgctctgctctctagcctcgtggcgtttggaggcggaggaggggcgccgttcccgcaaccagccgccgctgcagcaccgttctgcctgccgttttgcttcctgtccccgagtgcggcagccgcctacgtgcagccgttcctcgataagtcgggcctggagaagtacctgtacccagcggcagcagccgcgccattcccgctcctgtaccctggtatcccagcccctgctgcggctgcggcggcagccgcagctgccgctgcagccgctgctgcttttccgtgtctgagctcagttcttagcccaccacctgagaaggcgggcgctgcagcagccaccctgttgccgcacgaagtcgcacccctgggagcgccgcacccccagcatcctcacggccggacccatcttccgttcgccggtccgcgagaaccgggaaatcccgagtcgtcggcacaagaggaccccagccagcctggaaaggaagcacca

SEQ ID NO: 7756 - DNA, 1446 bp, synthetic construct
  misc_feature 1..1446: note = source = /note="Description of Artificial Sequence: Synthetic coding sequence"
  source 1..1446: mol_type = other DNA
atggatgaaggtatcccccacctgcaggaaagacagctgctggagcatcgggacttcattgggctggactattcttctctgtacatgtgcaagccaaaacgctccatgaaacgtgacgataccaaggatacctacaaactccctcatcgactcattgaaaaaaaacgtcgagataggattaacgagtgcattgcgcagctgaaagacctcctgccagagcacctgaaattgaccaccctgggccacttggaaaaagctgtggtccttgagctcacacttaaacacctgaaggccctaaccgcgctgacagaacagcaacaccagaaaattatcgcactgcagaacggggagcggtctctgaagtcacccatccagagcgacctggatgcatttcactccggatttcagacatgcgccaaggaggtgctgcagtacttatctcgtttcgagagctggacaccgcgtgagcctaggtgcgttcagttgattaaccacctccacgccgtcgccacgcagttcctgccgacgccccagttgctgactcagcaagttcctctgtcaaaagggactggcgccccttccgccgctggctccgccgctgccccctgtttggagcgtgcaggtcagaagctggagccactcgcctattgcgttcctgtgatacagcgcacccaaccgtctgccgagctggccgccgaaaacgatacagacaccgatagcggatatggtggagaggcagaggcacgccctgaccgagagaagggaaagggcgcaggagctagtcgtgtcaccattaagcaggaaccacctggtgaggactcccccgctccaaaacggatgaagctggactcgagaggaggcggatcaggtgggggcccgggcggtggagcggccgccgctgctgccgccttactgggcccggatcctgcagccgcggcagcacttctgcgccctgacgctgccctgctaagctcccttgtcgccttcggcggcggaggaggagctccttttcctcagcccgccgcagccgccgctccattctgtctcccgttttgctttttgtcaccatccgcagccgccgcatacgtccagcctttcctggataagagtgggctcgagaaatatctttatcccgccgcagccgccgcacccttccccttgctctatccagggatccctgcgcctgccgccgccgctgctgccgcggctgcggctgcagccgcagcagccgcctttccgtgtctgtcatccgtgctgtcacctcctccagagaaggctggtgccgccgctgccacactgctgccccacgaggtagcaccacttggagctccccaccctcaacacccacacggaagaacgcatttaccgtttgcgggacctcgcgagcccggcaaccccgagagctcagcacaggaggatccctcccagccagggaaggaagcccca

SEQ ID NO: 7757 - DNA, 1446 bp, synthetic construct
  misc_feature 1..1446: note = source = /note="Description of Artificial Sequence: Synthetic coding sequence"
  source 1..1446: mol_type = other DNA
atggacgaagggatccctcatctccaggagcgccagttactggagcatagggatttcatcggtctagactattcatccttgtacatgtgcaagcctaagcgctccatgaaacgcgatgacacgaaggacacttacaagttgccacatcgactgatcgaaaagaagagaagagataggatcaacgaatgcattgctcagctcaaagacctcttgccagagcacctgaaactgactactctgggacacctggagaaggcagtggtcttggaactcacacttaagcacctcaaggccctgacggccttaactgaacaacaacaccagaaaatcatcgccctccaaaatggcgaaaggtcccttaagtccccaattcagtctgatctggatgcatttcactcaggctttcagacatgcgccaaggaagtgcttcagtatcttagtcggtttgaatcgtggactcctagagagcctcgctgtgtgcagctcatcaatcacctgcatgccgtggctacacaattcttgccaacccctcagctgctgacgcagcaggtacccctctccaaaggaaccggagctccatctgctgccgggtcggcagccgccccatgtttggaaagggcagggcagaaactggagcccctggcctactgcgtgcccgtcatccagcgaacccaaccgagtgccgagcttgcagctgagaacgatactgataccgactcagggtacgggggagaagcagaagcaaggccggaccgcgagaaaggaaagggtgccggagcgagcagagtgactatcaagcaagaaccgcccggagaggatagccctgcgcccaagcgcatgaaactggactcgcggggcggcgggagtggtgggggaccaggggggggagctgctgcagccgcagctgcactgctggggcccgaccctgccgccgctgccgcactgttgagacctgacgctgccctattaagcagtctggtggcctttggcggtgggggaggggctccttttccccaacccgccgcagcagccgcccctttctgcctaccattttgcttcctgagtcctagtgccgccgccgcctatgtgcagcccttcctagataagagcggcctggaaaagtatctgtatcctgccgccgcagcagctcctttccctcttctgtaccccggtatccccgctcccgctgctgcagccgcagcagcggcggctgcggctgcggccgcagcagcctttccttgtctgtcctctgtactgtctcctccaccggagaaggccggtgcagccgcagcaaccttattgccgcacgaggtagcccctttaggggcccctcacccccaacacccacatggtcgaacacacctgccattcgcggggcccagagagcctggcaatcccgagtcttcagcccaggaggatccatctcaaccggggaaggaagcacct

SEQ ID NO: 7758 - DNA, 1446 bp, synthetic construct
  misc_feature 1..1446: note = source = /note="Description of Artificial Sequence: Synthetic coding sequence"
  source 1..1446: mol_type = other DNA
atggacgagggaatcccgcacctgcaagagcggcaactgcttgagcaccgtgattttattggcctcgactattccagcctgtatatgtgcaaacctaagcggtcaatgaaaagggacgacactaaagatacatacaagctaccacacagattgatagagaagaaaaggcgggatcggattaatgaatgcatcgcccagctgaaggacctgcttccggaacacctgaagctcaccaccctgggacaccttgagaaagctgtcgtgctcgagctaaccttgaaacatctgaaagccttaacagctctgacagagcagcagcatcaaaaaatcatcgcactccagaatggtgagcgctccctgaagtcccccatccagagtgatctggatgcctttcattctggatttcaaacatgtgctaaggaggtgctgcaatacctgtccagattcgaatcctggactccccgcgagcccaggtgtgtacagttgatcaaccatctgcacgcggtcgcaactcagtttctcccgactcctcaactcttgacacagcaggttcccctgtccaagggaaccggcgcgccaagcgccgccgggtccgccgctgcaccatgtctggagagggctggccagaaacttgaacctttggcgtactgtgtgcctgtaattcagagaactcagccaagcgccgaactggctgcggagaatgacaccgatacggacagcgggtatggaggcgaagctgaagcccggcccgatcgcgaaaaagggaagggggcaggcgcttcccgcgtaactattaagcaggaacctcctggagaggacagccctgcccccaaacgcatgaagttggactcgagagggggcggatccggtggaggccctggcggtggtgccgccgccgctgctgcggctctattaggacccgatccagcagcggccgcagctctacttcggccagatgccgccctcctctcatctttagtggcttttgggggagggggtggtgccccgtttccgcaaccagctgctgctgccgccccattctgtcttcccttctgctttttgtctcccagcgcagccgccgcatatgtgcagcctttcctagataaatcgggtctggagaaatatctataccccgccgccgcggcagcgccgttccctctgttataccctgggatcccagctccagctgccgccgctgctgcagcggccgcggcagccgctgcggcggcagctttcccctgcctgtcctccgtgctatcaccccctcctgaaaaggccggcgcggctgctgcaaccctgttaccacacgaagttgcccccctgggggcaccccatccccaacatcctcacgggcgtacccacctgccctttgccggacctcgggaaccaggaaacccagaaagctctgcgcaggaagatccatcacaacccgggaaagaagcccca

SEQ ID NO: 7759 - DNA, 1446 bp, synthetic construct
  misc_feature 1..1446: note = source = /note="Description of Artificial Sequence: Synthetic coding sequence"
  source 1..1446: mol_type = other DNA
atggacgaaggaatcccccacctccaggaaaggcaattgctcgaacaccgggacttcattggactggactactcatccctgtacatgtgtaaacccaagcggtcgatgaagcgcgacgacactaaagacacgtataaactgccccatcggctgatcgaaaagaagcgcagggaccgcatcaatgaatgtatcgcgcagctcaaggacctcttgcccgagcacctgaagctgaccacgctgggccatctggaaaaggccgtggtcctggaattgactctgaagcacctcaaggccctcactgcactgaccgagcagcagcatcagaaaatcattgctctgcagaatggagaaaggtcactcaagtcgccaatccagtccgaccttgacgctttccactccggctttcaaacgtgtgctaaggaagtgcttcagtacctgtcccgcttcgagtcctggactccgcgagaaccgaggtgcgtgcagctgatcaaccacctgcacgcagtcgccactcaattcctgcctacccctcaactcctcactcagcaggtccccctgtccaagggaaccggagcgccgtcggccgccggaagcgccgcagcgccatgtctggaaagagccggtcaaaagttggaacctctcgcctactgtgtgccagtgatccagcggactcagccctcggctgaactggctgccgaaaatgacaccgacacggattcgggttacggaggcgaagctgaagcaagaccggatcgcgaaaagggcaaaggtgcgggcgcatcccgggtgaccattaagcaagagccgccgggagaggactcaccggcaccaaagcgcatgaagctcgactcccgcggaggcgggtcgggtggcggcccgggcggaggagccgcagccgcagcggctgcgctcctcggaccagaccctgcagcagccgctgcccttctgcggccggatgcggctctgctgtcgtcactggtcgcgttcggaggtggagggggagcgccatttcctcagccagctgcggccgctgctccgttctgcctcccattctgcttcctctcgcccagcgccgcggccgcatacgtccagccgttcctggacaagtcaggactggagaaatacctgtacccggccgctgcagccgctccatttccgcttctgtacccaggaatcccagcgccggcggcagccgccgccgcggctgccgctgccgcagcagcagccgcagccttcccgtgcctgtcaagcgtgctgtcccctcccccggagaaagctggcgccgctgccgcgactctgctccctcatgaagtggcccccctcggagcgcctcaccctcagcacccccatggccggactcatctcccattcgcaggtccccgggaaccggggaacccggagtcgtcagctcaggaagatccaagccaaccaggaaaggaagcccca

SEQ ID NO: 7760 - DNA, 1446 bp, synthetic construct
  misc_feature 1..1446: note = source = /note="Description of Artificial Sequence: Synthetic coding sequence"
  source 1..1446: mol_type = other DNA
atggatgaaggaattccacatttacaagaaagacaacttcttgaacatcgagatttcattggattagactattcatcattatatatgtgtaaaccaaagcgtagtatgaagcgagatgatactaaagatacatataagttaccacatagattaatagaaaaaaaacgtagagatcgtattaacgaatgtattgctcaattaaaggatttacttccagaacatttaaagttaacaacattaggacatttagaaaaagccgtagtgcttgaattaactttgaaacatttaaaagcacttacggctcttacagaacaacaacatcaaaaaattatagctttacaaaacggggaaagatcacttaaatctccaattcaaagtgatttagatgcattccattcaggttttcaaacttgtgctaaagaagttcttcaatatctttcaagatttgaatcatggactccaagagagccaagatgtgttcaattaattaatcatttacatgcagttgctacacaatttttgccaactccacaattgttaactcagcaagttccattaagtaaaggtacaggagctccatcagcagcaggatcagctgctgcaccatgtcttgaacgagcaggacaaaaattggaaccattagcatactgtgttcctgtaattcaaagaacacaaccatcggctgaattagctgcagaaaatgatacagatacagatagtggttatggtggtgaggctgaagcaagaccagatagagaaaaaggaaaaggtgctggagcaagtcgagtaacaattaaacaagaaccaccaggagaagatagtcctgcaccaaaaagaatgaaattagattcacgtggaggaggatctggaggagggccaggaggtggagctgcagcagcagctgctgcacttcttgggccagatccagctgcagctgcagctttattaagaccagatgcagcacttctttcttctcttgtagcttttggtggaggaggaggagcaccatttcctcaaccagctgcagcagctgctccattttgccttccattctgttttttatcaccatccgctgccgcagcttatgttcaaccttttcttgataaatctggattagaaaaatatttatatccagctgctgcagcagctcctttcccattattgtatcctggaattccagcaccagctgctgctgcagcagcagctgcagcagctgccgcagcagcagctgcttttccatgtctaagttctgtattatctccaccaccagaaaaagcaggagcagcagctgctacattacttccacatgaggttgcaccattaggagctccacatccacaacatccacacggtagaactcacttaccatttgcaggaccaagagaaccaggaaacccagaaagttcagcacaagaagatccatcgcaaccaggtaaagaagctcca

SEQ ID NO: 7761 - DNA, 1446 bp, synthetic construct
  misc_feature 1..1446: note = source = /note="Description of Artificial Sequence: Synthetic coding sequence"
  source 1..1446: mol_type = other DNA
atggacgaaggtattccccatttacaggagagacagctgctggagcaccgggattttatagggctagattactcttctctgtacatgtgtaagcccaagcgctcaatgaaacgtgacgacaccaaagacacctataagcttcctcatagactcatcgaaaaaaaaagacgtgatcggatcaatgaatgcattgcccaactgaaggatttgctgccagaacacctgaaactgaccactctagggcacctggagaaagctgttgtcctcgagctcacactgaagcatctgaaggccctaaccgcactgaccgagcagcagcaccagaagattatcgcacttcagaacggcgagagaagtctcaagtcacccatccaatcagatctcgacgccttccacagtggcttccagacctgtgcaaaagaggttctccagtatcttagtagatttgaatcttggacccctcgagaacctcgatgcgtacaactcatcaaccacctccacgccgtggcaacccagttcctgcctaccccccaactgctcacccagcaagtgcccctgagcaaaggcacaggggctccgagcgctgctggcagtgccgccgcgccttgcctcgaaagggcaggccagaagttagagcctctcgcctactgtgttcccgtcattcagcgcacccagccttccgcagaattggccgcagagaatgataccgatacggactcgggatacggcggtgaggccgaggccagacctgaccgggaaaaagggaagggcgccggggcgagccgggtgacgattaagcaggagcctccaggagaggatagcccggcccctaagaggatgaaacttgatagcagaggcggcggcagcgggggtggaccagggggcggcgcagccgctgccgcagcagccctgcttggcccagatcccgcagctgcagccgcgctcctccggccagatgccgctctactttcttctttggtcgctttcggggggggtggtggtgcacctttccctcagcctgctgccgctgccgctcccttctgtctgcccttttgtttcctttcacctagcgcggcagcggcttatgtgcaaccatttctcgacaaatccgggctagaaaagtacctgtaccccgctgctgctgccgctccatttccactgctgtaccctggcattccagctccagctgcagcagccgccgccgctgctgccgccgcagccgctgcagctgcgtttccatgtctttcttccgtcctttcccctccacccgagaaagctggagctgcagccgcgacactgctcccacacgaggtagctccactgggggcaccacaccctcagcacccacacggtcgcacacatctaccatttgccggtcctcgagagccaggaaacccggagagttccgctcaggaggacccgtcccagccaggcaaagaagcccct

SEQ ID NO: 7762 - DNA, 1446 bp, synthetic construct
  misc_feature 1..1446: note = source = /note="Description of Artificial Sequence: Synthetic coding sequence"
  source 1..1446: mol_type = other DNA
atggacgagggaataccacatttgcaagaacgccagcttctggaacatcgcgacttcatcggacttgactacagcagcctgtacatgtgtaagccaaagcgctccatgaaaagagatgacacgaaagatacttacaagctgccccataggctgattgagaaaaagagaagggatcgcattaacgagtgtatcgctcagctcaaagatttgctcccggagcaccttaagctcactacgctcggacatcttgaaaaagcagtggtgctggaacttactctgaagcatctgaaggccctcactgcacttactgaacagcaacaccagaaaatcattgcactccaaaatggcgaacgatccctcaaatcccctattcaaagcgaccttgatgcgtttcactcaggatttcaaacctgtgcaaaggaagttctccaatacctgtctcgcttcgagtcctggacgccaagagagccacgttgtgtgcaactgattaatcaccttcacgcggtcgcaacccaatttctgcctactccccaacttctgacccagcaagtgccattgtccaagggtaccggtgcgccttcagccgctgggtcggcagcagcaccatgccttgaaagagcaggacagaaactcgaacctctcgcctactgtgtgcctgtcatccagcggacccagccgagcgcagaattggcagccgaaaacgatacggacaccgattccggatatggcggtgaagcagaagcacgcccggatagagagaagggaaagggagcaggtgcttcgagggttaccattaagcaggagcctcctggtgaggacagcccagcacctaagcggatgaagctggattctaggggaggagggtccggaggaggaccagggggaggagcagctgctgccgccgcggcgcttctggggcctgatcctgcggctgcagcggcgttgctgaggccagatgcagcgcttctgtcctcactcgtggcgttcggaggaggcgggggcgccccgtttcctcaacccgcggcggctgcggcacctttctgtctgccattttgcttcctgtcgccgtcggccgcagccgcatacgtgcaaccatttcttgacaagtcagggcttgaaaagtacctttaccctgcggcggccgcagccccatttccactcctttaccccggaataccagcgcccgccgcagctgctgcggcagccgcagcggcagcagccgccgcagcagccttcccttgcctttcgtcggtgctttcacccccgccagaaaaggcaggcgcagctgcagcaactctgctgccacatgaggtggcacctttgggagccccacacccacagcatcctcatggcaggactcatttgccttttgctgggccgcgggaacctggcaacccggaaagctcggcgcaagaggatcctagccagcccggcaaagaggcaccc

SEQ ID NO: 7763 - DNA, 1446 bp, synthetic construct
  misc_feature 1..1446: note = source = /note="Description of Artificial Sequence: Synthetic coding sequence"
  source 1..1446: mol_type = other DNA
atggacgagggtattccccacctccaggagcgtcagctgttggaacatcgggattttatcggcctcgactacagctctttgtatatgtgcaaaccgaaaaggtccatgaagcgggatgacacgaaagatacgtacaaactgccacataggctgatcgagaagaaaagaagagaccgaattaatgaatgtatcgctcagctgaaagacttgctgcctgaacacctcaagctgaccactttgggccaccttgagaaggccgttgtgctggaactgaccctgaagcatctgaaggctctgacagctttaaccgagcagcagcaccaaaaaatcattgctctccagaatggcgaacgttccctgaagtctcccattcagtctgacctcgacgcttttcactcgggtttccagacatgtgcaaaggaggtgttgcagtatttatcaaggttcgaatcctggacccccagagaaccacgctgcgtgcagcttattaatcacctacacgctgtggcgacacagttcctacctaccccacagctgttaacacagcaggtgccactatccaaaggcacaggcgcacccagcgctgcggggagtgccgctgctccgtgcctggagcgagctggtcagaaactggaacctcttgcttactgtgtgcctgttatccaaagaacccagccatccgctgaactggctgccgaaaacgataccgataccgattctggctacggcggtgaagctgaggccaggcccgacagggagaagggcaaaggggccggggcctctcgcgtaaccatcaagcaggaacccccaggcgaggattcacctgcccctaagaggatgaagttggattccaggggcggaggctcaggcggcggacccggtggcggtgccgcggccgctgcagccgccctgctgggacccgaccctgcagcagccgccgcacttctgcggcctgacgccgctctactttcaagtctggtggcttttggcggaggcggaggtgcaccatttccccaacccgcagccgctgcggcacccttctgtctgcctttctgtttcctaagtccgtcggcggccgcagcgtatgtacaaccctttctggataagtccgggttagagaaatatctgtacccagccgctgccgcagctcccttcccgctgctgtaccccgggattccggcaccagccgctgccgcagcagcagcagccgctgcggccgctgccgccgcagccttcccatgcctgagctccgttttgagtcctcctcctgaaaaagcaggtgctgcagccgctaccctcctaccccatgaggtagcccctctgggggcccctcacccacagcacccgcatggcagaacgcacctgccttttgcggggcccagggaacctgggaaccccgagagtagtgcccaggaagatccctctcagccgggaaaagaagcccca

SEQ ID NO: 7764 - DNA, 1446 bp, synthetic construct
  misc_feature 1..1446: note = source = /note="Description of Artificial Sequence: Synthetic coding sequence"
  source 1..1446: mol_type = other DNA
atggatgaaggcatcccacacctgcaagagcggcaactccttgagcatagagactttatcggactcgactatagctcgctttacatgtgtaaacccaagagatcaatgaagagagacgataccaaggacacttacaaactgccccatcggctgatcgaaaagaagcgcagggatcggatcaatgagtgtattgcccagttgaaggatcttctccccgaacatttgaaacttactaccctgggccacttggaaaaagcagtggtgctggaacttaccctgaaacatctgaaagcccttactgctcttactgaacaacaacaccagaagattatcgccctgcaaaatggtgaaagatctctgaagagccccatccagtcggatctcgatgcatttcactcgggttttcaaacttgtgcaaaggaggttcttcagtacctttcccggtttgagtcttggactccacgggagcctcgctgtgtgcaactgataaatcaccttcatgcggtcgctacccaattcctccctaccccacagctgcttacccagcaagtgccactgtcgaagggaactggggctccctcagccgctggatccgcggcagcgccatgtcttgaacgagcaggtcaaaagctcgagcctcttgcatactgcgtgccagtcattcaaaggactcaaccgagcgcagagcttgcagctgagaacgacaccgatactgatagcggatacggcggagaagccgaggccaggccagatagagaaaagggcaagggagcaggtgcctcgagggtcacgattaagcaggaaccaccaggagaggattccccggcaccaaagagaatgaaactcgattcaaggggcggagggtccggtggaggcccgggtggaggagcagcagcagccgcggcagcactgctggggcctgatcctgccgcagcagccgccctcctccgccccgacgccgcactgctgtcctcgctggtcgcgtttgggggaggaggtggcgccccttttcctcagcctgcggcagcagcggccccattctgtctccctttttgctttctgtccccaagtgcagcggcagcatacgtgcagccatttctcgataaaagcggactcgagaaatacctctacccagccgcagcagcagcaccgtttccacttctttacccgggtattccagcacccgcggcggcagcagctgcagcggctgccgcagcggccgccgctgctgcttttccgtgcctgagcagcgtgctttcgcctcctccagagaaagcaggagccgcggcggctaccctgctgccacatgaggtcgcaccactcggtgcccctcaccctcaacacccccacgggcgcactcatctgccttttgctggcccaagagaaccgggcaaccctgagagctcggctcaagaggacccatcgcagcccgggaaggaagcgcca

SEQ ID NO: 7765 - DNA, 1446 bp, synthetic construct
  misc_feature 1..1446: note = source = /note="Description of Artificial Sequence: Synthetic coding sequence"
  source 1..1446: mol_type = other DNA
atggacgaaggaatcccgcaccttcaggaaaggcagctgctggagcaccgggatttcataggcctggactactcgagcctgtatatgtgtaagcccaagcgctctatgaagcgcgatgacactaaggacacctacaagctgcctcaccgcctcatcgagaaaaagcgccgtgaccgcattaatgaatgcatcgcccagcttaaggatctgctcccagagcacctcaagctcaccactctgggtcatctggaaaaggccgtggtcttggaactgacgctgaagcatctcaaagccctgaccgccttgaccgaacaacaacatcagaagatcattgcgcttcaaaatggcgaaagatcactgaaatcgccgattcaatcggatctggacgcctttcactctggtttccagacgtgcgcaaaagaagtgctgcagtacctgtcacggttcgaatcgtggactcctcgcgagcctcgctgtgtgcaacttatcaaccacctgcacgccgtggctactcagttcttgccgacccctcagctcctcacccaacaggtgcccctgtcgaaaggaactggcgcgccaagcgcagccggaagcgcggcagccccatgtctcgaaagagccggccaaaagctggaaccgctcgcctactgcgtgcctgtcatccagcggacccagccttcagctgagctcgctgcggagaatgacaccgacactgactccggttatggaggagaggccgaagcacgaccagacagagaaaagggcaagggcgctggagcctcccgcgtcaccataaagcaggaaccgcctggagaggactcgcccgcccctaagagaatgaaactcgattcccgcggaggcgggtcaggcggcggtccgggaggaggagccgctgcggctgcggcagccttgttgggaccagatccggcagctgctgcagctctgctgcgaccagacgcggcactgctcagctccttggtggcgttcggaggaggaggcggcgcaccgttcccgcaacctgcagcggcggctgcgccgttctgcctgccgttttgcttcctctcaccttccgccgcggccgcgtacgttcaaccttttctggataaatcgggacttgaaaagtatctgtacccggcggcggcggccgcaccttttccgctgctttacccgggcatcccggcgcccgccgccgcggcagcggctgccgccgctgctgcagcggccgcggcagctttcccatgcttgtcctcggtcctgagcccaccgccggagaaggccggggcagcggcagcaaccctgctgcctcacgaagtggccccgctgggagcaccgcacccacagcaccctcatggacggacccacctgccttttgccggcccccgggagcctggaaaccccgaatccagcgctcaggaagatccgtcccagccgggaaaggaggcgccg

SEQ ID NO: 7766 - DNA, 1446 bp, synthetic construct
  misc_feature 1..1446: note = source = /note="Description of Artificial Sequence: Synthetic coding sequence"
  source 1..1446: mol_type = other DNA
atggacgagggcatcccacacctgcaagagcggcaactgcttgaacatagagattttatcggtttggattattcatctttgtacatgtgtaaaccaaagagatctatgaaacgtgatgatactaaggacacatacaagctgcctcatcgcttgatcgaaaaaaagcgcagggataggataaacgagtgtatcgcccagctaaaggacctcctgcctgaacacctaaagttgaccacgcttggccacctcgagaaggccgtggttctagaactaaccttgaagcaccttaaggccttgacggcactcacagaacaacagcaccagaaaatcatcgccttacagaatggggaaaggtctttgaagtcaccaattcagtctgatctagacgcgtttcactcaggctttcagacatgtgccaaggaagtgttacagtatttgagcagatttgaaagctggaccccccgagagccccgatgcgttcagctgatcaatcatttgcacgctgtggccacccagtttttacccacaccccagctgctgacccaacaagtacctctctccaaagggaccggagcccctagcgcggccgggtccgcagccgcaccttgcctggagcgagcagggcagaagctggagccactcgcatattgtgtaccagtaatccaaagaacccagcccagcgctgaattagcggcagaaaatgacacggatacagatagcggttatggaggagaggccgaagctagacctgaccgggaaaagggcaagggagcaggcgccagcagggtaacgattaaacaggagcctcctggagaggatagcccagccccgaaacgaatgaagctggacagtagaggcggagggagcggagggggccccggtgggggtgccgccgccgccgccgctgcgctgctcgggcctgatcctgctgccgcagctgcattgctgaggcctgacgctgcgctgctgagttcgctggtagctttcggtgggggaggaggagcgcctttccctcaaccagccgccgccgcagcacctttttgccttcccttttgttttctgagcccttcagccgccgcagcctacgtccagcctttcctggacaaaagtggcctggagaaatatttgtatccagccgctgccgctgcgccgtttccgctactgtaccctggaatccctgctccagctgccgcggctgccgctgcggccgcggctgcggctgccgccgcagcctttccctgtcttagctctgtccttagccctccacctgaaaaagctggagctgccgcagccaccttgctccctcacgaggttgctccactcggcgccccgcacccacagcaccctcatgggaggactcaccttcctttcgccggcccacgggagcccggcaatccagaaagttctgcccaggaagacccgtcacaacctggcaaggaggccccc

SEQ ID NO: 7767 - DNA, 1446 bp, synthetic construct
  misc_feature 1..1446: note = source = /note="Description of Artificial Sequence: Synthetic coding sequence"
  source 1..1446: mol_type = other DNA
atggatgagggtatcccccacctccaggagaggcagctcctggaacatcgtgatttcattggactggattatagttctctgtatatgtgcaaaccaaagagatccatgaaacgcgacgacaccaaagatacatacaagcttcctcatcgcctgattgaaaagaagagacgcgacagaatcaacgaatgtatcgcccagctcaaagatctgctccccgagcacctcaaactgaccactttgggccatcttgagaaagctgtcgttctcgagctgacccttaaacatctgaaggcccttacagccctcaccgaacagcagcaccagaagatcatcgcccttcagaatggtgaaagatccctgaaaagcccaatccaaagtgacctggacgctttccactccggcttccaaacctgtgcaaaggaggtcctccagtacctctccaggtttgagagttggacaccacgcgagccacgttgtgttcagctcataaaccacttgcatgccgtagctacccagttcttgcctacccctcagctcctgacccagcaggttccactgtctaagggaacaggtgcaccaagcgctgcaggttctgccgccgccccctgcttggaacgtgcaggccagaagctcgagcccttggcttattgtgtgcctgttattcaacgtacccagcctagcgcagagctcgcagccgaaaacgacacagacactgattctggttacggtggcgaggccgaagcccgcccagacagagagaagggaaagggtgcaggcgctagtagggttactatcaaacaagagccacctggagaggactcccccgctcctaagaggatgaagctggatagcaggggaggcggttctggaggtggccctggtggcggcgcagccgctgcagccgccgctctgcttggccccgaccccgccgcagcagccgctcttttgcgtccagatgctgccctgctttcctccttggtcgctttcggtggaggaggtggagcaccattcccccagccagctgccgccgctgcccccttttgcctgccattctgctttctgtctccatctgcagcagctgcatatgtgcaaccattccttgacaaaagtggtctggagaagtatttgtaccccgccgccgcagccgctcctttccccctcctctatcccggaatacccgcaccagctgcagccgctgccgctgctgctgctgccgccgccgcagctgccgcctttccttgtctctcctccgtcctgtcacccccacccgagaaggccggtgctgctgccgctaccctgcttcctcacgaggtcgcacccttgggtgctcctcacccacagcacccacacggcagaacccatcttccttttgctggaccaagggagcccggcaaccctgagtcaagcgcacaagaggatccttctcagccaggaaaagaggcaccc

SEQ ID NO: 7768 - DNA, 1446 bp, synthetic construct
  misc_feature 1..1446: note = source = /note="Description of Artificial Sequence: Synthetic coding sequence"
  source 1..1446: mol_type = other DNA
atggatgagggaatcccccacctgcaagagagacagctccttgaacatcgcgattttatagggctggattattcttctctatatatgtgcaaaccaaaacggtctatgaaaagggatgatactaaagatacttacaaactccctcataggttgatagaaaaaaaacgacgcgatcgcataaatgaatgcatcgctcagctcaaagatttactacctgaacacctcaaactcactactcttgggcaccttgaaaaagccgtggtcctggaactgactctaaaacacctcaaagctcttacagccttaactgaacagcagcatcagaaaatcatcgccctccagaatggagagagaagtcttaaatctcccattcagagtgacctggatgcgtttcattccgggtttcagacttgcgcaaaagaagtcctccaatacctttctcggttcgagagttggacaccacgagaacctaggtgtgtccagcttataaatcatctccacgctgttgccacacagttcctacccactccccagctcctaacacaacaggtcccattatctaaaggaacaggagccccctcagctgccggaagtgcagccgcaccatgtctcgaaagagccggacagaaactcgaaccactggcctattgtgtccccgtcattcagagaacacagccaagtgctgaactggctgcagaaaacgatactgatactgattctggatatgggggggaagccgaagcccgacccgatcgggaaaaagggaaaggagcaggagccagtagggtcactataaaacaagagccaccaggggaagacagtccagcccctaaaaggatgaaactcgattcaagaggaggagggtcaggagggggacctggaggaggagctgctgccgccgcagcagctctcctaggacccgatcccgcggctgccgcagcccttctacgacccgatgccgctctactgtccagtctcgtggcattcggaggaggagggggggcaccctttccacaacccgcagccgcggccgcccctttttgtctccccttttgcttcctctccccatcagcagccgccgcctatgtacagccattcctagataaatctggactagaaaagtatctataccctgctgcagccgctgctccctttcctctcctttatccaggaatacccgcccccgcagcggcagctgctgccgcagccgcagccgccgccgccgctgccgctttcccatgtttatcttctgtgttgtccccccccccagaaaaagcaggggctgcagccgctacattactaccccatgaagtcgcgccacttggggctccacaccctcagcatccacacggaaggacacacctaccatttgcggggccccgggaacctggaaacccagagtcctcagctcaggaagatccgtcccaacctgggaaagaagcccct

SEQ ID NO: 7769 - DNA, 1446 bp, synthetic construct
  misc_feature 1..1446: note = source = /note="Description of Artificial Sequence: Synthetic coding sequence"
  source 1..1446: mol_type = other DNA
atggatgaaggcattccccatttgcaggagaggcagctgcttgagcatcgcgacttcataggactggactacagttcactgtacatgtgtaaaccaaagcgctctatgaaaagagatgatacaaaggatacgtataaacttccacacagactgatcgagaagaagaggcgcgaccgcataaatgaatgtattgcccaacttaaggatctgttgcctgaacatctgaagttgacgaccctgggacatcttgagaaagctgtggtccttgagttgactctgaagcatctgaaagcgctcaccgcactgacagaacagcaacatcagaaaatcatcgccctgcagaatggggagaggagtttgaagagtcccatccagtccgatcttgacgcgtttcactctggtttccagacgtgcgcaaaggaagtgctccagtatcttagcagatttgagtcttggactccaagagaacccaggtgcgtacagctcatcaatcacctgcatgctgtggccacacagtttctccctacacctcaactgttgacgcagcaggtgcccctgtccaaaggaacgggggctccctccgcggccggaagcgcggccgctccttgtctggaaagggcgggacagaagttggaacctctcgcttactgtgtgccagtaatccagagaacccagccctccgcagagcttgctgcagaaaacgataccgacactgatagcgggtatggcggagaagccgaggcaaggcctgaccgggagaaaggtaaaggtgcaggtgccagcagggtgactataaagcaggaacctcctggagaggacagccctgcaccaaagagaatgaaactcgacagtcgggggggcggcagtgggggtggacccggagggggtgccgcagctgccgctgctgctctgcttggccctgatccggccgccgccgcagctctgttgcggcctgatgccgctttgcttagttccctcgtcgcctttggaggcggagggggagctcccttcccacagcctgctgccgccgctgctccattctgcctcccattctgttttttgtctcccagcgcggccgccgcctacgtgcagccattcctggataagtcaggactcgagaagtacctgtatccggcggctgctgcggctcccttcccgcttttgtaccctggtatacccgcaccagcagccgccgctgctgctgcggccgctgccgccgctgccgcggcagcctttccttgcttgtcaagtgtgctttcaccgccaccagaaaaggccggtgccgcagccgcgacactgctgcctcacgaagtggcgccactgggagctccccaccctcagcacccacacggacggacacatctgccctttgctgggccgcgagaacctgggaaccccgaatcttctgctcaagaggacccttcacagccaggcaaggaagcccca

SEQ ID NO: 7770 - DNA, 1446 bp, synthetic construct
  misc_feature 1..1446: note = source = /note="Description of Artificial Sequence: Synthetic coding sequence"
  source 1..1446: mol_type = other DNA
atggatgaggggattccgcatcttcaagaaaggcagctccttgagcacagagatttcatcggcttggactactcatcgctgtacatgtgcaagccgaaacgcagcatgaagcgggacgataccaaggatacttacaagctcccgcacaggctgattgagaagaagcgaagggatcgcatcaacgaatgtatcgctcagcttaaggacctgctcccagaacacctgaagctcacgactctcggccacctcgaaaaggctgtcgtgctcgagcttaccctcaaacatctgaaggccctcaccgcccttactgagcagcagcaccagaaaatcatcgccctccagaatggtgaacgctctctgaagagccctattcagtcagacctcgatgcctttcactctggattccagacctgtgctaaggaggtgctccaatatctctcccgcttcgaatcctggaccccgcgcgaaccgcggtgtgtccaactcatcaatcacctgcacgcagtggcgacgcagttcctgccaaccccgcagctgctgactcaacaggtcccgctgtccaagggaaccggagcgccgtcggcagcaggatcagccgccgcgccgtgcctcgaaagggccggtcagaagctcgagcctctggcgtactgcgtgcctgtgatccagcgcacccagccctcagcagaactcgcggctgaaaacgatactgataccgactccggatacggaggggaagcagaggccagacctgaccgcgaaaagggaaagggcgctggcgcatcccgggtgactatcaagcaggagccgcctggcgaagattcaccagctcctaaacgtatgaaactggactcgcgcggaggcggctcgggaggaggaccgggaggcggagctgcagctgctgccgccgctctgctgggaccagacccggcagcagccgctgctctgctccggccggacgcagcactcctgtcgtcgttggtggcattcggaggaggcgggggagcgccattcccacagcccgcggctgcagcggcgcccttttgtttgcctttctgctttttgtcgccgagcgcggcagccgcttacgtgcaaccctttctggacaaatcgggcttggagaagtacctgtacccagccgcagctgcagccccatttccgctcctctacccaggaatcccagctccggccgctgcggctgccgcagccgccgcggccgccgccgctgccgccgccttcccgtgtctcagctcggtcctgtcgcctccaccagagaaagccggagccgcagcagcgaccctcctgcctcacgaggtggcgccactgggggcccctcatccgcaacatccacatggccggacccatctgccgttcgctgggcccagagagccagggaacccggaaagctccgcccaggaggacccttcgcagcccggaaaggaagcgccc

SEQ ID NO: 7771 - DNA, 1446 bp, synthetic construct
  misc_feature 1..1446: note = source = /note="Description of Artificial Sequence: Synthetic coding sequence"
  source 1..1446: mol_type = other DNA
atggatgagggtatccctcatcttcaggaacggcagctccttgaacaccgtgatttcatcggtctggattactcctcgctgtacatgtgcaagcctaagaggtccatgaagcgggacgacacgaaggatacgtacaagctcccccatcgccttattgagaaaaaacgtcgtgataggatcaacgaatgtatcgcacaactcaaggaccttctgccagagcacctcaagctgactactcttgggcatctcgagaaagccgttgtcctcgagctgactttgaaacatcttaaagcactgactgccctcaccgaacagcagcatcaaaagatcattgctctgcaaaacggagaacgctcgctgaagtcaccaatccaatctgatctcgatgcatttcatagcggatttcagacctgtgctaaagaggtgctccagtatctctcaagattcgagtcgtggaccccccgcgaaccgcgttgtgtgcagctgatcaaccatcttcatgccgtcgcaacccaattcctgccaaccccacagctcctgacccaacaggttcctctttcaaaggggactggtgcaccctctgctgccgggtcagcagctgcaccttgtctggaacgcgcaggacaaaagctggaacctctggcttattgtgtgcccgtgattcaaaggacccagccctccgccgagctggcggcagaaaatgatactgataccgacagcggatacggaggtgaggcggaagcacggccagaccgggaaaaaggtaagggcgcaggagcgagcagggtcactatcaagcaagaacctcctggagaagatagccccgcccctaagagaatgaagctggactccagaggcggaggttccggaggcgggcccggtggaggtgccgcagcagccgcggcagccctgctgggcccagaccctgcggcagcggcagcgctgcttagacctgatgcagcacttctgagctccttggtcgcatttggcggtggtggcggtgcccccttccctcagccagcagccgcagcggcaccattctgtctgcccttctgcttcctgtccccatctgccgcggcggcttacgtgcaaccttttcttgataagtctggactcgagaaatacctctacccagcggcagcggctgccccatttccactcctctacccgggaatcccagctcctgcggcagctgcggcagcagcggctgcagcggcagccgcagccgccgcatttccgtgcctttcatcggtgctgtcgccccctcctgaaaaggctggagcagcagcagcgactttgctccctcacgaggtggcacctctgggtgcccctcatccccaacatcctcatggcagaactcacttgccattcgctggaccaagagaaccgggaaatccagagtcgtcggcgcaggaagatccaagccagccaggaaaggaagcgcct

SEQ ID NO: 7772 - DNA, 1446 bp, synthetic construct
  misc_feature 1..1446: note = source = /note="Description of Artificial Sequence: Synthetic coding sequence"
  source 1..1446: mol_type = other DNA
atggatgaagggattccccacctgcaggaacgccagctgcttgaacatagagatttcatcggattggattacagtagtctgtacatgtgcaagccgaagcgctccatgaaaagggatgatacaaaggacacctataagctcccccatcgtctgattgaaaagaagcgccgggatagaatcaatgagtgcattgcccagctgaaggatctgctccccgaacatctcaagttgaccacactcggacatctcgagaaggcggtcgttcttgaactgacactgaagcaccttaaagcgctgacggcactgacagagcaacagcaccagaaaattatcgccctgcagaacggtgagagatcccttaaaagtcccattcagtctgatctagatgcctttcacagtggcttccagacatgcgctaaagaggtgctccaatacttgtcgagattcgaaagttggaccccccgggaaccccgctgcgtccaattgatcaatcatcttcacgccgtggctactcagtttctgcctaccccacagcttctgacacagcaggttccactgtccaagggcacaggcgccccatccgcagccggaagcgccgctgccccctgtttggagagagccggacagaaactcgagcccctggcttactgtgtgcccgtaatacagagaacacagccttctgccgaactggccgctgagaatgatactgacacagatagcggctacggcggtgaggccgaagcgcgccccgacagagagaagggaaagggcgctggcgcctctagggtgaccatcaaacaagagccgcccggagaggactctcctgctccgaagagaatgaaactcgattcacgcggcggcggcagcggtggcggccccggcggtggagcggctgcagccgccgccgccttgctcggtccagatcctgctgcagcagccgccctgctgcgaccagatgctgctctgttgtcgtctctcgttgcttttgggggcggcgggggagccccctttcctcagcctgctgctgctgcggccccgttttgtctgcctttttgcttcctcagcccaagcgccgctgctgcatacgtgcagccgttcttggataaaagcggactagagaaatatctgtatcccgcagctgccgctgcacccttccccctcctctaccctggtatcccggcacctgccgcagccgccgccgctgctgctgccgcagctgctgcagccgccgcatttccgtgtttgtcaagcgttttaagcccccctcctgagaaagccggcgctgctgcagctacgcttctgcctcatgaggtcgcaccgcttggtgcaccccatccacaacacccccacggtaggacccatctgcctttcgccggccccagggagccaggaaaccctgaaagtagcgcacaggaagacccaagccagcctggcaaagaggcaccc

SEQ ID NO: 7773 - DNA, 1446 bp, synthetic construct
  misc_feature 1..1446: note = source = /note="Description of Artificial Sequence: Synthetic coding sequence"
  source 1..1446: mol_type = other DNA
atggacgagggtattccccacctgcaggaacggcagttgttagaacaccgggattttatcggcttggattatagttcactttatatgtgcaaaccaaaacgaagcatgaaaagggacgacactaaggacacttacaaactaccgcatcggctcattgaaaagaaacgccgagaccggatcaacgagtgtatagctcagttgaaggacttactgccagaacatctcaagctgacaaccttaggccacctagaaaaagcagtcgttcttgaactgactttgaagcatctcaaggcccttaccgccttaacggagcaacaacatcagaagatcattgctctccagaatggagaaagaagcctgaaaagtccaatccagagcgatctggatgctttccactcgggcttccagacctgcgcaaaggaggtactccagtatttgtcgaggtttgaaagctggactccgcgagagcccaggtgtgtgcagctaattaaccatctgcatgccgtagcaacccagttcttgccgacaccacagcttttaacgcagcaggtccccctgtccaagggaacgggagcgccctcggcagctggcagcgccgccgctccctgtctcgagagggccggccagaaactggagcctctcgcctattgcgtgccggtgatacaacgcacacagccatcagcagagctggccgccgaaaatgataccgatacagatagcggctatgggggagaggcagaggctcggcctgacagagagaagggcaaaggggcaggcgcatcaagggtgacgatcaagcaggagcctcctggggaagactcccccgcaccaaaaaggatgaaactcgactcacggggcggaggctcagggggcggaccgggtggcggcgccgccgctgcggccgccgccctgcttgggcctgaccccgcagctgctgctgcccttctgagaccagacgcagccctcctatccagtctcgtggccttcgggggcggtgggggggcacctttcccccagcctgccgctgctgctgccccattctgcctgccgttttgttttttgtcaccctcagcggcagctgcctacgtgcaaccttttctggacaaatccgggctggagaaatacctgtatccagctgctgccgccgcacctttccctcttctctatccaggtatccctgcccccgcagctgccgccgcggccgcagctgctgcagcagctgccgctgctgccttcccctgtctttcttcagtgctgtctccacccccggagaaagcaggagccgcagccgccactctgttgcctcatgaggttgcccctcttggcgcgccacacccccagcacccacacggacgtactcacctgcctttcgccggcccaagagaaccaggtaaccctgagtcttcggcacaagaagacccttctcaacccggaaaggaggctcca

SEQ ID NO: 7774 - DNA, 1446 bp, synthetic construct
  misc_feature 1..1446: note = source = /note="Description of Artificial Sequence: Synthetic coding sequence"
  source 1..1446: mol_type = other DNA
atggacgagggtatccctcatctgcaggagaggcagctccttgagcacagagactttattggtctagactacagctctctgtatatgtgtaaacccaagagatcaatgaagagagatgatactaaggatacatacaaactgccgcataggcttatcgagaaaaaaaggcgagacagaatcaacgaatgcattgctcagcttaaagacttactgcccgaacacttaaagctgacgacccttggacatcttgaaaaagcagtggttctcgagttgaccctgaagcatcttaaggctctgaccgcgctgacagaacaacagcatcaaaaaatcatcgcactgcagaatggtgaacgttccctgaaatcacccatccagtccgatttggacgcatttcatagcggctttcagacctgcgctaaagaggtcttacagtatctgtctcggtttgaaagttggacaccgagagagcctaggtgtgtacagttaattaatcatctgcatgcggttgccacgcagttcctccctaccccacagctcctcacccagcaagtcccgctcagtaaaggcaccggggccccgtccgccgcaggttctgcagctgcgccctgccttgagagagccggccagaagcttgaacctttggcctactgtgtgccagtaattcagagaacccagccctcagccgagctggctgccgagaacgacaccgacactgattcgggatacggcggcgaggccgaagctcgcccagatagggagaagggaaagggcgctggtgcatctagggtcaccatcaagcaggaaccccctggtgaagactcacctgctccgaagagaatgaaactggactcccgcggtgggggctctgggggcggcccagggggaggagccgccgctgccgctgcagccctcctaggcccagatccagccgccgcagccgcactgctcaggccagatgctgcactcctgtctagcctagttgcattcgggggcgggggcggagctccattcccacagcccgccgctgcggccgcacctttctgcttacctttctgtttcctatctccttcagcagccgcagcctacgtccagcctttcctggataagagcggcctagagaagtacctgtatcccgccgccgcagctgcccccttccctctgttgtaccctggtatcccagcccccgcagcggcagccgcagcggcagctgctgccgctgcagccgcggcagcttttccctgtctttcgtcagtactcagccccccgcccgagaaggctggcgctgccgctgcaacgcttctgccacatgaagtcgcgccactaggcgcaccgcaccctcagcacccccatgggcgaacacacctgccatttgcaggccctcgagagcctggcaacccggagtcgagtgcccaggaagatccctcccagccgggaaaggaggcaccc

SEQ ID NO: 7775 - DNA, 1446 bp, synthetic construct
  misc_feature 1..1446: note = source = /note="Description of Artificial Sequence: Synthetic coding sequence"
  source 1..1446: mol_type = other DNA
atggacgaaggaattccacatctgcaggagcgacagctgcttgaacatagagactttatcgggctggactacagctccctgtacatgtgtaaaccgaaacgctcgatgaagagagatgatactaaggacacttacaaactgcctcacaggctgattgagaagaaacggcgcgatcgcattaatgagtgtatagcacaactgaaggatcttctgccagagcatctcaagctgaccacccttggacatctcgagaaggcagtggtgttggagctcacgctgaagcacctgaaggcactgacggcactgactgaacagcagcaccagaagattatcgcattgcaaaatggagaacggagtctcaaaagccctattcaatcagatctcgacgcattccattctggttttcaaacctgcgccaaagaagtcctgcagtacctttcaagatttgaatcatggacccccagagagcctcgctgtgtgcaacttatcaaccacttgcatgccgtggccactcagttccttcctaccccgcagttgcttactcagcaagtgcctctgagcaaaggaaccggtgccccctccgcagcaggaagcgcagcggcaccctgcctggagcgtgcaggacaaaaacttgaaccactggcatactgtgtgccggtcatacaaaggacccaaccttccgccgagcttgcagcagaaaacgatactgacactgattcgggttacggaggcgaagccgaagcaagacccgatcgagaaaagggcaagggagcaggagcgagtcgagtcaccattaagcaggaacctcctggagaggattcgcctgcaccaaagaggatgaagctggactcgcggggtggagggtccgggggaggccccggcggaggggcagccgctgctgcagcggcacttctgggccctgatccagcagcagccgctgcacttcttcggccagatgccgcactccttagtagtcttgttgcatttggtggtggcgggggagccccttttccacaacctgcggcagcggcagctccgttctgtctccctttttgcttcctttccccttccgcggctgccgcctatgtgcaacctttccttgacaaatcaggtctggaaaagtacctctacccagcggcggcagctgcaccatttccacttctttaccccgggatcccagcgccagctgcggcggctgcagcggccgcagctgccgcggctgctgcagctgcgttcccatgtctctcatcggtcttgtcgcccccaccagagaaggcaggcgcggcggcggcaacgctgctgcctcacgaagtggccccacttggcgcgccacacccccagcatcctcatggtcgcactcatctgccgtttgcaggacccagggagccaggtaacccggaatcctcggcacaggaagatccctcacaacctggaaaagaagcaccg

SEQ ID NO: 7776 - DNA, 1446 bp, synthetic construct
  misc_feature 1..1446: note = source = /note="Description of Artificial Sequence: Synthetic coding sequence"
  source 1..1446: mol_type = other DNA
atggacgagggtattccccatctgcaagagcggcagctgctggaacaccgggactttatcggcctcgactactcaagcctgtacatgtgcaagcctaagcgctccatgaagagagacgacactaaggacacctacaaactcccgcataggcttatcgaaaagaagcggagagatagaatcaatgagtgcatagcccagctgaaggatcttttgcctgagcacctcaagctcaccactcttggacatctggaaaaggctgtggtgctggaactgaccctcaagcatctgaaggccttgactgcactcactgaacagcaacatcagaaaatcatcgctctccagaacggagaaagatcactcaaatcgcctatccagagcgatctggatgcgttccactccggattccagacttgtgcaaaggaggtcctgcaatacctttctcggtttgagtcttggacccctcgggagccacgatgcgtgcagctgatcaaccaccttcacgccgtggctactcaattcttgcctaccccacagctgctgactcaacaggtcccgctgtcgaagggaaccggcgcgccctccgcggcaggctcggccgccgccccctgcttggagcgcgcgggtcagaaacttgaaccgctcgcatactgtgtccctgtgatccaaaggacccagccgtctgccgaactggccgctgaaaacgacactgataccgacagcggatacgggggtgaggcggaagccagaccagatagagaaaagggtaagggagccggcgcgtcccgcgtcacgatcaaacaggagccgcccggagaagatagcccggcgcccaagcggatgaaactggattcccgcggcgggggctcgggaggaggaccgggcggcggcgccgctgccgcggcggccgcactgctgggaccagaccctgcagcggcggccgcgctcttgcggccggacgccgcgctgctttcctctttggttgctttcggaggaggagggggtgccccgttcccgcaaccggcggcggcagccgccccattctgtctccccttttgtttcctttccccgtccgccgcggccgcatacgtgcaacctttcctggacaagtcaggtctggaaaagtatctgtacccagctgccgctgcagcccctttcccgcttctctaccccggcatcccggcacccgcagccgcagcagccgctgcagcagccgcggcggcagctgcagccgcgttcccgtgcctgtcgtccgtgctgagcccgccaccagagaaagccggtgctgccgctgctactctgctgccgcacgaagtggcccctctgggtgccccccacccccagcacccacatgggcgcacgcacttgcctttcgcgggaccgagggaaccgggaaatccggagtcgagcgcccaggaggacccttcgcaaccaggaaaagaagccccc

SEQ ID NO: 7777 - DNA, 1446 bp, synthetic construct
  misc_feature 1..1446: note = source = /note="Description of Artificial Sequence: Synthetic coding sequence"
  source 1..1446: mol_type = other DNA
atggacgagggcatccctcatttacaggagaggcagctcctcgaacacagggacttcatcggcctagactatagttccctctacatgtgtaagcccaaacgcagcatgaaacgtgacgacaccaaggacacatacaaactaccccaccgccttatcgagaaaaagcggagagacaggatcaacgaatgtatcgcccagctgaaggacctccttccagaacacttgaaactgaccacccttgggcatctggagaaagccgtggtgctcgaactgacccttaaacacctgaaagcgctcaccgcactgactgagcagcagcaccagaaaataatcgcccttcagaatggagagaggtctctgaaaagtcccatccaaagtgacctggatgcattccactccgggttccaaacctgcgcgaaagaagtcctgcagtacctgagcaggttcgaaagttggactccaagggaacctcggtgcgtgcagcttatcaaccacttgcacgccgtggccacccaatttctgccaacccctcaactactcacgcagcaagtccccctttccaagggcactggggctccatctgcggctgggagtgccgccgctccatgtctggaacgcgctggacagaaactggagcccctagcttattgtgtgccggtcatccagcggacccagccgagcgcggagctggctgctgagaacgatacagacacagacagcggttacgggggtgaggccgaggcacggccagaccgggagaagggcaagggcgctggggcttccagggtcacaataaaacaggaaccacccggagaagactccccagccccgaaaagaatgaagctggacagtagaggcggaggatccggcggcgggcctgggggcggcgcggctgctgccgcagcagcactccttgggcctgatcccgctgctgcagcagccctcctacggcctgacgcagctctgctgagcagtctcgttgcctttggaggcgggggaggggccccctttcctcagcctgccgccgccgccgcgcccttctgcctgccattctgctttttaagcccatcggcagccgctgcctacgtgcagccattcctggataagtctggcctggaaaaatacttgtaccccgccgcagctgccgctccatttcccctgctgtatcccggaatccctgcacccgccgccgctgccgccgccgccgcagccgcagcggccgctgccgcagcctttccttgcctttcgtcagtgttatcacctcctcctgaaaaggctggtgccgcagctgcgacactgctgcctcatgaagtcgcccctcttggtgctccacaccctcaacacccgcatgggaggactcacctgccgttcgcgggaccacgtgagccaggcaatccggagagctcagctcaggaggatccctcccaaccgggcaaggaggcccct

SEQ ID NO: 7778 - DNA, 1446 bp, synthetic construct
  misc_feature 1..1446: note = source = /note="Description of Artificial Sequence: Synthetic coding sequence"
  source 1..1446: mol_type = other DNA
atggacgaaggaatcccgcacctgcaagaacgtcagctcctggagcacagggactttatcggactggactacagcagcctttacatgtgcaagccaaaacgctccatgaaacgggatgataccaaagacacctacaagctcccgcatcggctcattgagaaaaaacggcgcgaccgaatcaatgagtgtatcgcgcagctgaaagacctcctgccggaacatctgaagctgacgaccctgggacacctggagaaagcagtcgtgctggaactgactctgaagcaccttaaggcactgaccgctctcaccgaacaacagcatcagaaaatcattgcgctgcagaacggagaacgctcgctgaagagccccatccagtcggacctggacgcctttcactcgggattccagacctgcgccaaggaggtgctgcaatacctgtccagatttgaatcatggaccccgcgagaacccaggtgtgtgcagctgatcaaccaccttcacgctgtggccactcaattcctcccgacgcctcagctgctcactcaacaggtcccgttgagcaaggggaccggagccccgagcgcagccggctcagccgctgcgccgtgcctggagcgcgcaggccaaaaactggaacccctggcttactgcgtaccggtcatccagaggactcaaccgtccgccgaactggccgcagagaacgacaccgataccgactcgggatatggaggcgaagcggaagcccgacccgatcgcgagaagggaaaaggagccggagcctcccgcgtgactatcaagcaagagccgccgggggaagattcaccggctcccaagagaatgaagctggactccagaggtggaggatcgggcggaggacctggcggcggtgctgccgccgcggcagctgctctgctggggccggaccccgcagcagcggcggcgctgctgcggccggacgccgccctgctgtcaagtttggtggcgttcgggggtggaggaggagcaccattcccgcaaccagctgctgccgcggcaccattctgtctgccgttctgctttttgtccccgagcgcggcggccgcatacgttcagccgtttctcgacaagtccggcctggaaaagtacctgtacccagctgccgcagcggcgccttttcctctgctgtacccgggaatcccggcgcccgcagcagcagctgcggcagcagcagcggccgccgcagccgccgcagctttcccttgtctctcatcagtgctcagccctccaccggagaaagccggagcggcggccgccactctgctgccccatgaagtggccccgttgggcgccccacatccacagcaccctcacggccggacgcacttgccgttcgccggaccacgtgagccgggaaatccagaatcgtccgcccaggaggacccttcgcagcctggaaaggaagcccca

SEQ ID NO: 7779 - DNA, 1446 bp, synthetic construct
  misc_feature 1..1446: note = source = /note="Description of Artificial Sequence: Synthetic coding sequence"
  source 1..1446: mol_type = other DNA
atggatgagggcataccgcacctgcaagaaagacagctcttggagcatcgagatttcatcggtcttgactatagcagcttgtacatgtgtaaacctaagcgcagcatgaaacgggacgacacaaaggatacatacaaactgccccacaggttgatcgagaagaagcggcgcgatagaattaacgagtgcatcgctcagctgaaagacctcctgcctgaacaccttaaactcacaaccctcggtcatctcgaaaaggctgtagttctggagcttacactgaagcacctgaaagccttgaccgcactcaccgagcagcagcaccagaagattatcgccctgcagaacggggaaagatctctgaagtcccccatccagagcgacctggacgcatttcactccggttttcagacttgtgccaaggaggtgctgcaatatctctcaagattcgagagttggacacctagagaaccaaggtgcgtccagctcattaaccaccttcatgccgttgctactcagttcctcccaactccacaattgctgacacagcaagtaccacttagcaaagggacaggagccccatctgctgcagggagcgcggcagctccatgcctggaaagagccggacaaaaactggaacctctcgcttactgtgtccccgtcatacaacgcacccagccatcagccgagcttgctgccgaaaacgacaccgataccgatagcggttacggaggcgaagccgaggcacgcccagatagggagaaaggcaagggagctggcgccagtcgcgtcactatcaagcaggagccgccaggggaggattcacccgccccaaagcggatgaaactcgacagtcgggggggaggatctggaggaggacctggcggaggggcagccgcagccgctgctgcgttactcggaccagatcccgctgccgctgctgcactcctccggcctgacgctgcccttctgagttccctggtcgcttttggcggcggaggaggcgccccatttccgcaacctgctgccgcggcagcccccttttgccttcccttttgctttttaagtccctccgctgctgccgcgtacgtacaaccatttttggacaaatcgggactggaaaaatacctgtacccggctgccgcagctgctcctttccctctcctttacccgggaatacctgcccccgcagctgccgctgctgccgctgcggctgctgccgctgccgccgctgctttcccctgtttgtctagcgtcttatcccctccccccgaaaaagctggcgccgcagcggcaaccctgctgcctcatgaggtggctccccttggagccccacacccacagcacccccatggcaggacccaccttccttttgccgggccgagagagccaggtaaccctgagtcctcagctcaggaggatcctagtcagccaggaaaggaggctccg

SEQ ID NO: 7780 - DNA, 1446 bp, synthetic construct
  misc_feature 1..1446: note = source = /note="Description of Artificial Sequence: Synthetic coding sequence"
  source 1..1446: mol_type = other DNA
atggacgagggcatcccacatttacaagagcgtcagcttctggagcatcgcgacttcattgggctggattattcctctctctatatgtgtaagcccaagagatcaatgaaacgtgacgacacaaaggatacatacaaattacctcatcgcctgatcgagaaaaagcgtagggaccggatcaacgaatgcatcgcacagttgaaggatcttctgccggagcacctaaagcttactacccttggtcacctcgagaaggcggtggtgttggagttgacactgaagcatctcaaagcgctaactgctttaacagagcaacagcatcaaaaaatcatagcgctgcaaaatggagagcgatccctgaagagccctattcagtcagatctagatgcttttcattccggtttccaaacctgcgcaaaagaggtgttgcaatatttgtctcgtttcgagtcttggactccgagggagccacggtgcgtacaattgattaaccaccttcacgccgtcgctacgcagttcttgccgaccccgcagctattgactcagcaagtgccactgtccaaaggaaccggtgctccttccgcggcgggtagtgccgccgctccctgccttgaacgcgccggacagaaattggagcctctcgcctattgcgtgccggtcatacagcgtacccagccgtctgcagagctggcagcagaaaacgacaccgatactgattctggttacggcggcgaagcagaggcccgtcctgatcgagaaaagggtaaaggtgctggggcgagccgggtgaccatcaaacaggaacctcctggggaggattctccggccccgaagcgcatgaaactggactcgaggggtggtggtagcggtggcggccctggcgggggggcagcagcagcagccgccgcgttactcgggccagatcctgctgccgctgccgcgctgctacgacccgatgccgccctcctctcaagtctagtagccttcggaggaggagggggggcgccgttcccacagcctgctgctgctgcagctccgttttgccttccattttgctttctttccccttcagctgctgcagcatacgttcaaccgttcctagacaagagcggacttgagaagtatctctatccggctgcagccgcagctcccttccctcttctttaccctggaattccagcccccgcagctgctgccgccgcggccgcagctgcagcagctgccgccgccgcttttccttgcctgagctcggttcttagccccccgccggaaaaggccggtgctgcagccgcaacgctgctgccccatgaggttgcaccgctaggggcgcctcatccacaacatcctcacggacgtacacatttgcccttcgcaggtccccgagagcccggcaatcctgaatcgtctgcccaagaggatccttctcaaccggggaaagaggccccc

SEQ ID NO: 7781 - DNA, 1446 bp, synthetic construct; identical to SEQ ID NO: 7756
  misc_feature 1..1446: note = source = /note="Description of Artificial Sequence: Synthetic coding sequence"
  source 1..1446: mol_type = other DNA

SEQ ID NO: 7782 - DNA, 1446 bp, synthetic construct
  misc_feature 1..1446: note = source = /note="Description of Artificial Sequence: Synthetic coding sequence"
  source 1..1446: mol_type = other DNA
atggatgagggcatacctcacctgcaggaaaggcaacttctcgagcatagggacttcattggactggactactccagcttatacatgtgtaagcctaagaggtccatgaagcgggatgatacaaaggatacttacaagctaccacaccgcctaatagagaagaaacggcgggataggatcaatgagtgcatcgcccaattgaaggacctcctgcctgaacaccttaagctcactaccttggggcacctggaaaaggcagtggtgctcgagctcaccctcaagcacctgaaagcactgactgcgctcacagagcagcaacatcaaaagataatagccctgcagaacggtgagcgttctctcaagtcacctatccagtctgatctggatgcgtttcacagcgggttccagacatgtgccaaagaggtgctgcagtatctgtcccgttttgagtcctggacccctcgggagccccggtgcgttcagctgatcaatcaccttcacgccgtagccacccagttcctgcccaccccccagctgctaacgcagcaagtgcccctatccaaagggacaggtgctccctctgctgcaggttctgctgcggccccctgtcttgaacgggctggtcagaaactcgagccgctggcctactgcgtgcccgtcatccagcggacccaaccatctgcggaactcgccgctgaaaatgacacagataccgattccgggtacggtggcgaagctgaagcgagaccagatcgggaaaaaggcaaaggtgccggagcctccagagtgacaattaaacaggagcctccgggtgaggacagcccggccccaaagagaatgaagctagatagcagaggaggcgggtctggaggcggacctggaggaggcgccgccgctgcagctgctgcgctcctggggcctgaccctgctgccgccgctgcactgctgcgaccggacgccgccctactaagttcccttgtggccttcgggggaggcggaggagcgccgttccctcagccagcggccgccgctgcccctttttgccttccgttttgcttccttagcccgtctgcggccgcagcttacgtacaaccatttctcgataagtctgggctggaaaagtatctgtatcctgctgcagccgccgcccctttccccctgctctaccctggcatccccgccccggccgccgcagctgccgctgccgccgctgctgctgcagcagccgctgcattcccctgcctgagtagcgtgttgtccccacctcccgagaaagctggagccgcagcggcgaccctcctgccccatgaggttgctccactcggagctccccacccacagcacccccacggcaggactcacctgcctttcgcaggacccagagaacccgggaaccccgagagctctgcccaggaggatccctcgcagcccggcaaggaggcacct

SEQ ID NO: 7783 - DNA, 1446 bp, synthetic construct
  misc_feature 1..1446: note = source = /note="Description of Artificial Sequence: Synthetic coding sequence"
  source 1..1446: mol_type = other DNA
atggacgaaggaattccacatcttcaggagcggcagttgctggagcacagggacttcatcggattggattactcttccctctacatgtgcaaaccgaagagatccatgaagcgggatgacaccaaggatacttacaaactccctcacagactgatcgaaaagaagaggcgagacaggatcaacgaatgcatcgctcaactgaaggacctgctgcctgaacacctgaagctgactactctcgggcatttggagaaagctgtcgtgctggagctgaccctgaagcatctgaaggctctgaccgcactgactgagcagcaacatcagaagatcatcgctttgcagaacggagaacgatctctgaaatcgccaatccaatcggatctcgacgcgttccactcgggattccaaacttgcgccaaagaggtgctgcagtacctgtcccggttcgagtcgtggaccccgcgggaacctagatgcgtgcagcttatcaatcaccttcacgctgtggccacgcaattcttgccgactccgcagttgctcactcagcaggtgccgctgtccaaggggaccggtgctccgtccgcagccggtagcgccgcggccccatgtctggagcgcgcaggacagaaactcgagcctctcgcgtactgcgtgccggttatccagcggacccagccatccgccgaactcgccgcagaaaacgataccgataccgatagcggctacggtggggaagcggaggctagaccggatcgggaaaagggcaagggagcgggcgccagccgcgtgaccatcaagcaagaaccaccgggagaggattcccctgctccgaaacggatgaaactcgattcaagaggcgggggatcaggaggaggaccaggaggaggcgcggccgcagctgctgcagcattgttgggaccggatccggcagcggcggcggcactgcttcggcctgacgccgcgctgctgtcgtcgctcgtggcgttcggcggtggagggggtgccccgtttccgcagccggcagctgcggctgcaccgttttgcctgcctttctgctttctgtcgccatccgcagccgcagcctacgtgcaacccttcctggacaagtcgggactggaaaagtacttgtacccggccgccgcggcagcgccgttccccctgctgtacccgggaatcccagcgcccgccgccgcagcggccgcggcggcagcggccgcagcagctgccgcagctttcccatgcctgtccagcgtgctgtccccaccgccggagaaggcgggagctgcagccgcgaccctgctcccgcatgaagttgcacctctcggtgcacctcatccccagcatccacacggacggactcatctgccatttgctggacctcgggaaccaggcaatccggaatcaagcgcgcaggaggacccgtcccagcccggaaaagaagcacca

SEQ ID NO: 7784 - DNA, 1446 bp, synthetic construct
  misc_feature 1..1446: note = source = /note="Description of Artificial Sequence: Synthetic coding sequence"
  source 1..1446: mol_type = other DNA
atggatgaagggattccgcatctccaagagcggcagctgctggagcatagggattttataggactcgactactccagtctatatatgtgcaagccaaaacgtagcatgaagcgtgatgacaccaaagatacctataagcttcctcaccgcctgatcgaaaagaagcgtcgagaccggatcaatgagtgcatcgcacagttgaaagatttgctgcccgagcacctgaaactgactaccctagggcatttggaaaaggcagtggtcctggagctgactttgaagcacctaaaagcattgacggcactgaccgagcagcaacaccagaagattattgctctgcagaatggtgagcggagcctcaagtctcccattcagagcgacctcgacgctttccattcagggtttcagacctgcgcgaaggaggtgctgcagtatctgtctaggtttgaatcttggacaccacgcgaacctcgctgcgttcaattgattaatcatttgcatgcggttgccacccagttccttcctacaccgcaactactgacacagcaggttccactctcgaaaggtactggtgctccgagcgcagccggctcggccgctgccccctgcttggaaagagctggccagaaacttgaacccctggcctactgtgtgcctgtcatccaacggacccagccctctgcagagctggccgccgaaaatgataccgacaccgattctggttacggtggtgaagccgaagcccgcccggatcgggagaaggggaagggcgctggcgcaagccgcgtgactatcaaacaagagccccctggggaagattctccagctcccaagagaatgaaactggactctaggggcggcggatctgggggcggacccggagggggagccgccgccgctgcagccgcactgctgggcccagaccctgcagcagcggcggcactgctgaggccggacgcagccctgctctcttcattggttgcttttggaggtggcgggggagcaccattcccacagcccgcggctgctgcagcccctttctgtttgccattctgtttcctctcacctagcgccgccgccgcatacgtgcaaccttttttggataagagcggcttggaaaagtatctatacccggccgcagccgcggccccattccctctcctctaccctggaattcccgccccagccgcggctgccgctgccgcggcagctgctgccgcagctgccgctgcattcccttgcctgtcgtctgttttgtcgccgccacccgagaaagccggagccgccgctgcaactttgctcccccacgaggtggccccacttggagcaccgcatccgcaacaccctcacggcagaacgcatctgcccttcgccggtccgagagaaccgggtaatccagagagctcagcacaggaagacccgtctcaaccagggaaggaggcccct

SEQ ID NO: 7785 - DNA, 1446 bp, synthetic construct
  misc_feature 1..1446: note = source = /note="Description of Artificial Sequence: Synthetic coding sequence"
  source 1..1446: mol_type = other DNA
atggacgaagggataccacatctgcaggaaagacagctccttgagcacagagactttattggtctggattatagctcgctctacatgtgtaagcctaagcggtccatgaagagagatgatactaaggacacctacaagctccctcacaggctcatcgagaaaaaacgccgtgaccggattaacgaatgtatcgcacaactgaaagatctcctccccgaacacctgaagctgaccaccttggggcacctggaaaaggcagtggtgctggagcttactcttaaacatcttaaggcactgaccgcacttaccgagcaacaacatcaaaagataattgcccttcagaatggggaaagaagccttaagagccctattcaatcggacctggatgcattccattcgggattccagacctgtgcgaaggaagtcctgcaatacctttcgagattcgagtcgtggaccccacgagaacctcgctgtgtccaactgatcaaccatctgcacgcggtcgcaactcagtttcttcctacccctcagctgctgacccaacaggtgcctctctccaaagggaccggagcaccctccgctgcggggtcggcagcagcaccgtgtcttgaacgggcaggacagaaacttgaacctctcgcatactgcgtgcctgtgatccaacgaacgcaaccttctgctgaactggccgcagaaaacgataccgacaccgattcgggatacggcggcgaagccgaggcaagaccagatagggaaaagggcaagggtgccggtgcctccagggtgaccattaaacaggaaccaccaggagaggattcgcctgcccctaagcggatgaaacttgattccaggggagggggatcgggaggtggaccaggaggcggggccgcggcggcggccgcagccttgctcggtccagatccagcggctgctgcggccctcctgcgccccgacgcagccctgctgagctcactggtggcatttgggggagggggtggtgcaccattcccacagcccgccgctgcagcagcgcccttctgtctcccattctgttttctctcaccttcggcagccgcagcatacgtgcaaccttttctggataagtcgggacttgaaaagtacctttaccccgcagccgccgcggcgccattccctctgctgtaccctggtattcctgcgccagccgcagcggcagcagcggctgcagcggccgccgcagccgcagctgcatttccttgtctgtcctcagtgctgtcaccaccacccgagaaggctggggccgcagccgcgacgcttctgcctcatgaagtggccccactgggggcaccacatccgcaacatccccatggaaggacccatctcccgtttgcagggcccagggagcctggaaaccctgaatcgtcggcacaagaagatccaagccagcccggtaaagaagcacct

SEQ ID NO: 7786 - DNA, 1446 bp, synthetic construct
  misc_feature 1..1446: note = source = /note="Description of Artificial Sequence: Synthetic coding sequence"
  source 1..1446: mol_type = other DNA
atggatgagggtataccacatcttcaagaaagacaactcctcgaacacagagacttcatcgggctggactactcatccctgtacatgtgtaagcccaagcgctcgatgaagagagatgatactaaggatacctacaagctgccccatcgacttattgagaaaaagcggagagacagaattaacgagtgtattgcacaacttaaggatctcctgccagaacatcttaaactcaccaccctggggcacctcgaaaaagcagtggtgctggagcttactctcaaacacctcaaggcactgactgcacttaccgagcagcagcatcaaaagattatagcgcttcaaaatggagagagatcgctcaagtcgcctattcagtccgatcttgatgcctttcacagtggctttcagacttgtgcgaaggaagttctgcaatacctgtccaggtttgaatcatggaccccgcgggaaccaagatgtgtgcagctcatcaaccatctccacgccgtggcaacccaattccttcctactcctcaacttctgactcagcaagtcccactctcgaagggaactggagcaccatcggcagctggatccgcagccgcaccctgtcttgagcgggcgggtcaaaaactcgagcccctcgcatactgtgtcccggtgatccaacgcacccaaccatcagctgaactggctgccgaaaacgacactgatactgacagcggttacggaggtgaggcagaagctcggccagacagagaaaagggaaagggggcgggggcatcccgagtcaccattaagcaggaaccacccggcgaagattcaccggcccctaagagaatgaaacttgattcgcgcggaggaggatccggcggaggaccaggtggcggagccgctgctgcggcagcggccctgcttggcccagaccctgcagccgccgcagcgcttcttcgtcctgacgccgcactcctctcctcgctcgtggcctttggtggtggcggtggcgcaccttttccacagcctgccgcagcggcagcaccgttctgtctccctttttgctttctgagcccgtcagcggccgcagcatacgtgcagccatttctcgataagtcgggactggaaaagtacctttaccctgccgctgcagccgcccctttccctctgctgtatccggggataccagcgccagcggcagcagcagccgccgccgctgccgccgcagcagccgcagctgctttcccttgtctttcgtccgtgctgtcaccaccaccggagaaggcaggagcggcggccgctactcttctgccccatgaggtcgcaccactgggagcaccgcatccacagcatccccatggtcggacccacctgccatttgcagggccacgtgaaccaggtaatccagaatcgtcggctcaggaagatccttcacaaccaggtaaggaagcacct

SEQ ID NO: 7787 - DNA, 1446 bp, synthetic construct
  misc_feature 1..1446: note = source = /note="Description of Artificial Sequence: Synthetic coding sequence"
  source 1..1446: mol_type = other DNA
atggacgaaggtattccacatttgcaggaacgccagttgctcgaacatagagatttcattggattggattattctagtctgtacatgtgcaaaccaaagaggtcgatgaagcgagatgatactaaggacacttacaagttgcctcataggttgatcgaaaaaaagagacgggatcgaattaacgaatgtatcgcacaattgaaggatttgttaccagaacatctcaagctaacgactctgggacacttagagaaggcagttgtgttggagcttacactaaaacacctgaaagccttgactgcactcactgagcaacaacaccagaaaattattgctcttcagaatggagaacgatcgcttaaatccccaatccaatcagatcttgatgcttttcactcgggattccaaacatgtgcaaaagaggttctccaatatctttcgagattcgagtcatggactccgagagaaccgagatgtgtgcaacttattaatcacctgcatgcagtagctacacaatttctgccgactccgcaacttcttacacaacaagtccccctctccaagggaacaggagcaccatcggcggctgggagtgcggcagcaccctgtctagagcgagccggacagaagctggagccacttgcctattgtgtgccagttattcaacgaactcaaccatctgctgaattggcagcggagaatgataccgacactgatagtggatacggaggcgaagcggaagcacgtcctgaccgagaaaagggaaagggagcgggagcctcacgagtcaccatcaagcaggaaccgcctggtgaggatagtccagctccaaaacgtatgaagttggactcaagaggaggaggatcgggagggggacctggaggaggagcagcagcagcagctgcagccttattggggccagacccggctgctgcggctgcactgctgcgtccagacgcggccttattgagtagcttggttgcattcggtggaggtggaggagccccatttccgcaaccagccgctgctgccgccccattctgcttacccttttgctttctgagtccatccgcggcagctgcttacgttcaacctttcttggacaaaagtggtctagaaaaatatctgtacccggccgcagcggcagctcctttcccgttactctacccaggcattccagcaccagctgctgccgcggctgcagcagctgcagccgctgctgctgctgcagcctttccctgtctctccagtgttttatcacccccgccagaaaaagcaggtgcagcagcagcaactttgcttcctcatgaagtagccccactcggtgctccacacccacaacatccacatgggagaacgcatcttccttttgctggtccacgggaaccaggaaacccagaatcctcagcccaagaggatccgtcgcaaccaggaaaagaagctcca

SEQ ID NO: 7788 - DNA, 1446 bp, synthetic construct
  misc_feature 1..1446: note = source = /note="Description of Artificial Sequence: Synthetic coding sequence"
  source 1..1446: mol_type = other DNA
atggacgagggaattccacatctgcaggagcgacagctgctcgagcaccgggacttcatcggacttgattactcgtcactttacatgtgtaagcctaagaggagtatgaaaagggatgacactaaggacacctacaagctcccgcaccgtcttatagaaaagaagagaagagacagaattaacgagtgtatcgcacaactgaaggatctccttcccgaacaccttaagctgactaccctggggcatctcgaaaaggctgtggtccttgaactcactcttaagcatctcaaggccctgactgctctgacggagcagcaacatcagaagattattgcgcttcaaaatggagaacggtcattgaagtcacctattcaatcggatcttgatgctttccattccgggtttcagacctgcgctaaagaagtccttcagtatctgtcgcgatttgaatcgtggactccaagagaacccagatgtgtgcagctcattaatcatctccatgccgtggcaacccagtttctgcccactccacagttgctcactcagcaggtgcctttgtcgaagggaactggtgcgccatctgcggcgggatccgctgcggctccgtgcctggaacgcgcaggacaaaagctggaacctctcgcgtactgtgtgcctgtgatacagagaacccaaccatccgccgaacttgcagcagaaaacgacacggatactgacagcggttacggtggggaagctgaggctcgcccggacagggagaagggtaagggtgcgggcgcaagccgggtcacgatcaaacaagaacctccaggggaggattcacctgcacctaaacggatgaaactggattcgaggggtgggggatcaggcggaggtccgggtggaggcgctgcagcagcggcggcagcgctgcttggaccggatccagcggctgcggcagcactcttgaggcctgatgccgcacttctgtcctcactggtggctttcggtggtggtggaggagccccgtttccacagccggcggcagccgcggcacctttttgtctcccattctgctttctgtcgccttccgccgccgccgcctacgtgcaaccgtttttggataaaagcggacttgagaagtacctctaccctgcagcagctgccgccccatttcctcttctgtaccctggaatcccagcaccagcggcggctgcagctgcggctgctgcggcagcggccgccgcggcagcctttccttgtttgagctcggtcctttcaccccctccggagaaagcaggagcagcagcagcgacccttttgccccatgaggtggcacctctgggagcaccacacccccaacatcctcacggacgtacgcaccttccatttgccggcccccgcgagccaggcaaccctgaatcctcggcacaagaagatccttcccagcccggtaaagaagcccct

SEQ ID NO: 7789 - DNA, 1446 bp, synthetic construct
  misc_feature 1..1446: note = source = /note="Description of Artificial Sequence: Synthetic coding sequence"
  source 1..1446: mol_type = other DNA
atggacgagggcattcctcacctgcaggagaggcagctcttggagcaccgcgactttatcggtttggactactcctctctgtacatgtgtaaaccgaaaaggagtatgaagcgcgacgacacgaaggatacctacaagttgcctcataggcttatcgaaaagaagaggagagacaggatcaatgagtgcatagcccaactgaaggatctgctccccgagcacctgaagcttactaccctcggtcaccttgaaaaggccgtcgtcctggaattgaccctgaaacatctgaaggcattgacagctcttacagagcagcagcaccagaaaatcattgcgctccaaaacggtgagaggtccctgaaatctcctattcagtccgatctcgatgccttccactctggttttcaaacctgcgccaaggaggttttgcaatatttgagccgctttgagtcctggactccccgcgagccccgctgcgtacagttgatcaatcatctgcacgccgtcgccactcagtttctgcctacgccccagctccttacgcagcaagtccccctctccaagggcactggagctcccagtgccgctggaagtgccgcagccccttgcctggagagagccggacaaaagttggagccacttgcatactgcgtgccagtgattcagaggacgcagccctccgccgagctggcggctgagaatgacaccgacactgactccggatacggtggtgaagccgaagcccgccctgacagagagaaaggcaagggagccggagctagccgcgttactattaagcaagaacctcccggtgaggacagtccagctcctaagaggatgaaattggattcacgcggcggtggatccggtggcggaccaggcggcggcgctgcagccgccgccgccgcgctgctgggtccagatccggccgccgcggccgcactgctgaggcccgacgctgccttgctgtcttctttggttgcctttggaggaggtggtggcgcaccgttcccgcagccagcggcggccgccgcaccattctgtctgccattctgttttctctctccaagtgccgccgctgcctacgtacaaccctttctggataaatccggcctggaaaagtacctctaccctgctgcagcagcagcaccattcccactcctctatcccggaattcctgctccagccgcagctgccgccgcggctgcagcggcggctgcagccgcggctgcctttccctgcctgtcatccgtgctgtctccgcctccggaaaaggctggtgctgccgccgctaccctcctcccacacgaggttgccccgcttggagcgccacaccctcaacatccccatggaagaactcatctccctttcgcgggaccaagggagcccggcaacccagagagttccgcgcaggaggaccccagccaaccaggaaaggaggccccc

SEQ ID NO: 7790 - DNA, 1446 bp, synthetic construct
  misc_feature 1..1446: note = source = /note="Description of Artificial Sequence: Synthetic coding sequence"
  source 1..1446: mol_type = other DNA
atggatgaaggaatacctcatctgcaggaaagacagttgttggaacaccgggattttatcggtctcgattactcctccctgtacatgtgtaagcccaaaaggtctatgaagcgcgatgataccaaggacacatataagctacctcacagactgatcgagaaaaagcgccgtgacaggatcaacgaatgcatcgcccagcttaaggacctgttgcccgaacacttgaaattaaccactcttggccatctggagaaggcagtggtgctagagctgacactcaagcatctgaaggcactaactgctttgaccgagcagcaacatcagaaaattatcgctctgcagaatggcgagcggagcctgaagagtcccatccagtctgacttggacgccttccatagcggtttccagacctgcgctaaagaagtgctgcagtacttatctcggttcgaatcgtggacgcccagagagccgcgctgtgtccagcttattaaccacttgcacgcagttgcgactcagtttttgcccacccctcagctgctgactcagcaggttcctctgagtaaaggaactggtgctcctagtgcagctggctccgctgccgccccatgcttggaacgggcagggcaaaagcttgagcccctggcctactgtgtgccagttatccaacgaacacagccgtctgctgagttggccgcggaaaatgacacggataccgactccggctatggtggggaagccgaggcaaggccagatcgggagaaagggaagggggcaggcgcatctagagtaacgatcaagcaagagcctccaggggaggatagcccagcacccaaacggatgaaattagactcacggggaggcggatccggaggaggcccaggtggtggtgccgcggcagctgctgctgccctactgggcccagacccggcggccgctgccgccctgttgaggcccgatgctgccttgctctcaagtctggtggcatttggagggggaggcggcgctcctttccctcaacccgcagcagctgctgcacctttctgcctgccattttgcttcttatctccctcagcagctgcggcctacgttcagcccttcctggacaagagtggccttgagaagtatctgtaccctgcagccgccgccgctccctttcctctgctttatcccggcattccagcccctgctgcagccgccgccgctgccgctgctgctgccgcagctgcggcagccttcccttgcctgtccagtgtccttagtcctccacctgagaaggcgggcgcggctgcggctactctactgcctcatgaggtggcgcccctcggcgcacctcacccccagcatcctcacggacgcactcacctgccatttgccggcccccgtgagccaggtaacccagaatcctctgcacaggaggacccaagccagccaggtaaggaagcccca

SEQ ID NO: 7791 - DNA, 1446 bp, synthetic construct
  misc_feature 1..1446: note = source = /note="Description of Artificial Sequence: Synthetic coding sequence"
  source 1..1446: mol_type = other DNA
atggacgaaggcattcctcatctgcaagagaggcagctgctggaacatcgagattttattggactcgattactcttctctctacatgtgtaaacctaaacggtctatgaaaagagatgacacaaaggacacctacaaactgccacatcgtctaattgaaaagaaacggagagatagaatcaacgagtgtatcgcccagcttaaagatcttctccccgagcacttgaaactcacaaccttaggccacctggagaaggcagtggtgctggaactcacactgaaacatctgaaagcactgacagcactgactgagcaacaacatcagaagatcatcgcgttacagaacggtgagcggtcacttaaatctcccatccagtccgatcttgacgccttccactcagggttccagacttgcgccaaagaagtgcttcagtatctgagccgctttgaaagttggaccccccgggagccaaggtgtgtccagctcattaaccacctccatgctgtggccactcagtttctaccaaccccccagttgctgacacagcaggtccctctatcaaagggcacgggtgccccgagcgctgccgggtctgcggccgccccctgtcttgagcgggcaggtcaaaaactggagccgctagcctactgcgtcccagttatccagcgaacccaaccttccgccgagctggccgcagaaaatgacaccgacacagatagtggctatggtggcgaggccgaagcccggccagacagagagaagggaaagggtgctggcgcatctcgagtgacgatcaagcaggaaccaccgggagaggactcgcccgctcctaaaaggatgaagcttgattctagagggggcggctctggaggaggcccgggcgggggtgccgccgcggctgccgcagccttgctcgggccagacccggccgccgctgccgctctcctgaggcctgacgccgccctcttatcttccctggtggcgttcggtggcggtggtggtgccccctttccacagcctgccgcagccgctgctcccttctgtctcccattctgcttcctctcaccttcggctgctgccgcgtacgtacagccatttctggacaagtcggggctggaaaaatatctgtaccccgcggcagctgctgcccctttccctctcttataccctggaatacccgctccggctgcggctgcagctgcagcagctgctgcggccgctgctgctgctgcctttccttgccttagttcggtgctgagcccccctccagagaaagctggagccgccgccgctacactcctgccgcatgaggtggcacccctgggagcaccgcacccgcagcatccacacgggagaacacatctgccattcgcgggcccaagggaacctgggaatccagagagctcggcccaggaagatccctctcagcccgggaaggaagccccc

SEQ ID NO: 7792 - DNA, 1446 bp, synthetic construct
  misc_feature 1..1446: note = source = /note="Description of Artificial Sequence: Synthetic coding sequence"
  source 1..1446: mol_type = other DNA
atggacgaagggattccgcatcttcaggaaagacagctgctggagcaccgcgactttatcggcttggattactccagtctgtatatgtgcaagcccaaacggtcgatgaagagagatgacactaaagatacttacaagttgcctcataggcttattgaaaagaagcgacgcgatcgtattaacgagtgcatcgcacaactgaaggatctgctgcctgaacatctgaaactcaccactcttggacacctcgaaaaggctgtggttctggagttgactcttaagcatctgaaggcccttaccgcactcactgaacagcaacatcaaaagataatagctcttcagaatggggaacgctccctgaaatcacctatccagtccgaccttgatgctttccattccggttttcagacttgtgcgaaggaagttcttcaataccttagcaggttcgagagctggacgcccagagaacctaggtgtgtgcaactgataaatcacctgcacgcagtcgcaacccaattcctgccaactccccagctccttactcagcaggtgcctttgtccaagggaacgggggctccttcggcagccggatccgctgccgcaccttgtctggagcgcgctggacaaaaacttgagccactggcatactgtgtgcctgtgatacaacgaacccaaccatctgcggaacttgcagcggagaacgataccgacactgactccggctacggcggtgaagccgaggcccggccggatagagaaaagggaaaaggagcaggcgcaagccgggtgaccattaagcaagaacctcccggagaggattcgccagcccctaaaaggatgaaattggattcccgtgggggaggatctgggggtggaccaggaggaggagcggcggcagccgccgcggctctcctgggaccagatcctgccgctgcagctgcgctgcttcggcccgacgcagctcttcttagctcgctggtggccttcggaggcggaggaggtgcaccgtttcctcagccagcggcggccgcagcacctttttgtctgcctttttgttttctctcgccgtcggcagcagcggcatacgtgcaaccattccttgacaagtcgggactcgaaaagtacttgtaccccgcggccgctgcggccccatttcctctcctctaccccggcatccccgcaccagcagctgccgcggccgccgcggcagcagcagccgcagctgctgctgctttcccatgtctttcttcagtccttagcccgccacctgagaaggcaggtgcagccgcagccaccctgcttcctcacgaggtcgcaccgctcggggccccacacccacaacatccccatggacgcacccatctgccttttgcagggccccgcgagcctggaaatccagaatcatcagctcaagaagatccgagtcaacctggcaaagaagcaccc

SEQ ID NO: 7793 - DNA, 1446 bp, synthetic construct
  misc_feature 1..1446: note = source = /note="Description of Artificial Sequence: Synthetic coding sequence"
  source 1..1446: mol_type = other DNA
atggacgaaggcatcccgcatctgcaggagcggcagcttctcgaacaccgggatttcatcggcctggattattcgagcctgtatatgtgcaagcctaagcgctcgatgaaaagggacgatactaaagacacttacaagctcccccaccggctcattgaaaagaagcggcgtgatcgcatcaatgaatgtatcgctcagctgaaggatttgctgccagaacaccttaagctgactactctgggacacttggagaaagccgtggtcctggaactcactctgaaacacctcaaagcactgacggcgctgacggagcagcagcatcagaaaatcattgcactgcagaacggagagagatcgctcaagtcaccgatccagtcggacttggacgcatttcattcgggcttccaaacctgcgccaaggaagtgttgcaatacttgtcaaggttcgaatcctggactcctcgggagccgagatgcgtgcagctgattaaccatttgcatgcagtggcaactcagtttctgcctacccctcaactcttgacgcaacaagtgccgctgtccaaaggtaccggggccccgagcgcggcgggtagcgcggcagccccgtgccttgagcgcgccggccaaaaactggagccattggcgtactgtgtcccggtgatccagcggacccagccgtcggcggaactggcagctgaaaacgacaccgacaccgattcgggatacgggggagaagccgaagccaggccggaccgcgaaaaggggaagggtgctggggcctcccgcgtgactataaagcaagaacctccgggcgaggactcaccagcacctaagcgcatgaagctggattcgcgaggcggggggagcggagggggacctgggggcggggctgcagccgctgcggcagccctgctcggtccagacccagccgcggccgcagccctgctgcggccagatgctgctctcctgtcatcactcgtcgctttcgggggaggaggaggggccccattcccgcagccagcagcggcagccgctccattctgcctgcctttctgcttcctgagcccttcggctgcggctgcatacgtacagcccttccttgataagtcaggactggagaagtacctgtatcctgcagcagcagcagcgccatttccgctgttgtaccccggaatcccagcaccggccgccgctgccgccgctgctgccgcggccgctgcagcagcggccgcatttccatgtctcagctccgtgctctccccgccgccggaaaaggcaggagccgctgccgcaaccctgttgccccacgaagtcgcgccgctcggagcaccgcacccccaacacccgcatggacggacccaccttccgttcgcggggccccgggagccaggaaacccagagtcatctgcgcaggaggacccttcccaaccaggaaaggaagcccca

SEQ ID NO: 7794 - DNA, 1446 bp, synthetic construct
  misc_feature 1..1446: note = source = /note="Description of Artificial Sequence: Synthetic coding sequence"
  source 1..1446: mol_type = other DNA
atggacgaggggatcccacatctccaggagagacagctgttggagcacagggactttatcggtttggattactcgtcactctacatgtgtaagcctaaaagatcgatgaagagggatgataccaaagatacctacaagctgccgcacagactcatcgaaaagaaacgtcgagatagaatcaatgaatgcattgcgcaactgaaggatctcttgcctgaacatcttaagctcacgacccttggccacctggagaaggcagtcgtgcttgaacttactcttaaacaccttaaggcactcaccgcactgactgaacaacagcaccaaaagataattgcgctgcagaacggtgaacgatcacttaagagcccaatacagtcggatctggacgcattccactcgggatttcaaacctgtgctaaagaggtgttgcagtatctttcccggtttgagtcatggactcctcgtgaaccaagatgcgtgcagcttatcaatcacctgcatgcggtcgcaactcagtttttgccgactcctcagctcctgactcaacaagttcccctttccaagggaactggcgcaccttcggcagcaggttcagcagcagcaccttgtcttgaacgagcagggcaaaagctcgagcctctcgcttattgtgtgccagtgattcagcgaacccagccttcagctgagttggcagcagaaaacgataccgacaccgattcgggatatggtggtgaagccgaagcacgcccagatagggagaaggggaagggggcaggagcgtcccgagtcaccattaagcaagaaccacctggtgaagattcgccagcaccaaagcgcatgaagctcgactcccggggtggaggttcgggtggcggacctggcggtggtgcagccgccgccgcggcagccctccttggaccagacccggccgctgcggctgcgcttctgaggcctgacgcagcactcctgtcctcactggtggcatttggcggagggggaggagcaccctttcctcagccagccgctgccgccgcccctttttgtctgcctttctgcttccttagtccctcagcggcggcagcctacgtgcaaccctttcttgataaatcgggtcttgaaaagtacctttaccctgccgccgcagcggcaccatttcccctgctgtacccaggtattccagcaccggcagccgctgcggccgcggcagcggccgcagcagctgccgctgcagcgtttccatgcctttcctccgtgctttccccacctccggagaaggctggagcagccgcggcaaccctcctgccacatgaagtggcccccctcggtgcaccacatccgcagcatcctcatggtcggactcatctccctttcgcaggtccacgggaaccgggtaacccggaatcgtctgctcaggaggacccttcacaacccggcaaagaagcaccg

SEQ ID NO: 7795 - DNA, 1446 bp, synthetic construct
  misc_feature 1..1446: note = source = /note="Description of Artificial Sequence: Synthetic coding sequence"
  source 1..1446: mol_type = other DNA
atggatgagggaattcctcatttacaagagcggcagctgttagagcaccgcgacttcatcggactcgattacagttcattgtatatgtgcaagccaaaacgatccatgaagcgcgatgatactaaggacacgtacaagctcccccaccggctaatcgaaaaaaagaggagagatcgtataaatgagtgcattgcccaattgaaggacttgttgcctgagcaccttaaattaactacactgggacaccttgagaaggccgtggtactggagctgacgctaaagcacctgaaggcactgaccgccctgactgagcagcaacatcagaagataatcgcgctccagaatggcgagcggagcctcaagtcccccatccagagtgacctggatgccttccatagtggttttcagacctgcgcaaaggaggtgctgcaatatctgagccgcttcgaatcctggacgcccagagagccacgttgcgttcagcttatcaaccacctgcacgcagtggccacgcaattccttccgaccccgcagcttctgactcaacaggtccccctgtccaagggcacaggtgccccatccgctgctggctccgctgcagctccctgcctggagcgcgccggccagaagctggaaccgctggcgtattgcgtgcccgtgatccagcggacccagccgagcgctgagctggctgccgagaatgataccgatacagattcgggctatggtggtgaagcggaggctagacccgatagagagaagggcaagggagcaggagcttcgcgggttaccataaagcaggagcctcccggcgaggactctccagcgccgaagaggatgaaacttgattcccgcggcggcggcagcgggggcgggccaggaggaggcgccgctgccgctgcggctgccttactgggccccgatccagccgctgctgccgcactcctacgtccggacgccgctctgctgagctccttggttgcctttggtggaggaggcggcgcccctttccctcagcctgccgcagctgccgcccccttctgcctgccgttttgttttctgagcccctctgctgctgccgcgtacgtacagccctttttagataagagcggactggagaaatacctgtaccctgctgctgcggcggctccgttccccctcctgtacccggggataccagcccctgccgcagcggcggcagcggcggccgccgcagccgctgccgcggcggccttcccctgcctctcctccgtgctgagcccgcctccggaaaaggccggagccgcagctgcaacacttttgccccatgaggttgccccccttggtgctccgcatccccagcaccctcatggccgcacccatctccccttcgccggcccccgtgaaccgggcaaccccgagtcgtcggcgcaagaggacccaagccaaccaggaaaggaagcaccc

SEQ ID NO: 7796 - DNA, 1446 bp, synthetic construct
  misc_feature 1..1446: note = source = /note="Description of Artificial Sequence: Synthetic coding sequence"
  source 1..1446: mol_type = other DNA
atggatgaaggtatcccgcatctgcaggagcgtcagctcctggaacaccgcgatttcatcggccttgactactcgtccctctacatgtgcaagcccaagcgttctatgaagagagatgatactaaggacacttataagcttccgcaccgcctcatcgagaaaaagcgccgtgaccgtatcaacgagtgcatcgcccaattgaaagatctactacccgagcacctgaagctcaccactctgggccatttggagaaggctgttgtgctcgagttgaccctaaagcaccttaaggccctcaccgcccttacggaacaacagcatcagaagatcatcgctctacagaacggtgagcgctccctaaagtcccccattcagtcggatcttgacgctttccattccggcttccaaacgtgtgctaaagaggttttgcagtatctgtcccgatttgagtcttggactccacgcgagccgcgttgcgtccagttgataaaccacctacatgcggttgccactcagtttcttcccactccacaactgctcacccaacaggttccgctcagcaagggtaccggcgccccgagtgctgcgggctccgccgccgctccctgtttagaacgcgcgggtcagaaactcgagccactcgcgtactgcgttccggtgatccagcgcactcagccgtccgctgagctggcggctgagaacgacaccgataccgacagtggatatggaggtgaggcagaggcccgtcccgaccgggagaagggaaagggagcgggtgccagcagagttacgattaagcaggagcctcccggtgaggattccccggctcccaagcgtatgaagctcgacagccgtggcggcggttcgggcggaggtcccggaggcggagcagcagccgcagccgcagccctgctggggccggatccggcggctgcagccgccttgctccgtcccgatgccgcgctgctgtcgtctctcgtggcttttggcggtgggggcggggctcccttcccccagcccgctgccgctgccgctccgttctgtctacctttctgcttcttgtctcccagtgccgcggcagcctacgtacaacctttcctggacaaatccgggctggaaaagtatttgtaccccgctgccgctgcggccccgttccccctgctgtaccctggaattccggcacccgccgcggcagcagctgccgcagcggccgctgccgcggctgctgccgccttcccctgtctgagctcagtgttgagcccgcccccggagaaggctggtgctgccgccgccaccctgctgccgcacgaggtcgcccccctgggagccccccatccccagcacccccacggtcgaacccacctacccttcgcaggtcctcgcgagcctgggaaccctgagtcaagcgcgcaggaggatccctcccagcccggcaaggaggcacct

SEQ ID NO: 7797 - DNA, 1446 bp, synthetic construct
  misc_feature 1..1446: note = source = /note="Description of Artificial Sequence: Synthetic coding sequence"
  source 1..1446: mol_type = other DNA
atggacgaaggaatcccacacctacaggaacggcagttgctcgagcaccgagactttattggattagactactccagcctgtatatgtgtaagccaaagcggtccatgaaacgggatgacacaaaggacacatataagttacctcacaggctgatcgagaaaaagcgcagggatcgtatcaacgagtgcatcgcacagctcaaagacctgttacccgaacatctcaagctaacaaccctgggacatctggaaaaggctgtagtcctcgagttgacgctgaagcacctcaaggcactgacagccctcacggaacagcagcatcagaaaatcatcgctctccaaaacggagagcggagtttaaagagtccgatccagagcgacctggatgcctttcatagtggttttcagacatgcgcgaaggaggtcctgcagtacctgtccaggtttgaatcatggaccccccgggaaccacggtgtgtgcagctcattaaccatctgcatgccgtggctacacagttcctccccaccccacaactgctgacccagcaggttccccttagtaagggcactggcgctccaagtgcggcaggcagcgccgccgctccttgcttagagcgcgctggccagaagttagagcccctggcatactgcgtcccggtgattcagcgcacacagccatctgctgagttggcggctgagaacgacacggataccgattcgggatatggtggtgaagccgaagcaagacccgacagggaaaaaggaaagggagctggcgcgtcccgcgttaccattaaacaagaacccccgggagaggactctcccgcacccaagcggatgaaattagactcacgaggcggagggtccggaggcggtccaggaggaggagccgccgcagccgcggctgccctgctgggtccagatcctgctgcagccgcggctctgctgcgacccgacgcagctttgttgagtagcctcgtggctttcggggggggtggcggagccccatttccacagccagcggccgccgccgccccattctgtctcccgttttgctttctctcgccctcagccgctgcagcttatgtccaaccattcctggataagagtggcctcgagaaatacctttacccagccgcagcagccgcgcctttcccgctgctgtaccccggcatcccagcccctgctgctgcagccgccgctgcagccgcggccgccgccgctgccgcagcatttccatgcctcagttcggtcctctccccacctccagagaaggccggagccgctgcggctactctgctgccgcatgaggtggcaccgctgggagccccacatccccagcacccacacggtagaacacatctgccgttcgctggcccccgggagcctgggaaccccgagtcctcagcccaagaggacccatcccagcctggaaaggaggctcct

SEQ ID NO: 7798 - DNA, 1446 bp, synthetic construct
  misc_feature 1..1446: note = source = /note="Description of Artificial Sequence: Synthetic coding sequence"
  source 1..1446: mol_type = other DNA
atggatgaagggatcccccatctccaggaacgccagctcttagaacatcgggatttcattggactggattactcttccctgtacatgtgcaaaccaaaacggtcaatgaaaagagatgatacaaaagatacatataaactcccccatcggctgatcgaaaaaaaaaggagagacagaatcaatgaatgcatcgctcagcttaaagatctactcccagaacaccttaaactcactacactgggacacttggaaaaagcggtagtgttggagttaactctcaaacatttgaaagctctgactgccctcactgaacagcagcaccagaagattatcgctttacagaacggagagcgctctcttaaatcaccaattcagagtgacctggatgccttccattctggattccagacgtgcgctaaagaagttcttcagtatttgtccagattcgaatcatggacacctagggaaccaaggtgtgttcaactgataaatcacctccacgctgtagccactcagttccttcccactcctcagctcctgacacagcaggtcccccttagtaaaggaactggggccccctctgcggcaggaagtgctgctgcaccttgcttagaacgggccgggcagaaactggaaccactcgcctactgtgtacctgtcatacagaggacacagccttcggctgaattagccgcggaaaatgatactgatactgattccggatacgggggggaggccgaagccaggcctgacagggaaaaaggaaaaggggcaggggcctcccgcgtcactattaagcaagaaccacccggagaagattctcccgcacctaagcggatgaagctagatagtcgcggagggggaagtggaggagggcctgggggaggagccgctgccgcggccgccgccctcctcgggccagatccagctgctgcagcggccctactgcggcccgacgctgcactgctttcgtccctggtcgccttcggaggaggggggggagctccctttccccagcccgccgcagccgcagcccctttctgccttccattctgttttctatcaccatctgctgcagcagcttacgtgcagcctttcttagataaatctggactcgagaaatacctctaccccgcagccgccgctgcccccttccctctgctctatcccggaatacctgcccctgctgcagcagctgcagctgccgctgctgcagccgcagctgctgcagctttcccctgtctcagttcagtcctgtccccaccccccgaaaaagcaggagcagccgcagccactctgctgccccatgaggtagctccccttggagccccccaccctcagcacccccacgggcgaactcatctgccttttgccgggcccagggagccaggaaaccctgagtcatctgcacaggaggatccatctcagcctggaaaagaagctcct

SEQ ID NO: 7799 - DNA, 1446 bp, synthetic construct
  misc_feature 1..1446: note = source = /note="Description of Artificial Sequence: Synthetic coding sequence"
  source 1..1446: mol_type = other DNA
atggatgagggaataccacacctacaggagcgccagctcctcgagcaccgagattttattggcctggattactcctccctatatatgtgtaaaccgaagcggtctatgaaacgcgacgatactaaagatacatacaaattgccccataggcttatcgaaaaaaaacggcgcgaccgaattaatgaatgtatagcccaattgaaggacctgctgcccgaacacctgaaattaactacactgggacatctcgaaaaggctgtggttcttgagttgactctgaagcacctgaaggctcttactgcactgactgagcagcagcatcagaagataatagctttgcaaaacggagagcgcagtttgaagtcccccatccagagcgacctcgatgcgttccacagtggttttcagacgtgcgctaaagaggtcctgcagtacttgtccagatttgagagctggacaccacgtgaaccgcgctgcgttcagctgattaatcatttgcatgcagtagctactcagtttctgccgacacctcagctcctgactcagcaggtgccattgagcaaaggcaccggcgcgcctagtgccgccggtagtgcagccgcaccttgtttggagagagcaggccaaaagctggaacccctcgcctattgcgtaccagtgatccaacgcacgcagccctcagctgaactggccgcagaaaacgataccgacaccgatagcggctatggcggggaggcagaggcgaggcctgaccgcgaaaagggtaagggcgccggtgcctccagagtgaccatcaagcaggagcctcccggcgaagacagcccagcccctaagcgaatgaaactggatagccgaggaggcgggtctggcggcggccccggcggtggagccgcagcagccgccgcagcgctcctaggaccggatcccgctgcggctgccgccctcctgcgtccagacgctgctttactgagctcactggtcgctttcgggggaggtgggggcgcacctttccctcaaccagctgctgccgcagcgcccttttgtctccccttttgctttctgtcaccctctgccgctgcagcatacgtgcagccgttcctcgataagtcaggccttgaaaagtatctctatcccgccgctgcggccgcaccatttcctcttctgtaccctggaatccccgctcctgccgccgcggcagcggccgctgccgcagccgccgccgccgcagcagccttcccatgtctctcctcagtactttcacctccgcctgagaaagccggggccgctgccgcaacattactcccccacgaagttgcacctctgggagcccctcatcctcagcacccccacgggaggacgcaccttccctttgccgggcctcgcgaacctggtaacccagagtccagtgcacaggaggaccctagccagcccggcaaggaagcgccc

SEQ ID NO: 7800 - DNA, 1446 bp, synthetic construct
  misc_feature 1..1446: note = source = /note="Description of Artificial Sequence: Synthetic coding sequence"
  source 1..1446: mol_type = other DNA
atggacgagggaatacctcatttgcaggaaaggcagctgttggagcatcgggatttcatagggctggactacagctctctgtatatgtgcaagcctaaacgtagtatgaagcgagatgataccaaggatacctacaaactaccgcaccggctgatcgagaagaagcggagggaccgcattaacgagtgcatagctcagctgaaggatctgctgcctgagcatctgaagctgactacgctcggtcacttggagaaggcagtggtgctggagctcacactgaagcacctcaaagctttgactgctctgaccgagcagcagcatcagaagatcatcgccctgcagaatggcgagcgcagcctgaagagcccaattcagagcgacctcgacgctttccacagcggtttccaaacttgcgccaaagaggtcctgcaatatctatctcgctttgaaagctggacgccccgcgagcctcgctgcgtacagctaatcaaccatctgcacgcagttgccactcagtttctaccgaccccccagctcttgacccagcaggtaccactgagcaagggcactggcgctccgtctgcggcaggaagcgccgctgccccatgcttggaacgggccggtcagaaactggaaccgttggcctactgcgtgcccgtaatacagagaacccagccatctgccgaactggccgccgaaaacgacaccgatactgactccggatacggaggcgaggccgaagctaggccagaccgtgaaaaaggcaaaggagcgggggcttctagggtgacgatcaaacaagagcccccaggggaggattcccccgcgccgaagaggatgaagttggactcaaggggaggaggatccgggggaggacctggtggcggagccgccgctgcagctgccgccctgctgggacccgacccagctgccgccgccgctctgctgagacccgacgccgctctgttaagttcattagtcgcatttggaggcgggggcggggcaccatttccccagccagctgccgccgccgctcctttctgtttgccattttgttttcttagccctagcgctgctgcggcttacgtgcagccattcctggacaagagcggtttggagaagtacctgtaccctgctgccgcagcggccccctttccactgctgtacccaggtatacccgctcccgctgccgccgctgccgccgctgcagccgccgctgcagctgcagccgcatttccctgcctctccagcgtcctgtcccccccacccgagaaagctggagccgcagcggccacactgctccctcatgaagtggcaccactaggcgccccccatccccagcacccccacggcaggacgcacttgccattcgccgggccacgtgaaccaggcaacccagagagtagtgcccaagaagatcctagccagcccggaaaggaagcacct

SEQ ID NO: 7801 - DNA, 1446 bp, synthetic construct
  misc_feature 1..1446: note = source = /note="Description of Artificial Sequence: Synthetic coding sequence"
  source 1..1446: mol_type = other DNA
atggacgaaggcattcctcacctgcaagagcggcaacttcttgaacaccgcgattttatcgggctcgattactcttcactttatatgtgcaaacccaaaagatctatgaaaagggatgatacaaaagatacctataagctgccacatagattaatcgagaagaaaagaagagacagaattaatgaatgcattgctcagctgaaggatttattgccagaacaccttaaactaacaacactcgggcatcttgagaaggcagtggttttagagcttactcttaagcacttaaaggctcttaccgccctgacagaacaacagcaccagaagattattgcacttcaaaatggcgaacgtagtcttaagtccccaattcaatcagatttagatgctttccactcaggctttcagacatgcgccaaagaggtgctccaatatctcagccgcttcgaatcatggacccctcgcgaacctaggtgtgtgcagctcatcaaccaccttcacgctgttgctacccaattcttgccaacgccccagttattgacccaacaagttccattatcaaagggcactggcgccccttccgctgctgggtccgctgctgcgccctgtctggagcgcgcgggtcagaaattagagccacttgcatattgtgtacccgttatacaaagaacacagccttccgccgagttggctgcggagaatgatacagatacagattccggctatgggggagaggctgaggctcgccctgacagggaaaaaggtaagggtgctggtgcgagcagggttacaattaagcaggagccaccaggggaggattctccagcccctaaacgtatgaagctagacagcaggggtggtgggtcaggggggggcccaggaggcggcgcagcagccgcagcagcagcattgcttgggccagatccggcggctgcagctgctctattgcgtccggacgctgccttgctctctagccttgttgcttttggtggcggtggtggtgcccctttcccacagcctgccgcggctgctgctcccttctgtttgccattttgctttttatcaccatctgctgcagctgcatatgtccagccattcctggataaaagtggattggagaagtacttataccccgcggctgcagccgctcctttcccacttttgtatcctggcattcctgcacctgccgctgccgctgcagcggcagctgccgcggctgcagctgcagcggcgttcccgtgtttaagtagtgtattgtctcctcctcctgagaaagctggagcagctgctgctacactacttccgcacgaggtggcacctcttggagctcctcaccctcaacacccacacggaaggacccatctaccattcgctggcccaagagagcctggaaatccagagtcgtcagctcaagaggatccgagccaacccggtaaagaggcacct

SEQ ID NO: 7802 - DNA, 1446 bp, synthetic construct
  misc_feature 1..1446: note = source = /note="Description of Artificial Sequence: Synthetic coding sequence"
  source 1..1446: mol_type = other DNA
atggatgaaggcattccacacctgcaagaaagacaacttctcgaacatagagacttcattgggctggactactcttctctgtacatgtgtaagcctaagcgctcaatgaagcgcgatgataccaaggatacgtacaaactgccgcacagactcattgaaaagaagaggcgggacagaatcaacgaatgtatcgcacaacttaaggatctgctgccagagcacctgaagctgactactctggggcatcttgaaaaggccgtggtcctcgaactcacccttaagcatctcaaggccctcaccgccctgactgaacaacaacatcaaaagattatcgcactgcagaacggtgaaagatcgcttaaatcccctattcaaagtgatcttgacgcattccactccggtttccagacttgtgcaaaggaggtgcttcaatacctgagcaggttcgaatcttggaccccacgcgagcctcggtgcgtccaactgataaatcacctgcatgcggtggcgacccagtttctgcccactccacagctcctcacccaacaggtgcctctttcgaaagggaccggagcaccatcagccgcgggaagcgcggcagcaccatgccttgaacgagcggggcagaagctggaaccacttgcatactgtgtccctgtgatccagagaactcaaccatcagccgagctcgcagcagagaacgataccgacactgactcagggtacggaggagaggccgaagcacgtcctgatcgggagaagggcaagggagccggagcatcacgcgtgacgattaaacaggagccacctggtgaagattcgcctgcgccaaagagaatgaagctggactccaggggaggcggatcagggggtggtccaggaggtggggctgcggcggccgctgccgcactgcttggacctgatccggcggcagccgccgcgcttctgcgtcccgatgcagccctgctttcatcgctcgtggctttcgggggtgggggaggtgcaccattccctcagcccgcagcagctgcagctcctttctgtctgccattttgtttcctgtcgcctagcgcggctgcagcgtacgtgcaacctttccttgacaagtcggggctcgagaagtacctctatcctgctgccgccgccgctccttttccacttctgtacccaggaattcccgccccagccgcagccgctgccgccgcagcagcagcagcggccgcggcagctgcatttccctgtcttagctcagtgctgtccccaccccctgagaaagcgggagcggccgcagcaacccttcttccccatgaagtggcaccattgggcgcaccacatccccaacaccctcacggacgcacccatcttcctttcgcaggtccgagagaaccaggtaaccctgagtcgtccgcccaggaagatccctcgcagccaggaaaggaagcacca

SEQ ID NO: 7803 - DNA, 1446 bp, synthetic construct
  misc_feature 1..1446: note = source = /note="Description of Artificial Sequence: Synthetic coding sequence"
  source 1..1446: mol_type = other DNA
atggacgagggcattcctcatctgcaggagcgacagctgctggagcatcgggatttcattggtctggattacagtagcctttacatgtgcaaaccaaagagatccatgaaacgagacgatacaaaggatacttataaactgcctcaccgcctgattgagaagaagcgaagagatcgcattaatgagtgcatcgctcagttgaaggatcttctccccgagcatcttaagctgacaacactgggccacctcgagaaagccgtcgtgcttgagttgactctgaaacacctcaaagcccttaccgcactgaccgaacagcaacaccagaaaataattgcacttcaaaacggagaaaggtccctgaagagccctattcaaagcgaccttgacgcttttcacagtggcttccagacttgcgccaaggaagtgctgcaatatctttctcgcttcgaatcatggacacctagggagccgaggtgcgtccagttaatcaatcatctgcatgccgtggcaacacagtttctccctacaccccagttgcttactcagcaggtacctctctctaagggaaccggcgccccatctgccgccgggtcagcagccgctccgtgtttggaacgcgcaggccaaaagttggagcctttggcttattgcgtcccagtgatccaaaggacacagccttctgcggaactggccgccgaaaatgataccgacactgacagtggttacggcggcgaagctgaagctaggcccgatagggagaagggaaaaggtgcaggcgcatcccgcgtgaccatcaaacaagagccaccaggcgaggatagcccagcgcctaaacgcatgaaattggactctagaggcggcggaagcggcgggggtcccggggggggggccgcggccgctgctgcagcacttctgggccctgaccccgcggcggccgccgcgttgttgaggcccgatgccgctctgctgagcagcctggtcgcttttgggggcggaggaggtgctcctttccctcaacctgctgctgcggcagcccctttttgcctgcctttctgctttctgagcccctcagctgctgcagcatacgtgcaaccatttctggacaaaagcggactcgagaaatacctgtaccctgcggccgccgccgctccctttcctttactgtacccaggtatcccagcaccggcagcggcggctgccgccgccgctgcagccgctgccgcagctgcagcgtttccttgtctgtcctccgtgttgtccccaccaccagagaaagcaggagccgcagccgccacactcctcccccatgaagtagcccctctgggggccccccacccccagcacccgcacggcaggacccaccttccattcgccggtcctagggagccgggaaatcctgaatcctctgcacaggaggatccttcccaacccggtaaagaggccccc

SEQ ID NO: 7804 - DNA, 1446 bp, synthetic construct
  misc_feature 1..1446: note = source = /note="Description of Artificial Sequence: Synthetic coding sequence"
  source 1..1446: mol_type = other DNA
atggatgagggaatcccccatctgcaggaacggcagctcctcgaacaccgagactttatcggtctggattactcgtcactgtacatgtgcaagccgaagcggtcgatgaaacgggacgacaccaaagacacctacaagctgcctcatcgccttatcgaaaagaaacgccgcgaccggatcaacgagtgcatcgcccagctgaaggatctcctgcctgagcacctgaaactcactactctgggacatctggaaaaggctgtggtgttggaacttactctgaagcacctcaaggcgctgactgcgttgactgaacagcaacaccaaaagattatcgccctgcaaaacggagaaagatcgctgaaatccccaatacagtccgacctggatgcgttccattcaggattccagacttgtgccaaggaagtgctccagtacctgagccgcttcgagtcatggactccgagagaaccacggtgtgtccagctcatcaaccaccttcatgctgtcgccactcaattcctgcccactccacaactccttacccagcaggtgccactctccaagggaactggtgcgccatccgccgccggatccgccgcggctccatgccttgagagagccggacaaaagttggaaccactggcatactgcgtcccggtgatccagcgcacccaacccagcgcggagctcgcagccgaaaacgacacggacacggacagcggctacggaggtgaggccgaagccaggccggatcgggaaaaaggaaagggagcgggagcgtcaagagtgacgatcaagcaagaacctcccggtgaagatagcccggccccgaagcggatgaagctggactcgcgcggcggaggaagcggtggaggacccgggggcggtgcggcagcagccgctgcagcactcttgggaccagatccggcggccgcggctgcactcctgcggccggacgccgccctgttgtcgagcctcgtggcgttcggagggggcggaggtgcgccgtttccgcaacctgcggccgccgctgcaccgttctgcctgccattctgttttctttcgccatcagccgcggcggcatacgttcaaccattcctggataaatcggggctggagaaatacctgtatcctgccgccgccgccgcgccgttccctttgctgtacccgggcatccctgctcccgcagcggccgcagccgcagcggcagcggcggcggctgccgcggcggccttcccttgtctttcatccgtgctgtcaccgccgcctgagaaggccggagctgcggccgccaccctcctgccgcatgaggtcgcaccgctgggcgcccctcacccacagcaccctcacggaagaacccatcttcctttcgccggaccgcgggaaccggggaacccggaatcatcggcacaggaggaccctagccaaccggggaaggaggcaccg

SEQ ID NO: 7805 - DNA, 1446 bp, synthetic construct
  misc_feature 1..1446: note = source = /note="Description of Artificial Sequence: Synthetic coding sequence"
  source 1..1446: mol_type = other DNA
atggacgaaggaatcccgcacctgcaggaacggcagctcctggaacatcgcgactttatcgggctggactactccagcctgtacatgtgcaagcctaaacgcagtatgaagagggacgataccaaggatacttacaaactgccacaccggctcatcgagaaaaagaggagagacagaatcaacgaatgtatcgcacagttgaaggaccttctgccggaacacctgaaactcaccactttgggtcacctcgaaaaggccgtcgtgctcgagttgaccctcaaacaccttaaggctctgactgccctcaccgaacaacagcatcagaagatcatcgcactgcagaacggagagcggagcctcaagtccccgattcagtccgatctggacgcttttcattcgggatttcagacctgtgctaaggaagtgcttcaatacctgtccagattcgagtcctggaccccaagagaaccgcgctgcgtgcaacttatcaaccaccttcatgccgtggctacccaattcctgcccacgccgcagctgctgacccagcaagtccccctgtcgaagggaacgggagcaccctccgccgcaggttccgctgcggcaccgtgtctcgagcgggctggacaaaagctggaacccctggcttactgcgtcccagtgatccaacgcacgcagccatcagccgaactcgctgcggagaacgacactgatactgactcgggatacggcggcgaagccgaagctagaccggacagagaaaagggaaagggcgctggagcttcacgcgtcaccatcaagcaagagccaccgggagaagattccccggccccgaagcgcatgaaacttgattcacgcggtggagggtctggaggaggacctgggggaggggcagccgcagcagccgccgcattgctgggacctgatcctgctgctgccgccgcactgctgcggccggacgcggcactgctctcttcacttgtggctttcggaggaggcggaggagcaccattcccgcaacccgccgcggccgccgcccctttctgtctgcctttttgcttcctgagcccaagcgcggcggctgcgtacgtgcaaccgttccttgacaagtcaggactcgaaaagtacctctacccggctgcggcagctgcgccgttcccactgctgtacccgggtatcccggccccggccgccgctgcggcggccgcagcggccgccgcggctgccgccgcggcctttccgtgtctgagcagcgtgctcagccccccacccgaaaaggccggcgcggcggcggcaactctgctgccccacgaggtggccccactcggagcgccgcaccctcagcatccgcatggaaggacccacctgccatttgctgggccacgggaaccgggaaaccctgaatcctcggcacaggaggatccgtcgcaacccggaaaagaagcccca

SEQ ID NO: 7806 - DNA, 1446 bp, synthetic construct
  misc_feature 1..1446: note = source = /note="Description of Artificial Sequence: Synthetic coding sequence"
  source 1..1446: mol_type = other DNA
atggatgaaggaattcctcacctgcaagagagacagcttctggaacatagggactttatcggtctggactactcgagtctctacatgtgtaaaccaaagcgatcgatgaagagagatgacaccaaggatacttacaaacttcctcatcggctgattgagaagaaacggagagacagaatcaacgagtgtattgcacaattgaaggatctgctcccggaacatctgaagctgactactttgggacatctcgaaaaggcagtggtcctcgaacttaccctcaagcatctcaaggcgctgaccgccctgaccgaacagcagcatcagaagataatcgctcttcagaatggagaaagatccctgaaatcgcccattcaatcggatctcgatgcattccactccggatttcagacttgcgcaaaagaagttctccagtaccttagccggtttgaatcgtggaccccacgcgaacccagatgcgtgcagcttatcaatcacctgcacgcagtggcaactcagtttcttccaaccccccagcttttgactcagcaagtgccccttagcaaagggacgggagcaccctccgccgctggatcagcagcagcgccgtgtctggaaagagcagggcaaaagctggaaccactggcatactgcgtgccagtaattcagcgcacccaaccctccgctgaacttgcagctgaaaacgataccgacaccgattcgggatacggcggtgaagcagaggcaaggccggacagggaaaaaggaaaaggtgctggggcctcgagagtgactataaagcaggagcctccaggggaagattcaccagcccctaaaaggatgaaacttgattctcgtggaggcggttcaggaggtggacctggcggtggggctgcagctgcggcagccgcacttcttgggcctgatcctgcggcagctgcagcactgctgcgacctgacgcagctcttctgtctagccttgtcgccttcggcggcggaggcggagcacctttccctcaacctgcggccgccgcagcacctttttgtctgcccttttgcttcctgagcccaagcgcggcggcagcatacgtgcagccattccttgataaaagcggtcttgagaagtacttgtaccccgcagcggcggcggcgccatttcctcttctgtacccagggatcccagcccctgcagccgctgcggcggctgcagcagcagccgcagcagccgccgctgcatttccttgccttagctcagttttgtccccacctcctgagaaggcaggagccgcagcggcgacccttctgcctcatgaggtggcccctcttggggctcctcacccgcagcatcctcacggaaggactcacctcccatttgcaggtccaagggaaccaggcaaccctgaatcgtccgcccaagaggacccatcgcaaccgggcaaggaagcaccc

SEQ ID NO: 7807 - DNA, 1446 bp, synthetic construct
  misc_feature 1..1446: note = source = /note="Description of Artificial Sequence: Synthetic coding sequence"
  source 1..1446: mol_type = other DNA
atggacgaagggatccctcacttgcaggagcgacagttgctcgagcaccgagatttcataggcttagattattcgtccctgtacatgtgcaaacccaaacgaagcatgaagagggacgataccaaggatacatataagcttccccaccgactgattgaaaaaaagagaagagacagaattaacgagtgtattgcccagcttaaggacctgctgcctgagcacttgaagcttactacactggggcatctcgagaaagctgtggttctagagttgacattgaaacacctgaaagctctaacggctctgacggagcagcaacaccagaagataatcgccctccaaaatggcgagcgatcattgaagagccctatccaatctgacctggatgcatttcattccgggtttcagacctgcgctaaggaggttttgcagtaccttagccgattcgagtcttggactccccgcgaaccacggtgcgtgcaactcatcaatcatctgcatgccgtggccacccagtttttgcccacacctcagcttctgacgcagcaagtcccactgtctaaaggcaccggcgccccttccgctgccgggtctgctgctgccccctgccttgaaagggccgggcagaagctggaaccactggcctattgcgtgccagtgattcagagaacccagcctagcgctgagctcgcggcagaaaatgacacggacacggatagcgggtatgggggcgaagccgaagccaggccagatagagagaagggaaagggtgccggcgcatcaagagttactatcaaacaggaacctcctggggaagactccccagctccaaagcgaatgaaactggattccagaggagggggatcaggcggaggcccaggaggaggcgccgctgcggcagcagcagcactcttgggaccagaccctgcagcggcagccgccctgctgagaccagatgcagcactgctgtcatctttggtcgcattcggcgggggggggggagcgccttttcctcagcctgcggcagcggccgcacctttctgcctgcctttctgcttcttaagcccctccgccgcggcagcctacgtccaacctttcttggataagtctggacttgagaagtacctataccctgcggcggcggccgctccattccctttgctctatcccggcatacccgcccccgccgctgccgcagctgctgccgcggctgctgcagcggcggctgcggcttttccatgtcttagctcagttctgtctccaccccctgaaaaagctggagcggccgccgcaaccttactgccccacgaggtagcgccactcggagccccccatcctcagcacccgcatgggcggactcacctaccatttgctggtcctagggagccagggaaccccgaaagtagtgcccaggaagaccccagccagccaggcaaagaggccccc

SEQ ID NO: 7808 - DNA, 1446 bp, synthetic construct
  misc_feature 1..1446: note = source = /note="Description of Artificial Sequence: Synthetic coding sequence"
  source 1..1446: mol_type = other DNA
atggatgaaggaatccctcacttacaagagagacagctgctggaacacagagattttataggcctggactattcctctctgtatatgtgtaagcctaagcgttcaatgaagcgggacgacactaaagatacatacaaactgcctcaccggttgatagagaagaagagaagagacaggatcaacgagtgtattgcccaattgaaggatctgcttccggaacatctcaaactgaccactctgggacacctcgagaaagctgtggtgttagagttaacgctaaagcacctcaaagcactcacagctctgaccgaacagcagcatcagaagatcatagcgctccagaatggcgagcggtctctcaaaagcccaatacaatccgatctggacgcattccactccggctttcaaacctgtgcaaaagaggttctccaatacctgagccgattcgaatcttggacccctcgagagcctaggtgcgtgcaactgatcaatcaccttcacgccgttgcaacccaattcctaccgacgccacagctactcacacagcaggttcccctgtccaaggggaccggtgcacctagcgccgctgggtccgctgctgccccctgcctcgagagggccggacagaagttggaaccgttggcgtactgtgtgcccgttatccaacgcacgcagcctagcgccgaattagctgccgaaaacgacacagataccgactcgggctacggaggcgaggcagaagcccgacccgatcgggaaaagggaaagggcgctggggccagccgggtgacaataaagcaagaacctcccggagaagactcccccgcaccaaagcgaatgaaattggactctaggggaggcgggtctggtgggggcccaggaggcggcgccgccgccgccgctgccgctctgttggggcccgaccccgcagctgccgctgcacttctccgtccagacgccgcgctgctctcttccctagtggcattcggtgggggtggaggagcgccctttccccaacctgccgcagctgccgcacccttctgtctgccattctgtttcctgtccccatcagccgccgccgcctatgtgcaacccttcctcgacaagagtgggctggaaaaatacctgtacccagcagccgctgccgcaccatttcccctgctgtaccccgggatacctgcgccggcagctgcagcagctgccgcagcggccgccgctgctgcagcagcggcctttccatgtttatccagcgtgcttagccccccgcccgaaaaagctggagccgctgctgctacgctgctgccccacgaagtagcaccactaggcgcccctcatcctcagcaccctcatgggcgtactcatttacccttcgcgggaccccgcgaaccgggcaacccagaaagctccgcgcaggaagaccctagccagcccggaaaagaggcgcct

SEQ ID NO: 7809 - DNA, 1446 bp, synthetic construct
  misc_feature 1..1446: note = source = /note="Description of Artificial Sequence: Synthetic coding sequence"
  source 1..1446: mol_type = other DNA
atggacgaaggcatcccccacctgcaggagcggcagctcctggagcaccgggacttcatcggtctggactactcgagcctgtacatgtgtaagccgaagcggtccatgaagagagacgataccaaggatacttacaaactgccacaccggctgattgaaaagaagaggagagatcgcatcaacgagtgcatcgcccagctgaaagatctcttgccagaacatctgaaattgactaccctcggacatctggaaaaagcggtggtgctggaactgaccttgaagcacctgaaggcgctcaccgcgctgaccgagcagcagcatcagaagatcatcgctttgcagaatggcgaacggtcacttaaatccccgatccaaagcgatctggacgcatttcactctggcttccagacctgcgccaaagaggtgctccagtacctcagccggtttgagtcatggaccccccgagaaccgaggtgcgtccaactgatcaaccatcttcacgccgtggcaacccagttcctcccgacgccgcagttgctgactcaacaagtgccgttgtcgaagggaactggggcaccttccgcagccggctcggccgccgccccatgcctggaacgcgcgggacagaagctcgagccattggcatactgtgtgcctgtcatccagcggactcagccatcggcggaactggcagccgaaaacgacactgatactgacagcggatacggtggggaagcggaggctcgcccggaccgggaaaaggggaagggagcgggagctagccgcgtcactatcaaacaggaaccaccgggggaggatagcccagcaccaaagcggatgaaacttgacagccgcgggggtggcagcgggggagggccgggtggaggcgccgcagcggcagccgcagcactgctggggccagatcctgctgcggcggcagcccttctgcgcccggacgccgccctgctgtcgtcccttgtggcatttggaggagggggaggggcaccattcccgcagcctgccgccgctgcagccccgttctgcctgccgttttgcttcctgtcgccttccgcggcggctgcgtacgtccagccgttcctggacaagtcaggattggagaagtacctgtacccagccgccgccgccgcaccgtttcccctgctctaccctggcataccagccccagcagcggcagcagcagccgcggcggcggccgcagccgctgctgcggcctttccttgtctcagctcggtgttgagcccgcccccggaaaaggccggggcggcagctgccaccctgctgcctcacgaagtggcaccattgggtgcgccacatccgcagcatccccacggacgcacgcatctgccgtttgcgggaccgagagagccgggcaatcccgaatcatcggctcaagaggacccttcgcagcctggaaaggaggccccg

SEQ ID NO: 7810 - DNA, 1446 bp, synthetic construct
  misc_feature 1..1446: note = source = /note="Description of Artificial Sequence: Synthetic coding sequence"
  source 1..1446: mol_type = other DNA
atggatgagggcatcccgcacttgcaagagcgccaactgctcgagcatcgagatttcatcggcctggactatagcagcttgtacatgtgtaagcctaaacgctcaatgaagcgggacgataccaaagacacttacaagctcccgcacagattgatcgaaaagaagagaagagacagaatcaatgaatgcatagcacagctcaaggacctgctgccggaacacctgaagctgactaccctcggacacctggaaaaggcggtggtcctggaactcacccttaagcatcttaaggccctgactgccctgactgagcagcaacatcaaaagattatcgcgctgcagaatggagagcgctcccttaaaagcccaatccagagcgatctcgacgctttccactcaggatttcagacctgcgcgaaagaggtgcttcagtacctctcgagattcgagagctggaccccgcgcgaacctcgctgcgtccaactcatcaatcatttgcatgcagtggccacgcaatttcttccgaccccgcagctcctgacccaacaggtgccactgagcaagggcactggcgcaccttcagcggcaggatccgcggccgcaccttgcctggaaagagcaggacagaagctggaaccattggcctactgcgtcccagttatccagcgcactcaaccctccgccgagcttgccgctgagaatgataccgacactgatagcggatacggtggagaggctgaagccagacctgaccgggaaaaaggaaagggagcgggggcttcaagggtgactatcaaacaggaaccgccaggggaggacagccctgcacctaagcgaatgaagctggactcgcggggcggcggatcggggggcggacccggagggggagccgcggctgccgccgccgctctgctgggccccgatcccgccgcagcagctgcactgctcagacccgatgccgcgttgctttcttcgctcgtcgcatttggaggtggaggcggggccccatttccacagcctgctgctgccgcagcacccttctgcctgccattctgttttcttagccctagtgcagcggccgcgtacgttcagccctttctcgacaagtcaggactggagaaatacctgtacccggcggctgcagcagctccatttccactcctgtacccgggcatcccggcccctgcagcggctgcggctgccgcggctgcagctgccgcagctgccgccgcgttcccgtgcctctccagcgtgctgtcaccgccgccggaaaaggccggagccgccgctgccaccctgctgcctcacgaggtggccccgctgggagccccacacccgcagcacccgcacggacggacccacctcccgttcgccggtccgcgcgagccggggaatccggaaagctccgcgcaagaggacccatcacagccaggtaaagaagctccg

SEQ ID NO: 7811 - DNA, 1446 bp, synthetic construct
  misc_feature 1..1446: note = source = /note="Description of Artificial Sequence: Synthetic coding sequence"
  source 1..1446: mol_type = other DNA
atggatgaaggtatcccacatctccaagaacgacaactgctcgagcatagggactttatcgggcttgattacagctcgctgtacatgtgcaagccaaagagatccatgaagcgcgacgatacgaaggatacgtataagctgccgcacaggctgatagaaaagaaacggcgcgatcgtataaacgaatgtattgcccagcttaaggacctcttgcccgagcacctgaagttgaccacgttgggccatttggaaaaggcagtcgtccttgaactcaccctgaaacatctcaaagcgctcactgcgcttaccgaacaacaacaccagaaaatcattgcgctccagaacggtgagcgatccctcaaatcccctattcaatcagacctggatgcatttcattcagggtttcaaacttgtgcgaaggaggtgcttcagtacttgtcacgcttcgaaagctggaccccacgagaacccaggtgtgtgcaactgatcaaccatctgcatgccgtcgccactcaattcctgcctacccctcaattgcttacccaacaggtgccactttcgaagggaactggagctccctcggcggccggctccgccgctgcaccatgtctggaaagggcaggccagaagctcgagccgctcgcttactgtgtgcctgtcattcagcggacccagcccagcgcagagctcgctgcagagaacgacactgataccgattcaggatacggtggtgaagcagaggcacggcccgatagagagaaaggaaagggagcaggcgcaagtagagtgaccattaagcaggaacctccaggagaagatagccctgcccctaagagaatgaaactggattcgaggggaggaggctcgggtggcgggcctgggggaggagcagcggctgcagctgccgctctgcttgggccggaccctgccgcagctgcagcgcttctgaggccggatgcagcacttcttagctccttggtggcatttggtggtgggggaggtgctccgtttccgcagccagcagccgcagcagccccattttgcttgcccttctgttttctgtcaccgagcgcggccgccgcatatgttcagcctttccttgataagtctgggcttgagaagtacctgtacccggctgccgcagcagcacctttccccttgctgtacccgggaattccagcacccgccgcagcggctgcggccgcggctgccgctgccgcagcggcggcagcatttccatgcctttcttcagtgttgtcaccacctcctgaaaaggcgggtgccgcagccgcaacgcttctgccccacgaagtggctccacttggagcacctcacccacaacatccacacggccggactcacctcccttttgcaggccccagggaacctggaaatccggaaagctccgcacaggaggatccatctcaaccgggaaaagaagcacct

SEQ ID NO: 7812 - DNA, 1446 bp, synthetic construct
  misc_feature 1..1446: note = source = /note="Description of Artificial Sequence: Synthetic coding sequence"
  source 1..1446: mol_type = other DNA
atggacgagggcatcccccatcttcaggaaaggcagctcctggaacaccgtgattttataggacttgactactctagtctgtacatgtgcaaacctaaacggtctatgaagagagacgacactaaagacacatacaagctgccccataggctaatcgagaagaaaaggcgggacaggatcaacgaatgtatcgcacaactcaaagacctcctccccgaacacctcaagctgacgaccctgggacaccttgagaaggccgtcgtgcttgagttaactctgaagcatttgaaggccctgacggccctgacagagcagcagcaccagaagataattgctctgcagaatggggagagatcactcaagagtcctatccagtctgacctggacgcctttcattcaggattccagacgtgtgcaaaggaggttctgcagtacctgtccaggtttgagtcttggacaccacgcgagccccgttgtgttcagttaatcaaccacctccacgcagttgcgacacaattcttgccaacgccccaactgctgacgcaacaggtgcccctaagcaagggaacaggagctccatcagctgccggctctgctgctgcaccctgcctcgaacgtgcagggcagaagcttgagccactcgcgtactgcgtccctgtgattcagcggactcagcctagcgccgagctggctgccgagaacgataccgacaccgacagcggatatggcggcgaggccgaggcgcgacccgaccgcgagaagggtaagggggccggcgcgagtagggttactatcaaacaggagccccccggggaggattctcctgcccccaagcgcatgaagctggactcacggggaggcggcagcgggggcggcccaggggggggggcggccgccgcggccgccgcactgcttggccctgacccggctgccgccgccgcacttctgcggcccgacgccgccctgctttctagcctcgtggcatttgggggtggaggaggcgccccatttccacagccagccgcagcagccgcgccattctgccttcctttttgcttcctctccccttctgcagctgcagcgtacgtgcagccctttctggataagtcaggtcttgagaaatatctgtaccccgccgccgctgccgcgccattcccactgttataccccgggattcccgcacccgctgctgctgccgcagcagcagctgcggcggctgccgccgccgcggccttcccctgcctctcttccgtactgtcgccccctccagagaaggccggcgcagctgcagcgaccctgctccctcacgaggtcgcgcccctcggtgcccctcatccgcagcacccacatggacgcactcacctcccctttgctggccctcgcgaacccggaaatcctgagagcagtgctcaagaggacccctctcaaccaggcaaagaagcgcct

SEQ ID NO: 7813 - DNA, 1446 bp, synthetic construct
  misc_feature 1..1446: note = source = /note="Description of Artificial Sequence: Synthetic coding sequence"
  source 1..1446: mol_type = other DNA
atggacgagggcatcccacacctacaagaacggcagctgttggaacatagggatttcattggtctggactacagcagtctgtacatgtgcaaacccaaacgttcaatgaagcgcgatgacactaaggatacatacaagctgccacaccgcctcatcgagaagaagagacgggatcggatcaatgagtgcattgcacagttgaaggatctgctgcccgagcacctgaaactcactactttaggtcatctagaaaaggcagtggtgttagaactgactctgaaacatctgaaagctttaactgcactgaccgagcagcagcaccaaaaaatcatcgctctgcagaacggagagcgctccctgaagtcaccaatccaatccgacctagacgctttccattccggcttccagacctgtgctaaggaggtgctgcaatatttgtcccggttcgaaagttggactcctagagaaccacggtgcgtccagttaataaatcacctgcacgctgtggctacccagttcctgcccactccacaactgctgacacagcaggttccactgtctaaagggaccggcgccccctctgcagccggcagtgctgcagcaccatgtttagagcgggcaggccagaagctagagccactggcatactgcgtgcctgttattcagcgcactcaaccatctgctgagctagccgctgagaatgatactgacacagactctgggtacggcggtgaagcagaagcccgccccgatagagagaaaggcaaaggcgccggcgcttcccgcgtgactatcaaacaggagcctcctggtgaagacagccccgcaccaaaacgaatgaagcttgatagtcgtggcggcggatctggagggggcccaggggggggcgcagctgctgctgcagcagcactgctaggccccgatccagctgctgccgctgctctactgcggccagatgctgccctgctgtccagcctggtggctttcggaggggggggcggcgccccattccctcaaccagccgctgccgccgcccccttctgtcttcctttctgcttcctaagcccatccgctgccgccgcttatgttcagcccttcctggataagagcggtctggaaaagtacctgtaccctgcagcagcagccgctccatttccactgctgtatcctgggattcctgcacccgccgctgctgctgccgccgccgccgctgccgcagccgccgccgctgctttcccctgcctctcttctgttctgtcccccccacccgagaaagcaggcgctgctgcagctacccttctgcctcatgaagtcgccccattaggagcaccacacccccagcatccacacggaaggactcaccttcccttcgccggcccccgtgagccaggaaatccagaaagctctgcacaggaggatccctcccaacctgggaaagaggcaccc

SEQ ID NO: 7814 - DNA, 1446 bp, synthetic construct
  misc_feature 1..1446: note = source = /note="Description of Artificial Sequence: Synthetic coding sequence"
  source 1..1446: mol_type = other DNA
atggacgaaggaatcccgcacctgcaagaacgccagttgctggagcacagagacttcatcggactcgactacagctcgctgtacatgtgtaaaccgaaacgttccatgaagagagatgacacgaaggatacctataagctgccgcaccgcctgatcgaaaagaagcgccgcgaccgcataaatgagtgcatcgctcagcttaaggacttgctgccggaacatctgaaattgactactctgggccacctggagaaggcggtggtgctcgagctgactcttaaacaccttaaggcactgaccgcactgacggaacaacagcaccagaagattattgcattgcagaacggagaacggtcgctgaagtcaccgatccagtcggacctggacgcatttcatagcgggttccagacctgcgcaaaggaagttctccagtacctgagtcgtttcgaatcatggacgccgcgcgagccaaggtgcgtgcaattgatcaaccatctgcatgcagtcgctacccagtttttgcctacccctcaactgctgacccagcaggtgcccctctccaagggaactggagcccctagcgctgcaggctcagcggctgccccatgcctcgagcgagctggacaaaagctggagccgctggcgtactgcgtcccagtgatccagagaactcaaccctccgcagagctggcggcggaaaacgacaccgacaccgactcgggatacggcggtgaggccgaggcccggccggaccgggaaaagggtaaaggggcaggggcttcgcgcgtgaccatcaaacaggaacctccgggagaagatagccccgcgcccaagagaatgaaactcgattccagaggcggaggatcgggtgggggcccaggaggaggagccgcggccgccgcggctgcactgctcggaccggatcctgccgccgcagcggctttgttgaggccggatgctgccttgctttctagcctggtggcctttggtggaggaggtggcgccccgttcccgcagccggcagccgctgctgcaccgttctgtctccccttctgtttcctgtcaccatcggctgcggccgcttacgtccaaccgttcttggacaagtcgggacttgaaaagtacctttacccagcggccgcggcagcgccgttcccccttctttacccaggcatcccagcgccggccgccgcagccgccgccgccgcggcagcagccgcagccgcagcagcctttccgtgcctgtcctcagtgttgtccccaccaccagagaaggccggggcagcggccgcaacgctgcttccacatgaggtcgcgccacttggcgctccccacccacagcacccgcacggccgcacgcatctcccattcgcgggaccaagggaaccagggaacccggaatcctcagcgcaggaggatcccagccagccaggcaaggaggcaccc

SEQ ID NO: 7815 - DNA, 1446 bp, synthetic construct
  misc_feature 1..1446: note = source = /note="Description of Artificial Sequence: Synthetic coding sequence"
  source 1..1446: mol_type = other DNA
atggacgagggcattccgcatcttcaggagaggcagctgctagagcatagggattttattggactcgactattcaagcctttacatgtgcaaaccaaagcgcagcatgaagcgggatgataccaaggacacttacaagctgccacaccgcttgatcgaaaagaagaggcgcgaccggatcaatgagtgcatcgcacaattgaaggatctgctgccagaacacctgaagctgactactctgggacatctggagaaggcggtggtgctggaactgacgcttaaacatctcaaggccttgacggccctcactgagcaacagcaccagaagattattgctcttcagaacggagaaaggtctcttaaatcccccatccagagcgacctggacgcctttcactcgggatttcagacttgtgctaaggaagtgttacagtatctttcgcgctttgaatcttggacgccgagagaaccgcggtgcgtccaattgataaatcacctgcacgcggtggcaacacagtttttgccaactccacagctattgactcagcaggtgcctctttcaaaagggactggtgcacccagcgccgccggtagtgctgcggcaccttgtctagagcgagcgggtcaaaaattggagccacttgcgtactgcgttcccgtaattcagcgcacgcaaccttcagcagagctggccgcagaaaacgacaccgacacagactcagggtacgggggtgaggctgaggcacgcccagaccgggagaagggaaaaggcgcaggtgcatctcgcgtaaccataaaacaagaaccccccggtgaagactcaccagccccaaaaagaatgaaattggacagcagggggggtggctcagggggcggccccggaggcggtgccgccgcagccgcagctgcacttctaggacctgaccccgcagcagccgccgctttgcttagacctgatgccgcattgctgtctagcttggtggcattcggcggtggcgggggggctccattcccgcaacccgccgcagctgcggcacctttttgtttgccattctgtttcctctcgccgagtgctgcagccgcatacgttcagcctttcctggataaatcagggctggagaagtacttgtatcccgcggccgcggcagccccattcccactgctttaccctggcattcctgccccagccgccgccgccgccgccgctgcagcagctgcagctgctgctgcggccttcccctgtctatcatctgtgctctcaccaccacccgaaaaggctggagcagccgccgccactcttctgccacacgaggttgctcctctaggggctccacaccctcagcatcctcacgggaggacccacttgccattcgccgggccgcgcgagccagggaaccccgagtcctctgcacaagaagatccctcacagccgggcaaagaagctccg

SEQ ID NO: 7816 - DNA, 1446 bp, synthetic construct
  misc_feature 1..1446: note = source = /note="Description of Artificial Sequence: Synthetic coding sequence"
  source 1..1446: mol_type = other DNA
atggacgaaggaattccgcacctccaggaacgtcagctgctcgaacatcgggatttcatcgggttggactactcttcgctttacatgtgtaaacctaagagaagcatgaagagggatgatacgaaagatacctacaagctgcctcatcgccttattgagaaaaagagaagagacaggattaatgaatgcatagcacaactgaaggatcttctgcctgaacaccttaaactcacgaccctgggccatctcgagaaggcagtcgtgcttgaattgacccttaagcaccttaaggcacttactgcacttactgaacagcaacatcaaaagatcattgcattgcagaacggcgagcggtcgctgaaatcgcctattcaatctgacttggacgcgtttcattccggttttcaaacctgtgccaaagaggttctccaatacctgtcgagattcgagagctggactcccagagaacccaggtgtgtccagttgatcaaccatcttcacgctgtagcgactcaatttctgccaacgccacagcttctgacccagcaggtccctcttagcaagggtaccggagcacccagcgcagcaggatccgccgccgccccttgcctggaaagggcgggccaaaaacttgagcccctggcatattgtgtgccagtgatccaacgcacgcaaccctcagcagaactggcggcggaaaatgatactgatactgattcaggatacggaggtgaggcggaggcgcgcccggaccgggaaaagggtaaaggagcgggtgcatccagggtcactattaagcaggaaccacctggggaggattcacctgcaccgaagagaatgaagctggattcccggggtggcggttccgggggaggaccagggggaggagcagctgcagccgcggcagcacttcttggaccggatccagctgccgcggccgcacttctcagacctgatgccgcactcttgtcatctctggttgcatttggcggtgggggcggggccccgttcccacagccagccgccgctgcagcacctttttgcctccccttctgttttcttagtccaagcgccgccgccgcatacgtccaaccttttctggacaagtcggggctcgaaaagtacttgtaccccgcagcagccgcagcccccttcccgctgctctaccccggaatccctgcaccagctgcagcagcagctgcggcggccgcagccgccgcggctgccgctgcattcccttgtctgagctccgtgctttcgcccccgccagagaaggcaggagctgccgccgcgaccttgcttccacacgaagtggctccactgggtgcgcctcacccgcagcatccacatggccgtactcatctcccttttgcgggacctcgagaacctggcaaccctgaatcgtcggcacaagaggaccctagccaaccaggcaaggaagcccct

SEQ ID NO: 7817 - DNA, 1446 bp, synthetic construct
  misc_feature 1..1446: note = source = /note="Description of Artificial Sequence: Synthetic coding sequence"
  source 1..1446: mol_type = other DNA
atggatgagggaattccacacctgcaggagcgacaactgctggaacacagggactttatcggactcgattactcctcactgtatatgtgcaagcctaaacgctctatgaagcgcgatgataccaaagatacatataaactgcctcaccgcctgatcgaaaaaaaacgcagagaccgcatcaacgagtgcatcgcccagctgaaagatttgctccctgaacatctcaaactgaccacactgggtcacttggagaaggccgtggtgctggaactgaccttgaagcacttgaaagccctcacagcactgacagagcagcagcaccaaaagataatcgccttgcagaacggggagagaagtctgaagagtccgattcagtctgacctggatgccttccattcaggatttcagacatgtgccaaggaggtcctgcagtatctgtccagattcgagagttggaccccccgcgaaccacgctgtgtgcagctcatcaaccacctgcatgccgtggccacccagtttctccctacacctcaacttttgacacagcaagtcccgttgtcaaaagggactggggctccgtccgccgctgggtcagctgcggcaccatgtctggaacgagccgggcagaagctggagcccctggcttattgcgtgcccgttatccagcgaacacaacccagtgcagaactggccgccgaaaacgataccgacactgactccggttacggcggcgaagccgaagccagacccgatagagagaagggtaagggagcaggagcctcccgggtcacaattaagcaggagccacccggcgaagactctccagcccctaagcgaatgaaactggactctcgcggcggagggtccggcggcggcccaggcgggggcgccgctgcggcagcagctgccttgctcggtcccgatccggctgccgccgctgcccttctgagacctgacgctgccctgttgtcctccttggtggcgtttggcggcggtggcggggcacccttcccacagccggcggccgcagcagcgcccttctgcctccctttctgctttctgagcccaagtgcggcagcagcttacgttcaacccttcctcgataaaagtggtctcgaaaagtatctgtatcctgccgctgccgcagctccatttccattgctgtaccctggcatccctgcacccgctgccgcggcggccgctgctgccgccgctgccgccgcagcggccgcctttccgtgcctgtcatccgtgttgtccccacctccagaaaaagccggcgccgccgcagccaccctcctcccgcatgaggtggctccactgggagcaccccatccgcagcacccccacggcaggacacatttgccatttgccggcccccgggagccgggtaatccggaatcatctgcacaggaggaccctagtcagcccggtaaggaagcccca

SEQ ID NO: 7818 - DNA, 1446 bp, synthetic construct
  misc_feature 1..1446: note = source = /note="Description of Artificial Sequence: Synthetic coding sequence"
  source 1..1446: mol_type = other DNA
atggatgagggtatccctcatctgcaggagcgacagctcctggagcatagagacttcatcggcctagactatagtagtctgtatatgtgtaagcccaagcggtcaatgaagcgggatgatactaaggatacttacaagctgcctcacagactaattgaaaaaaagcggagggatagaattaacgaatgtattgcccagttgaaggacctgctcccggagcatcttaagctcactactctgggccatttggagaaggcggtggtgttggagttgacactcaagcaccttaaggcgctgaccgcacttacagaacagcagcaccaaaaaatcattgccttacagaacggggaacggtctctaaagagccccattcagtctgacctggatgccttccacagcggatttcaaacgtgcgccaaggaggttctgcaataccttagcagattcgagtcatggacgccgcgtgaacctcgctgcgtacaacttattaaccatcttcacgcggtggccacccagtttctgcccacaccccagctgctcacacagcaagtgccactgagcaaaggaactggcgcccccagcgctgccgggtctgcggctgcaccttgcctcgagcgtgcgggacagaagctggagccactggcctactgtgtcccagtgattcagaggacacagccatcagcagagttggccgcagaaaacgacactgatacggactctggatacggcggagaggctgaggcccgccccgatcgggagaagggtaagggcgctggcgcgagccgagtaaccatcaagcaggaacctcctggcgaggattcccccgcacctaaaaggatgaaacttgacagtcgcggcggaggctccggggggggccctgggggtggggctgcagccgccgccgccgctctgctgggcccagaccctgcagccgcggctgcattgctccgccccgacgccgcgctactgtcatcgctggtggcctttggcgggggcggtggcgctcctttcccccagccagctgctgctgccgctccattctgtctgccgttttgttttttaagcccgagcgccgcggccgcttacgtgcagccttttctggacaagtcaggactggaaaaatacttgtaccctgcagccgccgccgcaccatttcctctgctctaccccggtatcccggcaccggccgccgcggccgcagcagccgcggcagctgcagccgcggctgccgcattcccttgtctatcttccgttctgagcccccctccggagaaggctggtgctgccgcagccacactcttgcctcacgaagtggctcccctgggagccccccaccctcaacaccctcacggcagaacgcacctgccgttcgcgggtccaagggagcctggcaaccctgaatccagcgcgcaagaagacccctctcagcccggcaaagaggcgcct

SEQ ID NO: 7819 - DNA, 1446 bp, synthetic construct
  misc_feature 1..1446: note = source = /note="Description of Artificial Sequence: Synthetic coding sequence"
  source 1..1446: mol_type = other DNA
atggatgagggtatacctcatctccaagaacgccaactgctcgaacacagggactttatcggtctggattactcaagcctttacatgtgtaagcctaagagatctatgaaacgagatgacactaaagatacttacaaactgcctcacaggcttattgaaaagaaacggcgggacagaatcaacgagtgtatagctcaactcaaagatctccttcctgagcacctcaaacttaccacccttgggcacctggagaaggcagtggtgttggaacttactcttaagcatttgaaggcattgaccgcacttactgagcaacaacaccaaaagattattgctctgcaaaatggagaacgtagtcttaagtcgcctattcaatcggatctggatgcctttcactcggggtttcagacttgcgcaaaagaagtgctgcagtacctttcgcggttcgaatcttggactcccagagaacctagatgcgtgcaactgattaaccatctccatgcagtcgcaacccagttcctgcccaccccacagctgctcacgcagcaagtaccgctctcgaagggtaccggcgcaccctcggcagcaggttcagctgcagcaccgtgcctggagcgcgccggacaaaaactggagccacttgcctactgcgtccctgtcatacaacggacccagccatccgcagaattggcagcagagaacgatacggataccgacagcggatacggtggcgaggcagaagcgcgtccagatagggaaaagggcaagggtgcaggagcatcgagagtcactattaagcaagaacccccgggtgaagattcgccagccccaaagaggatgaaattggactcccggggtgggggatcgggcggaggaccaggtggtggagcggcggcggcagcggcagcattgctgggcccggacccagcagcggctgcagcgttgcttagaccagatgcggccctgctttcctctctggtcgcatttggtggaggaggaggggcaccatttccacagccagccgctgcggcagctcctttctgtctgccgttttgctttttgtccccctcagcagcagcagcatacgtgcaaccattcctggataagtcagggctggaaaagtatctttacccggcagccgccgcagctccattccccctgctctaccctgggattcctgcccctgcagcggccgccgccgcggcagccgcagccgccgcggctgcagcagccttcccctgtctttcaagcgttctctcaccaccgccagaaaaggcgggggcagcagccgcaacccttcttcctcatgaggtggcacctcttggagcaccgcatccccagcatccgcatggaagaactcatctcccatttgcaggtcctagagagcctggtaatcctgagtcgtccgcacaggaggatccatcgcagccggggaaggaggcccca

SEQ ID NO: 7820 - DNA, 1446 bp, synthetic construct
  misc_feature 1..1446: note = source = /note="Description of Artificial Sequence: Synthetic coding sequence"
  source 1..1446: mol_type = other DNA
atggacgagggtatccctcatcttcaggagaggcagttactggaacatcgggacttcattggtctggactactcatccctctacatgtgtaagcctaaacggagcatgaaaagagatgatacgaaagatacatacaagctgccacaccggttgatcgagaagaagaggagagacagaatcaacgaatgcatcgcacagctgaaagacctattgccagagcatctaaagctgaccactctgggtcatctcgagaaggcagtagtgcttgagctgaccctaaaacatctcaaggctctgactgcgttaacggagcagcaacaccagaaaattatcgcgctgcagaatggggagaggtcattgaagtctcctatccagagcgaccttgacgcttttcacagtgggttccagacatgtgccaaagaagtcctgcagtacctctctcggtttgagagttggacaccaagagaacctcgttgcgtccagttaattaaccatctgcacgccgtggccactcagttccttcccacaccccagctgttgacacagcaggttccacttagtaagggtacaggcgcgccttccgccgcagggtcagccgccgccccctgtctggagcgcgccgggcaaaagctggaacctctcgcgtattgcgtgccagtcattcagaggacccagcctagcgctgagctagcagcggaaaacgacacagacaccgatagtggctacggaggggaggcagaggctaggcccgaccgcgagaaaggaaaaggcgccggagcctctcgggtcacgataaaacaggaaccacccggtgaggactccccagccccgaaaagaatgaaactcgattctcggggtggcgggagtggtggaggccccggcgggggggccgctgcggcagccgctgcactactgggccctgaccccgccgctgcagccgcactgcttcggcccgacgctgcgctgttatcttctctggttgcatttgggggcggcggtggggctccttttccccagccagccgctgctgccgcccctttttgcctgccattttgcttcctgagtccttctgcagctgcagcctatgtgcaaccattccttgacaagtcaggactcgagaaatacctgtatcccgctgccgctgctgcaccatttccactgttataccctggcataccagcacctgccgctgcggccgccgctgcggcggccgccgccgctgcggcggctgcatttccatgcctaagcagtgttttatctcctcctcccgaaaaagctggggccgccgccgcaactttgctgccccatgaagtcgctccacttggggccccacaccctcagcatccgcatggtcggacccatctgcctttcgctggtccccgcgaacccgggaaccccgaatcctctgcccaggaagatccgagtcagcctggaaaagaggcgccc

SEQ ID NO: 7821 - DNA, 1446 bp, synthetic construct
  misc_feature 1..1446: note = source = /note="Description of Artificial Sequence: Synthetic coding sequence"
  source 1..1446: mol_type = other DNA
atggacgagggaatcccacatctgcaggaaagacaactgcttgagcatcgcgactttatcgggctggactactcctcgttgtacatgtgtaaacctaaaaggagcatgaagcgggatgataccaaggatacctataaacttccccataggctcatcgaaaagaagagacgtgataggattaatgagtgcattgcacagctgaaggacctcctgcccgagcaccttaaacttactaccctggggcatctggaaaaagccgtcgttcttgagttgactttgaagcaccttaaagctctgaccgcactcactgaacaacagcaccagaagatcattgcactgcagaatggagaacggtcccttaagtccccaatacagtccgacctggatgcatttcactcaggattccaaacttgcgcaaaggaagtcctccaatacctctcacgcttcgagtcgtggactcctcgagaaccccggtgtgtgcaactcattaaccatctgcacgcggtggcaactcagttcctcccaaccccacaactgcttacccaacaagtgcccttgtcaaagggtaccggtgcaccatctgccgccggctcggcagcggcaccatgtttggagcgagctgggcaaaagttggagcctcttgcgtactgcgttcctgtgattcaaagaactcaacccagcgccgaactggccgcagagaacgatacggacacggacagcggctatggaggcgaagccgaagcaagacccgacagagagaaaggtaagggtgcaggagcctcccgagttaccattaaacaggaaccacctggagaagattcgccagcaccaaagagaatgaaactggatagccggggcggagggtccggaggaggtcccggagggggcgcagcggcggcagccgcggcactgttggggccggatcccgcagccgcagcagctctccttaggcccgatgcagctctcctctcttccttggtagcatttggcggtggcggcggagcccctttcccgcagcccgcggcagcagcagcacctttctgccttcctttttgttttctgtccccaagcgccgcggcagcgtacgtccagccctttctcgataagtcgggacttgaaaagtacctgtaccctgcggcggccgcagcaccatttccacttctctacccaggtatccctgccccagctgccgccgccgccgctgctgccgccgcagcggccgccgcggccgcatttccatgtctgtcctcagtgctgtccccaccgcctgagaaggccggagccgctgccgcaacgcttcttccgcatgaagtcgccccacttggcgcccctcatccacagcaccctcatggtaggacgcatctgccatttgcagggcccagagaaccaggcaaccctgaaagctccgcacaagaagatccaagccagccaggaaaggaagcacct

SEQ ID NO: 7822 - DNA, 1446 bp, synthetic construct
  misc_feature 1..1446: note = source = /note="Description of Artificial Sequence: Synthetic coding sequence"
  source 1..1446: mol_type = other DNA
atggacgaaggaatcccccaccttcaagagcgccagctgctggaacatcgggacttcattggcctcgactacagcagcctgtacatgtgcaagcccaagcggagcatgaaacgggatgatacgaaggatacctacaagctgccacatcgactgatcgagaagaagcggcgtgaccgaatcaatgagtgcatcgcacagttgaaagatcttttgccggaacatttgaagctgaccaccctggggcatctggaaaaagcggtcgtgctggaactgaccctgaagcacctgaaggccctcaccgctctgactgaacagcaacatcaaaagattatcgccctccagaacggcgagaggagcctgaagtcgccaatccaatcagaccttgacgccttccactcgggatttcagacctgtgccaaagaggtgcttcagtacctgtcgcgtttcgagtcctggaccccgagagaaccgcggtgtgttcagctgattaaccacttgcacgcagtcgccactcaatttctcccgactccacagctgcttactcagcaggtgcctctttcaaaaggaactggagccccgtcggccgccggctccgcagccgccccgtgtctggaaagagctggccaaaagctcgagcctctggcgtactgcgtgccggtcatccagcggacccagccctccgcagaacttgcggctgagaacgatacggacaccgactcgggatacggtggggaagccgaagcgcggcctgacagagaaaagggcaagggagcgggtgcgtcacgggtgaccatcaagcaagaaccgccaggagaagattcaccagcgcccaagagaatgaagctggatagcagagggggcggatccggcggcgggccaggaggaggagctgcggcggctgcggccgcgctcctgggtccggatccagcagcagctgcggcgctgctgaggcctgatgcggccctcctgagctccttggtagctttcgggggtggtggaggtgcaccgtttccacaaccagcggccgcggcagcgccgttctgccttccattctgcttcctgtccccgtcagccgccgcggcttatgtgcagccctttttggacaaatccggcctggagaagtacttgtaccctgcggccgccgctgcgccgtttccactcctgtacccaggaatcccagccccggcagctgcagcggctgccgccgccgcagccgctgctgcagcggccgctttcccgtgcttgtcctccgtgctgtcaccgccgccggagaaggctggagctgccgcagcgacgctgctgccccacgaggtggcaccgctgggcgcacctcatccgcagcacccgcatggacgcacccacctgcccttcgcgggaccaagagagcccggcaatccagagagctcggcgcaggaagacccgtcacaacccggaaaggaagctccg

SEQ ID NO: 7823 - DNA, 1446 bp, synthetic construct
  misc_feature 1..1446: note = source = /note="Description of Artificial Sequence: Synthetic coding sequence"
  source 1..1446: mol_type = other DNA
atggacgaaggcatcccacacctgcaggagaggcagcttctcgagcatagagacttcatcggactggattactcgtccctgtacatgtgcaagcccaagcggtcgatgaaacgggacgataccaaggatacgtacaaactgccgcatagactcatcgagaagaagcggagagatcggatcaatgaatgcatcgcccagttgaaggatctgctgcctgagcatctcaagctcactacgctgggccacctggaaaaggcggtggtcctggagctcaccctgaagcacctgaaagccctcactgccctgaccgaacaacagcaccagaaaatcatcgcgctgcaaaacggagaacggtcacttaaatcccccatccagagcgacctggacgccttccactctggctttcagacctgtgcaaaagaagtgctccagtacctgagcagattcgagtcatggactccgcgcgaaccacgctgcgtgcaattgattaatcacctccacgccgtggccactcagttcctccctactccacagctcctgacccagcaggtgcccttgagcaaaggaactggcgccccgtcggccgctggtagcgctgccgcaccgtgcctcgaacgggcaggacaaaagctcgagcccctggcctactgtgtccctgttatccaacgcacccagccatcagcggaacttgccgccgaaaacgacaccgacactgactccggatacggtggcgaagcagaagctcgcccggatcgcgaaaagggaaagggcgcgggagcctcgcgcgtgaccattaaacaagagcctccaggggaggattccccggcgccaaagaggatgaagctcgactctaggggcggtggcagcggaggagggccggggggaggtgccgctgctgccgcagcagccctgttgggaccagaccccgcggcggcggccgcattgcttcgacctgacgccgccctgctgtcgtcgctggtcgccttcggaggaggaggcggggcaccgttccctcaacctgccgctgcggcggccccgttctgccttccgttctgctttctgtcaccgtcagcagccgccgcctacgtgcagcccttcctggacaagtccggtctggaaaagtacctgtacccggccgcggcagccgcacctttccctcttctgtatcccggaattcctgctccagccgcagccgctgctgctgctgcagctgcggcggcagcggcggccgcgtttccgtgtctgtcctccgtcctttcgcccccgccagaaaaggcgggagcagctgccgcaactctcctcccgcatgaggtggcacctctgggagcaccgcatccgcaacacccgcatgggcgcacccacctcccatttgcgggaccacgtgagccgggcaacccggagtccagcgcgcaagaggatccgtcgcagccagggaaggaagctccg

SEQ ID NO: 7824 - DNA, 1446 bp, synthetic construct
  misc_feature 1..1446: note = source = /note="Description of Artificial Sequence: Synthetic coding sequence"
  source 1..1446: mol_type = other DNA
atggatgagggcattccccacttgcaagaacgccagttgttggaacatcgggattttattggcctggactattcttcactttatatgtgcaagccaaaaagatccatgaagagagacgacactaaggacacttacaaactgccacacagattgattgagaagaagcggcgggatcgcatcaatgagtgcatcgcccagctcaaggacctcctccccgagcatctgaaactgaccaccctaggacacctcgaaaaagctgtggtcctagaactcaccctgaaacacctgaaagccctgacagcgctgaccgagcagcagcaccagaaaataatagctcttcagaatggcgaacggagtctcaagtctccaattcagtctgacctggatgctttccattccggatttcagacatgtgctaaggaggtgttacagtacctgtccagattcgagtcctggaccccgcgggaaccgcgatgtgtccaactgatcaaccacctgcacgccgtcgcgacccagttcctgcctaccccacagttgctcacgcagcaagtgcccctttcgaagggaaccggtgcaccgagcgctgctgggagcgctgccgcaccctgtctagaacgcgcgggccagaagctagagcccctggcatattgcgtgccagtcatccagcgaacacagccctctgccgaactcgccgccgaaaatgatacggacactgatagtggatatgggggggaggccgaagcaaggcccgacagagaaaagggcaaaggcgctggggcctctagggtaactatcaagcaggagccgccaggagaggatagcccagcccccaagaggatgaagctagattcccggggaggaggctctggcggcgggcccggcggcggggctgcggccgccgcagccgctttacttggtcccgatcctgccgccgcggccgcccttctgcgtccagacgccgccttgctcagctccctggtagcctttggtggagggggtggtgcgccatttccgcagccagcggccgctgccgcccctttttgcctgcctttctgctttctctccccaagtgccgccgctgcatatgtacagcccttcctagataaatccggactggagaagtacctttatccggccgcagcagccgccccctttcctctactctatcctggcatcccagcaccagccgccgcggccgccgccgcagccgcggccgccgccgctgccgccgcctttccctgtctttcctcagtcttatctccacctcccgaaaaggcgggagctgcagctgctaccttgctaccccatgaggtggcccccttaggcgcaccacatccccaacaccctcatggacgcacacatcttccattcgccgggcccagggagccggggaacccagagagcagcgcccaggaggaccccagccaacccgggaaggaagctccc

SEQ ID NO: 7825 - DNA, 1446 bp, synthetic construct
  misc_feature 1..1446: note = source = /note="Description of Artificial Sequence: Synthetic coding sequence"
  source 1..1446: mol_type = other DNA
atggacgaagggattcctcatctccaagagcgccagcttctggaacacagggacttcatcggacttgattactccagcctctacatgtgcaagccgaagcgatccatgaaacgggacgatactaaggatacctacaagctcccacaccgcctgattgagaagaaaaggagagacagaatcaacgagtgtattgcgcagcttaaggacctgctgccagaacatttgaagctgactactctgggacatcttgaaaaagcagtggtgctggagcttacgctcaaacacctcaaggctctgaccgcactgaccgaacagcaacatcaaaagatcattgcattgcaaaacggtgaaagatctctcaagtcgcctatccaaagcgacctggatgcattccattcgggtttccaaacgtgtgcgaaagaggtgcttcaatacttgtcacgcttcgaatcgtggacccccagagaaccgcgttgcgtccaattgatcaatcatctccatgcagtcgccacccagtttcttcctacgcctcagcttctgacccagcaggtccccttgtcaaagggcaccggcgccccttcagctgccggatcagcagctgcaccttgtttggaaagggcaggacagaaactggaaccgctggcctactgtgtcccagtgattcagcggacccagccttccgcagagcttgccgccgagaatgacaccgatactgattcgggctacggtggcgaagccgaagcacggccagatcgcgagaaaggaaagggtgcgggagcctccagagtgactattaagcaggaaccgcccggggaagattcacccgcaccaaagcggatgaagctcgattccaggggcggtggtagcgggggcggacccggaggaggtgcggccgcagcagcagctgccctgctcgggccagatcctgcggcggcagccgcacttctgcggccagacgccgcccttctgtcgagccttgttgcatttggaggcgggggaggcgcgccttttcctcagcccgctgcagccgcggcacctttttgtctgcccttttgtttcctctccccaagcgcggcagccgcctacgtgcagcctttcctcgataagagcggactcgagaaatatctttacccagcagcggctgcagccccttttccacttttgtacccaggtatccctgcgcccgcagccgccgcggcagctgcggcggctgctgcggcagcggcagcggcctttccttgcctgtcgtcggtgttgtctcctccaccggaaaaagcgggagcagctgcagcgactctcttgcctcacgaggtggcccctttgggtgcaccacacccgcaacacccacatggacgaactcatctccctttcgccggaccaagagaacccggaaatccggaatcaagcgcacaagaggatccatcacagcccgggaaggaagcccct

SEQ ID NO: 7826 - DNA, 1446 bp, synthetic construct
  misc_feature 1..1446: note = source = /note="Description of Artificial Sequence: Synthetic coding sequence"
  source 1..1446: mol_type = other DNA
atggacgagggcattcctcatctgcaggaacggcaattactcgagcacagagactttattggtctcgactacagctctttgtacatgtgcaagccgaagaggtccatgaagcgcgacgatacgaaagatacctataagctgccacaccgtctaattgaaaaaaaacgacgcgataggattaatgagtgtattgctcagttgaaagacttactgcctgagcacctgaaactgactacgctgggccacctggagaaagccgttgtgctggagttgaccctgaaacacctcaaagcgctgacggccctgaccgaacagcagcaccagaaaattatcgcactccagaatggcgaacgctccctgaagtcaccgatacaaagcgatctggacgccttccatagcgggttccagacttgcgccaaggaagtgctgcagtacctgagcagatttgaatcgtggaccccccgcgaacctcgctgcgttcaactgatcaatcaccttcacgcagtggctactcagttcttaccaacgccgcaactgctgacccaacaggtcccgctcagcaagggtactggcgccccaagtgcggcaggtagcgccgccgcgccgtgcctcgaacgggctggtcagaaactggaaccgctggcatattgcgtcccagttattcagagaactcagccgagcgctgaactggccgctgagaatgacactgacactgatagcggttatggtggagaggcggaggcgcgcccagatcgcgaaaaaggtaaaggtgcgggagcgtcacgcgtgaccattaaacaggaacctcccggggaggatagcccagcgccaaaacgtatgaagctggactccaggggcggcggatctggaggtggcccgggtggaggtgcagccgcagcggcggcggctctgctgggcccagatcctgcagctgctgccgccctgctgcgccctgacgcagctctgctgagctcactggtcgcatttggcgggggtgggggtgcaccttttccacagcctgcagcggcagcggcccccttctgcctgcctttttgctttctgagcccaagcgccgctgcagcgtatgtacagccgtttctggacaagtccgggctggagaaatatctctatccagcggcggccgcggctccatttccactgctgtacccaggaatcccagcgccagccgccgctgccgccgccgcggcggcagctgccgctgccgcagcagccttcccgtgtttgtctagcgtgctgtcacctccgccagagaaggctggtgccgctgctgcgacgctcctgcctcacgaagttgcgcctctgggcgcgccacaccctcagcatccgcatggtaggacccatctgccattcgcaggtccgcgagaaccaggtaacccggaatccagcgcgcaagaagatcctagccagcccggtaaagaagctcca

SEQ ID NO: 7827 - DNA, 1446 bp, synthetic construct
  misc_feature 1..1446: note = source = /note="Description of Artificial Sequence: Synthetic coding sequence"
  source 1..1446: mol_type = other DNA
atggatgaggggatccctcacttgcaggagcggcagctgcttgagcatcgagactttatcggcctggactacagcagcctttacatgtgcaaacctaagcgatccatgaagagggacgatactaaggatacctataagctgccacataggctcatcgaaaaaaagcgcagagaccggattaatgaatgcattgcccaactcaaggacctgctccccgagcacttgaaactgactacacttggacacctggagaaagctgtggtgctcgaactgactttgaagcatctgaaagcactgacagccctgaccgaacagcagcaccagaaaattattgctctccagaacggtgagcgcagcctcaaatccccaattcagtccgacctcgacgccttccattcagggtttcagacatgtgccaaggaagtgttgcagtacctgagccggtttgagtcttggacccccagagaaccccgctgcgtccagctgatcaatcacctccacgcagtcgccacccaattcctgcccaccccccagttgttgacccagcaagtgccattgtcaaaaggcacaggagccccgagtgccgccgggagcgcagccgcgccttgcctggagcgagcaggacaaaagctggagccactggcctattgtgtacctgtgatccagcgaacccagcccagtgctgagctggctgccgaaaatgatactgatacagacagcggctacggaggagaagccgaagcacggcctgaccgagagaagggaaagggcgctggggccagtcgggtgactattaaacaggagccaccgggtgaggactctccagcacctaagagaatgaagctcgattctcggggagggggcagcggcggcggcccgggcgggggggctgccgccgcagcggccgctctcctggggcctgaccctgctgcggccgccgccctgctccgcccagacgctgctcttctgtcttccctcgtggccttcggaggcggaggaggagcaccttttcctcaacctgctgcggctgccgcgccattctgcctccctttctgttttctgtcacccagcgcagcggcagcctatgtccaacccttcctggataagtccggcctcgaaaagtacctgtacccagccgcggctgccgcgccctttccgctcttgtatcccggcatacctgcccccgctgcagcagcagctgccgccgcagcggctgcggcggctgccgccgcttttccctgcttgtcaagcgtcttgtctcccccccctgaaaaggctggagcagccgccgctaccctgctgccgcatgaggtcgcacccctgggggctcctcatcctcagcacccacacggccgaacacatttgcctttcgccgggccacgggaaccgggcaatcccgagagcagtgcccaggaggacccgtcacagcctggtaaggaagctccc

SEQ ID NO: 7828 - DNA, 1446 bp, synthetic construct
  misc_feature 1..1446: note = source = /note="Description of Artificial Sequence: Synthetic coding sequence"
  source 1..1446: mol_type = other DNA
atggatgagggaataccacatctccaagaaagacagctcctggaacaccgggactttattggtctggattacagttccctttacatgtgtaagccaaaacgctcaatgaagcgagacgacacaaaggacacttataagttgccacacaggctgatcgagaagaagcgaagagacagaatcaatgaatgcatcgcgcagttaaaggatttattgcccgagcatcttaagctcaccacactgggacatcttgaaaaagccgttgtgctcgagctgaccctcaaacatctgaaagccctaaccgcactgaccgagcaacaacaccaaaaaatcattgcactgcagaacggagaacgctcactcaagtctcccatacaaagcgacttggatgcgtttcacagcggcttccagacctgcgccaaggaagtcctccagtacctgtccaggttcgaaagttggactccacgcgaacccaggtgtgtacagctgataaatcacttgcatgccgtggccactcagtttcttcccacccctcagttgctgactcagcaagtgcccctatccaaaggtaccggagctcctagcgccgccggatcagcggcagccccctgtctggaaagagctggccagaagttggagccgcttgcctattgcgtaccagtcatccagcggacgcagccatccgcagaattagctgccgagaacgacacagacacagactctggctatggtggcgaggccgaagcccgacccgaccgcgagaaaggcaaaggggcaggcgcatctagagttaccattaagcaggagcctcccggcgaagacagtcctgctcccaaacgcatgaaactcgactccagggggggggggtcgggtgggggtccaggaggaggagccgctgcagcggcggccgctttattgggtccggaccccgccgcggccgctgctctgctgcgacctgatgctgctctgctgagctctcttgtggccttcgggggaggaggcggtgcccctttcccccagcccgccgcagcggctgcccctttttgcctgcccttctgcttcttgtcaccgtccgcggctgcggcctacgttcagcctttccttgataaatcagggctggagaaatacctctacccggccgcagcagccgcaccattccctctgttatatcccggaatccccgcaccagcagccgctgccgccgccgccgcagcagctgcagccgccgcagccgcgttcccgtgtcttagcagtgtgctgagccctcctcctgagaaggcgggagcagcagccgcgactctcctgccacacgaggtggctcccctgggtgctccgcatccccagcacccccacggaaggactcacttgccatttgccggcccacgcgagccaggcaatcccgaatcctctgcacaggaggacccttcacaaccgggaaaagaggccccc

SEQ ID NO: 7829 - DNA, 1446 bp, synthetic construct
  misc_feature 1..1446: note = source = /note="Description of Artificial Sequence: Synthetic coding sequence"
  source 1..1446: mol_type = other DNA
atggatgagggcatcccgcatctgcaggaacgccaacttttagaacatagagattttattgggttggattattcaagcctgtatatgtgtaaaccaaaaagaagcatgaaacgggatgacacgaaagatacatataaacttccacacagacttatagagaagaaacggcgtgaccgtatcaacgaatgtattgcccagttgaaagatcttctcccggaacatctgaaattaaccacgttgggccatctggaaaaggcggtcgtgctagaattaacgctcaaacatctaaaggcgctgactgcattgacagagcagcagcatcagaaaattattgctctgcaaaacggcgagcggtcgctaaaatcacccattcagtcagacctggatgcgtttcattcaggcttccaaacttgtgcaaaagaagtccttcagtatctttcccgttttgaatcatggacaccgagagaaccacgctgtgttcagctgatcaaccatttgcatgcagtagcgacacaatttcttcctacgccgcaactgttgacgcagcaggtgcctttatctaaaggtacgggagcaccatcagccgcaggatcggctgcagctccctgcctggagcgtgcgggacagaaacttgaaccgctggcatactgcgtgccagtcattcagcgtacacagccgtctgccgaattggctgccgaaaatgatacggacacagattctggttatggaggcgaagcggaagcccgacctgatcgcgagaaaggaaaaggagccggtgcgtcaagagtaactatcaaacaggaaccacctggggaagattctccagcccctaaaaggatgaaattggattcaagaggtggcgggtccggcggaggccctggcggcggggctgcggcagcagcagccgcattactgggaccggacccggcagcagcagcggcactccttcggccggatgcggcactactttcctcacttgtggccttcggtggtggtggcggggcaccttttccacaacccgctgctgctgctgcaccgttttgcttgccgttttgctttctgtccccaagtgcagcggctgcctatgtacagccatttcttgataagtcaggacttgagaagtatttgtatccggctgcggcggccgccccttttccgttactttatccgggcattccagctccagcagcagcggccgcagccgcggcggcagccgcggctgccgcagccgcctttccgtgtctgtcaagtgtcttgtccccgcctccagaaaaagcgggtgctgcggccgctactctcttgccgcacgaagtcgcgccgttaggagcccctcatcctcagcatccgcatggcagaacccaccttccgtttgctgggccgagagaaccgggcaaccccgaatctagcgcgcaagaagacccgagtcagccagggaaagaagcgccg

SEQ ID NO: 7830 - DNA, 1446 bp, synthetic construct
  misc_feature 1..1446: note = source = /note="Description of Artificial Sequence: Synthetic coding sequence"
  source 1..1446: mol_type = other DNA
atggacgaagggatcccgcacctccaggagcgccaattgttggagcacagggactttatcggtctggactactcgtcactgtatatgtgtaaaccgaagcggagcatgaagcgggacgataccaaggatacctacaagctcccccacagactgatcgaaaagaaacgccgggacagaatcaacgaatgcattgctcaactgaaggaccttctgccggaacacctgaaactgaccactctcggccacctcgaaaaggccgtggtgcttgaactcaccctgaagcatctgaaagcactcaccgcgctgaccgagcagcagcatcagaaaatcatcgccctgcaaaatggagagagaagcctgaaaagcccaatccaaagcgatctggatgccttccatagcgggttccaaacctgcgcgaaggaagtgctccagtacctttcgcgcttcgaatcatggaccccgcgcgaaccacgctgcgtccagctcatcaaccacttgcacgcggtcgcgacgcaatttcttcccaccccgcaactcctgactcagcaggtgccgctgtcgaaagggacgggagccccctcggccgcgggctcggccgctgcgccttgcctggaacgggcgggacaaaaactcgagccgctggcgtattgcgtcccagtgatccagagaacccaaccgtcagcggaactggccgcagagaacgacactgacactgacagcggatacggcggagaagcggaagctcggccggatagagaaaagggaaagggagcaggagctagcagggtcaccattaagcaagagccgccaggcgaagattcacctgcccctaagcgcatgaagctggattcgcgcggaggagggtccggaggagggcctgggggaggagcagcagcagccgctgcagctctcctgggaccagacccggccgcagccgcagctctgctccgaccggacgccgccctcctgtccagcctggtcgctttcggagggggcggaggcgctccgttcccccagcctgctgctgctgcagctccgttctgcttgccattttgctttctcagcccgtcggccgccgccgcttacgttcaaccgttccttgataaatcggggctggagaagtacctctatccagcggcagcggctgcaccgttcccactcctgtaccctgggatcccggctccagccgcagcagctgccgccgcagcggctgccgctgcggcagctgcagcattcccttgtctgtcctcggtcctctccccgccgccggagaaggccggagccgcggcggccactctgctgccgcacgaagtcgccccattgggcgcaccgcatccgcagcaccctcatggacgcactcatctgccttttgccgggccgcgggagccgggcaacccggagagcagcgctcaggaagatccatctcagcctggaaaggaggcgcct

SEQ ID NO: 7831 - DNA, 1446 bp, synthetic construct
  misc_feature 1..1446: note = source = /note="Description of Artificial Sequence: Synthetic coding sequence"
  source 1..1446: mol_type = other DNA
atggacgaggggatcccccatctccaggagagacagctgctcgagcaccgcgacttcatcgggctggactactccagtctttatatgtgtaagcccaaaaggtccatgaagagagatgataccaaggatacttataaactgccccatcggctgattgaaaagaagaggcgggatagaattaatgaatgcatcgctcagctgaaggacctacttccagagcacctgaaacttacgaccctgggtcatctcgaaaaagccgtggtacttgagctgacactgaagcacctcaaagccctgactgcactcactgagcagcagcatcagaaaatcatcgcactccagaacggcgagaggtcactcaagtcccccatccagagtgacctggatgcgtttcactccggattccagacgtgtgctaaagaagtcctacagtatttgtcacgattcgaatcctggaccccccgagagcctcggtgcgtacaactcattaaccacctgcatgcagtggcaacccagtttctgcccactcctcaactgctgacacagcaagtgccactgtccaagggcaccggtgcaccctcggccgctggcagcgccgcagcgccttgtcttgagagggccggacagaaactcgaacctctcgcttattgcgtccctgtgatccagcggacccaacccagcgccgaattagctgcagaaaacgatacagacacagactcagggtatggcggtgaggctgaagctaggccggatagggagaagggaaaaggcgctggggcttcacgggtcactatcaagcaggaaccacctggagaggacagtcccgctcctaaacgcatgaagttagattctcgggggggcggctcggggggagggcctgggggcggggccgcggcggccgccgcagccctgctcggacctgatccggctgccgcggctgccctgcttagacctgatgcagcgctgctgtcttcactcgtcgcattcggaggcggcggcggtgccccctttccacagccagcagccgctgctgcaccattctgcctgcctttttgttttctgtcacccagcgctgccgccgcctatgtgcagccttttctggataagtccgggctggagaagtatttgtacccggctgccgcagctgcaccattcccactcctctatcctgggatacctgcgcctgccgccgccgccgcagcagccgccgcagccgccgctgctgccgccgctttcccctgcctttctagtgtgctgtccccacctccagagaaggccggcgccgcagcagccacattgctgcctcatgaagtggcgcccctgggcgcaccccatccacagcatccacacgggcgaacccacttgccctttgcggggcctagagagccagggaatccagagagctccgcccaggaggatcccagccagcccggaaaggaagcaccc

SEQ ID NO: 7832 - DNA, 1446 bp, synthetic construct
  misc_feature 1..1446: note = source = /note="Description of Artificial Sequence: Synthetic coding sequence"
  source 1..1446: mol_type = other DNA
atggatgaaggtattccgcaccttcaggaaagacagttgctcgagcatcgggactttatcggccttgattattcctcactgtacatgtgtaagccaaagaggagcatgaaaagagatgacaccaaggacacctacaagctccctcatcgactgatcgaaaagaagcgtagagatcgcatcaacgagtgtattgcacagcttaaagatctcctgcccgagcaccttaaactcaccacgcttggacatcttgaaaaggcagtggtgttggagctgactcttaagcatctgaaggcacttaccgcccttactgaacaacagcaccagaaaatcatagccctccaaaacggagaaagaagcctgaaatcccccatacagtctgacctggacgcattccattccgggtttcaaacctgcgcgaaggaagtcctgcagtacctgtcgagattcgaatcgtggactcctcgcgaaccgagatgtgtgcagcttatcaatcatctgcacgcagttgcaacccagtttctccctactccacagctgcttacccagcaagtgcccctttcgaagggcaccggggccccttccgcggctggatcggccgcagccccttgtcttgagagagcgggacaaaaactggaacctctcgcctactgtgtgcccgtcattcagcgcacgcagcccagtgccgaactcgcagcagaaaacgacaccgatactgactcgggctacggaggagaagcagaggcccggcctgatagggaaaaaggaaagggagctggagcaagcagggtcactattaagcaagaaccccctggcgaggattccccagcaccaaaaagaatgaaactggactcacgtggagggggttccggaggtggacccggaggcggagcagctgccgcagcggcagccctcctcgggccagaccctgccgccgccgccgctctgcttcgcccagatgccgctcttttgtcctcgttggtggcgttcggtggaggaggtggcgctccttttccacaacccgccgcggccgcagcgccattctgtttgccgttctgttttctgtccccttccgctgcagcagcctacgtccaaccattcctggacaaatccggtcttgagaaatacctttaccctgcggcagcggccgctccattcccactcttgtaccctggcattccagctccggcagccgctgccgccgcagcggcggctgcagcggccgcggctgccgcatttccatgtctgagctctgtcctgtcgcctcctcctgaaaaagcaggagcagccgcagcgaccctgcttcctcatgaagttgcaccactgggcgccccacacccccaacatccgcatggtcgaacccaccttccatttgccggaccacgcgaacctggcaatcctgaatcctccgcacaagaagatcctagccaaccagggaaggaagccccc

SEQ ID NO: 7833 - DNA, 1446 bp, synthetic construct
  misc_feature 1..1446: note = source = /note="Description of Artificial Sequence: Synthetic coding sequence"
  source 1..1446: mol_type = other DNA
atggatgaggggatccctcatctgcaggagcggcagttgctggagcatagagacttcataggcctggattacagcagtctgtacatgtgtaagccaaagagatcaatgaagagagacgacaccaaagatacttacaagctgcctcacaggctaattgagaagaagcgccgtgatagaattaatgagtgcatcgctcagctaaaagatttgctccccgaacacctcaagctcacaaccctggggcatttagaaaaagcggtggtccttgagctcacactgaagcatcttaaggctctgaccgccttgactgaacagcagcaccagaagattatcgctttgcagaacggagagcgttccctgaagtctcctatacaaagtgacctggatgcattccacagcgggtttcagacttgtgctaaggaggtgttgcagtacttgagccgcttcgagtcttggacccctcgcgagcctcgatgcgtgcagctaatcaaccacctacatgccgtggctacacagttcctaccaactccccaacttctcacccagcaggtacctctcagcaaagggactggcgccccctcagctgccggctccgccgctgccccctgcctggagcgggcaggacagaaactggagccactggcttactgtgtgcccgtaatccagcgaacacagccctccgcggaactcgcagctgaaaatgacacagataccgactctggatacgggggcgaagctgaggcacgtcccgacagggaaaaaggcaagggggcaggagcctcccgggttactattaaacaagagccacctggagaggattcgcctgcgcccaagcgaatgaagctagattcccgtggtggcggcagcgggggcggacccggcgggggagccgccgccgctgccgccgctttgctggggccggatccagcagcggcagccgcactgcttcgcccagacgctgctcttctgagcagtctcgtggcctttgggggcggcggcggcgccccatttcctcagcctgctgccgctgctgcgccattttgcctgccattctgctttctcagtcccagcgcagctgctgcctatgtccagccgtttctcgacaagtccggattagagaagtacctttaccctgctgcagcggctgctcctttcccactgctatacccgggcatcccagcgccggccgccgccgccgccgcggctgctgcggctgcagcagctgctgctgccttcccatgcctctccagcgtcctgagtcctcccccagagaaggccggagctgcagccgcaacgctgttaccgcacgaagtagcaccccttggcgcgccccatccacagcacccgcacggccggacccaccttcccttcgctggtccccgagagccgggaaacccggaaagtagtgcacaagaagatccatcacagccgggcaaagaggcgcca

SEQ ID NO: 7834 - DNA, 1188 bp, synthetic construct
  misc_feature 1..1188: note = source = /note="Description of Artificial Sequence: Synthetic coding sequence"
  source 1..1188: mol_type = other DNA
atggtcgcaggaaccaggtgtctgctcgcactgctgctgccccaggtgcttctcggcggcgcagcgggtttggtccctgaactgggtcggagaaagttcgccgcagcctcctcaggtcgcccatcgtcccaaccatcagatgaagtgcttagcgagtttgaactccggttgttgtcaatgttcggactgaaacagcgccccacccctagcagagatgcagtcgtgccaccttacatgcttgatctttataggcgtcactctggtcaacctggctccccagcacccgaccatcgcttggagcgggctgcatcaagagcgaacaccgtccggagcttccatcacgaagaatcacttgaagaactgcctgaaacctctggaaagactaccaggagattcttctttaatctgtcgtcaattccaaccgaagagtttatcacttctgcagagcttcaggtgtttcgtgaacaaatgcaagacgcacttggtaacaactcatcgtttcaccatcggattaacatttacgagatcattaagcctgcaactgcaaacagcaagtttcctgtgacccggcttctcgacactcgactggtgaaccaaaatgcctcccgatgggagtcgtttgacgtgactccagcagtcatgaggtggactgcacagggacacgcaaatcatggatttgtggtcgaggtggcacatcttgaagaaaaacagggcgtgtccaagaggcatgtcagaatctccaggtcgcttcatcaggacgaacattcatggtcccaaatacgtccactgctcgttacctttggtcacgacggtaagggtcacccccttcacaaaagagagaagagacaagcaaaacataaacagcgaaagagacttaagtcgtcgtgtaaaagacacccactttacgtggacttttcagacgtcggctggaacgattggattgttgccccgccaggttaccatgcattctactgccatggagagtgcccttttccactcgcagaccatcttaactccaccaatcatgcaattgtgcagactttggtgaattcggtgaattccaagatacccaaagcctgctgtgttcctaccgaactctcggccatctccatgttgtatctcgatgagaacgaaaaggtggtgctcaagaactaccaagatatggtggtggagggctgcggctgtcga

SEQ ID NO: 7835 - DNA, 1188 bp, synthetic construct
  misc_feature 1..1188: note = source = /note="Description of Artificial Sequence: Synthetic coding sequence"
  source 1..1188: mol_type = other DNA
atggtcgctggaacgcgctgcctgcttgcgcttctgttgccacaggtcttgctcgggggcgctgcggggctcgtgcctgagctggggcggcgcaaattcgcagcggcctcatcgggtaggcccagcagccaaccgagtgatgaggttctttccgaattcgagctgagactcctctcgatgttcggcctgaagcaaagacccactccttcccgcgacgccgtggttcccccttacatgctggatttgtacaggcggcattccggtcaaccagggagtccagctcctgaccaccgcctggagcgtgccgcctcccgggcaaatactgtgcgcagtttccatcacgaagagagtctggaagagcttcccgaaaccagcggaaaaaccacaaggcgattttttttcaacctgtccagtattccaaccgaggagtttatcacctcggccgagctgcaagtcttccgagagcaaatgcaagacgccctaggcaataactcctccttccaccatagaatcaacatttatgagattattaaacccgccactgcaaactccaagttccctgtcactcggctgctggatacacgcctcgtgaatcagaatgcaagcaggtgggaaagctttgatgtgacaccggccgtgatgagatggacagcccaaggccacgctaaccatggttttgttgtcgaggtggctcacctagaagagaagcagggtgtgagcaagagacacgttcgaattagccgtagtctccatcaggacgagcattcctggagccagatacggccacttctagtgacgtttggccacgatggcaagggccacccactgcacaagagagagaaacgacaggccaagcataagcagcggaaacggttaaagagtagctgcaagcggcatccactgtatgttgacttcagtgatgtaggttggaacgactggatcgtggctccacccggataccacgccttctactgtcatggggagtgcccgttcccactagccgaccatctgaactccacaaatcatgccattgtgcagaccctcgtaaactcggtcaatagcaagatccccaaggcatgttgcgtgccgacggaactctcggcaatttccatgctttacctggatgaaaatgaaaaggtggtgctcaagaactaccaggacatggtcgtggaaggatgcggctgcagg

SEQ ID NO: 7836 - DNA, 1188 bp, synthetic construct
  misc_feature 1..1188: note = source = /note="Description of Artificial Sequence: Synthetic coding sequence"
  source 1..1188: mol_type = other DNA
atggtcgcgggcactagatgccttcttgcactgcttctgcctcaggttctgttggggggagcagccggtcttgtgcccgaacttggtcggaggaaatttgccgcagcgagctccggtcgtccttcgagccaacctagcgacgaggtcctctccgagtttgaactgcggctcctgtccatgttcggtctgaagcaacggcccaccccatcgagagatgctgtggtgcctccatacatgcttgacctttacagacggcattcgggacagcctggttcgcctgcccctgatcatcggctggagcgtgcagcttcccgcgcaaacactgtgagatcatttcatcacgaagagtcgctggaggaactcccggaaacctcgggaaagaccacccggaggtttttctttaatctttccagcattcctactgaagagttcatcactagcgccgagctgcaggtctttcgggaacagatgcaggacgccctggggaataactccagctttcatcatcggattaacatttacgagatcattaaacctgctactgcaaatagcaagttcccagtgacccgactgcttgacactcgtcttgtcaaccagaatgcgtcaagatgggagtcatttgatgtgacccctgcagtcatgcgttggaccgcacagggacatgccaaccacggattcgtggtggaagtcgcccacctggaggaaaaacagggtgtgtcgaagaggcatgtgagaatttcacgttccctgcaccaggatgaacacagctggagccaaattagaccactcctggtgacgtttggccacgacggtaaaggacaccctctccataagcgcgagaagagacaagcaaaacataagcaacgtaagcgtctgaagtcctcgtgcaagagacatcccctttatgtggatttttcggatgttggctggaacgactggatcgtggcgccacccgggtaccatgcgttctattgccacggtgagtgcccattccccctggcagatcacctcaactcaacgaaccatgcaattgtccaaaccctggtgaattccgtcaatagtaagataccaaaggcatgttgtgtgccaaccgaactgagcgccatttccatgttgtacctcgatgaaaatgagaaggtggtcctgaagaactatcaagatatggtggtggagggttgcggctgtaga

SEQ ID NO: 7837 - DNA, 1188 bp, synthetic construct
  misc_feature 1..1188: note = source = /note="Description of Artificial Sequence: Synthetic coding sequence"
  source 1..1188: mol_type = other DNA
atggtggccggaactaggtgtctgctcgcacttttgttaccacaggtcctccttgggggagcggccgggctggtccctgagcttgggaggagaaaattcgctgcagcctcttcaggaaggccctcctctcagccatctgatgaagttttgtcagaattcgaacttagactgctttctatgttcggactaaaacagcgcccaacaccctctcgcgatgcggttgttcctccatacatgctagacctgtaccgacggcactcagggcagcctggatctcccgcccccgatcacaggcttgagcgggcagcatcccgggccaatactgttagaagttttcatcatgaagaatcactggaagaactacctgaaacttcagggaaaacaacaagaaggtttttcttcaatctaagttccatccctactgaagaatttataacatcggctgaactgcaggtgtttcgagaacagatgcaggatgccttagggaacaactccagtttccaccaccggattaatatatatgaaatcatcaaaccagccacagcaaattccaaattccctgtgacaaggctactggatacaagacttgtgaatcaaaatgcttcccgctgggagtcctttgacgtaacacctgcagtgatgaggtggacagctcagggacatgctaaccatgggttcgtcgtcgaagttgcgcatctagaagaaaaacagggagtttcaaagcggcatgtccggatctctagatcccttcatcaggatgaacattcatggtctcaaataaggcctctacttgtgacatttgggcatgatgggaaaggacaccctttgcacaagcgcgaaaaaaggcaggccaagcacaaacaaaggaaacgcctgaaatctagttgtaaaagacatcccttatatgtagacttctccgacgtggggtggaatgactggatagtggccccacccgggtatcatgctttctattgtcatggagaatgccctttccccctggcagatcatcttaattctactaaccatgctatagtgcaaacactcgtgaattcagtcaattccaagatccccaaagcttgctgcgtgccaacagaattgagtgcaatttctatgctgtaccttgatgaaaacgaaaaagtggttctcaagaactatcaggacatggttgtcgagggatgtggatgtcga

SEQ ID NO: 7838 - DNA, 1188 bp, synthetic construct
  misc_feature 1..1188: note = source = /note="Description of Artificial Sequence: Synthetic coding sequence"
  source 1..1188: mol_type = other DNA
atggttgccggaacccggtgcttgttggcactgctgctgccacaggtcctcctcggtggcgcggcgggactggtcccggaacttggaagaagaaagtttgccgccgcgtcgtcggggcggcccagctcgcagccgtcggacgaagtgctctccgaattcgagctgaggctcctcagcatgttcggacttaaacagcgccccactccgtccagggacgctgtggtgccgccgtatatgctggatctgtaccgccgccacagcggtcaacctggaagcccggctccagaccatcgcctggaaagagcggcctcccgcgccaacacggtccggagcttccaccacgaagagtccctggaggaacttcccgaaacctcgggaaagaccaccagacgctttttcttcaacctgtcgtcaatcccgaccgaggaattcatcacttcagcggagctgcaggtgttcagagagcagatgcaggacgcgctcggaaacaattcgtccttccaccaccgcatcaacatctacgagattatcaaaccggcaacggctaactcaaagttccccgtgacccgcctgctggatacccggctggtgaaccagaatgcgagccggtgggaatcgttcgatgtcactcccgccgtgatgcgctggactgcacagggtcatgccaaccacgggttcgtggtcgaggtggcccatctcgaggagaaacagggcgtctcgaagcgccacgtgcggattagccgctccctgcaccaagacgaacactcgtggtcacaaatcagaccgctgctcgtgaccttcggacacgacggcaagggccatcctctccacaaacgcgaaaagcgccaggctaagcacaaacagagaaaaaggctgaaatcctcctgtaagcgccatccattgtacgtggatttctccgacgtgggctggaacgactggatcgtcgctccaccgggataccatgccttctactgccacggagaatgcccattcccgctggccgaccacctgaactccacgaatcatgctatcgtgcagactctggtgaactcggttaattccaagatccctaaggcttgttgcgtgccaaccgaactgtcggcgatctccatgctgtatctggatgaaaacgaaaaagtcgtgctgaagaactaccaagatatggtggtcgaaggttgcggatgcaga

SEQ ID NO: 7839 - DNA, 1188 bp, synthetic construct
  misc_feature 1..1188: note = source = /note="Description of Artificial Sequence: Synthetic coding sequence"
  source 1..1188: mol_type = other DNA
atggtagccggaaccaggtgtttgcttgcattgctcctgccacaggtgctgctggggggggccgccggactggtgccagaattgggtcgtcggaaattcgccgctgcgtcatccggccgcccatcctctcagccatctgacgaggtgctctctgaatttgagctccggctgttgtcaatgtttgggttgaagcagcgacccaccccaagtagggatgctgtggtgcccccctatatgctggacctgtatcggaggcatagtgggcagccggggtcccccgcccctgaccaccggcttgaacgcgccgcaagccgcgccaatacggttcgaagtttccaccacgaggagagcctggaggaactgcctgagacctctggtaagaccacgaggcgtttcttcttcaatttgtcttccatccctacggaagaattcattaccagtgctgagctgcaggttttcagggaacagatgcaggacgctctgggtaataattctagtttccaccaccgaattaatatatatgagattataaagcctgccaccgccaattctaagtttccagtcactcgcttgttggatactaggctcgttaaccagaatgcctcacggtgggaatcgtttgatgtgaccccggcggtaatgcgttggaccgcacaagggcacgcgaatcatggctttgtggttgaggtggctcacctggaggaaaaacaaggtgtgtccaaacgccacgtgcggatctcacggtccttgcaccaggatgaacactcctggtcgcagatccgcccactgcttgtgaccttcggacacgatggcaaaggccacccgctgcataaaagagaaaaacgacaggcaaagcacaagcaacggaaacgcctcaaaagttcatgcaaacggcatccgctttatgtggatttttctgatgtcggctggaatgactggatcgtggccccccccggctatcacgccttctattgtcatggtgaatgcccctttccgctcgctgaccacttgaattccacaaaccatgctatcgttcagaccctggtcaacagcgtgaacagtaaaatccccaaggcgtgctgtgtaccaacagagctgtccgccattagcatgctgtacctagatgaaaacgagaaggtcgtgttgaaaaattaccaagacatggttgtggaagggtgtggatgtcga

SEQ ID NO: 7840 - DNA, 1188 bp, synthetic construct
  misc_feature 1..1188: note = source = /note="Description of Artificial Sequence: Synthetic coding sequence"
  source 1..1188: mol_type = other DNA
atggtcgcaggaaccaggtgtcttttggccctgttgcttccacaagtgctgttgggaggtgcagccggactggtcccggagctcggccgccggaagttcgcagctgcttcttcagggcggccgtcgtcacagccttcagatgaggtcctcagcgaatttgagctccggctgctgtccatgtttggtctgaagcagcggccgactccgtcacgggacgccgtggtgccaccatacatgctggacctctaccgcagacacagcggacagcctggatcaccagccccggaccaccgcctcgaacgggccgcctcgcgcgccaacactgtccggtcgttccatcacgaagagtcgctcgaagaactgccggaaacttcaggcaagactactcgcagattcttcttcaatctgagcagcatccctactgaagaattcatcacctctgcggagcttcaggtattcagagaacagatgcaggacgccctggggaacaacagctccttccatcaccgcatcaatatctacgaaatcatcaaaccggccaccgcgaactcgaagttcccggtgacccgcctgctcgatacccgcctggtcaaccaaaacgcatcccggtgggaatcctttgacgtgactccagcggtgatgcggtggacggcgcagggacacgccaatcacggattcgtcgtcgaagtcgctcatctggaggaaaagcagggcgtgagcaaaaggcatgtccggatctcgcgatcgctccatcaagatgaacattcgtggtcacagatccggccactgctggtgaccttcggccacgacgggaaggggcacccactgcacaagcgggaaaagcgccaggccaagcacaagcaacgcaagagactgaagtcctcgtgcaagcggcatcctctttacgtcgatttctccgatgtgggctggaatgactggatcgtggccccacctggctaccatgccttctattgtcacggagaatgcccattcccactggccgaccatcttaactccacgaaccatgcaatcgtgcaaactttggtcaattccgtgaatagcaagatccccaaggcttgctgtgtgccgaccgaactcagcgccatctcaatgctgtacttggacgagaacgaaaaggtggtgctgaaaaactatcaggacatggtcgtggaaggatgcggctgcaga

SEQ ID NO: 7841 - DNA, 1188 bp, synthetic construct
  misc_feature 1..1188: note = source = /note="Description of Artificial Sequence: Synthetic coding sequence"
  source 1..1188: mol_type = other DNA
atggtcgctgggacgcgctgtctgttggctctgctcttgccacaggttctactgggtggggccgccggacttgtgcctgaactaggtagaagaaagtttgccgctgcaagcagcggtagacctagctctcaaccatcagacgaggttctctccgagtttgagctgaggctgctgtccatgtttgggctgaaacaaaggcccactccatctcgtgatgccgtggtccctccttacatgctcgacctgtatagaaggcactcaggccagcccgggtctccagcccctgatcaccgtttggaacgagcagcatcccgagcgaatacggtgaggtcattccaccatgaagaatccctggaagaattgcccgagacgtcgggaaagactaccaggcgattttttttcaacttgagctccatccctaccgaggaattcattacgagcgcagaacttcaggtgttcagagaacaaatgcaggatgccctcggcaacaacagtagtttccaccatcgaatcaatatatacgaaatcatcaagccggcgaccgccaactccaagttccctgtcactagacttctcgacacacgtctggtgaaccaaaacgcgagtcgatgggagtcatttgacgtgactcctgccgtgatgaggtggaccgcacaaggccacgctaaccacggcttcgttgtcgaagtcgctcacctggaagaaaagcagggcgtcagtaagagacatgtgaggatatcaaggtctctgcaccaagacgagcactcctggagtcagattcgacccttgttggtgacatttgggcacgacgggaaaggacatccactgcacaaaagggaaaagcgtcaggccaaacacaaacagcgtaaacggttaaaaagttcctgcaagcgacacccactttacgtggacttctctgatgtaggctggaacgactggatcgtggctccgcccgggtaccatgccttctactgccatggggagtgtccgtttcctttggctgaccacctgaactcgacgaatcatgccatcgtccagacactcgtcaattcagtaaactcgaagatccctaaggcatgctgtgtgccaactgagctcagcgcaatcagcatgttgtatctggatgaaaacgaaaaagtggtactgaagaactaccaagacatggtggtggaggggtgcggctgccga

SEQ ID NO: 7842 - DNA, 1188 bp, synthetic construct
  misc_feature 1..1188: note = source = /note="Description of Artificial Sequence: Synthetic coding sequence"
  source 1..1188: mol_type = other DNA
atggtcgccggcaccaggtgccttcttgccctgttgttgccccaggtgctgctcggaggagcagctggcctggtgccggaactgggaaggcgcaagtttgcagccgcgtcctcggggaggccctcgtcgcagccctcggacgaagtgctctccgaattcgagctccggttgctctcaatgttcgggctgaaacagcggccgaccccctcacgggacgcggtcgtcccgccgtacatgctggacctgtaccgcagacattcgggtcagccaggatccccggccccggatcaccgactggagagggccgcctcgcgcgcaaataccgtgagatcgttccatcacgaagaatcgctggaggagctgccagaaacgagcggtaagaccactcgccggttcttctttaatctttcgtccatcccgaccgaagagtttatcacttcggcagagctgcaagtgttcagagaacaaatgcaagacgccctgggcaataactcgtccttccaccatcggatcaatatctacgagatcattaagcctgcgaccgctaacagcaagtttccggtcacccgtctgttggatacgcgccttgtgaatcaaaacgcgtccagatgggaatcattcgacgtgaccccggctgtgatgagatggaccgcacagggacatgccaatcacggatttgtcgttgaggtggcgcaccttgaggaaaagcagggagtctcgaagcggcatgtgcggatcagcagatcacttcatcaggatgagcatagctggtcccagatcagacctcttctcgtgacttttggacatgatggaaagggacatcctctccacaaaagagaaaaaagacaggccaaacataagcagagaaaacgcctcaaatcgtcttgcaagcgccatccactgtatgttgacttctccgacgtgggctggaatgattggattgtggcgccaccaggctaccacgcattttactgccacggcgaatgcccattccccctcgccgatcacctcaacagcaccaaccacgcaatcgtccagactctcgtgaactccgtgaactcaaagatcccgaaggcctgctgtgtgccaactgaactttccgccatcagcatgctgtacctcgacgagaacgagaaagtggttctgaagaactaccaggatatggtggtcgagggatgcggatgcaga

SEQ ID NO: 7843 - DNA, 1188 bp, synthetic construct
  misc_feature 1..1188: note = source = /note="Description of Artificial Sequence: Synthetic coding sequence"
  source 1..1188: mol_type = other DNA
atggtggccggaacccgctgtcttctggcactcctgctgcctcaggttcttctgggtggagctgctgggctggtcccagaattgggtcggagaaagtttgcagctgcgtcctctggccgcccgtccagccaaccttccgatgaggtgctttccgaatttgagctgcggctcctgagtatgttcggcctcaaacagcgcccaacaccatctagagatgccgtggtgcctccttacatgctggatctttatagacggcattccgggcagcccgggagtcctgctccagatcatcggctggaaagggccgcctctcgggccaatacagtgcggtcctttcaccacgaggaatccctggaagagcttccagagacctctggtaagaccacacgcagattcttttttaatctgtcctcaatcccaacagaggagtttataacatcagctgagctgcaggtgttccgcgaacaaatgcaggatgccctcggcaacaacagctccttccatcacaggataaatatctacgagataattaaacccgccaccgctaactctaaattcccagtgacgaggctgctggatactagacttgtcaatcaaaatgccagccgatgggagtccttcgacgtgaccccagcggtcatgcgatggactgctcaggggcacgcgaatcacgggttcgttgtggaggtggcccacctcgaagagaagcagggggtcagcaagcgccacgtgcggatctcaagaagcctgcaccaggatgagcacagctggagccagatcagaccattgctcgtcacttttgggcatgatggaaagggccatccactgcacaaaagggagaaacgccaggcaaagcacaaacagcgcaaacggctgaaaagttcttgcaaaagacaccctctgtacgtcgatttcagtgacgtgggctggaatgactggattgtagcgcccccaggttaccacgctttttactgtcatggggagtgccctttccccctcgcagatcatttgaattctacaaaccatgccatcgttcaaactctcgtcaattccgtaaactctaaaatacctaaagcctgctgtgtgccaactgagctctctgctatcagtatgttgtacctcgacgagaacgagaaggtggttctcaagaattatcaggatatggtggtagagggatgtggatgtcgg

SEQ ID NO: 7844 - DNA, 1188 bp, synthetic construct
  misc_feature 1..1188: note = source = /note="Description of Artificial Sequence: Synthetic coding sequence"
  source 1..1188: mol_type = other DNA
atggttgcaggaacaagatgtttattagctttattacttccacaggttttattaggaggagcagccggacttgtaccagaacttggaagaagaaaatttgctgctgcaagttcagggagaccatcatcacaaccatcagatgaagttctttcagaattcgaattaagacttttatctatgtttggtttaaaacaaagaccaactccatcaagagatgcagtagttccaccatatatgcttgatctttatagaagacattctggacaaccaggaagtccagcaccagatcatagattagagagggccgcatctagagcaaatacagttagatcttttcatcatgaagaatcattagaagaacttccagaaacatcaggaaagaccacaagaagattttttttcaatttatcatcaattccaactgaagaattcataacatctgcagaacttcaagtattcagagaacaaatgcaagatgctttaggaaataattcaagttttcatcatagaatcaatatttatgaaataattaaaccagcaacggcaaattctaaatttccagttactagacttttagatacaagacttgtaaatcaaaatgcatctagatgggaaagttttgatgtaacaccagctgtaatgagatggacagcacaaggtcatgctaatcatggatttgtagtcgaagtagcacatttagaagaaaaacaaggagtttcaaaaagacatgttagaataagtagatctcttcatcaagatgaacattcatggtcacaaattagacctttattagttactttcggtcatgatggtaagggacaccctcttcacaaaagagaaaaaagacaagctaaacataaacaaagaaaaagacttaaatcatcttgtaaaagacatccattatatgttgacttttctgatgttggatggaatgattggattgttgcacctccaggatatcatgcattttattgtcatggagaatgtccatttccacttgctgatcatcttaatagtacaaatcatgcaattgtacaaacacttgttaattctgtaaattcaaagataccaaaagcttgttgtgttccaacggaattaagtgctattagtatgctttatttagacgaaaatgaaaaagttgttcttaagaattatcaagatatggttgttgaaggatgtggatgtaga

SEQ ID NO: 7845 - DNA, 1188 bp, synthetic construct
  misc_feature 1..1188: note = source = /note="Description of Artificial Sequence: Synthetic coding sequence"
  source 1..1188: mol_type = other DNA
atggtggctggcacgcgctgtctcctggcccttctcctgcctcaggtgttgctgggcggagcggcaggtctggtcccggaactgggacgccgcaaattcgcagccgcgtctagcggcagaccgtcctcccaacctagcgacgaggtgctctcggagtttgaactccgcctgctctccatgttcggacttaagcaaagacccacccccagccgcgacgcagtggtgcctccttacatgcttgatctgtaccggcgccactcggggcaacccggaagcccggccccagatcaccgactcgaacgggccgcgagcagagctaacaccgtccgctccttccaccacgaggagtcactggaagaactcccggaaacgagcggaaaaacgacgaggagatttttcttcaacctgtcgtccatcccaactgaagaattcatcaccagcgcggaactgcaggtgttccgggagcagatgcaagacgcactgggcaacaattcttcgttccaccatagaatcaacatctatgagatcatcaagccagctaccgcgaatagcaagttcccggtgacccgcctgttggatacccggctcgtgaaccagaatgcatcgagatgggagtcgtttgatgtcaccccagctgtgatgcggtggacggctcagggtcatgcgaaccacgggtttgtggtggaggtggcgcacctcgaagagaaacaaggagtctcgaagcggcatgtgcggatctcgaggagcctgcaccaggacgaacattcgtggtcgcaaatccggccactgctggtcaccttcggacacgatggaaagggacatccacttcataagcgcgaaaaacggcaggctaaacacaaacagagaaagaggctcaagtcgagctgcaagcggcatccgctgtacgtcgacttttccgacgttgggtggaatgattggattgtggcgccgccaggataccacgccttctactgccacggagaatgtccgtttccactggcggaccacttgaactcgaccaaccatgcaatcgtgcagaccctcgtgaattcggtgaactctaaaatccctaaagcatgctgcgtgcccaccgagctgtccgcgatctcaatgctgtacctggatgagaacgaaaaagtggtgctgaagaactaccaggatatggtggtagaaggttgcggttgcagg

SEQ ID NO: 7846 - DNA, 1188 bp, synthetic construct
  misc_feature 1..1188: note = source = /note="Description of Artificial Sequence: Synthetic coding sequence"
  source 1..1188: mol_type = other DNA
atggtagccgggactagatgtctcctcgctctactgctgccccaggtgctgctggggggagccgcagggcttgttcccgagctcgggaggagaaaattcgctgcagcctctagtggacgcccatcctcccagccgtccgatgaagtcttatccgaattcgagctgagactactctcaatgtttgggctgaagcagagacccacaccatctcgagatgccgtagtgcctccctatatgttggacctatataggaggcattcagggcagccaggatctcctgcgcctgatcatcggctcgagagggccgcctcccgggccaacactgtgagatccttccatcacgaagaatcactcgaagaactgcccgaaacttcagggaaaacaactcgaagatttttcttcaatttaagttctatccctactgaagaattcataacatctgcggaacttcaggtctttagggaacaaatgcaagatgcacttgggaacaatagttcctttcatcatagaataaatatatatgaaatcataaaaccagccacagccaactctaagttcccagtgacacggttactagatacacgcttagtgaatcaaaacgcttccaggtgggaaagtttcgacgttacacccgctgttatgaggtggacagcgcagggacatgcaaaccatggattcgtggtcgaagtagcacatctcgaagaaaaacagggggtttctaagagacacgtgaggatctccaggtctctccatcaggatgagcactcctggtcacagataaggcccctgttagtgacatttggacacgatgggaaagggcatccattacacaaaagagaaaaaaggcaggcaaagcataaacagagaaaaagactcaaatcttcttgtaaaagacatcctttgtacgtcgatttttctgatgtggggtggaacgattggatagtggcaccccccgggtatcacgccttctattgccacggggaatgccctttcccattagctgatcatcttaattcaactaaccacgcgattgtacagactctggtgaactccgtcaactccaaaatacctaaagcttgttgtgttcccacagagctatccgccatctccatgctgtatctagatgaaaatgaaaaagttgtgctgaaaaactatcaggatatggtggtggaaggatgcggatgccgg

SEQ ID NO: 7847 - DNA, 1188 bp, synthetic construct
  misc_feature 1..1188: note = source = /note="Description of Artificial Sequence: Synthetic coding sequence"
  source 1..1188: mol_type = other DNA
atggttgcagggactcgatgtttgcttgcactcctgctaccccaagtactgctgggaggtgctgccggcctggtgccagagttggggaggaggaaatttgctgcggcttccagcgggcgaccatcatcacaaccatctgatgaggttctgtctgagtttgagctcagacttctgtctatgttcggactaaagcagagacctaccccctcccgggacgccgtcgtgcctccctacatgctcgatctctacagacggcactccgggcagcccgggtctccggctcccgaccatcgcctagaacgcgctgcatcacgggcaaacaccgtgcggagttttcaccacgaggagtcacttgaggagctccctgagactagtggtaagaccacacggaggttcttcttcaatctgtcttccattcccactgaggaattcattaccagtgccgaacttcaggtgtttcgcgagcagatgcaggatgccctaggcaataacagttcttttcatcatcgcattaacatctacgaaattattaagccagcgactgccaattctaagtttcccgtcacacgcttgcttgatacaaggctggtgaatcagaatgcatcgcgttgggaatctttcgacgtgacacctgcagtgatgaggtggactgctcagggacacgccaatcacggattcgtagtggaggtcgcgcacttggaggagaagcagggcgttagcaaacggcacgtaaggatcagcagatctctgcaccaggacgaacactcatggtcgcagataagacctctgcttgtaacttttggccacgatggcaaaggacatcccctgcataagcgggagaagcgccaagctaagcacaagcaaaggaagcggctaaagtcttcttgtaaaagacaccctctctatgtcgactttagcgacgtgggctggaacgactggattgtagctcccccaggataccacgccttctactgccacggcgaatgtccatttccactggcagatcatctaaacagcacaaaccacgccattgtgcaaacccttgtcaacagcgtcaactccaagatccccaaggcctgctgcgttccgactgagctgtcagcgattagcatgctgtacctggatgaaaacgagaaggtggtgctgaaaaactaccaggatatggtggtggagggctgtggctgccgc

SEQ ID NO: 7848 - DNA, 1188 bp, synthetic construct
  misc_feature 1..1188: note = source = /note="Description of Artificial Sequence: Synthetic coding sequence"
  source 1..1188: mol_type = other DNA
atggtcgcgggcactcgatgtttgttggcactgctgctccctcaggtgttgttgggcggtgctgcaggattagttcccgagcttggtcgccgtaagttcgccgcagcatcttctggtcgaccatctagtcaaccgtctgatgaagttcttagtgagttcgagttgcgtctgctgtcgatgttcggactcaagcaacgtccgacgccttctagagacgcagtggtccctccatacatgttggacctgtataggcgtcactctggtcagccaggatcaccggctccagaccaccgtttagaacgtgcagcatctagagcaaatacagttcgatcttttcatcatgaggagtcattagaagagctaccggagacatcaggaaagacgacaagacgattctttttcaatctctcctccatcccaacggaagaatttatcacttctgcagagctccaagtattccgggagcaaatgcaggatgcgctcggtaacaattcgagcttccatcatcgaatcaacatctatgagatcatcaagcctgccacggccaacagtaagtttccagtgacacgcctcctcgatactaggttggtgaaccagaacgccagtcgctgggaatccttcgacgtcacgccagccgttatgcggtggacggcccagggtcacgcaaatcatggtttcgttgtagaggtggcccatcttgaggaaaagcagggagtgtctaagcggcatgtgcgaatcagtcgctctctgcaccaggacgaacatagttggtcacagatcagacccctcttggtgacttttgggcatgatggcaaggggcacccacttcataagcgagaaaagagacaagcgaagcataaacagcgcaaacgactgaagtcaagttgtaagaggcatccgctgtatgttgacttttccgatgtcgggtggaatgactggattgtggcgccgcctggttatcacgccttttattgccacggtgaatgcccgtttccgctcgcggaccaccttaactcaacgaaccatgccattgtccaaacactcgttaactcagttaacagcaagattcctaaggcatgttgcgtcccaactgaactcagtgcgatctctatgctctatctggacgagaatgagaaggttgtgttaaagaattatcaggacatggtggtggaaggttgtggctgccgg

SEQ ID NO: 7849 - DNA, 1188 bp, synthetic construct
  misc_feature 1..1188: note = source = /note="Description of Artificial Sequence: Synthetic coding sequence"
  source 1..1188: mol_type = other DNA
atggtcgccggtacacgctgcctgctggccctgctgttaccccaggtcctgctgggaggtgcagctggtctggtgcctgagttaggccgaaggaaatttgccgccgcatcaagcggaagaccttctagccagcctagcgatgaggtattatcagaattcgagctaagactgctaagcatgtttggcctaaagcagaggcctactccatcccgcgatgccgttgttccaccatatatgctggatttataccgaagacactccggccagcctggatcccctgcacccgaccacaggctggagcgcgccgcatctcgcgccaacaccgttcggtcttttcatcatgaggagtcactagaagaacttcctgagacttccgggaagaccactcgtcgattcttcttcaatctgtcctcaattccaaccgaggagtttatcacttctgctgaactgcaggtctttcgcgagcagatgcaggatgccctagggaacaacagttcctttcatcaccggatcaatatatatgaaattataaagccagcaacagcaaattctaagttcccagtgaccaggcttctcgatacccggcttgtcaaccagaacgcttcaagatgggaatcctttgatgttacccccgccgtcatgaggtggactgcccaaggccatgcaaaccacgggttcgtggtggaagttgcccacttagaggaaaagcagggggttagcaagcgacacgttcggataagccggagtctgcaccaggacgaacattcttggtcccaaatcaggcctctactggtaacatttggacatgacggcaaagggcacccactgcacaagagagaaaagcgccaggctaagcacaagcaacggaaacgcttaaagagctcttgtaagcgtcatcctctttacgtcgactttagtgatgtcgggtggaacgattggatcgtcgcaccacctggctatcacgctttctactgccatggagagtgcccatttcctctggcagaccatctgaatagcacaaaccatgccattgttcaaaccctggtgaacagcgtgaactcaaaaattcctaaggcttgttgtgttcctactgaactgtccgccattagtatgttgtatctagacgagaatgaaaaagtagtcctgaaaaactaccaggatatggtggtcgagggctgcggttgtagg

SEQ ID NO: 7850 - DNA, 1188 bp, synthetic construct
  misc_feature 1..1188: note = source = /note="Description of Artificial Sequence: Synthetic coding sequence"
  source 1..1188: mol_type = other DNA
atggtggcgggaacgcgatgtcttttggccttgctgttgccacaggtgctgctgggtggggccgcaggacttgtcccggaactgggccggcggaagtttgcggccgcttcctcgggacggccatccagccagccctctgatgaggtgctgagcgagttcgagctgcgcttgctgtcgatgtttgggttgaagcagcggccaacgccgagccgcgatgcggtggtgccaccttacatgctggacttgtaccgccgccactcggggcaacctggaagccctgcaccagatcacaggttggagagggcggcatcgagggcaaacaccgtgcggtccttccaccatgaggagtccctggaagaactgccagaaacctccggcaaaactacccgacggttcttcttcaacctgtcgtcgattccgactgaagaattcatcacgagcgcagagcttcaggtctttcgcgaacaaatgcaagacgccctcggcaacaactcatcattccaccatagaattaacatctacgaaatcatcaaaccggccaccgccaactcgaagttcccagtcacccggctgctcgatacgaggctcgtcaatcagaatgcgagccgatgggaatcctttgatgtgactccggcagtcatgaggtggactgcgcagggccatgctaatcacgggttcgtagtggaagtggcacaccttgaggagaagcagggagtgtctaagcgacacgtgcggatctcacggtccctccatcaggacgagcatagctggagtcaaatccgccctcttctcgtgaccttcgggcatgacggaaagggccaccctctccacaaacgggaaaagagacaggcgaaacataaacaaagaaagcggcttaagtcctcatgcaaaagacacccgctgtacgtcgatttctccgacgttggctggaatgactggatcgttgcgcctcctggataccacgcattctattgtcatggagaatgcccgtttccgctcgccgaccacctcaactcaactaatcatgccatcgtgcagactctggtcaattctgtgaactccaagatcccgaaagcgtgctgcgtgccgaccgaactgagtgcaatttccatgctgtacctggacgagaacgaaaaagtggtcctgaagaactaccaggacatggtcgtggagggatgcggatgcagg

SEQ ID NO: 7851 - DNA, 1188 bp, synthetic construct
  misc_feature 1..1188: note = source = /note="Description of Artificial Sequence: Synthetic coding sequence"
  source 1..1188: mol_type = other DNA
atggtggccggaacgagatgccttttggccttactgttgccacaagtgcttttggggggcgcggcaggcttggtcccagagcttgggcggcgtaagttcgctgccgcatcaagcggtcgacccagcagtcagcccagcgacgaggtgctctctgaatttgagctaagactcctctccatgttcggtttaaagcagaggcccactccttcacgggatgctgtggtgccaccatacatgctcgatctgtaccgccggcacagcgggcaacctggctccccagcccctgaccatagactcgagagagccgcaagccgggctaacacggtgaggagcttccatcatgaggaatcacttgaagagctgccagagactagcggaaagaccacaaggcggtttttcttcaacctgtcaagcattccgacggaagagtttataacatctgctgagcttcaggtgttcagggaacaaatgcaggacgccctgggtaacaatagttcgttccatcatcgaattaacatttatgaaatcattaagcccgcaacggctaatagcaagtttccagtgacccggctgctcgataccaggttggtgaatcagaatgcctccaggtgggagtcctttgatgtaactccggctgtgatgcgatggactgcccagggacacgcaaatcacggcttcgtcgtggaggttgcacatcttgaggaaaaacagggcgtatctaagcgccatgtccggatctctcgtagcctgcatcaggatgaacattcttggagtcaaatccgaccgcttttggttacatttggccatgacggaaaggggcaccccctgcataaaagagagaagcgccaggctaaacataaacagcgtaagcgactgaaatctagttgtaagcggcatccattgtacgtggatttttctgacgtgggatggaacgactggatcgtcgcaccccctggatatcatgccttttactgccatggggaatgtccgttcccccttgccgaccatctcaacagcacgaatcatgctatcgtgcagacccttgtcaactccgtcaattcaaaaatcccaaaagcttgttgcgtgcccactgagctgagcgctataagtatgctgtacctggatgagaacgagaaagtcgtgctgaagaattaccaggacatggtcgtggagggatgtgggtgccgg

SEQ ID NO: 7852 - DNA, 1188 bp, synthetic construct; identical to SEQ ID NO: 7835
  misc_feature 1..1188: note = source = /note="Description of Artificial Sequence: Synthetic coding sequence"
  source 1..1188: mol_type = other DNA

SEQ ID NO: 7853 - DNA, 1188 bp, synthetic construct
  misc_feature 1..1188: note = source = /note="Description of Artificial Sequence: Synthetic coding sequence"
  source 1..1188: mol_type = other DNA
atggttgcaggcacgagatgcctgctggcactcctgctgccacaggtcctgttgggcggtgcagcaggtttggtcccggagctgggccgacgtaagttcgcggccgcatcaagcgggagaccaagctcccagcctagcgacgaagtactgagtgagtttgaactgcgtttgctgagcatgtttggtctgaaacagcgccctacccctagccgcgacgcagtggtgccaccatatatgctggacctgtataggcgccacagcggccagcctggtagccccgctccagatcatcgactggagcgcgccgcgtctcgcgcgaataccgtgcgcagcttccaccacgaggaatcgttagaggagttgccagaaacttcgggtaagacaactcgtaggttcttttttaacctgtcaagcattcctactgaagaatttattaccagtgccgaactgcaggtgttccgcgaacaaatgcaggacgcgctgggtaataatagctcctttcaccaccggatcaacatttacgagatcattaaacctgcgacggcaaactctaaattcccagtgacacgcttactggacacccgccttgtcaatcagaacgcaagccgctgggaaagcttcgacgttaccccggccgttatgaggtggacggcgcaaggtcatgccaatcacggatttgtggtagaagttgcccacctggaggaaaaacaaggcgtctcgaagcgacatgttaggatttcccgctcgttgcaccaggacgagcactcctggagccaaattaggcctctgctggtcaccttcggtcatgatggtaagggccacccactgcacaagcgcgaaaagaggcaggctaagcataagcagaggaagagactgaagtcaagctgtaaacgccatcctctgtacgtggacttttccgatgtgggctggaatgattggatagtggcgcctcccggttaccacgcgttctactgccacggtgaatgtcccttcccactggctgatcacctcaactcgactaaccatgcgatcgtgcaaactttggtcaactccgtcaacagcaagatcccgaaggcatgttgcgttccaaccgaactgtccgcgatctctatgctatatctggacgagaacgagaaggttgtgttgaaaaattaccaggatatggtcgtggaaggctgtggctgccgc

SEQ ID NO: 7854 - DNA, 1188 bp, synthetic construct
  misc_feature 1..1188: note = source = /note="Description of Artificial Sequence: Synthetic coding sequence"
  source 1..1188: mol_type = other DNA
atggtggctgggacacggtgtctgctcgcgctgctgctgccccaggtgctgctggggggtgccgcgggattggtgcccgaactcgggcggcgaaagttcgcagccgcgtccagcggacgcccttcatcgcagcccagcgacgaggtgttatcggaattcgaattacgtctgctctctatgtttggattgaaacagcggccaaccccatcacgcgatgccgtggttcctccctacatgctggacttatacagaagacacagtggccagcctgggtcccccgcaccggatcaccgtcttgagagagccgcctcccgggccaatactgtccgatccttccatcatgaggaatcgttagaagaactgcctgaaacttctgggaagacaacacgcagattcttcttcaatctgagcagcatcccaactgaggagttcatcacctctgctgaactgcaggtgtttcgtgagcagatgcaggatgcgctcggcaacaatagcagtttccaccatcggattaacatatatgagatcatcaagcctgccacagcaaactccaagttcccagtgacccggcttctggataccagactcgtgaaccagaacgctagtcgatgggaaagctttgatgtgacgcctgccgtcatgaggtggacagcccagggccatgctaaccacggctttgtcgtcgaggtagctcacctggaggaaaaacaaggcgtgtccaagcgccacgttagaataagccggagcttgcaccaagacgagcatagctggtctcaaatccgcccactactggttacatttggtcacgacgggaaaggtcaccctctgcacaaaagggagaagcggcaggctaagcataagcagcgcaaaagactgaagtcttcctgtaagaggcacccgctttacgtggatttctccgacgtgggatggaacgattggattgtggcacctcccggctatcacgccttctactgtcatggtgagtgcccgtttcccctggctgaccacttaaattcaacaaaccacgctatcgttcagactttggtcaatagcgtgaatagcaaaattccgaaggcctgttgcgtacccacagagctgagcgccatctccatgctgtatctagacgagaacgaaaaagtggtgctcaaaaattatcaggacatggtggtggagggctgcggctgccgg

SEQ ID NO: 7855 - DNA, 1188 bp, synthetic construct
  misc_feature 1..1188: note = source = /note="Description of Artificial Sequence: Synthetic coding sequence"
  source 1..1188: mol_type = other DNA
atggtggccggaactcggtgccttctggccctgctgctgccacaggtcttgctcggaggcgcggccggactggtgcctgaactggggcggagaaagttcgcggctgcctcgtccggacgcccgagttcgcagcccagcgatgaagtcctgagcgagttcgagctcagactgctgagcatgttcggactcaagcagcggccgaccccaagccgcgacgccgtggtgccgccttacatgctggatctttaccggcgccattccggtcagcctggatcccccgcgccggatcaccggctggagagagccgcttcgcgcgcaaacacggtgcgctcattccaccatgaagagagcctcgaggagcttccggaaacctccggcaagacgaccaggaggttcttcttcaacctctcgtcgatcccaaccgaagaattcatcacgtcggccgaactgcaagtattcagagaacaaatgcaagatgccctggggaacaactcatcgttccaccataggatcaacatttacgagatcataaagccggccactgcaaactcgaaatttccggtaacgcggttgctcgacacccgcctggtgaatcaaaatgcatcgcgctgggagtctttcgacgtgacgccggccgtgatgcgctggaccgcgcaggggcacgctaaccacggattcgtcgtggaagtggcgcacctggaagagaaacagggagtctccaaacgccacgtgaggatctcacggtcacttcaccaggacgagcactcatggtcgcaaatcagaccactgcttgtcacttttggtcatgatggaaagggccatccgctgcataagagagaaaagcgacaagccaaacacaaacagagaaagaggctgaaaagctcatgcaagcgtcacccgctgtatgtggatttctcggacgtgggatggaacgactggatcgtggcaccccccggctaccatgctttttactgccatggcgaatgtccatttccccttgctgaccaccttaactctaccaatcatgcaatcgtccaaactctggtgaattccgtgaatagcaaaattccgaaggcctgctgcgtgccgactgagctgtcagcgatttcaatgctgtaccttgacgaaaatgagaaggtggtgctcaagaactaccaggacatggtggtggagggatgtggatgccgg

SEQ ID NO: 7856 - DNA, 1188 bp, synthetic construct
  misc_feature 1..1188: note = source = /note="Description of Artificial Sequence: Synthetic coding sequence"
  source 1..1188: mol_type = other DNA
atggtggcaggcacgcggtgcttgctggcactcctgcttccgcaggtgcttctcggaggagcagcggggctggtgccagaacttgggagacgaaagttcgcggcggctagctcgggcagaccttcctcacaaccatccgatgaagtgctctccgaatttgaactccgacttctttccatgtttgggttgaagcaaaggcccaccccctccagggacgccgtggtccctccttatatgctcgatctgtacaggagacactccggacaacccggttccccagcccctgatcatagacttgagcgagcagcaagccgggctaacactgtgcgctcgtttcaccacgaggagtcactcgaagaactgcccgaaacttctggtaagaccaccagaagatttttcttcaacctgtcgtctatacctaccgaagagttcatcacttctgctgaattgcaagtgtttcgtgaacagatgcaagatgcattgggtaacaattcatctttccaccatcgaattaacatatacgaaatcataaagcccgcaactgcaaattccaaatttcctgttactaggttgctcgacactcggcttgtgaatcagaacgcgagccgatgggaaagttttgatgtcacccctgccgtcatgaggtggactgcgcaggggcatgccaatcatggatttgtggtggaagtggcgcatttggaagaaaagcaaggagtctcgaagaggcacgtgagaatatcacgcagcctgcatcaggatgagcattcgtggtcgcaaattcgcccacttctggtgacctttggtcatgatggtaagggccatcccctgcataaacgcgagaaacggcaagctaaacacaagcaaagaaagagacttaagtcatcatgtaaaaggcaccctctgtacgtggactttagcgacgtgggctggaacgattggatcgtggcaccacccggttaccatgctttttactgccatggagagtgtcccttcccacttgccgatcaccttaatagcactaatcatgcaatcgtccagacgttggtcaattccgtgaactcgaagattcctaaggcctgttgcgttccgactgaacttagtgccatttcaatgctgtacctggatgaaaacgagaaagtggtcctgaagaactaccaggatatggtcgtcgaaggatgtgggtgtaga

SEQ ID NO: 7857 - DNA, 1188 bp, synthetic construct
  misc_feature 1..1188: note = source = /note="Description of Artificial Sequence: Synthetic coding sequence"
  source 1..1188: mol_type = other DNA
atggtcgccggtaccaggtgtctccttgcactgcttcttcctcaagtgctgttggggggagcagcgggccttgtgcctgagctgggtcgcaggaagttcgccgcagcatcgtccggtaggccgtcctcccaacctagcgacgaagtgctgagcgaatttgaattgagattgctttccatgtttggcctcaaacagcggcctactccatcgcgcgacgccgtggtgcccccatacatgctggatctctaccggaggcactcgggacaaccaggatcgccagcgcctgaccatcgccttgagagagcagcatcgagggcgaataccgtgaggagcttccatcacgaggagtccctcgaagaactgcctgaaaccagcgggaaaactaccaggcgttttttctttaacttgtcatcgatcccaactgaggagttcattacgtcagccgaactccaagtgtttcgcgaacagatgcaggacgcactggggaacaattcgtcgtttcaccaccgcattaacatatatgaaatcattaagcccgccactgctaattctaaattccctgtgaccaggcttctggacaccaggctggtcaaccaaaatgcatcgcggtgggagtccttcgatgtcaccccagcagtgatgaggtggaccgcccaaggccatgccaaccatggcttcgtcgtggaggtggcacatctggaggaaaagcagggagtctccaagagacacgtgagaatttcgaggagcctgcaccaagatgagcatagttggtcccagattcgcccccttcttgttacctttggtcacgatggtaagggacacccactccacaaacgagaaaagagacaggcaaaacacaaacagagaaagcggctgaagtcctcgtgtaagcgacatcccctgtacgtggacttttcagatgtcggctggaacgattggatcgtggccccacccggatatcatgcattttactgccatggagaatgcccctttcctcttgcggatcacttgaactcaaccaaccatgccatcgtgcaaactctcgtcaactccgtcaacagcaagatccctaaggcctgttgcgtgcctactgaacttagcgcaatctccatgctgtaccttgacgaaaacgagaaggtggtgctgaagaactaccaagatatggtggtcgaagggtgcggttgccgg

SEQ ID NO: 7858 - DNA, 1188 bp, synthetic construct
  misc_feature 1..1188: note = source = /note="Description of Artificial Sequence: Synthetic coding sequence"
  source 1..1188: mol_type = other DNA
atggtggcgggtaccagatgccttttggctctgctgcttccccaggttctcctgggtggagctgcgggattggtgccagagctgggccgccggaagtttgcagcagcaagcagtggaaggcctagctctcaaccatcagatgaagtgctttcggagtttgagctgcgcctgctctcgatgtttggcctgaagcaaagacccacccctagccgtgatgccgtcgtgcccccgtacatgttggatttgtatagacgacattccggtcaacccggctcgccagcaccagatcatagactcgagagagcagcctccagagctaacactgtgcggagctttcatcatgaagaatcgctggaagagctcccagaaacttccggaaagaccactaggagatttttcttcaaccttagcagcattcctaccgaagaattcatcacctccgcagaactgcaggtgtttcgggaacaaatgcaagacgcactggggaataactcatcttttcatcaccggatcaatatctatgagatcattaagccagcgactgctaacagtaagtttccagtgaccaggcttcttgatactcgtcttgtgaaccagaacgcatcgaggtgggaatcatttgatgtcactcctgcagtgatgcgttggaccgcacaaggccatgccaaccatggttttgtagtggaagtcgcccatctggaagaaaagcaaggagtgtcgaagcggcatgttcgcatatccagatcgctgcatcaggatgaacactcgtggagccaaatacgtcctctcctggtcactttcggacatgacgggaaaggtcatccacttcacaagcgcgaaaagcgccaagctaaacataaacagagaaagcgtctgaaatcctcatgtaaacgccatcctctctacgtggacttcagcgacgtcggatggaacgattggattgtggctcctccaggataccatgcgttctactgccacggggaatgccctttccctctcgccgatcacctgaacagcactaaccatgcaattgtgcaaactcttgtgaactcagtgaactcaaagatcccgaaagcatgctgcgtgccaaccgaactttcggcaatttccatgctctaccttgacgaaaatgagaaagtggtgcttaagaactatcaggatatggtcgtcgaaggatgcggatgccgg

SEQ ID NO: 7859 - DNA, 1188 bp, synthetic construct
  misc_feature 1..1188: note = source = /note="Description of Artificial Sequence: Synthetic coding sequence"
  source 1..1188: mol_type = other DNA
atggttgcgggcactcgctgccttctggccttgctgctcccacaggtgctgctcggaggggctgccggtcttgtccctgagttgggcagacggaagttcgcagcggcgtcatcagggcgaccgtcgagccagccatcagacgaggtgctcagcgaattcgaactgagacttctctcaatgttcgggctgaagcagaggccgactccgagccgcgacgctgtggtgccaccgtacatgctggatctctatcggaggcattcgggacagccaggatcgcctgcgcctgaccatagattggagcgggcagcctcccgggccaacactgtgcgctcttttcaccatgaggagagcctcgaggaattgccggaaacctccggtaaaacgaccagacggtttttctttaatctgagctcgatcccgactgaagaattcatcacttccgctgagctgcaagtgtttagagagcaaatgcaagatgccctgggtaacaactccagctttcaccaccgcatcaacatttacgagatcatcaagcctgcgaccgccaattcgaaatttccggtcacccgtctcctggataccaggctcgtaaaccaaaacgcgtctcggtgggaatcatttgacgtgactccggcagtgatgagatggactgcccagggccacgccaaccacggctttgttgtggaagtcgcccatttggaagagaagcaaggagtgtccaagagacacgtgcggatcagcaggtccctccaccaagacgaacactcctggtcgcaaatacgcccgctgctggtgacgttcggacatgatggcaagggacatccgctccacaagagagaaaagcggcaagccaagcataagcagcgcaagagacttaagagctcgtgtaagcgccatccactgtacgtcgattttagcgatgtcggatggaacgattggatcgtggcgcccccgggctaccatgcgttctactgccacggggaatgcccgttcccgctggccgatcatctcaactcgaccaaccatgcgatcgtgcagaccctcgttaattcggtgaacagcaagatcccaaaagcctgctgcgtccccacggagctgagcgctatctcgatgctttatctggatgagaatgagaaagtggtgctgaagaactaccaagacatggtggtggaaggatgcggttgcaga

SEQ ID NO: 7860 - DNA, 1188 bp, synthetic construct
  misc_feature 1..1188: note = source = /note="Description of Artificial Sequence: Synthetic coding sequence"
  source 1..1188: mol_type = other DNA
atggttgctggcactagatgcttgttggcattgcttttgccgcaggtcctcctcggaggagccgctggattagttccagagctgggccgacgtaaattcgcggccgcttcttcaggaagaccatcatcacagccaagtgatgaagtgttgagtgagtttgaattaagattgcttagtatgttcgggttgaagcagcgccccacgccatctcgtgatgctgtggttcccccatatatgctggatttgtatcgtcgacattcaggacaacctggatctcccgcacctgatcacagacttgagagagctgctagtcgtgctaacacagtgagatctttccaccatgaagaatcacttgaagaattgcctgagacgtctggaaagacaactcgacgattcttcttcaacttgtcatccattcccacagaagaatttatcacatccgctgaactccaagtcttccgcgaacaaatgcaagatgcattaggtaacaactcatcattccatcatagaattaatatttatgaaatcattaaaccggccactgctaacagcaaatttcctgttacaagactcctggatactagactggtcaatcaaaacgcatcccgttgggaatcatttgatgtgacgccagctgtcatgagatggactgctcaagggcatgcaaatcatggttttgtcgtggaagtcgcccacttagaagaaaaacaaggggtgtcgaaacggcatgtcaggatttcaagatcgcttcaccaggatgaacatagttggagccaaataagaccactcctggttacgttcgggcacgatggtaagggacacccattgcacaaaagagaaaaacgccaggcgaagcataaacaacgaaaacgattaaaatcgtcttgtaagagacacccgttgtatgtagatttttcagacgttggctggaatgattggatcgtggctccacctggatatcacgctttctattgccacggagaatgtccatttccattagcggaccacctaaattccacaaaccatgctattgttcaaacattagtaaatagtgtaaattctaaaattccaaaagcatgctgtgtaccgacggaactgagcgctatttcgatgctgtacctggatgagaatgaaaaagttgtgttaaagaattaccaggatatggttgtagagggatgtggatgcaga

SEQ ID NO: 7861 - DNA, 1188 bp, synthetic construct
  misc_feature 1..1188: note = source = /note="Description of Artificial Sequence: Synthetic coding sequence"
  source 1..1188: mol_type = other DNA
atggtggccggcacccgatgcctcctcgcactgcttctgcctcaagtgctcttggggggtgcagcagggcttgtgccagagcttggccggcgcaagttcgccgcagcctcctcaggaaggccttcgagtcagccaagcgatgaagttctgtctgaatttgaacttcgcctcctgtccatgttcggactgaagcagcggcccacgccatcacgggatgcagtggtccctccatacatgctggatctgtaccgcaggcattcgggccaacctgggtcgccagcaccagatcaccgtctggagcgagcagcctcgcgcgcaaatactgtgcggagctttcaccacgaggagagcctcgaagagcttcctgagacttccggaaaaaccacccgcagattcttctttaacctgagctcaatccccactgaagagtttatcaccagcgccgaactgcaagtgttcagagagcaaatgcaagatgctctgggcaacaactcgagctttcatcatagaatcaacatatatgaaatcataaaacccgccacggccaactcgaagttccccgtgactaggcttctcgacactcgtcttgtcaatcaaaacgcttcccgctgggagagctttgatgtgacccctgccgtgatgagatggactgctcaggggcatgcgaatcatggatttgttgttgaggtcgcacacctggaagagaagcagggcgtgtccaagcgtcacgttcgaatatcgcgcagccttcaccaggacgagcattcgtggtcgcaaatcaggccccttctggtcacgtttggacacgatggaaagggacaccctcttcataagcgagaaaaaaggcaggccaagcataagcaacgaaaacgcctcaaatcatcatgtaagcggcatcctctctacgtggacttcagcgacgtgggctggaacgattggattgtggcacccccaggataccacgcattttactgtcatggagagtgtccttttcctctggcagatcaccttaactcaacgaaccatgccattgtccagactttggtgaacagcgtaaactccaagatcccgaaggcatgttgcgtgccgaccgaactctcggctatctcaatgctttacctcgatgaaaatgagaaggtggtgcttaagaactaccaggacatggtcgtggaagggtgtggttgccgt

SEQ ID NO: 7862 - DNA, 1188 bp, synthetic construct
  misc_feature 1..1188: note = source = /note="Description of Artificial Sequence: Synthetic coding sequence"
  source 1..1188: mol_type = other DNA
atggtggcggggactcggtgcctcctggcgctgctgctgccccaggtgctgctgggcggggctgccggcttggtgcccgaactcggacgtcgcaagtttgcggccgcttcttccgggcgaccatcaagccaaccttcggacgaggtattaagtgagttcgagctgcggctgttgtccatgttcggacttaagcagaggccaacaccgtcccgcgacgctgtggtgcccccttacatgctggacctctaccgtcgtcattcgggacagccaggctccccggcaccggatcatagactggaacgggctgccagcagagcaaatactgtgcgtagttttcatcacgaggaatcgcttgaagaactccctgagaccagtggaaagactactcgacgctttttttttaacctgagcagtatccctaccgaagagttcatcacctcagccgagctacaggtcttcagggagcagatgcaggacgctttggggaataactctagctttcaccatcggatcaacatttatgagattatcaagccagccaccgccaactctaagtttccagtgacacgactcctcgatacacgattagtgaaccagaatgcgtcaagatgggaatcttttgacgtgacacccgcggtcatgcgctggacagcacaggggcacgcaaaccatggctttgtggtagaagtagcccatctggaagagaaacagggcgtttctaagcgccacgtgaggatttctcggagcctgcatcaggatgaacactcctggtcccagattcggcccttgctggtgacttttggacacgacggtaaaggacaccctcttcataagcgggagaagcgccaagctaagcacaagcagcgtaaacgtctgaaaagttcttgcaagagacatcccttgtacgtggatttctccgatgtgggatggaacgattggatcgtggctccgcccggctatcacgctttttattgtcacggagagtgtcctttccccctagccgaccacctgaattccactaaccacgcaatcgttcagacactggttaattccgtcaacagcaaaattcccaaagcgtgttgtgttccaaccgagctttccgcaatttccatgctgtacctggatgaaaacgagaaagtggtgctaaagaactatcaagacatggtggtggaagggtgcgggtgtcgc

SEQ ID NO: 7863 - DNA, 1188 bp, synthetic construct
  misc_feature 1..1188: note = source = /note="Description of Artificial Sequence: Synthetic coding sequence"
  source 1..1188: mol_type = other DNA
atggttgcaggaacgcgctgccttctggccctacttctcccacaagtattgcttggaggggcagctggactggttccggagctgggccgacgcaagttcgccgctgcgagttccgggcgcccctctagtcagccctcggatgaggtgctgagcgagtttgagctgcggctgctctcaatgtttgggctgaagcagcggccgaccccttcccgggacgccgtcgttcctccttatatgctggacctgtatcggcggcactccgggcagccaggatctccagccccggaccatcgccttgagcgcgctgcttcacgtgctaacaccgtccgaagcttccatcatgaggagtctctagaagagctccccgaaacctcagggaagacaaccagaaggtttttctttaacttgtccagcatcccaacggaagagttcattacaagcgcggagttgcaagtgtttagagagcagatgcaagacgccctggggaataactcaagttttcaccataggattaatatatatgaaatcatcaagccagcgaccgctaactctaaattccccgtgacccgcttactggatacgaggctggttaaccagaacgcatcaaggtgggagtcctttgacgtgacacctgcagtgatgcgttggaccgcgcagggacatgctaatcatggcttcgtggtggaagttgctcacctggaggagaagcagggggtgtctaagagacatgtgaggatatccaggagcctgcatcaggatgagcactcttggagccagataagacctctgcttgtcacctttgggcacgatgggaagggtcacccccttcacaagcgggagaagcggcaggctaaacacaagcagcgcaagaggctcaagtcttcctgtaaacggcacccattgtatgtggatttcagcgatgttgggtggaacgactggatcgtagcgccccccggatatcacgcattttactgtcatggcgagtgcccttttcctctggcagaccaccttaactctaccaaccatgcaatagtgcagactctggtgaacagcgtcaacagtaagatccccaaggcttgttgcgtcccaacagagctaagcgccatttccatgttgtacctggacgagaatgaaaaagtggtgctcaagaactaccaggacatggtggtggagggctgcgggtgccgg

SEQ ID NO: 7864 - DNA, 1188 bp, synthetic construct
  misc_feature 1..1188: note = source = /note="Description of Artificial Sequence: Synthetic coding sequence"
  source 1..1188: mol_type = other DNA
atggttgcgggtaccagatgtttgctcgctctcctgcttccgcaggtgctcctgggtggagctgcaggtctggtgcctgaacttggacggaggaagtttgcagcagcctcgtcaggccgaccctcatcccagccatcagatgaagtcttgagcgaattcgaacttcgactgctttccatgttcggcctgaaacaaagaccaaccccttcacgggatgcagtggtgcctccttatatgctggacctgtacagacgccattcgggccaacccggatcaccggcacccgatcaccggctcgagagagctgcgtccagggccaacactgtccgcagctttcaccacgaggagtcgttggaagagcttccggaaacttccggtaagaccacccgacgcttcttctttaacctgtcctcaattccaaccgaggagtttatcacctcagccgaacttcaagtttttcgggaacaaatgcaggacgcccttggaaacaattcatcgtttcaccaccgcatcaacatttacgagataatcaaaccagcaactgcaaactcaaagtttcctgtgaccaggctgctcgatacgcgactggttaatcagaatgcgtcgcgctgggaatccttcgacgtgaccccggcggtgatgcgctggaccgcacaaggacatgccaaccatggttttgtcgtggaggtggcgcacctcgaagagaaacagggcgtcagtaagcggcatgtgaggatttctaggtcgctccatcaagacgagcactcatggtcgcaaattcggccccttctcgtgaccttcggtcacgatggaaaaggacatcctctgcataaacgagaaaaaaggcaggcaaagcacaaacagagaaagaggcttaaatcctcctgcaaaagacatccactgtacgtggatttttcggatgtcggatggaatgattggattgtcgcaccaccagggtaccatgcattttactgccacggcgaatgtccatttccccttgcagatcatcttaactccaccaatcacgccatcgtgcagaccctggtgaattccgtcaactcgaaaatacctaaggcatgctgcgtgcctactgagctgtcggcaattagcatgttgtacctcgatgagaatgaaaaggtcgtgctgaagaattaccaagacatggtggtcgaaggatgtggatgccga

SEQ ID NO: 7865 - DNA, 1188 bp, synthetic construct
  misc_feature 1..1188: note = source = /note="Description of Artificial Sequence: Synthetic coding sequence"
  source 1..1188: mol_type = other DNA
atggttgcaggcacccgctgtcttttggccctgcttctcccccaggtgctgctgggaggggcggccgggctcgtcccggaactcggtaggcgtaaattcgcagccgcatcaagcggaaggccttcgagccagccgtccgacgaagtcctttcggagttcgagcttagacttctcagcatgtttggacttaaacagcggcccacccctagcagggatgcagtcgtgccaccatacatgcttgacctgtaccgacgtcacagcggtcaacctggttcacccgccccagatcaccggctcgagagggcagcatcgagagcaaacaccgtccgatccttccaccacgaggagtccctggaagaactcccagaaacttcgggtaagacgaccagaagattcttctttaacctcagctccatccctaccgaggagttcattacttccgcggagctgcaggtgttcagagaacagatgcaagatgcacttggcaacaactcatcttttcatcataggattaacatatacgagattatcaaaccagcaaccgcaaactctaagtttcctgtgaccagacttctggataccaggctggtcaaccagaacgcatctcgctgggagtcctttgacgtgacgccagcagtcatgagatggaccgcacagggccatgctaaccatggttttgttgtggaagtggcacatcttgaggaaaagcaaggggtgtcaaaacgccatgtgagaattagcaggtccctgcatcaagatgagcattcatggtcccaaatccgcccattgcttgtcactttcggacatgatgggaaaggtcacccccttcataagcgagaaaagcgccaagcgaaacacaaacagcggaagcgtcttaagagcagctgtaagcggcatccgctttacgttgatttttctgacgtgggttggaacgactggattgttgcaccacctggctaccatgccttttactgtcatggagaatgtccatttcctctggcagatcatcttaactccaccaaccacgccattgtgcagactcttgtcaactcggtgaattcgaagattcctaaggcatgctgtgtgccgaccgaacttagcgctatttccatgctctaccttgatgaaaatgaaaaggtggtgctcaagaactaccaagatatggtcgtggaaggttgcggatgcagg

SEQ ID NO: 7866 - DNA, 1188 bp, synthetic construct
  misc_feature 1..1188: note = source = /note="Description of Artificial Sequence: Synthetic coding sequence"
  source 1..1188: mol_type = other DNA
atggtggccggcaccagatgcctgctggctctactgcttcctcaggtgctgctgggtggcgcggcagggttggtgcccgagctggggagaagaaagttcgccgccgcctcttccgggcgcccttcctcccagccaagcgacgaggtgctgagtgaatttgagctcaggctgctcagcatgtttggtcttaaacaaagacccactccgagcagagatgcagtcgttccgccatacatgctcgatctatacaggagacacagcggtcaacctggatcgcctgcacccgatcaccgcctcgagagggcggcatcccgggctaatacagtgcggagcttccaccatgaagagtcgctagaggaactgcccgagacttctggtaagaccacgcgaaggttttttttcaacctgtcctccatccctacagaagaatttatcacatcagctgaactacaggtgtttcgggagcagatgcaggatgccctcggcaataatagctcatttcaccaccggatcaatatctacgagattatcaaaccagccaccgccaactctaaatttccagtgactcgcctgttggatacgcggctggtcaatcagaatgcttctaggtgggagtccttcgatgtgactcccgccgtgatgaggtggactgcccagggccacgctaaccatgggttcgttgtcgaagttgcacatctcgaagagaaacaaggagtctccaagagacacgtacgcatcagtcgtagcctacatcaggatgagcactcctggtcgcagattaggcccctgctggtgactttcgggcatgacggaaaggggcatcccctgcataagcgagagaagagacaggctaaacacaagcagcggaaacgattaaagtcttcttgcaagcggcatcctctgtacgtggatttttcagatgtgggctggaacgactggatagtggccccacccggctatcatgcattctattgccacggggagtgtccctttccacttgcagatcatcttaactctactaaccacgctatcgtgcagaccctggtgaactctgtgaattccaagatcccaaaggcctgttgtgtgccaacagaactgtcagcaatctccatgttatacttggatgagaatgagaaagttgttctgaagaactatcaagatatggtggttgaagggtgtgggtgtcgc

SEQ ID NO: 7867 - DNA, 1188 bp, synthetic construct
  misc_feature 1..1188: note = source = /note="Description of Artificial Sequence: Synthetic coding sequence"
  source 1..1188: mol_type = other DNA
atggtcgcgggcactcggtgcctcttggccctgctgctgccccaagtgctcctgggcggcgcagcgggactcgtgcccgaactgggcagacggaagttcgccgccgcatcgtcgggacgcccatcgtcacagccgtccgatgaggtgttgtcagagttcgaattgcggctgctttccatgttcggactgaagcagcgaccgactccaagccgggacgctgtggtgccgccttacatgttggatctctatcgcagacacagcgggcagccgggtagcccggccccggaccaccggctggaacgcgccgcgtcgcgcgcaaacaccgtgcgcagctttcatcacgaagagtcgctcgaggagctgccagaaacttcgggaaagaccactagacgcttcttcttcaacctcagctcgattccgactgaagaattcatcaccagcgccgaactccaagtgtttagagagcagatgcaagatgctctcggtaacaattccagttttcaccatcgcatcaatatctacgaaattatcaagccggcgactgcgaactcaaagttcccggtcaccaggctgctggacacgaggctggtcaatcagaatgcgtccagatgggagtcttttgatgtgacccctgctgtgatgcggtggaccgctcagggacatgcaaatcatggattcgtcgttgaagtggcccatctcgaagagaagcagggagtgtcaaagaggcatgtcagaatctcccgctcccttcatcaagatgagcactcatggtcacagatccgcccactgctcgtcacctttggacacgatgggaaaggccaccctctgcacaaacgtgagaaacggcaggcaaagcataaacagaggaagcggctgaagtcgtcctgtaaacggcaccccctgtacgtcgacttctccgacgtgggttggaacgactggatcgtggccccaccaggataccacgccttctactgccacggcgaatgccctttcccgcttgctgaccacctgaactcaacgaaccacgccatcgtccaaactcttgtgaattccgtgaactcgaagatcccgaaggcatgctgcgtgcctaccgagctgagcgccattagcatgctgtacctcgacgagaacgaaaaagtggttctgaagaactaccaagacatggtagtggaagggtgtggatgccgc

SEQ ID NO: 7868 - DNA, 1188 bp, synthetic construct
  misc_feature 1..1188: note = source = /note="Description of Artificial Sequence: Synthetic coding sequence"
  source 1..1188: mol_type = other DNA
atggtggctggaactcggtgcctgctggccctgctgcttccacaggtcctgctcgggggagcggcgggacttgtgccagagcttggacggcgtaagttcgcggctgccagctcaggtcggccttcgtcgcaacccagtgacgaagtcctgtccgaattcgaattgcggctcctctccatgttcggtctgaagcagcgaccgactccgtctcgggacgcggtcgtcccaccttacatgctggacctgtaccggaggcacagcggacaaccaggttcaccggcccctgaccaccggttggagcgggctgcgagccgagctaacactgtgcggtcgtttcatcatgaggagtcgctggaggaactgccagaaacctcaggcaagacgacccgccgcttcttcttcaacctttcgagcatcccgactgaagaattcattacctccgccgaactgcaagtctttcgcgagcagatgcaagacgcgcttgggaacaattcgtcattccaccaccgcatcaacatctacgaaatcatcaagccggcaaccgccaactccaagtttccagtcactcgcctcctggacactcgcctcgtgaatcagaacgcgtcccgctgggagtcattcgacgttactccggcagtgatgagatggactgcccaaggacatgcgaaccacggctttgtggtggaagtcgcccatttggaagaaaagcagggtgtgtcaaaaaggcacgtgcggatctcccggtccctccaccaggacgagcactcgtggtcgcagatcaggccgctgctggtgaccttcgggcatgacggtaaaggccatccgttgcataagagagaaaagcggcaggcaaaacacaagcagcgcaagcgcctgaagtcgtcatgcaagagacacccactttacgtggacttctcagacgtcggatggaacgattggatcgtggcacctccgggctaccacgccttctactgccatggagagtgcccattcccgctggccgaccatttgaacagcactaaccatgcaattgtgcagactctggtcaactcggtgaacagcaagatccccaaggcctgctgcgtgcctacggaactctcagccatctccatgctgtacctcgatgagaatgagaaggtcgtcctgaaaaactaccaggacatggtggttgagggatgtggttgccgc

SEQ ID NO: 7869 - DNA, 1188 bp, synthetic construct
  misc_feature 1..1188: note = source = /note="Description of Artificial Sequence: Synthetic coding sequence"
  source 1..1188: mol_type = other DNA
atggtggccggaacccggtgcctgttggctctgcttttgccgcaggtcttgctcggaggcgccgccgggttggttccggaactgggacgccgcaagtttgcagcggcctcctcgggtcggccgtcatcccagccgtcagacgaagtgctgtcagagttcgaactgagacttctgtcaatgttcggactcaagcagcgccctacgccttcccgggacgcagtggtgccaccgtacatgctggacctgtacagaagacattccggtcagccgggctctccagccccggaccatcggctggagcgggcagcgagccgtgcgaatacggtgagatcgttccatcacgaggagagcctggaagagctgcctgaaacgtctggtaagactacgcggcggtttttctttaaccttagctccatccccaccgaggagttcatcacctccgcggaactgcaggtgttccgggagcagatgcaagatgcactgggaaacaatagctcgttccaccataggatcaacatttacgaaatcatcaagccagcaactgcgaacagcaagttcccggtgactcgcctgctggacacccggctggtgaatcaaaacgcctctcgctgggagtctttcgacgtgactccggcggtgatgcgctggactgcgcagggacacgcaaatcatggattcgtggtcgaggtggcgcacctcgaggaaaaacagggcgtgtccaagcggcatgtccgtatctcccgctccctgcatcaggatgagcacagctggtcgcagatcagacctctgctcgtgacctttggacatgacgggaagggacaccccctccacaaacgagaaaagcgccaagccaagcacaagcaaagaaaaaggctcaagtcaagctgtaaaaggcatccgctttatgttgatttctcagatgtcgggtggaacgattggatcgtggcccctccgggttaccacgcgttctattgccacggcgaatgtccgttccctctcgcggatcacctcaacagcaccaaccacgccatcgtgcaaactctggtgaattccgttaacagtaaaatcccgaaggcctgctgtgtgccaactgaactgtcggcgatttccatgttgtacctggacgaaaatgagaaggtggtgctgaagaactaccaagatatggtcgtggaggggtgtggatgcaga

SEQ ID NO: 7870 - DNA, 1188 bp, synthetic construct
  misc_feature 1..1188: note = source = /note="Description of Artificial Sequence: Synthetic coding sequence"
  source 1..1188: mol_type = other DNA
atggtcgcaggaactcgatgtcttctcgccctcctgctgccccaggtgttgctcggcggcgctgcgggactggttccggagttggggcggcggaagttcgcagcggccagcagtggacgaccatcttcccagccaagcgatgaggtgctgagcgagtttgagctgcgccttctgtctatgttcggtctgaagcagcgacccactcccagcagagatgccgtcgtgccgccgtacatgctagatctttaccgtcgccacagtggacaacctggctcccccgcgccagatcatcggctggagcgtgcagcctcgagagcgaacacggtcaggtcttttcaccatgaggagagtctggaagaactgcctgaaacctcaggtaagaccaccagacgctttttttttaacctgagtagcatcccaacagaagagtttattaccagcgctgaacttcaggtgtttcgagagcagatgcaggatgctttaggaaataactccagcttccaccatcgaatcaacatctatgagatcataaagccagctaccgcgaactctaagttccccgtgacccgcttgctcgatacacgcctagtgaaccagaacgcctcccggtgggaatctttcgacgttactccagctgttatgcggtggactgctcagggacatgcaaaccacggattcgtagtcgaggttgcacacctggaagagaagcagggggtgagtaaaaggcacgtccgcatcagccggtctctacaccaggacgaacactcctggtctcaaattcgccctctacttgtgacgtttggccatgacggcaagggtcacccgctgcacaaaagggagaagcgtcaggccaaacataagcagcggaaaaggcttaaatctagctgcaagcgacatccgctttacgtggacttcagcgacgtggggtggaacgattggatagtcgcccctcccggctatcacgcattctactgtcacggggagtgtccgtttccattagctgatcatctgaactccactaaccacgccatagtgcagactctcgttaattccgtgaattctaagattccgaaggcttgttgcgttcccactgagctctctgctatctcaatgttgtacctagatgagaatgaaaaggtggtgcttaaaaactaccaggatatggtggtggaaggttgcggatgtcgc

SEQ ID NO: 7871 - DNA, 1188 bp, synthetic construct
  misc_feature 1..1188: note = source = /note="Description of Artificial Sequence: Synthetic coding sequence"
  source 1..1188: mol_type = other DNA
atggtggccggaactcggtgtctgctcgcactgcttttgcctcaagtgctgctggggggggccgcaggactagtgcccgaactgggcaggcgaaaattcgccgctgcttctagtggtagaccatcatcacagccttctgacgaagtgttgtctgagttcgaacttagacttctatctatgtttggcttaaagcagcggccaacccctagtcgtgatgcagtggttcccccctatatgctggacctgtatagacgacactcaggccaacctgggtcccctgcaccagaccataggctggaaagagccgctagcagagctaacacagtgcgatcatttcaccatgaggagagtctggaggagctgccggagacttcaggcaagactactcggagatttttctttaatctgagttccattccaacagaggaatttataacttctgctgagttgcaagtctttagagaacagatgcaggacgctctgggcaataacagctcctttcatcaccgaatcaacatttacgagatcatcaaacctgctactgcaaactccaagtttcctgtgaccaggctccttgatacccgactcgtgaaccaaaacgcctcaaggtgggagtctttcgatgtgaccccggccgtgatgcgatggaccgctcagggacacgcaaatcatggtttcgtggtggaggtggcccacctggaagagaagcaaggtgtctccaaacgacacgtgcggatttctcggtcacttcatcaggatgaacactcttggtcccagattagacccctgctggtcacttttggccatgacggaaaggggcaccccttacataagcgagaaaaacggcaagcaaagcataagcagagaaaacgactcaagagctcctgtaagaggcacccgttgtatgtggacttctccgatgtaggctggaatgattggatagttgctccacccggttaccacgctttctactgccacggagagtgccccttcccccttgctgaccacctgaactcaactaatcatgcaatcgtccaaacattggtgaatagcgtcaacagcaagataccaaaagcctgctgcgtcccaacagaactgtctgccataagcatgctctacctggacgagaatgaaaaagtggttctcaaaaattatcaagacatggtcgtggaaggctgtggctgcaga

SEQ ID NO: 7872 - DNA, 1188 bp, synthetic construct
  misc_feature 1..1188: note = source = /note="Description of Artificial Sequence: Synthetic coding sequence"
  source 1..1188: mol_type = other DNA
atggttgccggtacacgctgtctgttggctctgctgttgccccaggtcctcctaggaggagccgccggattggttcccgaactgggccgtagaaagtttgcggccgcctcttccggtaggcccagcagccagccaagcgatgaagttctgagcgagtttgagcttcgtttgcttagcatgtttggcttgaagcaacggccgaccccttcaagggacgctgtcgtgccaccatacatgttggacttgtaccggaggcatagtggtcaacccgggtccccagcccctgaccatcgtttggaaagggccgcgtcacgcgcaaatacggttcgcagtttccatcacgaggaatcacttgaagagttgcccgagacttctggcaagaccacccggagatttttttttaatctttccagcatcccgaccgaggaattcatcacctccgcagagcttcaggttttccgcgagcagatgcaggacgccctcggaaacaactcctccttccatcaccggatcaacatctacgaaataataaagccggctacagctaacagtaagttcccagtgacccggcttctcgatacacggctggtgaaccaaaatgcttccaggtgggaaagtttcgatgtgactcctgccgtgatgaggtggaccgcacaggggcacgcaaaccacggttttgttgtagaagtggctcatctggaagagaaacagggcgtgtcaaagcggcacgtacggatcagcagatctctgcaccaggacgaacattcatggtctcagatccgcccactactggttacatttgggcacgatggtaagggtcatccacttcataagcgtgagaagaggcaggccaaacacaagcagcggaaaaggctcaaatcatcctgtaagcgtcaccccctctatgtggatttcagcgatgtgggatggaatgactggatagtggcaccccctggctatcatgctttctattgtcatggggaatgtccttttccattagctgaccaccttaattctactaaccacgccatcgtgcaaacattggtgaactcggtcaatagtaagatcccgaaagcttgttgtgtgcccactgagctgagcgccatttccatgctgtatcttgacgaaaacgaaaaagtggtactgaagaactaccaggacatggtcgtggagggctgtgggtgtcgt

SEQ ID NO: 7873 - DNA, 1188 bp, synthetic construct
  misc_feature 1..1188: note = source = /note="Description of Artificial Sequence: Synthetic coding sequence"
  source 1..1188: mol_type = other DNA
atggtcgcgggaactcgttgcttgctggcactcctgcttcctcaggtcctccttggaggagcagctggtttggtgccagagctgggccggcggaaatttgccgccgcaagctccggacggccttcgtcacaaccctcagatgaagtgctttccgaatttgagttgaggcttctgtcgatgttcggtcttaagcagaggcctaccccttcccgcgatgctgtggtgcctccctacatgctcgacctgtacagacgacattcgggacaaccaggttcacctgcaccagaccaccggcttgaacgcgctgccagccgcgcaaataccgtgcgttcattccatcatgaggaaagcctcgaggagctgccagaaacgagcggtaaaaccacgcggcggtttttctttaacctcagcagcatacccactgaagaattcataaccagcgcagagctgcaagtgtttagggaacaaatgcaggacgctttgggaaacaattcctcgttccatcatagaatcaacatttacgaaatcattaagcctgcaactgccaactcgaaattcccggtgaccagactccttgataccagacttgtgaaccaaaatgcctcccgttgggagagctttgacgtgactcctgccgtcatgaggtggacggcacagggccacgcaaaccatggctttgtggtcgaagtggcgcaccttgaagaaaaacagggagtctcaaagagacacgtgcgaatcagtcggtcactgcatcaggatgagcattcatggagccaaatccgcccactgttggtgacttttggccatgatgggaagggacacccactccataagcgggaaaaacggcaagcaaagcataagcaacgcaaaaggctgaagtcaagctgtaagcgacatcctctttacgtggattttagcgatgtgggatggaatgactggatcgtcgcacctcctggataccatgcattttactgtcatggcgaatgtccattccctcttgcagatcatctcaatagcactaaccacgcaattgtccaaaccctggtgaactccgtgaactcgaaaattccgaaggcatgttgtgtccctaccgaactgtccgcaatttccatgctgtacctggacgaaaacgaaaaggtggttctgaagaactaccaggatatggtggtggaggggtgtggatgtcgg

SEQ ID NO: 7874 - DNA, 1188 bp, synthetic construct
  misc_feature 1..1188: note = source = /note="Description of Artificial Sequence: Synthetic coding sequence"
  source 1..1188: mol_type = other DNA
atggtcgcagggactaggtgtctcctcgccttgctcctgcctcaagtcctcctgggaggtgcagcaggtctggtgccagaacttgggagaagaaagtttgcagcagcttcctccggacgtccatcaagccaaccctccgatgaagtgcttagcgagtttgaactccgcctgctcagcatgtttggtcttaagcaaaggcctaccccaagcagagatgcagtcgtgccaccttacatgctcgatctgtacagacgccactcgggtcaaccaggttcgcctgcaccagatcacagactcgaaagggcagcctcgcgcgcaaacactgtgcgatcctttcatcatgaggaatctctggaggaactgcctgagactagcggaaagaccacccgtcggtttttctttaacctgtcgtcgattcctactgaggagtttatcacttcggcagaactgcaagtattccgcgaacaaatgcaggatgccctggggaataactcatccttccatcatagaataaacatttacgagattatcaaaccggcaaccgcgaactccaaattcccggtcactaggcttctggatacccgacttgtgaaccagaatgcctcgagatgggagtcattcgacgtgactcctgcagtcatgcgttggactgcgcaaggacatgcaaatcatggttttgtggtggaagttgcacatctggaagagaagcagggagtgtcaaaacgtcatgtgcgcatctccaggtcgctccatcaggacgaacattcatggtcccaaatccggcctcttctggtgaccttcggtcacgacggaaagggacatccactgcacaagcgggaaaaacgacaggcaaaacataaacaacgcaagcgccttaagagctcgtgtaaaagacatccactgtacgtcgatttttcagatgtcggttggaacgattggattgtcgccccaccaggataccacgcattttactgccatggagagtgcccatttcccctggcagatcacctgaactccactaaccatgctattgtgcaaacccttgtcaactcagtgaattcgaagattcctaaggcctgttgtgtgccgactgaactgagcgcgatttcgatgctgtacctcgacgagaacgaaaaggtggtcctgaagaactaccaggatatggtggtcgaaggatgtggatgccgc

SEQ ID NO: 7875 - DNA, 1188 bp, synthetic construct
  misc_feature 1..1188: note = source = /note="Description of Artificial Sequence: Synthetic coding sequence"
  source 1..1188: mol_type = other DNA
atggtggcaggcaccaggtgtctgcttgcactgctgttgccacaggtcctgctgggaggcgccgccgggcttgtgcccgaacttggacggcggaagtttgcagcagcatcctcgggtcgtccgagcagccaaccttctgatgaagtgctctcggagttcgaactgcgcctcctcagcatgtttggcctgaagcaacgccctactccctcgagagatgctgtggtgccaccttacatgttggatctgtaccggagacactccggacagccaggctctccagcgcctgaccaccggctggagagagcagcctcaagagcaaataccgtgaggtcatttcatcatgaagagagcttggaagaacttccggagacttcaggcaagacgacccgccgcttctttttcaacctttcaagcatcccaactgaggagttcataacgagcgccgaattgcaggtgttcagagaacagatgcaggatgcactgggaaacaactcgagctttcatcatagaattaacatctacgaaatcattaagcctgcaactgcaaatagcaagtttcctgtgactaggctcctcgacactcggctggtcaaccagaatgcaagcagatgggaatccttcgacgtcactccggcagtcatgaggtggaccgcgcaagggcacgctaatcacggattcgtcgtggaagttgctcaccttgaagagaagcaaggggtttcgaagcgtcacgtgagaatttcgagatcgctgcatcaagatgagcattcctggtcacaaattagaccccttcttgtcaccttcggtcatgatggaaagggacaccctttgcacaagcgagagaagaggcaagccaaacataaacagcgcaaacgacttaagagctcgtgtaaacggcatccactttacgtcgattttagcgacgttggatggaatgattggattgtggcacccccgggttaccatgccttttactgtcatggagaatgccccttccccctggcggaccacctcaatagcacgaaccacgctattgtgcagaccttggtgaattcggtgaattcgaagatcccaaaggcatgttgtgtgcctactgaactgtcggccatttcgatgctctatttggatgaaaacgaaaaagtcgtgcttaagaattaccaggacatggtggtcgagggatgtggttgcagg

SEQ ID NO: 7876 - DNA, 1188 bp, synthetic construct
  misc_feature 1..1188: note = source = /note="Description of Artificial Sequence: Synthetic coding sequence"
  source 1..1188: mol_type = other DNA
atggtcgccggaactaggtgcttgctcgccctcctccttccacaggtcctgctgggaggagcagccggactggtcccagagctgggccgccgcaaattcgccgcggcctcgagcggacgcccatcatcgcagccgtcagacgaagttctctccgaattcgaactgcgcctgctctcgatgttcggactgaaacagcgaccaacgccgtcgagagatgcagtggtgccgccatacatgctcgacctctatagacgacattccggccaacccggcagccctgctccagaccacaggcttgagcgggctgcctccagagcaaataccgtgcgctcgttccaccatgaagagagcctcgaggaactgccagagacgtcagggaaaactacccgccggttcttcttcaacctgtcgtccatcccaactgaagagtttatcaccagcgctgagcttcaggtgtttagagaacaaatgcaggacgcactcggaaataacagctccttccatcatcgcataaacatctacgagatcatcaagcctgccactgccaattccaagtttccggtgaccaggctgctggataccaggctggtgaatcagaacgcctctcggtgggaatctttcgatgtgacccctgccgtcatgagatggactgcgcaaggacacgccaatcatggattcgtggtggaggtggcccatctggaagaaaagcagggtgtctccaagcggcatgtgcgcatctcccggtcgctccaccaagacgaacattcctggtcgcagatccgcccgctgctggtcacctttggacacgatgggaagggacaccctctgcataagcgtgagaaaaggcaggccaagcataaacagagaaagcgcctcaagagcagctgtaaaaggcacccgctgtacgttgacttttccgatgtgggatggaatgactggatcgtcgcgcctccgggctaccatgctttctactgccacggggaatgtccattcccgcttgcggatcatctgaattcgactaaccatgctatagtgcaaactttggttaattcggtgaactcgaagatcccgaaggcgtgttgcgtgccaactgagctgagcgcgatttcaatgctctacttggacgaaaacgagaaggtcgtgctcaaaaactaccaagatatggtggtcgaagggtgtggttgcagg

SEQ ID NO: 7877 - DNA, 1188 bp, synthetic construct
  misc_feature 1..1188: note = source = /note="Description of Artificial Sequence: Synthetic coding sequence"
  source 1..1188: mol_type = other DNA
atggtggcaggtacaagatgcctactcgcactgttactgccccaagtactgctgggcggagcagctggcctcgtgcctgaacttgggagaagaaaatttgcagcggccagctccggcagaccttctagccagccctctgatgaggttctttccgaattcgaactgcggctcctttctatgttcggccttaagcagcggcccaccccaagcagagatgcagtagtgccgccttacatgttggatctgtataggaggcatagtggacagccaggctcacctgccccagatcataggttagagagagcagctagtcgcgcaaacaccgtcaggtcatttcaccatgaagaatctctggaggaattaccggagacctccggaaagaccaccagacggttcttcttcaacctcagtagcattcccactgaagagttcatcacaagcgctgaactgcaggtttttcgggagcagatgcaggatgccctgggaaacaacagttcattccaccaccggattaacatctacgaaatcatcaaacctgccaccgccaatagtaagtttcccgtgaccaggctgttggatacacgccttgtcaaccaaaacgcatcacggtgggaatcatttgatgtgactcccgctgtcatgagatggactgcccaaggtcatgccaatcatggtttcgtcgtggaggtagcacaccttgaggaaaagcagggagtctctaagaggcacgtgaggatcagcagaagcctccatcaggatgaacatagctggagtcaaattaggccacttctggtgacttttgggcacgacggaaagggccaccccctgcacaagagggagaaaaggcaggcaaaacacaagcagaggaaaaggctgaagagctcatgcaaaagacatccgctttatgtagatttctccgacgtcggatggaacgactggatcgtggcaccgccaggctatcatgcgttctactgccacggtgagtgcccttttccactcgctgaccacctgaatagtactaaccatgccatcgtgcagactctcgtgaatagcgtgaacagcaaaatcccaaaggcctgttgcgtacccaccgaactcagcgcgattagcatgctgtacttagatgaaaatgagaaagttgtactgaaaaactatcaagacatggtggtcgagggatgtggatgccgc

SEQ ID NO: 7878 - DNA, 1188 bp, synthetic construct
  misc_feature 1..1188: note = source = /note="Description of Artificial Sequence: Synthetic coding sequence"
  source 1..1188: mol_type = other DNA
atggttgctggtacaagatgtctacttgctcttttgttgccacaagttctattgggcggggctgctggccttgttcctgaattggggcgcaggaagtttgcggcagcatcgagcggtcgcccatcttctcagcccagcgatgaggtgttgtccgaatttgaactcagactattgagtatgttcggtttgaagcagaggccaactccatctcgtgatgctgtggtgcccccatacatgttggatctttataggagacacagtggtcagcctggaagcccagctcccgaccataggcttgaacgggccgccagcagggctaatactgtcagatctttccatcacgaagagtcacttgaggaattaccagaaacttcaggcaaaacgacacgaaggtttttctttaatttgtcaagcattccaacagaggaattcatcacgtcagccgagctacaggtattccgcgagcaaatgcaggacgcattgggaaataactcatcgtttcaccacaggatcaacatctatgaaatcatcaagcctgccactgctaactcgaagtttcctgtgacaagacttttggataccagactggtgaatcaaaatgcctcacgctgggaaagtttcgacgtcacccctgctgttatgcgctggacagctcagggccacgctaaccacgggtttgttgtcgaggttgcacatctcgaagagaaacagggtgttagtaaaagacatgtcaggattagtaggtcactccatcaggatgagcactcttggtctcaaatacgccctttactagtgacatttggccatgatggtaagggacacccgcttcataaacgggaaaaaaggcaggctaagcataaacagaggaaacgacttaaatcaagctgcaagaggcatcctttatacgtggattttagtgacgtagggtggaatgattggatcgtagctcctcccggatatcatgctttttactgtcacggcgagtgtccattccctttggctgatcatttgaactccaccaatcatgcaatagtgcagaccctcgttaatagcgttaactcgaaaatcccaaaggcttgttgtgttccaactgagctcagcgccatatcaatgctctatttagacgagaacgaaaaagttgtccttaagaactatcaagacatggtcgttgagggttgcggttgtaga

SEQ ID NO: 7879 - DNA, 1188 bp, synthetic construct
  misc_feature 1..1188: note = source = /note="Description of Artificial Sequence: Synthetic coding sequence"
  source 1..1188: mol_type = other DNA
atggtcgcaggtaccagatgcttgctggctctgttacttccccaggtactgctcggcggggctgccggactggtgccggagttaggtaggcggaagtttgcagctgcaagctctggtaggcctagctcgcagccctctgacgaggttttgtctgagttcgagctaaggctgcttagtatgtttggactgaaacagcggccgacacctagtagagatgcagtagtgcccccctatatgctggatctgtaccgccgccactctgggcagcctggatcccccgcgccggatcaccgtttagaaagggccgctagccgcgctaacaccgtgaggtctttccatcatgaggagtctctcgaagagctgcccgaaacctcaggcaaaacaacacgacgattctttttcaatctcagcagcatcccaaccgaagagtttattacctctgccgagttgcaagtgttccgcgaacagatgcaggatgctctgggcaataactccagcttccaccatcgtattaatatttatgagattataaaaccggctaccgccaactcgaaatttccggtgacgagactcctggatacccggctggtgaatcagaacgcctcacgctgggaaagcttcgatgtgacccctgctgtgatgagatggaccgctcagggccatgctaaccatgggttcgtggtcgaggtggcacatctcgaggagaagcagggcgtttctaaaagacacgtccggattagcaggtctctgcatcaggacgagcacagttggagccaaatcagacctctgctcgttacgtttgggcatgacggcaaagggcaccctttgcacaagagagaaaagaggcaagctaaacataaacagcggaaacgactcaaatcatcctgcaaacggcatcctctgtacgttgatttcagtgatgtgggatggaacgattggattgtggcacctccagggtatcacgccttctattgccacggcgaatgccctttccctctagccgaccacttaaacagcacgaaccacgccattgtgcagacactggtgaactccgtaaactccaaaatcccaaaagcctgttgtgtcccaacagaactgagcgctatatctatgctctaccttgacgagaatgaaaaggtagttctcaagaactaccaggatatggtagtcgagggatgtggctgcagg

SEQ ID NO: 7880 - DNA, 1188 bp, synthetic construct
  misc_feature 1..1188: note = source = /note="Description of Artificial Sequence: Synthetic coding sequence"
  source 1..1188: mol_type = other DNA
atggtggccggaactagatgcctgctggcgctgctcctgccccaagtgctcctgggaggtgcagccggactggtgccggaacttggacgacggaaattcgccgccgcctcatcaggccgcccctcaagccagccgtcagatgaagtgctctcggagttcgaattgcgcttgctctcgatgttcgggctcaaacagcggccgaccccttcacgagacgccgtggtgccgccgtacatgctggacctgtaccgtcgccactcaggacagccaggatctcctgcaccggaccatcgccttgaacgagcagcgtctcgcgctaataccgtgcgatcattccaccacgaggaaagccttgaagagctgcctgaaacctccggcaagactaccagacggttcttctttaatctgtcgtccatcccaacggaagaattcatcacgtcggcggaactgcaagttttccgggagcagatgcaggatgctcttggaaataacagctcttttcatcaccggataaacatctacgagatcataaagcctgcaaccgccaactcgaagtttccagtgactagactgctcgacactcggctggtcaaccagaacgcaagccgctgggagtcttttgatgtgaccccggcagtgatgaggtggaccgcgcagggacatgccaaccacggtttcgtggtggaggtcgcacatctcgaggagaaacaaggcgtctccaagcggcacgtccgcatctccagatccttgcaccaagacgaacattcctggtcacagatcaggcccctgcttgtgacgttcggacatgacggtaagggccacccgctccacaaacgcgaaaaaagacaggctaaacacaaacagagaaagcgactcaagtcatcgtgcaagcgccacccactctacgtggatttcagcgatgtgggatggaatgactggatcgtcgcccctccgggctaccatgctttctattgtcacggtgagtgtccatttcccctcgccgatcacctgaactccaccaatcatgccatcgtccagactcttgtgaactctgtcaactccaagattccgaaggcctgctgcgtgccgactgaactgtcggcgatctccatgctgtacctggacgaaaatgagaaggtcgtcctgaaaaactatcaagatatggtggtcgagggttgtggatgcaga

SEQ ID NO: 7881 - DNA, 1188 bp, synthetic construct
  misc_feature 1..1188: note = source = /note="Description of Artificial Sequence: Synthetic coding sequence"
  source 1..1188: mol_type = other DNA
atggttgcaggcacccgctgtttactcgctctgctactgccccaggttctgcttggaggcgccgcgggcctggtgcctgagctgggccggcggaaatttgctgcagcatcttctggtcggccgtcaagtcagccttccgatgaagtactgtccgaattcgagctcaggctgctaagcatgttcggtctgaaacagcgacccaccccgtctcgtgatgcagtggtgccaccttacatgctcgatctctatcgaagacattctggacagcctggtagtcccgctcctgatcatcggctggaaagggccgctagccgcgccaacactgtgagaagttttcaccacgaagagagccttgaagagttacctgagactagcggcaaaaccacacgtagattttttttcaatttgtctagtatacccacagaggagtttataacctccgcggagctgcaggtgtttagggaacagatgcaggacgctttgggtaacaatagctccttccaccaccgcattaatatttacgaaattatcaaacctgctaccgccaattctaagtttcccgtgacacgattgctggatacacggctggtgaaccagaacgcaagcagatgggaatccttcgatgttacaccagctgtgatgaggtggacggcccagggccacgcaaatcatggcttcgtggtggaggtggcgcatctagaggagaagcaaggagtgtcaaaaaggcacgttaggataagcagatctttacaccaggacgagcactcctggtcccaaataagacctctgttggtgaccttcggccatgacggtaagggacacccattacacaaaagagagaagagacaggcgaagcacaagcagcgcaagagactaaagtcttcgtgtaagcggcaccccttgtatgtggacttcagtgacgtgggctggaatgattggatcgtggctccccccggctaccatgcattctattgccacggtgagtgtccattcccgctggctgaccacctcaactctacaaatcacgctatcgtgcagactttggtgaacagtgtcaatagcaagatcccgaaagcgtgttgtgtcccaaccgagctgtcggcaatatctatgctgtatctagatgagaatgagaaggtggtccttaagaactatcaggatatggtggtcgagggatgtggatgtaga

SEQ ID NO: 7882 - DNA, 1188 bp, synthetic construct
  misc_feature 1..1188: note = source = /note="Description of Artificial Sequence: Synthetic coding sequence"
  source 1..1188: mol_type = other DNA
atggttgccgggactcggtgcctgcttgcgctgctgctgccgcaagttttgctgggaggtgcggctggactggtgccagaacttggccggcgtaagtttgccgctgcttcgtccggacggccctcttcccagccaagtgatgaggtactcagcgagtttgagctgcggcttctctccatgtttggactgaagcagagaccgacaccctccagagatgcagtagtgccaccgtatatgctggatttgtataggagacatagcgggcagcctggttcacctgcacccgaccaccggctcgaacgggctgcgtcccgcgcgaacacggtccgatcatttcaccacgaggagtctctcgaggaactacccgaaacatcagggaagaccactagacgctttttcttcaacctgagctcgatcccgacggaggaatttatcacatccgctgagcttcaggtatttagggagcaaatgcaggacgccttggggaataactcttcgtttcaccatcgtataaacatctatgagattattaaaccggccacagctaacagtaagtttcctgtgacacgtctgctcgacacgagactggtcaaccagaacgcgtctcggtgggagtcctttgacgtgacaccagcggtgatgcggtggactgcccagggtcacgccaaccatggattcgtggttgaagtggcccacctggaagaaaagcagggagtgtctaaacgccatgtgcgcatttcaaggagcttgcatcaagatgagcattcctggagccagattagacctctgctggttacattcggccacgacggcaagggccatcccctgcacaaacgtgagaaacggcaagctaaacacaaacagcggaagaggctgaagtcgtcatgtaaaagacaccctctctatgttgactttagcgatgtaggttggaacgattggatcgtggcccctcccggctaccatgcgttctattgtcacggtgagtgtccttttcccctggccgaccacctcaactcgactaatcacgcgatcgtgcagaccctggtcaattcagttaatagcaagatacccaaggcttgctgtgttcccaccgagctgtctgccatttctatgctatatctggatgagaatgaaaaggtggtgcttaaaaactaccaggacatggtcgttgaaggctgcggctgtcgg

SEQ ID NO: 7883 - DNA, 1188 bp, synthetic construct
  misc_feature 1..1188: note = source = /note="Description of Artificial Sequence: Synthetic coding sequence"
  source 1..1188: mol_type = other DNA
atggtcgccggtacaagatgcctcctcgccctcttgctgccacaggtgctcctggggggggctgcagggctggtccctgaactcggtagaaggaagttcgcggctgcgagctccgggagaccgtcctctcaaccgagtgacgaagtgttgtcagagttcgagctgcggctcttgagtatgttcgggttgaagcagaggcccacaccaagccgggatgcagtcgtccccccctatatgttggacctgtataggcgccactcaggtcagccgggctctcctgcccctgatcacagactggagagggcggcctcaagagcgaacactgtcagatcatttcaccatgaggagagtctcgaggagctcccggagactagtggtaagactacaagaaggttttttttcaacttgagcagcatacctacagaggaatttatcacttcagccgagctgcaggtgttcagggagcagatgcaggatgccctgggaaataactcctccttccatcatcggataaacatctacgagataataaaacccgctaccgccaactcaaaatttccggtgacgcgactgcttgatacccgcctcgtgaaccaaaatgcttctcgatgggagtctttcgacgtgacccccgccgtcatgcgatggactgctcaggggcacgcgaatcacggattcgtggtggaggtcgctcatctggaggaaaagcagggagtatccaaaagacacgtgcgcattagtagatccttgcatcaggacgagcacagctggtcccagatcaggccactgctcgtgacgttcggacatgacggaaagggccaccctctgcacaaacgggagaagaggcaggcaaagcacaagcagaggaaacggctgaaatctagttgtaagaggcaccccctgtacgtagatttctcagatgtggggtggaacgactggattgtcgccccacctggatatcacgccttttattgtcatggggaatgccccttccctcttgccgaccacctgaattccacgaaccatgcaatcgtgcagaccttggtgaactccgtcaacagtaagatccctaaggcatgctgtgttcccacggaactgagcgcaatatctatgctgtacttggacgagaacgagaaggtcgtgttgaagaactaccaagatatggtggttgagggttgcggatgtaga

SEQ ID NO: 7884 - DNA, 1188 bp, synthetic construct
  misc_feature 1..1188: note = source = /note="Description of Artificial Sequence: Synthetic coding sequence"
  source 1..1188: mol_type = other DNA
atggtggccggaaccagatgcctcctggcactcctcctgccccaagtactgctgggaggagcagccggcctggtaccagagctgggccgccgcaagttcgctgcagcctcgagtggtagaccatccagccaaccctcggatgaggtcttgagtgaatttgagctgagactgctgtctatgtttggtctaaaacagcggcctacaccttccagggatgcagtagtgcccccttacatgctcgacctgtatagaagacactcggggcagcccggatctcccgccccggatcaccggctcgagcgcgccgcttccagagccaacaccgtccggtcttttcatcacgaagagtcactggaagagctacccgagacgtctggaaagaccacgcggcgattcttcttcaacttatcttccattcccacggaggagttcattactagcgctgagctgcaggtgtttcgagaacagatgcaggacgctttaggcaacaactcatcttttcatcatcgcatcaacatttacgagattatcaagcccgccactgccaactcgaagtttcccgtgaccagactccttgatacaaggctggtgaaccagaatgcctcaagatgggagagctttgatgtgacaccagccgtaatgcggtggaccgcccagggacatgccaaccatggattcgtggtagaggtggcacacttggaggagaagcagggagtgagcaagagacacgtccgtatctcacgaagtctacaccaggatgagcactcctggagccagataagacccctccttgtgaccttcggccacgatgggaaaggtcatcctcttcacaagcgggaaaaacgacaggcaaaacacaagcagaggaaaaggctgaagtcttcatgtaaaaggcatccgctttatgtcgattttagcgacgtcgggtggaacgactggatcgtggctcctcctggttatcacgccttttactgccacggtgaatgtcccttccctttggccgaccatcttaattccacgaaccatgcaatcgtgcagaccctggtgaactctgtcaactctaagatcccaaaggcctgttgcgtgcccacagaattgtctgctatctcaatgctctacttagacgagaatgagaaagttgtgttgaagaattatcaagatatggtcgtcgaaggctgtggctgccgg

SEQ ID NO: 7885 - DNA, 1188 bp, synthetic construct
  misc_feature 1..1188: note = source = /note="Description of Artificial Sequence: Synthetic coding sequence"
  source 1..1188: mol_type = other DNA
atggtagcaggaactaggtgcctattagccttattattaccccaggtcctcctaggcggggctgccggcctcgtgccagaactgggacgacgcaaattcgcagcagcatcaagcggcagaccatccagtcagccgtctgacgaggtcctctctgagttcgagctgaggctgctctccatgttcgggctaaagcagcgtcctaccccgtctcgtgatgccgtcgtccctccttacatgctggacctatacagacggcactctggccagcccggcagccctgcccctgatcatcgattagaacgggctgcctcaagggcgaatacagtgaggtctttccatcatgaagaatccctggaagagctaccggagaccagcggaaagactaccagaaggtttttctttaatctgagcagcattcctaccgaggaatttataacaagcgctgaattgcaggttttcagggaacagatgcaagacgctctggggaacaacagctccttccatcatcgaatcaacatatatgagatcataaagccggccactgctaattcaaagttccctgttacgcgactacttgatacacgcctggttaaccagaacgcgtcccgttgggagagcttcgacgtcacaccagccgtgatgcggtggacggcccaaggccacgccaaccacggattcgtagtggaggttgcccatctggaggagaagcagggcgtgtccaaaaggcatgtgaggatctctaggtccttgcaccaggacgagcactcttggtcacagatccgccctctgcttgtgaccttcggacacgatggtaagggtcacccccttcacaagcgcgagaaacgccaggcgaagcataaacagaggaagcgcctgaaatccagctgcaaacgccatcctctttacgtggatttcagcgatgtgggctggaacgactggatcgtggctcctccaggttaccacgcattctattgtcatggggagtgccctttcccccttgcagatcacctgaatagcactaaccatgcaatcgttcagacactagtgaactctgtgaatagcaagatccccaaggcctgctgcgtaccaactgagctgtcggccatctctatgttgtatcttgatgagaacgagaaggtggtgctgaaaaattatcaggatatggtagtggaggggtgtgggtgtcga

SEQ ID NO: 7886 - DNA, 1188 bp, synthetic construct
  misc_feature 1..1188: note = source = /note="Description of Artificial Sequence: Synthetic coding sequence"
  source 1..1188: mol_type = other DNA
atggtggcgggcactcgctgcctgctggcactgctcctcccacaggtgttgttgggcggcgccgcgggactcgtacccgaactcgggagaaggaagtttgccgccgcctcttcaggccgaccttcttctcagccttcagatgaggtcctgagcgaatttgagttgagactcctgtccatgtttgggctcaagcagaggcctacacccagtcgggacgccgtcgtgccgccctacatgctggacctgtaccgccgccatagcggacagccaggatcccccgcaccagatcacagacttgaacgggctgcgtcaagagcgaacaccgtgcgctcattccaccatgaagagagcctggaagagttgcccgagacctcagggaagaccacccgcaggtttttttttaatctttcaagcattcctacagaagaattcattacaagcgccgagcttcaggtgtttcgggagcagatgcaggacgccctgggcaataatagcagctttcatcaccggataaatatttacgagatcattaaacccgcgacggccaattccaagttccccgtcactagattgctggacactcggcttgttaaccaaaatgcttcaagatgggagagtttcgatgttacccccgccgtgatgaggtggactgcccagggccatgccaatcacggcttcgtagtggaagtggctcacttggaagaaaagcagggtgtcagcaagcgccacgtgaggataagcaggagccttcatcaagacgaacattcttggagtcagattcgccccctcctggtgacgttcggtcatgatggaaagggacatcctctgcataaacgggaaaaacgacaggccaaacacaaacaacggaagcggttgaaaagctcctgtaagcgccatcctttgtatgtggattttagcgacgttgggtggaacgattggattgtcgcgccgccgggctatcacgctttctactgccacggcgaatgcccctttcccctggcagaccacctgaatagcactaaccatgctattgttcaaacgttggtcaacagcgttaatagcaaaataccaaaggcctgttgtgtgcctaccgagttgagcgcaatcagcatgctgtatcttgatgagaacgagaaggttgtcttgaagaattaccaagacatggtagtcgagggttgtgggtgcaga

SEQ ID NO: 7887 - DNA, 1188 bp, synthetic construct
  misc_feature 1..1188: note = source = /note="Description of Artificial Sequence: Synthetic coding sequence"
  source 1..1188: mol_type = other DNA
atggtggcgggaactcgctgcctgctggctctgcttctgccgcaggtgctgctgggcggcgccgcgggactggtcccggaactggggcgccggaagtttgccgctgcctcgtcggggcgccctagctcccaaccgtcggatgaagtgctttcagaattcgaactcagattgctgagcatgtttggcctgaagcagcggccgaccccttcaagagacgcggttgtcccaccgtacatgcttgatctgtacaggcgccattccggtcaacccggttcaccggccccagaccacaggctggagcgcgccgcctcgagagccaacaccgtcaggtcgttccatcacgaagaatcgctcgaagagctgcctgaaaccagcggaaagaccacccgccggttcttctttaatcttagctctattccgacggaggagttcatcacctcggcagagttgcaggtttttcgagaacaaatgcaggatgccttgggaaacaattcttctttccatcaccgcatcaacatctacgaaatcatcaagcctgcaaccgccaactccaagttccctgtgacgaggctgctggacactcggctcgtgaaccagaacgcaagccggtgggagtcgttcgacgtgactccggctgtgatgcgatggactgctcagggacatgcgaatcacgggttcgtggtggaagtggctcatctggaggagaagcaaggtgtgtccaaacgccacgtgagaatctcgcgctccctgcatcaggacgaacactcctggagccagatccgtccacttctggtgacctttggacacgacggcaaaggtcatccactgcacaaacgtgaaaagcgccaagccaaacacaaacagcgcaagaggcttaagtcctcatgcaagcggcacccgctctatgtggacttcagcgacgtggggtggaatgattggatcgtggcgccgccgggctaccatgctttttactgccacggagaatgtcccttccctctcgctgatcatctgaattcaaccaaccacgccattgttcaaacgctggtcaactcagtcaactcaaaaatcccgaaggcctgctgtgtgcccaccgaattgtccgctattagcatgctttacctcgacgagaatgagaaagtggtccttaagaactaccaggatatggtggtcgagggatgcggctgccgg

SEQ ID NO: 7888 - DNA, 1188 bp, synthetic construct
  misc_feature 1..1188: note = source = /note="Description of Artificial Sequence: Synthetic coding sequence"
  source 1..1188: mol_type = other DNA
atggtagctggaacccgctgtctcctggctctgttgctgccgcaggttctgctgggcggagctgccggcctggtgcctgagctgggcaggaggaagttcgctgcagcaagcagcggtagaccatcaagtcaaccttctgatgaggtcttgtccgaattcgagctcagattgcttagcatgtttggtttgaagcagagacccacacccagcagagatgcagtggtaccaccatatatgctggatctgtaccgcagacacagtggccaaccaggttctcctgccccagatcataggttggaacgcgccgcgtcccgcgccaacaccgtgcgcagcttccaccacgaggagtctctcgaggagctgcccgagacttccggcaagacgacccgccgcttcttctttaatctgagcagtattccaactgaggagttcatcacaagtgctgagctccaggtatttagggagcaaatgcaagatgctcttggcaacaatagctcctttcatcacagaatcaacatctatgagatcattaaaccggctaccgctaacagcaaattcccggtgactagactccttgacacaagacttgttaatcagaatgcctctagatgggaaagtttcgacgttactccggcggtgatgaggtggaccgctcagggccacgctaaccacggtttcgtcgtcgaagtggcccacctcgaggagaagcagggtgtgtcaaagaggcacgtgaggatatctagaagccttcaccaagacgagcattcttggtcacagatcagaccactgctggttacatttggccacgacggtaagggacaccctttgcataagagggaaaagagacaggccaagcacaagcagagaaagaggctgaagagttcttgtaaaaggcaccccctgtacgtggacttctctgacgtaggatggaacgactggatcgtcgctccacctggttaccacgccttttattgtcacggagaatgtccattccctctggccgaccacttgaactcaacgaaccacgccatcgtgcaaaccctggtaaactccgtgaactctaaaattccaaaggcatgctgcgtcccaacggagctctccgccatctccatgctctacttggacgaaaacgagaaagtcgtactcaagaactatcaagacatggtggtagagggttgcggatgccgc

SEQ ID NO: 7889 - DNA, 1188 bp, synthetic construct
  misc_feature 1..1188: note = source = /note="Description of Artificial Sequence: Synthetic coding sequence"
  source 1..1188: mol_type = other DNA
atggttgcgggtacgcgttgtttattagcgttattactaccgcaagtattactaggtggtgcggcgggtttagtaccggaactaggtcgtcgaaaatttgcggcggcgtcgtcgggtcgtccgtcgtcgcaaccgtcggatgaagtactatcggaatttgaattacgactactatcgatgtttggtttaaaacaacgtccgacgccgtcgcgagatgcggttgtaccgccgtatatgttagatttatatcgtcgacattcgggtcaaccgggttcgccggcgccggatcatcgattagaacgtgcggcgtcgcgtgcgaatacggttcgatcgtttcatcatgaagaatcgttagaagaattaccggaaacgtcgggtaaaacgacgcgtcgttttttttttaatttatcgtcgataccgacggaagaatttataacgtcggcggaactacaagtatttcgagaacaaatgcaagatgcgttaggtaataattcgtcgtttcatcatcgtataaatatatatgaaataataaaaccggcgacggcgaattcgaaatttccggtaacgcgactattagatacgcgtttagttaatcaaaatgcgtcgcgttgggaatcgtttgatgttacgccggcggtaatgcgttggacggcgcaaggtcatgcgaatcatggttttgtagtagaagtagcgcatctagaagaaaaacaaggtgtatcgaaacgtcatgtacgaatatcgcgatcgttacatcaagatgaacattcgtggtcgcaaatacgtccgttattagttacgtttggtcatgatggtaaaggtcatccgctacataaacgagaaaaacgtcaagcgaaacataaacaacgaaaacgattaaaatcgtcgtgtaaacgtcatccgttatatgtagatttttcggatgttggttggaatgattggatagttgcgccgccgggttatcatgcgttttattgtcatggtgaatgtccgtttccgttagcggatcatttaaattcgacgaatcatgcgatagtacaaacgctagtaaattcggttaattcgaaaataccgaaagcgtgttgtgtaccgacggaactatcggcgatatcgatgctatatctagatgaaaatgaaaaagtagttctaaaaaattatcaagatatggtagttgaaggttgtggttgtcga

SEQ ID NO: 7890 - DNA, 1188 bp, synthetic construct
  misc_feature 1..1188: note = source = /note="Description of Artificial Sequence: Synthetic coding sequence"
  source 1..1188: mol_type = other DNA
atggtggcaggcaccaggtgtctgctggcactgctccttcctcaggtgcttttgggaggggctgcaggactggtgccggaactcggaagaagaaagtttgcggcagcaagctcaggacgtccgtcctcacaaccttcagatgaagtcctttccgaatttgaactgcggcttctgtcgatgttcggcctgaagcagcggcccactccctccagagacgcagtggtgccaccctacatgttggatctctaccgccgtcatagcggacaaccaggctcgccagcaccggatcacaggctggagagggccgcatctcgtgctaacactgtcagatcgtttcatcatgaagaatcgctggaggagctgcccgaaacttcaggcaagaccacccgacgcttcttcttcaacctgtcctcgatccctacggaggagtttatcacgtcagctgaacttcaggtctttagagaacaaatgcaggacgccctcggaaataactcgagcttccaccatcgcatcaacatctacgagatcattaagcctgcgaccgccaattcgaagttccctgtgactcgactcctcgatactagactcgtgaaccaaaacgcctcgcgatgggaatcgttcgatgtcactcccgcagtgatgagatggaccgcacaaggacatgcaaatcatgggtttgtggtggaagtcgcacatctggaagagaaacaaggcgtctcaaagagacatgtgaggatttcacgctcactgcaccaggatgagcattcctggtcacagatcagacctcttctcgtgacttttggacatgatggaaaaggccacccactgcataaacgggaaaagcgccaagcaaaacataagcaacggaaacggcttaaatccagctgtaagcgccatccgctgtacgtggatttttcagacgtcggctggaacgactggattgtcgcaccccccggataccacgcattttactgccatggtgaatgtcccttccctcttgcggaccatcttaactcaaccaaccacgcaattgtccagaccctcgtgaactcggtgaacagcaaaattcccaaggcgtgctgtgtgcctaccgaactgtccgccatctcaatgctttacctcgatgaaaatgagaaggttgtgctgaagaactatcaagacatggtggtggaagggtgtgggtgccga

SEQ ID NO: 7891 - DNA, 1188 bp, synthetic construct
  misc_feature 1..1188: note = source = /note="Description of Artificial Sequence: Synthetic coding sequence"
  source 1..1188: mol_type = other DNA
atggtcgcaggaacccgctgcttgctggcgcttttgctcccacaggtgttgctgggaggagcggcgggccttgtgcccgaactgggtcgccgcaagtttgccgcggcctcgtccggaaggccgtcctcacagccttcggacgaagtgctgagcgaattcgaactgagactcctgtccatgtttggcctgaaacaaaggccaacccccagcagggacgccgtggtaccgccttatatgctggatctttaccggcggcactcgggacaaccgggaagccccgcgccagatcatcgcttggaacgcgcggcctccagggcgaatacggtccgctcattccatcacgaagagagcctggaagagctcccggaaacttcgggtaagactacccggcgattctttttcaatctttcgtcaatccctactgaagaattcatcacttcagctgagctgcaggtgttccgggaacagatgcaagacgctctcggcaacaactcgagctttcaccatcgcatcaatatctacgagatcatcaaaccggcaactgcaaattcgaaattcccggtcacccgcctgttggacacccgcctggtcaatcagaacgcaagcagatgggagtccttcgatgtgacgccagccgtgatgcggtggactgctcaggggcatgctaaccacggattcgtcgtcgaggtggcgcacctggaggagaagcagggtgtgagcaagcggcatgtgcgcatatctcgaagcctgcaccaagacgaacattcgtggtcgcaaatcaggccgctgctcgtgactttcggccacgacggaaagggccaccctctgcacaaacgcgaaaaacgccaggcgaagcataagcagagaaagcggctgaagtcctcctgtaagcgacatccactttacgtggacttttcggatgtaggatggaacgactggatcgtggccccaccggggtaccatgccttttactgccacggtgagtgcccgttccccctcgcagatcatttgaactcgaccaaccacgccattgtccaaaccctggtgaattccgtgaactcaaagattcctaaggcttgctgtgtccccaccgaactctcagccatctctatgctctaccttgacgagaacgagaaagtagtgctcaagaactaccaggacatggtcgtggaagggtgcggatgccgt

SEQ ID NO: 7892 - DNA, 1188 bp, synthetic construct
  misc_feature 1..1188: note = source = /note="Description of Artificial Sequence: Synthetic coding sequence"
  source 1..1188: mol_type = other DNA
atggtcgccggaaccagatgcctcctggcattgcttttgccacaggtcctgctgggaggggctgctggattagttcctgaactgggtcgtcgaaagtttgcggcggcatcctcaggacggcccagctcacagccaagtgatgaggtcctgtctgagtttgagttacgactcttatccatgtttgggcttaagcagaggccaactccatccagggacgcagtagttcctccatacatgcttgacctttacagaagacattcgggccagccaggatctccagcacccgaccataggctggaaagggctgcctccagggcaaacacagtgaggagcttccatcacgaggagtctttggaggagcttccagaaaccagtggtaaaacaactcgtcgtttttttttcaacttatcctccatccctaccgaggagttcataactagtgcagagctccaggtcttccgtgagcagatgcaagatgctcttgggaacaacagctcatttcaccatagaatcaacatatacgagattatcaaacctgcaaccgcgaatagcaaattcccagttaccagactgttggatacccggctcgtgaaccaaaacgcttctaggtgggaaagctttgacgtgacccccgccgtgatgcgctggacagcacaaggacatgccaaccacggattcgttgtggaggtcgcacatcttgaggagaaacagggcgtgagcaagcgtcatgtccggatcagcaggtcactccaccaagacgagcatagctggagccaaatcaggcccctcttagtcacctttggacatgatggaaagggccacccattgcataagcgcgaaaagcgccaggcaaaacacaagcaacgcaaacgtctcaagtcttcttgtaaaaggcaccccctgtatgtcgatttttcggacgtgggatggaacgactggatcgtggcgcctccgggctaccatgcgttctactgtcacggcgaatgtccattccctctcgctgatcacctgaactcaaccaatcatgccattgtccaaacattggtaaactcagtgaactctaagatacccaaggcttgttgtgtccctaccgaactgagtgctatatccatgctatacctggatgagaatgaaaaagtggtgctgaagaactaccaagatatggtcgtcgagggatgcggctgcagg

SEQ ID NO: 7893 - DNA, 1188 bp, synthetic construct
  misc_feature 1..1188: note = source = /note="Description of Artificial Sequence: Synthetic coding sequence"
  source 1..1188: mol_type = other DNA
atggtagcaggcacccgatgtcttcttgcgctgctgcttccccaggttttgctaggtggggctgcgggcctggtgcctgaactgggcagaagaaaatttgcagccgctagcagcgggagaccaagttcgcaaccctctgatgaagtactatccgaatttgagctacgattgctgtcaatgtttggcttgaagcagcgacccactccttcacgggatgctgtggtcccaccatatatgctggatctttatcgacgacatagtgggcaacccggctcacccgctcccgaccaccgcctagagcgggctgcttcacgagccaacactgtgcgatcctttcaccacgaggagagcctagaggagctgccagagacatcaggcaagactacacggcgttttttctttaatttgtcgtctatccctacagaggaattcataactagcgctgaattgcaggtctttcgcgagcagatgcaagacgcactcggcaataactcatcgttccaccatcgaatcaacatttatgagatcattaaacctgcaaccgccaattctaaatttcccgtcaccagactgttagacacaaggctggtgaatcagaatgctagccgatgggaaagctttgacgttacacctgccgtaatgcgatggacagctcagggtcacgccaaccacggcttcgtggtcgaagtggctcaccttgaagaaaagcagggcgtgagtaagaggcacgtccgcatatcccgttcactacaccaggacgaacattcctggtcccagattcgccctctactggtaactttcgggcacgacgggaaagggcatcccctgcacaaacgagagaaacgccaggcaaagcacaagcagcggaagaggctaaagagctcctgcaagcggcatcccctctatgtggatttctccgatgttgggtggaacgattggatcgtggctccacccgggtaccatgcgttctattgtcatggtgagtgtccctttccactggctgaccacctaaacagcaccaatcacgcgatagtccagacgttagtaaatagcgtgaatagtaagatccctaaggcgtgctgtgtacctacggaattatccgcgatcagcatgttatatctggatgaaaatgagaaagtggttctaaagaattaccaggatatggtggtggagggatgtggatgtcga

SEQ ID NO: 7894 - DNA, 1188 bp, synthetic construct
  misc_feature 1..1188: note = source = /note="Description of Artificial Sequence: Synthetic coding sequence"
  source 1..1188: mol_type = other DNA
atggtcgccggtacacgatgcttattggctctgctcctgcctcaggtcctcctgggcggggctgccgggctggtgcctgagcttggcaggcggaagttcgcggccgcctctagcggcaggcccagctctcaacccagcgatgaggtgctatctgaatttgagctccgcctgctgtcgatgttcggtctaaaacagaggcccacaccctctagagatgccgttgtgccaccctatatgctcgacctctacagaaggcactctggccagcctggttctcctgctcctgatcaccgtctagagcgagcagcgtctcgcgcaaacaccgttcggtcattccatcatgaggagagcctggaggaactccctgagacctctggaaaaacaacccggcgtttttttttcaatctgtcttcaattcctaccgaagaatttattacaagcgccgagctccaggtcttcagagagcaaatgcaggatgcgttgggaaataactcttccttccatcatcggataaatatatatgagatcattaagccagcaaccgcaaatagcaagtttccagtgacgcgtctcttagatactaggttagtaaaccagaatgcgagccggtgggagtcatttgatgtgacccctgccgtcatgcggtggacagcccaaggtcacgcgaatcacggttttgtggtggaagtggctcacctggaggaaaaacagggcgtgtctaagaggcatgtgcgcattagtcggtctttacatcaggacgagcattcttggtctcaaatacgaccacttcttgtcacctttggacacgatggtaagggtcacccactccataaaagggaaaaacgccaggccaagcacaagcagagaaaacgcctgaaatcctcctgcaagcgacatcccctgtatgttgacttcagtgacgttggctggaacgactggatcgtcgccccccccggctaccatgcgttctactgtcatggagagtgtccgttcccattagctgatcacctcaattccacaaaccacgcgattgtgcaaaccctggtgaacagtgtgaattccaagattccgaaggcttgctgcgtcccaaccgaattgagcgccataagtatgctgtatctcgacgagaatgagaaggtggtcctgaagaactatcaggacatggtggttgagggttgcgggtgtcgc

SEQ ID NO: 7895 - DNA, 1188 bp, synthetic construct
  misc_feature 1..1188: note = source = /note="Description of Artificial Sequence: Synthetic coding sequence"
  source 1..1188: mol_type = other DNA
atggtcgcaggaacccgatgcctactagccctgctgcttccccaagtccttttgggcggcgctgccggtctggtccccgaactgggcagaaggaaatttgccgcagcaagcagcggaaggccttcatcacagccctctgacgaggtcctgtcagagttcgagctcaggcttttaagtatgttcggactgaagcagcggccgaccccctcaagggacgcggtcgtacctccttacatgctggacctgtaccggcgccattccggtcagcccggaagcccggcacccgaccaccggttggagagagccgcgtctcgagccaacaccgtgaggtccttccatcacgaggaaagtcttgaagagttgccagagacatcagggaagaccaccaggagatttttttttaatctgagctccataccaacagaggaattcatcacctcagccgagctccaggtcttccgcgaacaaatgcaggatgcccttggcaacaattccagttttcaccatcggatcaacatttacgaaatcataaaacccgcaacagccaacagcaagtttcctgtgacacgcctcttagacacacggctagtcaatcagaacgccagtcgctgggagtcgtttgacgtgactcccgcagtgatgcgatggaccgcccaaggtcacgcaaatcatggcttcgtcgtggaggtggcccacctggaggaaaaacagggtgttagtaagagacatgtcaggatctctaggagcctgcaccaggacgaacactcttggagtcagatcaggcctctgttagtgaccttcgggcacgatggcaaagggcacccactccacaaacgcgagaagcggcaggccaagcacaagcagcggaaaagactgaaaagctcgtgtaaacggcaccccctgtatgtggacttctcagatgtgggctggaacgactggatcgtggcaccccccggttaccacgccttctactgtcacggcgagtgtcctttccccctagcggaccatcttaactctacaaatcatgcaatcgtgcagactttggtaaactcagtaaacagtaaaatccctaaagcttgctgtgtccccacagaactctccgcaatatcaatgctgtatctggacgagaacgaaaaagttgtgctgaagaactaccaggacatggtggtggagggttgcggatgccgg

SEQ ID NO: 7896 - DNA, 1188 bp, synthetic construct
  misc_feature 1..1188: note = source = /note="Description of Artificial Sequence: Synthetic coding sequence"
  source 1..1188: mol_type = other DNA
atggttgccggaacgcggtgcctcctggcgctgctcctgccgcaggtgcttctgggaggagcggctggactggtgccagaactcggacgccgcaaattcgcagcggcaagctcgggaaggccgagcagccagccgtcagacgaggtgctgagcgaattcgaactccgcctcctcagcatgttcggactgaagcagcgccccactccgtcccgggatgccgtggtgccgccttacatgttggacctgtaccgccgtcacagcggacagcctggctcacctgctcctgaccacagacttgaacgcgcagcctcaagggccaatactgtgcgcagcttccaccatgaggaatcactggaagagctcccggaaacttctggcaagacgacccgccgcttctttttcaacctctccagcatcccaactgaagagttcattacctccgccgagctgcaagtctttcgggagcagatgcaggatgccctcggaaacaactcatcgttccaccatcgcatcaacatatacgagatcattaagccagctacggccaactccaaattcccagtcactagactcctcgatacccggctggtcaatcaaaatgccagcaggtgggaatcgtttgatgtgactcccgcagtcatgagatggaccgcgcaaggacatgccaaccatggcttcgtggtcgaagtcgcacacttggaggagaagcaaggagtttctaagagacacgtgcgcatctcacggagcctgcatcaggacgagcattcctggagccaaatccgaccgcttttggtcaccttcgggcatgacggaaagggacacccactgcataaacgggaaaaacggcaggccaagcacaaacagagaaagcgactcaagtcgagctgcaagcggcacccgctttacgtggacttcagcgacgtggggtggaacgattggattgtggcaccgcccggctatcacgcattctactgccatggcgagtgtcctttccctctggctgatcacctgaactctaccaatcacgccatcgttcaaaccctcgtcaactccgtgaactcgaagattcctaaagcctgctgtgtaccgactgaactgagcgccatcagcatgctgtacctcgacgagaacgagaaggtcgtgcttaagaattaccaagatatggtggtggagggatgtgggtgcagg

SEQ ID NO: 7897 - DNA, 1188 bp, synthetic construct
  misc_feature 1..1188: note = source = /note="Description of Artificial Sequence: Synthetic coding sequence"
  source 1..1188: mol_type = other DNA
atggtcgctggtaccagatgtctgttagctctcctgctcccacaggttcttctgggtggcgcagccggcctggtcccggaactgggacgcagaaagtttgcagcagcctcttccggtaggccgtcttctcaaccttccgacgaggtgctgagcgagtttgaactaagactgctttctatgtttgggctgaaacagaggcccactccgtccagagacgcagtggtgccaccgtatatgctggacctgtacagacgacactcaggacagccgggatccccggcaccggaccataggctcgagagggccgcatctagagccaacaccgtgaggagttttcaccatgaggaaagcctcgaggagctccctgagaccagtggaaaaacaacccgaaggttctttttcaatctctcgagcatcccaactgaagagttcatcacgtccgctgagctgcaggtgtttagggagcaaatgcaggacgccctcggcaataattccagcttccatcatagaattaacatatatgaaattattaagcccgctacagctaatagcaagttcccggttacacgtctcctggacactagattggtgaatcagaacgctagccgctgggagtctttcgacgtaacccccgctgttatgcggtggaccgcccagggccatgctaatcacgggttcgtagtcgaagtggcgcacctcgaggaaaagcagggagtgtctaaacggcacgttagaatctcacgatctttgcaccaggacgagcactcatggtcccagatcaggcccttgttggtgacattcggccacgatgggaagggtcacccactgcacaagcgtgagaaacgacaggccaaacataagcagcggaagagattgaaatcctcgtgcaagagacacccactgtacgtggatttttccgatgtcggctggaacgactggatcgtggccccgccaggttaccacgcattctactgtcacggcgagtgtccgtttccattggccgaccatctaaacagcacgaaccacgctatcgttcaaacactggttaacagtgttaattcaaagattcctaaggcatgctgcgtgcctacggaactttctgcgataagtatgctctatttggatgagaatgaaaaggtggtgctcaagaattatcaggatatggttgtcgagggatgcggttgtagg

SEQ ID NO: 7898 - DNA, 1188 bp, synthetic construct
  misc_feature 1..1188: note = source = /note="Description of Artificial Sequence: Synthetic coding sequence"
  source 1..1188: mol_type = other DNA
atggtggcaggtacccgctgcctgctggcgttactgttaccccaggtcttgctgggcggggcagccggcctcgtccctgaactgggtcgccgtaaattcgcggccgcaagctccgggagacctagctcccagccctctgacgaagtgctgtcggagtttgaacttaggctcctgtctatgttcggactaaaacagaggcccaccccctctcgtgatgccgtggttccaccttacatgctggacttgtatcgccggcacagcggccagcctgggagtccggccccagatcaccgactggaacgggcggcctcgagggccaacacggtgaggtctttccatcatgaagaaagcctggaggaactgccagaaaccagcgggaagactactcgacggtttttttttaacctgagctctatccccacagaggaatttatcacaagtgctgagttacaagtgtttagggaacaaatgcaagatgcgctcggaaataattctagtttccaccaccgcattaacatttatgaaatcataaagcctgcaacagccaacagcaagtttcctgtgacacgcctgctggatactcgattagtgaatcagaatgcatctagatgggaatcttttgacgtgactcctgctgtgatgcgctggacagctcagggacacgccaatcatgggttcgttgttgaagtcgcacacctggaggaaaaacagggggttagtaaacgccatgtgagaatcagccgctctctgcaccaggatgaacattcctggtctcagatcagacccctactcgtaacctttggccacgacggcaagggtcacccacttcacaaacgcgagaagcggcaggctaaacataagcagaggaaaagacttaaatcctcatgtaagagacatcctctgtatgtggatttctcagatgtggggtggaatgattggattgtagcacctcccggctatcacgcattttactgtcatggcgaatgtcccttcccattggctgatcatctgaacagtacaaatcatgctatcgtgcagaccctggttaatagcgtgaattccaaaatccctaaggcctgctgcgtgccaacagaactgtcagccatcagtatgctatatctggatgagaacgaaaaggttgtgctcaagaattatcaagacatggtcgttgaaggctgcggctgtcgt

SEQ ID NO: 7899 - DNA, 1188 bp, synthetic construct
  misc_feature 1..1188: note = source = /note="Description of Artificial Sequence: Synthetic coding sequence"
  source 1..1188: mol_type = other DNA
atggtcgctggtaccaggtgtcttctggccttactgctcccacaggtgctactcggtggagcggccgggctagttccggagttggggcggcgaaaatttgccgccgctagttctggaagaccctcatcccagccctccgatgaagtgctctccgaattcgaattgcgcctcttgtccatgttcgggctaaaacagcggccgactcccagccgcgatgctgtggtgccgccctacatgctggacctctaccgacgacattccggacagcccggatccccagccccagaccatagactggagcgagcagcttcaagagcaaataccgttcgttcctttcatcatgaggaatcccttgaggaactcccagaaacttctgggaagacgacaaggcggttttttttcaatctgagtagcattcctacggaggagtttattacttctgctgaactccaagtctttagggagcaaatgcaggatgctctaggcaataatagctcttttcaccatcgcattaatatctacgagattataaaacccgccaccgccaatagtaagtttccagtcacaagactgctggacaccagattggtgaaccagaacgcctcaagatgggaaagctttgatgttacccctgccgtaatgcggtggactgcacagggtcacgcaaaccatggcttcgtcgtcgaggtggctcacctggaagaaaaacaaggggtgtccaaaaggcatgttcggatatcgaggagcctccaccaggacgagcatagttggagccagatcagacctctgttagtgaccttcggccatgacggaaagggccacccactacataagagggagaaacggcaggccaagcataaacagcggaaacgtctcaagtcctcgtgcaagcgccaccccctttatgttgacttttcggacgtcggctggaatgattggattgtcgctcccccgggttaccacgcattctactgtcatggggagtgcccattcccacttgcagaccacctgaatagtacaaatcatgcgattgtgcagacccttgtaaactctgtgaattccaagattccaaaggcctgctgcgtaccaaccgagctgtctgccattagcatgctatatttggatgagaacgaaaaggttgttctgaagaattaccaggacatggttgtggaaggttgtggttgtcgc

SEQ ID NO: 7900 - DNA, 1188 bp, synthetic construct
  misc_feature 1..1188: note = source = /note="Description of Artificial Sequence: Synthetic coding sequence"
  source 1..1188: mol_type = other DNA
atggttgcgggaaccaggtgcctattagcgctgttgttgcctcaggtgctcctgggaggagccgctgggctggtccctgaactcgggcggcgcaaatttgctgccgcgagctcaggtaggccctcctcacaaccaagtgatgaggtactgtcagagtttgagcttcgattgctgtctatgttcgggttaaaacagcgccccacaccctcccgtgacgcggtggttcctccctacatgctggacttgtatagaaggcattctgggcaaccaggcagcccagctccggatcatcggctcgagcgcgctgcgagccgcgcaaatacagtgcgatctttccatcacgaagagagtttggaagaattacccgagacctctggaaagacaacaagacgtttcttcttcaatctatcgtcaatccctaccgaagagtttattacgtccgcggagttgcaggtatttcgagaacaaatgcaggatgcactcggcaacaactctagcttccatcaccggattaacatttacgaaattatcaagcccgctactgccaactcaaagttccccgtcactcgcttgctagacacgagactggtgaatcagaatgccagccggtgggagtccttcgacgtgacaccagcagtaatgcgctggactgcccaaggccatgcaaatcatggatttgtagtggaagtggcccaccttgaggagaagcagggtgtctccaagagacacgtgcgcatcagcaggagtttgcaccaagatgagcactcttggagccagattagacccctcctagtgacttttggacatgacggcaaaggccacccactgcataagcgggaaaaacgccaagcgaaacacaaacagcggaagcggctgaaaagctcttgcaaacggcaccctctttacgttgactttagcgacgttggatggaacgactggattgttgctccacccggataccacgccttttattgccatggggagtgccccttccccctcgccgaccatctgaattcgacaaaccacgcaattgtgcagaccttggtgaactccgtcaactctaagattcccaaagcatgctgcgtgccaacagagctgtcagccatcagcatgttgtacctggatgagaatgaaaaagtggtgctcaagaattatcaggatatggtcgtggagggctgtgggtgcaga

SEQ ID NO: 7901 - DNA, 1188 bp, synthetic construct
  misc_feature 1..1188: note = source = /note="Description of Artificial Sequence: Synthetic coding sequence"
  source 1..1188: mol_type = other DNA
atggtagcaggaacccggtgcttgcttgccctgttactgccccaagtccttctgggtggcgctgctgggctagtacctgagttagggcgccggaaattcgcggcggcctcaagcggacggcctagctctcagcccagcgatgaggtgttgagtgagtttgagcttaggctgctgagtatgttcggcttgaaacagcgccccaccccaagcagagatgcggtcgtgccaccttatatgctggatttatacagacgccatagcggacagccgggctctccagcccctgatcacaggctagaacgggccgcatctagggccaataccgtgaggtcatttcaccacgaggaaagccttgaagaattgcctgaaaccagcggcaagaccacgcgccggttctttttcaatctgtccagtatccccactgaagaattcattacctccgcagagcttcaggtgttcagggagcaaatgcaggacgcgctgggtaataattctagcttccatcaccggataaatatctacgaaattatcaaaccggcgactgccaactccaagttccccgtaacccggcttctcgataccagattggtgaatcagaacgcctcccgatgggagagtttcgatgtcacacccgcagttatgcgatggaccgcccagggacacgcgaatcacggtttcgtggttgaagttgcacacttggaagagaaacagggcgtgtctaaaaggcacgtgaggattagtaggagcctgcaccaagatgagcacagctggtctcagataagaccactgttagttaccttcggacatgacggcaagggccaccctctgcacaagcgggaaaaacgacaggctaaacacaagcagcgtaagcggctaaaatcctcttgcaaaaggcatcccctttacgtagatttcagtgatgtgggctggaatgattggatcgttgcacctccgggatatcacgccttttattgccacggggagtgtccttttcctttggcggatcatcttaatagcacgaatcatgcaattgtgcaaactttggttaattcagtcaatagtaaaattccaaaggcatgttgcgtgccaactgagctctctgctattagcatgctgtatctggacgagaatgagaaggtggtgctgaagaactaccaagacatggtggtggagggctgcggatgtcgg

SEQ ID NO: 7902 - DNA, 1188 bp, synthetic construct
  misc_feature 1..1188: note = source = /note="Description of Artificial Sequence: Synthetic coding sequence"
  source 1..1188: mol_type = other DNA
atggtggccggcacgagatgtctgctcgcattgctcctgcctcaagtcctattaggaggagctgcaggactggtgccagagttgggaaggcgtaagttcgcggcggccagttcaggaaggccttcctctcagcctagtgacgaggtattatctgagtttgaactgcgactgctttccatgttcggattaaaacagagacccaccccttctcgggacgctgtggtaccaccttacatgctggatttgtacaggagacactctgggcagcctggatcacccgcgcccgaccatcgcctggagagggccgcctcccgggcaaacactgtgagaagtttccatcacgaagagagtctcgaagagcttcctgaaacctctggcaagacaaccagaagattcttcttcaacctaagctctattccgactgaagagtttataacttcagccgaattgcaggtgtttagagagcagatgcaggacgcattgggcaataatagtagtttccatcacaggatcaatatatatgagattattaagcccgcaacggcaaacagtaagtttcccgtgacgcgcctgctcgatacaagattggtgaatcagaatgcctctaggtgggaaagcttcgatgtaacgcccgccgtgatgcggtggacagcgcaaggccacgcgaaccacggctttgtcgtcgaggtcgcacacctggaggaaaaacagggagtatcaaaacggcacgtcagaatttcgagatctcttcatcaggacgagcattcatggagtcagattcggcctctgcttgtcacattcggacacgacgggaaaggtcacccattacacaaacgggagaagaggcaggccaagcataagcaacggaagaggctcaagtcctcatgcaaaaggcatcctctttacgtcgatttctcagatgtgggttggaatgactggattgtcgcaccacccggataccacgccttttactgtcacggggaatgccctttccccctggcagatcatctgaactccaccaatcacgccattgtgcagactttagtcaattctgttaactccaagatccctaaagcttgttgtgtgccaactgagttaagtgctatctcaatgttatatttggatgagaatgagaaggtggttctgaagaattaccaggatatggtcgtcgaaggctgtggctgcaga

SEQ ID NO: 7903 - DNA, 1188 bp, synthetic construct
  misc_feature 1..1188: note = source = /note="Description of Artificial Sequence: Synthetic coding sequence"
  source 1..1188: mol_type = other DNA
atggtggccggtactcggtgcctcctcgccctcctcctcccacaggtgctcttggggggcgcagcaggcctggtgccagagctgggacgcagaaagttcgcggcagcctcgtcaggacggccgagctctcagccttcagacgaggtgctctcggaatttgagttgcggctcctgtcaatgttcggactgaagcaacgaccgaccccctctcgcgatgccgtcgtcccaccgtatatgctggacttgtaccggcggcatagcggacaacctggtagccctgcgccggaccaccgccttgaaagggccgcttcccgcgccaatactgtgaggtcgttccaccacgaagaatcgcttgaggaactgccggaaacttcgggaaagaccaccagaagattcttcttcaatctgagctcgatccccaccgaggagttcatcacgtcagccgagctccaggtgttccgggagcaaatgcaggacgccctgggaaacaactccagcttccaccaccggatcaacatctacgaaatcatcaagccggccaccgctaactctaagttcccggtgaccagactgctggacacgcggttggtcaaccaaaacgcctcgcgctgggaatccttcgacgtgactcccgctgtcatgcgctggactgcccagggacatgcgaatcacgggttcgtcgtggaagttgcccacctcgaggaaaagcagggtgtttcaaagagacacgtgcgcatctcccgctccctgcatcaggatgaacactcctggtcccagatccggcctctgctggtgacctttggtcatgacggaaagggccaccccctccataaaagggaaaagcgccaagcaaaacacaagcaacggaagcggctgaaatcgtcctgcaagaggcatccgctttacgtggatttctcggacgtgggatggaatgattggattgtggccccaccgggctaccatgctttttactgccatggcgagtgtccattccctctcgcagaccacctgaacagcactaatcatgctatcgtgcagacccttgtcaattcggtgaacagcaagatccccaaagcctgctgtgtgcccactgagcttagcgccatctcaatgctctaccttgatgagaacgaaaaagtggtgttgaaaaactaccaagatatggtcgtggaagggtgtggatgccgg

SEQ ID NO: 7904 - DNA, 1188 bp, synthetic construct
  misc_feature 1..1188: note = source = /note="Description of Artificial Sequence: Synthetic coding sequence"
  source 1..1188: mol_type = other DNA
atggtagccgggacccgctgtctgcttgccctccttcttccacaagtgcttcttggcggagcagcaggacttgtgcctgaattgggaaggagaaagtttgcagcggccagctcgggacgcccaagctcgcagccctcagacgaagtgctttccgaatttgaacttagactcctgtcaatgtttgggctgaaacaaagacctactccttccagggatgcagtcgtgcctccgtacatgctcgacctgtaccgtcgccatagcggccaaccaggaagccctgcccctgatcatcgcctcgagcgcgcagcaagccgagcaaacaccgtgcgatcctttcatcatgaagaatcactggaggaacttcctgaaactagcggtaaaacgaccagacggttctttttcaatcttagtagcattcccactgaggagttcataaccagcgccgaacttcaagtctttcgggagcaaatgcaggatgcattgggaaataactcctcatttcatcaccgcatcaacatttatgagataatcaaacctgccactgcaaactccaagttccctgtgaccagactccttgataccagactggtcaaccagaatgcttcgcgttgggaatcctttgacgtgactccagcagtcatgagatggaccgctcaaggacatgccaaccacgggtttgtggtggaggtcgcgcatctcgaagaaaaacagggtgtgagcaaacgccatgtgcggatctcaagatccctccatcaagatgagcattcatggtcacagatcaggccccttcttgtgacctttggccatgatggtaagggacatccactccacaaaagagaaaagcgccaagcgaagcataagcagaggaagaggctgaaaagctcatgtaagcgacatcctctctacgtggatttttctgacgtgggatggaacgattggatagtggcgccacctggttaccatgctttttactgtcacggagaatgtcctttcccactggctgatcatttgaactccaccaatcatgccatcgtgcagaccctggtgaattccgtgaactcaaagatccccaaggcatgttgcgtgcccaccgaactgtctgccatttcgatgctgtacctcgacgaaaatgaaaaggtggtcctgaaaaactatcaagacatggtcgtcgaaggttgtggatgtagg

SEQ ID NO: 7905 - DNA, 1188 bp, synthetic construct
  misc_feature 1..1188: note = source = /note="Description of Artificial Sequence: Synthetic coding sequence"
  source 1..1188: mol_type = other DNA
atggtggcaggaactagatgtttgcttgcactgctgttgcctcaggtgctgctcgggggagccgcagggctggtgcctgaacttggccggcggaagtttgcggcagcgtcgtccggtcggccttccagccagccatcagatgaagttctttccgaatttgaattgcgactgctctccatgtttggactcaagcaacggccgactccttcgcgtgacgccgtggtgcctccatacatgctcgacctttacagacgccactcgggacaacctggaagcccggcacctgatcacaggcttgaacgtgcagcatcgagagcaaacaccgtgcgttcattccaccatgaagaaagccttgaagaacttcctgaaacctcagggaaaaccactaggcgcttcttctttaatctgtcctcgatacctaccgaagaattcattactagcgcagaacttcaagtgttcagagagcagatgcaagatgctctgggtaacaattcatcgtttcatcacaggatcaacatttacgagatcatcaagcctgcaactgcaaactcaaagtttcctgtgacgagactgcttgatacgcgccttgtgaaccaaaatgcatctcgctgggaaagtttcgatgtgactccagcggttatgagatggacggcccagggtcatgccaaccacggctttgtcgtggaggtggctcatctcgaagagaagcagggtgtcagcaaacggcatgttagaataagccggagcctgcatcaggatgagcattcgtggtcgcaaatccgtccactgctggtgacctttggccatgacgggaagggacacccacttcataagagggaaaaacggcaagcaaagcacaaacagagaaaaagacttaagtcgtcatgtaagaggcatccactttacgtggacttttcagatgtgggttggaacgactggattgtggcccctcctggttaccatgcattctactgccacggcgaatgtccatttccactcgccgatcatcttaactcaaccaaccacgcgatagtgcagactctggtgaactcggttaactccaagattccaaaggcgtgttgtgtacctactgaacttagcgcaatctccatgctgtacctggacgaaaatgaaaaagtggtgctcaagaattaccaagatatggtggtggagggctgtggttgcagg

SEQ ID NO: 7906 - DNA, 1188 bp, synthetic construct
  misc_feature 1..1188: note = source = /note="Description of Artificial Sequence: Synthetic coding sequence"
  source 1..1188: mol_type = other DNA
atggtggctggaaccagatgcttgctggccctcctcctcccgcaggtgcttctggggggagcagcaggactggtgccggagctcggacgcaggaagttcgccgcggcatcttcgggacgcccgtcctcccagccttcggatgaggtgttgtccgaattcgaactgagactgctgtccatgttcgggttgaagcagcgccctaccccatcccgggacgctgtggtgccgccttacatgcttgatttgtaccgcaggcacagcggtcagccaggatcacctgcgccggaccataggctggaacgggctgcctcgagagcaaacaccgtgcggagcttccaccatgaagaaagcctggaagagctcccagaaactagcggcaagaccacccgccgattcttcttcaacctgtcatcaatcccgaccgaggaattcatcacttcggcagagctccaggtgtttagagagcagatgcaagacgcactgggcaacaactcttcattccatcatcgcatcaacatctatgaaatcatcaaacctgcgactgccaattcgaagttccccgtgacccgcctccttgacacccggcttgtgaatcaaaacgcttcgcgctgggaatccttcgacgtgaccccggccgtcatgcggtggacggcacaaggacacgctaaccatggattcgtggtcgaagtggcgcacctcgaagaaaagcaaggtgtctcgaagcggcacgtgcgcatctcccgctcacttcaccaagacgagcactcctggagccagataaggcctctgctcgtgacgtttggacatgacgggaagggacatccactgcataagcgggaaaagcgccaagctaagcataagcaaaggaagcgcctgaaatcatcctgcaaacgtcacccgctttacgtggatttctcggatgtgggatggaatgactggatcgtggccccgcctggataccacgcattttactgtcatggagaatgccctttccctctggcagaccatcttaattcaactaaccacgccatcgtccagactctggttaactcggtgaactcgaaaatccccaaagcctgctgtgtgccgacggaattgtcagcgatcagcatgctgtacctggatgagaacgaaaaagtggtgctgaagaattaccaggacatggtggtcgagggctgtggctgccgg

SEQ ID NO: 7907 - DNA, 1188 bp, synthetic construct
  misc_feature 1..1188: note = source = /note="Description of Artificial Sequence: Synthetic coding sequence"
  source 1..1188: mol_type = other DNA
atggtggccggtactcgctgtttgctggcacttctgctcccccaagtccttctcggaggggcagcaggactcgtgccagagctcggtcgtcgaaagtttgcagcagcatcctcaggcagaccatcatcacagccttcggatgaagtcctctcagaattcgagctcagacttctctcaatgtttggtcttaagcagcggcctactccctcgcgtgatgcagtggtgccaccttacatgctggacctctacaggagacattcaggtcaacccggctcccccgcaccagatcacagacttgagagagcagcatcacgggcaaacacggtccgctcgttccaccatgaagagagcctcgaagaacttccagagacttctggaaagactacccgtcgttttttcttcaatcttagctcgatccctactgaagaattcattacgtcagcagaacttcaagtattcagggaacaaatgcaagacgcccttgggaataactcgtcatttcatcaccgcataaacatttatgagattatcaagccagcaactgccaactctaagtttcctgtgactagactgcttgataccagactggtgaaccagaatgcctcgcggtgggaatcctttgacgtgactccggccgtaatgcggtggaccgctcaaggccatgctaaccatggtttcgtcgtggaagtcgcacatcttgaagagaagcaaggcgtgtcaaaaagacacgttcgcatttcgaggagcctgcatcaggacgaacactcatggtcgcagattaggccccttcttgtgacctttggacatgatggcaaaggccaccctctgcataagcgggaaaagcgccaggccaaacataagcaacgaaaacgactgaagagctcgtgtaagcgacatcctctgtacgtcgacttcagcgatgtgggttggaacgattggatagtggcacctccagggtaccatgcgttctactgccacggagagtgtccatttccattggcggatcaccttaacagcaccaaccatgccattgtgcaaaccctcgtgaattcggtgaattctaaaatcccgaaagcgtgttgtgtgccaaccgaactgtccgccatttctatgctgtacttggatgaaaacgaaaaggttgtcctcaagaactaccaagacatggtggtcgaaggatgtggttgtcgc

SEQ ID NO: 7908 - DNA, 1188 bp, synthetic construct
  misc_feature 1..1188: note = source = /note="Description of Artificial Sequence: Synthetic coding sequence"
  source 1..1188: mol_type = other DNA
atggtcgcaggcacgaggtgcctgctggcactgctgctcccacaggtcctgctgggtggggcggctggactcgtccctgagctcggccgccggaaattcgcagccgcatcctcgggtcggccgtcctcacaaccaagcgacgaagtgctgagcgaattcgaactgaggctgctttccatgtttggactcaaacagaggccaactccaagtagagacgccgtggtgccgccttacatgctggacctctacagacgccacagcggacagcctggctccccagcccctgaccacagattggagagagccgcctcgagagctaataccgtgagatcgtttcaccatgaagaatccctcgaagagctgccagaaacttcaggcaagactacccgccgcttcttcttcaatctgtccagcatcccgaccgaggaattcatcactagcgccgaattgcaggtctttagggaacagatgcaggacgctctcggaaacaactcgagctttcaccaccgcatcaacatctacgagatcattaagccagccaccgcgaattcaaagttcccggtgactcgactcctggatacccgcttggtcaaccagaacgcttcgagatgggagtccttcgacgtgactccggccgtgatgcgatggactgctcagggacacgccaatcacggtttcgtcgtcgaagtggcacatcttgaagagaagcagggcgtgtcgaaacgacatgtgaggatttcgcggtccctgcatcaggacgaacacagctggtcgcaaatccgcccgctgctggtgaccttcggccatgacgggaaggggcatcccctccacaaacgcgagaaacgacaggccaagcacaagcagaggaagcgcttgaagtcgagctgcaagaggcaccctctgtacgtcgacttctccgacgtgggctggaacgactggattgtggccccgcctggataccatgcgttctactgccatggagaatgcccgtttccactggcggaccacctgaatagcactaaccacgcgatcgtccaaaccctggtcaacagcgtgaatagcaagatcccgaaggcctgctgcgtgcctaccgaactctcggccatttcaatgctctacctggacgaaaacgaaaaggttgtcctgaaaaactaccaagatatggtcgtggagggatgtgggtgtcgc

SEQ ID NO: 7909 - DNA, 1188 bp, synthetic construct
  misc_feature 1..1188: note = source = /note="Description of Artificial Sequence: Synthetic coding sequence"
  source 1..1188: mol_type = other DNA
atggtggctggcaccagatgcctgctggcgcttcttcttccacaagtcctgttgggaggcgccgccgggctggtcccggagttgggtagacggaaatttgccgcggcgagctcaggccgtccatctagtcaacctagcgacgaagtgctctcagaatttgaactgagactattatcaatgtttggcctgaaacagaggcctaccccgagccgtgacgccgtcgtcccaccgtatatgttggatttgtatcgccgtcattccggtcaacctggctctcctgcgccggaccatcgacttgaacgtgcagcgtcaagggcgaacaccgttaggtcttttcatcatgaagaatctttggaagaactcccagaaacatctggcaagacgactcggcggttcttttttaaccttagctcaattccgactgaggaatttatcacatcggccgagttacaagtatttagagaacagatgcaagacgcgttaggtaataattcatcgtttcatcatcggataaatatctatgaaataatcaagccggctaccgccaattcgaagttcccggtgactaggttattggatacgagactggtcaaccaaaacgcttcacgatgggaaagcttcgacgtaacgcccgcagttatgcgttggacagcgcagggtcatgcaaatcatggctttgttgtggaggtagcgcatttagaagaaaaacaaggcgtctcgaaacgtcatgtgcgcatttccagatcgctgcatcaagacgaacattcatggtcacaaatccgcccgcttttggtcacatttggccatgatggaaaaggccatccacttcataaacgggaaaaacgccaagcaaaacacaaacagcgcaagcggctgaaaagctcttgcaaacgccaccctctctatgtcgattttagcgacgttggatggaatgattggattgtagcgccgcctggttatcatgcattttactgccatggcgaatgcccgtttccgctggcagatcatctgaacagcacaaatcatgcaattgtacaaaccttggtaaattcggtcaatagcaaaatcccaaaagcgtgctgcgtgcctacagaactgagcgcaattagcatgctgtatctcgatgagaacgaaaaagtcgtcttgaaaaattatcaagacatggtagtagagggttgtggatgccgg

SEQ ID NO: 7910 - DNA, 1188 bp, synthetic construct
  misc_feature 1..1188: note = source = /note="Description of Artificial Sequence: Synthetic coding sequence"
  source 1..1188: mol_type = other DNA
atggttgctggcactcggtgccttcttgcactgcttctaccacaggtcctgcttggcggggccgctggcttagttccagagctcggccgcaggaagtttgcggccgcatcctccggccgaccctcatcgcaaccctccgatgaggtactttcagagtttgaactaagactcctatctatgtttggtctaaaacagcggcctacaccatcacgggatgcagtcgtgcccccatatatgctcgatttgtataggagacactccggacaacctggaagcccggcccccgaccatcggctggagagagccgccagtagagccaacacagtgcggagctttcatcatgaggaaagtctggaggaactgccggagacctcaggtaagacgacccggcggttcttcttcaacctctcttccatccccacggaggaatttataacaagcgcagagctgcaagtctttagagagcagatgcaggacgctctgggtaataattccagctttcatcatagaatcaatatttacgaaattataaaacctgccaccgctaattctaagttccccgtgacaaggctgttagacaccagactggtaaatcagaatgcaagtcgctgggagtcatttgacgtgaccccagccgtgatgagatggacggcacaggggcatgccaatcacggctttgttgtcgaagtggcccacctggaagagaagcagggcgtgtcaaaacgtcacgtgcgcatcagtagaagtctgcaccaggacgaacatagttggagccagatcagacctctcctggtgacatttggacatgacgggaagggacaccccctgcacaagcgcgaaaaacggcaggcaaaacataaacagcgcaagaggttaaagtcgtcctgtaagcggcaccctctctatgtagatttttctgacgttggttggaacgactggatcgtagcgccccccggctaccatgctttttattgccatggggagtgccccttcccactcgctgatcatttgaatagcactaatcacgccatcgttcagaccctggtaaattcagtcaactccaaaatacctaaagcatgctgcgtccccacagaactgagtgcgatttccatgctgtacttggatgaaaatgaaaaggttgtgctgaagaactaccaagacatggtggtggaagggtgtggttgtcgc

SEQ ID NO: 7911 - DNA, 1188 bp, synthetic construct
  misc_feature 1..1188: note = source = /note="Description of Artificial Sequence: Synthetic coding sequence"
  source 1..1188: mol_type = other DNA
atggtggcagggacccgctgtctgcttgccctgctgcttccccaagtgctgcttggtggtgcagcgggcctcgtgcctgagctggggcgtcggaaatttgcggccgcttcctccgggcgtccttcgtctcaaccaagcgatgaagtcttgtccgaattcgagcttagacttctgagcatgtttggtctgaaacaaaggcctacgccatcgcgtgacgccgtggtgcctccttacatgcttgacttgtaccgcagacacagcggacagcctggaagccctgcgcccgatcatagactggagcgtgctgcatcacgtgccaataccgtgcgatcatttcaccatgaggagtcccttgaagagctgcctgaaaccagcggtaagactactcgccgattctttttcaatctttcttccataccgaccgaagagtttatcactagcgcagaactccaggtattccgggaacaaatgcaagacgcgctcggaaacaactcgtcctttcatcataggatcaacatttacgagattatcaaacccgcaactgcaaactctaaattcccagtaactcgtctgcttgatacccgccttgtgaatcagaacgcctcacgatgggagagctttgacgtcaccccagccgtcatgcggtggactgctcaaggccatgccaatcatggctttgtggtggaagtcgcgcatctggaagaaaagcagggagtttcaaagcggcatgtgagaatatcgaggtcacttcatcaggatgaacatagctggagccaaatccggcctcttctcgtcaccttcggtcacgatggcaagggacatcccctgcataagcgggaaaaacggcaagcaaagcacaagcagcggaagcgtctgaagtcgtcatgcaagaggcacccactctacgtggatttctctgacgtcggctggaatgattggattgtggcaccccctggataccacgcattttactgtcacggagagtgtccttttccgttggcagatcacctgaacagcaccaaccacgcaatcgtgcagactctcgtcaattccgtgaattcaaagattccaaaggcatgttgcgttcctacggaactttccgcaatatcgatgctctatctcgatgaaaacgagaaagtcgtgctcaagaactaccaagacatggtcgtcgaaggatgtgggtgccgg

SEQ ID NO: 7912 - DNA, 1188 bp, synthetic construct
  misc_feature 1..1188: note = source = /note="Description of Artificial Sequence: Synthetic coding sequence"
  source 1..1188: mol_type = other DNA
atggtggcgggcactcggtgtctcctggcccttctattgccacaggtcctgctgggcggtgcggccggtctagttcccgagctcgggcggcgtaaatttgccgcggcctcttctggccgcccttccagtcagccttccgatgaggtgctgagcgaattcgaactgagacttctgtcaatgttcggcctgaagcagcgcccaacgccttcacgagatgcagttgtacccccctatatgctcgatctgtacagaaggcactcgggtcaacctggctcgcctgccccagaccataggctagagcgggcagcctctcgggcaaatactgtgagaagcttccaccacgaagagtctctagaggagcttccagaaacctccgggaaaaccacacgccggttcttctttaacctcagtagcatccctacagaggaattcatcactagcgcagagctgcaagtgtttcgcgaacaaatgcaagacgctttggggaacaatagcagctttcaccatagaatcaatatatacgaaattattaaacccgctaccgcaaatagtaagtttcctgttacacgcctgctcgatactagactggtaaatcagaacgccagccggtgggagtcctttgacgtcactccggcggtgatgaggtggacagctcaggggcacgccaaccacggttttgtggttgaagtcgcccacttggaagaaaaacaaggagtaagcaaaaggcacgtccgcatatctagaagcctgcaccaggacgaacattcgtggtcccagatccgccccttactggtcacgttcggccacgatggaaaggggcatcccctgcataaacgggaaaagaggcaagcaaaacataaacaacggaagcgacttaaaagtagctgtaagcggcatcctctctacgttgactttagcgacgtgggctggaatgactggatagtggccccaccagggtaccatgcattttactgtcacggcgaatgcccctttcctctggccgaccatttaaacagtaccaatcatgcaattgtgcaaactttggttaactcggttaactcgaaaattcccaaggcctgctgcgtgccaaccgaattgtccgctatctccatgctgtacctcgatgagaatgagaaggtggttcttaaaaactatcaggacatggtcgttgaaggatgcggatgtcgc

SEQ ID NO: 7913 - DNA, 1188 bp, synthetic construct
  misc_feature 1..1188: note = source = /note="Description of Artificial Sequence: Synthetic coding sequence"
  source 1..1188: mol_type = other DNA
atggttgcgggaactcgctgtttgctggcactgctgctgccgcaggtgctgcttgggggagctgccggactggtgcctgaactcgggagacgcaaatttgccgctgcctcatccgggcgcccttcctcgcaaccctccgatgaagttctctccgagttcgagctccgcctgctgagcatgtttggattgaagcagcggcctaccccctccagagatgctgtcgtcccgccgtacatgctggatctttaccggaggcattcgggccagcctggatccccagcaccagaccaccggctcgaaagggccgccagccgcgcgaatactgtgcggtccttccatcacgaagaatcgcttgaggagctgccagaaactagcggtaagacgactcgcagatttttcttcaacctgtcctctatcccgactgaagaattcatcactagcgctgaactccaggtgttccgcgagcaaatgcaagacgcactgggcaacaattcttccttccatcatcggatcaacatctacgagattatcaagccagcgacggccaactcgaagtttccagtgacgaggctcctggacacccgtctggtgaaccagaacgcgtcgagatgggagagctttgatgtcaccccagccgtcatgagatggacggcgcaggggcatgcaaatcacggattcgtggtggaagtcgcccacctggaagaaaagcagggcgtgagcaagcggcacgtcagaatctcacggtccttgcatcaagacgaacattcatggtcccagatccgcccgctgttggtgaccttcggacatgatgggaagggacatccgcttcacaaaagagaaaagcgccaagcgaaacacaaacaaagaaagagacttaagtcgtcctgcaaaaggcacccgctgtatgtcgacttttcggatgtgggctggaatgattggatcgtcgccccgccgggataccatgcgttctactgccatggtgaatgcccgttccctctcgctgatcacctgaatagcaccaaccacgcgatcgtgcaaactctcgtcaactccgtgaacagcaaaattccgaaagcatgctgcgtccctactgaactttcggcgatttccatgttgtacctggacgagaacgaaaaggtggtgctgaaaaactaccaggacatggtggtggagggttgcggatgcaga

SEQ ID NO: 7914 - DNA, 1188 bp, synthetic construct
  misc_feature 1..1188: note = source = /note="Description of Artificial Sequence: Synthetic coding sequence"
  source 1..1188: mol_type = other DNA
atggtggccggtaccaggtgcctccttgctctgctcttgccacaggtcctcttgggtggcgcagccggacttgtgcctgagctcggaagacgcaaattcgcagctgccagtagcggacgtccctcctctcagcccagcgacgaggttctgtccgaatttgagctgaggctccttagtatgttcggtttgaagcagaggccaaccccttcaagggacgccgtagtgcccccatatatgctggacctgtatcgccgccatagtggacagccaggaagccccgctcctgatcaccgcctggagagagctgcttctcgtgctaatactgtccgctcctttcaccatgaggaatccttggaagaactgcctgaaacctccggaaaaacaaccagacgcttcttctttaatcttagctccatcccaactgaagagtttatcacttcagctgagttgcaggtgtttcgtgagcagatgcaggatgctctgggaaacaactcaagcttccatcaccgtattaatatttacgagatcataaaaccagcaacagcaaacagtaagttccccgtaacaagactgctggacacccgcctggttaaccagaacgcctctaggtgggagagctttgacgtcacccctgccgtgatgaggtggactgcccaaggacacgcaaaccacggattcgtggtagaggtggctcatctggaagaaaagcaaggcgtgagtaaaagacacgtgaggatcagcaggagcctccaccaagatgagcactcatggtcacagatacgccccctcctcgtcacatttggtcacgatggcaagggccaccctctccacaagagagagaagcgccaggcaaaacacaagcagaggaagaggctgaagagttcctgtaagcgtcatcccctgtatgtggacttttccgatgtcggatggaatgactggatcgtggcccccccaggttaccacgctttttactgtcacggagagtgcccttttcctctcgccgatcacctgaactctaccaatcatgcaattgtccagactctcgtcaactcagtcaatagtaaaattcctaaagcctgctgtgtgcccaccgagttgtccgctatctctatgctgtaccttgacgagaacgagaaggtagtgttgaagaactatcaagacatggttgtcgaaggttgtggttgtagg

SEQ ID NO: 7915 - DNA, 1188 bp, synthetic construct
  misc_feature 1..1188: note = source = /note="Description of Artificial Sequence: Synthetic coding sequence"
  source 1..1188: mol_type = other DNA
atggtcgctggcacccgctgtcttttggctctgttgctgccgcaggtcctgttaggcggcgccgctgggcttgtgcctgaactgggacggcgtaaatttgccgccgcatcatcagggcggccctcaagccaaccatctgacgaggttctgtcggagtttgaactccggttgttatccatgtttggactgaagcagcgaccaacaccaagcagggacgccgtggtgcccccctatatgctcgatctttatcgtagacacagcggtcaacccggatcaccagcccccgaccacagactggaacgggccgcttcaagggccaacaccgtgcggagcttccaccatgaagaaagcttagaggaactgcctgagacgtccggcaagacgacacggcgatttttctttaatctttccagcattccgacagaggaattcatcacctcggccgaactgcaggtctttagagaacagatgcaggacgcgctggggaataactcctcattccaccatcggatcaatatttacgagataataaaacctgcgactgctaactctaagtttccagtgacccggctactggacacccgactggtcaatcaaaacgccagcagatgggagagtttcgacgtcacccctgctgtcatgcggtggacagcccagggacacgcaaaccacggattcgtcgtcgaagtggcccacctggaagagaagcagggagtctccaaacgccacgtacggataagtcggtccctgcaccaagacgagcacagctggtcgcagattaggccacttctagtaacctttggccacgacggaaaaggacatcctcttcataagcgggagaaaaggcaggctaagcacaagcagagaaagcggttaaaaagctcctgcaaacggcatccactctacgtcgatttttctgatgtgggatggaacgattggattgttgctcccccaggataccacgccttctactgtcatggagaatgcccatttccactcgccgatcacctcaacagcactaatcatgcaatcgtccaaacactggtaaactcggtgaactcaaaaattccaaaggcatgttgtgtgcccactgaactatcagcaataagcatgctctatctggacgagaatgagaaggtcgtgttgaaaaattatcaggatatggtagtggaaggatgtgggtgcagg

SEQ ID NO: 7916 - DNA, 1188 bp, synthetic construct
  misc_feature 1..1188: note = source = /note="Description of Artificial Sequence: Synthetic coding sequence"
  source 1..1188: mol_type = other DNA
atggtagcaggcactcggtgcctcctggctctcttgctgccacaggtgctgttgggtggtgccgccggtcttgttccagaactggggcgtcgaaagttcgcggctgccagctccggtcggccctctagccagccaagcgacgaagtgctgtcggagtttgagctgcgactgttgtcaatgttcgggctcaagcagcgtcccacaccttcccgtgatgctgtagtgccaccctatatgctggacctctaccgacggcacagtgggcaaccggggagcccagcgcccgatcatcgacttgagagagctgcttctcgcgccaacacagtgaggagtttccaccacgaggaaagcctggaggaactgccagagacatctgggaagaccactagacggttttttttcaatctaagctccatcccaaccgaggagtttatcacatctgcggagcttcaggtattcagggaacagatgcaggatgctcttgggaacaactcctcattccaccaccgaattaacatttacgagataataaagccggctaccgccaactccaagttccctgtgactcgtttgctggatacccgcctggtgaaccagaacgcctcacggtgggagagcttcgacgtgacacctgcggtgatgagatggaccgcccagggtcatgcaaaccacgggttcgtcgtcgaagtggctcacctggaagaaaaacagggggtctctaaacgccatgtccggatatctagaagtctccaccaggacgagcattcctggagccagatccgacctctcctcgtcactttcggccacgacggaaaaggacatccgctgcataagcgggagaaaaggcaagccaagcacaagcagcgcaaaagactgaaatctagctgcaaaagacacccactgtatgtcgatttttccgacgtgggctggaacgactggattgttgctccccccgggtatcatgccttctattgtcacggcgagtgtccgttcccgctcgccgaccacctgaactcaacgaatcatgcgattgtgcagaccctggtgaacagcgtgaattctaaaatccccaaggcgtgttgcgtgccgacggagcttagcgccataagcatgttgtatctggatgaaaatgaaaaggtggttttgaagaactaccaagatatggtggtggaaggctgcggatgccgt

SEQ ID NO: 7917 - DNA, 1188 bp, synthetic construct
  misc_feature 1..1188: note = source = /note="Description of Artificial Sequence: Synthetic coding sequence"
  source 1..1188: mol_type = other DNA
atggttgccggaacgcggtgtctcctggcgctcctgttgccccaagtgctgctgggaggcgcggctggcctcgttcccgagctcggccgccgcaaattcgctgcggcatccagtggccgccctagcagccagccgtcggatgaggtcctgagcgaattcgaactccgtctgctgagtatgttcggtctgaagcagaggcctactccttcccgagatgctgttgtccctccctacatgctcgatctgtaccgccgtcactccggccagccgggcagccctgcgcccgatcaccgtctcgaacgagccgcttcgcgggccaacaccgtacgtagtttccatcatgaagagagcctggaggagctccccgaaacgtccggcaagacgacccggcgcttcttttttaatctttcctctatccctaccgaggagttcatcaccagcgccgagctccaggtgtttagagaacagatgcaagacgctcttggcaacaactcatcgttccatcaccggattaacatctacgaaattatcaagccagccaccgccaactctaagtttcccgtcactcgcttgctggatacgcgccttgtaaaccagaacgcttcccggtgggagtctttcgacgtcacccctgcagttatgcgctggactgcccaaggacacgccaaccacggcttcgtcgtggaggtcgcccaccttgaggaaaagcagggagtctcaaagcgccacgtgcgtatttcccgtagccttcaccaagatgagcatagctggtctcaaatccgtccacttcttgtgactttcggccatgacggcaagggtcaccctctccataagcgtgagaagcgacaagctaagcacaagcaacgcaaacgcctgaagtcgtcttgcaaaaggcaccccctgtacgtggacttcagtgatgttggctggaatgactggattgtcgctcctcctggttaccatgccttctattgccatggcgagtgcccgttccctcttgctgatcacctcaacagtacgaaccacgccatcgttcagacgctggtgaattcggtcaacagtaagattcccaaggcttgctgcgtccccaccgagctgtctgctatcagcatgctttacctggacgagaatgaaaaggtggtgctgaagaactaccaagacatggtcgtcgagggttgcggttgccga

SEQ ID NO: 7918 - DNA, 1188 bp, synthetic construct
  misc_feature 1..1188: note = source = /note="Description of Artificial Sequence: Synthetic coding sequence"
  source 1..1188: mol_type = other DNA
atggtggccggaacccgatgcctgttggctttgctattgccacaggtgctgctaggcggtgctgcgggcctggttcctgagctgggccgacgaaaattcgcggcagcctcgtccggacgcccttcgagccagcccagcgacgaggtattgtctgagttcgagttgcgattgctgagtatgttcggccttaaacagcggccaactccaagcagggacgccgttgtgcctccgtacatgttagatctgtacaggcgccattcgggacaacctggctcgccagcccccgaccaccgactggagagggctgcaagccgcgctaataccgtacgttccttccaccacgaggagtcgctggaggaattgcccgagacgagtggaaagaccacgcgcagattcttctttaatctaagctcgattcctaccgaagagttcatcacgtcggcggaattgcaggttttcagggagcaaatgcaggacgcactgggcaataactcgtccttccaccacagaatcaacatctatgagatcatcaaaccagctacggccaattccaagttccccgtgactcggctgctggatacgcgcctggtaaaccagaacgcatccaggtgggagagcttcgatgtcacccccgccgtgatgcgctggactgcacagggccatgctaaccatggcttcgtggtggaagtggcgcacctcgaggagaagcagggggtctccaagagacacgtgcgtatcagtcgttcgctacaccaagatgagcatagctggagtcaaattcgccccttgcttgtcaccttcggccatgatgggaaaggccatccgcttcataagcgtgagaagcgccaggcgaagcacaagcaacgaaaacgccttaaatcttcttgcaagcggcacccgttatacgtcgatttcagtgacgttgggtggaacgattggatagttgccccccccggttatcatgccttctactgccatggagaatgccctttcccgctggcggaccacctgaactcgactaaccacgccatcgtgcagacgcttgtgaattcagttaattcaaagatccctaaggcctgttgcgttccgaccgagttgagtgccatctccatgctctacttggacgagaatgagaaggtggtgcttaagaactaccaggatatggtagtcgagggctgcggttgtcga

SEQ ID NO: 7919 - DNA, 1188 bp, synthetic construct
  misc_feature 1..1188: note = source = /note="Description of Artificial Sequence: Synthetic coding sequence"
  source 1..1188: mol_type = other DNA
atggtcgcgggcacccgttgcctgctcgcccttctcctacctcaggtgctgctcggtggcgccgcgggcttagtgcctgaactcgggcgaaggaagttcgccgccgcttcgagtgggcgaccaagctcacagccttctgacgaggtgctaagcgagtttgagcttagattgctttcgatgtttggtctgaaacagcgcccaactccgagcagagatgctgtggtacccccctatatgctggacttatatcgaagacattccggacagcccgggtccccggcacccgaccaccgtctagaacgagcagcaagccgcgccaataccgtacgcagctttcatcacgaggagtcattggaagaactgcccgaaacaagtgggaagactactaggaggtttttcttcaatctgagctctatcccgacggaagagtttattacgagtgctgaattacaggtgttccgggagcaaatgcaggatgcacttggcaataattctagcttccaccaccgaattaacatctatgagatcattaaaccagctacagctaatagtaagttccctgtgacgcggctcctggacacacggttggtgaaccagaatgcgtcaaggtgggagagttttgacgtgacgccagctgtgatgaggtggaccgcacagggccacgctaatcacggctttgtcgtggaggtggctcacttggaagagaagcagggtgtgagcaaacgacacgttaggatttctaggtccctacatcaggacgaacactcttggtcacagatcaggccactcttggttacgttcgggcacgatggcaaagggcaccccctgcataagagggaaaaaagacaagccaaacacaaacagcgcaagaggctcaaaagctcctgtaaacgccatcctctttatgtggacttctctgacgtcggatggaatgattggatagtcgcccctccgggttaccacgcattctactgtcacggagagtgccccttcccgctggctgaccacctgaatagtactaatcacgctatcgtacagaccttggtgaactccgttaattcgaagatcccaaaggcatgctgcgttcccacggaattaagcgccatctccatgctctacctggacgagaatgaaaaagtggtcctcaagaactaccaggacatggtcgttgaggggtgtggttgccgc

SEQ ID NO: 7920 - DNA, 1188 bp, synthetic construct
  misc_feature 1..1188: note = source = /note="Description of Artificial Sequence: Synthetic coding sequence"
  source 1..1188: mol_type = other DNA
atggtcgctggaactcggtgtctcctggcccttcttttgcctcaggtgctcctgggcggggcagcgggacttgtgcccgagcttggcaggagaaagtttgcggcagcctcttcgggccgcccctcaagccagccttcagatgaagtgctttcggaatttgaactgagattgctttctatgttcggtcttaagcaaagaccaaccccatctcgtgatgccgtcgttccaccttacatgcttgatctctaccgtagacacagcggtcaaccagggtcgcctgccccggatcatcgccttgaacgcgccgcaagcagagcgaataccgttcgttcctttcatcatgaagaaagcctcgaagagctccctgaaacttcaggaaagactacgcgacggttctttttcaatctttcatcaattccaacggaagagttcatcactagcgcagagcttcaggtgttcagagaacaaatgcaagacgcactgggaaacaactcgagctttcatcaccgaattaacatttacgagatcatcaagcctgcaaccgccaactcaaaattcccggtcaccaggctcctggatactcggctggtcaatcagaatgcttcgcgatgggaatcgttcgatgtgaccccagcagtcatgcgctggaccgcacaagggcacgctaaccacggctttgtggtggaagtggcacatttggaagagaaacaaggagtgtcaaaacgccatgtcagaatatcccggtcactgcatcaagacgagcattcctggagccagattcggcccctgcttgtgacctttggccacgatgggaagggacatcctctccacaagcgtgaaaagaggcaagcaaagcataagcaacggaagagactgaaaagcagctgcaaaagacaccctctttacgtcgacttttctgatgtgggatggaacgactggattgtggcaccgccaggataccatgcattctactgtcacggagagtgcccatttcctcttgcggatcatttgaactcgactaatcatgcaattgtgcagactctggtgaactcagtcaacagcaagatcccgaaggcatgctgtgtcccaaccgagctgtcggcgatctcaatgctgtacttggacgagaacgaaaaagtggttcttaagaattatcaagatatggtggttgagggttgtggatgtcgg

SEQ ID NO: 7921 - DNA, 1293 bp, synthetic construct
  misc_feature 1..1293: note = source = /note="Description of Artificial Sequence: Synthetic coding sequence"
  source 1..1293: mol_type = other DNA
atgcatgtgcggagcctgcgggcagcggccccacacagctttgtcgcattgtgggctcccctgtttctactgcggtcagcgcttgcagattttagcctagacaacgaagtccattcctcattcatccaccgcaggctgaggtcacaagagcgacgagaaatgcaaagagaaattctctccattctcggactgccccaccgcccccgcccacacttgcagggaaagcataacagtgctccaatgttcatgcttgacctgtacaacgcgatggccgtggaagaaggaggtggaccaggcggccagggttttagttatccgtacaaggccgtcttctctacgcagggacctccgctcgcaagcctccaggacagtcattttctgaccgatgcagacatggttatgtcattcgtaaatctggtggagcacgataaagaattcttccatccgagataccatcaccgggaattccgattcgacctctccaagattcccgaaggagaggccgtgactgccgcggagttccggatttataaggactatattcgcgaacgatttgacaacgaaacctttcgtatcagtgtgtatcaggtactccaggaacacctggggcgcgagtcagacttatttctattggatagcaggactctgtgggcaagcgaagagggctggttggtgttcgacattaccgcgaccagtaaccactgggtagtgaatcctagacacaacttgggccttcagctaagcgtcgaaacccttgacggacaaagtattaacccaaagctggcgggcctcattggcaggcacgggccacagaataagcagcctttcatggtggctttctttaaggctacagaggttcattttaggtctattcgcagtacgggttccaaacagagaagtcagaaccggtccaaaacacctaagaaccaggaggcactgcgaatggcaaacgtcgccgaaaactctagctctgatcagaggcaagcctgcaagaagcatgagctgtacgtaagttttagagacctgggttggcaggattggatcatagccccagaggggtacgctgcctattactgtgagggagagtgcgcattcccactgaattcttatatgaatgctacgaaccacgcgatagtgcagaccctcgtgcatttcatcaacccagagacggtgccaaagccttgttgcgccccaacccaactgaatgctataagtgtgctgtatttcgatgacagttcgaatgtcatattgaagaaataccggaacatggtggtaagagcctgcgggtgtcac

SEQ ID NO: 7922 - DNA, 1293 bp, synthetic construct
  misc_feature 1..1293: note = source = /note="Description of Artificial Sequence: Synthetic coding sequence"
  source 1..1293: mol_type = other DNA
atgcatgtccgttcattaagagccgccgcacctcactcatttgtggcactgtgggcccccctctttctgctgcggtctgcacttgctgacttttccttagacaatgaggtccactccagctttatccaccgaagactccgatcccaagaacggcgcgagatgcagagggaaatactcagcattcttggactgcctcacagaccacggccgcacctccagggcaagcacaactccgcccccatgtttatgctggatctgtacaacgctatggccgtcgaggagggaggagggcccggtggtcagggattttcttatccttacaaagctgttttctccacccaagggccgccgctagcctcgctgcaggattctcactttttgaccgatgccgacatggttatgtcttttgtcaatttggtggagcacgacaaggaattttttcatccacgataccaccaccgtgagttccggttcgatttgtcaaagatccctgaaggcgaggctgtaacagccgccgagtttcggatatacaaggactacatccgagaaaggttcgataacgaaactttccgcatttctgtgtatcaggtgctgcaggagcacttggggcgcgagtccgacctgttcctgttagacagtcggactctgtgggcttctgaggaggggtggctggtgttcgacatcaccgccactagcaatcattgggttgtcaatccgcggcataacctcggattgcaactgagtgtggaaactctagacggacagagtattaaccccaagctagctgggctcatcgggagacacggcccacagaacaaacaaccttttatggtggcatttttcaaggccaccgaggtgcatttcaggtccattcgttccaccggcagtaaacagcgatcccaaaatcgcagcaaaaccccgaaaaatcaagaggcgctgcggatggccaatgttgctgaaaattcatctagcgaccaacgccaagcgtgtaagaaacacgagctgtacgtgagttttcgtgacctcggctggcaggattggattatcgcacctgagggctacgccgcctactactgcgaaggcgagtgtgctttcccgctaaactcgtatatgaacgccacaaaccacgcaattgtgcagactctggttcactttatcaaccccgagacagtgccaaagccttgctgtgctcccacgcagctgaatgctatttctgtcctttacttcgatgattcaagcaacgtcatccttaagaagtatagaaatatggtggtgcgggcgtgcggctgccac

SEQ ID NO: 7923 - DNA, 1293 bp, synthetic construct
  misc_feature 1..1293: note = source = /note="Description of Artificial Sequence: Synthetic coding sequence"
  source 1..1293: mol_type = other DNA
atgcatgtgaggagcctgcgtgctgcggcccctcatagctttgtcgccctgtgggcccctctttttctgttgagatccgctttggctgacttctctctagacaacgaggtgcacagttctttcatccacagaagactaagatcacaggagcgaagggagatgcaaagggaaatcttgtctattctcggactgccacacagacccagaccccacctgcagggtaagcacaattccgcccccatgttcatgctcgatctctataatgctatggcagtggaagaaggaggtgggcctggcggacagggcttctcttacccttataaggcagtattttcgacccagggtccccccctcgcgagccttcaggactctcactttctgactgacgccgacatggtcatgtcttttgtgaatctagtggaacacgacaaagagttcttccatcccagatatcaccatagagaatttcgattcgatctctcaaagatcccggagggcgaagccgtcactgcggccgagtttagaatttacaaggattatattcgggagcgattcgataacgaaacatttcgtatctccgtttaccaggtccttcaggagcatttaggacgggagagcgaccttttcttgctggacagcagaaccctttgggcctctgaggaaggatggttggtgtttgacattacagcgacgtcgaaccactgggtggttaacccaagacacaacctgggcctccagctcagtgtcgagaccctggacggccagagcattaatccgaagctcgctggcctcatcgggaggcacgggccccaaaataagcagccttttatggtcgcgttcttcaaagctaccgaggtgcactttcgaagtatcaggtccacggggtccaagcaaagatctcagaacaggtccaagacaccaaaaaatcaggaggccttgcggatggcgaacgtggctgagaactcctcttccgatcagcgacaggcctgtaagaaacatgaactgtacgtgtcattccgagacctgggatggcaggactggatcattgcaccggagggatatgcagcgtattattgcgaaggagagtgcgccttccctttgaacagctatatgaacgccacaaaccacgctattgtgcagacactcgtccactttattaatcccgagaccgtacctaagccatgttgtgcgccaacgcaattaaacgccatctcagtgctctatttcgatgattcatcaaacgtgatcttgaagaagtacaggaatatggtggtgcgagcatgtggctgccat

SEQ ID NO: 7924 - DNA, 1293 bp, synthetic construct
  misc_feature 1..1293: note = source = /note="Description of Artificial Sequence: Synthetic coding sequence"
  source 1..1293: mol_type = other DNA
atgcacgtccgttcactgcgcgctgcggccccgcattcttttgtggcactgtgggccccgctttttctgctgaggtccgccttggcagatttcagcctggataacgaagtgcacagctctttcattcaccgccgcctgcgatctcaggaacggcgtgagatgcagcgcgagatcctgagcatcctaggccttccacaccgcccgcgcccgcatttgcaaggtaaacataatagcgccccgatgtttatgctcgatttgtacaacgctatggctgtcgaggagggtggtgggccgggaggccaagggttttcctacccatataaggccgtgttctctacccagggaccgccactggcaagcttgcaggatagccacttcctcacggacgccgatatggtgatgtcttttgtaaatctggttgagcacgataaagagttcttccacccacgttaccaccaccgcgagtttcgatttgacctgtccaagatccctgagggggaggcagtgacggccgctgaatttaggatctataaggattacatccgcgaaaggtttgataacgaaacgttccgcatctccgtctatcaggtcctccaggaacacctgggcagagaaagcgacctttttctgctggacagccggacactgtgggctagcgaagagggctggctggtgttcgatattacggcaacgtccaatcattgggtggtcaacccgcgccacaacttggggctgcaactgtccgtggaaaccctggatggtcagtccattaacccaaaactggctggcctgatcgggaggcatgggcctcagaacaagcagccgttcatggtggcgtttttcaaagccaccgaggtgcactttcgctccatccgatcaactgggtcaaaacagcggtctcaaaaccgctctaagaccccaaaaaaccaagaggctctgcgcatggcaaacgttgccgagaactctagcagcgatcaacgccaggcatgcaagaagcatgagctgtatgtgagctttcgggatctcggctggcaggactggattatagctcccgagggttatgccgcatattattgcgaaggtgagtgcgcctttcccctgaattcctacatgaatgcaaccaatcacgcaatcgtgcagacacttgttcactttattaacccggaaacggtgccgaagccgtgttgtgcgccaactcagctgaacgctatttccgtgctgtacttcgatgattccagcaatgtgattttgaaaaagtaccggaatatggtggtgagagcctgtggttgtcac

SEQ ID NO: 7925 - DNA, 1293 bp, synthetic construct
  misc_feature 1..1293: note = source = /note="Description of Artificial Sequence: Synthetic coding sequence"
  source 1..1293: mol_type = other DNA
atgcacgtgcggtctctcagagcggctgcaccccactccttcgtggctctctgggcaccccttttcctattaaggtcggcattggctgatttttcattggataatgaagttcactccagctttatccacaggcggctgcgtagtcaagaacggcgggaaatgcagcgagaaattttgtctatcctgggactgcctcacaggcctaggccacacctccaaggcaagcacaactcggcacctatgtttatgctagatctctataacgcaatggccgtagaagagggcggcgggcccggaggacaaggattctcgtacccttataaagccgtcttctccacccagggaccacccctcgcttctcttcaggactctcatttcctaactgatgccgacatggtcatgagcttcgtcaatctggtggaacatgacaaagagttcttccatcccagatatcatcaccgagagttccgcttcgacctgtccaagattcctgaaggcgaagctgtgacagccgcagaattcagaatctataaggattacatacgggagaggtttgacaacgagaccttccgaatcagcgtgtaccaagttcttcaggaacacctggggcgggagtcagacctttttctgctcgactcacgcaccctatgggcgtcggaggaaggctggctggtattcgacatcacagccacatctaatcattgggtggtcaaccccaggcacaatttaggtcttcagttgagcgttgaaactttggatggccagagcattaatcctaaactagcgggactaatcgggcgacatgggccacagaataagcagcccttcatggttgctttcttcaaagcaactgaggtccacttccggtctatccgctcaaccggaagtaaacaacgttcccagaacagatcaaagacgccaaaaaatcaggaggccctccggatggctaatgtggccgagaattccagttctgatcagagacaagcgtgcaaaaaacatgaactgtatgtgagctttagagacctgggttggcaggattggatcattgctcccgagggatatgccgcctactactgcgagggagaatgcgcctttccgttgaattcctatatgaatgccaccaatcacgctattgtccagaccctggtgcactttataaaccccgaaacagtgccaaagccgtgttgtgctcctacacagttgaatgcaatcagcgtcctgtacttcgatgacagttctaacgtgatattgaaaaaataccggaacatggtggtcagggcttgcgggtgtcat

SEQ ID NO: 7926 - DNA, 1293 bp, synthetic construct
  misc_feature 1..1293: note = source = /note="Description of Artificial Sequence: Synthetic coding sequence"
  source 1..1293: mol_type = other DNA
atgcatgtccggtcactgagggctgccgccccgcattcttttgtggcgctttgggcgccactcttcctccttagaagtgccctggcggacttcagcctggataatgaggtgcactcttccttcatccacaggaggctgcggtcgcaagagcgcagagagatgcaacgggaaatcctctcaatccttgggctgccgcacagaccgcggccccatctgcaagggaagcataatagtgcccccatgttcatgctggacctgtacaacgcaatggccgtggaagaagggggaggcccgggaggacagggattctcgtatccgtacaaagcagtcttttccacccaagggccgcccctcgcctccctgcaggatagccatttcctgaccgacgccgatatggtgatgagcttcgtcaacctggtggagcatgacaaagaattcttccacccacgttaccaccaccgagaattcagattcgacctcagcaagatcccagaaggtgaggccgtgacggcagcagaatttcgaatctacaaggattacatcagagaacgcttcgacaatgaaaccttccgcatctctgtttaccaagtcctccaggaacatttgggccgagagtcggatctgtttttgctcgacagtcggacgctttgggcctcggaggaaggttggctggtgtttgacattactgctacctcgaaccactgggtagtgaacccacgccataacctcggactccagctctcggtggagacgctcgacggacaatccatcaatcctaagctggcaggattgatcggacggcacggtccgcagaacaagcagccgttcatggtcgcgttcttcaaggcgactgaggtccactttcgctcgattcgcagcactggctctaaacagcgctcccagaatcggagcaaaaccccgaagaaccaggaggctctgcgcatggccaacgtggcggaaaactcgtcctcggatcagagacaagcctgtaagaagcacgaactttacgtgtccttccgggacctgggttggcaggactggatcatagctccagaagggtacgcggcatactattgcgaaggagagtgcgcctttccgctgaactcgtacatgaacgcaaccaatcacgcgatcgtgcagactctggtccacttcataaacccagagactgtgcctaaaccttgttgcgctcctacccaactgaacgcgatttccgtgctgtactttgatgattcctcaaatgtcatccttaagaagtaccgcaacatggttgtccgggcctgcggatgccat

SEQ ID NO: 7927 - DNA, 1293 bp, synthetic construct
  misc_feature 1..1293: note = source = /note="Description of Artificial Sequence: Synthetic coding sequence"
  source 1..1293: mol_type = other DNA
atgcacgtgcgctcacttcgggcagccgcacctcatagcttcgtggccttgtgggcacctctctttctgctgagaagcgcccttgctgatttttcgctggataatgaagtccatagcagctttatccacaggcgactgaggtcgcaggagcggcgtgagatgcaacgcgagattctcagcattcttggcctgcctcatagaccacgtccacacttgcaaggtaagcataactccgcccctatgtttatgttggatctttacaacgcaatggcggtcgaagagggtggtgggcctggcggacagggtttttcgtacccctacaaggccgtgttttcaactcagggaccgcctcttgcgagcctccaggactcgcactttctcaccgatgccgatatggtgatgtcttttgtcaatctcgtggaacacgataaagagtttttccatcctagataccatcacagagaattccggtttgatctttcaaagatcccagaaggtgaagccgtcactgcagcagaatttcgcatatacaaggactatattcgcgaaaggtttgataacgaaactttcagaatctccgtttatcaggtcctgcaagagcacctgggccgagagtcagatctttttcttcttgattccaggaccctgtgggcatccgaagaaggatggctcgtgtttgatattactgcaacgtccaaccattgggttgttaatcctcgacacaacctcggtttgcaacttagcgtcgaaactctggatggccaatccattaaccccaagctggccggactgattggccgccacgggcctcagaacaagcagccattcatggtggcttttttcaaggcaactgaagtgcatttccgttccatcagatcgaccggtagcaagcagagatcgcagaaccgcagtaaaacccctaagaatcaggaagcgcttcgaatggcaaacgtggcagaaaactcctcctcggatcaaagacaagcgtgcaagaagcatgaactttacgtctcgtttagagatctgggatggcaagattggatcattgcgccagagggatacgccgcatactactgtgagggagagtgcgccttcccgttgaacagctacatgaacgcgactaatcatgcaattgtgcagactctggtccactttatcaatccagaaacggtgcccaagccttgttgcgcaccgacccaacttaatgcaatttcggtgctctacttcgatgattctagcaacgtgatcctgaagaagtaccggaacatggtggtgagggcatgtggttgtcat

SEQ ID NO: 7928 - DNA, 1293 bp, synthetic construct
  misc_feature 1..1293: note = source = /note="Description of Artificial Sequence: Synthetic coding sequence"
  source 1..1293: mol_type = other DNA
atgcacgtgcggtccctgcgcgccgccgccccgcattctttcgtcgccctttgggcccctctgttcctcctgagatcggcactcgctgacttttcgctggacaatgaggtccactcatcattcatccataggaggcttcgctcccaggagcggcgcgagatgcagagagagatcctgtcaatcctgggtctgccccatcgacctcgcccgcacctgcaagggaagcacaattccgcaccgatgtttatgctcgatctgtacaacgcgatggctgtggaggaggggggcggcccaggaggccaaggattcagctacccatacaaggcagtgttttcgacccagggcccgccgctcgcgtcactgcaggattcacattttctgactgacgcggacatggtcatgtccttcgtgaaccttgtggagcacgataaagagtttttccacccgagataccatcaccgcgagtttaggttcgacctgagcaagatcccggagggagaagcggtcaccgcggccgaattccgcatctacaaggactacattcgggagcgcttcgacaatgaaacctttagaatctccgtgtaccaggtgctccaggaacaccttggccgtgaatcagatctcttcctcctcgacagccgcaccttgtgggcttccgaagagggatggctggtgtttgacatcaccgcgacctctaaccattgggtggtgaatcccagacacaaccttgggctccaattgagtgtggaaaccctggatggacaaagcatcaaccctaagctggcgggtctgatcggacgccatggaccgcagaataagcagccattcatggtggccttcttcaaggctactgaggtgcatttccgctccatcagatcgacgggatccaagcagcgctcacagaatcgctcgaaaactccgaagaatcaggaggccctgagaatggcaaatgtcgcagagaactcttcctctgatcagcgccaggcctgcaagaagcatgaactgtacgtgtccttccgcgacctgggttggcaggactggatcatcgcccccgagggatacgcggcctactactgcgaaggcgaatgcgccttcccgctgaatagctacatgaatgcgaccaatcacgcaatcgtccagactctcgtgcatttcatcaacccggaaaccgtcccaaagccttgctgcgctccgactcaactcaacgcgatatcagttctctacttcgatgacagctcaaacgtgatcttgaagaagtaccggaacatggtggtcagagcctgcggctgccac

SEQ ID NO: 7929 - DNA, 1293 bp, synthetic construct
  misc_feature 1..1293: note = source = /note="Description of Artificial Sequence: Synthetic coding sequence"
  source 1..1293: mol_type = other DNA
atgcacgtgcgaagcttgagggcagccgccccccatagtttcgtggctctctgggcccccctgttcctgctccgctctgccttagctgacttctcgctagataatgaagtgcattcttcattcatccacagacgcctccggagccaagagagacgcgaaatgcaaagggaaatcctgtcaatcttgggattgccacatcgaccgcggccacacctgcaagggaaacataatagcgcaccgatgtttatgctggacctgtataatgccatggccgtcgaggaaggggggggccctgggggccagggattcagttacccgtacaaagccgtcttcagcactcaggggcctccactcgcatctttacaggatagtcatttcctgacggatgccgacatggttatgagcttcgtgaacttggtggagcatgacaaagaattcttccaccctcggtaccaccatcgggagttccggtttgatctgtccaagatccctgagggcgaggccgtaacagccgctgaattccgtatatataaggactatatccgggaacggtttgataatgagactttcaggatttctgtttatcaggtcctccaggagcatctcgggagggaatcagacctgttcttgctagattcgcggaccctgtgggcgagtgaagaaggctggctggtgttcgacatcactgccacgagtaaccattgggttgtcaaccctaggcataacctggggctccaactgagcgtggagactctggacggtcagtccattaatcccaagctcgccggtctcattggccggcacgggccccaaaacaaacagcctttcatggtagctttctttaaggcaaccgaggtgcatttccgctccattcgctccaccggatcgaagcagcgtagccagaatagatcaaagacaccaaagaaccaggaggcccttcgaatggcaaatgtggcggaaaattcatcaagcgatcagagacaggcctgcaagaagcacgaattgtacgtcagcttccgtgatctggggtggcaagattggatcatcgccccagagggctacgctgcctactactgcgaaggggagtgtgctttccctctgaacagttatatgaatgcaacaaaccatgcaattgtgcaaacacttgtccacttcatcaatcctgagaccgtcccaaagccctgttgcgccccaacgcagttaaatgccatctcggtgttgtacttcgacgacagcagcaatgtaatactgaaaaaatatcgcaacatggtggtcagagcctgcggttgccac

SEQ ID NO: 7930 - DNA, 1293 bp, synthetic construct
  misc_feature 1..1293: note = source = /note="Description of Artificial Sequence: Synthetic coding sequence"
  source 1..1293: mol_type = other DNA
atgcacgtgcgctcgctgcgggccgcggcgccgcactctttcgtggccctgtgggccccattgttccttctgcggtccgcacttgccgatttctccctggacaacgaggtgcattccagcttcatccatcgccggcttaggtcgcaggagaggcgagaaatgcagagggaaatcctgagcatcctgggactccctcacagaccacgcccgcacttgcagggcaagcacaactcagcaccgatgttcatgctcgatctgtacaatgccatggctgtggaggaaggaggaggacctgggggccaaggtttttcctacccatacaaggccgtgttctcaacccagggaccccctctggccagcctgcaggactcccacttcttgaccgatgccgatatggtgatgtccttcgtgaacctggtcgagcacgacaaggagttcttccacccgcggtaccaccatagggaatttcggttcgacctgtcgaagataccggagggagaagctgtaaccgcggcagagttccgcatttacaaggattacattcgggagagattcgacaatgaaactttccggatctcggtgtatcaagtgctgcaggagcacttgggcagggagtcggacctgttcctcctggattcacggacgctttgggcctctgaggaaggatggctggtctttgatatcaccgctaccagtaaccattgggtggtcaatccaagacacaacctcggcctccaactgtcggtggaaacccttgatgggcagtcgatcaaccccaaactggcgggtctgatcggccggcacggcccgcagaataaacagcctttcatggtggcattcttcaaggccaccgaagtccactttcgctcgatcagatcgactgggagcaagcagagaagccagaatcgcagcaaaacgccgaaaaaccaagaagctcttagaatggccaatgtcgcagaaaatagctcgtccgatcagcgccaggcctgtaagaagcatgaactgtacgtcagcttccgggacctcggctggcaggactggatcatcgcgccagagggatacgctgcttactactgcgaaggagaatgtgcgtttccactcaacagctacatgaatgctacgaaccacgccatcgtccaaaccttggtgcactttatcaatccggaaacggtgccaaaaccatgctgtgcccctactcaactgaatgcgatcagcgtgctttactttgacgattcttcgaacgtcatccttaagaagtaccgaaacatggtggtgcgggcgtgcggctgccac

SEQ ID NO: 7931 - DNA, 1293 bp, synthetic construct
  misc_feature 1..1293: note = source = /note="Description of Artificial Sequence: Synthetic coding sequence"
  source 1..1293: mol_type = other DNA
atgcatgtccgatctctgagagcggcagcaccacattcctttgtcgcactctgggcacctctgtttcttctccgatccgccctggcagactttagtctggacaatgaggtgcactctagtttcattcatcgaaggctccgcagccaagagaggagagagatgcaaagagagattttgtcaatacttgggcttccccatagaccccgaccgcacttgcaaggaaagcataattcagctccgatgtttatgcttgatctttacaatgcaatggcagtggaagaaggaggagggccaggtggtcagggcttctcctacccctataaagcagtgttctcgactcaaggacctcctctcgcgtcactgcaggactcccatttcctcacggatgccgacatggtgatgtcatttgtgaaccttgttgagcatgacaaggagtttttccatccgaggtaccaccaccgagagtttcggttcgatctttccaagatccccgagggcgaagccgtcaccgcagcagaattccgtatttacaaggattacatccgcgaacggttcgataatgaaaccttcagaatctcagtctaccaggtgcttcaggaacacctcggcagagagtccgacctgtttctgctggactcgaggaccctgtgggcgagcgaagagggatggttggtttttgacataactgccacctccaatcactgggtcgtgaacccgagacataacctgggtttgcagctttccgtggagacgttggatggccaatcgataaaccctaagctggccggactgattggcagacatggtcctcaaaacaagcaaccctttatggtcgcatttttcaaggccaccgaagtgcatttccggtcgattagatccactgggtccaaacaaagatcccagaaccggagcaagaccccaaaaaaccaagaagcactgcgaatggcaaatgtggccgaaaattcgtcgtcagatcagagacaggcctgcaaaaagcacgagctctacgtgtcgttccgtgatctcggatggcaggattggattattgcccctgaggggtacgcagcttactactgtgaaggagaatgtgcattccctcttaattcgtacatgaatgccaccaaccatgccattgtgcagactctggtgcatttcataaacccagaaactgtccctaaaccttgctgcgctcctactcagttgaacgctatatccgtcctgtattttgatgacagcagcaatgtgattcttaagaagtacagaaacatggtggtgagggcatgtggctgccat

SEQ ID NO: 7932 - DNA, 1293 bp, synthetic construct
  misc_feature 1..1293: note = source = /note="Description of Artificial Sequence: Synthetic coding sequence"
  source 1..1293: mol_type = other DNA
atgcacgtgagaagcctccgggcagcagccccccatagcttcgtcgcactctgggcacctcttttcctccttcggtcggctctggcagatttctcccttgacaacgaagtgcattcctcgtttatccatagacgcctcaggtcccaggaacgacgcgaaatgcagcgggaaattctgtccattcttggacttccacatcgtcctcggccacatttgcagggtaaacacaactcagcgccgatgtttatgcttgatctttacaacgcaatggccgtggaagaaggtggcggacctggaggacaagggttcagctacccgtacaaggccgtgttttcgactcagggtcctccattggcatcccttcaagactcccattttcttaccgacgccgatatggtcatgagcttcgtcaacctggttgagcatgataaagagttttttcatccaagataccaccaccgggagtttcgtttcgatctttccaagatccccgaaggtgaggccgtgaccgcagccgaattcagaatatacaaggattacatacgggaacgattcgataacgaaaccttccgcataagcgtctaccaagtcttgcaagaacatttggggcgagaatcagatcttttcctgctggactcccgcaccctttgggccagcgaagaaggttggcttgtgttcgacattacggcaacttcgaatcactgggtggtcaacccaagacacaatctgggactccaactgagcgtggaaactcttgatggacaatcgataaaccccaagctcgccggacttattggtcgacacggcccacaaaacaagcagccttttatggtcgctttctttaaggcgaccgaggtgcactttagatcgattagaagcactggatcaaagcagcgatcacaaaataggtcgaaaactcctaagaatcaggaagcacttcggatggcaaacgtggcggaaaactcctcatccgatcagagacaagcgtgtaagaaacacgaactgtatgtgagcttcagagatctcggatggcaggactggataattgctccagaaggttatgcagcttactactgtgaaggcgaatgtgcattccctcttaacagctacatgaacgcaaccaaccacgccattgtccaaacgctggtgcacttcattaatcccgaaactgtcccaaagccatgctgtgcacccacgcaacttaacgcgatctccgtcctgtactttgacgattcctcaaacgtgattctgaagaaatacagaaacatggtggtgcgcgcatgcgggtgtcac

SEQ ID NO: 7933 - DNA, 1293 bp, synthetic construct
  misc_feature 1..1293: note = source = /note="Description of Artificial Sequence: Synthetic coding sequence"
  source 1..1293: mol_type = other DNA
atgcatgtacgttcacttagggctgcggcaccacattcttttgtagcattgtgggcaccactttttctacttcgatcagccctcgctgatttttcactggataacgaagtgcactcttcatttatacatagaagacttagatctcaagagcgtcgagaaatgcaacgtgaaatattgagcattcttggattgccacataggccgcgaccgcatttgcaaggcaaacacaattcggcaccaatgtttatgctggatctctataatgcaatggcggtagaggagggaggaggcccaggaggacaaggatttagttatccttataaagcagtcttttcgacgcagggaccaccactggcgagtctccaagattctcattttttaactgatgcagacatggtgatgtcatttgttaatttggtggaacacgataaagaattttttcatccacgatatcatcatcgagagtttagattcgatcttagcaagataccggagggagaagccgttacggctgccgaatttcgaatttataaggattatattcgtgagaggttcgataatgagacgtttcgaatatcagtttaccaagttctccaggagcacttgggaagagagagtgatcttttcctactagattcaagaacactatgggcatcagaagagggctggctggtgtttgatattactgcgacgtctaatcattgggtcgtgaatccgagacataatttaggactccaattaagtgtcgaaacactcgatggacaatccattaatccaaagctcgccggtctcattggacgtcacggaccacagaataaacagccattcatggtcgccttcttcaaagctacggaagttcacttccgatcaattcgttcgacaggatctaagcagcgaagtcaaaatagatccaaaactccgaagaatcaggaggcgttgcgcatggcaaacgtcgcagaaaactctagttcagaccagcgtcaagcatgcaagaaacatgaactgtacgttagctttcgggatttaggctggcaagattggatcattgccccggagggatatgcggcatattactgcgaaggagagtgcgcgtttcctctaaattcatacatgaacgccacaaatcatgcgatagttcaaaccctagtccatttcatcaatcctgagactgtcccaaaaccgtgttgcgctccgactcaactgaatgccatctcagtactttacttcgatgactctagtaatgttatattaaaaaaatatagaaacatggtagttcgtgcatgtggatgccac

SEQ ID NO: 7934 - DNA, 1293 bp, synthetic construct
  misc_feature 1..1293: note = source = /note="Description of Artificial Sequence: Synthetic coding sequence"
  source 1..1293: mol_type = other DNA
atgcatgttcgatccctgagggctgcagcgccacattcgttcgtggcactctgggcaccgctctttctcctcagatcagcgctggcagacttttcgcttgataacgaggtgcattcatcctttattcatcgtcgcctgaggtcacaggagcgcagagagatgcagagggaaattctgtcaattctgggacttcctcaccgcccacgcccacatctccaagggaagcacaattcagcaccgatgttcatgctcgatctttacaatgcaatggcagtggaagagggaggtggtcccggaggtcagggcttctcctacccttacaaggccgtgttctcgacccaggggccacctcttgcctcgctgcaagattcgcattttctgactgatgcagacatggtcatgtcctttgtgaaccttgtggagcatgataaggaattctttcaccctagataccaccatcgggaatttaggtttgacctttcgaagatacctgagggagaggcggtgaccgcagcagaatttcggatttacaaggattacattagagaacgcttcgacaacgaaacctttagaatttcggtctaccaggtcctgcaagaacaccttggaagagagtcagatctgtttctgttggattcgagaactctttgggcatcggaagaaggctggcttgtctttgacatcacggcaacttccaatcattgggtcgtgaaccccagacacaatctgggattgcaactgtccgtggaaacccttgacgggcagtccattaacccaaagttggcaggactgattggccgccacggaccacagaataagcagccctttatggtggcattctttaaggcgaccgaagtgcattttcgatcaatcagatcgaccggcagcaaacagagatcgcagaatcgtagcaagactccaaagaatcaggaagcactgaggatggcaaacgtcgcagaaaattcctccagcgaccaacgccaggcctgtaagaagcatgaactgtacgtgagtttccgggatctgggttggcaggattggatcatagctccggagggctacgcggcgtactactgcgagggagaatgcgcgtttccacttaattcctacatgaatgcgactaaccacgccatcgtgcagactctggtgcacttcatcaatccagaaaccgtacctaagccatgttgtgctcctactcaactgaatgccatctcagtgctgtacttcgatgactcgtccaacgttattctgaaaaagtatagaaacatggtggtgcgggcatgtgggtgtcat

SEQ ID NO: 7935 - DNA, 1293 bp, synthetic construct
  misc_feature 1..1293: note = source = /note="Description of Artificial Sequence: Synthetic coding sequence"
  source 1..1293: mol_type = other DNA
atgcacgtcagatctctgagagcggccgcgccgcatagctttgtcgctctttgggcgccgctcttcctgcttcgctctgccctggctgatttttctctcgacaacgaagtccactcatccttcatccaccgcagacttcggtcccaagagcgccgcgaaatgcaacgggaaatcctgtcgatcctcggactgccgcaccgacctcggccccacctccaaggtaagcacaactccgccccgatgttcatgctggacctgtacaacgcgatggcagtcgaggaagggggcggacctggcggtcagggcttttcatacccgtacaaagctgtgtttagcacccagggaccgccactggcctcgctgcaggattcccacttcctcactgatgctgacatggtgatgtcattcgtcaatctcgtggaacacgacaaggaattctttcaccctcgttaccatcatagagaattccgcttcgaccttagcaagatacccgagggagaagccgtcactgccgctgaatttcggatctacaaggattacattagggagcgcttcgacaacgaaacgttcagaatctcggtgtaccaggtgcttcaggagcatctgggacgcgagtccgatctgttcctgcttgactcccgcacgctgtgggcgtcggaggaaggatggctggtgttcgacatcaccgccacgtcgaatcactgggtggtgaacccacggcataacctgggactgcagctgtcggtggaaaccctggacgggcagtctatcaatccaaagctcgcgggactgatcggcagacatggccctcaaaacaaacaaccattcatggtggctttcttcaaggccaccgaagtgcattttcggtctatccggagcactgggtccaagcagaggtcgcagaacaggtcaaagacccctaaaaaccaggaagcgctcagaatggccaacgtggcagagaatagctcgtcggatcagcggcaggcttgcaaaaagcacgagctttacgtttcctttcgcgaccttggatggcaagactggatcattgcaccggaaggctacgcggcatattactgtgaaggggagtgcgccttccctttgaacagctatatgaatgccaccaaccacgctatcgtgcagactttggtgcactttatcaacccagagactgttccgaagccctgctgtgcccctactcaattgaacgcaattagcgtgctctacttcgatgatagctctaatgtcattctcaaaaagtaccggaacatggtggtgcgagcctgcggctgccat

SEQ ID NO: 7936 - DNA, 1293 bp, synthetic construct
  misc_feature 1..1293: note = source = /note="Description of Artificial Sequence: Synthetic coding sequence"
  source 1..1293: mol_type = other DNA
atgcacgtgcgttccctccgtgctgccgccccccattctttcgtcgctctgtgggctcctcttttcttgctgaggtccgccttggctgacttcagtctcgacaacgaagtccattccagtttcatacatcgccgtctgagatctcaggaacgccgtgaaatgcaacgtgaaattctgtctatcctgggcctgccccatcgtccacgccctcacctccagggaaaacacaacagcgctcccatgttcatgcttgacctttacaatgctatggccgttgaggagggaggaggacccggaggtcagggtttctcctatccatacaaggccgtgttcagcacacagggtccacccctcgctagcctgcaagactcacactttctgactgatgctgatatggtcatgtccttcgtcaacttggtcgaacacgacaaggaattcttccacccaaggtatcatcatagggagtttcgtttcgatttgtccaagatacctgagggagaagccgtcaccgctgccgagttccgcatatataaagactacattagagaacgtttcgacaacgagacattcaggatcagtgtgtatcaggtcctgcaggaacatctgggcagagaaagcgacctgtttctcctcgatagcagaactttgtgggccagcgaagaaggatggctcgtgttcgacatcaccgctacatcaaaccactgggtagtcaaccctcgtcacaacctcggtctgcagctttctgtcgagacactcgacggacagtctatcaaccctaaattggctggactcattggtcgccacggtccacagaacaagcagccattcatggtggctttcttcaaggccacagaggtacattttcgttcaatccgcagtactggttctaaacaacgcagccagaatcgcagcaaaacacctaaaaatcaggaggctctgaggatggccaacgttgccgaaaactcctcttctgaccagaggcaagcttgtaagaaacacgagctctatgttagtttcagagatctgggatggcaggattggatcatcgctcccgagggttatgctgcttactactgcgagggtgagtgcgccttccctctgaatagttacatgaacgctactaatcatgcaatcgttcagaccctggtccatttcataaatcccgaaaccgttcccaagccctgctgtgcccctacacagctcaatgctattagtgtgctctactttgacgacagctccaacgtcattcttaagaaataccgcaatatggtagtgcgtgcatgcggctgtcat

SEQ ID NO: 7937 - DNA, 1293 bp, synthetic construct
  misc_feature 1..1293: note = source = /note="Description of Artificial Sequence: Synthetic coding sequence"
  source 1..1293: mol_type = other DNA
atgcatgtccgctcgctgcgcgccgcagcgcctcacagctttgtcgccctctgggcacctctttttctgctgaggagcgccctggcagatttttccctcgacaacgaggtgcattcttccttcattcacagaaggctcagatcgcaagaacgaagagagatgcaacgagaaatcctctcgatcctgggactccctcacagacctagaccgcatctgcagggaaagcataacagcgcacctatgttcatgctcgatctctacaacgcaatggcagtggaggaaggaggtgggccaggaggccaaggattttcctacccttacaaggcagtgttcagcacccaaggcccccctctcgcatcgcttcaagatagccacttccttactgatgcagacatggtgatgtcctttgtgaatcttgtggaacacgataaggagtttttccatccacgataccatcatcgggagttcagatttgatctttcaaaaatccctgaaggagaagccgtgaccgctgctgaattccgtatatacaaggattacatccgcgagcgctttgacaatgagacttttcgcattagcgtctaccaagtgctgcaagaacatctgggtagagagtcggaccttttcctgctggattccaggaccttgtgggcaagcgaggaagggtggcttgtgttcgatatcactgcaacttccaaccattgggtcgtcaacccccggcataatcttggcttgcagctttccgtggagacgctcgacggacagagcattaacccgaagttggcgggactgatcggacgacacggaccacagaacaagcagcctttcatggtggcatttttcaaggcaacggaagtccactttaggtccattcgttcaaccggatccaaacaacgctcccagaatagatcgaaaactccgaagaaccaagaggctcttagaatggcaaacgtggcagagaactcctcgtccgatcaacgacaggcttgtaagaaacatgaactgtacgtcagcttccgggaccttggatggcaggattggattatcgcgcccgaaggatacgcggcatactattgtgaaggagagtgtgcctttcctcttaattcatacatgaacgccactaaccacgcaatagtccagactctcgtgcatttcataaaccctgaaactgtcccaaagccttgctgtgcaccaacccaactgaacgcaatctccgtgctttactttgacgactcctccaacgtcatcctgaagaagtaccgaaatatggtcgtgagagcctgtggttgtcac

SEQ ID NO: 7938 - DNA, 1293 bp, synthetic construct
  misc_feature 1..1293: note = source = /note="Description of Artificial Sequence: Synthetic coding sequence"
  source 1..1293: mol_type = other DNA
atgcatgtgaggagcttgcgggcagcagcgccccactcattcgtggcactgtgggcgcctttgtttttgctccggtcagccctggccgatttctccctcgacaatgaggttcactcctcatttatacatagacgtttacggagtcaggagagacgcgaaatgcagcgcgagatactgtccatccttggactcccacacaggccgcgtccccacctccaagggaagcataactccgctcctatgtttatgctcgatctgtacaacgccatggcagtggaggaaggagggggtcccggagggcagggattctcttatccctataaagctgtgtttagtactcaggggccgcccctcgcgagtctccaagactcccattttttgacagacgctgatatggtaatgagtttcgtgaatctggtcgagcacgacaaggaattcttccacccgcggtatcatcaccgcgagttccgctttgacctgagcaaaatcccggaaggcgaggccgttacagccgctgagttccgtatctataaagactatattagggagcgatttgacaacgaaaccttccgtatttctgtgtatcaggtcctgcaagagcacctgggtagagagtcggacttgttcttactggattcaagaacgctctgggcgtccgaggagggctggctagtattcgatatcacggctactagtaaccattgggttgtgaatccgcggcataacctgggcctgcagctgtctgtggagacattggatggtcagagcatcaatccaaagctagcggggttgatcgggaggcacggaccccagaataaacagccttttatggtagccttttttaaggcgactgaggtccactttcggtctatcaggagcacaggtagcaagcagaggagccagaatagatcaaagacccctaaaaaccaagaagcacttcggatggcgaatgtcgccgaaaattcttccagtgatcaacggcaagcatgcaaaaaacacgagctttacgtcagcttcagagacttggggtggcaggactggatcatcgcccctgaagggtatgctgcctactactgtgagggtgaatgtgctttccctctcaatagctatatgaatgctaccaaccacgctattgtgcaaactctggtgcatttcatcaacccagaaaccgtccctaagccgtgctgcgcccctacccagcttaacgccatctccgttctgtacttcgacgactccagtaacgtaattcttaagaagtacagaaacatggtagtccgagcctgtggttgtcac

SEQ ID NO: 7939 - DNA, 1293 bp, synthetic construct
  misc_feature 1..1293: note = source = /note="Description of Artificial Sequence: Synthetic coding sequence"
  source 1..1293: mol_type = other DNA
atgcatgtaaggagtcttcgagcggctgctccccactcctttgtcgccctgtgggccccactcttcctactgcggagcgccttggctgatttctcattggacaacgaagtgcactcctcattcatccataggaggcttcgaagtcaagagcgccgagagatgcagagagagatcctgtctatcctggggctgcctcatcggccaaggccgcatctgcagggcaaacataactcagcccccatgtttatgctggatctgtataacgctatggctgtggaagagggaggcggcccaggggggcaagggttttcttacccatacaaagcagtgtttagcactcagggccccccgcttgcctctctacaggattctcattttctaacagatgccgatatggtcatgagctttgtgaacctggtcgagcacgacaaggaattcttccaccctagataccaccaccgcgagttccggttcgatctttctaagattccagaaggggaggccgtaaccgcggcggaattcaggatttataaggactatatacgggaacggttcgacaatgaaacatttaggatcagcgtttaccaagtgctccaagagcatctcggacgggagtccgacctgttcctcctggactctcggactctctgggcctccgaagaaggctggctggtttttgacattaccgctaccagtaatcactgggttgtgaatccgcggcacaatctgggactgcaactgagtgttgaaaccctggatgggcaatcaattaacccaaagctggcgggcctgataggccgccacggacctcagaacaagcagcccttcatggtggcgttcttcaaagcaacagaggtccatttccgctcgatcagaagcaccggtagtaaacaacggagtcaaaatcggtctaaaacccctaaaaatcaggaggccttacgcatggccaatgtggctgagaactcttcgtccgatcagcggcaggcatgtaagaaacacgagctgtacgtttcattccgggatctagggtggcaggattggattatcgctccggagggatatgcggcttattattgcgaaggagaatgcgccttccctctaaattcctacatgaacgctaccaaccacgcaattgtccagaccctggtgcacttcatcaatccagaaacggtgccgaagccttgctgtgctccaacacagctaaacgccatcagcgtgctctatttcgatgatagctctaatgtgattctgaaaaaataccggaacatggtggtccgagcttgcggttgtcac

SEQ ID NO: 7940 - DNA, 1293 bp, synthetic construct
  misc_feature 1..1293: note = source = /note="Description of Artificial Sequence: Synthetic coding sequence"
  source 1..1293: mol_type = other DNA
atgcacgtgcggtccttgcgcgccgctgctcctcattctttcgtggctttgtgggcacctttatttctcctgcggtcggccttggccgacttcagcctagataatgaggtacattcctcctttatacaccgcagactgagatcacaggagcgccgggaaatgcagagggaaattcttagtatactgggactgccacatcggcctcgcccccacttgcagggaaagcacaacagcgcccctatgtttatgctggatctttataacgccatggcggtcgaagaaggcgggggcccggggggccaggggttttcttacccttacaaggcagtattctcgacccagggtccccccctcgcctctctccaggacagccacttcttgacggatgctgatatggtaatgagctttgttaatctcgtggagcatgataaggagttctttcaccctaggtatcatcatagggagttccgcttcgacttatccaaaattcctgagggagaagccgtaactgccgccgagtttaggatttataaggattatatcagagaacgatttgataacgagacgttccggatctctgtttaccaagtactgcaggaacatttggggagagagtctgatctatttctgctggactccagaacgctgtgggccagcgaagaagggtggttggtattcgatattactgcgacaagcaaccactgggttgtcaaccctaggcacaatctcggtctgcaactttccgtggaaacactggacgggcaaagtatcaatcctaaactagcaggccttattggtcgtcatgggccgcagaacaagcagccattcatggtggcatttttcaaggccacagaggtgcactttagaagtattagaagtacagggagcaagcaaagatctcagaacaggagcaagacaccaaaaaaccaagaggccctgcgaatggctaatgtcgcagaaaactcctcctccgatcaacggcaagcctgtaagaaacacgaactgtatgtttcattcagagaccttggatggcaagattggatcatcgcacctgagggttacgcggcatattactgtgaaggcgagtgtgcttttcctctaaactcatatatgaacgccactaatcacgctattgtccagacacttgtccacttcattaatcccgagactgtgcctaaaccttgctgcgcaccaacccagctgaatgcaattagcgtgctgtattttgacgactccagcaatgttattctgaagaagtatcggaacatggttgtgcgggcatgcggttgccac

SEQ ID NO: 7941 - DNA, 1293 bp, synthetic construct
  misc_feature 1..1293: note = source = /note="Description of Artificial Sequence: Synthetic coding sequence"
  source 1..1293: mol_type = other DNA
atgcatgtacggagcctgcgggctgccgccccacactccttcgttgccctctgggcgcccttgttcctgttgaggagtgccttggccgacttttccctggataacgaggtacactcttcattcatccaccggcgccttcggagtcaggaaaggcgggagatgcagagagaaatcctgagcatactcggcctcccgcacaggcccagaccacaccttcagggcaagcataattctgccccaatgttcatgttggacctgtacaacgctatggctgtagaagaaggtgggggacccggtgggcaaggattcagttacccttataaagccgtattctctactcaggggcctcccctggcaagcttgcaggacagccatttccttaccgacgcagatatggtgatgagtttcgttaatctggtcgagcacgataaggaatttttccaccccagatatcatcatcgcgagtttagattcgatctgtctaagatcccagagggagaggctgtgacagcagcggaattcagaatttacaaggactatattcgggagcgatttgacaacgaaacgtttaggatctctgtgtatcaagttctgcaagaacatttgggacgcgagtccgatctgttcctgctggactctcgcacactgtgggcttccgaagaggggtggctggtctttgatatcacagccactagcaaccactgggtggtgaatccacggcacaatctgggactgcagctctcagtcgaaactttggatggccaaagcatcaatcccaaactggctgggctgattgggcgacacggcccacaaaataagcaacctttcatggtggcttttttcaaagctaccgaggtacattttagaagcatcagatctactggcagtaagcagagatcccaaaacagaagtaaaacccctaagaatcaggaggcattgcggatggccaatgtggcggagaattcatcatccgaccagcggcaggcgtgcaaaaaacacgaattgtatgtgagtttcagggatcttgggtggcaggactggatcattgctccggagggatatgcagcatattattgcgagggggagtgtgcatttcctctgaatagctatatgaatgcaacaaatcatgccattgtacagaccctcgtccattttattaaccctgagacagtgcctaagccttgttgtgctcctacccagctgaacgccatatctgtgctctacttcgacgacagcagcaacgtgatactgaagaaataccgcaatatggtcgtgcgggcctgtggctgtcat

SEQ ID NO: 7942 - DNA, 1293 bp, synthetic construct
  misc_feature 1..1293: note = source = /note="Description of Artificial Sequence: Synthetic coding sequence"
  source 1..1293: mol_type = other DNA
atgcacgtaagatctttgcgcgccgcagctccacactcttttgtcgcattgtgggccccactcttcctgctgcgctctgccctcgcagatttcagtctagataacgaggtgcactcctcctttatccaccgccgtctcagatcacaagaacggcgggaaatgcagcgcgaaatcctcagtattctgggtctccctcaccgcccgcgtccccacctgcagggtaaacacaattcagcccctatgtttatgctggacctttataatgccatggctgttgaggagggcggtggtccaggagggcaggggttctcctacccttacaaggcggtgttcagcacgcaggggccacccctggccagcctgcaggactcacactttcttaccgatgcagacatggtgatgagtttcgtaaacctggttgagcatgataaagagtttttccaccctcgttaccatcatcgcgagtttaggtttgatctgagcaagatccctgagggggaggctgttaccgccgcggaattccgaatctacaaagattatattcgggaacgatttgataacgaaacctttcggatttctgtctaccaggttctgcaggagcatctgggccgcgaatctgacctgtttctattggattcacgcaccctgtgggcatcagaagaagggtggctggtcttcgatatcactgccacctccaaccactgggtcgtgaatcccagacataatttgggcctgcagctatccgtggagactttggatggccaatcaatcaaccctaagctggcaggtttgatcggtcgccacggaccccaaaataaacagccatttatggtggctttcttcaaagcgacagaagttcactttcgcagcatccggtcgactgggagcaaacagcgctcacagaataggagcaagacccccaaaaaccaggaggctctgcgcatggccaacgttgcggaaaacagtagcagcgatcagaggcaggcatgcaaaaaacatgagctgtacgtgagcttccgcgatttgggatggcaggactggatcattgccccagaggggtatgctgcttactactgcgagggagagtgtgcctttcctttgaacagttacatgaacgctacgaaccacgctattgtacagaccttggttcacttcatcaatccagaaacggttcctaaaccttgttgtgctcccactcaattgaatgcaataagcgtcctatacttcgacgacagctctaacgtgatcttgaagaaatatcggaatatggtagtgcgcgcatgcggctgccat

SEQ ID NO: 7943 - DNA, 1293 bp, synthetic construct
  misc_feature 1..1293: note = source = /note="Description of Artificial Sequence: Synthetic coding sequence"
  source 1..1293: mol_type = other DNA
atgcacgtgcgctctctgagggctgccgccccacactcattcgttgctctctgggctccgctctttttgctgcggtcagcactggccgatttttcactggacaacgaggtacactcatctttcatccatcgccgcttgcggtctcaggaacggcgcgaaatgcagcgagagatactgagcattctgggactgcctcaccgcccccggcctcatctgcaaggcaagcataacagcgcccccatgttcatgctggacttgtataatgcgatggctgtcgaagaaggcgggggccccgggggccagggtttttcttacccctataaggcggttttttccacacagggcccacctctggcttcactccaggactctcattttctgactgacgctgacatggtgatgagctttgtgaatctcgtggagcatgacaaggagttctttcacccccgctaccaccaccgggagttccgattcgatctttctaaaatccccgagggagaagcagtgaccgcggccgagttccgcatttataaagattatattagggagcgatttgataacgagacatttagaatctccgtataccaggtactccaagagcacctgggcagggagagcgatctgtttctcctggactccagaacactctgggccagcgaagaaggttggctggtgttcgatataaccgctacatcaaaccactgggtggttaatcccagacacaacctcgggcttcagctgtctgtggagacattggacggacagtccattaaccccaagctggcaggcctgatcgggagacacggcccacagaacaagcagccctttatggtggcttttttcaaagctactgaagtacacttcagatcaatcaggtccacgggaagcaaacagcgatcccagaatcggagcaagaccccgaaaaaccaggaggctcttaggatggccaatgtagccgagaattcttcatccgaccagcgacaggcttgtaagaagcacgagctgtatgtctcctttcgcgatctggggtggcaagattggatcatcgcccctgagggatatgccgcctactattgtgagggggagtgcgcattcccactgaactcctacatgaacgctacaaatcatgccatcgtccagacacttgtgcacttcataaaccctgagacagtgccaaaaccctgttgtgcccccacccagctgaacgcaatttcagtcttgtattttgatgatagttccaatgttatcctgaagaagtacagaaacatggtggttagggcctgtggatgccac

SEQ ID NO: 7944 - DNA, 1293 bp, synthetic construct
  misc_feature 1..1293: note = source = /note="Description of Artificial Sequence: Synthetic coding sequence"
  source 1..1293: mol_type = other DNA
atgcatgttcgatccctgagagcagctgcgccacacagcttcgtcgctctctgggcgccactgttcttgttgcgctccgctctggcagacttctccttagataacgaggtgcattctagctttatccaccgccgactccgttcgcaggagcgacgcgagatgcagagggagattctatccatcttgggtttgccgcaccgcccgcgcccgcaccttcagggcaagcacaattccgcgccgatgttcatgctggatctttacaatgccatggcggtggaagaaggaggaggtccaggcggccagggattcagttatccctataaagctgttttttcgacccagggacccccactggcgagcctacaggattctcactttctgacggacgctgatatggtcatgagcttcgtcaacttggtcgagcatgataaggaatttttccacccgcggtaccaccatcgtgagtttcgcttcgatttgtcgaagattcctgaaggtgaagccgtgaccgccgccgagtttcgcatttacaaggactacattcgtgagcgtttcgataacgagacattcaggataagcgtgtaccaagtgttgcaggaacatttaggccgcgagagcgatttgttcctgctggacagtcgcaccctatgggcatctgaggagggctggctcgtgttcgatatcaccgcaacaagtaaccactgggttgttaatccgcgccataacctaggactgcaactctccgtcgaaacactagacggccagagcattaacccgaagcttgctggcttgataggacgtcacggacctcaaaataagcagcccttcatggttgctttcttcaaggcgacggaggttcatttccgtagtatccgcagtacgggcagcaagcagcgcagccagaaccgctcgaaaacgccaaagaatcaggaagctttgagaatggcgaatgtcgcggaaaatagtagttcagaccagcgccaagcgtgcaagaagcacgaactgtacgtctcattccgggatttgggttggcaggattggatcattgcaccagagggttatgctgcatactattgcgagggagagtgtgcattcccacttaattcctacatgaacgcaaccaatcacgccatcgtccagacgctggtgcacttcatcaatccagagaccgtgcccaagccgtgttgcgcccccactcaactgaacgctatatccgtgctttactttgatgacagctcgaacgttatccttaagaagtatcgaaatatggtggttagggcatgtggctgccac

SEQ ID NO: 7945 - DNA, 1293 bp, synthetic construct
  misc_feature 1..1293: note = source = /note="Description of Artificial Sequence: Synthetic coding sequence"
  source 1..1293: mol_type = other DNA
atgcatgtgagatctctgcgggctgcagcccctcactcatttgtcgctctctgggcgccattattcctgctgcgtagcgctctggcggatttttcactggataacgaagttcatagttcttttatacacaggaggctgcggtcacaggagaggagggagatgcaaagggaaatattgagcatactcggcctgcctcacaggccgcgcccccatctacagggaaaacacaatagtgccccaatgtttatgttagacctctacaatgccatggccgttgaagaaggaggtggtcctggtgggcagggtttttcatatccctacaaggcagtgttctccactcagggcccccctctcgcttcactccaggactctcattttctgaccgacgcagatatggtcatgtccttcgttaacttggtggaacatgataaagagttctttcatccacgatatcatcaccgcgagttccgattcgacttatccaaaatccctgagggtgaagccgtaacagctgcggagtttagaatttataaagactacatccgagaacggttcgacaacgagaccttccgtatcagcgtctatcaagtgctccaggaacatcttgggcgagagtcagatctcttcctactcgactctcgcacactgtgggcaagtgaggaggggtggctggtttttgatataacagccacaagtaaccactgggtcgtgaacccgcgtcataaccttggactgcaactctctgtcgaaactctggacggtcagtcaatcaaccccaagctggcaggtctaatcggccggcacgggcctcaaaacaaacaaccctttatggtggcttttttcaaggccaccgaagtgcattttaggtccatcaggagcaccgggtccaagcaaaggtctcagaataggtccaaaacccccaaaaatcaagaggctctcaggatggccaacgtcgctgagaacagcagcagtgaccagcgccaggcttgtaagaagcacgagctctacgtctcttttagagacctgggctggcaggactggatcattgcccctgagggatacgccgcatactattgcgaaggtgagtgtgcgtttccactgaattcgtacatgaacgccacaaatcacgcaatcgtgcaaaccctcgtgcattttataaatcctgagactgtgccaaaaccctgttgcgctcctactcaactgaatgccatttctgtgctctattttgacgactcttctaatgtgattctcaaaaaatataggaatatggtcgtcagggcctgcggatgtcat

SEQ ID NO: 7946 - DNA, 1293 bp, synthetic construct
  misc_feature 1..1293: note = source = /note="Description of Artificial Sequence: Synthetic coding sequence"
  source 1..1293: mol_type = other DNA
atgcatgtgcggtcgctgcgcgctgccgcaccacactccttcgtggcactctgggctccactcttcctccttcgcagcgccctggcggacttcagccttgacaatgaagtccactcctcctttattcatcggcgcctgagatcacaggaacgacgggaaatgcaacgcgagatcctgtcgatcctcggactgccgcacagacctaggccgcatctgcagggtaagcataacagcgcgccgatgttcatgctcgacctgtacaacgccatggctgtcgaagaggggggaggtccgggtggacaaggattctcgtacccttacaaggcagttttctcgactcagggccccccgctggcttcactccaagattcacacttcctgacggatgccgacatggtcatgtcgttcgttaaccttgtggaacatgataaggagtttttccacccgcgctaccaccaccgggagttcagatttgacctgtccaagattccggagggagaagccgtcactgctgcagaatttagaatctacaaagattacatcagggaaagattcgataatgaaactttcagaatctctgtgtaccaagtgctccaggaacatctcggaagagagagcgacctttttcttctcgactcacgcactctgtgggcgtctgaggaaggatggctggtgttcgacatcaccgcaactagcaatcattgggtggtgaatccgagacacaatcttggactccaactgtccgtcgagactttggatggacaaagcatcaacccgaagctggcaggactgatcggccggcacggccctcagaataaacagccgttcatggtggcgttctttaaggccactgaggtccacttccggagcatccgaagtaccggctcaaagcagcgctcacaaaatcgctccaaaacgcctaagaaccaggaggcacttcggatggccaacgtggccgagaacagcagctccgaccagcgacaggcgtgcaaaaagcatgaactgtacgtgagcttccgtgaccttggttggcaagattggatcatcgcccccgaggggtacgcggcgtactattgcgagggagagtgcgcgtttcctctcaactcatacatgaatgcaactaaccacgccatcgtccagactctggtgcacttcatcaaccctgagacggtgcccaagccgtgctgcgcaccaacgcagctgaacgcaatttccgtcctgtacttcgatgacagctccaacgtgatcctcaagaagtaccgcaatatggtggtccgcgcgtgcggctgccat

SEQ ID NO: 7947 - DNA, 1293 bp, synthetic construct
  misc_feature 1..1293: note = source = /note="Description of Artificial Sequence: Synthetic coding sequence"
  source 1..1293: mol_type = other DNA
atgcacgtccgcagcctacgagccgccgcccctcactcttttgtcgctctgtgggcgccactgtttctgttgagatccgcactggccgatttctctctagacaacgaggtgcacagttcctttatccacagacgactaagatcccaagaacgacgggaaatgcagcgggaaatcctcagtattttgggtctcccacatcgaccaaggccgcacttgcaagggaagcataacagcgccccaatgtttatgctcgatctctataatgcaatggctgtggaggaaggcgggggtcccggcggccaaggtttctcatatccgtacaaggccgttttcagtacacagggccctcctttggcttccctgcaggattctcacttccttaccgacgccgacatggtgatgagctttgtcaatctcgtcgaacacgataaggagttcttccatcctaggtatcatcatagggaatttcgcttcgacctgtctaaaatcccggaaggagaggcagtgactgccgctgagtttcgcatatacaaggattatatacgggaacggttcgataatgaaacatttcgcataagtgtgtaccaggtgctgcaggagcacctgggacgcgagtctgatctgtttctgctagactcacggacactgtgggctagcgaggagggatggcttgtgttcgatattaccgccacttctaaccactgggtggtgaatccacggcataacctcggattgcagctatctgtggaaacactggacggccaaagtatcaacccaaagctcgcgggactcataggcaggcacggtccacaaaataaacagcctttcatggtggcctttttcaaagccacagaggtgcacttccgtagcattcgtagtaccggaagcaagcagaggtcccagaatcgcagtaaaacccccaaaaaccaggaggccttacgaatggcaaacgtcgctgagaattcatccagtgaccagcgtcaggcttgcaagaagcacgaactatacgtctcctttagagacttaggatggcaggactggataatcgcccctgaggggtatgccgcctattattgtgaaggggagtgcgcttttcccttgaactcatatatgaacgctaccaaccacgctattgtgcagaccctggtgcacttcatcaaccccgaaactgttccaaagccttgttgcgcccctacccagctaaacgcgatatccgttctgtactttgatgactcctccaacgtgattctgaaaaagtaccggaacatggttgtccgggcatgtgggtgccac

SEQ ID NO: 7948 - DNA, 1293 bp, synthetic construct
  misc_feature 1..1293: note = source = /note="Description of Artificial Sequence: Synthetic coding sequence"
  source 1..1293: mol_type = other DNA
atgcatgtgagatctctgagagcagcggcgccgcactcgttcgtggctctctgggcgccactgtttctcctcaggtcggcgctggccgatttcagcctcgataacgaggtgcactcgtcgttcatccatagacggctgcggtcacaagaacggcgcgaaatgcagagggagatcttgtcaattctcggcctccctcatcggcctcgcccacatctgcaaggaaagcataactccgcaccgatgttcatgctcgatctgtacaacgcgatggcggtcgaggaagggggaggaccgggagggcaaggattttcctacccgtacaaagccgtcttctccactcaaggaccgccccttgcgagcctccaggactcccatttcctgaccgacgccgacatggtgatgtcctttgttaacctcgtggaacatgacaaggaattcttccacccacggtaccaccaccgcgagtttcgcttcgacctgtccaagatcccagaaggtgaggccgtgaccgccgccgaatttcggatttacaaggactacatccgggagaggttcgataacgaaaccttcagaatctccgtgtaccaggtgctgcaagagcatctggggcgggaatccgacttgttcctgctggattcacggaccctgtgggcctccgaagagggatggcttgtctttgacatcactgccacctcaaatcactgggtggtgaatccacgccacaatctgggattgcagttgtccgtggaaaccctcgacggacagtccatcaatcctaaactggccgggctcatcggaaggcacggacctcagaacaaacagccatttatggtggcgtttttcaaagcaaccgaagtccactttagaagcattcgctccaccggatcaaagcagcgtagccagaatagatcgaagactcccaagaatcaggaagctctgaggatggccaatgtcgccgaaaactcgagcagcgaccagcggcaagcatgcaagaaacatgaactttacgtgtccttccgcgacctgggttggcaggactggatcatcgcaccggagggatacgcggcatactactgcgagggcgaatgtgctttcccgttgaattcgtacatgaatgcaaccaatcacgctattgtgcaaactctggttcacttcatcaacccagaaactgtccctaaaccgtgctgcgctccaactcaactgaacgccatctcggtgctctacttcgacgactcctcgaatgtgatcttgaagaaataccgtaatatggtggtccgcgcatgcgggtgccat

SEQ ID NO: 7949 - DNA, 1293 bp, synthetic construct
  misc_feature 1..1293: note = source = /note="Description of Artificial Sequence: Synthetic coding sequence"
  source 1..1293: mol_type = other DNA
atgcacgtgcggtccctcagagccgcagcgcctcattcgtttgtggctttgtgggcgccgttgttcctcctccggtcagctctggcggatttctcacttgacaacgaggtccactcgtcatttatccaccgcagactgcgctcacaagaaagacgcgaaatgcagcgggaaatcttgtccattttgggccttccgcatcggccccgcccacacctgcaagggaagcacaattccgcacccatgtttatgcttgatctctacaacgctatggcagtggaggaaggcggaggacccggagggcagggattttcgtacccgtacaaagccgtgttctctacgcaaggacctcctctcgcgagcttgcaggactcgcatttcctcactgatgctgatatggtgatgtcgttcgtcaacctggtggaacacgacaaggagttctttcatccccggtaccaccacagggaatttaggtttgatctgtcaaagattccggagggcgaagcagtgactgcggccgaattcagaatttacaaggactacatcagagaaaggttcgacaacgaaacgttccgcatcagcgtttaccaggtccttcaggaacatctgggaagggagagcgacttgtttctgctcgactcacggactctctgggcctccgaagagggttggctggtgttcgatatcactgcaacttcgaaccattgggtggtgaacccaagacacaacctgggcctgcagctctcggtggagactctggacggacagtcaatcaacccgaaactggcagggctgatcggacgacatggacctcagaataagcagccgtttatggtcgcatttttcaaggccactgaagtgcattttcgatccatccgctcgaccggctcgaaacagaggtcccaaaacaggtccaagactccgaagaatcaggaggcccttcgcatggccaacgtcgccgaaaactcgtcctcggaccagagacaggcatgcaaaaaacatgagctgtacgtctcctttcgggatcttggttggcaagactggatcattgcgcctgagggctacgcagcctactactgcgagggagagtgtgccttcccgctcaactcttacatgaacgcgacgaatcacgcgatcgtgcaaactctggtgcacttcattaatccggaaactgtgccgaaaccatgctgcgccccgacgcaactgaacgccattagcgttctctacttcgacgactccagcaacgtgatcctcaagaagtaccggaacatggtggtgagggcttgtggatgtcac

SEQ ID NO: 7950 - DNA, 1293 bp, synthetic construct
  misc_feature 1..1293: note = source = /note="Description of Artificial Sequence: Synthetic coding sequence"
  source 1..1293: mol_type = other DNA
atgcatgtgcgttcgctgcgcgccgccgccccgcactccttcgtcgctctgtgggccccactctttctcctccgctcggctctggccgacttctcgctcgataacgaagtccactcctcctttatccaccggcgactcaggtcccaggagcggagagagatgcagcgggagattctgtcgatcctcggcctgccacaccggccccgaccgcacctgcagggaaagcacaactcggcccctatgttcatgctggacctgtacaacgctatggccgtcgaagaaggaggcggaccgggcgggcaaggcttttcgtacccttacaaggcggtgttctctactcaaggccctccattggcgtccctgcaggatagccacttcctcaccgacgcggacatggtcatgtcgttcgttaacctggtggagcacgacaaggagttcttccacccccggtaccaccatcgcgaattccggttcgacctgtcgaagatccccgagggcgaagcggtcactgccgcagaattcaggatctacaaagactacatccgcgagcgattcgacaacgagacttttcgcatctcagtgtaccaggtgctgcaagagcatctgggtagagaatcagacctctttttgttggacagccgaaccctttgggcctccgaagaagggtggttggtgttcgacattaccgcaacttccaaccactgggtggtcaatccgcgacataacctgggactgcagctgtccgtggaaactttggacggacagtccatcaacccgaagctcgccggacttatcggtcgccacggtccacagaataagcagcccttcatggtggcgttctttaaggccaccgaggtgcatttcagatccatccggtccaccggcagcaagcagcggtcacaaaacagatctaaaacgccgaaaaaccaggaagccctgaggatggcaaatgtggcggaaaatagctcgtcggatcagagacaagcctgcaagaagcacgagctgtacgtctccttccgggatctcggatggcaagactggatcatagccccggagggatacgcagcctactactgcgagggagagtgcgccttccctctgaactcgtacatgaatgccactaaccatgctattgtgcagaccttggtgcactttatcaatccagaaaccgtgcctaagccatgctgcgccccaactcagctgaacgctatctccgtcctgtacttcgacgactcctcaaacgtgatcctcaaaaagtatcggaacatggtggtgcgcgcttgcgggtgccac

SEQ ID NO: 7951 - DNA, 1293 bp, synthetic construct
  misc_feature 1..1293: note = source = /note="Description of Artificial Sequence: Synthetic coding sequence"
  source 1..1293: mol_type = other DNA
atgcacgttcgcagcctccgcgctgccgctcctcatagtttcgttgctctctgggccccactgttcctgctgagatctgctctggccgattttagtctggataacgaggtgcacagctccttcattcataggagactgaggagccaggagagaagggaaatgcagagagaaatactgtcaattctgggcttgcctcacaggcctcgcccacacctgcagggcaaacacaatagcgcacctatgttcatgctggatctgtacaacgctatggctgtcgaagagggtggcggcccaggcggccagggattctcctatccatataaggcagtgttcagcacccagggcccccctctggcgtctctgcaagatagccacttcctgacagatgcggacatggtgatgtcatttgttaatctggtcgaacacgacaaggagttctttcatccacgctaccaccatagagaattccgcttcgatctgtctaagattcccgaaggagaagcagtaacagctgcggaattcaggatctacaaggactacatcagggaaaggtttgataatgagacttttaggatatcagtctatcaagtcctgcaggaacaccttggacgcgaatctgatctcttcctgctggacagcaggacactgtgggcaagtgaggagggctggctggtgttcgacataacagcgacctcaaaccattgggttgtgaatcccaggcacaatctcggcctgcagctcagcgtggagacgctcgacggacaatctataaaccctaagctggccggactgatcggacgccacggaccacagaacaagcaaccattcatggtggccttctttaaagctaccgaagtccatttcaggagtatcaggagcacaggtagcaaacaacgcagtcagaacaggtccaagactcctaagaaccaggaagcgttgaggatggctaatgtcgccgagaactcatcatcagaccaacgccaggcctgtaaaaagcacgagctttacgtgtcctttcgcgacctgggatggcaggactggattatcgcacccgaaggctatgctgcatactactgtgaaggtgagtgcgctttccctctgaattcctacatgaacgctactaaccacgccattgtgcagacactggtccacttcattaacccagagaccgtgcccaagccttgttgcgctccaacacaactcaacgccatctccgtcctctacttcgatgattccagcaacgtcatattgaagaaatacagaaacatggtcgtacgcgcttgtggctgccat

SEQ ID NO: 7952 - DNA, 1293 bp, synthetic construct
  misc_feature 1..1293: note = source = /note="Description of Artificial Sequence: Synthetic coding sequence"
  source 1..1293: mol_type = other DNA
atgcatgtcaggagtctccgggccgccgccccccacagtttcgtagccttgtgggctccactgttcttgcttaggagcgccttggcagatttttccttggataatgaggttcattctagcttcatccatcggaggctgcgctcccaggagcggcgggagatgcaaagagagattttgtcaatcctgggactaccacaccggccaagaccacatctgcagggtaaacataattccgcgccaatgttcatgttggatctatacaacgcaatggcagtggaggagggcggagggcccggaggccagggcttcagctatccatacaaggcggtgttttctacacaggggcctccactggccagtcttcaagattcgcacttcctgacggacgccgatatggtgatgtcttttgtgaaccttgtggaacacgataaggagttttttcacccaagataccaccatagagagtttcggttcgacctgtcgaaaatacctgagggggaagcagtaacagctgctgaatttaggatatacaaggactatattcgtgagcgattcgacaacgagactttccgcatttcagtgtatcaagttctgcaggagcacctaggaagggagtctgacttgttcctgctcgatagccgaactctatgggcttccgaggaaggttggctagtgtttgatattactgccacatcgaatcattgggttgtgaatccccggcacaatttaggactgcagctgtcagtggaaaccctggatggccagtctattaatcctaagttggctggcttgataggcagacatggacctcagaacaaacagcctttcatggtggcttttttcaaggctaccgaggtacacttcagaagcatacgatcgactgggtccaagcaacggtcccagaatagatctaaaacgcctaaaaatcaagaggcactaagaatggccaatgtggccgagaactcctcatccgatcaacgccaggcttgcaagaaacatgagctgtacgttagctttcgagatcttggctggcaggactggataatcgctccagagggatacgccgcctattactgtgagggcgagtgtgctttcccattgaattcttatatgaacgctactaaccacgcgatcgtccaaacactggtccacttcataaatccagaaacggtccccaaaccatgttgcgcgcctacacagcttaatgctatctcagtgctgtacttcgacgacagctcaaatgtgatactgaagaagtaccgcaatatggtagttcgggcctgtggctgccac

SEQ ID NO: 7953 - DNA, 1293 bp, synthetic construct
  misc_feature 1..1293: note = source = /note="Description of Artificial Sequence: Synthetic coding sequence"
  source 1..1293: mol_type = other DNA
atgcatgtaagatcattacgtgctgctgcaccacattcatttgttgctctttgggctcctttatttttacttagatcagctcttgcagatttctccttagataatgaagtacatagtagtttcattcatagaagattacgttcacaagaaagacgtgagatgcaacgtgaaattctttcaattttaggtcttccacatagaccaagaccacatttacaaggaaaacataattcagcacctatgtttatgttagatctttacaatgctatggctgttgaagaaggtggaggaccagggggacaaggttttagttatccatataaagcagtattctcaacacaaggaccaccactcgcatctttacaagattctcattttttaactgatgcagatatggtcatgtcatttgtaaatttagttgaacatgataaagaatttttccatccaagatatcatcatcgagaattcagatttgatttatcaaagattccagaaggagaagcagttacagctgcagaatttcgtatttataaggattacattcgtgagcgttttgataatgaaacttttaggatatctgtttatcaagttttacaagaacatcttggaagagaatctgatttatttcttcttgattcaaggactttatgggcttctgaagagggatggcttgttttcgatattactgcaacatcgaatcattgggttgtaaatccaagacataatcttggacttcaattgtcagttgaaacgcttgacggacaatcaattaatcctaaattagcaggattaattggtagacatggtccacaaaataaacaaccatttatggttgcattttttaaggctacagaagtacactttagatctattagatccactggaagtaaacaaagatcacaaaatagaagtaaaacacctaagaatcaagaagcattaagaatggcaaatgtagcagagaattctagttccgatcaaagacaagcatgtaaaaagcatgaactttatgtatcttttagagatttaggatggcaagattggattattgctccagaagggtatgcagcttattattgtgagggagaatgtgcatttccattaaattcatatatgaacgctactaatcatgcaattgttcaaacattagttcatttcattaatccagaaactgttcctaaaccatgttgtgcaccaacacaattaaatgcaatttcagttttgtattttgatgatagtagtaatgttatattaaaaaaatatagaaatatggttgttagagcttgtggatgtcat

SEQ ID NO: 7954 - DNA, 1293 bp, synthetic construct
  misc_feature 1..1293: note = source = /note="Description of Artificial Sequence: Synthetic coding sequence"
  source 1..1293: mol_type = other DNA
atgcatgtgcggtcactgcgtgcagcagcgccacactcgttcgttgccctttgggccccactcttccttcttcggtccgcactggccgacttttctctggataatgaggttcactcatcctttattcataggcgcctgcggtcgcaagaacgtagggagatgcagcgcgaaattctttccatcttggggctgcctcaccgacctcggccccatcttcaaggaaagcacaactcggcccctatgttcatgctggatctttacaatgccatggccgttgaagagggaggcggccccggaggtcagggattttcctacccttacaaggctgtgttttccactcaaggaccaccattggcctcgttgcaggacagccacttcctcactgatgcagacatggtgatgtccttcgtgaatcttgtcgagcatgataaggagttttttcatccaaggtaccaccatagggaattccgctttgatctgtccaagatcccagaaggtgaagcggtgactgcggcagaattccggatttacaaggattacatccgggagcgatttgataacgagacttttcggatcagcgtgtaccaggtgcttcaagaacacctgggtagagagagcgacttgtttctgcttgactcacgtaccctctgggccagtgaggagggttggctggtttttgacataaccgccacttccaaccactgggtggtgaaccctagacacaaccttggactgcagctgtcagtcgagactcttgacggccagtcgatcaaccccaagttggcaggcctgataggtagacatggtcctcaaaacaagcagcctttcatggtggcgttctttaaggccactgaagtgcattttcggagcattcgttctactggctcgaaacaacggtcccagaatagatcgaaaacccctaagaaccaggaagcactccgcatggctaatgtcgcagaaaatagctcatccgaccaacggcaagcatgcaaaaaacatgaactttacgtttctttcagagatctcggatggcaagactggatcattgctcctgaaggatacgcggcatactactgtgagggtgaatgtgcatttccactgaacagctacatgaacgcaactaaccatgcaattgtgcaaaccttggtccatttcataaaccctgaaaccgtccctaagccttgctgcgctccgacccaattgaacgccatctcggtcctgtactttgatgatagctccaacgtgatcctgaagaagtacaggaatatggtggtgagagcatgtggatgtcat

SEQ ID NO: 7955 - DNA, 1293 bp, synthetic construct
  misc_feature 1..1293: note = source = /note="Description of Artificial Sequence: Synthetic coding sequence"
  source 1..1293: mol_type = other DNA
atgcacgtgaggagccttagagcagcagcacctcactcttttgtggcgctttgggcgcccctgttccttctgcgctcggcactggcggatttttccctggacaacgaagttcacagctccttcatccacagacgcctgagatcacaagagcgcagagagatgcagagagagatcctctcgatactcggtctgccgcataggcctcgcccacatcttcaaggtaagcataacagcgctcccatgtttatgctggatctttacaatgcgatggccgtggaggagggcggaggcccgggtggacaaggattttcgtacccttacaaggccgttttcagcactcaaggacctcctctcgcctcattgcaagattcgcactttcttaccgatgctgatatggtgatgtctttcgtgaaccttgtggagcacgataaggaattctttcacccacgataccatcatcgggaatttcggttcgacctctccaagattccggagggggaggcagtgaccgccgcagaatttagaatttacaaggactacataagagaaaggtttgataacgagactttcagaatctcagtctaccaagtgcttcaagagcatctggggcgggagtcggacctgtttctgctggatagccgtaccctttgggcctcagaggagggttggctcgtgtttgacattaccgccacctcaaaccactgggtggtgaacccaagacataatctgggccttcaactgtcagtcgaaacgctcgacggacaatcgatcaatcccaagctggcaggcctcatcggaaggcacggacctcagaacaaacagccctttatggtggcattcttcaaggcaactgaagtccatttccggtccattcggtcaactggatcgaaacagagaagccaaaatcggtccaagacgccgaagaaccaggaagcactcagaatggcaaacgtggccgaaaactcgtcgtcggatcagagacaagcatgtaaaaagcatgaactgtacgtctcattccgcgacctggggtggcaagactggattattgctcccgaaggttacgcagcatactactgcgagggagaatgcgcgtttcccctcaactcctacatgaatgcaaccaaccatgccattgtgcagaccctggtccatttcatcaatccagaaaccgtgcctaagccttgttgcgcaccgacccagttgaatgccatctccgtgctgtactttgatgacagctcgaacgtgatactgaagaaatacaggaatatggtcgtgagagcatgtggatgccat

SEQ ID NO: 7956 - DNA, 1293 bp, synthetic construct
  misc_feature 1..1293: note = source = /note="Description of Artificial Sequence: Synthetic coding sequence"
  source 1..1293: mol_type = other DNA
atgcacgttaggagcctgagagctgcggctccacactcttttgtggcattgtgggctcccctgtttctgctgaggtccgcgttggctgacttcagcctggacaatgaggtgcatagttcttttatccaccgccgcctgcggtcgcaagaaaggagagaaatgcagcgagagattctctctattttggggctcccacacagacccaggcctcacttacagggcaaacataacagtgcccccatgtttatgttagatctctacaacgctatggcggtggaggagggcggggggccgggcggccagggcttttcctacccgtacaaggccgtctttagtactcagggcccccccttggcaagccttcaagatagccactttctgactgacgccgacatggttatgagtttcgttaacctggttgaacacgataaggaattttttcacccacgatatcatcaccgagagttccggtttgatctgtctaagattcccgaaggggaagcagtgacagccgctgaatttcgcatctacaaggattatattagggaacgctttgacaacgagacattcaggatttccgtgtatcaggttttgcaggaacatctcggccgcgagagcgacttgttcctcctcgactccagaactttgtgggcttccgaagaggggtggctagtgtttgatatcaccgcaaccagtaaccattgggtcgtgaatccccgacacaacctgggactccaactttcagtcgagacgctcgatgggcagtcaattaacccaaaattggccggcctgatcgggcgccacggccctcaaaacaagcagccatttatggtcgccttctttaaagcaacagaggtacattttagatcaatccggtctacgggttcgaagcagaggtcgcagaaccgaagtaagacccccaagaatcaggaggcgctccggatggcgaatgtggcagagaatagcagcagtgatcaacgtcaggcatgcaaaaagcatgaactgtacgtctcttttcgggatcttgggtggcaggactggataatcgcgcctgaaggttatgccgcatactactgtgagggagaatgcgcatttccattaaattcttatatgaacgcaactaaccacgccattgtccagacactggtccatttcatcaacccagagacagtgccgaagccatgctgtgctcccacccagctcaatgctatttctgtgctttactttgacgattcctcgaacgtgattctgaaaaagtatcgaaacatggtggtgcgggcttgcggctgccac

SEQ ID NO: 7957 - DNA, 1293 bp, synthetic construct
  misc_feature 1..1293: note = source = /note="Description of Artificial Sequence: Synthetic coding sequence"
  source 1..1293: mol_type = other DNA
atgcatgtacgctccctcagagcggcagccccacatagttttgtggccctatgggctccgctcttcctcctaaggagcgctctggcggatttcagtctcgataacgaagtacattcatccttcatccatcgcaggctgcggtcccaggagcgtagagaaatgcagcgggagattctctccattctcggcctgccccaccggcccaggcctcacctgcagggcaagcacaattctgccccgatgttcatgcttgatttgtacaatgcgatggcggtggaggaggggggtggcccaggcggacagggatttagctatccctacaaggccgtttttagcacccaggggccaccactggctagtctgcaggacagccactttctgactgacgccgatatggtgatgagctttgtaaatctggtagagcacgataaggagttttttcacccccgttaccaccaccgcgagttcagatttgaccttagcaaaatccctgaaggcgaggctgttaccgccgccgaatttcgcatctacaaagactacataagagagcggttcgataatgaaacctttcgcataagcgtatatcaagttctgcaggagcacctgggtcgagaaagcgacctgtttctgctggatagccgtaccctttgggcgagcgaggagggctggctcgtatttgatataactgccacaagtaaccactgggtggtcaatccaaggcacaacctgggccttcagcttagcgtggaaaccctcgatgggcagagcattaatcccaagctcgccggactgattggacgccatggacctcagaacaagcagccattcatggtagctttctttaaggcaaccgaggtacatttcagatctatccgctctactgggtcaaaacagcgttcccagaatcggagcaagacaccaaagaatcaagaggccttacggatggccaacgtagcggagaatagtagttccgaccagcggcaggcatgcaagaagcacgagctgtacgtgagtttccgggaccttggctggcaagattggatcatcgcaccggagggctacgctgcctactattgtgagggagagtgtgcttttccgcttaatagttacatgaacgcgacgaatcacgcaatagtccagaccctcgtgcacttcattaatcccgaaacagtacctaaaccatgctgcgcccccacccagttaaatgccatcagcgtgctctactttgacgattctagcaacgttatcctgaagaagtacagaaacatggtagtgcgggcctgtggctgccac

SEQ ID NO: 7958 - DNA, 1293 bp, synthetic construct
  misc_feature 1..1293: note = source = /note="Description of Artificial Sequence: Synthetic coding sequence"
  source 1..1293: mol_type = other DNA
atgcatgtgcgatcccttcgcgcagcagcacctcattcctttgtggcactttgggccccactcttcctgctgaggagcgcacttgcagatttctccctcgataatgaagttcactcgtcatttatccatcgcaggctccgttcacaggaaaggcgggagatgcagcgggaaattctgtcaatcctcgggctgcctcatagaccccgtccgcatcttcaaggaaagcacaattccgcacctatgttcatgctggatctgtacaacgccatggcagtggaggaaggaggaggtccgggcggacagggtttttcgtatccatacaaagccgtgttcagcactcaaggtccacctctcgcatcgctccaagactcacattttcttaccgatgcagatatggtgatgtcgttcgtgaatctggtcgagcatgataaggagttttttcatcctcgttaccatcatagagaattccgatttgatctgagcaagatcccggaaggcgaagcagtgactgcagcagagtttagaatctacaaagactacattcgggaaagattcgataatgagacttttcggattagcgtctaccaagtgctccaagaacaccttggaagagagtccgatctgtttcttctcgattcgcgtaccctttgggcgtcggaagaaggatggctggtgtttgatattaccgcaacctcaaaccattgggtggtgaaccctcgccataatcttggactgcagcttagcgttgaaactctcgacggacaaagcatcaaccctaagctcgcaggcctgataggccgccatgggcctcagaacaagcaacctttcatggtggcattctttaaggccactgaggtccattttcgcagcattcggagcactggatcgaagcagagaagccaaaaccgctccaaaacccccaagaaccaagaggcgcttcgaatggctaacgtggctgagaattcgtcctccgaccagcgacaggcctgcaagaagcatgaactgtatgttagctttcgcgacttgggctggcaggactggatcattgcaccagaaggttatgcagcatactactgtgaaggtgaatgtgctttcccactgaattcctacatgaacgcaaccaaccatgcaatagtgcagaccttggttcatttcataaacccggaaactgtgcctaaaccttgctgcgcaccaacgcagctgaatgctatttccgtgctttactttgatgattcgtcaaacgtgatactgaagaagtacaggaatatggttgtgcgcgcctgtgggtgccat

SEQ ID NO: 7959 - DNA, 1293 bp, synthetic construct
  misc_feature 1..1293: note = source = /note="Description of Artificial Sequence: Synthetic coding sequence"
  source 1..1293: mol_type = other DNA
atgcatgtccggagcctccgggcggccgccccccacagtttcgttgcgctgtgggctcccctcttcctcctgcgcagcgccctggctgatttctcactggacaacgaagtccactctagcttcatccaccgtcgcctgcgtagtcaggagcgccgtgagatgcagagggagattctgtctattctcggattgccccaccgccctaggccccatttgcaggggaaacataattcggcccctatgttcatgctggacctgtacaatgcgatggctgtggaagagggcgggggacccggtggccaaggcttctcttatccctacaaggctgtctttagtacccaggggccccctctggcgagtctccaggacagccactttttgactgatgccgacatggttatgtccttcgtcaacttggttgagcacgataaggagttcttccatccgcgctaccaccatcgcgagttccggttcgatctctctaagatccctgagggcgaggcagtcacggctgccgagttccgcatttacaaggactacatcagggagagattcgataacgagacgttccgaatttcggtctatcaggtcctccaggagcacctgggacgtgagagtgaccttttcctgctggactcccgcactctatgggcctcagaggagggctggctggtatttgatattactgccacctcaaaccactgggtcgtgaatccccggcacaacttgggcctgcagctgtccgtcgaaacgttggacggacagagcatcaatcccaaactcgctggcttgattggccggcacggtccccagaacaagcagcctttcatggtcgccttctttaaagccaccgaggtccacttccgttccatccgtagcaccggctccaagcagcgcagccagaatcgttccaaaaccccgaagaaccaggaggcactacgcatggccaacgtcgctgagaacagttcctccgatcagcggcaggcctgcaagaaacacgagctgtacgtttcatttcgcgatcttgggtggcaagattggattatcgccccagagggttatgctgcctattactgtgagggcgagtgtgcgttccccctcaactcctacatgaacgcaacgaaccatgcaattgttcaaacccttgtccactttattaaccccgagactgtcccaaagccatgctgcgcccctacgcagctgaacgccatctcggtcctgtacttcgatgactcctccaacgtgatcctgaagaagtatcgtaacatggtcgtgcgtgcttgtggatgccac

SEQ ID NO: 7960 - DNA, 1293 bp, synthetic construct
  misc_feature 1..1293: note = source = /note="Description of Artificial Sequence: Synthetic coding sequence"
  source 1..1293: mol_type = other DNA
atgcatgtcagatccctaagggcggcagcacctcattcttttgtcgctttatgggccccactgttcctcctgaggtccgcgctcgcggatttctccttagacaacgaagttcatagcagctttattcacaggaggctacgcagtcaggaaaggagagaaatgcaaagagagatcctgtctatccttggcctccctcataggccacgtccccatttacagggtaagcataattccgccccaatgttcatgttagacctgtacaacgcaatggcggttgaggaaggcgggggccccggcggccagggtttctcgtatccttacaaagccgtgtttagtactcagggaccgccgctcgcatctctgcaggatagtcacttcctgactgatgccgatatggtgatgtcttttgtcaatctggtggagcacgataaggaatttttccaccctcgctaccaccatagggagttcagatttgatctttcaaaaattcctgaaggcgaagctgtcaccgctgccgaatttcgtatctataaggattacatacgcgaacgattcgacaacgagacttttcgcatttcggtctaccaagtcctacaagaacacttagggagggagtccgacctgttccttctcgactcccgcacgctgtgggctagtgaagagggatggttggttttcgacataaccgccacttccaaccactgggtggttaatccaagacataatcttgggctgcaactttcagttgagactcttgacggccagagcataaatccaaaactcgctgggcttattgggagacacggcccgcagaacaagcagcccttcatggtcgctttctttaaggccacagaggtccactttcggagcatccggtcaacaggttccaaacagaggagtcaaaatcggagtaaaactcccaagaaccaggaggctctcaggatggcgaacgtcgcagaaaacagctcctccgatcagcgacaggcctgcaagaaacacgaattgtatgtttcctttcgggatttggggtggcaggattggattatcgctccagagggatatgctgcctactactgcgaaggagagtgcgctttccccttaaactcctacatgaacgccaccaaccatgcaatagtgcagaccctggttcattttatcaatcctgagacagttcccaagccctgctgcgcgcctacccaactgaatgcaatctccgttttatactttgacgatagcagtaacgtgatcctgaagaagtatcgaaacatggtcgtgcgagcctgcgggtgtcac

SEQ ID NO: 7961 - DNA, 1293 bp, synthetic construct
  misc_feature 1..1293: note = source = /note="Description of Artificial Sequence: Synthetic coding sequence"
  source 1..1293: mol_type = other DNA
atgcacgtccgatctctcagagcagcagcccctcattcgtttgtcgctctgtgggcgccactgtttttgcttagaagcgcgttagcagacttctccttagataacgaggtccactcttcgtttattcacagaaggctgcgctcgcaagaaagacgggaaatgcaaagagagattctgtctattttggggcttccgcataggccgcggccgcacttacagggcaaacacaacagcgcaccgatgtttatgttagacttgtacaacgctatggcggtggaagaaggcggaggccctggagggcaagggtttagctatccgtataaagcagtcttcagcacccagggacctccgcttgcgtcattacaagacagccacttcctgactgatgccgatatggtgatgtcttttgtcaatctggtggaacacgataaagaattctttcatccacggtaccatcaccgagagttccgttttgatcttagcaaaatccctgagggagaagccgtaacggcagcagaatttagaatttataaggactacatccgggaacgttttgacaatgagacttttaggatttcagtgtatcaggttttacaagagcacttagggagagaatcagatctctttctcctggattcgcgtacactttgggcttcagaagagggctggttggtgttcgatataaccgccacgtctaatcattgggttgtcaatcctcgccataatctgggattacagttgtctgttgaaacgcttgatggccaaagcattaatcctaagttggccggattgattgggcgacacggtccacaaaataagcagccgtttatggttgctttttttaaagcgacagaagttcattttcgaagcataagaagcacgggaagcaaacagcgaagtcagaacagatccaagacgccaaaaaaccaagaggcgttgcgtatggcgaacgttgcagaaaacagctcatctgatcagcgccaagcttgcaaaaagcatgaactctatgtgagctttagagaccttggctggcaggactggattattgcgccggaaggatatgcggcttattactgtgagggcgaatgcgcgtttcctctgaatagttatatgaacgcgacaaatcatgccatcgtgcagacattagtacactttataaatcccgaaacggtcccgaaaccttgctgcgctccaacgcaattaaacgccatatccgttctctatttcgatgattccagcaacgtcatcttaaaaaaataccgcaatatggtcgtgagagcgtgtgggtgccat

SEQ ID NO: 7962 - DNA, 1293 bp, synthetic construct
  misc_feature 1..1293: note = source = /note="Description of Artificial Sequence: Synthetic coding sequence"
  source 1..1293: mol_type = other DNA
atgcacgtgcgtagcctgagagccgcagcgcctcactcatttgttgcgctttgggcccctctattcctattaagatccgcactggctgatttttctttggataacgaagtccattctagcttcatccataggcgcctccgcagtcaggaacggagggagatgcagagggagattttaagcattctcggtttgcctcaccgaccacgcccccatctccagggaaagcacaactccgcccctatgttcatgctggatctgtataacgcaatggcggtcgaagagggagggggaccagggggccagggcttttcatacccgtacaaagctgttttctccacccaaggcccgccccttgcttccctgcaggactcccattttttgaccgatgccgatatggtcatgtcctttgtgaatctagtggagcacgataaggaattctttcacccccggtaccatcaccgggaattccgattcgacctgagtaaaatccctgaaggagaggcggtgaccgcagccgaattcagaatatacaaggactacatccgagagcgattcgataatgaaaccttccgtatctccgtttatcaggtgctacaggaacaccttggaagagagtctgatctcttcttactggatagccgaacgctttgggccagcgaagaaggctggcttgtcttcgacataaccgctacaagcaatcattgggtggttaatcctcgccataacttggggctgcaacttagcgtggaaacccttgatggccagagcattaaccccaagctggctggccttattggacgacatgggccacagaataaacagccatttatggtcgctttttttaaagccaccgaggtgcacttccgctcgataagaagcacagggtcaaagcagcggtcacagaaccggtcgaagacccctaagaaccaggaagcgctacgcatggcaaatgtcgcggagaatagctcatctgatcaacggcaggcctgtaagaagcacgaactatacgtctcctttcgggatttgggatggcaggattggatcattgcaccagaaggctacgctgcatactactgtgaaggcgagtgtgctttcccgctgaattcatatatgaacgctaccaatcatgcgatagtacagaccctggtgcactttattaacccagagacggtcccaaaaccctgttgtgctcctacacagctgaacgcgattagtgtgttgtatttcgatgatagctctaacgtgatattgaagaagtataggaatatggttgttcgcgcctgcggctgccat

SEQ ID NO: 7963 - DNA, 1293 bp, synthetic construct
  misc_feature 1..1293: note = source = /note="Description of Artificial Sequence: Synthetic coding sequence"
  source 1..1293: mol_type = other DNA
atgcacgtgcgttcgctgcgggcagcagcgccgcacagctttgtagccctgtgggctccactttttctgctgagaagcgctctggcagatttttcacttgacaacgaagtgcatagctcctttattcataggcgcctgcgaagtcaagagagaagggaaatgcagagagaaattctgagcatcctcggcttgcctcacagaccgcgacctcacctgcaggggaagcataattcagccccgatgtttatgcttgatctctacaatgcaatggcagtggaagaaggcggaggtcctggcggtcaaggtttttcgtacccctacaaggcggtgttttcgactcaaggaccaccgctcgcatctctgcaggattcacattttctgaccgatgcagacatggtgatgtcgtttgtgaatctggtggaacatgacaaggagtttttccatccacggtaccatcatcgagagtttcgctttgatctttcgaaaattccggagggtgaagcagtgactgctgccgaatttaggatatacaaggactatatccgggaaagattcgataacgaaaccttccgtatatcggtctaccaggtcttgcaggaacacttgggacgggaatccgatctgtttcttctcgattccagaaccctctgggcctccgaggaaggatggctggtgtttgacattacggcaacctcgaaccattgggtcgtaaatcccagacataatcttggtctgcaactttctgtggaaacccttgatgggcagtcaattaacccaaagctcgcaggcctcatcggtagacacggacctcagaataaacaacctttcatggtggcatttttcaaagcaaccgaggtgcactttcggtcgatacgcagcaccggttccaaacagcggagccaaaatcgatccaagactcctaaaaaccaagaagccttgaggatggcaaacgtggctgaaaattcgtcgtctgatcaaagacaggcatgtaagaagcatgaactttacgtgagctttcgggatctggggtggcaagactggattatcgcccccgagggttacgctgcctactactgtgaaggggaatgtgcgttccctctgaactcctacatgaatgccacgaaccatgcgatcgtgcagaccctggttcacttcattaacccagaaaccgttccaaagccctgctgcgctccgactcaactgaacgcaatctccgtcctgtattttgatgactcgtcgaacgtcatccttaagaagtaccggaacatggtggtgcgcgcatgtggatgccac

SEQ ID NO: 7964 - DNA, 1293 bp, synthetic construct
  misc_feature 1..1293: note = source = /note="Description of Artificial Sequence: Synthetic coding sequence"
  source 1..1293: mol_type = other DNA
atgcatgtgaggagcctgagggctgccgctccacactccttcgtcgccctctgggctccactcttccttctcagaagcgctcttgcagatttttctctggacaacgaggtacattctagcttcatacataggaggctgagaagccaagaaagaagagagatgcagagggaaatcctgagcattctgggactgcctcacagaccaagaccccacctccagggcaaacacaatagtgctccgatgttcatgctggacttatacaatgcgatggccgtcgaagaagggggagggccaggcgggcagggatttagctatccttacaaagccgtcttttcaacccaggggccccccctggccagcttgcaggactcccatttcctgaccgatgcagacatggtgatgagttttgtgaatctagtggagcatgacaaggagttcttccaccccagatatcaccaccgggaatttagattcgacctgtctaaaatccctgaaggcgaagcagtcaccgcagcggaatttagaatatacaaggactatatacgggaacgtttcgacaatgagacctttcggatctccgtgtatcaggttctgcaggagcatctggggcgggagtccgacctgttccttctcgatagtcgaacgctctgggcttcagaggaaggatggctggttttcgacatcacagccactagtaaccattgggtggtcaatccgcggcataacctgggcttgcagctcagcgtcgagacattagacgggcagtcaatcaaccccaagctagcggggctcatcgggaggcacgggccacagaataaacagccctttatggtcgccttctttaaggctaccgaggtccatttccgatccattaggagtacaggtagcaagcagcgtagccagaatagaagtaagacccccaagaatcaagaggccctgaggatggcaaatgttgcggaaaacagcagttccgaccagaggcaagcttgtaagaaacacgaattatatgtaagttttcgggacttgggctggcaggactggataattgcccccgaaggctatgcagcctactactgcgaaggcgagtgcgcatttccattgaattcctacatgaatgccaccaatcatgccatcgtgcagactctggtgcactttataaatccagagacggttcccaaaccctgctgcgcacccacacagcttaatgccatcagtgtgctgtacttcgatgactcatctaacgtgatcttgaagaaatatcgaaacatggtggtgagagcctgtggatgtcat

SEQ ID NO: 7965 - DNA, 1293 bp, synthetic construct
  misc_feature 1..1293: note = source = /note="Description of Artificial Sequence: Synthetic coding sequence"
  source 1..1293: mol_type = other DNA
atgcatgtacggtctctgcgggcagctgcaccgcatagcttcgttgccctctgggcaccactgtttctgctgcgctctgctcttgccgatttctctttggataacgaggttcacagcagttttatccaccgccggttaaggagccaggagcggcgcgaaatgcagagagaaatcctgtctatcctggggctgccccacaggccgcgcccccatctgcagggaaaacataactccgcaccaatgtttatgttggatttgtacaacgcaatggccgttgaagagggcggaggccctgggggccagggctttagctacccctataaagctgtcttttccacacaaggtccaccactggctagcctccaggatagtcactttcttacggacgctgatatggtgatgagcttcgtgaatctggtggagcacgataaggagttctttcaccctaggtaccaccaccgcgagttcagatttgacctgtccaagatccccgaaggagaagcagtgaccgccgctgaatttcgtatctacaaagattacattcgtgaaaggttcgacaacgagacttttcgcatctcagtgtaccaggtcctgcaagagcacctcgggcgggaaagtgatctgtttctgctcgatagcagaactctgtgggcgtcagaagaagggtggcttgtctttgatattaccgctaccagtaaccactgggtcgttaaccctaggcataatctggggttacagctgtccgttgagaccctagacgggcagtcaatcaacccgaaactagctggattgatcggacgccacggaccacaaaataaacagccctttatggtggctttcttcaaggccaccgaggtgcattttcgatcaataaggagcacaggaagtaaacaaagatctcaaaacaggagcaaaacacctaaaaaccaggaggccctgcgtatggccaacgtggctgagaacagtagcagcgatcagcgccaagcttgcaagaagcatgaattgtacgtctccttccgggacttgggctggcaggactggatcatagcaccggaaggctacgctgcctattactgcgaaggagagtgcgcctttcccctgaacagttacatgaatgctacaaaccatgctattgtccagaccttggtgcattttatcaacccagagaccgtgcccaaaccctgttgcgcacctacgcagcttaatgcaatcagcgtactgtactttgatgattcctccaacgtgatccttaaaaagtacagaaacatggtggtcagggcttgcggctgtcac

SEQ ID NO: 7966 - DNA, 1293 bp, synthetic construct
  misc_feature 1..1293: note = source = /note="Description of Artificial Sequence: Synthetic coding sequence"
  source 1..1293: mol_type = other DNA
atgcatgtccggtcccttcgggctgccgccccacactcttttgtcgctctctgggcgcccctcttcctgttaaggtcagcgctggcagacttctctctggacaacgaggtgcatagtagttttatccacaggaggctgagatcacaagagcggcgggaaatgcagcgcgaaatcctctctattctaggtctgccacacagacccagaccccatcttcagggtaagcataatagcgcacccatgtttatgttagatctgtataacgcaatggcggtcgaggaggggggaggtccaggtggccagggtttcagctacccatataaagccgttttctccacgcaggggcctcccttggcctccttgcaggacagccacttcctcaccgacgctgatatggtgatgtcctttgtaaacctcgtggaacacgacaaggaattctttcacccaagataccaccatcgtgaattcagattcgacctctctaagattccagagggcgaagcggtgacagcagcagagtttcgcatctacaaagactacattcgtgagcggttcgacaacgagactttcagaatctccgtgtatcaagttttgcaggaacatctggggcgggaaagcgatctttttctgcttgattccagaaccctctgggcatcagaggaaggctggctggtcttcgatattacggccacatctaatcattgggtagtcaacccaagacataacctgggcctgcagttgagcgttgagacactggacggccagtccatcaatcctaagctggctggcctaattggaaggcatggcccccagaataaacagcccttcatggtggcgttctttaaggcaactgaagttcacttcagatccatacgctccaccgggtcgaagcagaggtcccagaaccggtccaaaactcctaaaaaccaggaggcgcttagaatggctaatgtggcggagaactcatcttcagatcagcgtcaggcttgcaagaagcatgaactgtatgtttccttccgagacctcggatggcaagactggataatcgcacctgaagggtatgccgcctactattgcgaaggagagtgtgcctttccactaaattcctatatgaacgcgacgaaccacgcgatcgtgcagaccttagtccactttatcaaccccgagacagtaccaaaaccatgttgtgcccccacccagctgaacgccatttccgtgctttatttcgatgattcttccaacgtaatcctgaaaaagtataggaacatggtcgttcgcgcctgtggctgtcac

SEQ ID NO: 7967 - DNA, 1293 bp, synthetic construct
  misc_feature 1..1293: note = source = /note="Description of Artificial Sequence: Synthetic coding sequence"
  source 1..1293: mol_type = other DNA
atgcatgtacgctcgctcagggcggcagctccacattcttttgttgcattgtgggcacctctgtttctgctgcgctcggccctcgcggatttttcccttgataatgaagtgcatagcagcttcattcatagacgccttcggtcacaggaacggcgggaaatgcagcgcgagattttgtcgattctcggcctgccacacaggccacggccacatctgcaaggaaagcacaacagcgcaccgatgtttatgcttgacctgtacaacgcaatggccgtcgaagaaggcggtggaccaggtgggcaaggtttttcgtacccttacaaggcggtgttctctactcagggacctccactggccagcctgcaagatagtcacttcttgactgatgcagatatggtcatgtcctttgtgaacttggtggaacatgataaggaattcttccaccccaggtatcatcatcgtgaatttcggttcgacctctccaagattcctgaaggggaggcagtgacggcagcagagtttcgcatctacaaggactacataagggaaagatttgacaatgagacgttcaggatcagcgtctatcaggttctgcaagagcatcttggtcgcgagtccgatctcttccttcttgattcccgaaccctctgggcatcggaagaaggatggctcgtgtttgacattaccgccacctcgaaccactgggtggtgaaccccagacacaaccttggccttcagctctcagtcgaaactctcgacggacaaagcattaaccctaaactggcgggcctcattgggcggcatgggccgcagaacaagcaaccatttatggtcgcttttttcaaagcaactgaggtccattttcgatcaatcagaagcaccgggtctaagcaacgcagccaaaatcgatcgaaaactccgaagaaccaggaggctctgcggatggccaacgtcgcagaaaactcgtcgtcggaccagcggcaagcatgtaagaagcatgagttgtacgtgagctttagagatctgggttggcaagattggataatagcgccagaaggatacgccgcatactactgcgagggtgagtgtgcattcccgcttaattcctatatgaacgcaaccaaccatgccatagtgcaaaccctcgttcactttatcaatccggaaactgtcccgaaaccgtgctgcgcccctacgcagcttaatgccatttccgtcctttacttcgatgactcatcaaacgtgatccttaagaaataccgaaatatggtggtccgtgcttgtgggtgtcac

SEQ ID NO: 7968 - DNA, 1293 bp, synthetic construct
  misc_feature 1..1293: note = source = /note="Description of Artificial Sequence: Synthetic coding sequence"
  source 1..1293: mol_type = other DNA
atgcacgtgaggtcactccgagcagcagcgccgcattcctttgtggcgttgtgggcacctctgtttctgttgcgcagcgccctggcagatttttcgcttgataacgaggtgcactcgtcctttattcatcgccgtcttagaagccaggaacgtagagagatgcaaagagaaattctttccattctcggccttccacacagacctaggccacaccttcaggggaagcacaactcagcacctatgttcatgctcgacctctacaacgcaatggccgtggaagaaggaggtggcccaggggggcaaggattttcatacccatacaaggcggttttctcaacccaaggacctccactcgcgagcctgcaggactcgcattttcttacggatgcagacatggtgatgtcgtttgtcaacctcgtggagcatgataaagaattcttccatcccagataccaccacagggaatttagatttgatctctcaaagatccctgagggtgaagcagtgactgcagcagaatttcgaatttacaaggattacattagggagaggtttgacaatgaaacttttcggatctcggtgtatcaagtgcttcaggaacacctgggcagagaatccgatctctttctgttggattccagaaccctttgggcctcggaagaaggctggctcgtgtttgatatcaccgcaaccagcaatcattgggtcgtgaacccgcggcataatcttggacttcagctgagcgttgaaaccctggatggtcagagcattaatcccaagctggctggtctgatcggaaggcatggtccgcagaataagcaaccatttatggtggcgttcttcaaagccactgaagtgcactttcgttcgattagatcgactggcagcaagcaacgtagccaaaatcgttcaaagacgccgaagaaccaggaagcacttcgtatggcgaacgtggctgagaactcgtcatctgaccaacgccaagcatgtaagaaacacgagttgtacgtctcgttccgggatctcgggtggcaagattggatcattgcaccggagggatacgccgcttactactgtgaaggagaatgtgcattccctctgaacagctacatgaatgcaaccaatcatgcaatcgtgcaaactctggtccactttatcaacccagaaactgtgcctaaaccttgctgcgcacctactcagcttaacgcgatctcagtcctctactttgacgattcctctaacgtcatcttgaagaagtataggaacatggtcgttcgggcatgcggctgtcac

SEQ ID NO: 7969 - DNA, 1293 bp, synthetic construct
  misc_feature 1..1293: note = source = /note="Description of Artificial Sequence: Synthetic coding sequence"
  source 1..1293: mol_type = other DNA
atgcacgtccgtagcctacgggccgccgcccctcactctttcgtggctttgtgggccccattatttctgcttagaagtgctttggctgacttttcactggataatgaggtccacagctcattcatccatcgcaggttacgtagtcaagagcgtagagagatgcaaagagagattttgtctatcctaggactcccccatcggcccaggccacaccttcagggaaagcataatagcgctccgatgttcatgcttgatttatataacgctatggccgtcgaagaaggtggtgggcccggtgggcagggtttcagttacccgtacaaagctgtgttctctacgcaaggtcccccacttgcttctcttcaggattcacactttctgactgacgctgatatggtaatgagcttcgtgaacttggtggagcatgataaggagtttttccaccccagatatcaccatcgtgagttcaggttcgatttgagcaagattcctgagggagaagctgtgactgcggcagagtttagaatttataaggactacattagggagcgattcgataacgagacctttaggatatcggtttaccaagtcctacaagaacacctcggtagggagagcgatctctttttgttagattccagaactctttgggccagtgaggaaggttggcttgtttttgacattactgccacctctaaccactgggtggttaacccaagacacaatttggggcttcagttgtctgtcgaaactcttgatggacagtcaataaatccgaagcttgctggtcttattgggaggcatggaccccagaacaaacaacccttcatggtcgctttcttcaaagctacagaggtccattttagatcgatcagaagcacaggcagtaaacagcggtcgcagaatcgttctaagacgccaaaaaatcaagaagctcttaggatggcaaatgttgcagagaatagcagctcagaccagagacaagcttgtaagaagcacgaattgtatgtttcatttcgtgatttggggtggcaggattggataattgctccagagggttacgcagcttactactgcgaaggggaatgcgctttccctttaaactcatatatgaacgccacaaaccatgctattgtacaaactctggtacatttcatcaatcctgagacagtaccgaagccatgttgcgcgccaacacaacttaacgcaataagtgttctatatttcgatgatagctccaatgttatactgaaaaaatataggaatatggtagtaagggcctgcgggtgccat

SEQ ID NO: 7970 - DNA, 1293 bp, synthetic construct
  misc_feature 1..1293: note = source = /note="Description of Artificial Sequence: Synthetic coding sequence"
  source 1..1293: mol_type = other DNA
atgcacgtgagatccctgcgcgccgccgcgccccattcgttcgtggccctctgggccccgctgttcctcctccggtcagcactcgcggatttctcgctggacaacgaggtgcattcttctttcatacacaggaggttgagatcccaggaaaggcgggaaatgcaacgcgaaattctgtccatccttggattgccacaccgccctagaccccatctccaaggaaagcacaactcagctcccatgttcatgcttgatttgtacaacgctatggccgttgaagagggaggaggaccgggaggccagggattttcctacccttacaaggccgtgttctccacccagggtcccccactggcgtcgctccaggactcccatttcctgacggatgcagacatggtgatgtcatttgtgaatctggtggagcacgacaaggagtttttccacccacgctatcatcatcgagaattccgcttcgacctgtcaaagatcccggaaggggaagccgtgactgcggcggagtttaggatctacaaggactacatcagggaaagattcgacaatgagactttccggatcagcgtgtaccaggtgctgcaagagcacctcggcagagaatcagatctgttcctgctggactcccgcaccctctgggcatcggaggagggatggctcgtgttcgacatcactgccacctcgaatcattgggtggtcaacccccgccataacctggggctccaactgtccgtggagactctggatgggcagtcgatcaatccgaagctcgctggactgatcggacgacacggtcctcagaacaagcaaccgttcatggtggctttcttcaaggcaaccgaggtgcactttcgctcgatccggtccaccgggtccaaacagcgctcccagaatagaagcaaaactccgaagaaccaagaagccctgcgcatggccaacgtggcagaaaacagcagcagcgaccagcgccaggcgtgtaaaaagcatgaactgtacgtcagctttcgcgacctgggctggcaggactggattatcgcacccgaaggatacgccgcctactactgcgaaggagaatgcgccttcccgctgaattcctacatgaacgcaactaatcacgccatcgtgcagaccctcgtccacttcatcaatccagaaactgtcccgaaaccgtgttgtgcccctactcaactcaacgccatctcagtgctctatttcgatgactcatcgaatgtcatcctcaagaagtaccggaatatggtggtgagggcgtgcggatgccac

SEQ ID NO: 7971 - DNA, 1293 bp, synthetic construct
  misc_feature 1..1293: note = source = /note="Description of Artificial Sequence: Synthetic coding sequence"
  source 1..1293: mol_type = other DNA
atgcacgtgcggagcttgcgggctgcggcaccacactctttcgtcgcattatgggcccctctgttcttgctccgaagcgctcttgcagatttctccctcgacaatgaagtccacagttccttcatacaccgcagattgcggagccaggagcggagggaaatgcagagagagatcctcagtatactcggccttcctcataggcccagacctcatctccagggcaaacataattccgcgcctatgtttatgttggatctatacaacgccatggctgttgaggaaggcggagggcctggtggtcaagggttttcatatccgtacaaggccgttttctcaacgcaggggcctcctctggcatcattgcaggactctcacttcttgaccgatgccgacatggtgatgtccttcgtgaacctcgtggagcacgataaagaattcttccatccacgttatcaccatagagagttccgtttcgatctgtcaaagatccctgaaggcgaagccgtgacagctgccgagttccgcatatataaggattatatacgggagagatttgacaatgaaacattccgaatttccgtgtatcaggttcttcaggaacacctgggccgcgaaagtgatctttttctcttggattcacggactctgtgggcctctgaggagggctggctggtgttcgatatcaccgcgacctccaatcattgggtggtcaacccgcgccacaaccttggactgcagttatccgtagagacgcttgacgggcaatccataaaccctaagctggccgggctgattggccggcatggccctcaaaataagcagccttttatggtggctttctttaaagctacagaagttcacttccgctccataagatctactggctccaagcaaaggagccagaatcgatcaaaaacacccaagaaccaggaggccctgcggatggcgaatgtcgccgagaatagctcctctgatcaaaggcaagcctgcaagaaacatgaactgtatgtgagctttagagacctaggatggcaagactggataattgcacctgaggggtatgccgcttattactgcgagggagagtgcgcattcccacttaactcatacatgaacgcaacgaatcacgccatcgttcaaaccctagtccacttcatcaacccagaaaccgtgccgaaaccgtgttgtgcccctacccagctaaatgcgatcagtgtgctgtacttcgatgactcatctaacgttattctcaaaaagtacagaaacatggtggttcgcgcctgtggttgccac

SEQ ID NO: 7972 - DNA, 1293 bp, synthetic construct
  misc_feature 1..1293: note = source = /note="Description of Artificial Sequence: Synthetic coding sequence"
  source 1..1293: mol_type = other DNA
atgcatgtgcgaagtttgagagccgctgctcctcacagtttcgtggccctgtgggctccactctttctgttgcgtagtgccctcgcagacttctccctggacaacgaggtgcattcttccttcatccacaggaggctgaggagtcaagaaagacgagagatgcagagagaaattttatccatcctcggcctacctcataggccccgaccgcaccttcaggggaagcacaatagcgcccctatgttcatgctcgatctttacaacgccatggcagtggaggaaggaggcggcccgggagggcagggattctcatatccatataaggccgttttctccacacaggggccacccctcgctagccttcaggacagtcactttctgaccgatgccgacatggtgatgtctttcgtgaatcttgtggaacatgacaaagagtttttccatccccgatatcatcaccgtgagttcaggtttgatttgagcaaaatcccagaaggggaggccgtcacagccgctgagtttaggatctataaagactacattagagagaggttcgataacgagacctttcgcatcagtgtgtaccaagtgttacaggagcatttgggtcgagaatccgacctgtttcttcttgacagccgcaccctctgggcctcagaggaaggctggctggtctttgacatcaccgccaccagtaaccactgggtggtgaatcctaggcacaacctgggcctccagttaagcgtggaaacactcgacggacagagtatcaatccaaagcttgccggactaatcgggagacatggtccccagaacaaacagccttttatggtggccttcttcaaggcaaccgaagtccacttcaggagtatccggagtacagggtctaaacagcgtagccagaacaggtccaagactcctaagaatcaggaggccctgcgaatggcaaacgtggcagagaattcctcatcagatcaacggcaggcttgtaaaaaacatgaactgtatgtaagcttccgtgatctggggtggcaagactggatcatagcccccgagggctacgccgcttattattgcgaaggtgaatgcgctttccccttgaattcctacatgaatgccacaaaccacgccatcgtgcagaccttagtgcactttatcaatcccgagacagtgcctaaaccttgctgcgcccctactcagctgaatgcgatttctgtactgtacttcgacgacagcagtaacgtgatactcaagaaatacaggaacatggtggttcgagcttgtgggtgccat

SEQ ID NO: 7973 - DNA, 1293 bp, synthetic construct
  misc_feature 1..1293: note = source = /note="Description of Artificial Sequence: Synthetic coding sequence"
  source 1..1293: mol_type = other DNA
atgcacgtgagatcgctgagagcggctgcgccccattcgttcgtcgcgctctgggcccccctttttctcctccgctccgcgctcgctgacttctcacttgataatgaagtgcactccagcttcatccatcgccgcttgcggtcacaagaacggagagagatgcaacgcgagattttgtctatcctgggattgccgcacaggcctcggcctcatctgcagggcaaacataattcagcacctatgttcatgttggacctgtacaacgccatggctgtggaggagggcggcggaccggggggtcagggcttctcctacccgtacaaggctgtgttttcgactcagggacccccactcgccagccttcaagactcacatttcctgacggacgcagatatggtcatgtcattcgttaacctcgttgagcacgacaaggaattctttcacccgagataccaccaccgagaatttcgatttgatctgtcgaagattcccgaaggagaggccgtgaccgccgcagagtttagaatctacaaggattacatccgcgaacgctttgataacgaaacctttcgcatctccgtataccaggtgctccaagaacatctggggcgcgaatcggacctgttccttctggacagccggaccctgtgggccagcgaagaaggctggctcgtgttcgacatcacggccacttccaaccattgggtggtcaacccgcgccacaacctggggctccagttgagcgtagaaactctggacggacagagcatcaacccgaaactggccggcctgattggtagacatggtccgcagaataagcaaccattcatggtggccttcttcaaggctactgaagtccactttagatccatccggagtactggatcaaagcaacgcagtcaaaatagatcaaagacccctaaaaaccaggaggcacttcgcatggccaatgtggcggaaaactcaagctcggatcagcggcaggcgtgtaagaaacacgagctttacgtgtcattcagggacctcggttggcaggactggataatcgcgccagagggatacgcggcctactattgcgaaggggagtgtgccttcccactcaactcctatatgaacgccaccaatcatgcaatcgtgcagaccctggtccatttcatcaatccggagacggtgccaaaaccgtgctgcgctcccacccagctgaacgcaatctctgtgctgtacttcgatgactcctcaaacgtgattttgaagaagtaccggaatatggtcgtccgggcttgcggatgccat

SEQ ID NO: 7974 - DNA, 1293 bp, synthetic construct
  misc_feature 1..1293: note = source = /note="Description of Artificial Sequence: Synthetic coding sequence"
  source 1..1293: mol_type = other DNA
atgcatgtgaggtcgctgcgcgccgccgcgccacacagcttcgtggccctctgggctcccctttttctgctgcggtcggcgttggccgatttcagcctcgacaacgaggtgcactcctcgttcatccatcggcgtctgcgtagccaagagcgcagagagatgcagcgggaaatcctgtcaatcttgggactgccacacagaccgcgccctcatctccagggaaagcacaactcagcgccgatgttcatgctcgatttgtataacgccatggctgtggaggaaggaggaggccccggaggacaagggtttagctacccgtacaaagcagtgttctcgacccaggggccacctctggcctcgctgcaggactcccatttcttgactgacgcagacatggttatgtcgttcgtgaaccttgtggaacacgataaggagttcttccacccaagataccatcaccgcgagttcagattcgacctgtccaaaattccagaaggggaagcggtgactgcggcagagtttcggatctacaaagattacatccgcgaacgcttcgacaatgagactttccggatctccgtctaccaggtccttcaggaacacctggggagagagtcagatttgttcctgctcgattcacggacgctctgggcctcggaagaaggatggctggttttcgatatcactgccacgtccaaccattgggtggtgaacccgagacacaatctgggattgcaattgagtgtcgagacgctggatggtcaatcgattaacccgaagctggcaggcctgatcggacgccatggtccgcagaataagcaaccgttcatggttgcttttttcaaggccaccgaagtacatttccgttcaattcggtcaaccgggagcaagcagcgcagccaaaatcggtctaagaccccgaagaatcaagaagctctgcgcatggctaacgtcgctgaaaatagctcttcggaccagcgccaggcttgcaagaaacacgagctgtatgtgtcatttcgcgaccttggatggcaggactggatcatcgccccagaaggatacgccgcgtactactgcgagggagagtgcgccttcccactgaatagctacatgaatgctaccaaccacgcaatcgtgcaaactctcgtccatttcatcaacccagaaaccgtacccaagccgtgttgtgcccctacccagcttaacgctatctccgtgctgtactttgacgactcgtcaaacgtcattctcaagaaatacagaaacatggtcgtgagagcctgcggatgccac

SEQ ID NO: 7975 - DNA, 1293 bp, synthetic construct
  misc_feature 1..1293: note = source = /note="Description of Artificial Sequence: Synthetic coding sequence"
  source 1..1293: mol_type = other DNA
atgcatgtgcgctctctgcgggcagcggccccacattccttcgtggcgctttgggcacctctgtttctgctccgatctgctctggcagactttagtctcgacaacgaagtccactcttctttcattcaccgacggctgcgctcccaggaaaggcgggagatgcagagagaaatcctctctattctgggcttgcctcataggccgagacctcacctgcagggaaagcacaactccgcacctatgtttatgctggacttgtataacgcaatggccgtggaggaaggcggtgggccaggtggccagggttttagttatccgtacaaagccgttttcagcactcagggcccccctctggcttccctgcaggacagccactttctgactgacgctgacatggtcatgtcatttgtgaatctggtggaacacgataaggagttttttcatcctagataccatcatcgcgagtttaggttcgatctctcaaagatccccgaaggcgaggccgtcaccgcagctgagttccggatctataaagactacattcgggagcggttcgataacgaaacattccggattagtgtttatcaggtacttcaggagcacctcggccgagagagcgacctgttccttctggatagccgcaccttgtgggcaagcgaagagggttggctcgtgtttgatattaccgcaacttctaaccattgggtggtgaatccaagacacaatctgggtctgcaactgtcagttgagacgctggatggacagagtattaaccctaaactggccggtttgatcggcaggcatgggccccagaataagcagcctttcatggtggcgttctttaaggctacggaagtgcacttccgatcaattagaagcaccggtagtaaacagcgctcccagaatcgctcaaagacccccaaaaatcaggaggcactgcgcatggccaatgtggccgagaacagctcatctgatcagcggcaggcatgtaaaaagcacgaattgtatgtatctttccgagatctcgggtggcaggactggattatagcacccgaaggttacgcagcgtactactgcgaaggcgagtgtgcctttccactgaatagttacatgaacgccactaatcacgccatcgttcagactctggtccatttcataaatcctgaaaccgtgcccaaaccctgttgcgccccaacacaactcaacgctatttccgtgttgtactttgacgactcctctaatgtcatcctgaagaagtatcgaaacatggtcgtgcgggcctgtggatgccat

SEQ ID NO: 7976 - DNA, 1293 bp, synthetic construct
  misc_feature 1..1293: note = source = /note="Description of Artificial Sequence: Synthetic coding sequence"
  source 1..1293: mol_type = other DNA
atgcacgttaggtccctgagagccgctgcgccacatagttttgttgcattgtgggcacctctgttcctccttaggtcggctttagcagatttctcccttgacaacgaagtccatagtagtttcatccatcgtcgtctacgctcccaggaacgtagggaaatgcagagggagattctttcaattttgggactaccgcatcggccacgcccgcatttgcagggcaaacacaactctgcgcctatgttcatgttggacctgtacaacgcaatggctgtggaggagggtggcggaccgggcggacagggcttttcatacccctacaaggcggttttctccacccaaggccctccattagcatcactgcaagactcccatttcttgaccgatgccgacatggtcatgtcgtttgtaaacctggtggagcatgataaagaattctttcacccacggtaccatcaccgtgagttccgcttcgacctctcaaagattcctgaaggagaggccgtgacagcagcagagtttcgtatttataaagactacatccgggagcgtttcgacaatgaaacgtttagaatctctgtttatcaggttcttcaggagcatctaggtcgggaaagcgatctctttctgttggactcgcgcactctgtgggctagtgaggaaggctggttggtcttcgatatcactgccacttcaaatcactgggtggtcaatccgcgccacaacctcggactccaattgtccgtggagacgctcgacggtcagtccatcaaccctaaactggcaggcttgataggccgccacggaccccagaataagcaaccattcatggttgctttctttaaggccacggaggtacactttcggtctatccgctccaccggatcgaagcagcggagccagaatcgttccaagacccccaagaaccaggaagcgttacgcatggccaatgtcgcagaaaactcatcgagtgatcaacgccaagcgtgtaaaaaacacgaactctacgtatcttttcgggatttgggttggcaggactggatcatcgcaccggagggatacgctgcatactactgtgagggggaatgcgcattccctctcaattcttacatgaatgccactaaccacgctatcgttcaaactttagtgcacttcataaacccggaaacagtccccaaaccgtgctgcgctcccacccagttaaatgctatttccgtcctgtattttgacgatagtagcaatgtcattttaaaaaaataccggaatatggttgtccgcgcatgtgggtgtcac

SEQ ID NO: 7977 - DNA, 1293 bp, synthetic construct
  misc_feature 1..1293: note = source = /note="Description of Artificial Sequence: Synthetic coding sequence"
  source 1..1293: mol_type = other DNA
atgcatgtgcgctcattgcgcgccgccgcaccacactcatttgtcgctctgtgggccccacttttcttgctgagatctgctttggctgatttcagcttagacaacgaagttcatagcagctttattcaccgcagactgaggagtcaggagagacgcgagatgcagcgcgagattctgagcattctgggactgccacaccgcccaagaccccaccttcagggcaagcataactcagcaccaatgtttatgctggatctttataatgcaatggccgtcgaggaaggcggtggcccaggcggccagggattttcctatccctacaaggcggttttcagtacccagggacctcccttggcttctctgcaggacagccattttctgacagacgccgacatggtaatgtctttcgttaatctggttgagcacgataaagagttctttcacccacgctaccatcaccgcgagttcaggttcgacctgtcaaagatccctgagggtgaggctgtgaccgcggccgagttcagaatctacaaggattatatacgcgagaggtttgataacgagacgtttcgcatctctgtgtatcaggtcttacaggagcacctaggccgggagtctgatctctttctgcttgattcacgtacactctgggcttctgaagaggggtggctggtcttcgacattaccgcaacctctaaccattgggtggtcaaccctcggcacaacctggggttgcagctaagcgttgaaactctggatggacagagtatcaatccaaagttggcgggccttataggccgccacggccctcagaacaaacagcctttcatggtagcttttttcaaggctactgaggtgcactttaggtctattagaagcactggctctaaacagcgtagccagaatcggagcaagacccccaaaaatcaggaggctctgaggatggcaaacgtggccgaaaacagcagcagcgaccagagacaggcctgcaaaaaacacgagttatatgtgtcctttagagacctgggttggcaggactggataatcgcgccagagggctatgcggcctattattgtgaaggagagtgtgcatttcctctcaattcctacatgaacgccactaaccatgccatagtgcaaacactcgttcatttcattaaccccgagaccgtgccaaagccctgctgcgctccaacccagctaaatgctatttcggttttatattttgacgacagttccaatgtgatcctcaaaaaataccggaatatggtagttcgagcctgcggctgccac

SEQ ID NO: 7978 - DNA, 1293 bp, synthetic construct
  misc_feature 1..1293: note = source = /note="Description of Artificial Sequence: Synthetic coding sequence"
  source 1..1293: mol_type = other DNA
atgcacgtaagaagtctcagagccgccgcaccacactcattcgtggccttatgggccccacttttccttctgcgctccgcactcgccgatttcagcttggacaatgaggtccacagctcgttcattcatcgacggctccgtagtcaggaacgccgcgaaatgcagcgcgaaattctctctatactgggccttccgcaccgtccccgacctcacctacagggcaaacacaacagcgctcccatgtttatgctcgacctatataatgccatggcagtcgaggagggaggcggccctggtggacagggtttctcttatccttacaaagcagttttttctacacagggaccacccctcgcatcactgcaggattcacactttctgactgacgcagacatggtcatgagtttcgtgaatttggtggagcacgacaaggagtttttccacccgcgttaccatcatcgcgagttcagattcgacctgtccaaaattccggagggagaggctgtcaccgccgcagaattccggatctataaagattatatccgagaaaggttcgataatgagaccttccgcatctctgtttaccaggtgctccaggagcacctcgggcgagagtctgacctctttctcttagatagcagaacactctgggcatcggaggaggggtggctggtgtttgatatcactgcgacaagtaaccattgggtcgtgaaccctaggcacaaccttgggcttcagctgtctgtggagaccctggatggacagagcatcaacccaaaacttgccggcctgattggtaggcacggtcctcaaaataagcaaccctttatggtagcattcttcaaggcgacggaagtgcattttcgatccatcaggagtacaggatctaaacagaggagtcagaaccggtcgaagacaccaaaaaaccaggaggctctgcgaatggcgaatgtagccgagaacagcagctccgaccagcgtcaggcatgcaaaaaacacgagctgtacgtaagcttcagggatcttggctggcaggattggattattgcaccagagggctacgctgcttattattgcgaaggcgaatgtgcattccctcttaatagctacatgaatgccacaaaccacgccatcgtgcaaacccttgtgcattttataaatcccgagaccgtgcctaaaccttgctgtgcccctacccagctgaatgcaatctctgtgctgtactttgacgattcatctaatgttattttaaaaaagtacagaaacatggtggtccgcgcttgcgggtgtcat

SEQ ID NO: 7979 - DNA, 1293 bp, synthetic construct
  misc_feature 1..1293: note = source = /note="Description of Artificial Sequence: Synthetic coding sequence"
  source 1..1293: mol_type = other DNA
atgcatgtgagatcgttgagggctgcagcgcctcattccttcgtggcactctgggcgccactgttcctgttgcgtagcgcgcttgcagatttttcgctcgataatgaggtccattcctcattcatacacaggcgtctccgctcccaagagcgcagagagatgcaacgcgaaattcttagcatcctggggcttccacatcgccccagacctcatctccaggggaagcacaactcagcacctatgtttatgctcgacctctataacgcgatggcggtggaagaaggagggggacctggtggacaaggattttcgtacccttacaaggcggtcttttcaacgcaaggacctccacttgcgtcgcttcaggactcccactttctcactgatgccgacatggtgatgtcgttcgtgaatctcgtggagcatgataaggaattcttccatccccgctaccatcatagagagtttagattcgatcttagcaagatcccagagggagaagcggtgacggccgccgaatttaggatttacaaagactacatcagagaacggttcgataacgagacgtttagaatatccgtgtaccaagtgctgcaggaacatttgggtcgggaatcagatctttttctgctggattcgagaactctttgggcttccgaggaaggatggctggtgtttgatattaccgccacttccaaccactgggtggtgaacccacgtcataatcttggtctgcagctgtcggttgaaaccctggatgggcagtcaatcaatcccaaactggcgggacttataggccggcacggaccacaaaacaagcagccatttatggtggcattctttaaggccactgaagtgcattttaggagcattcgcagcaccggtagcaagcaaagaagccagaaccgatccaaaacccctaagaaccaagaagctctcagaatggccaatgtcgcagagaactcctcatcagatcagcgacaggcttgtaagaagcacgaactgtacgtgtccttccgggacctgggctggcaggactggattatcgccccagaaggctacgcagcgtactactgtgagggagaatgtgcatttccactcaacagctacatgaacgccaccaaccatgctattgtgcaaaccctcgtccacttcataaatccggaaaccgtgccaaagccctgttgtgcacctactcagctgaacgcgattagcgtcctgtactttgatgactcctctaacgtgatcttgaagaaataccgaaacatggtagtccgcgcatgtggatgtcat

SEQ ID NO: 7980 - DNA, 1293 bp, synthetic construct
  misc_feature 1..1293: note = source = /note="Description of Artificial Sequence: Synthetic coding sequence"
  source 1..1293: mol_type = other DNA
atgcacgttcgctccctccgagccgctgcccctcactccttcgttgctctctgggctcccctttttctgttaaggtctgccctcgctgatttcagcctggataatgaagttcacagctccttcatccacaggcggcttcgatcacaagaacggagggaaatgcaacgagaaatcctctctatcctcggtttgccacacaggccccggccacacctgcagggaaagcacaacagtgcaccaatgtttatgctggacttgtataatgccatggctgtggaagagggaggtgggccaggaggacagggattcagttatccctataaggcagtgttctctacccagggacctcctctagcatccctgcaagactctcactttctgacagacgccgacatggtaatgtcttttgttaacttagtcgaacacgataaggaatttttccaccctcgttaccatcacagggagttcaggtttgatttgagcaagattcccgaaggagaggcagtcacggctgcagagtttcggatttataaggattacatacgcgagagattcgacaacgagacatttcggatcagtgtttaccaggtgctccaggagcatctaggccgagagtcagatttgttccttctggacagccggaccttgtgggcctctgaggaaggatggctcgtcttcgatatcacagcaacctccaaccattgggtggtgaacccccgccacaacttaggattgcagctcagcgtggagactctggacggtcagtccattaaccctaaactcgctgggctgattggccggcacggacctcagaataagcagccgtttatggtcgcgtttttcaaagcaactgaggtgcactttaggtctatccgttcaacaggcagtaagcagcggtcacagaatcgatccaagacacctaagaaccaggaggccctgagaatggccaacgtagcggaaaactcatcctcggaccagcgacaagcatgcaagaaacacgaactatatgtatcgtttagagacctgggatggcaggactggattattgctcccgagggctacgcagcctactattgtgaaggggaatgcgctttccctctcaattcctacatgaatgctactaaccatgcgatcgtgcagacactggtccatttcatcaatccagagaccgtccccaaaccttgttgcgcccctacacagttgaacgcaatctctgttctatactttgatgatagttcgaatgtaattctgaagaagtacaggaacatggtagtgcgggcctgcggctgtcac

SEQ ID NO: 7981 - DNA, 1293 bp, synthetic construct
  misc_feature 1..1293: note = source = /note="Description of Artificial Sequence: Synthetic coding sequence"
  source 1..1293: mol_type = other DNA
atgcatgtccgttccttgcgtgccgcagcccctcatagtttcgtggctctgtgggctcctctattcctcctcaggtccgctcttgccgacttttctctggacaacgaagtgcacagctctttcatccaccgccgcctgaggtcacaggaacgaagggaaatgcagcgcgagattctttctatacttggattgccccatagacccaggccacatctgcaagggaaacacaactctgccccaatgtttatgctagacctgtacaatgctatggctgtagaagaaggaggaggccccggaggacagggctttagctatccctataaagccgtcttctctacacaggggccccccttggcttcactgcaggactcgcattttcttactgacgccgacatggttatgtccttcgtgaacctggtggagcacgataaagagtttttccaccccaggtaccatcaccgcgaatttagattcgatctgtctaaaatcccagagggagaagccgtaaccgctgccgaattccggatatacaaggattacattagagagcgttttgacaatgaaacatttaggattagtgtctaccaggttctccaggagcacctggggcgcgagagcgacttgttcctgctggactcccggacgctgtgggctagtgaggaaggatggctggttttcgacattaccgccacctctaaccattgggtggtgaatccccggcacaacttgggcctgcagctgagtgtggagaccctggatggtcagagcattaaccccaagctggctggcctcatcggccgccacggccctcaaaacaaacagcccttcatggtagctttttttaaagctaccgaagtgcatttccgaagcataaggagtacgggctctaagcagagaagtcaaaatcggtctaagacacctaagaaccaggaggcactgaggatggccaatgttgctgagaactcgagcagcgatcagcgccaggcatgtaagaaacacgagctgtacgtgagttttcgagatctaggttggcaggattggatcatcgctcccgaaggctatgcagcctattactgtgaaggcgagtgtgcatttccactcaattcatatatgaacgcaacgaaccatgctatcgtacaaacccttgtgcacttcattaacccagagaccgtacccaagccctgctgcgctccaacccagctgaacgccatctccgtcctatattttgatgactcttcaaacgttatcttgaaaaaatacagaaatatggttgtgcgggcctgcggctgccat

SEQ ID NO: 7982 - DNA, 1293 bp, synthetic construct
  misc_feature 1..1293: note = source = /note="Description of Artificial Sequence: Synthetic coding sequence"
  source 1..1293: mol_type = other DNA
atgcacgtgcggtccctgcgcgctgccgccccgcactcgttcgtcgccctttgggcacctctctttctgttgcggtcggcgctggcagacttctcattggataacgaggtgcacagctcttttatccaccggcgcctgcggagccaggagcgacgggaaatgcagcgggaaatcctgagcatcctgggcctgcctcaccgtcctagaccccatctccaaggaaagcataattcagcacctatgttcatgttggatctctacaatgctatggcggttgaggaaggagggggtcctggcggtcaggggttctcgtacccctacaaggccgttttctccactcaggggccgccgctcgccagtctgcaggactcacacttcctcaccgacgccgacatggtgatgtccttcgtcaacctggtggagcatgacaaggagtttttccatccacgctaccatcatcgggaattccgctttgatctcagcaaaataccagagggagaagccgtcacggcggccgagttcaggatttacaaggactacattcgcgaacgcttcgataacgaaaccttcaggatcagcgtgtaccaggtgctgcaagaacaccttgggcgcgaaagtgacctgttcctgctcgactcccggaccctctgggcatcggaagaggggtggctggtgttcgacataactgcaacttctaatcactgggtcgtgaacccccggcacaatctgggactccagctgtcggtggagacgttggacggccagtcgattaatccaaaactggccggactcatcggacgccatggaccacagaataaacagccgttcatggtcgcgttctttaaagcgactgaagtgcactttaggagcatcagatcaactggtagcaagcagaggtcgcaaaataggtcgaaaaccccgaagaaccaggaggcccttcggatggcaaacgtggcggagaacagcagtagcgatcaacgacaggcctgcaagaagcatgaactgtacgtgtcgttccgggatcttggatggcaagattggatcattgccccggaaggatacgccgcctactactgcgagggagaatgcgcgttcccgttgaactcctatatgaacgcaactaaccacgccattgtccagaccctggtccacttcatcaacccggaaactgtgccgaagccgtgttgcgctccgacccagctgaacgcaatctcggtgctctactttgacgactcatccaacgtcatcctcaagaagtatagaaatatggtggtgcgcgcatgcggctgccat

SEQ ID NO: 7983 - DNA, 1293 bp, synthetic construct
  misc_feature 1..1293: note = source = /note="Description of Artificial Sequence: Synthetic coding sequence"
  source 1..1293: mol_type = other DNA
atgcacgtcagatccctgagggctgccgctcctcacagcttcgtggcgctgtgggcacctctgtttctcctaagatctgccctggcagacttcagtctggacaatgaggtccacagttcttttatccatcgtcggctccgctcacaagagaggcgggagatgcagagggaaatcctatccatcttgggacttcctcatcggccaagaccacacctccagggcaagcacaacagtgctcctatgttcatgcttgatttgtacaacgctatggccgttgaggaaggcggaggccccggaggtcagggattctcatacccctataaggcagtgtttagcacgcagggcccaccgctcgcctcccttcaggactcccactttctcacagatgctgacatggtgatgagcttcgtaaatctagttgagcatgacaaagagttcttccacccacgctaccaccacagggaattcagatttgacctgtcaaagattcctgagggggaagcagtgactgctgcagagtttcgaatttataaggactatatcagagaacgttttgataatgaaacctttagaatctccgtgtaccaagtgctgcaggagcatctggggcgcgagtccgatctctttctcctcgatagtcggacgctatgggccagtgaggaaggatggcttgtatttgatatcactgcgacgagcaatcactgggtggttaacccgcgccacaatctaggcttacagctgagtgtagagaccctggacggacagagtattaatccgaagctcgcaggcctgataggaagacatggcccgcagaacaagcaacctttcatggtcgcgtttttcaaggccaccgaggtgcacttcagatctatccggtcgacaggatccaaacagaggtcacaaaacaggtccaaaaccccaaaaaaccaggaagccctgcgtatggccaacgttgcggaaaactcgtcctctgaccagcgccaggcttgcaagaaacacgagctgtacgtgagtttcagagacctcggatggcaggactggattattgcgccagagggatatgccgcatattattgcgaaggggagtgtgcttttcccctgaactcgtacatgaacgccacgaatcacgcgattgtccagacactcgttcatttcattaaccccgagaccgtgcccaagccttgctgcgcccctacgcagttaaatgctatttccgtgctgtattttgacgatagtagcaacgtgattctcaaaaagtacagaaacatggtggtccgcgcttgtggatgtcac

SEQ ID NO: 7984 - DNA, 1293 bp, synthetic construct
  misc_feature 1..1293: note = source = /note="Description of Artificial Sequence: Synthetic coding sequence"
  source 1..1293: mol_type = other DNA
atgcacgtccgatctttgagggccgctgccccccactccttcgtggctctgtgggccccactgttcctgttgcgcagcgccctagcggacttcagtttggacaacgaagtccacagctccttcattcacaggcgacttcggagtcaagagcgtcgcgagatgcagcgggaaatcctgtcaatcctgggcttgccacacaggccacgacctcatctgcaaggcaaacataactctgccccaatgtttatgcttgatctgtacaacgcaatggccgtggaagaggggggtgggcctggcggccaggggtttagctatccctacaaggcagtcttctccacacaggggccacctctggcttcccttcaggacagccattttctgaccgatgctgatatggttatgagttttgtgaatctggtggagcacgacaaggagtttttccatccacggtaccatcacagggaatttcggtttgacctcagcaaaattcccgaaggtgaggccgtaacagcggctgagttccgcatttacaaggactacatcagagaacgatttgacaatgaaaccttcaggatttccgtgtatcaagtcctccaagaacacctcggacgagaatccgacctcttcctgctggattcaaggacactttgggctagcgaagagggctggcttgtgttcgacattactgccacgtccaaccattgggtggttaaccctcggcacaaccttgggcttcagctaagcgtggaaactctggatgggcagagcatcaatcccaagttggctggcctgatcggcaggcatggcccccagaataagcaaccttttatggtagcttttttcaaagccaccgaagtccactttcgttccattcgaagcaccggcagtaagcagagaagccagaatcgatctaagactcctaagaatcaggaggccctgagaatggccaatgtggctgagaactcgagcagcgatcaacgccaagcctgtaaaaaacacgagctatatgtcagctttcgagacctggggtggcaggattggatcattgcaccagagggttatgctgcttactactgcgaaggtgaatgtgcctttccactcaactcctacatgaatgcaaccaatcacgcgattgtccagacactcgtgcattttattaatcctgaaacggtgcccaagccctgctgcgcccccacacagcttaacgcgattagtgttttgtactttgacgacagtagcaatgtaatcctcaaaaagtatcggaacatggtggtgcgcgcctgtgggtgccac

SEQ ID NO: 7985 - DNA, 1293 bp, synthetic construct
  misc_feature 1..1293: note = source = /note="Description of Artificial Sequence: Synthetic coding sequence"
  source 1..1293: mol_type = other DNA
atgcatgtgcgttctctccgggcagcggctcctcattcattcgtggcactgtgggcccccttgttcctgctgcggtccgctctggctgatttctcactggacaacgaggtgcactcgtcgttcattcatcggcgcctgaggagccaagagcgccgagagatgcagagggaaattctttctatcctgggccttccacaccgccccagacctcacctccaggggaagcataattcagccccgatgtttatgcttgacctctacaacgcgatggcggtggaggagggcgggggcccgggaggacaaggtttcagttacccatacaaggccgtcttttccacccaggggccaccgctcgcatccttgcaggattcacacttcctgactgacgccgatatggtgatgtccttcgtcaatctcgtcgaacatgataaagagttttttcaccccaggtaccaccacagggaatttcggttcgatctctcaaagattccggagggagaagccgtgacggcagccgaattccggatctacaaggattacatccgggagcggtttgacaatgaaactttccggatttcggtgtaccaggtccttcaagaacatctgggccgggaatccgacctgttcttgctcgacagccgcactctgtgggcatccgaggagggatggcttgtgttcgacatcaccgctacctcgaaccactgggtggtgaaccccaggcacaatctgggcctccaactctcggttgaaaccctggatggacagtcaatcaacccgaaactggctggactgatcggcagacacgggccgcagaacaaacagccgttcatggtggcatttttcaaggcaaccgaggtgcatttcagatccatcaggagcactggatccaagcaacgctcgcagaatcggtccaagactcctaaaaaccaggaggcgcttcgcatggctaacgtggcggaaaattcatcctcagatcagcggcaagcgtgcaagaagcacgagctctacgtctccttccgggatctcggatggcaggactggatcatcgcaccagaggggtacgccgcctactattgcgagggagagtgcgcatttcccctgaactcctacatgaatgcgactaaccatgccattgtccagaccttggtccacttcatcaatccggaaactgtccccaagccttgttgcgcgccgacccagctgaacgcaatctccgtgctctacttcgacgattcaagcaacgtcattctcaagaaatatcgcaatatggtggtgagggcatgcggctgccat

SEQ ID NO: 7986 - DNA, 1293 bp, synthetic construct
  misc_feature 1..1293: note = source = /note="Description of Artificial Sequence: Synthetic coding sequence"
  source 1..1293: mol_type = other DNA
atgcatgtccggtctttgagggctgctgcccctcattcgtttgtcgcactctgggcccctcttttcctgctgcgctcagcacttgctgatttctccctggacaacgaagtgcattcgagctttattcatcgtagactcagatcgcaggagagaagagagatgcagagagaaatcctgtccattctgggactgccacatagacctagaccacaccttcaaggcaaacataattcagcaccgatgtttatgcttgacctttacaatgccatggccgtggaagaagggggaggtcctggggggcaaggattttcgtacccttacaaggctgtgttttcgactcagggccctcccctcgcatcacttcaggactcccatttccttaccgacgccgacatggtcatgtcctttgtgaacctggtggaacatgataaggaattctttcatccccggtaccatcatagagaatttcggttcgatttgtccaaaatacctgagggagaagctgtgaccgctgcagagttcaggatctacaaagattacatacgagagcgtttcgataacgaaacttttcgcattagcgtgtaccaggtgctgcaagaacatctgggaagagagtccgatctgtttctgctggacagcagaactctttgggcatcagaggagggctggcttgtctttgatattactgctacttcgaaccattgggtggtgaatccacgtcacaacctgggtttgcagctgagcgtggaaaccctggatggacagtccatcaacccaaagctcgcaggcctgatagggagacatggaccccagaacaagcagccatttatggtggcattctttaaagcaacggaagtgcactttcgatctattcggagcaccggcagcaagcagcgctcccaaaaccgctcaaagacgcccaagaaccaagaagcactcagaatggccaatgtcgcagagaactcgtcgagcgaccagcgtcaagcatgtaaaaagcacgagctctacgtgtcatttcgcgatctcggatggcaggattggataattgctcctgaaggatacgcagcttattactgtgaaggagaatgcgcctttccgttgaattcgtacatgaatgcaactaatcatgcaattgtgcagactcttgtgcactttatcaacccagagactgtccctaagccatgttgtgcgcctacccagctgaacgctatctccgtcctttactttgatgatagcagcaacgtcattcttaagaagtaccgtaacatggtcgtccgggcatgcggttgccac

SEQ ID NO: 7987 - DNA, 1293 bp, synthetic construct
  misc_feature 1..1293: note = source = /note="Description of Artificial Sequence: Synthetic coding sequence"
  source 1..1293: mol_type = other DNA
atgcatgtgaggtcactgagggcggccgcgcctcatagctttgtggctctgtgggcacccctgtttttgctccgcagcgcgcttgctgacttttccctggataatgaggtgcacagctccttcattcacaggaggcttcggagccaggagcgccgcgagatgcaaagggaaatcttgtcaattctcggccttccccatcgcccaaggccacatttacagggaaagcataacagcgcccccatgttcatgctcgatctgtataacgccatggctgtcgaggaaggtgggggacccggtggacaaggcttcagttacccatacaaagccgtattcagcacccaggggcctccactggctagcctccaggacagccattttctgactgacgcagacatggtgatgtccttcgtgaaccttgtggagcacgacaaagagttctttcaccctcgatatcaccatagagagttccgcttcgacctgtctaagattccagagggagaagctgtgacagccgccgaattccgaatttacaaggattacattcgagaaaggttcgacaacgagacattccgcatctctgtgtatcaggtgttgcaggagcatctggggcgggagtcagacctctttctgctggattcccgtactctttgggccagtgaggagggatggttagtgttcgatataactgccacatctaatcactgggtggtcaacccccggcataatctgggtctacagctcagtgtggaaactctggacggacaaagtatcaaccctaagctggccggacttatcgggcgccatggcccccagaacaagcagcccttcatggtggcgtttttcaaggcgacagaagtgcatttccgaagcatccgatctaccggttccaaacaaaggagccagaatcggagtaaaaccccgaagaaccaagaagctttgcgaatggcgaacgtggccgagaacagcagttccgaccaaagacaggcctgcaaaaagcacgagctgtacgtgtcatttcgtgacctgggatggcaggattggatcatcgcaccagaaggatatgccgcctattactgtgagggagaatgcgcttttccactgaactcatatatgaacgccactaaccatgcgattgtgcagacactcgtacatttcatcaatcctgaaacagttcccaagccttgttgtgcacccacccaattaaacgccatctccgtcctgtacttcgacgacagctcaaacgtgattctgaagaagtataggaacatggtggtgagagcttgtggttgtcac

SEQ ID NO: 7988 - DNA, 1293 bp, synthetic construct
  misc_feature 1..1293: note = source = /note="Description of Artificial Sequence: Synthetic coding sequence"
  source 1..1293: mol_type = other DNA
atgcacgttaggtccctcagggccgccgcgccacatagtttcgtggccctctgggcacccctcttcctgctgcggtcagcgctagctgatttttctctcgacaacgaagtccatagctcctttatccaccgacggctccgctcacaggaacgccgggagatgcagcgggagattcttagtatccttggcctgccacaccggcccagaccacacttgcagggtaagcataacagcgcacctatgttcatgcttgacctgtacaatgcgatggccgttgaggaaggagggggaccaggcggccaggggtttagctacccatacaaagccgttttctctacgcagggaccacccctggcttccttgcaagactcacattttctcaccgacgcagatatggtgatgagctttgtgaaccttgtcgaacatgataaagaattttttcaccccaggtaccatcaccgggagttccgcttcgacctgagcaagattcccgaaggagaggctgtcaccgccgcggagtttcgcatctacaaggactacattagggagaggttcgataacgaaacatttagaatctccgtctatcaggttctgcaggaacacttagggagggagagtgacctgttccttctcgatagtagaactctgtgggccagcgaggaaggctggttagtgttcgatattacagccacatccaatcattgggtcgttaacccacgccacaatctgggtctgcagctctctgtggaaaccctggacggccagagcatcaaccctaaactcgctggattgattgggagacacggaccacagaataaacagccttttatggtggccttttttaaagcaactgaagtccacttccgctcaatacggagtaccggatcaaagcagagaagtcagaaccggtctaaaacgcccaagaaccaggaggcactccgaatggctaatgttgctgagaatagcagtagtgaccaacgccaagcctgcaagaaacacgagctctacgtttccttccgggatctgggttggcaggattggatcattgcacctgagggatacgcggcctactactgcgagggggagtgcgcttttccccttaattcatatatgaacgcgaccaatcatgccattgtccagacactcgttcattttattaaccccgagacagtcccaaaaccctgctgcgctcccacccagctgaacgctatctctgtcttgtactttgatgacagctctaatgtgatactgaaaaagtatcgcaatatggtcgttagagcatgtggctgtcac

SEQ ID NO: 7989 - DNA, 1293 bp, synthetic construct
  misc_feature 1..1293: note = source = /note="Description of Artificial Sequence: Synthetic coding sequence"
  source 1..1293: mol_type = other DNA
atgcacgtgaggtcactgagagcagcagctccccactcatttgtggcactttgggcgccattgtttctgttgcgtagcgcccttgcagatttcagccttgataacgaagtgcattcctcgtttatccatcgtcggctgagatcacaagaaagacgagaaatgcagcgggaaattctttcgattctcggtctgccgcaccgccctagacctcatcttcaaggtaagcataactcggcccctatgtttatgttggatctgtacaatgcgatggccgtcgaggaagggggtggtccgggagggcagggcttttcctacccgtataaggccgtcttttctacccaagggccaccactcgcgtcccttcaagattcgcactttcttacggatgcagacatggtcatgtcgttcgtgaacctcgtggaacatgacaaggagttttttcatcctcgctaccatcatcgcgagttccgatttgatctgtccaaaataccggagggagaagcggtgaccgcagcagagtttcggatctacaaagactacatacgtgaaagatttgacaacgaaaccttcagaatctccgtctaccaggtgctgcaagaacacctcggacgcgaatctgatctttttctcctcgattctcggactctgtgggcttccgaagaagggtggctcgtgttcgacatcacggcaacctcaaatcactgggtggtgaatccccggcacaatctgggactgcagctgtcggtcgaaacgctcgatgggcagtcaatcaatcctaagctggccggcctgataggtcgtcatggacctcaaaacaagcagccatttatggtggcattctttaaggcaactgaagtgcatttcagaagcattagatccaccggaagcaaacaacggtcgcaaaaccgatccaagactccgaaaaatcaggaggctcttcggatggccaacgtggcagaaaactcatcgtcagatcaacgccaggcgtgtaagaagcatgaactttacgtgtccttccgagatctgggttggcaagactggattatcgcaccggagggctatgcagcctactactgcgaaggagagtgtgcttttcctcttaatagctacatgaacgcaaccaatcacgctatagtccagactttggtgcatttcatcaaccccgaaacggtgccaaagccctgttgcgcacctactcaactcaatgccatttcagtcctgtactttgatgattcatccaacgtcattctgaagaagtacaggaacatggtggtcagagcttgtggctgccac

SEQ ID NO: 7990 - DNA, 1293 bp, synthetic construct
  misc_feature 1..1293: note = source = /note="Description of Artificial Sequence: Synthetic coding sequence"
  source 1..1293: mol_type = other DNA
atgcacgtgcgctcactccgggccgccgccccgcacagcttcgtggcgttgtgggctccactgttcctgctgcgcagtgcgctggctgatttctccctggataacgaggtccactccagcttcattcacagacgcctccggagccaggaacgccgcgagatgcaacgcgagatcctgtccatccttggactgccacatcggccgcgcccgcatttgcaggggaaacacaatagcgctcccatgttcatgctggacctctacaacgcgatggccgtcgaggaaggaggaggacctggaggtcagggattttcctacccatacaaggccgtgttctcgacccagggtccgccactcgcgtccctgcaggattcacacttcctgaccgatgcggatatggtgatgtcttttgtcaacctggtggaacatgacaaggaattcttccacccacgctaccatcacagagaattccggttcgacctctccaagatcccagaaggcgaagccgtgactgccgctgaatttagaatctacaaggactatatccgagaaaggttcgacaacgagacgtttcgcatctcggtctaccaggtccttcaggagcacctggggcgcgagtccgacctcttcctgcttgactcacgtactctgtgggcatcggaggaaggatggctggtctttgacatcactgccaccagcaatcactgggtggtcaacccgcggcacaatcttggattgcaattgtcagtggaaaccctcgacggacaatccatcaaccctaagttggccggtctgatcgggagacatggcccgcagaataagcaaccttttatggtggcatttttcaaagcaactgaagttcacttccggtcgattagatcgactggcagcaagcaaaggtcacagaacagatccaagacccccaagaatcaggaagcactgcggatggccaacgtcgcagagaacagctcatcggaccagaggcaggcttgcaaaaaacatgaactctacgtgtcattccgggatctcggatggcaagattggatcatcgcgccggagggctacgctgcctactattgcgaaggcgagtgtgccttcccgctcaactcgtacatgaatgcgaccaaccacgcaatcgtgcaaactctcgtgcatttcatcaatcctgagacggtgccgaagccttgttgcgcccccacccagctgaacgcaatatcggtgctgtacttcgatgactcgagcaacgttattctgaagaaatacaggaatatggtggtgcgggcgtgcggctgccat

SEQ ID NO: 7991 - DNA, 1293 bp, synthetic construct
  misc_feature 1..1293: note = source = /note="Description of Artificial Sequence: Synthetic coding sequence"
  source 1..1293: mol_type = other DNA
atgcatgtgcggagtctacgagctgcagcccctcactccttcgtggcattatgggcccccctgttcctgctcaggagtgctcttgcggatttctcgcttgataatgaggtgcattcctcttttatccacagacggctcaggagtcaggaaagacgggaaatgcagagagaaatcctctcaatactcgggcttccgcataggcctcggcctcatctccagggaaaacataattccgccccaatgttcatgttagatctttacaacgctatggccgtcgaagaagggggagggcctggaggacagggattctcctatccctataaagccgttttcagtactcaggggccccccctcgcctctctgcaggactcgcatttcctaactgatgctgatatggtgatgagtttcgtgaatctggttgaacacgataaagaattctttcatccaaggtaccatcaccgcgaattcaggttcgatttatcaaaaatccctgagggagaggcagttacagccgctgagttcaggatctacaaggattacataagggaaaggtttgacaatgaaacgtttcgcatttccgtgtatcaggttctccaggaacatcttggacgggagtcagatctctttttacttgacagtaggactctatgggcatctgaagaagggtggctagtcttcgatataacggcaacatctaatcactgggtagtgaatcctcggcacaacctggggctccagctctctgtagagacattagatgggcagtctataaatcctaaattagccggactgataggaaggcacgggcctcagaacaaacagcctttcatggtcgcatttttcaaagcaactgaagttcactttagatctatcagatcaacagggtccaaacagaggtcccagaaccggtccaagacacctaagaatcaggaggccctgcgcatggccaatgttgcagagaattcctctagtgatcagcgacaggcatgcaaaaaacacgaactctatgtttcctttcgcgacttagggtggcaagactggatcatcgcccctgaaggatacgccgcctattattgtgagggggaatgtgcctttcctctcaattcgtatatgaacgcgactaaccacgccatcgtgcagacactcgtgcactttattaacccagaaactgttcccaaaccctgctgcgcacccacacagctcaacgccatctcggtactctatttcgatgattcctccaacgtgatactgaaaaaatataggaacatggtcgtcagggcatgcgggtgtcac

SEQ ID NO: 7992 - DNA, 1293 bp, synthetic construct
  misc_feature 1..1293: note = source = /note="Description of Artificial Sequence: Synthetic coding sequence"
  source 1..1293: mol_type = other DNA
atgcacgtgaggtctttgcgggccgccgctccacacagcttcgtggcactttgggcacctctgttcctgctccggtcggccctggcggacttttcattggacaatgaggtgcacagctcgttcatccacagacgcctcagaagccaggaacggagagaaatgcagcgggaaatcctctctatcctgggactcccgcatcggccgcgcccccatctccaggggaagcataacagcgccccgatgtttatgctcgacctgtacaatgccatggccgtggaagaagggggcggacccggcggccaagggttctcgtacccctacaaggccgtgttttcgactcagggaccgccgctcgcttccctgcaggacagtcatttcctcactgacgctgatatggtgatgagctttgtgaatctggtggaacacgataaggagttcttccacccccgctaccatcaccgagagttccgctttgacctctcaaagatcccggagggagaagctgtgaccgcagccgagtttcggatctacaaagattacatccgcgaacggtttgacaacgaaacctttcgcatcagcgtgtaccaagtcctgcaagaacatctgggaagagagtcagacctgttcctgctggacagccggaccctctgggcaagcgaagagggatggttggtgttcgacatcactgcgacctccaaccattgggtggtgaaccctcgccacaatctgggcttgcaactgtccgtggaaaccctggatggacagtcgattaatccaaaacttgccgggttgattggtcgccacggcccacagaacaagcaacctttcatggtggcatttttcaaggcgaccgaagtgcactttaggtccatccgctccactggctccaagcagcgaagccagaatcgctcaaaaactcctaagaaccaggaagcgctgcggatggcaaatgttgcagaaaattcctcgtcggaccaaaggcaggcctgcaagaaacacgaactgtacgtgagcttcagagatttggggtggcaagattggatcattgccccggaaggatacgcggcgtactactgcgaaggcgagtgcgcctttcccctcaactcttacatgaacgccacgaaccacgccatcgtgcagacgcttgtgcatttcatcaaccctgaaactgtcccgaaaccttgctgtgcaccgacccagctcaacgctatctccgtgctgtacttcgatgactcgtccaatgtgatcctcaagaaatacagaaacatggtggtgcgcgcatgtggctgccac

SEQ ID NO: 7993 - DNA, 1293 bp, synthetic construct
  misc_feature 1..1293: note = source = /note="Description of Artificial Sequence: Synthetic coding sequence"
  source 1..1293: mol_type = other DNA
atgcacgtgcggtcgttgcgcgcagcagcccctcatagctttgtggcattgtgggctccattgttcctcctccgatccgcactcgctgacttctccctcgataacgaagtgcacagtagctttattcaccgccggctgcgctcacaggaacggagggagatgcagcgggagattctctccatcctgggactgccccaccgtccccgcccacatctgcagggcaagcacaactcggcccctatgttcatgcttgacctgtacaacgctatggcagtggaagaggggggtgggcctggcggacaaggattttcgtacccttacaaggctgtgtttagcacccagggtccaccacttgcgtcgcttcaggactcacatttcctcaccgacgctgatatggtgatgtcattcgtgaatctggtggagcatgataaggagttcttccaccccaggtaccaccacagagaattcagattcgatctgtcgaaaataccggagggcgaagccgtgactgccgcggaatttcgcatttacaaagattacatcagagaaaggttcgacaacgaaactttccgcatctcggtataccaggtgttgcaggaacatctgggcagagagtctgacctttttcttctggacagccggaccctgtgggcctccgaggagggatggctggtgttcgacatcaccgccacgtcgaatcactgggtggtgaatcctcgccataatctggggcttcaactgtcggtcgaaaccttggacggtcagtcaattaacccaaaactggccggactcattggtcgccatggacctcaaaacaagcagccctttatggtcgcgttctttaaggcaactgaggtgcattttagatccattcggagcaccggctccaaacagagaagccagaatcggtccaagactcccaagaatcaggaagcgctgcggatggccaatgtggccgagaattcgtcaagcgaccaacgccaggcctgcaaaaagcacgagctctacgtctccttcagagacttgggttggcaggactggatcatcgcaccagagggctacgctgcatactactgtgagggcgagtgcgcctttccgcttaactcatacatgaacgcgaccaatcatgccatcgtccagaccctggtgcactttatcaaccctgaaactgtgcctaaaccgtgctgcgccccgactcagctgaacgccatcagcgttctctacttcgacgattcctccaacgtgatcctcaagaaatatcgcaacatggtcgtcagagcctgcgggtgccac

SEQ ID NO: 7994 - DNA, 1293 bp, synthetic construct; identical to SEQ ID NO: 7947
  misc_feature 1..1293: note = source = /note="Description of Artificial Sequence: Synthetic coding sequence"
  source 1..1293: mol_type = other DNA

SEQ ID NO: 7995 - DNA, 1293 bp, synthetic construct
  misc_feature 1..1293: note = source = /note="Description of Artificial Sequence: Synthetic coding sequence"
  source 1..1293: mol_type = other DNA
atgcatgttcgctcgctccgcgccgctgccccgcattcattcgtggcgctctgggcccctctcttcctgctgcgcagcgcgcttgcggacttttccctggataatgaggtgcacagttccttcatccacagacgcctgcgtagccaagaacggcgggaaatgcagcgagagatcctctcaatcctggggctcccacaccggccgcgccctcacctgcaaggcaaacataatagcgctccgatgttcatgctggatctgtataacgccatggctgtggaagaaggaggcggaccgggcggccagggcttctcgtacccatacaaggctgtcttttcaacccaaggtccgccacttgcttcgttgcaagattcacacttcctcaccgacgcggacatggtgatgtctttcgtgaatctcgtggaacacgacaaagagttcttccaccctcggtaccatcatcgtgagttccgctttgacctgtcaaagatcccagaaggagaggcggtgactgcagcagagttcaggatctacaaagattacattcgcgaacggttcgataacgaaactttccgcatctcagtctaccaagtcctgcaggagcacctggggagggaatcggacctgttcctgctcgactccagaaccctctgggcttccgaagaaggatggctggttttcgacattaccgcgactagcaaccattgggtggtcaatcctcgacataatctggggctgcagttgtccgtcgagactttggacggacagtccatcaaccctaaactcgcggggttgatcggtagacacggaccccagaacaaacagccgttcatggtggctttctttaaggcaaccgaggtgcactttaggagcatccggtcgactggatcgaagcagcgtagccagaatcggtccaagaccccgaagaatcaggaggccctgcgtatggctaacgtggccgaaaacagcagctcggatcaacggcaggcatgcaaaaagcatgaattgtacgtgtcgttccgcgacctcggctggcaagactggataatcgcaccagaaggttacgccgcatactactgcgagggagagtgcgcctttccccttaactcctacatgaacgcaaccaatcacgcgattgtgcagacgctcgttcacttcatcaacccggaaaccgtgcccaagccctgttgtgctccgacgcagcttaacgccatttctgttctctattttgacgatagttccaacgttatcctgaagaagtacagaaacatggtggtcagggcctgcggttgccat

SEQ ID NO: 7996 - DNA, 1293 bp, synthetic construct
  misc_feature 1..1293: note = source = /note="Description of Artificial Sequence: Synthetic coding sequence"
  source 1..1293: mol_type = other DNA
atgcatgtgaggtcgcttcgtgcagccgcacctcattcctttgtggcactttgggcccccctgttccttttgaggtcagcactcgccgatttcagcctggataacgaagtgcattccagcttcatccatagacgactgcggtcccaggaacggcgcgaaatgcagagggaaatcctctcgattctcgggctcccccatcgtcccaggccccaccttcaaggaaagcacaacagcgcgcctatgtttatgctggacttgtacaatgcaatggctgtcgaggaggggggaggacctggagggcaggggtttagctacccctacaaggcagtgttttcgacccagggaccgcctcttgcatcgcttcaagatagccacttcctgaccgacgcagatatggtgatgtcgtttgttaacctcgtcgagcatgataaggagtttttccatcctagataccatcatagggaatttagatttgatctgtccaagattcctgagggtgaggcagtgaccgcggccgaatttcgtatctacaaggattacattcgggaaagatttgataacgaaacttttcgcatctcggtgtaccaggtgcttcaggaacaccttggaagagagtcggatcttttcctgcttgactctcggaccctctgggcatccgaagaaggctggctggtctttgacatcactgccacttctaatcattgggtcgtgaatcctcgccataacctgggccttcagttgtccgtggagacgctggacggacagtccattaatcccaagttggcaggtcttattggacggcatggaccacagaacaaacaaccatttatggtcgcctttttcaaggcgaccgaggtgcactttcgtagcattagatccactggatccaagcagcggtcacaaaatcgctcgaaaacccctaagaaccaggaggcccttagaatggctaacgttgcagagaactcctcgtccgatcagcgccaagcctgtaagaaacatgagctttacgtgtcgttcagggatcttggatggcaagattggatcattgcaccggagggatacgcggcatactactgtgaaggggaatgtgcatttcctctgaattcttacatgaacgcaactaatcatgccattgtgcagaccctggtgcacttcataaacccagagactgtccctaaaccgtgctgcgcccctacccagcttaatgcaatctcggtcctgtactttgatgactcgtcgaatgtgatcctcaagaagtaccgaaacatggtggtgcgcgcatgcggttgtcac

SEQ ID NO: 7997 - DNA, 1293 bp, synthetic construct
  misc_feature 1..1293: note = source = /note="Description of Artificial Sequence: Synthetic coding sequence"
  source 1..1293: mol_type = other DNA
atgcacgtccggtcgctccgcgccgccgccccgcactccttcgtggctctctgggccccgctgtttctgctgcgctcggccctcgctgacttctcgctggacaacgaggtgcacagctcgtttatccaccgccgcctccggagccaggagcgacgggagatgcagagagagatcctgtcgattctcggactgcctcacaggccgcggccccacttgcaggggaagcataattccgcaccaatgttcatgctggatctctacaatgccatggcagtggaagagggcgggggcccgggaggacaggggttttcctacccatacaaagccgtcttttccactcagggaccacccctggcttcgctgcaagattcgcacttcctgaccgacgcagacatggtgatgtcgttcgtgaatctcgtggaacatgataaggagtttttccacccacggtaccaccatcgcgagtttcggtttgatctttcaaaaatcccggaaggagaagccgtgaccgcagctgaattccgcatctacaaggactacatccgcgagcggttcgacaacgagacgttccggatctctgtgtaccaggtgctgcaggaacacctcggccgcgagtcggatctctttcttttggactcacgcactctgtgggcctcggaagaaggttggctggtgtttgatatcactgcgacttccaatcactgggtggtgaatccacggcacaatctcggactccagctgtccgtggaaaccctcgacggacaatcaattaacccaaagctggcaggtttgattggacggcacggcccacaaaacaagcaaccgttcatggtggcgttcttcaaggccacggaggtccacttccgatccatcaggagcaccgggtccaagcagcggagccagaatagatccaagacccctaagaaccaagaggcgctgcgcatggcgaacgtcgcagagaacagcagcagcgatcagagacaggcatgtaagaagcatgaactctacgtgagctttagagatctgggctggcaagattggatcatcgcgcccgaaggatacgcggcatactactgcgaaggggaatgtgcctttcccctcaattcgtacatgaatgcgacgaaccatgccatagtccaaaccctggtgcacttcatcaaccctgagacggtgccaaagccgtgttgtgccccgacccagctgaacgcaatctccgtcctgtatttcgacgattcctccaacgttatcctgaagaaataccggaatatggtggtccgcgcatgtggctgccat

SEQ ID NO: 7998 - DNA, 1293 bp, synthetic construct
  misc_feature 1..1293: note = source = /note="Description of Artificial Sequence: Synthetic coding sequence"
  source 1..1293: mol_type = other DNA
atgcatgtgaggtcactgcgcgcagctgctcctcatagcttcgtagcactgtgggcccctctgtttctcttgcgatcggcgttggccgacttcagcctcgataatgaggtccacagttcctttattcaccggagactgaggagccaggagaggcgagaaatgcagagagagatcctgagcatccttggcctccctcataggccccggccgcatctgcagggaaaacacaactccgcacccatgtttatgctggatttgtacaacgctatggccgtggaagagggtgggggacctggagggcagggcttttcttatccctataaagccgttttttcaacccagggtcctccactggcctcactccaggactctcactttttgaccgacgcagatatggtcatgtcttttgtgaacttggtcgaacatgacaaggaattctttcacccccggtaccaccacagagagttcagattcgacttaagcaagatccccgaaggggaagctgtgacagccgcggaatttcgcatctataaggactacataagagaacgattcgataacgagacattccggataagtgtctaccaggttctgcaggaacatctggggcgcgagtcagacttgttcctgctggatagccggaccttatgggcttcagaggaggggtggctggtgttcgatataacggcgacctcgaatcactgggtggtcaacccccgacataacctgggactgcagttatccgtcgagaccctcgacggccagagcataaatccgaagctggccggacttattggcaggcacggtccccagaataagcagcctttcatggtggccttcttcaaggccacagaggtgcacttcaggtctattaggtccactggctccaagcagcggtctcaaaaccgttcaaagacccccaagaatcaggaagccctgaggatggccaatgtggctgaaaacagttctagcgatcagagacaggcatgcaaaaagcacgagctgtatgtttctttccgggacttgggatggcaagattggatcatcgctccagaagggtacgctgcgtactattgcgaaggcgaatgcgcgttcccactcaacagttacatgaacgcaactaatcacgccatcgtacagaccctggtccatttcattaatcctgaaaccgtcccaaagccgtgttgtgcgcctactcagctgaatgctatctcagtcctctattttgatgactcctctaacgtcatcttgaaaaaataccgcaatatggtcgtgagggcatgcgggtgccac

SEQ ID NO: 7999 - DNA, 1293 bp, synthetic construct
  misc_feature 1..1293: note = source = /note="Description of Artificial Sequence: Synthetic coding sequence"
  source 1..1293: mol_type = other DNA
atgcacgtgcggtcgctccgggcggctgcccctcactcctttgtggccctctgggccccgctgttcttactgcggagcgctctagctgatttttcacttgataacgaagtgcatagcagtttcattcaccgtagactcagatctcaggagagacgagagatgcaacgggaaatcttatccatcttgggccttccccaccgaccaaggcctcacctgcaaggaaagcacaactctgcccccatgtttatgctggatctatataacgccatggctgtagaagagggaggcggcccgggtggccagggcttcagttatccgtacaaggctgtcttctccacgcagggtcctccccttgctagcttgcaggatagccacttcttgacagatgcagatatggtcatgtcatttgtaaacttggttgaacatgacaaagagttctttcatccccgatatcatcatcgggagtttagattcgaccttagcaagatccctgaaggtgaggctgttacagccgcggaatttagaatatacaaggattatattcgcgagaggttcgacaatgagacttttagaatttctgtgtaccaggtactccaggagcacctgggccgcgaaagtgatcttttcctgttagattcaagaacactgtgggcaagcgaagaggggtggttagtctttgatatcacagcgacttctaatcactgggtagtaaatccccgtcacaatctgggcctgcagctttccgtcgagactctcgatgggcagtcaattaatcccaaactcgccggactgataggacgccatgggccgcagaacaagcaacctttcatggtagcattctttaaggctacggaagttcacttccggagtattcgtagcaccggatcgaaacaacgtagccagaaccgatccaagactcctaagaaccaggaggcactcaggatggcaaatgtagctgagaattcatcgtccgatcagaggcaagcctgcaaaaagcacgaactctacgtctcattccgggatctgggatggcaagactggattatcgcccctgaaggctacgccgcatattattgcgagggagagtgcgcgttcccactgaactcatacatgaacgccacaaatcacgctatagtccagacactggtacatttcataaatcccgagaccgtccccaaaccgtgctgtgcaccaacacagttaaacgcaatctctgtgctttacttcgacgattctagtaacgtgatcctgaagaaataccgcaacatggtggtgagagcctgtgggtgtcat

SEQ ID NO: 8000 - DNA, 1293 bp, synthetic construct
  misc_feature 1..1293: note = source = /note="Description of Artificial Sequence: Synthetic coding sequence"
  source 1..1293: mol_type = other DNA
atgcatgtacgttcgttacgagcggcggcgccgcattcgtttgtagcgctatgggcgccgttatttttattacgatcggcgctagcggatttttcgttagataatgaagttcattcgtcgtttatacatcgacgactacgatcgcaagaacgacgtgaaatgcaacgagaaatattatcgatattaggtttaccgcatcgaccgcgaccgcatttacaaggtaaacataattcggcgccgatgtttatgctagatttatataatgcgatggcggtagaagaaggtggtggtccgggtggtcaaggtttttcgtatccgtataaagcggtattttcgacgcaaggtccgccgctagcgtcgctacaagattcgcattttttaacggatgcggatatggtaatgtcgtttgttaatctagtagaacatgataaagaattttttcatccgcgttatcatcatcgagaatttcgatttgatttatcgaaaataccggaaggtgaagcggtaacggcggcggaatttcgtatatataaagattatatacgtgaacgatttgataatgaaacgtttcgaatatcggtatatcaagtattacaagaacatctaggtcgtgaatcggatttatttctattagattcgcgaacgctatgggcgtcggaagaaggttggctagtttttgatataacggcgacgtcgaatcattgggtagtaaatccgcgacataatttaggtttacaactatcggtagaaacgttagatggtcaatcgataaatccgaaattagcgggtttaataggtcgtcatggtccgcaaaataaacaaccgtttatggtagcgttttttaaagcgacggaagttcattttcgttcgatacgatcgacgggttcgaaacaacgatcgcaaaatcgttcgaaaacgccgaaaaatcaagaagcgctacgtatggcgaatgttgcggaaaattcgtcgtcggatcaacgacaagcgtgtaaaaaacatgaattatatgtatcgtttcgagatttaggttggcaagattggataatagcgccggaaggttatgcggcgtattattgtgaaggtgaatgtgcgtttccgctaaattcgtatatgaatgcgacgaatcatgcgatagtacaaacgttagttcattttataaatccggaaacggttccgaaaccgtgttgtgcgccgacgcaactaaatgcgatatcggttctatattttgatgattcgtcgaatgtaatattaaaaaaatatcgtaatatggttgttcgtgcgtgtggttgtcat

SEQ ID NO: 8001 - DNA, 1293 bp, synthetic construct
  misc_feature 1..1293: note = source = /note="Description of Artificial Sequence: Synthetic coding sequence"
  source 1..1293: mol_type = other DNA
atgcatgtgcgctctttacgagccgccgctccccatagctttgtcgctctgtgggctcctctgtttctgctgagaagcgctctggctgacttcagtttagacaacgaggtccattcttccttcatccatcgaagactcaggagtcaggaacgtagggaaatgcagagagagattttgtcaatactcggcctgccccaccggccccgtcctcatctgcagggaaagcacaacagtgcccctatgtttatgctggacctgtataacgccatggccgtagaggagggcggaggccctggaggacaaggtttcagctacccttataaggctgtgtttagtacacagggaccaccactggccagtctccaagactctcatttcctgaccgatgcagacatggttatgagctttgttaatttagttgaacatgataaggaattcttccatcctaggtaccaccaccgggagttcaggtttgatctgtctaagatccctgagggcgaggctgttaccgctgctgagttcaggatctataaggactacattcgggagcgcttcgataatgagactttcaggattagtgtgtatcaggtcctgcaggagcatctgggccgtgagagcgacctatttctgctggactccaggaccctgtgggctagtgaggagggctggctcgtgttcgatataaccgctacatctaaccactgggtcgtgaatcccaggcataacctgggcctgcaactcagtgtggagacactggacggccagtccattaatcctaagctggcaggcctgatcgggaggcacggccctcagaacaaacagccatttatggtcgcttttttcaaggctacagaagtgcactttagatccatccgaagcacaggatccaagcagcgaagccagaatcgcagcaagacacccaagaaccaggaggcactgcgtatggccaacgtggccgaaaacagttccagcgatcagcgtcaggcatgtaaaaagcacgaactgtacgtgagtttccgggatctgggctggcaggattggatcattgctcccgaaggatacgccgcttactattgtgagggggagtgcgcttttccgctgaacagttatatgaatgcaaccaaccacgcaatagtccagaccctagtgcactttatcaacccagagacagtgcccaagccctgttgcgccccgacacagctgaacgctatcagcgtcttatacttcgatgattcatctaacgtgatactgaagaagtaccgaaacatggtcgtgagagcctgcggctgtcac

SEQ ID NO: 8002 - DNA, 1293 bp, synthetic construct
  misc_feature 1..1293: note = source = /note="Description of Artificial Sequence: Synthetic coding sequence"
  source 1..1293: mol_type = other DNA
atgcatgtaaggtctctgcgcgccgcagcccctcattccttcgttgcactatgggcccccctatttctactaagaagtgcgttagctgacttctccctcgacaacgaagtgcattcatcattcatacatagacggctcagatctcaggaacgacgggaaatgcagcgggaaatactctcgatattggggttgccacatcgcccaagaccacacctccaggggaaacacaactccgctcctatgtttatgctcgatctctacaacgcaatggcagtagaagaaggaggaggaccaggaggacagggattctcttatccgtacaaagccgtgttttctacacaggggccacctcttgcgtctctgcaggatagtcatttcctcactgatgccgacatggtgatgtcattcgtaaacctcgttgaacatgataaagaattttttcatccccggtatcatcatagagaatttcggtttgacctgagtaaaatacccgaaggagaggctgtgacagccgccgaattccggatctataaagattatatccgcgaacgtttcgataacgaaacatttcggatatccgtttatcaggtacttcaggaacatctaggaagagaatccgatttattccttctggacagtagaacattatgggcttccgaggaaggatggttagttttcgatataacagcaacatcaaaccattgggtagtaaaccctagacacaacctcgggctacagctgtctgttgaaacacttgatgggcagagtatcaatcccaaattggccgggctgataggacggcatgggccccaaaataaacaaccctttatggttgcattcttcaaagccactgaagtgcatttccggagtatccgctcaactgggtccaaacagagaagtcagaatcggtccaaaacaccaaaaaatcaggaagcattacggatggccaatgtggctgagaattcctcctccgaccaaaggcaggcctgcaagaaacacgaactatatgtctctttcagggatctggggtggcaggattggataatagctcctgaaggatatgccgcttactattgtgaaggagagtgcgcttttcccctcaacagttatatgaacgcaacaaatcacgctattgtgcagacgttagtacactttataaatcctgaaactgtgccaaaaccatgttgtgcccctacacagttgaacgcgatttcagtcctttacttcgatgatagttcgaacgtgatcctcaaaaaatatcggaatatggtcgtgagggcttgcggatgtcat

SEQ ID NO: 8003 - DNA, 1293 bp, synthetic construct
  misc_feature 1..1293: note = source = /note="Description of Artificial Sequence: Synthetic coding sequence"
  source 1..1293: mol_type = other DNA
atgcacgtgcgatccctgcgcgccgcagcacctcattctttcgtggcactttgggcacccctgtttcttctccgttccgctctggctgatttctcgctcgataacgaagtgcacagcagctttattcaccggaggctccggagtcaagagcgccgggaaatgcaacgggaaattctgtcgatcctcggactgcctcatcgcccaaggcctcatcttcaagggaaacacaatagcgcacctatgtttatgcttgatttgtacaatgcaatggcggtggaagaaggaggcgggcccgggggtcagggattttcctacccatacaaggcggtgttttcgactcagggaccacctctcgcatcactgcaggattcacattttcttaccgatgctgacatggtgatgagctttgtgaatctcgtggagcatgataaggagtttttccatcccaggtaccatcatcgggagttcagatttgacctgtccaagattcccgagggagaggcagtcactgcagcagagtttcgcatctacaaggattacatcagagaacggtttgataacgaaacctttcgaatctcagtctaccaagtcctccaagaacacttgggccgcgaaagcgatctcttcctgctggattccagaactctttgggcgtcagaagaagggtggcttgtgtttgatatcaccgcaacttcaaaccattgggtggtcaacccacgccacaacctgggtctgcaactttccgtggaaacgctggatggtcaatcgatcaacccaaaacttgcgggtctgattggtcgacatggaccacagaataagcagcccttcatggtggcatttttcaaggccaccgaggtgcattttcgttctattagatccactgggtcaaaacaaaggtcgcagaaccgctcaaaaactcctaagaaccaagaggcgctgaggatggcgaatgtcgccgaaaattcatcatccgatcaaagacaggcatgtaagaagcatgagctttacgtgtccttcagagatctgggatggcaagactggataatcgcacccgaaggatacgccgcttactactgtgagggggaatgtgcatttcctctgaacagctatatgaacgcaaccaatcatgccatcgtgcagacgctggtgcatttcatcaatccagaaactgtccccaagccatgctgtgcgccaacgcagcttaacgcaataagcgtcctttactttgacgattcaagcaacgtcatacttaagaagtaccgaaatatggtggtccgagcgtgtggatgtcat

SEQ ID NO: 8004 - DNA, 1293 bp, synthetic construct
  misc_feature 1..1293: note = source = /note="Description of Artificial Sequence: Synthetic coding sequence"
  source 1..1293: mol_type = other DNA
atgcatgtgagatctctccgagcagcagcgccccacagcttcgtggcactttgggctccgctgttccttctcagatcggcactggcagacttttcgcttgacaacgaagttcattcatccttcatacatcggagacttagaagccaggaacggagggagatgcaacgggaaattctttcgattctgggtttgccgcatcgcccaagaccgcacctgcaaggtaagcataattcagcaccaatgtttatgctggatctctacaacgcgatggcggtggaggaaggcggagggcccggtggacaggggttcagctacccttacaaggccgtcttttcgacccagggaccacccctggcaagcctgcaggattcgcactttctgactgatgctgacatggtcatgtcattcgtgaatcttgtggaacatgataaagaattcttccaccctcggtatcaccatagggaatttaggtttgacctgtcgaagattcccgaaggcgaagccgtgaccgccgcagagtttcggatctacaaagactatatccgtgaacggtttgacaacgaaactttcagaatctcggtgtaccaagtgctgcaggagcaccttggacgggagtcagacctctttcttcttgattcaagaactttgtgggcatccgaggagggctggctggtgtttgatatcactgcgaccagcaatcattgggtggtgaatccgaggcataaccttggcctgcaactctcagtagaaactctggatggtcagtccattaatcccaaacttgcggggcttatcggacgacacggccctcaaaacaagcagccttttatggtggcattctttaaggcgaccgaagtccacttccgttcgatcagatccaccggtagcaagcaacgatcacagaacagaagcaagacccccaaaaaccaggaagccctccgaatggccaacgtggcggaaaattcatcatccgaccaaagacaagcatgcaagaaacatgaactttacgtgtcgttccgggatttgggttggcaagactggatcattgccccagaaggatacgcggcatactactgtgagggagaatgtgcgttcccgcttaactcatacatgaatgcaactaaccatgcaattgtgcagacgctggtccatttcattaacccagaaaccgtgcctaagccttgctgtgcaccaacccagttgaatgcaatctcagtgctctacttcgatgactcgtccaacgtgatccttaagaagtaccgtaacatggtggtgagggcatgtggatgtcac

SEQ ID NO: 8005 - DNA, 1293 bp, synthetic construct
  misc_feature 1..1293: note = source = /note="Description of Artificial Sequence: Synthetic coding sequence"
  source 1..1293: mol_type = other DNA
atgcacgtgcgctctctccgcgccgccgctccacactcatttgtcgcgctgtgggccccgctgttcctgctgcgctcagctctggcagacttctcgcttgacaatgaagtgcacagcagcttcatccaccgcaggctgaggtcacaggagcggcgtgagatgcagcgcgaaatcctctccattctgggactgcctcaccgcccgcggccccacctccagggtaaacacaacagcgcccctatgttcatgttggacctctacaacgccatggctgtcgaagaaggcggcggtccgggtggccaaggattctcatatccatacaaagccgtgttctccacccagggacctcctctcgcatccctgcaagattcgcacttccttaccgatgcggacatggtgatgagcttcgttaatctggtcgagcacgacaaagaattcttccacccgcggtaccaccatcgggagttccggttcgacctgtcaaagatcccggagggggaagccgtgacggcggcggagtttcgcatctacaaggactacatccgcgaaagattcgacaatgaaacttttcgcatttccgtgtaccaggtcctgcaagaacacctgggccgcgaatcggatctcttcctgctcgatagcagaactctgtgggcatccgaggaaggttggctggtgttcgatatcaccgctacgtccaaccattgggtagtgaatcccaggcacaatcttgggctgcaactgtcggtggaaaccctcgatggccagtccatcaatccgaagttggcaggactgatcggaaggcatggtccgcagaataagcaaccgtttatggtcgcattcttcaaggcgaccgaggtccattttcggtccattcgatcaactgggagcaagcagcgctcccaaaaccgctctaagacgccgaaaaatcaagaggccctgcgcatggcaaatgtggccgagaactcttcatccgaccaaagacaagcctgcaaaaagcacgagctgtacgtgagcttccgcgacctcggatggcaagactggatcattgcaccggagggatacgccgcgtattactgtgaaggagaatgtgcgttccctctgaacagctacatgaatgcgactaaccacgccatcgtgcagactctggtgcactttatcaacccggaaaccgttcctaagccgtgctgcgcgccaacgcagctcaacgcaattagcgtgctctacttcgacgactcatccaacgtgatcctgaaaaagtaccgcaatatggtggtgcgcgcctgcgggtgccat

SEQ ID NO: 8006 - DNA, 1293 bp, synthetic construct
  misc_feature 1..1293: note = source = /note="Description of Artificial Sequence: Synthetic coding sequence"
  source 1..1293: mol_type = other DNA
atgcatgtacgaagcctccgtgctgccgcgcctcactcattcgtggccttgtgggcgccactgtttttactgcggtcggcactcgccgacttcagcctggacaatgaggtgcattctagtttcatccataggcgcctcaggagccaagagcgacgggagatgcagagggaaattctcagcatcttggggctgcctcatagaccccgccctcatcttcagggcaagcataactcagccccaatgtttatgttggatttgtacaacgctatggccgtagaagaaggcggtggcccaggtggccagggattcagctatccctacaaggctgtattttctacacaggggccccccctcgcttcgctgcaggatagccacttcctgacggatgctgacatggtgatgtcctttgtcaacctggttgaacacgacaaggagttttttcatcctcgctaccatcaccgcgagttcagatttgacctgtcgaagattcccgagggggaggccgtgactgcagctgagtttagaatatataaggactatatcagagagcggttcgacaatgagacctttagaatcagcgtctaccaggttctgcaggaacacctcggccgggaaagcgatctgtttctacttgattcccggaccctctgggcctctgaagaagggtggctcgtttttgacatcaccgctactagtaaccactgggtggtgaaccctaggcacaacctgggactccaacttagcgtagagactctggacggacagtcaatcaacccaaaattggcgggactgataggcaggcatgggccccagaacaaacagccatttatggtcgccttttttaaagccaccgaagtacattttcgatctatccgctcaaccgggtccaagcaaaggtcgcagaataggtctaagacccctaagaaccaggaagcgctccgcatggctaacgtggccgagaactcgtctagcgaccagcgccaggcttgcaaaaagcacgagctctacgtatctttcagggacctcggatggcaggactggatcatcgcccccgaaggctacgccgcttactactgtgaaggtgagtgtgccttccccttaaattcttacatgaacgctaccaatcatgccatcgtccagaccctggtgcacttcattaatcccgagacagtgcctaagccttgctgcgcaccaactcaattgaacgccatctccgtgctctacttcgacgactccagtaacgtgattttaaagaagtatagaaacatggtggttagagcctgcggctgtcat

SEQ ID NO: 8007 - DNA, 1293 bp, synthetic construct
  misc_feature 1..1293: note = source = /note="Description of Artificial Sequence: Synthetic coding sequence"
  source 1..1293: mol_type = other DNA
atgcacgtgaggtcccttcgcgcggctgctccacacagttttgtggcgctgtgggcacctctttttctgctcaggagtgcacttgccgatttcagcttggataacgaagtgcactccagtttcatccacagaagactgagaagccaagagaggagggagatgcagagggagatcctgtccatcctgggactccctcatcgcccgcgtccccatctgcagggtaagcataactctgctcccatgttcatgctagacctttacaacgccatggccgttgaggaaggaggggggccaggaggacagggcttctcatacccctacaaagcagtgtttagcacccaaggccccccccttgcttcgctgcaggatagccattttctgacagatgctgatatggtcatgtcatttgttaatctggtggagcacgataaagagttcttccaccctcgataccaccaccgagaatttaggtttgatctgagcaagatcccagaaggagaggcagtgacagccgccgaattcaggatctacaaagattatatcagagagcggttcgataatgagacctttaggatcagcgtgtaccaggtcctccaagaacatctggggagggagtcagatctgttcctgctggatagccggaccctctgggcgagcgaagagggatggctggtctttgatatcaccgcgacaagcaatcattgggtggtgaatcctcggcataacctcgggctgcaactgagtgtggaaacactggacggacaaagcatcaacccaaaactggcaggtctgattggccgccacggcccacaaaataagcaacccttcatggtggcatttttcaaagcgaccgaagtacacttcaggagcatccgcagcactggtagtaaacaacgaagccaaaaccggagcaaaacccctaaaaatcaggaagcactgaggatggcaaacgtggccgagaacagcagcagcgaccagcgccaggcctgcaagaaacacgagctgtacgtgtcatttcgtgacctgggatggcaggactggatcatcgcgccagagggatatgctgcatactactgcgaaggagaatgtgcctttcctttgaactcctatatgaacgcaactaaccatgccattgtgcagaccctagtgcatttcatcaaccctgaaacagtgccaaagccatgttgtgcacctacccaactcaacgccataagcgttctgtattttgatgacagttcaaacgttatacttaagaagtacaggaacatggttgttagggcatgcggctgccac

SEQ ID NO: 8008 - DNA, 4500 bp, synthetic construct
  misc_feature 1..4500: note = source = /note="Description of Artificial Sequence: Synthetic coding sequence"
  source 1..4500: mol_type = other DNA
atgactagaatacttactgcattcaaagtggtgcgcaccctgaaaaccgggttcggctttacgaatgtgacggcacatcaaaagtggaaattctccagacctggtataagactgctgtcggtcaaagcccagactgctcatattgtgttggaggacggtaccaagatgaagggatattcgtttgggcatccaagcagcgtcgcaggtgaagtcgttttcaatactggactgggtggatacccagaagcaatcactgatcctgcgtacaagggtcagattctgaccatggcgaaccccattattggtaacggaggtgctcctgacactacggcactggatgagctgggcctgtcaaagtacctcgaaagcaacggtattaaggtgtccggccttctggtgctcgattacagcaaagactataatcactggttggcaactaagtccctgggccaatggctccaagaagagaaggtgcctgcaatctacggagtggataccagaatgcttaccaagattatacgagataaaggtactatgctgggtaagatagaattcgaaggccagccagtggatttcgtcgatccgaataaacaaaacctgattgctgaagtgagcaccaaagatgtgaaggtgtacggaaagggaaaccctaccaaagtggtggctgtggactgcggcattaagaataacgtgattcggctgctcgtgaagcgaggtgccgaggtacatcttgtcccctggaaccatgacttcactaagatggaatacgatggcatcctgattgcaggtggcccgggcaaccctgccctggccgaacccttgatccagaatgtgcgcaagatactcgaatcggatagaaaggaaccactttttgggatctcgaccggaaacctgattactggattggccgctggggcaaagacctacaagatgtctatggcaaatagaggacaaaaccaacctgtcctgaacattaccaataaacaggcgttcataaccgcacaaaatcatggttacgccctcgacaacactctgccagcgggatggaaacctctgttcgtcaacgtgaatgaccagaccaacgagggtattatgcatgagtcgaagcccttttttgcagtccaatttcatcctgaggtgacgccaggacccattgatactgaataccttttcgactccttcttctcgttgataaagaaggggaaggccactacgatcacttcagtgttgcctaagcccgcactggtggcttctcgggtggaagtctcaaaagtgctgatcctgggctccggcggactgtcaatcggacaagccggtgagttcgattacagcggttcacaagcagtgaaggccatgaaggaagaaaacgtcaaaaccgtgctgatgaacccgaacattgcttctgtgcaaactaatgaagtcggtcttaagcaggcagacaccgtgtacttccttccaattaccccgcaatttgtgaccgaagtgatcaaggccgagcagccggacggactcatccttggcatgggtggtcaaactgcccttaactgtggtgtcgaactgttcaaacgaggggtcctgaaggaatacggcgtgaaggtgcttggaacttcggtggaatccattatggctaccgaagataggcaattgttttccgataaactcaatgaaatcaacgagaaaatcgcaccatcattcgcagtggagtcgatcgaagatgccctgaaggcagctgacaccattggttaccctgtcatgatccgcagcgcatacgcactgggaggcctgggaagcggaatctgtccaaatagagagactcttatggatttgtcgactaaggcatttgcaatgactaatcaaattctggttgaaaagtctgttaccggctggaaggaaattgaatacgaagtggtgagggacgccgatgacaactgcgtcaccgtctgtaatatggaaaacgtggacgcaatgggggtgcatactggtgattcggtggtggtggcaccagcacagaccctgtcgaatgcagagtttcagatgctgcgcagaacttccattaatgtcgtgcgtcatcttggaattgtgggagagtgtaacatacagttcgcactccatcctacttcgatggaatattgtatcattgaggttaacgcaagactgtctcgctcctcggcacttgcgtccaaggcaaccggatacccacttgcattcattgcagcaaagattgcactgggtattccactccccgaaatcaagaacgtcgtctcgggtaagacgtccgcttgctttgagccatctttggattacatggttaccaagataccccggtgggacctggataggtttcacggaacctcgagcagaatcgggagcagcatgaagagcgtgggggaagttatggcaattggtcgtacctttgaagagagctttcaaaaggctctccgcatgtgtcatcctagtattgaaggtttcacccctcgccttccaatgaacaaggaatggccatcaaacctggatcttagaaaggagctgtccgaacctagctcaactcgtatatacgcgatcgcaaaggcaatcgatgacaacatgtcccttgacgagattgagaaacttacctatattgataaatggtttttgtacaagatgagggatatcctcaacatggaaaaaaccctgaagggtctgaattccgaatcgatgaccgaggagacgcttaagcgcgccaaggaaataggcttttccgacaagcagatatcgaagtgccttggtctgaccgaagcacagacccgtgaacttcgtctgaagaaaaacatccacccatgggttaagcaaatcgataccctggcagcggaatacccctcggtgaccaactacctttatgtcacttataacggacaggagcatgatgtcaattttgacgaccatggaatgatggtccttggctgtggaccgtaccacataggcagcagcgtcgaatttgactggtgtgcagtgtcctcaatcagaactctccggcagctggggaaaaagactgtggtggtgaactgtaaccccgagacggtgagcaccgatttcgatgagtgcgataagctctactttgaggaactctcacttgaacgcatcctcgatatctaccatcaggaagcatgcggaggttgcatcatatcagtgggcggccaaatcccaaacaatttggccgtgcccctctacaagaatggagtgaagattatgggcacctcccctctccaaatcgatagggctgaggatagatcgatcttttccgctgtgctggatgagctcaaggtggcccaagcaccctggaaggctgtgaacactcttaatgaagccctggagttcgcgaagagcgtggattacccttgcctgctgcggccgtcttacgtgttgtcgggctcggcgatgaatgtggtgttttctgaggacgagatgaaaaagttccttgaagaggcaactagagtgtcgcaggagcacccggttgtcctgacgaagttcgtcgaaggggcccgggaagtggaaatggacgccgtcggtaaggacggacgggttatttcccatgcaatttccgagcatgtggaagatgccggtgtccactctggggacgcaacccttatgctgccgacccagaccatatcgcaaggcgcaatcgaaaaggtcaaggatgcaacgcgtaaaatcgcaaaagcattcgcaatctccggcccctttaacgtgcagtttctggtcaagggaaatgatgtgctcgtcattgagtgcaatctgagagcatcccggagctttccgttcgtgagcaagacgttgggagtggactttattgacgtggctactaaggtgatgattggagaaaatgtcgacgaaaaacatctccccaccctcgatcatcctattatcccagcggactacgtggcaatcaaggcacctatgttttcctggccacgacttcgggatgcagacccaatcttgaggtgtgagatggcatcgactggggaagttgcttgctttggagagggcatacacactgcgtttcttaaggcaatgttgtccaccggatttaagatcccgcaaaagggtatcctgatcggaatccaacagtcctttcggccacgttttcttggcgtggccgaacaactgcataatgaaggcttcaaactttttgcaaccgaggcgacttccgactggctgaacgccaacaacgtgcctgcaacccctgtggcatggcctagccaggaggggcagaatccaagcctttcatccatccggaagctgatccgcgacggctcaattgacctcgtgattaacttgcctaacaataacacgaaattcgtgcacgataactacgtgatcagaaggactgcagtcgactcaggcattccactcctcactaactttcaggtgactaagttgtttgcagaagcagtgcagaaatcgagaaaggtggattccaaatcactttttcactaccgacaatactccgcaggcaaggcggcg

SEQ ID NO: 8009 - DNA, 4500 bp, synthetic construct
  misc_feature 1..4500: note = source = /note="Description of Artificial Sequence: Synthetic coding sequence"
  source 1..4500: mol_type = other DNA
atgacccgcatactgaccgcgttcaaagtcgtccggaccctaaagacaggcttcggattcactaacgtgactgctcaccagaaatggaagttctccagaccaggaataagattacttagtgtcaaggctcaaacagcgcatatcgtgcttgaagatggaactaagatgaaaggatatagcttcggtcacccatcctctgtggccggcgaagttgtgttcaacaccggcctaggagggtatcctgaagcaattacagacccagcttacaagggacagatactcacgatggcgaatcccattatcgggaacggcggggcacctgacacaacagccctggacgaactggggttgtcaaagtacctggagtccaacggcatcaaagtctccggcctgctcgtgctcgattacagcaaggattacaatcattggttggcaacgaagtccctaggtcagtggctgcaagaggagaaagtccccgccatatacggcgtggacacacgcatgctgacgaagatcatccgcgacaagggaaccatgttgggtaaaattgagttcgagggccagcctgtcgacttcgtggaccctaataagcaaaacctgatcgctgaagtcagcacaaaagacgtgaaagtttacgggaagggcaatcccaccaaggtcgtggccgtcgattgcggcatcaaaaataacgtcatcagactattggttaagaggggcgccgaggtacatctcgttccctggaaccacgacttcaccaagatggaatacgatggaattctgatcgcgggcggtcctggaaaccccgcactggcagagcctctcatccaaaatgtacggaaaatcttggaaagcgatcgcaaggaaccactgtttggcatttctacagggaacctgattaccggcttagctgctggggcaaaaacttacaagatgtcgatggccaaccgcgggcagaatcaacctgtactgaatattacaaataaacaagcctttattactgcacagaaccatggctatgcgctggacaacaccctccctgctggatggaaaccccttttcgttaacgtgaatgaccaaactaatgagggcatcatgcacgagagcaaaccattcttcgccgtgcagttccatcctgaagtcactcccggacctattgataccgaatatctttttgattcttttttttctcttattaagaaaggaaaagccaccacaatcactagtgtactgcccaagcccgcactagttgcttcacgtgtggaagtgagcaaagtgctgatactcggcagcgggggtctttcaattgggcaggcaggcgaattcgattactcaggctcacaggccgtgaaagctatgaaagaagagaatgtaaagactgttctgatgaaccctaacatagcgtctgtgcagacaaatgaagtgggcctaaaacaagcagatactgtgtatttcctgccaatcactccacagttcgtcacagaagtgatcaaggcggagcagccagacgggctgattctcggaatgggcgggcagaccgccctcaactgcggcgtcgaactctttaagcgtggcgtgttgaaggaatatggcgtgaaagtactgggcaccagtgtggagtctatcatggctaccgaagaccggcaactgttcagcgacaagttgaacgagattaacgagaagatcgcaccatcctttgcagtagaaagcatcgaggacgcactgaaagctgccgataccatcggctaccctgttatgatccgctcagcgtatgctttagggggcctcgggagcggaatctgtccgaacagagagactctgatggacttgtccacaaaggcatttgcaatgactaaccagattctagtagagaagagcgttacaggctggaaagaaatcgagtatgaagtagttcgggacgctgacgacaattgcgtgacagtttgcaatatggagaacgtggacgctatgggcgtacacacaggagattccgtcgttgttgcaccagcccagaccttgagtaatgcagaattccaaatgctgcgaaggacctccatcaacgtggtgaggcatctaggtatagtgggcgagtgtaatattcaatttgctctccatcctacaagtatggagtactgtatcatcgaggttaacgcacggctgagtcgaagcagcgccttggcctccaaagccacaggataccctctcgcctttatcgctgcaaaaattgcgctcgggatcccattgcccgagattaagaatgttgtgtctggcaagacaagtgcgtgttttgagcctagtctggattacatggtcaccaaaatacctcgctgggacttagacagatttcacggcacgagcagccggatcggctcttcaatgaaatcagttggagaggttatggcaatcggacggaccttcgaggaaagcttccaaaaggccttgcgcatgtgccatccgtcaattgagggtttcacccctcgcctcccaatgaataaagaatggcctagcaacctggatttacgaaaagaactgagtgaacccagctcgactcgcatctacgcaatcgctaaggcaatagatgataatatgtctctcgacgagatcgagaagttgacatatatcgataaatggtttctgtacaaaatgagagacatcctaaatatggagaaaacactgaagggactgaactcagagagtatgactgaggagacactgaaacgggctaaggagatcggcttttccgataaacagatatctaaatgtttagggctgaccgaggcgcagactcgtgagctgcgccttaagaagaacatccatccctgggtcaaacagattgacactcttgccgccgagtatccttctgtgactaattacctgtatgtgacctataatgggcaggaacacgacgtcaactttgatgatcacggcatgatggtactggggtgtggaccttatcatattgggagctccgtggaatttgactggtgcgccgtgagcagcattagaactctaaggcagctgggcaagaagaccgtggtcgttaattgtaacccagagaccgtgtcgaccgacttcgatgagtgtgataagttatacttcgaagaattgtccctggagcgcattctcgatatttatcaccaggaggcatgcggggggtgcattatttctgtaggaggacagattcctaacaacctggccgtacctctgtacaagaatggggtcaaaattatggggacatcccccctgcaaatcgatcgcgctgaagacagaagcatattctctgctgtcctggacgagcttaaggtggcccaggctccatggaaggccgtaaacacactgaatgaagctctagaattcgccaaaagcgtagattacccctgtctccttagaccctcctacgttctgtctggctctgcaatgaatgtggtgtttagtgaggacgaaatgaaaaagttcctggaggaagccacaagagtgtctcaggagcacccagtcgttctgacaaagtttgttgaaggcgctcgcgaggttgaaatggatgcagtgggaaaagacggccgagtgattagtcacgccatcagcgagcacgttgaagacgcaggggtgcactccggcgacgcaaccctgatgctgccaactcagaccatctcccagggcgcaatcgaaaaagtcaaggacgcaacaaggaaaatagcaaaggcctttgcaatctcgggaccgttcaacgtccagtttttagtgaaagggaacgatgtcttggtgattgaatgcaatttacgggcgtcgaggagctttccatttgtgtctaagaccttgggagtggactttatagacgtggcaaccaaggtgatgatcggagagaacgtggatgagaagcacttaccgacgctggaccatccaatcatacctgccgactacgtggctatcaaagcgccgatgttttcatggccgcgtctgcgcgacgcagacccgatcctcagatgcgaaatggccagtacaggcgaagtagcttgtttcggcgaaggaatccataccgctttcctaaaggcgatgctgagtacaggcttcaagatccctcagaagggtatacttatagggatccagcaatcctttaggccccgcttcctgggcgttgccgagcagctacacaacgaaggcttcaaactgttcgccactgaggctacatctgattggctgaacgcaaacaacgtgcctgctacccctgtcgcctggccatcccaggagggacaaaatccaagtctcagttccataagaaagttaatacgagacgggtctattgacttggttataaacctgcctaacaataatacgaaattcgttcacgacaattacgtaattcggcgcacagctgtggactccgggattcctctgctaactaatttccaggtgactaagctgtttgccgaggctgtgcagaaaagtagaaaggttgattccaaatcactgttccactaccggcagtactctgcagggaaggccgct

SEQ ID NO: 8010 - DNA, 4500 bp, synthetic construct
  misc_feature 1..4500: note = source = /note="Description of Artificial Sequence: Synthetic coding sequence"
  source 1..4500: mol_type = other DNA
atgacaagaatcttaaccgcatttaaggtggtgcgaacactgaagactggattcggcttcaccaacgtcactgcacaccagaagtggaaattttctagaccagggattcggctgttgtcagtcaaggctcagaccgcccacatcgtgcttgaggatggaacaaagatgaaggggtactcattcggccacccgagctctgtcgcgggggaggtggtgttcaacactggcctcgggggttatcctgaggctataaccgacccagcttataaggggcagatcctgacaatggctaacccgattattgggaacggcggcgccccagatacgacagccctggacgaactgggcctatcaaagtaccttgagtctaatggcatcaaggtgagcgggttgcttgtgctagattactccaaggattacaaccattggctcgccaccaagtcgctgggccagtggctgcaggaggagaaggtccccgccatctacggcgtagatacccgaatgcttaccaaaatcatacgtgacaaaggcacgatgcttggcaagatcgagtttgaagggcagcctgtggattttgtagatcccaataagcagaacctgatagccgaggtatctactaaggacgtgaaggtgtatggtaaaggcaatcctacaaaagtggttgcggtggattgtggaatcaaaaataacgtgattagactgctcgtgaagcggggtgccgaagtgcatctggtcccctggaaccatgacttcaccaagatggagtacgatggtattttgatcgccggaggccccggcaacccagctctggccgaacccctgattcagaatgtgagaaaaatcctagaaagcgaccgcaaggaacccctgtttggcatatccactgggaacttgattacagggctggcagcaggcgccaagacgtacaagatgtctatggcgaaccgaggccagaatcagcccgtgctgaatatcacaaacaagcaggctttcatcacagctcagaatcacggatacgcattagacaacacactgcccgcaggatggaagccactgttcgtaaatgttaacgatcagactaatgaaggcatcatgcacgagagcaaaccattttttgccgtgcagtttcacccggaggtgactcctggccccatcgatacagaatacttgttcgatagtttcttcagcctgatcaaaaaagggaaggcaacgacaataactagtgttcttcccaagccagccctcgtcgccagtcgagtcgaagtgagcaaagtgctcattcttggatctgggggcctgagtattggccaggccggtgaattcgactattccggtagccaggcagttaaagcgatgaaggaggagaatgtgaaaaccgttctgatgaatcctaacatcgcctccgtgcagaccaatgaggtgggtcttaagcaggctgatacagtgtatttccttccaatcacaccacaattcgtgacagaagtgattaaggccgagcagcccgacggcctgattctaggcatgggcggacaaacagctctcaattgcggcgtggagctgttcaagcgaggcgttctgaaggaatacggcgtgaaagtgctgggcactagtgtcgaatctatcatggccaccgaagatagacagcttttctccgacaagcttaacgaaatcaacgaaaagatcgctccttctttcgccgtcgaaagcattgaggacgccttgaaagccgccgatacaattggctatccagtaatgattaggagcgcttacgcgctaggcggacttggctccgggatctgccccaaccgcgagacgctcatggacctttcaaccaaagccttcgccatgacaaatcagatactcgtggaaaagtctgtgaccggctggaaggaaattgagtacgaggtcgtaagggatgccgatgacaattgcgtgacagtgtgcaacatggagaatgtagacgctatgggagttcatacaggagattcagtggtagtagcgcctgcccagaccctatctaatgctgagttccagatgttgaggcgcacatctatcaatgttgtgagacacctgggaatagtgggagagtgcaacatccagttcgccctgcaccctaccagcatggagtactgtattatcgaagtcaacgcacggctgagccgctcaagcgcgcttgcctctaaggccactggataccccctggccttcattgccgccaaaattgcactcggaatccctctgcccgagattaagaatgtggtctctggcaaaactagtgcatgctttgaaccgagcctggactatatggtgacaaagattccacgctgggacctggaccggttccatggcacctcatcacgcattggttcatctatgaagagcgtcggcgaagttatggccataggcagaacattcgaggagagtttccaaaaggccctgcggatgtgccatccctctatcgaaggcttcaccccccgactgcctatgaacaaggagtggccatctaacctggatcttagaaaagaactgtccgagccatcatcgactaggatatacgcgattgctaaggcaattgatgacaatatgagtctggatgagatagagaagttgacctacatcgacaaatggtttctgtacaagatgcgggatatcctaaatatggagaagacgttaaaaggcttgaactccgagtcaatgacagaagagacccttaagcgggctaaagagataggattttcagacaagcagatcagcaagtgtcttgggctcaccgaagcacagactagggaactccgcctgaagaagaacatacacccttgggttaagcagatcgataccctggctgctgagtatccttcagtaactaattatctgtacgtgacttacaatggccaggaacacgatgtgaacttcgatgaccatggaatgatggttcttgggtgcggcccataccacattggcagtagcgtggagtttgattggtgcgccgtttcttcaatccgaacccttcggcagctgggcaaaaaaacggtggttgtaaactgtaaccccgagactgtttcgactgatttcgatgagtgtgacaagctgtacttcgaggagctgagcttagaacggatcctggatatttatcatcaggaggcctgcggcggatgtattatctcggttggaggacagattcccaacaacctagccgttccattgtataaaaacggggtaaagattatgggtacttcgcccctgcagattgacagggctgaagatagaagcatattctccgcagtgctggacgagctgaaagtggcccaggcaccctggaaggctgtgaacactctgaacgaagccctggagttcgcaaaatctgtggattatccttgcctcctccgaccttcctatgtcctgtctggctcagcaatgaatgtggtgttctctgaggatgagatgaagaaattcctcgaggaagcaacccgtgtcagccaggagcatcctgttgtgctgaccaagttcgtggagggcgctcgagaggtcgagatggacgcagtagggaaggatggcagagtgatcagccatgcgataagcgagcatgtcgaggacgccggggttcacagcggtgacgctactctaatgctgcctacacaaactatatcacagggcgccattgagaaagtgaaggatgcgacacgcaaaatagctaaggcgtttgctatcagtggaccttttaacgttcagtttctggtgaaaggaaacgacgtgctggtaattgagtgtaacctgcgcgcaagcagatcttttcccttcgtatcgaaaacactcggcgtagatttcatcgacgttgcaactaaggtgatgattggggagaatgtggacgagaaacatcttcctacgctggaccatccaattatccccgcagattatgtggctatcaaagctccaatgttttcttggcctcgcttgcgcgatgcagatcccattctgcgttgtgaaatggcctcaactggagaagtcgcctgtttcggcgagggaatccacaccgccttcctgaaagctatgctgtccacaggcttcaaaataccccagaaaggaatcctgatcgggatccagcagtccttccggccccgcttcctgggggttgcagagcagctgcacaacgaaggctttaagctgttcgctacagaagctacctccgactggctgaacgctaataatgtgccagctacgcccgtggcatggccttctcaggagggccagaatccttctctcagctcaatccgtaagctgattcgagatggaagcatcgacctcgtgatcaacctgccaaacaacaacaccaaattcgttcacgataactatgtgatcagacgcactgctgtcgattcaggcatcccactccttacgaactttcaggtcactaagctgttcgcggaggccgtgcagaagtctcgcaaggtcgactcaaagagtctttttcactaccgtcagtatagcgctggaaaggcagca

SEQ ID NO: 8011 - DNA, 4500 bp, synthetic construct
  misc_feature 1..4500: note = source = /note="Description of Artificial Sequence: Synthetic coding sequence"
  source 1..4500: mol_type = other DNA
atgacccggattcttaccgctttcaaagtcgtgaggacccttaagactgggtttggttttactaacgttactgcacaccagaaatggaagttttcgcgacctggaatcagactgctttcggtgaaggctcaaacggcgcatattgtgcttgaagatggaactaagatgaaaggatactcgtttggacacccttcatcggtggcgggggaggtcgtgttcaacactgggctcggagggtacccggaggctattacggaccctgcatacaagggacaaattcttaccatggcaaacccaatcattggcaacggtggagcacctgacacgaccgcgcttgacgaactcggacttagcaaatacttggaaagcaacggtataaaggtgtctggactgctggtccttgattacagcaaggactacaatcattggctggcgactaagtcccttggacaatggctgcaggaagaaaaggtgccggccatttacggagtggacaccagaatgctgaccaagattattcgggacaaggggaccatgttgggaaagatcgaatttgagggtcaacctgtggatttcgtggatccaaataagcagaacctgattgcagaagtgtcgactaaggatgtaaaggtgtatggtaaaggaaacccaacgaaggtggtggcggtcgactgcggaattaagaataacgtgattcgacttctggtgaaacggggtgcagaagtgcacctggtgccgtggaaccatgatttcaccaagatggagtacgatgggatcctgatcgcaggtggtccaggtaacccagcacttgcagaaccccttatccagaatgtgaggaagatcctcgaaagcgatcgcaaagaaccactgttcgggatctcgactggcaaccttattaccggactcgcagcaggtgcaaaaacctacaagatgtccatggcgaaccgtggacaaaaccaaccagtgctgaacatcaccaacaaacaagcgttcataaccgcccagaaccatggatatgcacttgataatactcttcccgccgggtggaagccccttttcgtgaacgtgaatgatcagactaacgaaggaattatgcatgaatcgaaacctttcttcgcagtgcaatttcacccagaggttactccaggccctattgataccgaatacctctttgactcattcttttcacttatcaagaaaggaaaagccaccactataaccagcgtgcttcctaagcctgccctggtggcgtcacgagtcgaagtgtcgaaagtcttgattctgggatcgggaggactgtccattggacaggccggtgagtttgactactcgggatcgcaggcggtaaaagcgatgaaggaagagaatgtgaaaacggtgcttatgaaccccaacattgcatcggtgcagaccaacgaggttggactgaaacaggccgatactgtgtacttccttccaatcacgccgcagttcgtcactgaggtgattaaagcagaacaacctgatggactcatcctgggcatgggaggccaaactgctctcaactgcggtgtggagctgtttaagcggggtgtgctcaaggaatatggtgtcaaagtgctgggaacgagcgtggagtcaattatggcaactgaggatcggcaactcttttccgataagctgaatgaaatcaacgagaaaatcgccccttcttttgcagttgaatcgattgaagatgctttgaaggcagccgataccatcgggtacccggtcatgattagaagcgcatacgccctgggcggattgggatccggaatatgcccaaatagggagacgctgatggacctcagcacgaaagcatttgcgatgacgaaccagattcttgtggagaagagcgtcactggatggaaggaaattgagtacgaagtcgtgcgggatgcagacgacaattgtgtgaccgtgtgtaacatggagaacgtggacgcaatgggtgtgcatacgggagatagcgtggtggtggcacccgcgcagacgctgtccaacgctgagtttcagatgttgcggcgaacctcgataaatgtggtgcgccatcttggaatagtcggcgaatgcaacatacaatttgccctccatccaactagcatggagtactgcattatcgaagtcaacgccaggttgtcgagatcctccgccctggcatccaaggcaactgggtaccctctcgcattcattgccgcaaaaatcgcgttggggatccctctgccagaaatcaagaatgtggtgtccggcaaaacttccgcttgtttcgaaccatctcttgattacatggtgaccaagattccacgctgggatcttgataggtttcatggtacttcatcgcgcattggatcatcgatgaagagcgttggagaagtgatggcaattggaagaacgttcgaagaatcctttcaaaaggcacttaggatgtgtcatccatccatcgagggattcactccaaggcttcctatgaacaaagaatggccatcgaacttggacctgcgtaaggagctgagcgaaccctcatccacccgcatctacgctatcgccaaggcaatcgacgacaacatgagcttggacgaaattgagaagctgacctatattgacaaatggttcctgtacaagatgagagacattttgaatatggaaaaaactctgaaggggcttaattcagaatcgatgactgaagaaacgctgaaaagagcaaaagaaatcggcttttccgacaagcaaatctccaagtgtctgggacttaccgaggctcaaacccgcgagctgagactgaagaaaaacatccacccttgggtgaaacagattgataccctggccgccgagtacccttcggtcaccaactacctgtacgtgacttacaacggacaagagcacgatgtgaattttgatgaccacggaatgatggtgttgggatgcggcccttaccatatcggctcgtccgtggaatttgactggtgtgctgtgtcctcaattcgaactcttcgtcaactgggtaaaaagaccgtcgtcgtgaactgtaatccagaaactgtcagcaccgatttcgatgaatgtgataagttgtactttgaagagctgtccctggaaagaatccttgacatttaccatcaggaggcatgcggggggtgcatcatctcggtgggaggacagattcccaacaatctggccgtgcctctctacaagaacggcgtcaagattatgggtacctcgccactgcagatcgatcgcgcagaggacagatcaatcttttcggcagtgctggatgaacttaaagtggcccaagccccttggaaagcagtgaatactctgaacgaagcccttgaattcgcaaagtccgtcgattacccctgtttgctgcggccatcctacgtgctcagcggttctgcgatgaatgtggtcttttccgaagatgaaatgaagaagtttctcgaggaagcgacccgagtgtcccaggagcatcctgtcgtgctgaccaagtttgtcgagggtgctcgggaagtggagatggatgcggtcgggaaagacggtagagtgatctcacacgcgatctcggagcacgtggaagatgctggagtgcattcgggcgacgccaccctgatgcttcctacccaaactatttcgcaaggagctatagagaaagttaaagacgcgacccggaagatagccaaggcctttgccatttccggaccctttaatgtccaatttctcgtgaagggcaacgatgtccttgtgattgaatgtaacctgcgcgcaagtagatcatttccttttgtgtccaagactcttggggtggatttcattgatgtggcaactaaggtgatgattggagaaaacgtggatgaaaaacacctgcctaccctcgatcaccctatcattcccgctgattacgtcgccattaaagcgcctatgttttcgtggccccgccttagagacgccgatccaatactccgctgtgaaatggcaagcactggagaggtggcatgcttcggagagggtattcataccgcttttcttaaagcaatgcttagcaccggttttaagatcccacagaaaggcattcttataggcatccagcaatcattccgcccacgattccttggcgtggcagaacagctgcataacgaaggcttcaagctctttgccaccgaagcaacctcagattggcttaacgcaaacaatgtgcctgcgacccctgtggcttggccatcccaggaagggcagaatccctcactgtcatccattcggaagttgatcagagatggctctatcgatctggtgataaaccttcctaacaacaacactaagtttgtccatgacaattatgtgattagacgcactgctgtcgattccggaattccgcttttgactaatttccaagtgaccaaactttttgcagaagcagtccagaagtcgagaaaggtggattcgaagtcgcttttccattaccgtcagtactccgcaggcaaggctgcg

SEQ ID NO: 8012 - DNA, 4500 bp, synthetic construct
  misc_feature 1..4500: note = source = /note="Description of Artificial Sequence: Synthetic coding sequence"
  source 1..4500: mol_type = other DNA
atgacgaggattctgacggcatttaaggtggtgaggacactgaagaccggatttgggtttacaaacgtgactgcccaccagaagtggaagttttcacggcccggtatcaggttgctgtccgtgaaagcccagacggcacatatcgtcttagaggatggcaccaaaatgaagggatactcttttgggcacccctcttcagtggccggcgaggtggttttcaataccggccttggggggtacccagaggcaattaccgaccccgcgtataagggccagatcttgaccatggcaaatcccattattggcaacgggggggcccctgacaccacggcacttgacgagctggggcttagcaagtacctagaaagcaatggtataaaggtgtccgggctcctcgtcctcgattattctaaggactataatcactggctagccacaaaatcgctaggccaatggctgcaagaagagaaagtgccagccatctacggggtggatacacgcatgctaaccaaaatcatcagagataaagggacaatgctggggaaaatcgagttcgaaggacagccagtcgacttcgtagatcctaacaagcaaaacctaattgccgaagttagcacaaaggatgttaaggtttatggcaagggtaacccaacaaaagtagtcgccgttgactgcggcattaagaataatgttatccgactgctagtgaagcggggtgccgaggtgcacctggtcccctggaaccatgacttcactaagatggagtacgatggaatcctcattgctggcgggcccggcaatccagcattggctgaacccctgattcagaacgtgaggaaaatccttgaatcggacagaaaagagcctttgttcggtatcagcaccggtaacttgattacaggactggcagctggcgccaagacctacaagatgtccatggccaacagaggccaaaaccagccagtgctcaacatcacgaacaagcaagcattcatcacagcgcaaaaccatgggtatgccctggacaacaccttgcccgccgggtggaaaccattatttgttaacgtaaatgatcagaccaatgaggggataatgcatgagtccaagccgttctttgccgttcaattccaccctgaggttacacctggacctatcgacaccgagtatttgtttgatagttttttctcgcttatcaaaaagggcaaggccacaacaattacaagcgtgttacctaagcccgccctggtggcctctagggttgaggtttctaaagtgttgattcttggatcaggcggcctgtccatcgggcaggccggggaatttgactactccggctcacaggcagtgaaggctatgaaggaggaaaatgtcaaaactgtcctaatgaacccaaacatcgctagcgttcaaactaacgaggtgggtctgaagcaggctgacacggtatacttcctccccatcacgccccagttcgtgactgaagtcattaaagctgagcagccagatggcctaatcctcggcatgggtggtcagacggccctgaactgcggggtcgagctcttcaagaggggagtgctcaaagagtatggtgttaaagttctcggaacctctgtcgaaagtatcatggctactgaagacaggcagctgttctcggacaagctgaacgaaattaacgaaaaaattgcgccttcattcgccgtggaaagcatagaagacgcattgaaggcggccgacaccatcggatatccagttatgatcaggtcagcgtatgcgctcggagggttgggtagtgggatttgtcccaatcgcgaaacactaatggacttatcgacaaaagctttcgccatgaccaaccaaattctcgtggagaagagcgtcacaggatggaaagagattgaatacgaagtggtaagggacgcggacgacaactgcgtgacagtgtgcaatatggagaatgttgatgcgatgggagtgcacacaggagattccgtggtggtcgcgcccgcccagacactgtcaaatgccgagtttcaaatgctgcgccgcaccagcatcaatgtggtccgtcatcttggcattgtcggtgaatgcaacatccagtttgccctacatcccacttccatggaatactgcatcattgaggtcaacgcccggctgagcagatcgagtgcacttgccagcaaagccacgggatacccgcttgcttttatagccgccaagatcgcactgggcatcccccttcccgaaataaaaaatgtggtttctgggaaaacgtccgcctgcttcgagccatcacttgactatatggtaaccaagattccaaggtgggacctggacaggttccacggcacatctagtcgtatcgggtctagtatgaagagcgtgggcgaggtcatggctataggacgcacgttcgaagaaagttttcagaaggccctgcgaatgtgccacccttccattgagggatttaccccaagactaccgatgaataaggagtggcctagtaatctggatctgagaaaagagttgtccgagccatcatcaactaggatctacgcaatagccaaagccatagacgacaatatgtcactcgacgagatagagaaactcacttatatagataaatggttcctttataaaatgcgggacattcttaatatggagaaaactctcaagggcttgaacagcgagtccatgactgaggaaaccctcaaacgcgctaaagagataggattctctgacaaacagatcagcaaatgtctgggcttgaccgaggcacagactagggagttgcgcctcaaaaagaacattcatccatgggtgaaacagatagatactctggcagctgagtatccctcagtgacaaattacctttacgtcacctacaacggacaggagcacgacgtgaattttgatgatcacggtatgatggttctgggttgcggaccttatcacattgggagctcagtggaattcgactggtgcgccgtgtcatcgattcgaacacttcgtcagttaggcaagaaaacagtagtcgttaactgtaatccggaaaccgtttctactgatttcgacgagtgcgataaactgtattttgaagagctttccctggagcggatcctggatatctaccaccaggaggcctgtggcggttgtattatatcggttggcggtcagatccccaacaatcttgctgtaccactctataaaaatggggtgaaaataatgggcaccagccccctgcagattgaccgcgcagaggataggtctatcttctctgctgtgcttgatgaactcaaggtcgctcaagcaccttggaaagcagtgaatacgttaaatgaagcgctggagttcgccaagtccgtggactacccttgtcttctgaggccttcatacgtgttgtccggtagcgccatgaacgttgtttttagcgaggacgagatgaaaaaatttctggaggaggctaccagagtgtcccaagaacacccggttgtgttgacgaaattcgtggaaggcgctcgcgaagtggaaatggatgctgtgggaaaggacggaagggtgatcagccacgctatcagcgagcatgtggaagacgctggcgtccattccggtgatgcaactctcatgctgcccacacagactatctcgcaaggcgccatagagaaagtgaaggacgcaaccagaaagatcgctaaagctttcgctatctccggaccttttaatgtgcagttcttggtgaaaggaaacgacgtgttagttatagaatgcaatcttagggcaagccgttctttcccattcgtttcaaagactctgggcgtggacttcatagatgtggctaccaaagtgatgatcggcgaaaatgtggacgagaagcatctgcccacgcttgatcacccaatcataccagctgattatgtcgctatcaaagctccaatgttttcttggccgaggcttagggacgccgatccaatattgagatgcgagatggcaagtactggcgaggtggcatgctttggcgaaggaattcacaccgcattcctgaaagctatgctgagtacaggtttcaagattccccagaagggaattcttattggaatccaacagtcattcaggcctcggttccttggcgtcgcagagcagttacacaacgaggggtttaagctgtttgcaacagaggctacttccgattggctgaacgccaataatgtcccagcgacaccagttgcttggccatcccaggaggggcaaaacccttccctgtcttcaattcggaagcttatcagagatggaagcattgacttagtgatcaacctgccgaataacaacaccaagtttgtgcacgacaactatgtcatacgtcgaacagctgtggattcagggatccctctgctcaccaactttcaagtgaccaagttattcgcagaggcagtccagaagagccgaaaagtggattctaaatcactgtttcactatcgacagtattctgctggcaaggccgca

SEQ ID NO: 8013 - DNA, 4500 bp, synthetic construct
  misc_feature 1..4500: note = source = /note="Description of Artificial Sequence: Synthetic coding sequence"
  source 1..4500: mol_type = other DNA
atgactcgcatactcacggcttttaaagttgtgcgtacgttgaaaacaggctttggatttactaatgttacagcacatcagaaatggaagttctcaaggccaggaatccggctgttgtcagttaaagcgcaaactgcgcacatagttctcgaagatggcacaaagatgaaaggatatagttttggtcatccctcttcggtggcaggcgaggtagtgtttaacacgggcctggggggatatcctgaggccattacggacccagcgtataaaggccaaatacttaccatggcaaaccctatcatcggaaatgggggagcacctgacacgacggcacttgatgaattaggattaagtaaatacctggaaagcaatgggatcaaagttagcgggttgttggtccttgattattcaaaagattataatcattggttggctacgaaatcccttggacagtggcttcaagaagaaaaagtcccggccatctatggcgtcgatacgcggatgcttacaaaaatcatccgcgacaaaggaacgatgctgggaaagattgaatttgagggccagccagttgattttgtagacccgaataaacaaaatctgattgccgaggtcagtacgaaagatgttaaagtatatggcaaagggaatcctacaaaagtcgtggcggttgactgcggaattaaaaataacgtaatccgccttctagtaaaacggggcgcggaggtacacctggtcccgtggaatcatgattttactaaaatggaatatgatggcattcttattgccggcggacctggcaatccggccttagctgaacctctgatacagaacgttcggaaaattttggaatctgatcgaaaggaaccactgtttggaataagcacgggaaatcttatcactggacttgcagctggtgctaaaacatataaaatgtctatggcgaatcgcggacaaaaccaacctgttttaaatataacaaataagcaagcctttatcacagcacaaaaccatgggtatgctcttgataatacgttaccggcgggttggaagcctctgtttgttaacgttaatgatcagacaaacgagggtataatgcatgaatcgaagccgttttttgcagtacaattccaccccgaagtgaccccgggtccgatcgacaccgagtatttatttgatagcttttttagcctcattaaaaaaggcaaagccacaacgattacaagtgttcttccgaaaccggctctggtggcgagccgggttgaggtaagcaaagtgctgattttgggaagtggaggtttgagcatagggcaggcgggtgaattcgattattcggggtcacaggccgtaaaggcaatgaaagaagagaatgttaaaactgtgcttatgaatccgaatatcgcaagcgtccaaaccaacgaagtaggtctaaaacaggcggacaccgtgtacttcctccctatcacgccgcaatttgtcaccgaagttattaaggctgaacagccggatggacttattttggggatggggggacaaacggctttaaactgcggtgttgaattatttaagcgcggtgtactcaaggagtacggggtgaaagtcctcggcacatccgtggagagcatcatggcgacagaagatcgtcagcttttttctgacaagctgaatgaaattaacgaaaaaatcgccccgtcttttgccgtggaaagcattgaggatgcgcttaaggcagccgatacaatcggctatcctgtcatgatacgtagcgcatatgcactggggggcttagggtcagggatctgtcctaaccgcgaaacattaatggatctgtcaacgaaagccttcgctatgaccaaccagatcctcgtagaaaagagcgttactggctggaaggaaatagaatatgaagtggtgagagatgccgatgataactgtgtgaccgtatgcaatatggagaacgtggacgcaatgggtgtccatacgggcgatagcgttgtagtagctccggctcaaactctttctaatgcagaatttcagatgcttagaagaacatctatcaatgtggttcgtcacttggggattgtaggtgaatgtaatatacaatttgcgttgcatcctacatctatggaatattgtattatcgaagtcaacgcgagactcagcaggtcatcggctctggcaagcaaagctactggatatccgttggcctttattgcagctaaaatcgccttggggattcctctaccggaaattaaaaatgtcgtgtcggggaaaacatctgcctgcttcgagccgtcactcgattatatggttactaaaatccctaggtgggacctggatcggtttcatggaacgtcctcgagaattggaagcagcatgaaatcagttggggaagtcatggctattgggcgaacatttgaagaatcctttcagaaagcactccgcatgtgccatccttcaattgaaggctttaccccgcgacttcctatgaataaggagtggccctcaaacttggaccttagaaaagagctgtcagaaccttcgagtacacgcatttatgcgatcgctaaagcaatcgatgataatatgtctttagatgagatcgaaaaattgacatacatagataagtggttcctttacaaaatgcgtgacatcctgaatatggagaaaaccctgaaaggtttaaattctgaatctatgacggaagaaacccttaaacgtgccaaggagattggctttagcgacaagcagataagtaagtgcctcggattgactgaggcgcagacacgtgagttgaggttaaaaaaaaacattcacccttgggtaaaacaaatagatacacttgcagcagaatatcctagtgtgactaactatctctatgttacgtacaatggacaggaacacgatgtcaattttgatgatcatggcatgatggtattaggctgcggtccgtatcatatcgggtccagcgttgagtttgattggtgtgcagtcagtagcattcgaacgttgcgacaactgggtaagaaaactgtcgtggtcaactgtaatccagaaacagttagcacggattttgacgagtgcgataaactttattttgaagaactgtcgcttgaacggatcttggatatttaccatcaagaagcatgtggcgggtgcattataagtgtggggggccagattcccaacaatcttgcggtacctttgtataaaaatggcgttaaaattatgggcacaagcccactgcagattgatagagctgaagataggtctattttctcagccgttctagacgaattaaaagttgcgcaagcaccctggaaagctgtgaatacattaaatgaagctctggagtttgcaaaatcagtagattacccatgcttattaagaccgtcttacgtcttgtctgggtctgcgatgaatgtagtttttagcgaagatgaaatgaaaaagtttctggaggaagccacacgcgtgtcacaagaacatccggtagtattaacgaaattcgtggagggagcccgcgaagtggagatggatgccgttggcaaggatgggagagtgatatctcatgctatttcggaacacgtggaggacgccggggttcattctggtgatgctaccttaatgctgccgacacagacaatttcacaaggggctatcgagaaagtgaaagatgctacacggaaaatagctaaggcgtttgcgatatctggaccgttcaacgtgcaatttctagtaaaaggaaacgatgttcttgttatcgaatgcaaccttcgtgcctctcgctccttcccgtttgtctcaaaaacgcttggagttgacttcattgatgtagccacaaaagtaatgatcggtgaaaacgttgacgagaaacatttgccaacacttgatcacccgatcataccggccgattatgtggccattaaagcaccgatgttctcttggccgcggctgcgcgatgcggatcctattctacgttgtgaaatggcatcaacaggggaagttgcgtgctttggagagggcattcacacggcatttttaaaagctatgttatcgacagggtttaagattcctcaaaaaggaattcttattggaattcaacagtccttccgtccgagattcctgggagtcgcggaacagcttcataacgaaggttttaaactctttgctacggaggccacgagtgactggcttaacgcgaataacgttccggcgacaccggtagcatggccgtcacaagagggtcagaatccctctctctcttcgatcagaaaacttatcagagacggctcgatcgacctcgttattaacctccctaacaacaatacaaagttcgttcatgacaattatgtaatccggcgcacagcagttgactctggcattcctttactaacgaattttcaagtcacaaaattattcgctgaagcagtacaaaaaagccgtaaagtcgatagcaaatctctttttcattacaggcaatactcagcagggaaagcggcc

SEQ ID NO: 8014 - DNA, 4500 bp, synthetic construct
  misc_feature 1..4500: note = source = /note="Description of Artificial Sequence: Synthetic coding sequence"
  source 1..4500: mol_type = other DNA
atgacgcggatcttgaccgcctttaaggtggtccggaccttgaaaaccggcttcggattcaccaatgtgacggctcaccaaaagtggaagttctcccgcccaggaatccggctgctctccgtgaaggcccagactgctcacatcgtgctcgaagatggaaccaagatgaagggttactcattcggccacccttcgagcgttgcgggagaggtggtgttcaataccggactcggcggatacccggaagcgatcaccgaccccgcttacaaggggcaaattctcactatggcgaatccgatcatcggtaacggaggagctccggacacgactgcgcttgacgagttgggattgtcgaagtacctcgagtcgaatggaatcaaggtgtccggcctgcttgtgctggattactcaaaggattacaaccactggttggctaccaagtcgttggggcagtggctgcaggaagaaaaggtgccagccatctacggcgtggacactcgcatgttgactaaaatcatccgagacaaggggaccatgctcgggaagatcgagttcgagggtcagcctgtggatttcgtggacccgaacaaacaaaacctcatcgcggaagtgtcaacgaaggatgtcaaggtgtacggaaagggaaatccgactaaggtggtggccgtcgactgcgggatcaagaacaatgtcattagattgttggtgaagcgcggtgctgaggtccatctcgtgccctggaaccatgacttcactaagatggaatacgacggaatcttgattgcgggaggaccgggaaatccggccctggcggaaccactcatccagaacgtgcggaaaatcttggaatcggaccgcaaagagccgctgtttggcatttcgaccggaaacctgatcactggactggccgccggagcaaagacctacaaaatgtcgatggcgaaccgcggtcagaatcagccggtcctgaatatcactaacaagcaggctttcattacggcccaaaaccacggctacgccctggacaacaccctgccggccggctggaagccactgttcgtcaacgtgaatgaccaaactaacgaaggcattatgcacgaatccaagccgttcttcgccgtccaatttcacccggaggtgactccggggccgatcgacactgagtacctcttcgattcgttcttctcgctgatcaagaaaggcaaagccacgaccatcactagcgtgctgccgaagccagctctggtcgcctcgcgcgtcgaggtgtccaaggtcctcatccttggatccggaggactcagtatcggacaggctggcgaattcgactacagcggatcgcaagccgtgaaggcaatgaaagaagagaacgtcaagacggtgcttatgaaccccaacatcgcatccgtgcagaccaacgaagtcgggctgaagcaggccgacaccgtgtacttcctgccaattactccacagtttgtcactgaggtgatcaaggcagagcagccagacggcttgatcctgggaatgggaggccaaaccgcgctgaactgtggtgtggagttgttcaagagaggggtgctgaaggaatacggagtgaaagtgttggggacctccgttgagtccatcatggcgaccgaggaccggcaactcttttcagataagctgaacgaaatcaatgagaagatcgctccgtcgtttgccgttgagtcgattgaggacgctttgaaggcagcagacacgattggatacccagtgatgatcaggtcagcctacgcactcggcggcttgggatccggaatttgtccgaaccgcgagactctcatggacctgagcactaaggcgtttgccatgaccaaccaaattctggtcgaaaagagcgtgactggatggaaggagatcgaatacgaagttgtgcgggacgccgacgataattgcgtgactgtgtgcaacatggaaaacgtcgacgcaatgggagtgcataccggagactccgtggtcgtggctccagcgcaaaccctttcgaacgcagaattccaaatgctgcggcgcaccagcatcaacgtcgtgagacacctgggaatcgtcggggagtgcaacatccaattcgccctgcaccccacttctatggaatactgcatcattgaagtgaatgctagactgtcgcgcagctcggctctggcctcaaaggccactggctacccactggctttcatagctgctaagatcgccctgggaatccctttgcctgaaatcaagaacgtggtgagcggaaagaccagcgcctgcttcgaaccgtccctggactacatggtgactaaaatcccacgctgggacctggacagattccacggtacctctagccgcatcggatcgagcatgaaatccgtgggcgaagtcatggccattggacggaccttcgaagaatcattccaaaaggccctgcgcatgtgtcacccgagtatcgagggatttaccccccggctgccgatgaacaaggagtggccaagcaacctggacctcagaaaggaactttcagaaccttcctccacgagaatctacgcgattgcgaaggctatcgacgacaacatgagccttgatgaaatcgaaaagctcacttacattgacaaatggtttctgtacaaaatgagagacattcttaacatggaaaagactctcaagggactgaatagcgaatcaatgaccgaagagacgctgaagcgggccaaggaaatcggatttagcgacaagcagatcagcaaatgcctgggacttaccgaagcgcagacccgcgaactgcgtctgaaaaagaacatccatccgtgggtgaagcaaatcgacaccctggcagctgagtacccgtcagtgactaactacctgtacgtcacctacaacggacaggaacacgatgtgaacttcgacgaccatggtatgatggtcctcgggtgcggaccttaccacatcggttcgagcgtcgaatttgattggtgcgctgtgtcctccatcaggactctgcggcaactcggaaaaaagactgtggtggtgaattgcaacccggaaacggtgtcaactgacttcgatgagtgcgacaaactgtatttcgaagagctgtcgctggaaaggatcctcgatatctaccatcaagaggcctgtggcggctgcataatctccgtggggggtcagattccgaacaacctggccgtccctctgtataagaatggagtgaagattatggggacttccccgttgcaaatcgaccgcgccgaagatcggtccatcttctcggcggtgctggatgaactgaaagtggcgcaggcgccgtggaaagcggtgaataccctgaatgaagcgttggagttcgccaagtctgtggactacccgtgtctgcttcggccatcttacgttctgtccggctctgctatgaatgtggtattttccgaggacgagatgaaaaagttcctggaagaggctactcgtgtgtcacaggagcaccctgtcgtgctgaccaaattcgtcgagggagcaagggaggtggaaatggacgcggtcggaaaggatggccgggttatttcgcacgccatttccgagcacgttgaggacgctggagtgcattccggagatgccaccctcatgctcccaacccagactatctcccagggagcgatcgaaaaggtgaaggacgccactcgcaagatcgcgaaagcctttgccatctcgggaccgttcaatgtgcaattcctggtgaaggggaacgacgtgctggtcatcgagtgcaatctccgagccagccggtcctttccatttgtgtcaaaaaccctgggagtggactttatcgacgttgccactaaagtcatgattggagaaaatgtggatgaaaaacacctgcccactctggaccacccgattatcccggccgactacgtcgctataaaggctccgatgttttcatggccgagactgagggacgcggacccaatcctgcggtgcgaaatggcgagcacgggtgaggtggcgtgcttcggagaaggcattcatactgccttccttaaagctatgttgtccaccgggttcaaaattccacagaaggggatcctcattggcatccagcagtcgtttcgcccgagattcttgggtgtggccgaacaacttcacaacgagggattcaaactgtttgccactgaagcaacctctgactggctcaatgcgaataacgtgccggctacccctgtggcatggccgtcccaggaaggacaaaacccttcactctcatcaatccgcaaactgatcagagatggctcgatcgacctcgtgatcaacctgcctaacaacaacaccaagttcgtgcatgataactacgtgatcagacgcactgcggtggattcggggatccctctgctgaccaacttccaggtgaccaagctgttcgctgaagcagtgcaaaagagccgaaaagtggattccaagtccctgttccattaccgccagtacagcgctggtaaagcggca

SEQ ID NO: 8015 - DNA, 4500 bp, synthetic construct
  misc_feature 1..4500: note = source = /note="Description of Artificial Sequence: Synthetic coding sequence"
  source 1..4500: mol_type = other DNA
atgactaggattctgaccgcgtttaaggtcgtcaggactttgaaaactggttttgggttcaccaacgtgactgcacatcaaaaatggaagttttcgcggccaggtatacggctcctttcggttaaggcccagaccgcgcacatcgtgctcgaagatggaactaaaatgaaaggctactcgttcgggcatccatccagcgtcgcaggtgaagtggtgttcaacaccgggctgggaggatatcccgaagcaataactgatcctgcatacaaaggacaaattctcactatggctaaccctataatcggaaatggtggggcaccagatactactgccctggacgaactgggactgtcgaagtaccttgaatcaaacggaatcaaggtgagcgggctgcttgtcctcgactattcgaaagactacaaccactggcttgcaaccaaatccctgggccaatggctgcaagaagagaaggtaccagcaatctacggtgtggacaccaggatgctgaccaaaatcatccgagacaagggcaccatgctcggaaagatcgaatttgaaggacaaccggtcgattttgtcgatcccaacaaacagaatctgattgccgaggtgagcaccaaagacgtgaaggtgtacggaaaaggtaatccaactaaggtggtggcagtggattgtggtattaagaataatgtgattcgtcttttggtgaagagaggggccgaggtccatcttgtgccttggaaccatgacttcactaaaatggagtacgacggaatcctgatagcaggaggccctgggaatcctgcactggcagaacccctcattcagaacgtgagaaagattctcgagagcgatcggaaggaacctctgtttgggattagcaccggtaatctcatcactggactggcagcaggtgccaagacctacaagatgtcgatggccaaccggggccagaaccaacctgtgttgaacattacgaataagcaggcctttatcaccgcacagaaccatggatacgccttggataacaccctgcctgcaggctggaaaccactctttgtgaacgtgaacgatcaaactaatgaaggaattatgcatgagagcaagccattctttgcagtgcagtttcatcctgaagttactccgggacctattgacaccgagtacctgtttgattcctttttctccctcattaagaagggaaaggcgactacgattacctcagttcttcccaagccggcgttggtggcaagccgggtggaggtgtccaaggtgctcattcttggatccggtgggctgtcgattggacaagctggggagtttgactacagcggttcacaagccgtcaaagcaatgaaggaggaaaacgtcaaaacggtgcttatgaaccctaacatcgcatctgtgcaaaccaacgaagtggggctcaaacaagccgacacggtctactttcttcctatcactcctcaattcgtgaccgaagtgatcaaggccgaacagcctgatgggctgattcttggcatgggtggacaaactgcactgaactgtggggtcgagctgttcaaaaggggagtgcttaaagaatacggtgtgaaagtgctgggaacttccgtcgaatcgatcatggcaacggaagatcgccagctgttctccgacaaactgaacgagataaacgagaagatagcaccgagcttcgccgtggaatcaatagaggatgcccttaaggccgcagacactattgggtaccccgtcatgatacggagcgcatacgctttgggtggtctgggatccggtatctgtcctaaccgagaaacccttatggatctgtcaaccaaggcatttgccatgacgaaccaaatcctggtggaaaaatccgtgaccggttggaaggaaattgagtacgaagtcgtgcgggacgctgacgacaactgcgtgaccgtgtgtaatatggaaaacgtcgatgcaatgggagtgcacaccggtgatagcgtggtcgtcgcacccgcccagactctgagcaatgctgaatttcagatgcttcgaagaacttcaattaacgtcgtccgacaccttggtattgtgggcgagtgcaacatacaattcgcattgcatcctacctccatggaatactgcattatcgaagtaaacgcaagactttcgcgatcgtcggcactggcaagcaaggcaaccggataccctctggcgtttatagcagcgaagatcgcgctggggattccactcccagaaatcaaaaacgtggtgtctggtaagacttccgcatgttttgaaccctccctcgattacatggttaccaagattccccgctgggatctggatagattccatgggacgtcctcccgaattgggagttccatgaagtcggttggcgaggtgatggcaataggcaggactttcgaagaatcgttccagaaagcgctgagaatgtgccatccatctatcgagggatttaccccacgattgcctatgaacaaggaatggccttcaaacctggatctccgcaaagagctgtctgagccgtcaagcaccagaatttacgcaatagcgaaggccatcgatgacaatatgtcacttgatgaaattgaaaaacttacttacatcgataaatggtttctgtacaagatgagagacattcttaacatggaaaagactcttaagggactgaactccgaatcgatgaccgaagaaaccctgaagcgggcgaaagaaattgggttctcagacaagcagattagcaaatgcctgggattgactgaggcccagaccagagaactgaggctgaagaagaatatccatccttgggtcaagcaaattgacaccctcgcggccgagtacccctccgtgaccaactatctttacgtgacttacaacggtcaagaacatgacgtgaacttcgacgatcatggaatgatggtgcttggctgcggtccataccatattggttcgagcgtcgagtttgactggtgtgccgtgtcctcaatccgcactctgcgtcagctgggtaaaaagactgtcgtggtgaattgtaatcctgaaactgtgtcgaccgatttcgatgaatgtgacaaactctactttgaagaactgtccttggaaagaattctggatatctaccatcaggaggcctgtggcggctgcatcatttcggtcggtggacaaatacctaacaacctcgcagttccattgtacaagaacggagtcaagattatgggcacctcacctctccagattgaccgggcagaggatcggagcatctttagcgcagtgctggatgaattgaaagtcgcacaagctccatggaaagccgtgaacactctgaatgaggcactggagtttgccaaatcggttgattacccttgtctgcttcgtccttcctatgtgctctcgggttcggcaatgaacgtcgtgttctcggaagatgagatgaagaagttcttggaagaggcaacccgtgtgtcccaagagcatccggtggtgctgactaaattcgtggagggtgcacgggaggtggagatggatgcagtcggaaaggatggacgtgttatttcgcacgcaattagcgaacatgtggaagatgcgggagtccattcgggtgacgccactcttatgctgcctactcagaccatctcgcagggggccatcgagaaggtgaaggacgccactcgaaagattgccaaggcctttgcaatctcaggaccattcaacgtgcagtttctcgtgaaaggcaatgatgtccttgtcattgagtgcaacctgagagcgtcgagatcttttccttttgtgtccaagactcttggagtggactttattgatgtggcaaccaaagtcatgataggtgaaaacgtggacgagaaacatttgcccaccttggaccatcctattatccccgcagattacgtggccatcaaagcgccaatgttttcttggcccagactgcgtgatgcggacccaatattgcgctgcgagatggcatcaactggggaagtggcgtgtttcggagaggggattcataccgcatttcttaaagcaatgctttcgactggttttaagataccacaaaagggaatcctgattggaatccagcaatcatttagaccccgctttcttggggtcgcagagcagctccataatgaagggttcaagctctttgccaccgaggccactagcgattggcttaatgctaacaacgttcctgcaacccctgtcgcctggccctcacaagaagggcaaaacccatccctgtcgtccatcagaaaacttattcgcgacgggagcatagatctggtgataaatctccctaacaacaataccaagtttgtgcatgataactacgtgatcaggcgcaccgccgtggattcaggcattcctctgttgaccaatttccaggtgactaaactctttgccgaagcagtgcaaaagtcgcggaaggtggattcgaagtccctgtttcactaccgtcagtacagcgctggtaaggcagca

SEQ ID NO: 8016 - DNA, 4500 bp, synthetic construct
  misc_feature 1..4500: note = source = /note="Description of Artificial Sequence: Synthetic coding sequence"
  source 1..4500: mol_type = other DNA
atgacccgaatcttgacagcttttaaggtagtgcgtacacttaagacagggttcgggtttaccaacgtgactgctcaccagaaatggaaattcagtaggccaggaatccgactactttccgttaaggctcagaccgcccacattgtgcttgaggacgggaccaagatgaagggttactcgttcgggcacccttccagtgtggcaggcgaagtggtgttcaatactggactgggtggataccccgaggccatcaccgacccggcttacaagggacaaattctgacaatggctaaccccattattggcaatggcggggcccctgacaccactgcactggatgagcttggactctccaagtacctcgaaagtaacggtattaaggttagcggcctgctggttctcgactacagcaaagactataaccactggctcgctacaaagtccttgggacagtggctacaagaagaaaaggtcccagccatctatggtgtagatacaaggatgttaaccaagatcatacgagataaggggaccatgctggggaagatagaatttgaaggacagcccgtcgactttgtcgatccgaacaagcagaatctgattgccgaagtaagcacaaaggatgtcaaagtgtatggcaaggggaatccaaccaaggtggtggcagtggactgcggcattaagaacaatgttatccgcttgctggtcaaaagaggtgctgaggtgcacctggtaccatggaaccacgactttactaaaatggaatacgacggcatcctaattgcgggcggacccggcaacccggccctggccgagcctctgatacaaaatgtaagaaagatcctggaaagtgataggaaggagccactatttggcatttctactggtaacctgatcacaggccttgctgcaggggcgaaaacatacaaaatgagcatggccaataggggccaaaaccaaccagttttaaacatcaccaacaaacaggcattcataacagcacagaaccatgggtacgcacttgacaacaccctccccgcggggtggaagcctctattcgtcaatgtaaacgatcagaccaacgagggcattatgcacgagagtaagccattctttgctgtgcagtttcatcctgaggtcaccccaggcccaattgacactgagtacctctttgacagcttcttctccttgattaaaaaagggaaagccactacaattacctccgttctacccaagcctgcgctggtcgcttcccgggttgaggtgtccaaggtgctaatccttggatctggtgggctttcaattggccaggctggagagtttgactatagtggcagccaggcggtaaaagctatgaaagaagaaaacgtgaagaccgtcctgatgaacccaaacatcgcttctgtgcagactaacgaggtcggtctgaagcaagcagacactgtctacttcctgccaattaccccccagttcgttaccgaggttattaaggccgaacaacctgacggcctgatactgggcatggggggtcagacagcgcttaattgtggagttgaactgtttaagaggggagttctgaaggaatacggagtgaaggtactgggcacctcggttgagagcattatggctacagaggatagacagcttttctccgacaagttgaacgagatcaacgaaaaaattgctcccagctttgccgtggaaagcatcgaagacgcactgaaagccgcagacacaataggttacccggttatgatcagaagtgcctatgcgctgggaggcctgggcagcggcatttgcccgaacagagaaactctgatggacctctccaccaaagcatttgccatgactaaccagattctagtggagaagtcagtaacgggctggaaggaaatagagtacgaagtcgttagagacgcagacgataactgtgtgacggtgtgcaacatggagaatgttgacgctatgggggtacatacaggggacagtgtggtggtcgcgccagcccagaccctgtctaacgccgaatttcagatgctgaggcggacaagcataaacgtcgtgagacaccttgggattgtgggagaatgcaatatccagttcgccttacaccctacctcaatggagtattgtattatagaagtcaacgctcggctgagtcgctcttcggccctggcttccaaggctaccggataccccttggcattcatcgccgccaagatcgccctgggcattccactcccagagattaagaatgtggttagcggaaagaccagcgcatgcttcgaaccaagtcttgactatatggtgaccaagatacccaggtgggacctcgaccgatttcacggaacttccagtcgaattggcagctccatgaagtccgtcggcgaggtgatggccatcgggcgaacttttgaggagtccttccagaaagcgctcaggatgtgccatccctcaatcgagggttttaccccccggctccccatgaacaaagagtggccaagcaacctggatctcagaaaggaactgagcgaacctagctccaccaggatctatgctatagcaaaggccattgacgacaacatgagcctcgacgaaattgaaaaactcacatacatcgacaagtggtttctttataaaatgcgagatatcctcaacatggaaaaaactctgaaggggttgaattcagagtcaatgactgaagaaacgctcaagcgggccaaagagatcgggttctcagacaagcagataagcaagtgtctgggcttgaccgaagctcagacacgagaactgcgcctgaaaaagaatattcacccctgggtgaaacagatcgatacactggccgcagagtacccatctgtgaccaactacctttacgtgacctataacggccaagaacacgacgtgaactttgacgaccacgggatgatggtgctaggatgtggcccataccatattggcagcagtgtagagttcgactggtgtgcggtgtcaagcatccgtaccctccgacagctcggcaaaaagacagtggtagtaaactgcaatcctgagaccgttagtactgatttcgacgagtgtgataagctgtacttcgaagagctcagcttggaaaggattctggacatctatcaccaggaagcctgcggcgggtgcattatcagcgtaggggggcagatccccaataaccttgctgtgcccctgtacaagaatggggttaagattatgggcacgtcccctctgcagatcgatagagcagaagatcgctccatctttagcgccgtgttagacgaacttaaggtagcccaagcaccctggaaggccgtcaacacgcttaatgaagcactggaatttgccaaaagcgtggattatccatgtctgctacgaccctcttacgttctcagtgggtccgctatgaacgtggtattctccgaggatgagatgaagaagtttctggaagaggcaacaagggtgagtcaagaacatcccgtagtgctgacaaaattcgtcgaaggcgcccgagaggttgagatggatgctgtcggcaaggatggtagagtcatttcccatgctattagtgagcacgtcgaagacgccggggttcacagcggcgacgcaacactgatgcttcccacacagaccatctcccaaggcgcaatcgaaaaggtcaaagacgctaccaggaagatcgccaaggcattcgcaatatcggggccgttcaatgtgcagttcttggtaaagggtaacgacgttctcgtgatcgagtgcaatttgagggcctctcgctcctttccttttgtgagtaagacactgggggtagactttatcgatgtagctactaaggtgatgattggcgagaacgtcgacgagaagcatctgccgaccttggatcatcctatcattcccgcagactatgtggcaattaaggcccccatgttctcatggccacgactgcgcgacgcggaccccatcctgagatgcgaaatggcaagcaccggcgaggtggcttgttttggtgaaggaatccatactgcatttcttaaggccatgctatcaaccggttttaaaatcccacaaaaaggaattctgattggaatccagcagtcatttcgaccccggttcctcggtgtagcagagcagctgcacaacgaagggttcaagctgttcgctaccgaggccacctccgactggttgaatgccaataacgttcctgccactcccgttgcgtggccctcacaggaggggcagaacccatctcttagctctatacgcaaactcattcgagacgggagcattgatctcgtgataaatctgccgaataacaacacaaagttcgtgcacgacaactatgttatccggcgaacagcagttgactccggtatcccactcctgactaattttcaggtgaccaagttgttcgctgaagccgtgcaaaaatcccgaaaggtggactcaaagagcctgtttcattaccgacagtactccgcaggtaaagctgct

SEQ ID NO: 8017 - DNA, 4500 bp, synthetic construct
  misc_feature 1..4500: note = source = /note="Description of Artificial Sequence: Synthetic coding sequence"
  source 1..4500: mol_type = other DNA
atgaccaggatcctgacggcatttaaggtggtgcgtactctgaaaaccggattcggctttaccaacgtcaccgcacatcaaaagtggaagttttcccgtcctggcattcgcctgcttagcgtgaaagctcaaaccgcccatattgtgctcgaagatggtactaagatgaagggttactcatttggacacccttcttcagtggcaggagaagtcgtgttcaatactggacttggtggctacccagaggcaattactgaccctgcctacaagggtcaaattctgactatggccaacccaattatcggcaacgggggtgcacctgacaccactgcccttgatgagctcggactgtcgaaataccttgaatcaaacggaattaaggtgtcggggcttcttgttttggattatagcaaggactacaaccattggcttgcaactaagtcacttggacaatggcttcaagaggagaaagtgccagccatatatggagtggacactagaatgctgaccaagatcatccgggataaaggaactatgttgggaaagattgaatttgaaggacaaccggtggactttgtggatcctaacaagcaaaaccttattgcagaggtgtcaactaaggatgtcaaggtctacggtaagggtaatcctaccaaggtggtggcagtggactgtggaatcaagaataatgtgatccggcttcttgttaaacgcggagcagaggtgcaccttgtcccttggaatcacgattttaccaagatggagtacgatggaatactgattgcaggagggcctggaaatcccgccctcgcagaacctctgattcaaaacgtgcgaaagattctcgagtctgacagaaaagaaccgctttttggaatatcgactggcaaccttatcaccggtctggccgcaggtgccaagacttacaagatgtccatggcaaaccgaggccaaaaccaaccagtgcttaacataaccaataagcaggcattcattactgcacaaaatcatggttacgccctcgataacactctgcccgcagggtggaagcctcttttcgtgaacgtgaacgatcagaccaatgagggaattatgcatgagagcaagccctttttcgcggtccaatttcatccagaggtcaccccaggacctatcgacactgagtatctttttgattccttcttctcgctgattaagaagggaaaggcaacgactattacttcggtgctgccaaagccagcccttgtggcgagcagggttgaggtttccaaggtccttattctggggtcgggcggcctttctatcggccaagccggagagtttgattattcggggtcgcaggcagtgaaggccatgaaggaagaaaacgtcaagaccgtgcttatgaaccctaacattgcctccgtgcagactaatgaagtcggtctgaaacaggctgatactgtgtactttctcccgatcactccacagtttgttaccgaagtgattaaggccgaacaacctgacggtcttatccttggaatgggaggtcaaacggcgcttaactgcggagtggagcttttcaagagaggagtgctgaaggaatacggggtgaaggtgcttggaacctccgtggaatcgatcatggcaaccgaggataggcaattgttttcggacaagctgaacgaaatcaatgagaaaattgctccctcgttcgccgtggagagcattgaagatgcacttaaagcggctgacaccattgggtacccagtgatgatcagatcggcatacgctcttggtggcctgggatcaggtatttgtcctaacagagaaaccctgatggacctttcgacgaaggcatttgcaatgacgaaccagatcctcgtcgagaagtcggtgactggatggaaggaaattgaatacgaagtggtgcgtgatgcagacgataactgtgtgactgtgtgcaacatggaaaatgtggatgccatgggtgtccataccggagactccgtggtggtagcccccgcccaaaccctgagcaacgctgaattccagatgcttagacgaacttcgattaacgtcgtgaggcatttgggaattgtgggagagtgcaatatccagttcgctctgcatcctaccagcatggaatactgcattattgaagttaacgcccgcctctccaggtccagcgcacttgcaagcaaggccacgggatacccgctggcctttattgcagcaaagattgcacttggaattcctcttcctgaaatcaagaacgtggtgtcgggtaagacttcggcctgttttgagccaagccttgactacatggtcaccaaaatacctagatgggatcttgaccggtttcacgggacttcctcaaggattgggtcgtcgatgaagtccgtgggagaggtgatggcaatcggcagaactttcgaagagtctttccagaaggcactccggatgtgtcatcctagcatcgagggatttactcctaggctccctatgaataaggaatggccatccaacctggacctgcgaaaagaactcagcgaaccttcgagcaccagaatttacgcaattgcaaaagcaatcgatgacaacatgtctcttgacgaaattgagaagctgacgtacattgataagtggtttctctataagatgcgggacattttgaacatggaaaaaacccttaagggactgaactcggagtccatgactgaagagacgcttaagcgggcgaaggaaattggcttttccgacaaacagatttccaaatgtcttggtctgactgaagctcagaccagggagctgcgccttaagaagaatatacatccttgggtgaagcaaattgacacccttgcagcagaatacccatcggtcactaactacctgtacgtcacctataacggtcaggaacacgatgtgaattttgatgaccatggtatgatggtccttggctgtggcccctaccatattggttcatcggttgaatttgattggtgtgcagtgagctcaatacgtaccctgaggcagctcggaaaaaagacggtggtggtgaactgtaatccagaaaccgtgtcaaccgattttgatgaatgtgataaactctactttgaggaattgtcacttgagcggattcttgacatataccatcaagaagcatgcggtggttgtataatctcagtgggagggcaaatcccgaacaatctggcagtgccgctctacaagaacggggtcaagattatggggacgagccctcttcagatagatagggcggaagatagatcgatcttctccgcggtgttggatgagctgaaggtggctcaagcaccttggaaggcagtgaatacgctcaatgaagctcttgagtttgcaaagtcggttgattacccatgtctgctccggccaagctacgtcctttcgggatcggcaatgaatgtcgtctttagcgaagatgagatgaagaagtttctcgaagaagccaccagagtgagccaggaacaccccgtcgtgcttaccaaatttgtcgaaggagcaagggaagtggagatggatgcagtgggcaaggacggacgcgttatatcgcatgcaatttccgagcacgttgaggatgccggtgtgcactcgggcgacgcaacgctgatgcttcctacccagaccatatctcaaggcgccatagaaaaggtgaaagatgccactcgcaagatcgcaaaggcattcgccatatcaggaccctttaatgtccaattcctggtgaagggaaacgacgtcctggtgattgaatgcaacctcagagcaagccggtcctttccattcgtgtcaaagaccctcggagtggatttcattgacgtggctactaaggtcatgatcggtgaaaatgtggacgaaaagcatctgcctaccctggatcaccccatcatacccgcagattacgtggcaatcaaggcacctatgttctcctggccaagacttcgcgatgcagatcctattctgaggtgcgaaatggcctcaactggtgaagtggcttgctttggagaaggcatccatactgcatttcttaaagcaatgctctcgactggtttcaagattccgcagaagggaatccttattggaattcagcagtcatttcgcccaagatttcttggtgtggccgaacagttgcacaatgagggtttcaagctgtttgcaactgaagcgacttccgattggctgaacgccaacaacgttccagcgactccagtggcctggccatcgcaagaaggacaaaacccatcgttgagctccattcggaagctcattcgggacggatcgattgatctggtgatcaacctccctaacaacaacactaagtttgtgcacgataactatgtgatccgcaggaccgccgtggatagcggaattccactcctgactaacttccaggtcaccaaactgttcgccgaagcggtccagaagtcccgtaaggtggatagcaaatcgctctttcactacagacaatactccgcaggaaaggcagca

SEQ ID NO: 8018 - DNA, 4500 bp, synthetic construct
  misc_feature 1..4500: note = source = /note="Description of Artificial Sequence: Synthetic coding sequence"
  source 1..4500: mol_type = other DNA
atgaccagaattttgaccgcattcaaggtggtccgcaccctcaagactggatttggattcaccaacgtgaccgcgcatcaaaagtggaagttttcccggcccggaatcagactgctgtcagtgaaagcccagacggctcacatcgtcttggaggacggaactaagatgaagggatactccttcggccacccatcctcagtcgcgggagaggtcgtgttcaacacgggacttggagggtaccctgaagctattacggatccagcgtacaaggggcagatcctcactatggctaatccgatcattggaaacggaggcgccccggacaccaccgcgcttgatgagctgggactttcaaagtacctcgagtcaaatgggatcaaagtctccggactgctggtcctggattacagcaaggactacaatcactggctggctactaaatccctgggacagtggctgcaagaagaaaaggtgcccgccatctacggagtggataccaggatgcttactaaaatcatcagggataagggaactatgctgggcaagattgagttcgaaggtcagccggtcgattttgttgatcctaacaagcagaatctcatcgctgaagtgtccaccaaagatgtgaaagtctatggcaagggcaatccaaccaaagttgtcgctgtggattgcggaatcaagaacaatgtgatccggcttctcgttaagcggggcgcggaagtgcacctggtcccgtggaaccacgactttaccaagatggagtatgacggaatcctgattgcggggggcccaggaaacccggccctggccgaaccactgattcagaatgtccggaagattcttgagtcggatcgcaaggaaccattgttcggcatctcgactggtaacctgatcactgggctcgccgcgggggccaaaacttacaagatgtcgatggcaaatcggggacagaaccaaccggtgttgaatatcactaacaagcaggcgtttatcactgcccaaaatcacggatacgccctggacaacactctgccagcgggctggaagcctctgtttgtgaacgtcaacgatcagactaatgagggcattatgcacgaatccaaaccatttttcgccgttcagttccacccggaagtgactccggggccgattgacactgaatacctgttcgacagcttcttcagcctcatcaagaaagggaaggccactaccatcacgtctgtgctccccaagcccgccctggtcgcttcaagggtcgaagtgagcaaggtgttgatactgggctccggtggactgagcatcgggcaggcaggagaatttgattactcggggtcgcaggcagtgaaggcgatgaaagaagagaacgtgaaaacggtgctgatgaacccgaacatcgcctcggtccaaactaatgaggtgggcctgaagcaggccgacaccgtttacttcctcccaatcacccctcaatttgtgaccgaagtcatcaaagctgagcaaccggacggacttattctgggcatgggtggacagaccgccctgaactgcggggtggaacttttcaaacgtggcgtgttgaaagaatacggcgtgaaagtgctgggaacctcggttgaaagcatcatggcaaccgaggaccgccagctgttttcagacaagctcaatgagattaatgagaagatcgcgccgtccttcgcggtggagtccattgaggacgccctcaaagcagcggacactatcggatacccagtgatgatccgatcggcctacgccctgggcgggctgggatcgggaatctgtcctaacagggaaactttgatggatctctctaccaaagcgttcgcaatgaccaaccagatccttgtcgagaagtcagtcactggctggaaggaaatcgaatacgaggtggttcgcgatgccgatgataactgtgtcactgtgtgcaacatggaaaacgtggatgcaatgggagtgcacaccggcgacagcgttgtggtggccccggcccagactctgtctaatgccgagttccaaatgctccgacgaacctccatcaacgtcgtgagacatctgggaatcgtcggcgagtgtaatatccagttcgctcttcatcccactagcatggagtactgcatcatagaggttaatgccaggctgagccggtcgagcgcactggcaagcaaagctaccgggtaccctctggctttcatcgccgccaagatcgccctcggcataccgctccctgaaatcaagaacgtcgtgtccggcaagacttcggcatgcttcgagccttccctggactatatggttactaagattccgcgctgggacctggaccggtttcacggaaccagctcacgcatcggctcgagcatgaagtcagtgggggaagtcatggccatcggacgtactttcgaggaatcgtttcagaaggctcttaggatgtgccatccgagcatcgagggattcactcctcggctgcccatgaataaggagtggccgtctaacttggacttgcggaaggaactctccgaaccgtcgtccacccggatctacgcaatcgcaaaagcgatcgatgacaacatgtcactcgatgaaatcgagaaactcacttacatcgacaaatggttcctctataagatgcgcgacatcctcaatatggaaaagacccttaaaggactgaatagcgagtccatgacggaagagactctcaagcgcgccaaggaaatcggcttctcagacaaacagatctcaaagtgcctcggactgaccgaagctcaaacccgcgagctgagactgaagaagaacattcacccctgggtgaagcagattgacacgttggccgccgaatacccaagcgtcaccaattacctgtacgtgacctataacggccaggaacacgatgtgaacttcgatgaccacggtatgatggtcctgggatgtggaccctatcacatcggtagctcggtggaatttgactggtgcgctgtgtcgtcaatccggaccctcagacagctgggaaagaaaacggtggtggtgaactgtaaccctgaaaccgtctccactgacttcgatgaatgcgacaaactttactttgaagaactgtcgctggagcggatcttggacatctaccatcaagaggcgtgtggaggctgcatcatcagcgtcggtgggcaaattcctaacaatctggctgtcccgctctataagaacggagtcaaaatcatgggaacttctcctctgcagatcgatcgcgcagaggaccggagcatcttcagcgcagtgctggatgaactcaaggtggcccaagctccgtggaaggccgtgaataccctgaacgaggccctcgagttcgcgaagtcggtcgactacccatgcctgcttagaccctcctacgttttgtcaggatcggcgatgaacgtcgtgtttagcgaagatgagatgaagaaattccttgaggaagcgactcgcgtgtcgcaggagcatcctgtggtcctgaccaagttcgtggaaggcgcgcgggaagtcgagatggatgcagtcggaaaagacggaagggtgatttcccacgccatctcagagcacgtggaagatgcgggggtgcactcgggagacgccacgctcatgctgccaacccaaaccatcagccaaggagccatcgaaaaagtcaaggacgcgacccggaagatcgccaaggcatttgcaatcagcggcccttttaacgtgcagttcctggtgaaggggaatgacgtcctggtgattgaatgcaatcttagagcttcacggtcgtttccgttcgtctcgaaaactctgggtgttgactttatcgatgtggcgactaaagtcatgatcggagaaaatgtggacgaaaaacacctccctaccctggaccaccctataatcccagctgactacgtggccatcaaggcgccgatgttttcctggccgagactccgcgatgctgacccgattttgagatgtgagatggcttccaccggagaggtggcctgtttcggagaaggaattcacactgccttcttgaaggcaatgctgtcaaccggattcaagatcccacagaagggcatcctcatcggcatccaacagtcattccgcccgagatttctgggtgtcgctgaacagttgcacaacgagggattcaaactgttcgccaccgaagcaacttccgactggctcaacgccaacaacgtgccggcgacgccggtcgcatggccttcacaagagggccagaacccatcgttgtcctccatccgcaagctgattcgcgacggttctatcgacctcgttatcaacctgccgaacaataacactaaattcgtccatgataactacgtgattcggcggactgccgtcgattcaggcatcccgctgctgaccaatttccaagtcaccaagctgtttgccgaggccgtccagaagagccgcaaggtggactccaagtcgctctttcactaccgacagtactccgctgggaaagccgcc

SEQ ID NO: 8019 - DNA, 4500 bp, synthetic construct
  misc_feature 1..4500: note = source = /note="Description of Artificial Sequence: Synthetic coding sequence"
  source 1..4500: mol_type = other DNA
atgacacgcattcttacagcgtttaaagtggtgcggactcttaagacaggctttggcttcaccaacgtcacagctcaccagaagtggaagtttagtaggccgggaattaggttgttgtctgtaaaggcccagactgcacacatcgtacttgaggatgggacaaaaatgaaggggtactctttcggacacccttcctccgtggctggcgaagttgtgtttaatactggacttgggggctaccccgaggccataaccgatcctgcttacaaaggccagatattaacgatggccaacccgatcatcggaaacgggggcgcaccagatactaccgcgctcgatgagctgggcctcagtaaatacttggagagcaatggtatcaaagtcagcgggctgctcgttctcgactattccaaagactataaccattggctcgccacaaagtctctcggccagtggctgcaggaagaaaaggtaccagctatatacggagtcgacactagaatgctgacaaaaatcatcagggataagggcaccatgctggggaagattgaattcgaaggacaacctgtggatttcgtggatcccaacaagcagaatctgattgcagaggttagcactaaggatgtgaaggtttacggaaagggcaatcctacaaaggtcgtggctgttgattgtggaatcaagaacaatgttattaggctgctagtgaagaggggagccgaggtacatctggtcccttggaaccacgactttactaagatggaatacgatgggatactgattgccggaggtcctggcaacccagcccttgcggagcccctgatacagaacgtgaggaagattctggagtcggataggaaagagccgctgtttggcatttctacaggcaatttaattaccggactggccgctggcgcaaaaacctacaaaatgtcaatggccaatcggggccagaatcagcccgtactcaacatcaccaataaacaagcttttattaccgctcagaaccatggctacgctctcgataacaccctgcctgccgggtggaaaccactttttgtaaacgttaatgaccagactaatgaaggcattatgcacgaatccaagccattctttgcagtgcaattccacccggaggtcacaccggggccgatcgataccgaatatctattcgactcctttttctcactgattaagaaaggaaaggcgactacaattaccagcgtactcccaaagccagcactcgtggcttcccgggtggaagtgtccaaagtgctaatcttaggatcaggcgggctcagtattggccaagcaggcgaattcgactactcaggtagtcaggcagtgaaagccatgaaggaagaaaatgtaaagaccgtgcttatgaatcctaatatcgcaagtgttcaaacaaacgaggtgggacttaaacaagcagacaccgtgtactttctgcccatcactccgcagttcgtgacggaagtgatcaaagccgagcaaccagatggcctgatcttgggaatgggcggtcagactgctttgaattgtggcgtggagctttttaagaggggcgttctgaaggaatatggggtgaaagtgctagggacaagtgtcgaatccataatggcaaccgaagaccggcagctgttctcagataagcttaacgagattaatgaaaagatcgcgccttctttcgctgtcgagagtatagaggacgccctgaaagcagccgacacaattggttaccccgtgatgatccgatccgcttacgcactcggtggtttaggttcggggatttgtccgaacagggagactctgatggatcttagtactaaagcctttgcgatgacaaaccagatccttgttgagaagtccgtaaccggttggaaggaaatcgaatatgaagtcgtgcgggacgccgacgacaattgcgtgactgtatgtaatatggaaaacgtcgacgctatgggagtgcatactggcgactcggtagtggtggccccggcacagacactttccaatgcagaattccaaatgctccgtagaacatccatcaacgtggttaggcacctcggtattgtcggagagtgcaatatacagtttgcactgcatcctacaagcatggaatactgtatcatcgaggttaatgctagactcagtcggtcttccgcactcgcctcaaaagcaaccggataccctcttgcttttattgcagctaagatcgcgcttgggattcccctgccagaaatcaagaatgtcgtctccggtaagaccagcgcttgttttgaacccagcctagattatatggtcacgaagatcccgcgctgggatctggataggttccacgggacctcttctagaatagggtcctctatgaaatccgtgggagaagtcatggcaatcgggaggaccttcgaggagtccttccaaaaggccttgcgaatgtgtcacccctcaatagaaggatttaccccccggttgccaatgaacaaggagtggccttctaacttagacttgcgtaaggagctgagtgagcccagctcgacaagaatttatgccatcgcaaaggcaatagatgataacatgagtcttgacgagatcgagaagctgacctacatcgataagtggttcctgtacaagatgcgagacatactcaatatggaaaagactctaaaaggccttaactccgaatctatgacggaggagacactgaaacgggccaaagagattggcttttcagataagcagatctccaaatgtctgggactcaccgaggcacagaccagagagctgaggctgaagaaaaacatccacccctgggtgaagcagatagacacattggcagctgagtatccgagcgttactaactatttgtacgttacctataacggacaggagcatgacgtgaatttcgatgatcatggcatgatggtcctcggctgcggaccgtatcatatcggatccagtgtcgagttcgactggtgtgccgtgagcagcattagaacgctcagacagctgggtaagaagaccgtggttgtaaactgcaacccggagacagtctctactgatttcgacgagtgtgacaagctctacttcgaagaattgtcgctggaacggattctagacatttatcaccaagaggcttgtggtggatgtataatctctgtggggggccagatccctaataacctggccgttccactgtacaaaaatggagtgaagataatgggaacatcccccctgcagatcgaccgcgctgaggaccggagtattttttccgccgtgctggacgagttgaaggtcgcccaagcaccttggaaggccgtgaataccctgaatgaggcgctggaattcgccaaatctgtggattatccatgtctcctccgcccctcttacgttctcagcggcagtgccatgaacgtggtctttagcgaggacgaaatgaaaaagttcctagaggaggcaacccgggtgtctcaggagcacccagtggtcctgacaaagttcgtagagggagccagggaagttgagatggatgccgtgggtaaagacgggagagttatttctcacgctattagtgagcacgtagaagatgcaggagtccactccggagatgctacacttatgctgcctacgcaaacgattagtcagggggccatcgaaaaggtgaaggacgccactcggaaaatcgccaaggcatttgcgatcagtgggcctttcaacgtgcagttcctagtgaaggggaatgatgtgttggtgattgagtgcaatctaagggcttctcgcagcttcccgttcgtctcaaaaactcttggagtggatttcattgatgtggcaacaaaggtcatgatcggcgagaatgtcgacgagaaacacttgcctaccctggaccatcctattattccagctgactacgtggctattaaggctcctatgttttcatggccccgcctgagagatgcggatcctatccttcgatgtgaaatggcatcaactggcgaggtagcttgctttggtgaaggcatccatactgccttcctcaaggctatgctgtctaccggtttcaagatcccgcagaagggcatcctgatcgggatccagcagtcttttcgccccagattcctgggcgtcgcggagcagctgcacaatgaaggatttaagctctttgctacagaagctacctctgactggctcaatgccaacaacgtcccagcgacacccgtggcctggcccagccaggagggacagaaccccagtctgagttctatcaggaaactcattcgagacggctccatcgatctcgtcataaacctccctaacaataacactaaattcgtgcatgataactatgtaatccggagaacggcagtcgacagcggaatacctctgctaaccaactttcaagtgacaaagttgttcgccgaggctgtgcaaaagtccaggaaagtagactccaaatcactcttccactatcgtcagtactccgctggcaaggccgcc

SEQ ID NO: 8020 - DNA, 4500 bp, synthetic construct
  misc_feature 1..4500: note = source = /note="Description of Artificial Sequence: Synthetic coding sequence"
  source 1..4500: mol_type = other DNA
atgaccaggatccttactgctttcaaggtcgttcgcacgctgaaaaccggattcggtttcactaatgtgacggcacaccagaagtggaagttctcgcggcctggcattcgcctcctctccgttaaggcgcagaccgctcacatcgtgctggaagatggaactaagatgaagggatactctttcgggcatccgtcgagcgttgccggcgaagtggtgttcaacactggactcggaggttacccagaagctattactgacccggcgtacaagggacaaatcttgactatggccaacccgataatcggaaacggcggcgcgccagataccaccgcgctggacgaactggggctctccaaatacctcgaaagcaacgggatcaaggtcagcggcctcctggtcctcgactactcgaaggattacaaccattggctggctacgaagtccctggggcagtggctccaagaggaaaaggttcctgcgatctatggagtcgacactcgcatgcttactaagatcatccgggacaaaggcacgatgctggggaaaatcgaatttgaaggccagcccgtggacttcgtggacccaaacaagcagaatcttatcgcggaagtgagcaccaaggacgtgaaggtctacggtaagggaaatcctaccaaggtcgtggcggtcgactgcggaatcaagaataatgtgatccggctcctggtgaaaagaggggccgaagtgcatcttgtcccgtggaaccatgattttacgaagatggaatacgacggaatcctgatcgcaggaggaccaggaaatcctgccctggcggaaccgctcattcaaaacgtgcgcaagattctcgagtcggatcgcaaagaaccacttttcgggatatctaccggcaacctgattactggcctcgccgctggagccaagacttacaagatgtctatggcaaaccggggtcaaaaccagccagtcctgaacatcaccaataagcaggcctttatcaccgcccagaaccacggatacgctctggataatacgctgccggcaggctggaaaccgctgttcgtgaatgtcaatgatcagacgaacgagggaattatgcacgagtccaaacccttctttgcggtgcagttccaccctgaagtgaccccgggaccgatcgacactgagtatttgttcgattcctttttctcccttatcaaaaagggaaaggctaccactattacttccgtcctgccgaagcctgcccttgtggctagcagggtggaagtgagcaaagtgctcatcctgggatcaggaggactttcaatcggacaagcgggtgaattcgactacagcggatcgcaggcggtgaaggctatgaaggaggaaaacgtgaaaactgtgctgatgaatccaaatatcgcttcggtccagaccaacgaggtcggactgaagcaggccgatacggtgtatttcctgcctataacccctcaattcgtgaccgaggtgattaaggccgaacagccggatggactgatcctgggcatgggcggacaaaccgcactcaactgtggagttgaactgttcaagcgcggggttcttaaggaatacggggtgaaagtgcttggtacctcggtggaatcgatcatggcgactgaagataggcagctgttttcagacaaattgaacgagatcaatgagaagatcgcgccctccttcgcggtggaaagcattgaggatgcacttaaggccgcggacactatcggctaccctgtcatgatacgatcagcatatgcccttggaggcctcggtagcggaatctgcccgaacagagaaacgcttatggacctgtccaccaaagccttcgcgatgaccaatcaaatcctcgtggagaaaagcgtcactggttggaaggaaattgagtacgaagtggtgcgcgacgccgacgacaactgcgttacggtgtgcaacatggagaacgtggatgctatgggggtccacaccggagactccgttgtggtcgcgccggctcaaactctgtcgaacgccgaatttcagatgctccgtcgcacctcaatcaatgtggtgaggcatctgggtattgtcggcgaatgtaatatccagttcgccctccacccgacttcaatggagtactgcatcatcgaagtgaacgcgcgcctctcgcggtcgtcagccttggcatccaaggccactggatacccgctggccttcatcgctgcgaagatcgcactcggcatcccactcccagaaatcaagaacgtggtgagcggtaagacttcagcatgcttcgagccctccctggattacatggtcacgaaaatcccgagatgggacctggaccggttccacggcacctcgagcagaatcggttcgagcatgaaatcggtcggcgaggtgatggccatcggaaggacctttgaggagagcttccagaaggccctgcgcatgtgccatccgtcaatcgaagggtttacgccgcggttgccgatgaacaaagagtggccgtcgaacttggatctgagaaaggagctgtcagaaccgtcgtccaccaggatttatgcaatcgcgaaagcgattgacgataacatgtcgttggatgagattgaaaagttgacctacatagacaaatggttcctgtacaagatgcgggacatcctcaacatggaaaagactctcaagggactgaactcggagtccatgactgaggagactctcaaaagagcgaaggaaatcggattctctgacaagcagatctcgaagtgcctgggccttaccgaagcacagactcgggagctgcggctgaagaagaacatccacccttgggtgaagcaaatcgatacgctcgccgctgagtacccttccgtgacgaactacctctacgtgacctataacggccaggaacacgacgtgaattttgatgaccacggaatgatggtgctgggttgcggaccgtaccacatcggctcgagcgtggaattcgactggtgcgccgtgtcgagcatcagaacccttagacagctgggcaaaaagaccgtcgtggtgaactgcaaccccgagactgtctcaactgacttcgatgagtgtgacaaattgtacttcgaagaattgtccctcgagcggattctcgatatctaccaccaggaagcgtgcggaggatgtatcatctccgtcggaggacaaatcccgaataacctggcagtccctctctacaagaacggtgtgaaaatcatgggaacttccccgctgcagatcgaccgggcggaagatcgaagcatcttttccgccgtcctcgacgaactcaaagtcgcccaggccccgtggaaagcagtcaatacgctcaacgaggcactcgaattcgctaaatctgtcgactacccatgtctgctgcgccctagctacgtgctgtcgggttcggccatgaacgttgtgttttcggaagatgagatgaagaaatttctggaggaggcgacccgggtgtcccaagagcatcctgttgtccttaccaagtttgtggaaggtgcaagggaagtggaaatggacgctgtgggcaaggatggccgcgtgatctcacacgcaatctcggagcacgtcgaagatgcaggagtccattcgggggacgccactttgatgctgcccacccagactatctcccaaggcgccattgaaaaggtcaaagatgcgactcgcaagattgccaaggctttcgcaatctcaggaccattcaacgtgcaattcctcgtgaaaggcaatgacgtgctggtgatcgagtgcaatctccgagctagcaggtccttcccgtttgtgtcaaagactcttggagtggatttcatcgacgtggcaacgaaggtgatgatcggagagaatgtggacgaaaagcacctgccgacgctcgaccacccaatcatcccagctgactacgtcgccattaaggcaccaatgttctcatggcctaggctgcgcgacgcggatccgatcctgagatgcgagatggcctccaccggggaggttgcctgtttcggagaaggtatccataccgccttcctcaaggcaatgctgtccacggggttcaagatcccacagaagggcatcctgataggcattcagcaatccttccgcccccggttcctgggcgtggcggagcaattgcataatgaggggttcaagctgttcgctactgaagccacctcagactggctgaacgcgaacaacgtgccggccaccccggtggcttggccatcccaagagggacaaaatccttccctgtcgtcgatcagaaaactgattcgcgatggaagcatcgacctggtgatcaatctgccgaacaacaatacgaagttcgttcacgataactacgtgatccgccggaccgccgtcgactccggcatcccgctgttgaccaattttcaagtgactaagctgtttgcggaggccgtccagaaatcgcgaaaggtcgattccaagtcgctcttccattacaggcagtactcagccggaaaagccgcg

SEQ ID NO: 8021 - DNA, 4500 bp, synthetic construct
  misc_feature 1..4500: note = source = /note="Description of Artificial Sequence: Synthetic coding sequence"
  source 1..4500: mol_type = other DNA
atgacacgtatactgacagcttttaaggtggtgcggactcttaagaccgggttcggattcaccaatgtgacggcgcatcaaaagtggaagttctccagaccagggatccgcttgctgagtgtgaaagcacagactgcccacatcgtgctggaggacggtacaaagatgaagggttacagttttggacacccgtcctcggtagctggagaagtcgtatttaataccgggctggggggataccccgaggccataacagatcctgcctataaaggccaaatcctgaccatggcaaatccaataattggaaacggcggcgcccccgacacaacggccttagatgagctgggattaagcaagtacctggaatcaaacgggattaaggtgtctggtctcctggttctggactattccaaggattacaatcactggctggccaccaaatcactgggtcagtggctccaggaggaaaaagttcccgcaatctacggagtagacacacgcatgttgaccaagatcatcagggataaaggaaccatgctgggaaaaatcgaattcgagggtcagcccgttgacttcgtcgatcccaacaagcagaacctgattgcagaggtgtcaacaaaggacgtcaaggtgtacgggaagggcaatccgaccaaggtggtcgccgtggactgcggaatcaaaaacaacgtgattcggctgctggttaaaaggggcgccgaagtccatctggtaccgtggaatcatgatttcaccaaaatggagtacgatggcattctaattgccggaggcccgggaaatccagcattagccgagccattgattcagaatgtgcgaaagatcctcgaatctgatagaaaagaaccgctctttggaatatccaccggtaatctcatcaccggactggccgccggcgccaaaacctacaagatgagcatggcgaatcgcggtcagaatcaaccggttctgaatatcacaaacaagcaggcctttatcacggcccagaaccacgggtacgccttggataatacgttgcccgccggctggaagcctctgtttgtcaatgtgaatgaccagaccaacgagggaatcatgcacgagagcaaaccattctttgccgtgcagtttcatcccgaggtgaccccagggccaattgatacggaatacttattcgactctttcttctccctgattaagaaaggaaaggcgacgaccattaccagtgtgctgccaaagccagcgctagtggcatcccgcgttgaagttagtaaagtgctgatcctgggaagtggtgggctgagcattggtcaggccggggagtttgattacagtggctctcaagccgtcaaggccatgaaggaagagaacgtgaagacagtcctgatgaacccaaacatcgcgtcggttcaaacgaatgaggtgggactgaagcaagcagatactgtctatttcctgccaattacaccacaattcgtaacagaagtaattaaggcagaacagcccgacggtttgatcctcggcatgggtgggcagaccgcgctcaactgtggcgtcgaactattcaagcgaggtgtgctgaaagaatatggtgtgaaggtgctggggaccagcgtggagtccattatggccactgaagatcggcagctgttttccgacaagctgaatgagatcaatgagaagatagccccttcgtttgccgtggaatcaatagaggatgctctgaaagccgcggacacaatcggatatccggtgatgatccgctcagcttacgcactcggaggcctcggatcagggatctgcccaaaccgagagactctcatggacctgtctacaaaggcatttgccatgactaaccaaatccttgtggaaaaatccgtcaccggatggaaggagatcgaatacgaggtcgtccgagacgccgatgacaactgcgttaccgtgtgtaacatggagaacgtggatgcaatgggcgtgcacaccggcgactctgtagtcgtggccccagcgcaaactttatcgaacgctgaatttcagatgctcagaaggacctccattaacgtggtcaggcacttaggtattgtcggcgaatgcaacatccagttcgcactccaccccacgagcatggagtactgtatcatagaggtgaacgcccggctctctcgatcctccgcattagcatccaaggccacaggttacccgctggccttcattgccgctaagattgcactcggcatcccgcttccagaaatcaaaaacgtggtgtccgggaagacgtctgcctgtttcgaaccttctttggattatatggtcaccaagatcccacggtgggatctggacaggtttcacggtaccagctcccgaatcgggagctcaatgaaatcggtcggcgaggtgatggctataggccgcacatttgaggagtcttttcagaaggccctcaggatgtgtcatcctagcatcgaaggattcacgccacgtcttcccatgaataaggaatggccgtccaatctagacctgcggaaagagctttccgagccttctagcacacggatctatgccatcgctaaggccatcgatgataacatgtcactagacgaaatcgagaagctcacatacatcgacaagtggttcctttataagatgagagatatcttgaacatggagaaaacgctgaagggactgaacagtgagtcgatgaccgaggaaactctgaagagggccaaggaaatcggcttctctgacaagcagatcagcaaatgcctggggctgacagaggcccagaccagagagctacggctgaaaaagaatatccatccttgggtgaagcagatcgacaccttggcggccgaatacccctctgtgacaaattacctgtacgtgacctacaacggccaggagcacgatgttaatttcgatgaccacggtatgatggtgctgggatgcggaccctatcatatcggcagcagtgttgagtttgactggtgtgccgtatcatcaattcgtacactgagacagctgggaaagaagaccgtggtggtcaactgtaatcctgagaccgtgtcgacagactttgacgagtgtgataaactgtacttcgaggagctcagtctggaacggattctggatatctatcatcaagaggcctgcggaggttgtatcatttctgtcggtggacagattcccaacaatctggctgtgcccctatacaagaacggcgtcaagataatggggacctcccccctgcagatagaccgggccgaagatcggtcgatcttctctgcagtgctggatgagctgaaggtggctcaagcaccttggaaggcagtaaatacccttaacgaggccctcgagtttgccaagtcagtcgactacccatgcctgctgagaccaagctatgtgctgtccggtagcgcaatgaatgtagtctttagcgaagacgagatgaagaagtttctcgaggaagcaacgcgagtgagccaggagcacccagtagtactgactaagttcgttgaaggagcccgcgaggtagagatggacgctgttggaaaggatgggcgggtcatttcgcacgcaatatccgagcatgtcgaggatgcaggcgtgcatagtggagacgcgacactgatgctacccacacagacaatcagccaaggcgctatcgaaaaggtcaaggacgccactaggaaaatcgccaaagcctttgcgatcagtgggcccttcaacgtacagtttctggtcaaaggtaatgacgtcctggtgatcgagtgcaatttgcgtgcatcccgctccttcccctttgtgtctaagaccctcggagtggattttattgacgtagcaacgaaggtgatgatcggagagaacgtggacgaaaaacaccttccaacactggaccacccaatcatccctgccgattacgtggctattaaggctcccatgttttcctggccacgactgcgtgacgccgaccccattttacggtgtgagatggctagcaccggggaggtggcatgtttcggtgagggaattcataccgccttcctgaaggctatgctaagcaccgggttcaagatcccgcaaaagggcattctcattggtatccaacagagctttcgaccacgctttctgggggtggcagaacagttacacaacgaaggattcaagctattcgcgaccgaggctacatctgactggctcaacgccaacaatgtccctgcgaccccagtcgcctggccctcccaggagggccagaatcctagcctctcatctattcgaaagctcattcgagacggctcaattgatttggtgatcaacctgcctaacaacaatactaaatttgtccacgataattatgtgatacgtcgcactgcagtcgacagcggcatccccctgctaacaaatttccaggtgacaaagctctttgcagaagccgtccagaagagccggaaagttgacagcaagagtctctttcattatagacaatacagcgcagggaaagctgct

SEQ ID NO: 8022 - DNA, 4500 bp, synthetic construct
  misc_feature 1..4500: note = source = /note="Description of Artificial Sequence: Synthetic coding sequence"
  source 1..4500: mol_type = other DNA
atgactcgaatcctcactgccttcaaagtggtgcgcaccttgaaaaccggattcggtttcaccaacgtgaccgcacaccaaaagtggaagttctcaagacccggtatccgcctcctgtccgtgaaagcccagaccgcgcacattgtgctcgaggacggaaccaagatgaaaggatactcgtttgggcacccgtccagcgtcgcaggagaggtcgtgttcaataccgggctcggggggtaccctgaggctatcaccgatccggcatacaaaggtcagatccttaccatggctaaccctatcattggcaacggaggagccccagacactaccgcgctggatgagctgggcctgtcgaagtacttggaatcgaacggtatcaaggtttcaggactccttgtgctggattactcaaaggactacaaccactggctggccactaagtcgctgggacaatggctgcaggaagagaaggtgccggccatctacggggtcgacaccagaatgctcaccaagatcatccgggataaagggaccatgctgggaaaaatcgagttcgaggggcagccggtcgactttgtcgaccccaataagcaaaatctcattgccgaggtgtcaaccaaggacgtgaaagtttacggaaagggaaatccaaccaaagtggtggctgtggactgcggtatcaagaacaacgtgattagactgctggtgaagcggggagccgaagtccacctggtgccttggaaccacgattttaccaagatggaatacgatggaattctgatcgcaggcgggccgggtaaccctgcactggcggagcctctgatccaaaacgtgcgcaagatcctcgaaagcgatcgaaaggaaccactgttcggcatctcgaccgggaacttgatcacgggtctggcggcgggcgctaaaacttacaaaatgtcgatggccaacagaggacagaatcagccggtgctgaacattaccaataagcaggctttcatcactgcccaaaatcacggctacgcgctggacaatactctgccggcaggatggaagccattgtttgttaacgtcaatgatcaaacgaatgaaggcattatgcacgaatccaagcccttcttcgcagtgcaatttcacccagaagtcactccagggccgatagataccgaatacctgttcgactccttcttctcactcatcaaaaagggaaaggccactaccattacctccgtactgccgaaaccggctctggtcgcctcccgcgtggaagtgagcaaagtccttatcctgggatcagggggactgagcattggtcaggcaggagaattcgattactcgggctcgcaggcagtgaaggctatgaaggaggaaaacgtcaagaccgtgctcatgaacccgaatatcgcatcggtgcaaactaatgaagtgggactcaagcaggccgatactgtctacttcctgccgatcaccccccagttcgtgaccgaagtgatcaaggccgaacagccggatggcctgatcctggggatgggaggacaaactgcactgaattgcggagtggaactgttcaaacgcggtgtgctcaaggagtacggagtcaaggttcttgggactagcgtggagtcaatcatggcgactgaggatcggcagctcttctcggataagctcaacgagatcaatgagaagatcgccccttcctttgcagtcgagtcaattgaggacgctctgaaagctgcagatactatcggataccccgtgatgatccggtcagcgtacgcgctgggcggactgggttcgggaatctgtccaaaccgagaaaccctgatggacttgtctactaaggcgttcgccatgaccaaccagatcctcgtggagaaatccgtgaccggatggaaggaaatcgaatacgaagtggtgcgggacgccgacgacaactgtgtgaccgtttgtaacatggaaaatgtggacgctatgggagtgcacacgggggacagcgtcgtcgtggccccagcccagactttgtcgaatgcggaattccagatgctgaggcgcacttcaattaacgtcgtgcgtcatctcggtattgtcggagagtgcaatattcagttcgctctgcaccctacttccatggaatactgcatcatcgaggtgaacgctcgcctgtccaggtccagtgcattggcttccaaggccacgggctacccgctcgccttcatcgcagcaaagatagcccttggcatcccgctgccagagattaagaatgttgtgtcaggtaagactagcgcgtgtttcgaaccatcgctggactacatggtgactaaaatccctcgctgggacctggatcggtttcatggaactagttcgaggattggatcgtccatgaaaagcgtgggtgaggtcatggcaatcggacggactttcgaggagtcctttcaaaaagcgctccgcatgtgccacccgtcaatcgagggctttacgccgagacttccgatgaataaggaatggccgtccaatctcgatctccggaaggaactctctgaacccagctcgactagaatttacgcaatcgctaaggccatcgatgacaacatgtccctggacgagatcgagaaactgacttacatcgacaagtggtttttgtataagatgcgagatatcctgaacatggaaaagaccctcaaaggattgaacagcgagagtatgactgaggagactctcaaacgggccaaggagatcggcttttcggataaacagatctccaagtgtctgggcctcaccgaggcgcaaaccagagaactccggctgaagaagaacatccatccgtgggtgaagcagatcgatactctggccgcagagtacccttcggtgaccaattacctttacgtgacttacaatggacaggaacatgacgtcaacttcgacgaccatggaatgatggtgctgggctgcggcccttatcatatcggaagctccgtggagttcgactggtgcgccgtgagctccatccggactctccgccaactcggaaagaaaactgtggtagtcaactgtaacccggaaactgtgtcgactgacttcgacgaatgtgacaaactgtacttcgaggagctttctttggagagaatcctggacatttatcatcaggaggcatgtgggggatgcattatctcggtggggggacagatcccgaataacctcgcagtcccgctctataagaatggagtcaagatcatgggaacttcgcccctgcaaatcgacagagctgaagatcgctccatcttcagcgcagtgctggacgagctgaaggtggcccaagccccttggaaggcagtaaataccctgaacgaggcccttgagttcgcaaagtccgtggactacccttgcctgttgcggccctcgtacgtcctctcgggcagcgccatgaacgtggtgttctcggaagatgaaatgaagaagttcctggaagaagctaccagagtttcccaggagcacccagtggtgctcacgaagtttgtggagggcgcgcgcgaagtggagatggatgccgtggggaaggatggacgcgtcatttcacatgccatctcagagcatgtggaagatgcaggcgttcactcgggggacgccactctgatgctccctacgcagaccatttctcagggagcgatcgagaaagtcaaagatgcgaccagaaagatcgccaaggcgttcgctatctccggcccgttcaacgtgcagttccttgtgaagggaaacgatgtgctggtgatcgaatgcaacctgcgagcctcacggtcgttcccctttgtgtcaaagacgctgggtgtggacttcatcgatgtggcgaccaaggtcatgattggagaaaacgtggatgagaagcatctcccgaccctcgaccatcctatcattcccgccgattacgttgctattaaggctccgatgttctcgtggccgcgcctgcgggatgccgacccgatcctcagatgcgagatggcctcaaccggagaagtggcgtgcttcggggaagggatccacactgctttcctcaaggccatgctgtccaccgggttcaagattccacagaaagggatccttataggaatccagcaatcgttcagaccaagatttttgggagtggcagaacaactgcataatgagggcttcaagctgtttgccacggaagcgacttcagactggcttaatgccaacaacgtcccggcgactccggtcgcatggccgagccaggaaggccaaaatccttcactgtcatcgatccgcaagctgatcagagatggatcgattgacctggtcatcaatcttccgaacaataacacgaaattcgttcacgacaattacgtgatccggcgcactgccgtggactcgggaatcccgctcctgactaatttccaggtgactaaactgtttgccgaggcagtccaaaagtcgcgtaaggtggatagcaaatccctgttccattaccggcagtacagcgccggaaaggctgct

SEQ ID NO: 8023 - DNA, 4500 bp, synthetic construct
  misc_feature 1..4500: note = source = /note="Description of Artificial Sequence: Synthetic coding sequence"
  source 1..4500: mol_type = other DNA
atgactcggatcctgaccgcctttaaagtggtgcggacactgaagacgggatttggtttcactaatgtgaccgcacaccagaaatggaaattctctaggcccggcattagactgcttagcgtcaaagctcagacagcccacatcgttctggaagatggcaccaaaatgaaaggctactccttcgggcaccctagctcggtagctggcgaagtggtatttaatacaggactcggaggataccccgaggcgatcaccgatccggcctacaaaggccaaatattaaccatggctaatccaataatcggcaatggcggggctcccgatactaccgcccttgatgagctaggacttagcaagtacctggaatctaatggtatcaaagtgtctgggctcctggtcctggactatagtaaggactacaatcactggctcgcaaccaaatctctcggacagtggctccaggaggagaaggtgcctgccatttacggcgtcgataccaggatgctaacaaagattattagggataaaggcacaatgcttggaaaaatcgagtttgaggggcagccggtagacttcgtggatccgaacaaacaaaacctaattgctgaagtttcaacaaaagacgtcaaagtctatggaaagggcaaccctactaaagtggtggctgtggattgtggcatcaaaaataatgtaatccgattgctggttaagcgcggcgctgaagttcacctcgtgccctggaatcatgattttaccaagatggagtacgacggaatcctgatcgctggtgggcccggcaatcctgcactggccgagcccctgatacaaaatgtgcgaaaaattctagaatcggaccgcaaagagccgctgtttgggattagcactgggaacctgataaccggacttgcagctggggctaagacctataagatgagtatggccaaccgcggacaaaaccaacctgtcctcaacatcacaaataagcaggcatttattaccgcccagaaccacgggtacgctctggacaacaccttgccggccggctggaagccactctttgttaacgtgaacgaccaaacgaacgaaggaatcatgcatgaatctaagccattcttcgcagtgcaattccacccagaagttacacccggcccaatcgataccgaatacttgttcgatagcttctttagcttaatcaagaaggggaaggctaccaccatcacaagcgtattgccgaagcccgcgcttgtggcaagtcgtgtggaggtgagcaaagttctgattttgggttccggcgggttgagcattgggcaggctggcgagtttgactactccggatcgcaggctgtcaaggcgatgaaggaagagaacgtgaagaccgtgctgatgaatcctaacatcgcatcagtccagacaaacgaggtggggctgaaacaggcagacacagtttactttcttcctatcacccctcagttcgtcaccgaggtgatcaaagccgaacaacctgacggactcattctgggaatgggcggccaaactgcgctgaactgcggcgtcgaactgttcaaacgaggggtgctaaaagaatacggtgtgaaggttctagggaccagtgtggagagcattatggcaacagaggacagacaactgttttctgacaaactgaatgagatcaacgagaagatagcccctagcttcgccgtagagtctatcgaagacgccctgaaggcagcagacacgattggctatccagtgatgatccggtctgcgtacgctctcggtggtttgggaagtgggatatgccctaacagagaaacgctaatggacctctccacaaaggcttttgccatgacaaaccagatactggtggagaagagtgttaccggatggaaggagatagaatatgaggtggtgcgagatgcagacgacaattgtgttacagtctgcaatatggagaatgtagacgcgatgggtgttcacactggagatagtgtagtggtcgccccggcccagacattaagtaatgccgagttccaaatgctgcgacggaccagcataaacgttgtgaggcacctcgggattgtaggggagtgtaatatccaatttgccctgcatccaacctctatggagtactgtattatcgaggtgaacgcccggttgtcgcgcagttctgccctggcatctaaggctaccggctacccgctggcttttatcgccgcaaagatcgccttgggaattccactaccagaaatcaagaacgtagtgtccggcaagaccagcgcctgttttgaaccttccctggactacatggtcactaaaatccctaggtgggatctcgatcgctttcacggcacatcatcgagaattggatcaagcatgaagagcgtgggagaggtaatggcaataggaagaaccttcgaggagtcattccaaaaggcccttcgaatgtgccatccgagtatcgaaggattcactccacgcctgcccatgaataaggagtggccatccaatctcgacctgagaaaggagctctccgagccaagtagtacgcgaatatacgccatcgcgaaagcaatcgacgataatatgagcctggatgaaatcgagaaacttacatacatcgacaagtggttcctatacaaaatgagggatatacttaacatggaaaagacccttaaaggtctgaactctgaatccatgaccgaggaaaccctgaaacgggcgaaggagatcggattcagcgacaaacagatctcaaaatgcctgggactcacggaggcacagaccagagagttacggctgaagaagaacatccacccatgggtgaagcagatcgatacacttgcggccgagtacccaagcgtgaccaactacctctatgtcacatacaacggccaggaacacgatgtgaactttgacgaccatggtatgatggtgctcgggtgtggaccctaccacataggctcttccgtggaatttgactggtgcgctgttagtagcattcgcaccctccgccagcttggtaaaaagactgtagtggtcaactgtaatcccgaaacagttagcaccgattttgatgaatgcgataaactgtacttcgaagagcttagtcttgaacgtatcctagatatctatcatcaggaggcttgcggtgggtgtatcatcagtgtgggaggacaaatacccaataacctcgcagtgcctctctataaaaatggagtcaagatcatgggcaccagtccactacagatcgaccgagcggaagacaggtcgatattctctgccgtcctggacgagctgaaggtagctcaggcgccgtggaaagccgttaacacactaaacgaggcacttgaattcgctaagagcgtggactacccatgcctgctccgcccatcatatgtactgagtggaagcgcaatgaatgtcgtattttccgaggacgagatgaagaagtttttagaggaggccacccgcgtctcacaggaacatccggtagttttgacaaagttcgtggagggagcgcgagaggtggagatggatgccgtaggaaaagacggtagggtgatatcgcatgcaataagtgaacacgttgaagatgcaggggtgcactccggggatgcaacccttatgctccccactcagaccatttcccaaggggccatcgagaaagtgaaggatgccacaaggaagatcgctaaggcctttgctatcagcggccccttcaacgtgcagtttctggtgaaaggaaacgatgtgctggtaatagagtgcaacctgcgagcatcaagatcatttcccttcgtgagcaaaactctgggcgtggatttcattgatgtggccactaaagtgatgataggggaaaacgtggatgagaagcatctgcctaccctcgaccatcccatcattccagccgattacgtagcaatcaaagcccctatgttctcatggccaagactgagagatgcagatcccatactgcgctgcgaaatggcttccacaggcgaagttgcttgttttggggaagggatccataccgcgttcttaaaggccatgctttcaaccggtttcaagataccacagaaaggaattcttatcggcatacagcagagtttccgaccccggttcctcggagtagcagaacaactccataatgaggggtttaagttgtttgccacggaggcgacatctgactggctgaacgccaacaatgtgccagctacgcctgtcgcttggccttcacaggagggccagaatccaagcctgtcaagcatccgtaaactgatccgggacggttccatagatctggtcattaacctccctaacaacaacaccaaattcgtccatgacaattatgtcataaggagaaccgcagtcgacagcggcatcccgcttttaacaaacttccaggtgacaaagcttttcgccgaggcagtgcagaaaagtagaaaggtcgattccaaaagtctgttccactaccgtcagtactccgctgggaaagctgcc

SEQ ID NO: 8024 - DNA, 4500 bp, synthetic construct
  misc_feature 1..4500: note = source = /note="Description of Artificial Sequence: Synthetic coding sequence"
  source 1..4500: mol_type = other DNA
atgactaggattctgacagcattcaaagttgtccggacccttaaaacaggtttcggcttcaccaacgtgactgcccaccagaagtggaaatttagccggcccggtataaggctgctgagcgtcaaggcacagacagctcacatcgtgcttgaagatggcacaaagatgaaaggctattctttcggtcacccatcctctgtcgccggtgaggtagtctttaatacagggctgggcggatacccagaggccattacggatcccgcctataagggtcaaatcttgacaatggccaatccaatcattggaaacgggggtgcaccggacaccaccgccctggacgagctgggactgtccaagtatttggaaagcaatgggattaaagtgagcgggctcttagtgttggattattccaaggactataaccattggctcgccacaaagtctttaggacaatggctccaggaggaaaaagtcccggctatctatggagtagacaccaggatgctgacaaaaataattagagataagggcactatgctgggaaagatcgaatttgaaggccagcccgtcgatttcgtggacccgaacaagcagaatctcattgccgaggtctcaaccaaggatgttaaggtctatggaaaaggtaaccctaccaaagtggtggccgtggactgcggaatcaagaacaatgtgatacgattactggtaaagaggggagcagaggtgcaccttgtgccttggaaccacgatttcacaaagatggagtatgacggtattctgattgctggaggcccaggaaaccccgcactggccgaaccactgatccagaacgtgcgtaagattctcgaatccgacagaaaagaaccattgttcgggatctctaccggcaatctgataacagggctggcagctggagccaagacttacaagatgagtatggctaatcgtggacagaaccagcctgtgctgaacattacgaacaagcaggcttttattaccgctcagaaccatggatatgccctggataatacactgcctgctggatggaaacctttgttcgtgaatgtgaacgaccaaacgaatgagggaattatgcacgagagcaagccatttttcgccgtccagttccatcctgaggtgacgcccgggcctattgacacagagtacttgtttgattctttttttagcctgattaaaaagggaaaggctaccacgattacatccgttcttcctaaacccgcactggtggcttctagagtagaagtgtcaaaggtccttatcttaggctccgggggcttgagcatcgggcaggcaggtgagttcgactatagcggctctcaggcagtgaaagcaatgaaggaggaaaatgtgaagacagtactgatgaatccgaatattgcatcagtgcagaccaacgaggtgggcctgaagcaagctgacactgtatattttctgccaatcacgccccagtttgttaccgaggtgatcaaagcggaacaacccgatggactgatccttggcatggggggacagacagcccttaactgtggcgttgagctgttcaagcgtggggtgcttaaggagtatggggtgaaagttcttggaacaagcgtcgagagcataatggcaaccgaggaccgccagttgttttcagacaagctgaatgagatcaatgagaagatcgcgccctcattcgccgtggagagtattgaagacgcactgaaagcagccgacaccataggctatcccgtgatgattcgctctgcctatgcgctgggtggcctaggcagcggtatatgtcctaaccgcgagacactcatggacctctcgactaaggccttcgccatgactaaccagatccttgtggagaagtcggttaccggttggaaagagattgaatatgaggttgtgagagacgccgacgacaattgtgtgaccgtttgcaatatggaaaatgtcgatgcaatgggggtgcatactggcgattctgtggtagtcgccccggcacagaccctctctaatgccgaattccagatgctcagaaggacatctatcaatgtggtccgtcacctcgggattgttggcgagtgtaatattcaatttgctctgcaccccacgagcatggagtactgcatcatcgaggttaatgccaggctgtctcggtctagcgcactggccagcaaggcgacgggctaccctctcgcatttatagccgccaagatcgccttaggaatacctcttcccgaaatcaaaaatgtggtgagtggcaagacttcggcatgttttgaacccagcctcgattatatggtcactaaaattcctaggtgggatcttgatcgttttcatggaacgtctagtcggatcggctcaagcatgaagtcagtgggggaagttatggccattggcaggacatttgaggagagtttccagaaggccttgcggatgtgccatccttccattgagggtttcacccctcggctgccaatgaataaggaatggccttcaaacctcgatttacgcaaggagctgtctgagccatcctctactcggatatacgcgatcgcaaaggccatcgatgacaatatgtctcttgacgaaatagaaaaactgacgtatatcgacaaatggttcctgtataagatgagggatatactgaatatggaaaaaaccttgaaagggctgaatagtgagtctatgaccgaggaaaccctcaagagggctaaggagattggcttttctgataaacaaatttcaaagtgtctgggcctcacagaggctcagacacgagagctcaggctgaagaaaaatattcatccatgggtgaagcagattgataccctcgcagcggagtatccttctgtcaccaactacctgtacgtaacgtacaacggacaggaacatgacgtcaactttgacgatcatgggatgatggtgctcggttgcggcccttatcatataggcagctccgtcgaattcgattggtgtgcagtctcctcaattaggactctccggcagcttggtaagaagacggtggtggttaactgtaatcctgaaaccgtttccacagacttcgacgaatgcgacaagttatacttcgaagaattgagcctcgaacggatcttggacatatatcatcaggaggcgtgtggcggctgtattatttctgtcggaggacaaatccccaataacttggccgtgccattgtataaaaatggggtcaaaatcatgggtactagcccactgcagatcgatcgggctgaagaccgctctatcttctcagccgtccttgacgagctaaaggtcgcccaggccccctggaaggccgtgaataccctgaacgaagctctcgagtttgcaaagtcagtcgattatccatgtctcctgaggcctagctacgtgctgagcgggtccgccatgaacgtggtgttttctgaagacgaaatgaaaaagtttctcgaagaggcgacccgggtgtctcaggagcatccagttgtgctgacaaaatttgtggagggagcacgggaagtggagatggatgccgttggtaaggacgggcgggtgatctcccacgccatttccgagcacgtggaggacgcaggggtgcatagtggcgatgctactctcatgttgcccactcagacaataagccagggggccattgagaaagtaaaagacgctacaagaaaaatcgcgaaggcatttgctatcagcggtccttttaacgtgcagttcctcgtgaagggcaacgacgtgctcgtaatagaatgtaacctccgggcgagccgctccttcccatttgtttccaagacactgggagtggatttcatagatgtggcgacaaaagtgatgatcggcgagaatgtggacgagaaacaccttcctacattggatcatcccattattcccgccgactacgtcgctatcaaagccccaatgttttcttggccccgcctgcgagatgcagatcccatcttgcggtgcgagatggcctcaaccggggaggtggcctgcttcggggaaggtatccacacagcttttctcaaggcgatgcttagtacaggctttaagatcccccagaaaggaatcttaattggtattcagcagtcctttcggcctaggttcttgggcgtggcggaacagttgcacaacgaaggattcaagttgtttgcaacagaagctaccagcgactggctgaacgcaaacaacgtccctgcaacacccgtcgcgtggcccagccaggaagggcagaatccttcactctcaagtatcagaaaactaatacgcgacggctctatcgacctagtaattaatcttcctaacaacaacaccaagttcgtacatgataactacgtaattcggaggacagccgtggatagcggaatacctctcctgaccaacttccaggtaacaaagctgtttgccgaagccgtgcagaagtccaggaaagtcgactccaagtctctttttcactatagacaatattcggcaggaaaggctgca

SEQ ID NO: 8025 - DNA, 4500 bp, synthetic construct
  misc_feature 1..4500: note = source = /note="Description of Artificial Sequence: Synthetic coding sequence"
  source 1..4500: mol_type = other DNA
atgacccgcatcctgactgccttcaaagtggttcgcactctcaaaactggcttcggattcaccaatgtgaccgcgcaccagaaatggaagttttcccgccccggaattcgcctgctgtcagtgaaagcccagaccgcacacattgtcctggaggacgggacgaagatgaaaggttactcattcggtcacccgtcctctgtggctggagaagtcgtattcaacaccgggctgggtgggtatccggaagcgattactgaccctgcttacaaagggcagatcctgaccatggccaacccaatcatcggaaacggcggcgcgcccgacaccacggcactggacgaacttgggctctcaaaatacctcgagtccaacggaatcaaggtgagcggtttgctggtgctcgactacagcaaggactacaaccactggcttgcaactaagtcgcttggccaatggttgcaggaagagaaggtgccggctatctatggggttgatactaggatgctcactaagattatccgcgacaagggcaccatgctcggcaagattgaatttgagggccagcctgtggatttcgtggacccaaacaagcagaatctgatcgccgaagtgtccaccaaagacgttaaggtctacggcaaaggcaacccgaccaaggtggtggcagtggattgcggaattaagaataatgtgatcagactcctggtgaagaggggcgccgaagtgcacctggtcccgtggaaccacgacttcaccaagatggaatatgacggcatccttatcgctggtggaccaggcaacccggcattggccgaaccgctgatccagaacgtgcggaaaatcctcgaatcggacagaaaggaaccactgtttgggatctcgactggaaatctgatcactggactggcggccggtgctaagacttacaagatgtcgatggccaaccgcgggcagaatcagccagtgctcaacatcactaacaagcaggcctttatcactgcacagaatcatggctacgctctggacaacaccttgccagcgggttggaaaccacttttcgtcaacgtgaatgatcagaccaacgagggcatcatgcatgagtccaagcctttcttcgcggtccagttccacccggaggtgactccaggaccaatcgacactgagtacctgtttgactcctttttctcgctgatcaagaagggaaaggcgaccaccatcacttccgtcctgccgaagcccgcgctggtggcttctcgcgtggaagtgtcgaaggtcctcatcctgggatccgggggtttgtccatcggacaggcaggagagtttgattacagcggttcccaagcggtcaaggctatgaaggaggagaacgtgaaaacggtgctgatgaacccgaacatcgctagcgtgcaaactaacgaagtcggactcaagcaagctgatacggtttacttccttccgatcaccccgcagttcgttaccgaggtgattaaggccgagcagcctgacggcctcatcctcgggatgggaggccagaccgcactcaactgtggagtggaactgttcaaaagaggcgtgctgaaggagtacggtgtgaaagtcctgggcacctcggtggaaagcatcatggcgactgaagatcgacaactgttcagcgacaaacttaatgagatcaacgaaaagatcgcccccagcttcgcagtggagtcaatcgaggatgcactcaaggcggcagatacgattggctacccagtgatgattagatctgcatacgccctcggaggacttggctcgggtatctgcccgaaccgcgagactttgatggacctgtctaccaaggcctttgcaatgacgaatcagattctcgtcgagaagtccgtgaccggatggaaggaaatcgagtacgaagtggtgcgagacgccgatgataattgcgtcaccgtgtgtaacatggagaacgtcgatgccatgggtgtccacactggagacagcgtcgtcgtggcgccagcgcagactttgtccaacgcggagttccagatgctccgccgcacctccattaacgtggtgagacacctgggcatcgtgggagaatgcaatatccagttcgccctgcatcctaccagcatggagtactgcatcattgaggtgaacgcccggctgtcacggtcgtccgccctggcctccaaggctaccggctacccgctggccttcatcgctgcgaagattgccctgggaatccctctcccggagatcaagaatgtggtttccggtaagacgtccgcctgcttcgaaccgtcgctggactacatggtcactaagatcccgagatgggacttggaccggttccatggtacctcgagccggatcggctcgtcgatgaaatcggtgggcgaggtcatggccattgggcggacgttcgaagaatcattccaaaaggcgctgagaatgtgtcacccatcgatcgagggatttaccccgagactgcctatgaacaaggagtggccctccaatcttgacttgcgcaaggaactgtccgaaccgtcaagcactcgaatctacgccatcgctaaagcgatcgacgacaacatgtcgcttgacgaaatcgaaaagctgacttacattgataagtggttcttgtacaaaatgcgcgatattctgaatatggaaaaaactctcaaggggctcaattccgaatcaatgacggaagagactctgaagcgcgcaaaagaaatcgggttctccgacaagcaaatcagcaaatgcttgggtcttactgaggcccagacccgcgagctgcggctgaagaagaacattcacccctgggtcaagcaaatcgacactcttgcagccgagtacccgtccgtcaccaactacctgtacgtgacctataatgggcaggagcacgacgtgaatttcgatgaccacggaatgatggtgttgggatgcggtccataccatattggatcctcggtggaattcgactggtgcgccgtctcatccatccggactttgcggcagcttggtaagaaaaccgtggtggttaactgcaacccggaaactgtgtcgactgatttcgacgaatgcgacaagctgtactttgaagagctgtcattggaacggatcctggatatctaccaccaagaagcctgcggagggtgcatcatctccgtcggagggcaaattccaaacaaccttgcagtcccgctgtacaagaatggcgtcaagatcatgggaacctcgccgcttcagatcgaccgggctgaagatagaagcatcttcagcgccgtgctcgacgaactcaaagtggcccaggctccttggaaggcggtgaacactctgaacgaggccctggaattcgcaaaatccgttgattacccctgcctgctgcggccttcgtacgtgcttagcggctcagcaatgaatgttgtgttttccgaggatgaaatgaaaaagttcctggaggaagctactcgggtgtcccaagagcacccggtcgtgttgactaagtttgtcgagggagcacgggaggtggagatggacgcggtgggaaaggacggtagggtgatctcgcatgccatctcggaacacgtggaggatgcgggggtgcactccggcgacgctacgctgatgttgccaactcaaacgatctcccagggtgccatagaaaaagtgaaggatgcgacccgcaaaatcgccaaggccttcgccatctccgggccattcaatgtccaatttcttgtgaaaggaaatgacgtgctggtgattgaatgcaacctgagagcctccaggtcgttcccgttcgtctccaaaaccctcggagtggactttatcgacgtggcgactaaggtcatgattggagagaacgtggatgaaaagcatctcccaaccctggaccacccgatcataccagcggactacgtggcgatcaaggcccctatgttcagctggccgcgcctgcgcgacgcagatccgatcttgcgttgcgaaatggcttcgactggcgaggttgcctgctttggagaaggaatccacactgcgttccttaaggcaatgctgtccaccggattcaaaataccgcagaaaggaatcctgataggaattcagcagtccttccgcccgcggtttctgggagtcgccgaacagcttcataacgagggtttcaagctgtttgccaccgaggccacgtccgactggctgaatgccaacaatgttccggcgactcctgtcgcatggccatcacaggaaggacagaacccgtcgctttcctccatccggaagctgatccgggacggctcaatcgatctggtgatcaacctgccgaacaacaatactaagttcgtccatgataactacgtcattaggcgcactgccgtggattcagggatccccctcctgacgaacttccaggtgactaagttgttcgccgaagccgtgcagaagtctcggaaggtggacagcaagagcctcttccactaccgccagtactcggccggcaaggcggcc

SEQ ID NO: 8026 - DNA, 4500 bp, synthetic construct
  misc_feature 1..4500: note = source = /note="Description of Artificial Sequence: Synthetic coding sequence"
  source 1..4500: mol_type = other DNA
atgaccaggatcctgactgcttttaaggtggtgcggaccctgaagactggctttggtttcactaacgtaaccgcccaccagaagtggaagtttagccggccgggcatccgcctgctaagcgtcaaggcacagaccgcccatattgtgctggaagacggcaccaagatgaaagggtattcgttcgggcaccccagcagcgtggccggcgaagtggtgtttaatacgggcttgggcggttaccccgaggcaatcactgaccctgcctacaaggggcaaatcttgacgatggctaaccctattatcggcaacggcggcgccccagacactaccgcactcgatgagctagggctaagcaagtacctggagtctaacgggataaaagtctcaggcctccttgtcctggattactctaaagattacaaccactggcttgccacgaagagcctagggcagtggctgcaggaggagaaggtgccggctatctacggcgtggataccaggatgctcacgaagatcatacgcgataaggggaccatgttaggcaagatagagttcgaggggcaaccagtggattttgtagatccgaacaagcagaacctcatcgcagaagtatccactaaagatgtgaaagtatatggtaaaggcaatcccaccaaagtagtagctgtggactgtggcattaagaataatgtcattcggttactcgttaaacggggggcggaagtgcacctggtgccgtggaaccacgactttaccaagatggaatacgatgggatccttattgctggaggtcctggcaaccccgccctggcggagcccctaattcagaatgttagaaaaatactggagtcagatagaaaggagccactgttcggtatctcaactgggaacctgatcacaggattggcagccggggccaagacatataagatgagcatggcaaatcgcggacagaatcaacctgttctgaacatcaccaacaagcaggcatttatcaccgcacaaaaccacgggtatgcattagataataccctccctgctggatggaagcccctgtttgtgaacgtgaatgaccagacaaatgagggtattatgcacgagtctaagcccttcttcgcggtacagtttcaccccgaagtgacaccaggtcctatcgataccgagtacctgtttgactcttttttttccctgatcaagaagggaaaggccacaacaatcacatcggtccttcctaaaccggctctcgtggcgtccagagtggaagtgtccaaggttctcatacttggaagcgggggcctttctatcgggcaggcgggggaattcgactatagtggcagccaggcagttaaggccatgaaagaagaaaacgttaaaactgtcctgatgaaccccaatatcgccagtgtacaaacaaatgaagtgggcctaaaacaggccgataccgtgtactttttacccatcacacctcagttcgttactgaggtgatcaaggcagagcaaccagatggactaattctcggaatgggagggcagactgcgttgaactgtggtgtggaattgtttaaaaggggcgtcctaaaggagtatggagtaaaggttttgggcacatctgtggaaagtataatggccactgaggaccggcaactgttttccgacaagttaaatgaaatcaatgaaaagatcgccccaagcttcgcagtagaatcaattgaggatgcccttaaggctgcggataccattggttatcccgtaatgattcggtccgcttacgcgctcggcgggctaggatcagggatctgtcccaaccgtgaaaccctcatggacttatcaacgaaagcatttgctatgaccaatcaaatcctagtagaaaagagtgtgaccggatggaaggagatagagtacgaagttgttcgcgacgccgacgataattgtgtaaccgtttgcaatatggagaacgttgacgccatgggagtccacactggggatagtgtggtcgtcgctccagcacagaccctcagcaatgcagaattccagatgctgcgccggactagcatcaacgtcgtgaggcatctgggaatcgtgggggagtgtaacattcagtttgcccttcacccaacctcaatggaatattgcataatcgaggtgaacgcgcgccttagccggagtagcgctcttgcaagtaaggcaaccggctatccactggccttcattgcagctaagatcgccctgggaatccccctgcctgagataaagaacgtagtctcgggaaagacgtctgcttgtttcgagccatcgttggactatatggtgaccaaaatccctcgatgggatttagatagatttcatgggacatccagtagaatcgggagttccatgaagagcgtaggggaggtgatggcgattggaaggaccttcgaggaatcattccagaaagctctccgaatgtgccacccctccattgaagggtttaccccccgcctccctatgaacaaggaatggccaagtaatttggatctcaggaaagagttgagcgagccctctagcactcgcatctacgcaatagcaaaggctatcgacgacaacatgtctctggatgagattgagaagctgacctatatagataagtggtttctctataaaatgcgggatatcctgaacatggaaaagactcttaagggacttaactctgaaagtatgacggaggagacactcaagagggcaaaggagattggtttttcagacaaacagattagtaagtgccttggattgacagaagcccagaccagggagctgcggcttaaaaaaaatattcatccgtgggttaaacagattgacactcttgctgccgaatatcctagtgtgacaaactacctttatgtcacctataacggccaggaacatgacgtcaatttcgacgaccatggcatgatggtcctgggctgtggcccttatcacatcggatcatccgtggaatttgactggtgtgcggtttcctcgatccgtactcttaggcagctcggcaagaaaacggtggtggttaattgtaatccagaaacagtgtcaactgatttcgatgaatgtgacaagttgtatttcgaggaactgtccctcgagcgcattcttgacatctatcaccaagaagcttgtggcggttgtatcatcagcgtcggcggacagatcccaaataacttggccgtgccactgtacaagaacggggtaaagattatgggcacatccccactgcagatagaccgggccgaggataggtcgatcttttcagccgtgctggacgagctaaaggtcgcccaagcaccgtggaaggccgtcaacaccctgaacgaagcactcgagtttgctaaatcagtggactacccctgtctgctacgaccctcatacgttctgtctggaagcgcaatgaacgttgtcttttcagaggatgaaatgaagaagttccttgaagaggccacccgagtgtctcaggagcatcctgtggttttaaccaagttcgtagagggtgcgcgggaggtcgaaatggacgccgttggtaaggatggcagggtgatcagtcatgctattagtgaacatgtggaggatgccggggttcacagtggcgacgctaccctgatgctgcccacacagaccatcagtcaaggagcgatcgagaaggtaaaggatgctacacggaaaattgccaaagcttttgcaattagtggaccctttaacgttcagtttctcgtgaagggtaacgatgtcctggtcatagaatgcaacttgcgcgcctcccggtcatttccgttcgtgagcaaaactctgggcgtcgacttcatcgacgtcgcaacaaaagttatgatcggcgagaatgtagatgaaaagcaccttcccactctcgatcacccaataatcccagcagattacgtggcgataaaagcgccaatgttcagctggcccagactgagagatgctgacccgatactacgatgcgagatggcttcgaccggggaagtagcttgttttggcgagggcatacatacggccttccttaaagccatgctatctaccgggttcaagattccccagaagggcatcttgatcggcatccagcagagctttcgacccaggttcttgggcgtcgccgaacagctgcacaatgaaggattcaagctgtttgctaccgaggccacctccgactggctcaatgctaataatgtgcctgctacacccgtggcttggcccagccaggaaggccagaatcccagcctgtcctccatccgcaagcttatccgcgacgggtcaatcgacctagtgattaacctgccaaacaacaacaccaagttcgtgcatgacaactacgtaatacggagaaccgcagtggactcaggcattcccctactgactaacttccaggtgacgaagttgtttgctgaggcagtgcaaaaatcaagaaaggtggacagcaaatccctctttcattaccgccagtactctgcaggcaaagctgcg

SEQ ID NO: 8027 - DNA, 4500 bp, synthetic construct
  misc_feature 1..4500: note = source = /note="Description of Artificial Sequence: Synthetic coding sequence"
  source 1..4500: mol_type = other DNA
atgactcgcatactcactgcattcaaggtggtcagaacacttaagactggcttcggtttcactaacgtgacagcacaccagaaatggaagttttcccgccctggcatccggctgctgtccgttaaggcccagactgcccacattgtgctcgaggacggcacaaaaatgaagggctattcttttggccatccttctagtgtcgcaggcgaagtggtatttaatacgggcctgggtggctaccctgaagcgatcactgatcctgcctacaaggggcagatactgaccatggctaatcccattattgggaatgggggggcgcccgataccacggctctcgacgaattgggccttagcaaatacttggagagcaacggtatcaaagtttcaggactgttggtgctggattattcaaaagactacaatcattggctcgcgactaagtccctgggccagtggctgcaggaggagaaggttcctgccatctacggcgttgacacaagaatgctcaccaaaatcattcgagacaaaggcactatgctcgggaaaatcgagttcgaggggcagcctgtcgatttcgtcgacccaaataagcagaatcttatcgcagaggtgagcactaaggacgtcaaggtgtacggcaaggggaatcccactaaagtggtagccgttgactgtggcattaagaacaacgtgatccgcctcttggtgaagaggggagcagaagtgcatcttgttccctggaatcacgattttacaaaaatggagtatgatggcattctgatcgcgggtggccctggcaatcctgccctggcggaaccactgatccagaatgtgcgcaaaatcctggagtccgaccgcaaggagcccctcttcggaatcagcacagggaacctgattactggacttgctgccggtgctaagacttacaaaatgtcaatggcgaaccgaggccagaaccagcccgtactcaatataacaaacaaacaggcttttatcacagcccagaaccatggatatgcattggacaacacactgccggctggctggaagccactgtttgtaaatgttaatgaccaaactaatgagggcatcatgcacgagtccaaaccattttttgctgtacagtttcatcctgaggtcacgccaggacctattgacacagagtacttgttcgacagcttctttagtctcataaagaaagggaaagcgacgaccataacttccgtgctccctaagcccgcacttgtggctagccgcgtggaagtgagtaaagtgctgatcctcggctccggcggcctgagtattggacaggccggcgaatttgactatagtggctcccaggcagtgaaagcaatgaaggaggagaatgtgaagaccgttcttatgaaccctaacatcgcctctgtgcagactaatgaagtggggctgaaacaagcagatacggtttacttcctcccgatcactccacagttcgtgactgaggtcatcaaggccgagcagcccgatggcctgatcctcgggatgggggggcagacggcactgaactgcggggtagaactgttcaaacgaggcgtcttgaaggaatatggggtcaaggtcctcggtacaagtgtggagagtattatggcaaccgaagatagacagctgttcagcgataaactcaacgaaatcaacgaaaaaattgcaccctctttcgccgttgaatcaatcgaggatgccctgaaggctgccgacaccatcggttaccctgtcatgatcaggtccgcatacgccctgggtggtctggggtctggcatctgtccaaatcgggagacactgatggacctcagcacaaaagccttcgccatgactaaccaaattctggtggaaaagtcagtgacaggctggaaggagatcgaatacgaggtcgtgcgagacgccgacgacaactgtgttacggtgtgcaacatggaaaatgtggatgctatgggtgtgcatactggcgattctgtagtggtcgctcccgcgcagaccttgtcaaacgccgaattccagatgctgcggcgcacgagcatcaacgtcgtccgacatttggggatcgtcggtgagtgtaacattcagttcgctctccatccaacgtccatggagtactgtatcatcgaggtgaacgctcggctgtctcgatccagtgccctggcgagtaaggcaacaggataccctctggccttcatcgccgctaagatcgcactcggcatacccctgccggagatcaagaacgtagtgagtggaaagacttccgcctgctttgagccctccctggactacatggtcaccaagatcccaaggtgggacctggataggttccatgggacttccagtcgaattggcagctcaatgaaatcagtcggagaggtaatggccattgggagaacattcgaggagagctttcagaaagctctgcgcatgtgccacccaagtatcgaagggttcacacctagactgccgatgaacaaggagtggccgtctaacctggacctgaggaaggaactgtccgagccttcttcaacaagaatatacgcaatcgccaaggcaattgatgacaatatgtctctcgatgagatcgaaaagctgacgtacatagacaagtggttcctgtataagatgcgggacatccttaacatggaaaagacactgaaaggcctgaattccgaatctatgacggaggaaaccctcaagcgcgctaaagagattggattctccgacaagcagatcagtaagtgcctgggccttaccgaagcacaaaccagagagctgcgcttgaaaaagaatattcacccttgggttaaacaaatagatactctggccgccgaatatcccagcgtcactaactatctgtacgttacatacaatggtcaggaacatgacgtgaatttcgatgaccatgggatgatggttcttgggtgtggaccgtatcacatcggatcttccgtcgagtttgactggtgcgcggttagtagcatacgaactctcaggcagctgggtaaaaagactgtcgtcgtgaactgcaaccctgaaacagtgagtactgacttcgatgagtgcgataagttgtacttcgaagagctgtctctggaacgaattctggatatctaccaccaggaggcatgcggcggctgcatcatctctgtaggggggcagattcccaacaatctggcagtgcccctgtataaaaatggtgtgaaaatcatgggtacctcaccgcttcagatcgaccgcgctgaggaccggtctatattcagcgcggtgttggacgaactgaaagttgctcaagccccttggaaagccgtcaataccctcaacgaggctctggagttcgcaaaatctgtagattacccctgtctgctgcgcccaagctatgtcttgtccggtagcgctatgaatgtggtgttctctgaggatgagatgaagaagtttctggaagaggccactagagtgtctcaggaacatccagttgtgcttactaaattcgttgaaggagctagagaggtggagatggatgctgtaggtaaggacgggagggtcatttcccacgcgatctccgagcacgtcgaagatgcaggtgtgcactcaggtgacgctaccctgatgctgcctactcagaccattagccagggggccattgaaaaagtcaaggacgctacccgaaaaatcgctaaagcgtttgccatctcaggacctttcaatgtacaattcctggtgaagggcaacgatgtactcgtgattgagtgcaatctcagggcaagtcggagcttcccatttgtttccaagacactgggcgttgattttattgatgtagctaccaaggtgatgataggggaaaacgtcgatgagaaacacctgcccactctcgaccatcctatcattccagccgattacgtggcaatcaaggcacctatgttcagttggccgaggttgagagacgcggacccaatcctcagatgtgaaatggcttcaaccggagaagtcgcctgctttggagagggcattcacacagcttttctgaaagcgatgctctccacaggtttcaaaattccacagaaaggaattctcataggaatacagcagtcattccggcctaggttcctgggcgtagctgagcagctgcataacgaagggtttaagctctttgctacggaggcaaccagcgactggcttaacgcgaataacgtccctgccacacctgtggcttggccttcccaggaggggcagaaccctagcctgagcagtatacgaaagctcatcagagacggttccatcgaccttgtcatcaaccttcccaacaataatacaaaatttgtccatgataattatgtgattcggagaaccgcagtagatagtggcattcctctgctcacaaactttcaagtcacaaagctgtttgcggaggcagtccagaaatctaggaaggttgattccaaaagtctgttccactaccggcaatactccgccggcaaggcagct

SEQ ID NO: 8028 - DNA, 4500 bp, synthetic construct
  misc_feature 1..4500: note = source = /note="Description of Artificial Sequence: Synthetic coding sequence"
  source 1..4500: mol_type = other DNA
atgactcgcatcctgactgccttcaaagtcgtgcggaccctcaagactgggtttggatttactaatgtgaccgcgcaccagaagtggaagttctcgcgtccggggatccgcctcttgtccgttaaggcccagaccgctcatattgttcttgaggacggaaccaagatgaaaggctactccttcggtcatccgtcgtccgtggccggtgaggtcgtgtttaacactggactgggaggataccccgaagccatcacggatcccgcgtacaagggccagattctgactatggcgaatcctatcatcgggaacggaggcgcacctgacactactgccttggatgagctgggtttgtcaaagtacctggaatcaaatggaatcaaggtttcggggcttctggtgctggattacagcaaggactacaatcactggctcgcgaccaagtccctgggacagtggttgcaggaagagaaggtgccggcgatctatggagtggacacccgaatgcttactaagattattcgggacaagggcaccatgctggggaagatagaattcgaaggccagcctgtggacttcgtggatccaaataagcaaaacctgattgcagaagtcagcacgaaggatgtgaaggtgtacggaaagggaaacccgaccaaggtcgtggctgtggattgcggaatcaagaacaatgtcattcgcctcttggtgaagcgcggggcggaggtgcacctggtgccttggaatcatgattttactaagatggagtacgacggaattctcattgcaggcggaccagggaatcctgcgcttgctgagccgctgatccagaacgtgcgcaagatcctcgaatcggacagaaaagaaccactgttcggtatctccacgggaaatctcatcaccggactggctgcaggggcaaagacgtacaagatgagcatggcgaaccgaggacagaatcaacccgtgctcaatatcaccaacaagcaagcgttcatcactgcccaaaaccacggatacgcactcgataataccctgccagctggatggaagccgctgttcgttaacgtgaacgaccaaaccaatgagggcatcatgcacgagtcgaagccattctttgccgtgcaattccacccagaggtaactccgggccccatcgacaccgaatacctgttcgactcatttttcagtctgattaagaagggaaaggccactactatcacctccgtcctgccgaagccggcgttggtcgcttcaagggtggaggtgtcgaaggtgctgatcttggggtcagggggactgtcgatcgggcaggccggagaattcgattactcgggtagccaggccgtcaaggcgatgaaagaagagaacgtcaaaaccgtcctcatgaacccgaatatcgcctcggtccagactaacgaggtcggactcaagcaggcagataccgtgtacttcctcccgatcactccgcagtttgtcaccgaagtcatcaaggcggagcaacccgacgggctgattctgggaatgggtggacagaccgccctgaactgcggcgtggaactgttcaaacggggtgtcctcaaggaatacggggtcaaggtgttgggaacctccgtggaatcgatcatggccactgaagatcggcagctgttctcagacaaacttaatgaaatcaacgagaagattgccccatcgtttgcggtcgagtcaatcgaggacgcacttaaggcggcagacactatcggctatccggtgatgatccgctcagcctatgcgcttggaggattgggctccggaatctgtccgaaccgggaaactcttatggacctctcgacgaaagcctttgctatgaccaaccaaatcctggtggaaaagagcgtgactggttggaaagaaattgaatacgaggtcgtgcgggatgccgatgataactgcgttaccgtgtgcaatatggagaatgtggacgcaatgggtgttcatacgggagactccgttgttgtggccccagcccagactttgtcaaatgcagagttccagatgctgcggcgcacttccatcaacgtggtgagacacctgggaatcgtcggggagtgcaacatccagttcgccctccacccaacctccatggaatactgtattatcgaagtcaacgcccgcctgtcgaggtcgtctgcgctggcctcgaaggcaacggggtatccgctggctttcattgcagctaagatcgctctgggtatccccctgccagagatcaaaaacgtggtgtcgggaaaaacttcggcttgcttcgagccatcgctggactacatggtgacgaagatcccgcggtgggacctcgatcgcttccatggaacctcgtcccggatcggttcatccatgaaatctgtgggagaagtcatggctatcggtcgcacctttgaggagagcttccaaaaggccctgcggatgtgccacccgtccatagaaggcttcacccccagactcccgatgaacaaggaatggccatccaacctggatctccggaaggagctgagcgagccatcctctactaggatttacgctattgcgaaggccatcgacgacaacatgtcactggacgaaatcgaaaaactgacttacatcgataaatggttcctgtacaagatgcgggatatcctcaatatggaaaaaacccttaaaggcctgaactccgagagcatgactgaagaaactctgaaacgggccaaggaaatcggtttcagcgataaacagatcagcaagtgcctgggcctcactgaagcacagaccagggagctgagactgaagaagaacatccatccatgggtgaagcagatcgacactctcgcggccgaatacccatcggtgactaattacctctacgtgacttacaacgggcaagagcacgatgttaacttcgatgatcacggaatgatggtcctcggatgcggcccgtaccacatcggttcgtcggtggagttcgactggtgtgcagtgtcatctatccgcactctccgccagctggggaagaaaactgtggtggtgaactgtaatccggagactgtgagcactgactttgacgaatgtgacaaactctacttcgaggaactgtcactggaacggattctcgacatttaccaccaagaagcgtgcgggggatgtatcatctccgtgggtggacaaatccccaacaacctcgctgtgccgctgtacaagaatggtgtcaagatcatgggaacttcgccgcttcaaatcgaccgagcagaggacagatccatcttttcagcagtcttggacgaactgaaggtggcccaggctccatggaaggccgtgaacaccctcaacgaggccctggagttcgcgaaatctgtcgattacccttgcctgttgcggccaagctatgtgctcagcggaagcgcaatgaacgtggtgttctcggaggatgagatgaagaaatttctggaagaagcaactagagtgtcgcaggagcaccctgtcgtccttaccaagttcgtggaaggagctcgggaagtggagatggacgcggtcggaaaggatgggcgcgttatctcgcacgccatatccgaacacgtcgaggatgcgggtgtccatagtggagatgccaccctcatgctgccgactcaaacgatctcgcagggcgccatcgaaaaggtcaaggacgcgactcggaagatagctaaagcattcgcaatctctgggcctttcaatgtccaattcttggtgaagggaaacgatgtgctggtgatcgaatgcaacctgagggcgtccagatccttcccgttcgtgtccaagaccctgggggtggactttatcgacgtggccaccaaagtgatgatcggagagaacgtggatgaaaaacatctgccgactctcgaccatcctatcatcccggcggactacgtcgccattaaggcgccgatgttttcctggccacgcttgcgcgacgcggacccgattctcaggtgcgagatggccagcaccggggaggtcgcttgcttcggagagggaattcacaccgcgttcttgaaggctatgctgtcgaccggattcaagatacctcagaaaggaattctcatcggaatacaacagtcattcaggccacgctttctgggcgtcgcggaacagttgcacaatgaagggttcaagttgtttgcaaccgaggcgacctccgattggctcaacgccaacaacgttccggcgactcccgttgcgtggccgagccaagagggacaaaatccctcactgtcgtccattaggaagctgatccgcgacggctccatcgacctggtgatcaacttgccgaacaacaacactaagttcgtccatgacaattacgtgatcaggagaactgctgtggacagtgggatcccattgctgacgaattttcaggtgacgaaactgttcgcagaagcggtgcaaaagtcacggaaggtggactcgaagtcactgtttcattaccgccaatactcggccggaaaggcggcg

SEQ ID NO: 8029 - DNA, 4500 bp, synthetic construct
  misc_feature 1..4500: note = source = /note="Description of Artificial Sequence: Synthetic coding sequence"
  source 1..4500: mol_type = other DNA
atgacccgcatcctgaccgctttcaaggtggtccggactttgaaaaccggcttcggatttaccaacgtgactgcacatcagaagtggaagttttcaagacctggtatacgtctgctttcggtcaaagcacaaactgcacacatcgtgctcgaagatggtaccaaaatgaaaggttactcgttcgggcacccttcatccgtggcgggcgaggtcgtgtttaacactggccttggtggctacccagaagcaattaccgatcctgcatacaaaggacagattctcaccatggcgaacccaatcattggtaatggaggagcacccgacactactgcgcttgatgagctgggtctgtcgaaatacctggaatcgaacggcattaaagtgagcggcctgctcgtgctggattattcgaaggattacaaccattggcttgcgaccaagtcgctcggacaatggttgcaggaagaaaaggtgcccgccatatacggcgtggatactcgtatgcttactaaaatcattagagataagggaaccatgcttggaaagatcgagtttgaagggcaaccagttgattttgtggacccaaataagcaaaacctgattgcagaagtgtcgacgaaggatgtcaaggtctacggcaagggaaacccaaccaaagttgtcgcagtggattgtgggattaagaacaacgtgatccggcttctggtgaagcgaggcgcagaagtgcacttggtgccttggaatcatgactttaccaagatggagtacgacggaattctcatagcaggtggacctgggaatcctgcgctggcagaacctcttattcaaaatgtgaggaagatcctggagagcgacagaaaagagccgctttttggtatctcgaccggcaaccttattaccggactggcggcaggggcaaaaacctacaaaatgagcatggcaaacagaggacagaatcagcccgttttgaatatcaccaacaaacaggcattcattactgcacaaaaccatggttacgcactcgataatactcttcctgcagggtggaaaccgctttttgtcaacgtgaatgatcaaaccaatgaagggataatgcatgaatccaagccctttttcgcggtgcagtttcaccctgaagtgaccccaggaccaatcgacaccgaatacttgttcgattccttctttagcctgattaagaaaggcaaagcaactacgattacttccgtgcttcctaagcccgcgcttgtggcctcaagagtcgaagtctccaaggtgctgatcctcggatccgggggcctgtcaatagggcaagcaggtgaatttgattactcgggatctcaagcagtgaaggcaatgaaggaagaaaatgtcaagactgtgctcatgaacccgaatatcgcatcggtccaaaccaacgaagtgggtctgaagcaggccgatactgtctacttccttccaatcaccccccaatttgtgactgaggtcatcaaagcagagcagccagatggacttattcttggaatgggagggcaaaccgcacttaactgtggggtcgaattgtttaagagaggagttctcaaggaatacggcgtgaaggtcctggggacctcggtggaatccataatggcaactgaagatcgtcaactgttcagcgataagctcaacgagataaatgaaaagattgccccttcatttgcagtcgaatccatcgaagatgccctgaaggccgccgacactatcggttacccagtgatgattcgatcagcatacgcacttggtgggcttggctccggtatctgtcccaaccgcgaaaccctcatggacctgtcaactaaggcatttgcaatgaccaatcagatcttggtggaaaagtcggtgacggggtggaaagaaattgaatacgaagttgtgagggatgcagacgataattgtgtcaccgtgtgcaacatggaaaacgtcgatgcgatgggcgtgcatacgggagattccgtcgtggtggcaccagcccaaactctgtcgaatgcggaatttcagatgctgagacggacttcgattaatgtggttcgacacctcggcatcgtgggagaatgtaacatacaattcgctcttcaccccacttccatggagtactgtatcattgaggtcaacgctcgactgtctcgatcaagcgcactcgcatctaaggcaactggatacccgcttgccttcatagccgcaaagatcgcactgggaatccctctgccagagattaagaatgttgtcagcggcaaaacctcggcgtgcttcgaaccaagcctggattacatggtgaccaaaattcctcggtgggaccttgatcgcttccatgggacctcctcgcgcatcggatcatctatgaagtccgtcggtgaagtcatggccattggtaggacctttgaagaatcatttcagaaggcgctgcgcatgtgccatccttcgatagaaggtttcaccccgagacttccgatgaacaaggaatggccaagcaacctggatttgcgtaaagaactctcggaaccgtcctccactcgaatctatgcaatcgctaaggctattgacgacaacatgtcgctggacgaaatagaaaaactcacctacattgataaatggttcctctataagatgcgcgatattctgaacatggaaaaaactctgaagggtctgaacagtgaatccatgaccgaagaaaccttgaagcgggcaaaggagatcggattttcggacaagcagatttccaagtgtcttggactgactgaggcacagacccgcgaactgaggctgaagaagaacatccatccttgggttaaacagattgacactctcgcagcagaatacccatcggtgaccaattatctttatgtcacttacaatggacaagaacacgatgtgaactttgatgaccatggtatgatggtcctgggatgtggtccctaccatattggatccagcgtggagtttgattggtgtgcagtctccagcatcaggaccctcagacaactcggtaagaaaaccgtggtcgtgaactgtaatccagagactgtctccaccgattttgatgagtgtgataaactgtactttgaggagctctcgctggagcggatccttgatatctatcatcaagaagcgtgcgggggatgtattatctcagtggggggacaaattccaaacaaccttgcggtgcccctgtacaagaacggagtcaagattatgggaacctcccctctgcaaattgatagagctgaagatcgttccatcttttccgccgtccttgatgaacttaaagtggcacaggccccttggaaggcagtgaatactctgaacgaggctctggagtttgcgaagagcgtcgattacccatgtctccttcggcctagctacgtgctttcgggttcggcaatgaacgtggttttttcggaagatgaaatgaagaagtttcttgaagaagcaacgcgtgtctcgcaagaacatccagtggtccttaccaagttcgtggagggcgccagagaggtcgaaatggacgccgtggggaaggatggcagagtcatttcccacgcaatttctgagcatgtcgaggacgcgggagtgcattcaggtgatgcaacgctgatgcttcccacccaaacgatctcccagggcgcaatcgagaaggtgaaagatgcaaccagaaagattgcgaaggcatttgccatctcaggaccctttaacgtgcagttcttggtgaagggtaacgatgtgcttgtgatcgagtgtaacctgcgcgcatcccgttcatttccatttgtctccaagaccctgggtgtggactttattgatgtggcgaccaaagtgatgatcggcgaaaacgtggatgaaaagcacctccctactctggaccatcctatcattcctgcagattacgtggctattaaggcacccatgttttcatggcctcgcctgcgtgatgcagatccaatcctccggtgtgaaatggcatcgaccggagaggtggcgtgttttggcgagggcattcacactgcatttctcaaagcaatgctgtccaccgggtttaagatccctcaaaaggggattctcattggtattcagcagagcttccgacctcgctttctcggagtggcagaacagcttcacaacgaaggatttaagttgttcgcaactgaagcgacctcagattggctgaacgcaaacaacgtccctgcaactcctgtggcctggccttcgcaagaaggacaaaatccctccctttcgtcgattagaaaactgattagggacggtagcattgacctcgtgattaaccttccaaacaacaacactaagttcgttcatgacaattacgtcattagaaggaccgcagtcgacagcggcattccgctgctcaccaactttcaagtgaccaagctgtttgctgaagccgtgcagaaatcaagaaaagtggacagcaaaagcctttttcactaccggcaatactccgcagggaaggcggcg

SEQ ID NO: 8030 - DNA, 4500 bp, synthetic construct
  misc_feature 1..4500: note = source = /note="Description of Artificial Sequence: Synthetic coding sequence"
  source 1..4500: mol_type = other DNA
atgacccgtattctgacagctttcaaagtggtaaggaccctgaagacggggtttggctttaccaacgtgactgcacaccagaagtggaagttttcccggccaggaatcagacttctttccgtcaaggcccaaacagcccatatcgttctggaagatggcacaaaaatgaaaggatacagctttggacacccttcctctgtggcgggcgaagtggtgttcaacacaggcttgggcgggtaccccgaggccatcacagaccctgcgtacaaaggccagattcttactatggcgaatccgattattggcaatggcggcgcccctgataccaccgccctggacgaactcggcctctctaaatatctggagagcaatggcataaaggtgagcggtttgttggtcctcgattattcaaaggattataatcattggctggcgaccaagtctctcggtcagtggttacaggaagagaaggtccctgccatatatggcgttgatacaagaatgctcaccaaaataatccgcgataagggaaccatgctcgggaagatcgaattcgaggggcagccagtggactttgtggaccccaacaaacagaatctaattgccgaagtgagcacgaaggatgttaaagtttacggcaaaggaaaccctactaaagtggtcgcggttgactgtggcatcaagaataacgtgatccgcctgctggtgaaaagaggcgcagaggttcatctggtcccctggaaccacgattttactaaaatggagtacgatggtatcttaattgcgggcggccctggcaacccggcgctagcagaacccctgattcagaatgtacgaaagattctagagtccgacaggaaagagcccctatttgggatatccaccggcaacctgatcactggccttgcagctggcgcaaaaacctataagatgtctatggccaatagagggcagaaccagcctgtactgaacattaccaacaagcaggccttcatcactgctcagaatcatggttatgcactcgacaatacgctccctgccgggtggaaacctttattcgtgaacgtcaacgatcagaccaatgagggcatcatgcacgagagcaagccgtttttcgcagtccagttccacccagaagttacccctggtccaatcgatacggaatacctttttgattcattcttcagcctgatcaagaaaggaaaggcaactaccataactagtgtgctcccaaaacccgccctcgtggcctctagggttgaggtgtctaaggtgctaatactggggtcaggaggtctgagcatcggtcaggccggagagttcgattactcgggctctcaagcggttaaggctatgaaagaggagaacgtgaagacagtcctgatgaaccctaacatagcctctgtccaaactaacgaggtgggactcaaacaggctgatacagtgtacttccttccaatcacaccgcagtttgtcaccgaagtgatcaaagctgaacaaccggatggacttattctgggaatgggaggccaaacagccctgaactgcggcgtggaacttttcaagcggggcgtgttgaaggagtacggagtaaaggtgctgggaacctcagtcgagtccattatggcaactgaagatagacaactttttagtgataaactaaacgaaattaatgagaagatcgctcccagttttgcagtggagtccatcgaggacgctctaaaagcagctgatacaatcggttatcctgtcatgattcgcagcgcttacgcacttggcggactaggcagtggcatctgccccaatcgtgaaactctgatggatctgtctacaaaagcgtttgctatgacaaatcagatactggtagaaaagtccgtaacaggctggaaggaaattgaatatgaggtagtaagagacgccgatgacaattgcgtgaccgtttgcaacatggaaaacgttgatgctatgggcgtgcacacaggggactccgtcgtagtcgcccccgcccaaaccctgtcaaacgccgaatttcaaatgctacggagaacctctatcaacgtggtacgacacctcggcatcgtgggcgagtgtaatattcagtttgcactgcatcccacctccatggagtactgtattatagaggtgaacgctcgcttgtcccggtcttctgctttagccagcaaggccaccgggtatccccttgcttttatcgcagcaaagattgctctgggcatccccctacctgagattaaaaatgtggtctctgggaaaactagcgcctgttttgaacccagcctggactacatggtgacaaaaattcccaggtgggatctagatagattccacggtacatcctccagaattggttcttccatgaagtctgtaggggaagtaatggctattggacggacctttgaagaatcctttcaaaaggcactgcggatgtgccacccatccatagaggggttcaccccacggctacctatgaataaagagtggcctagtaaccttgatctgcggaaagaactgtccgagcctagttctacccggatttacgctatagccaaggcgatcgatgacaatatgtccctagacgaaattgagaaactgacatatattgataagtggttcctgtacaaaatgagagatatcctaaacatggaaaagacactcaagggtcttaattcagagtccatgacagaggagaccctgaaacgtgcaaaggagattggtttctccgacaaacagatcagtaagtgcctggggctgacagaggcacagacacgggagttgcgcttgaagaaaaatatccacccgtgggtgaaacagattgacacgctagccgctgagtacccatctgtcaccaactacctgtacgtgacctataatgggcaggagcacgacgtgaatttcgatgaccatgggatgatggtgcttggctgcgggccataccacatcgggtcatcagttgaattcgattggtgcgccgtgtcctcaatccgtacacttagacagctcggaaagaaaaccgtcgtggttaattgtaatcccgagacagtatcaaccgacttcgatgaatgtgacaaactgtattttgaggaactgagtctggaaaggatattggacatataccatcaggaagcctgcggaggatgcatcatctctgtgggtgggcaaatcccaaataacctagcggtgcccttgtacaagaacggagtcaagattatggggaccagtccgctacagatcgaccgggccgaagataggtcaatcttctccgcggtactcgacgagctgaaggtggcgcaggctccttggaaggccgtgaataccctgaacgaagctctcgaatttgcaaagtccgttgactacccctgtctgttgaggccttcatacgttttgtctggaagcgccatgaatgtcgtttttagcgaggacgagatgaaaaagttcctagaggaggctacaagggtgtcccaggaacaccctgtggtattgacgaagtttgttgaaggggctagagaggtcgaaatggacgcggtagggaaggatgggagggtgattagtcatgccatttcggaacatgttgaggatgccggggtgcacagtggcgatgcaaccctgatgctgccaacgcagaccatcagtcagggggcgatcgagaaggtgaaggatgccactagaaaaattgcaaaagcattcgccatctccggaccatttaacgtccagtttttagtcaaaggcaacgatgtcctggttatcgagtgcaacctgagggctagtaggtcctttccattcgtcagtaaaacactgggcgtggattttattgacgttgctaccaaagtgatgatcggggaaaacgtcgacgaaaagcacctccccaccctcgatcatccgatcattcccgctgactacgtggcaatcaaagcgccaatgttcagctggcccagacttagggacgcagatccaatcctgcgctgcgagatggcaagcaccggcgaagtagcctgtttcggggaaggaattcatactgctttcctgaaggcaatgctcagcactggatttaagatccctcagaaaggaattctcattggtatacagcaatccttcagaccccggttcctaggagttgctgaacagttgcataatgaaggcttcaagctcttcgccaccgaagctacgtccgactggctcaatgctaacaatgtaccggccacacctgttgcatggcctagtcaggaaggtcagaaccctagcctttcaagtatccgaaagttgataagggatggttctatagatctagtaattaacctgccgaacaacaacactaagtttgtgcatgacaattacgtcatccgcaggacggcagtggactccggtattccattattaactaatttccaggtgaccaaactctttgctgaggctgtgcagaaaagccggaaagtggactctaagagtttattccactaccgacagtactcagccggcaaagctgcc

SEQ ID NO: 8031 - DNA, 4500 bp, synthetic construct
  misc_feature 1..4500: note = source = /note="Description of Artificial Sequence: Synthetic coding sequence"
  source 1..4500: mol_type = other DNA
atgactaggatactgactgcttttaaagtggtgcgaacactgaaaaccggctttggcttcactaacgtcaccgcacaccaaaagtggaagttttctcgcccgggtatccgcctgttgagcgttaaagcacagaccgctcacatcgtcctagaggacggcacaaagatgaaagggtacagtttcggtcacccatcttcagtggccggagaggtggtctttaatactggattaggcggctatccagaggctatcaccgaccctgcgtacaagggacagatccttaccatggctaacccaattatcgggaacggtggtgctcctgataccaccgcgctggacgaactggggctgagcaagtatctagaaagcaacggtattaaggttagtggactcctggtgctggactatagtaaggattataaccactggcttgctacaaaaagtctgggccagtggctgcaggaagaaaaagtcccagctatatatggagtggacacacgtatgttaacaaagattattcgcgataaaggaaccatgctgggaaagatcgagttcgaaggacaacctgttgacttcgtggaccccaataagcagaatctcatcgcagaagtgtctaccaaagatgtcaaagtgtatgggaaaggtaacccaacaaaggtggtggcagtggattgtggcatcaaaaacaatgtgataaggctccttgtgaagcgcggcgcagaagtgcacttagttccatggaaccacgattttaccaagatggagtacgacggcattttaatcgctggcggccccggcaacccggctctggctgagcccctgatacaaaatgttcggaaaattcttgaaagcgatagaaaggaacctctgttcgggataagcacaggcaaccttattacgggcctcgcagccggagctaaaacatacaaaatgagtatggctaaccgtggacaaaaccagccagtcctcaacataacaaacaagcaggcattcatcactgctcagaaccatggatacgctctggataacacactcccggccggctggaagcctctgtttgtcaatgtgaacgatcagaccaacgagggcataatgcacgagtccaagcccttcttcgccgtccaattccatccggaggtgactcccggccctatcgacaccgagtacttgttcgatagctttttcagcctgatcaagaaagggaaagccaccactattacttctgtgctgcccaagcctgctctagttgccagcagggttgaggtgagtaaggtgctcatcctgggcagtggcggcttatcaataggacaggctggcgaattcgattatagcggcagccaggcagtgaaagctatgaaggaagagaacgtcaagactgtcctgatgaatccaaacatcgcttcagttcagactaacgaagtggggctcaagcaggcagacactgtgtacttcttgcccattacccctcagtttgtgaccgaggtaatcaaggccgaacagcccgatggcctgattctgggaatgggcgggcaaacggcactgaactgcggggtggaactatttaagaggggggttttgaaagagtatggcgtgaaggttctgggaacttctgttgaatcaatcatggcgaccgaagacaggcagttattttctgacaagctcaatgaaatcaacgagaagatcgcaccttccttcgctgtggagagcatcgaggatgctcttaaagcagcagatacaatcggctatcccgtgatgattagaagtgcttatgcactgggcggattgggcagcggtatctgccctaatcgcgaaactctgatggacctgagcaccaaggctttcgccatgaccaaccaaattttagtggaaaaaagcgtgactggatggaaagaaatcgagtatgaggtcgtccgcgatgctgatgacaactgcgtgaccgtgtgtaacatggagaacgtcgatgctatgggagttcatactggagatagtgtggtggtagcccccgcacaaacactttctaacgccgaatttcagatgctgcgccggactagtatcaatgtagttagacatctcggaattgtgggagaatgcaacatccagtttgctctgcacccgaccagtatggagtattgcattattgaggttaacgcgcgcttgtcaaggtcttctgcattagcgagcaaggcgaccgggtacccgttggctttcatagccgccaagatcgctctgggcattccattaccagaaatcaaaaacgtcgtgagcgggaaaacctcagcgtgtttcgagccaagcctcgattatatggttaccaaaatcccaaggtgggatctggataggttccacgggactagcagccgtattgggtcctctatgaaaagtgtgggcgaagtcatggccatcggacgaactttcgaggagagcttccaaaaagccctcaggatgtgccaccctagtatcgaaggtttcacccctcggttgccaatgaacaaggagtggcctagcaacctggatttaagaaaggagctcagtgaaccatcctcaactagaatctatgccattgcaaaagccatagatgacaatatgagtctcgacgaaatcgagaaactgacgtacattgataaatggttcctatataaaatgcgggatattctcaacatggaaaagactttgaaaggacttaatagcgaaagcatgactgaggagacactcaaaagagcaaaggagatcggattcagcgataaacaaatcagcaagtgtttgggccttaccgaggctcagaccagagagttgcgcctgaaaaagaacattcacccctgggtgaagcagatcgacaccctcgctgctgagtatccgtccgtcaccaactacctttatgtgacctataacggccaagaacacgatgtcaatttcgatgatcacgggatgatggtactgggctgtggtccataccacattggcagcagcgtggagttcgattggtgcgcggtgtcttccataaggaccctgaggcaactgggtaaaaaaaccgtcgtagtgaactgtaatcctgaaactgtgagcaccgacttcgacgaatgtgataagctgtattttgaagaactgtcccttgaaaggatcctggatatctaccatcaggaagcctgcggaggctgtatcatctccgtcgggggccagataccaaacaaccttgccgtgcctctttacaaaaatggggtaaagatcatgggaactagcccactgcaaatcgaccgggccgaggatagaagcattttttccgccgttctcgatgaactcaaagtggcacaggcaccctggaaggccgtcaacaccttaaatgaagcccttgagtttgctaagagcgtagattacccctgtcttttgagaccctcttacgtgctgtcaggcagtgccatgaatgtggttttttctgaagacgagatgaaaaagtttctcgaggaggctacaagagtctctcaagaacatcctgtcgtgctgaccaaatttgtggaaggtgcaagggaagtggaaatggatgctgtaggaaaggacgggagagtcatttcgcatgctattagtgagcacgtcgaagacgctggagtccacagcggggatgctacgctgatgttaccaacccagaccatttcccaaggagcaatcgagaaggtcaaagatgcgaccaggaaaatcgctaaagcttttgccatcagcgggccttttaacgtgcagtttctcgttaagggaaacgacgtgttggtaattgagtgtaatctgagggcgagcagaagctttccatttgtgagtaaaaccctcggcgtggactttatcgacgttgctactaaggtcatgatcggcgaaaatgtagacgagaagcatctgccaacccttgaccaccccataatcccggcagattatgtcgctattaaagcccccatgttttcttggccaaggctgcgggatgctgaccccattctcaggtgcgaaatggcgtccactggcgaggtcgcatgctttggagaaggcatccacactgcttttctcaaggcaatgctgagtactgggttcaaaatcccccagaagggcatcctgattggcatacagcagagttttcgtcccaggtttctcggagtggcggaacagctgcataacgaagggttcaaactgttcgccaccgaggctacctcggattggcttaacgccaacaacgtgcctgccactccggtggcatggcccagtcaagaaggccaaaaccctagtttgagctccatcagaaaattgatccgcgatggctctattgatctggtgatcaacctcccaaacaacaacacaaagttcgttcacgataactacgtcataagaaggaccgctgtggatagcgggatccctctgctgactaattttcaagtcactaaactgtttgccgaggcagtgcagaagtctagaaaggtggatagcaagagcctctttcactatcgccagtatagcgcagggaaggcggcg

SEQ ID NO: 8032 - DNA, 4500 bp, synthetic construct
  misc_feature 1..4500: note = source = /note="Description of Artificial Sequence: Synthetic coding sequence"
  source 1..4500: mol_type = other DNA
atgaccagaatacttacggccttcaaggtggtgaggactctgaagacggggtttgggttcactaatgtgaccgctcaccaaaagtggaagttcagcaggcccgggatacggctgctgtccgtgaaggcccagacagcccacatcgttttagaggatgggaccaaaatgaagggctactctttcggccaccccagttctgttgccggcgaggttgtgttcaatacagggctgggtggctatccagaagccattactgacccagcctataagggtcagatcctgacaatggcaaacccgataatcggaaacggaggggcgccggatacaacggctctcgatgagctcggtctctccaaatatcttgagtctaatggcatcaaggtgtccggcctattagtactcgattatagcaaggattataatcattggctggccacaaagtccctaggccaatggttgcaagaagagaaggtgcctgcgatctacggcgtggataccaggatgctgaccaaaattattcgggataaaggcacaatgcttggcaaaatcgaatttgagggacagcctgtggacttcgtggatcctaacaaacaaaacctaattgctgaagtatccaccaaagacgtgaaggtctacggtaaagggaacccaacaaaagttgtggctgtggactgtggcatcaaaaacaatgtgatacgcctccttgtcaagaggggtgccgaagtccacctggtgccttggaaccacgatttcacgaagatggaatacgatgggattctgattgctggaggtccaggaaaccccgcgctcgctgagcccttgattcagaatgtgcgaaagatcctggagagcgacagaaaggagccgttgttcggcatcagtactggcaatctcattactggtctggcagcaggcgccaagacttacaaaatgtccatggcaaatcgggggcagaaccagccggtcttgaatattacaaacaagcaggcatttatcaccgcacaaaatcacggatacgcgctggacaatacactccctgctggatggaagccattatttgtaaacgtgaacgaccagaccaacgaagggatcatgcacgaatcaaagccttttttcgcggttcagtttcacccagaggttactccaggcccaattgatacggagtaccttttcgactcgttcttttctctcatcaagaaggggaaagctactacaattacatctgtcttgcccaaacccgccctggttgctagccgagtggaggtttcgaaagtacttattcttggaagcggaggactctcgatcggacaggctggcgagttcgactattccggcagtcaggcggttaaggccatgaaggaagagaacgtgaagacagtgttgatgaaccccaacattgcatctgtgcagaccaacgaggtgggcctcaaacaggccgacactgtgtactttcttcctattacaccccaatttgtaactgaggttatcaaagcagagcagccggatggcctgatcttgggaatgggcggccaaaccgccctgaattgtggcgtcgagctattcaagcgcggggtgctgaaggaatatggggtgaaagtcctggggaccagtgtcgaaagtatcatggctaccgaggaccgtcagctcttcagtgataagctgaacgagatcaacgaaaaaatcgcgccttcatttgccgtggagtctatcgaagacgctctgaaagccgccgataccattggttatcccgtaatgattcgatctgcatatgcacttggtgggctgggtagtggaatttgtcctaaccgcgagacacttatggacctctccacaaaagcctttgctatgactaaccagatccttgtcgaaaagtctgtgactggctggaaagagattgaatatgaagttgtgcgagatgcagacgataattgcgtgaccgtgtgtaatatggaaaacgtggacgccatgggagtccacacgggggattctgtcgtcgtggcccccgcccagacactttccaatgccgagtttcagatgctgcggagaaccagtattaatgtagttcgtcacctgggcatcgttggcgagtgcaacatccagtttgcgcttcatcctacttccatggagtattgcatcatagaggtgaacgccaggctgtctcggtcaagcgccctggcctctaaagccactggatatccactcgcctttattgcagccaagatagcactggggatccctcttccggagattaagaatgtggtgagcggcaaaacatcagcatgcttcgagcctagtctggattatatggttactaaaattccacgctgggacttagacaggtttcacggaacgtcttcccggattggtagctcaatgaaatccgtgggcgaagtgatggctattggacgaacctttgaggagtcatttcagaaggccttgcgaatgtgccatcccagtatagagggattcacaccgcgactgccaatgaacaaggagtggccaagcaaccttgacttgcgcaaagagctgagcgaaccatcttctacacggatttacgcaatagctaaagctattgatgacaatatgagccttgacgagatcgagaagcttacctatatcgataaatggttcctttacaagatgcgcgacattctgaatatggagaagaccctgaagggattaaactcagagtctatgacagaggagactttaaagagggcgaaggagatcgggttcagcgataagcagatttcaaaatgtctgggtttgaccgaggcccagactcgcgaactccgcttgaaaaagaacatccatccctgggtgaaacagatcgacacactggccgctgagtaccctagcgtcactaattacttgtatgtgacttataacggccaagaacacgacgttaactttgatgatcatggcatgatggtcctaggctgtggcccttaccatatcggatcctctgtagagttcgactggtgcgcagtgtcttcgatccgaacccttcggcaactcggcaagaagaccgtcgtggtcaactgtaaccccgagaccgtttcaactgactttgatgaatgtgataagctgtacttcgaggaactgtcactcgagcgcatccttgatatttatcatcaggaggcctgtggcgggtgcatcataagcgttggagggcaaattcctaataatctagccgtgcctctgtacaagaacggcgtgaagatcatgggtacgtccccgcttcaaattgaccgcgcagaggatcgcagtatattttccgctgtgctcgatgaactcaaagtcgctcaggctccatggaaggctgtgaatactctcaatgaggccctggagttcgccaaatctgtggactacccctgtttactgaggccgtcttatgtcctctcagggtctgcaatgaatgtggtgttcagcgaagacgaaatgaaaaaattcctggaggaggctacaagagtcagccaggaacaccccgtagtgttgacaaagtttgtcgaaggagcccgggaggtagagatggacgccgtgggtaaggacgggagagtcataagccacgctatctctgagcacgtggaggacgctggtgttcacagtggggacgctacgctgatgttgccaacccaaacaatcagccagggggctatcgaaaaagttaaggacgcaaccaggaagatcgcaaaggcatttgctatctccggaccctttaatgtccagtttctcgtgaagggaaacgacgtactggtgattgaatgcaacctccgggctagcaggtccttccccttcgttagtaagacactcggggtggattttatagatgtggccacgaaagtgatgatcggcgagaatgtcgacgaaaagcatctccccactctggatcaccccatcattccagctgattacgtggcaataaaagccccaatgttcagctggcccagactgcgcgacgccgaccctatcctgagatgtgagatggcctctacgggggaagtcgcctgttttggggagggcattcacacagcgtttttaaaagccatgctatctaccggcttcaaaataccacagaaaggcatcctgatcgggatacagcagtcttttagacccaggttcctcggagtagcagagcagctgcacaatgagggctttaaactttttgcaaccgaggccacaagtgactggctgaatgcaaataacgtgccagcaacccccgtggcatggccgtctcaggaggggcagaacccatccctgtcatctatcaggaagttaatccgtgatgggagtatcgacctcgttataaacctccccaacaacaatactaaattcgtacacgataattatgtcatcaggcgcacagccgttgatagtgggatccctctcctcaccaactttcaggtgacaaaattgtttgccgaagccgtccaaaaatcccgcaaggtagattctaaatcactgtttcactataggcaatactcagcgggcaaggccgcc

SEQ ID NO: 8033 - DNA, 4500 bp, synthetic construct
  misc_feature 1..4500: note = source = /note="Description of Artificial Sequence: Synthetic coding sequence"
  source 1..4500: mol_type = other DNA
atgacaaggatcctcactgcttttaaagttgtgcggacacttaagaccgggtttgggtttacgaacgtcacagcccaccaaaaatggaaatttagccggcccggcattaggctcctcagcgtgaaggcccagaccgcccacatcgtacttgaagatggcaccaaaatgaagggttacagctttggacacccatcatcagtggcaggcgaggtggtctttaatacggggctgggcggatacccggaggccattacagacccagcctataagggccagattctgacaatggcgaacccgataatcgggaatggaggcgcgccggataccacagcacttgacgagctggggctcagtaaatatctcgaaagcaatgggatcaaggtgtctgggctgttggtgctggattactcaaaagactataaccattggctcgctaccaagtctttgggacagtggctgcaggaggaaaaggtaccagctatttatggggtggacactcggatgctgacaaagattatccgcgataagggcaccatgctggggaagatcgagtttgaaggacagccagtggactttgtcgacccaaataaacagaatctgattgccgaagtttcaaccaaggatgtgaaagtctacggaaagggtaatcccactaaggtggtggctgttgattgcggcattaagaacaacgttatacgcctcctggtgaagcgcggggccgaagttcacctggtcccttggaatcatgattttaccaaaatggagtacgatggaatcctgatcgccggtgggccgggtaaccccgctctcgcggagcctttgattcagaacgtccgcaaaattcttgaatccgatcggaaagaacctttgttcgggattagtactggcaatctcattacggggctggctgctggggccaagacctacaagatgtccatggcaaaccgcggccaaaatcagccagtcttgaacattactaataagcaggcctttattactgcccagaaccacggctacgcccttgataataccctgccggctggctggaaaccattgttcgttaatgtgaacgatcagacaaacgaggggatcatgcacgaatccaaaccctttttcgctgtacagtttcaccccgaagtgactccgggtcccatcgacacggagtaccttttcgactccttcttttctctcatcaagaaaggcaaagcgaccactattacatctgtcctcccaaaaccggctctggtagcgtctagagtggaggtttccaaggtccttattctgggcagtggcggtctcagcattgggcaagctggcgagttcgattattccggatcacaggcagtcaaagcaatgaaggaggagaacgtaaaaacagttcttatgaaccctaacatagcatctgtccagactaatgaggttggactcaagcaagcggacaccgtttacttcctccctataaccccgcagttcgtgacagaagtcatcaaggccgagcagcctgatgggctcattctcgggatgggcgggcaaaccgcactcaactgtggagtggaactgttcaagcggggagtcttgaaggagtacggggtaaaggtacttgggacgtccgttgaaagcatcatggcgaccgaagatagacagctcttttcagacaagctgaacgaaattaatgaaaagattgccccctcctttgccgtggaatccatcgaggacgctctgaaagcggccgacacaattgggtatcccgtaatgattcgcagcgcctacgcattgggagggcttggcagtggaatctgtcctaaccgcgaaactctcatggatctcagtactaaagcctttgcaatgacaaaccagatactggttgagaagtctgtgacgggatggaaggagatcgagtacgaagtagtgagagacgctgatgataattgcgtcaccgtctgcaacatggagaatgtggacgccatgggtgtgcataccggagactccgtggtcgtggctccagcacaaaccttgtctaacgctgaattccagatgctgcggagaactagcattaacgttgtaaggcatctcggcatcgtaggtgaatgtaatattcaattcgccctgcacccaacctccatggagtattgcattattgaggtaaatgctcgcttgagccgcagcagtgctcttgcttccaaagctaccggttatcccctggccttcatcgccgccaaaatcgccctcggcatccctctgccagagattaagaacgtggtctccgggaagaccagtgcctgttttgagccttcactggattacatggtgacgaaaatcccgcgctgggacttggatcgctttcatgggacttccagccgcatcggttcttctatgaagtcagttggggaggtaatggccatcggcagaactttcgaagagtccttccagaaggcgctcaggatgtgccaccccagcatcgaagggttcacgccgaggttgccaatgaacaaggaatggccatctaatctcgacctgaggaaggagttgagcgaaccatccagtaccaggatttatgctatcgctaaggctatcgatgataacatgagcctcgacgaaatcgagaagctgacctacattgacaagtggttcctgtataaaatgagagacatcctgaatatggagaaaacgctgaaggggctcaattctgagagcatgactgaagaaacactgaagagggccaaggaaatcgggttttccgacaaacagatatctaaatgccttgggctgaccgaagctcaaacacgggaattgaggctgaaaaagaacatccacccctgggtgaagcagatcgacactctcgcagccgagtacccaagtgtgaccaattatctgtatgttacctacaacgggcaggagcatgacgttaactttgacgatcacggcatgatggtgctggggtgcggcccctatcatataggatcaagcgtcgaattcgactggtgtgccgtaagctctattagaaccctcaggcagctgggcaagaagacggttgtggtgaactgcaaccccgagactgtgagcactgacttcgacgagtgcgacaagctctatttcgaggagctgtcactggagagaattctggatatatatcatcaagaggcttgcggtggatgtatcatttctgttggtggtcagattcccaataatcttgccgtgcccctgtataaaaatggagtcaagattatgggcacttcaccgctgcagatcgatcgggctgaggatagaagcatattttcagcagtgctggacgaactgaaggtggcccaggctccttggaaggccgttaacacacttaacgaggccctggaattcgccaagtcagtggactatccctgtctcctccgcccctcatacgtactctccggctccgcgatgaacgtggtattctctgaggacgagatgaagaagttcctcgaagaagctacccgcgtgagccaggagcatccagttgtgttgaccaaatttgtggagggagcaagagaggtcgagatggatgccgtgggcaaggacggccgggtcataagtcacgccatctctgaacatgtagaggacgccggcgtgcactctggcgacgccacactgatgctcccaacccagaccataagtcagggtgcgattgagaaagtcaaggacgccactcggaagatcgccaaggcctttgccattagtgggccgttcaatgtacagttcctggtgaaaggtaacgacgttctggttattgagtgcaacctgagagcctccaggagttttccattcgtcagcaagactcttggcgtggactttatcgatgtagccacgaaggtcatgatcggagagaatgttgacgaaaagcacttgcctacactggaccaccccatcattccagctgactacgtcgccataaaggcccccatgttctcatggccccggctgagggatgccgacccaattctgaggtgtgaaatggcctctacgggggaagtggcttgtttcggtgaagggatccacaccgcctttcttaaggcgatgctctcaacaggatttaagatcccccagaaagggatactgatcgggatccagcagtcctttcgcccccgctttctcggtgtggccgagcagctgcacaacgaagggtttaagctcttcgcgactgaagctacgtctgactggctgaacgcaaataacgtgcctgccactccagtggcctggccctctcaggagggccagaacccaagcctgagttctatccgcaagctgatccgcgatggcagcatagacctggttatcaacctccccaacaataataccaagttcgtgcacgacaactacgtgatccggagaaccgccgtggattccggcatcccccttttgacaaactttcaagtgaccaaactcttcgccgaagccgtacagaaaagtcggaaagtcgactcaaaatctctgttccactatcgccagtacagtgctggcaaagccgcc

SEQ ID NO: 8034 - DNA, 4500 bp, synthetic construct
  misc_feature 1..4500: note = source = /note="Description of Artificial Sequence: Synthetic coding sequence"
  source 1..4500: mol_type = other DNA
atgactcggattctgaccgcgtttaaggtggtcaggaccctgaagaccggattcggatttacaaacgtgacggcccaccaaaaatggaaattttcgcgccctgggatcagattactatcagtgaaggcccagactgcgcatatagtattagaagatggaaccaagatgaagggctattcctttgggcatccaagcagtgttgcaggcgaagtggtgttcaatacaggactcggcggatacccagaagcgatcaccgaccctgcctacaaggggcaaatattgacaatggccaacccaataatcggcaatggcggcgcccctgacaccactgcgctcgacgagctaggactttctaagtacctggaatctaatggcatcaaggtttctgggctgttggtgctggactacagcaaagactacaatcactggcttgctacaaagtcgctgggacagtggttacaggaagagaaggtgcccgccatctacggtgttgacaccagaatgttaaccaagatcattagggataaagggacaatgttggggaagatcgagtttgagggtcagcctgtggacttcgttgatcctaataaacagaatctgatcgcagaggttagtaccaaggacgtcaaagtgtacgggaaagggaaccccacaaaggtagtcgccgtcgattgcggcattaaaaataatgtcatccggctgcttgtcaagcgaggagctgaggtacacctcgtcccctggaatcacgacttcactaagatggagtacgacggaatccttattgccggaggcccggggaaccctgcgctggccgaacccttgattcagaatgtacgaaagatactcgagtctgatagaaaggaaccacttttcggcatctctacaggcaatctgattacaggcctcgcagctggtgccaagacctacaagatgtccatggcaaacaggggccagaatcagccggtcttgaacatcacgaacaaacaagccttcatcacggcccaaaatcacgggtacgctctcgacaatacactgccagctgggtggaagcccctgttcgtgaatgtgaatgaccagacgaacgagggaataatgcacgagagcaagccattttttgccgtccagtttcatcccgaagtgacgcccggacctatcgacaccgagtatctgttcgactctttcttcagcctcattaaaaaaggtaaggctaccaccatcacatctgtgctccctaagcccgccctggtagcaagtcgcgtggaggtgtctaaggtcctgatcctagggagtggcggactttcaattggtcaggcgggggagtttgattatagtggatcacaggctgtgaaagccatgaaggaggagaatgtgaagacagttttgatgaatccaaatattgctagtgtacagacgaatgaagtggggcttaagcaggccgatacagtctatttcctacccatcactcctcaattcgttacggaagttatcaaagctgagcaaccagacggcctgattctaggaatgggtggtcagacagctctgaactgcggcgtcgaacttttcaagaggggcgtattgaaggagtacggcgtcaaagtcttgggtacatcggtggagtctatcatggccacagaggatcgtcagctcttctcagacaagcttaacgaaattaatgagaagatcgcaccatcattcgcagtggagtctattgaggatgccctaaaggccgccgatactatcggatacccagtgatgatcagatcggcctacgcactgggaggtctaggctccggtatatgccccaaccgcgagacgctgatggacctctcgactaaggcttttgctatgacaaatcaaatactggtcgaaaaatccgtgaccggatggaaagagatcgaatatgaggtagtgcgtgacgccgatgacaactgcgtcacggtctgtaatatggagaatgtggatgccatgggagtgcacaccggtgactccgttgtcgtagcccctgcccagacattgtcaaacgctgagttccagatgttaaggcgcacttcaattaatgtggtccgccacctagggattgtcggcgagtgtaatatccagtttgccttgcatcctaccagtatggaatattgtatcatcgaggtgaacgctagactcagtcggagctctgccctggctagcaaggcaactggttaccctttagctttcattgcagcaaagatcgctctcggtattccactacctgagataaagaacgtcgtgtccgggaagacaagtgcttgcttcgaaccatctctggattatatggtcaccaaaattccgcgatgggacctagatcgcttccacgggacctcctcacggatcggttcgtcgatgaagtcagtaggggaagtcatggcgatcggcagaacatttgaggaaagctttcagaaggctctgcgtatgtgtcatccgagcatcgaaggatttactccccgtctgccaatgaacaaggaatggcctagcaatctggacctgcgtaaggagttgagcgagccaagctccacaagaatctatgccatagctaaagcgatcgatgacaatatgtctttggacgagatcgaaaagttaacctacattgataaatggtttctgtacaagatgagggatatcctcaacatggaaaaaaccctgaaaggattgaactccgaatccatgactgaggagacactcaagcgggctaaagagattggtttttcggacaagcagatcagcaagtgcctgggactgactgaagcccaaacccgagaattgagacttaaaaaaaatatccacccctgggtgaagcagatcgatacactggccgccgagtatccatccgtcaccaactacctctacgtcacctataacggccaggagcatgacgtgaacttcgatgatcacggtatgatggtcctgggttgcgggccctaccacataggctcttccgttgagtttgattggtgcgcggtgtcctcaatcagaaccttacgtcaattgggcaagaaaacagtggttgtgaactgtaaccccgaaaccgtctccacggacttcgatgagtgtgataagctgtactttgaggagctttctttggagaggattctcgatatctatcaccaggaggcgtgtgggggctgcataatcagtgttggcggccagatccccaacaacctggccgtaccactctacaaaaacggagtgaaaatcatgggaacgtccccgctccaaatcgatcgcgcagaagacagatcaattttcagtgctgtactcgatgagctgaaggtggcacaggcgccctggaaagcagtcaacaccctgaatgaggcactggagttcgccaaatcggtcgactatccctgcctattaagacctagctatgttctgagcggatccgctatgaacgttgtttttagtgaggacgagatgaagaaatttctcgaagaggccacccgcgtgagccaagagcatccagttgtcctcactaaatttgtggagggagcccgcgaggtggaaatggacgcggtgggcaaggacggccgcgtgatatcacacgctatcagcgaacatgtagaagacgctggggtacatagcggcgatgcaacactgatgctgccaacacaaaccattagtcaaggtgcgatcgagaaagttaaagacgccacaagaaaaatcgcaaaagcattcgccatatcggggccatttaatgtacagtttctagtgaaaggtaatgacgtgcttgttatcgaatgcaatttgagggccagcaggtctttcccatttgtgtccaaaacactcggggttgattttatcgacgtggctactaaggttatgatcggcgaaaacgtggatgaaaaacatctaccaacgctcgatcatccaatcattcctgccgattacgtcgccattaaggcacctatgttttcctggcccagacttcgggatgccgacccgatcctacgctgtgagatggcttccacaggcgaggttgcatgttttggcgaaggaatccatacggccttcctcaaagccatgctaagtactggcttcaaaatcccccagaagggcatactgattggaatccagcagagctttcgcccccgatttcttggagtagctgagcagctccataatgagggattcaaactgttcgccacggaagcaaccagcgattggttgaacgcaaacaatgtgcccgctaccccagtggcctggccctcgcaagagggccagaatccttccctgagcagcatccgcaaactgattcgggatggaagtatcgatttagttatcaacctaccaaataataataccaaatttgtccacgacaactacgtgattcgtcggacagctgtggattctgggatcccgttgctaacgaactttcaggtcaccaagctttttgctgaagcggtgcagaaaagccgaaaggtggactccaaaagcctgttccattatagacagtattcagcaggaaaagctgct

SEQ ID NO: 8035 - DNA, 4500 bp, synthetic construct
  misc_feature 1..4500: note = source = /note="Description of Artificial Sequence: Synthetic coding sequence"
  source 1..4500: mol_type = other DNA
atgaccagaattcttaccgcatttaaggtggtaagaaccctgaaaaccggatttggtttcaccaacgtgactgcccatcaaaagtggaagttcagccggccaggcatacggctcctgtctgtgaaggcccagacagctcacatcgtgctagaagatggcactaaaatgaaaggttacagcttcggtcatccctcgtctgttgccggagaagtcgtctttaatacagggctcgggggatatcccgaagccattactgacccagcttataaaggccagatactgaccatggctaatcccattataggcaacggcggcgcccccgataccacggcacttgacgaacttggcctgagcaagtatctggagtcgaatggaatcaaagtgagtggtctgctggtgttagattacagcaaagattataatcactggctcgcgacaaaaagtcttgggcagtggctgcaagaggagaaagtgcctgccatatatggagtggacaccagaatgctaactaagatcattcgtgacaagggaactatgttagggaagattgagtttgaggggcaacctgtcgacttcgtggatcccaacaaacagaatctgattgccgaggtatcaaccaaggatgtgaaagtctatgggaagggtaaccccaccaaggtcgtggcggtggattgcggaatcaagaataatgtcatacgactcttggtaaaaagaggtgccgaagtgcacctcgttccgtggaatcatgatttcactaaaatggagtacgatggaattcttatcgccggcggccctggaaatcctgccctggctgaaccactaatccagaatgtgcggaagatactggagtccgaccggaaggagccactgttcggcatatccactggtaaccttattaccgggctagccgcaggcgccaagacttataaaatgagcatggcaaatcgcggacaaaaccagccagtgctgaacattactaataaacaggcctttatcaccgcccagaaccatgggtacgcgttggacaacaccctgccagccgggtggaaaccactgttcgtaaacgttaatgatcaaaccaacgaggggattatgcacgagagtaagccatttttcgcagtgcagtttcatccagaagtaactcctggccctattgataccgaatacttgttcgattctttcttttctctgatcaaaaaaggcaaggccacaaccatcacttccgtccttcccaagcctgcactggtagcatctcgggtcgaagtcagcaaggtgttaattttaggctctggtggtctcagtattggtcaggctggagagttcgactactcaggctctcaggcagtgaaagcgatgaaagaggaaaatgtgaaaactgtgttgatgaatcccaatatagcgtctgtgcagaccaatgaggtgggtttgaaacaggctgataccgtgtatttcctgcccattactccgcagtttgttaccgaggtaataaaggctgaacaacccgacggtctaattctgggcatgggtggacagaccgccctgaactgcggggtcgagctcttcaaaagaggcgtccttaaggagtatggtgttaaagtattagggacttctgtcgagagcatcatggctaccgaggaccggcagctgttttctgacaaacttaatgaaataaacgagaagatcgccccttcttttgcggttgaatccatcgaggacgcgctgaaagccgcagatacaatcggctacccagtgatgataaggtctgcctacgcacttgggggactgggctccggtatttgtcccaatcgcgagacactcatggatctgtctacaaaggcgtttgcaatgaccaaccagattctcgttgagaagtcagtgactggatggaaagaaatagaatacgaagtggtgcgtgatgcagacgacaattgcgtgacagtgtgtaatatggagaacgtggatgcaatgggcgtgcacactggcgatagcgtggtggttgctcccgcccagactttgtcaaacgctgaattccaaatgctgcgcagaacttctataaatgtggtgagacatctcggcatcgttggggagtgtaatatccaattcgcactgcacccaacttcaatggagtactgcatcatagaggtaaacgccagactcagccgctcgtctgcccttgccagtaaagccactggctatccgttggcttttatcgccgccaagatcgcactcggcatcccactgcccgagatcaaaaacgtcgtgagcggaaagacgtctgcttgctttgagccgagcctcgattatatggtaactaagattcctaggtgggatcttgatcgtttccatggcacttcatccagaataggatcctccatgaagagtgtgggagaagtcatggcaatcggcaggacattcgaggaatcttttcagaaggctctgcgcatgtgccatccctcaattgagggatttacccctcggctgcctatgaataaagagtggccgagcaatctagacctgcgtaaagaattgtctgagccttcttccacccgcatctatgctatcgctaaagctattgatgacaacatgtccctagatgagattgaaaagctaacatacatcgacaaatggtttctttacaaaatgcgcgacattttgaacatggagaaaaccctgaaggggctgaactcagaaagtatgacggaggaaacattgaaacgggctaaagagataggattcagcgataaacagataagtaagtgcctcggactgacggaagcacagaccagagagttgcggctgaaaaagaatattcacccttgggtcaagcagatcgacacgttagccgcggagtacccttcagtaacgaactacctgtacgtcacctacaacggccaggaacacgacgtgaacttcgatgatcatggaatgatggtgctgggttgtgggccttatcacattggctcatccgtcgagttcgattggtgcgccgtatcttcaattcgaaccttgcgccaacttggcaaaaagacagttgtggtgaattgcaaccccgagactgtgtccaccgattttgacgagtgcgacaagctgtacttcgaggaactaagtttggaacggattctggatatttaccaccaagaggcttgcggaggctgcattattagtgttggaggacagatccccaacaatctcgcagttcctctgtataaaaatggagtgaaaatcatgggtacatctccgcttcagatcgaccgcgctgaggatcgcagtattttcagtgccgtgctcgatgagctgaaggtggcccaagctccatggaaggcagttaacaccctcaacgaagcgctggaatttgccaaaagtgttgactacccatgcctgctgagaccctcttacgtgctctcaggctccgcgatgaacgtggtgttcagcgaagacgagatgaaaaaattcctggaggaagccacacgagtctcacaggagcaccccgtggtgctgactaagttcgtggaaggcgcgcgtgaagtagagatggacgctgtgggaaaagatggaagggtaatatctcacgccatctccgaacatgtggaagatgctggcgttcatagcggtgatgccaccctgatgctgcctacacagaccatctcacaaggcgcgattgagaaggtgaaggacgctactcgaaagattgccaaggctttcgccattagcggtccttttaatgtgcagtttctggtgaaaggcaatgatgtactggtgatagagtgtaacttgagggcgtcccggtcctttccctttgtcagcaagacgctcggcgtggacttcattgacgtggcaacaaaggtgatgattggagagaacgttgatgaaaaacaccttcccaccctggaccatcctatcatacctgctgattacgtggctattaaagcaccgatgtttagctggcctcggctaagggatgccgatcccatattaaggtgtgaaatggccagcacaggcgaggtggcatgttttggggagggcatccatacagccttccttaaggctatgctgagtactggtttcaaaatccctcagaagggcatcctgatcggaattcagcagagtttcaggccaaggtttctgggagtcgcagaacagctgcacaacgaaggttttaaactctttgctaccgaggctacatctgattggcttaatgcaaacaatgtgccggctacacccgtggcctggccctcgcaggaggggcaaaatccctccctcagtagcataaggaaacttattcgcgatggaagtatcgatttggttatcaatctgccgaacaacaacaccaagttcgtccacgataattatgtcattagaagaacagcggttgatagcgggatccccctcctgacaaatttccaggttacaaaactcttcgcagaagcagtgcagaagtccagaaaagtggactccaagtctttatttcactatcggcagtactccgctggcaaggccgct

SEQ ID NO: 8036 - DNA, 4500 bp, synthetic construct
  misc_feature 1..4500: note = source = /note="Description of Artificial Sequence: Synthetic coding sequence"
  source 1..4500: mol_type = other DNA
atgactcgcattctgaccgctttcaaggtagtccgcaccctaaaaaccggctttggcttcactaatgtgaccgctcatcaaaagtggaagttcagccgccctggtattcggctgctaagcgtgaaggcccagaccgctcacattgtcctagaagatggtaccaagatgaagggctactcctttggtcatcctagctccgttgccggagaggtggtctttaataccggtctgggtggttatccagaagcgattacggaccctgcctataagggtcagatccttactatggccaacccaattatcggtaacggtggcgcacctgacactactgcactcgatgagcttggcctgtcgaagtatctcgagagtaacggcatcaaggtcagcggtctgttggttctggattattctaaggattacaaccattggttagctacgaagagcctgggacagtggctgcaagaggaaaaggttcctgcgatctacggcgtggacacgcgaatgctgactaagatcattcgcgacaagggcaccatgctgggtaagatcgaatttgagggacagcctgtggacttcgtggatccaaacaagcaaaacctgattgcggaggtgtccaccaaggatgtcaaagtttacggtaagggcaatccgaccaaagtagttgccgttgactgcggcattaaaaataacgtgattcgcctgctggtgaagcgcggcgcagaggttcacttggttccgtggaatcacgactttaccaagatggagtacgacggtattctgatcgcgggcggcccagggaatccagcactggcggagcctttgatccagaatgttcggaagatcctggagagcgaccggaaggaaccactgttcggaatttccaccggaaatctgattaccggtctggcggccggcgcaaagacctacaaaatgagcatggccaatcgcgggcaaaaccagcctgttctgaacataaccaataaacaagctttcatcaccgcgcagaatcacggttacgcgctggacaacaccctgcctgctggttggaagccgctgttcgtgaatgtcaatgaccaaaccaacgaggggatcatgcatgagagcaagccattttttgccgtccagtttcatccagaggtcacgcctggtcctattgacaccgagtacttgttcgatagcttcttctcactgattaagaagggtaaggctaccacgatcacgtccgttctccctaaaccagccttggtggcgtctcgtgtggaagtgagcaaagtcttaattctgggtagcggcggcctgtccatcggccaggccggtgaattcgattatagcggatcccaggctgtcaaggcaatgaaggaggagaatgtgaagaccgtactgatgaatccgaacattgctagcgttcagaccaatgaagttggccttaaacaggctgatacggtgtacttcctgccaattactccccagtttgtaacggaggtgattaaggcagaacagccggacggtctgattttggggatgggtggccagactgcgttgaactgcggcgtagaactgtttaaaaggggcgtcctgaaggagtacggcgtcaaagtgctgggtaccagcgttgagagcatcatggccactgaagaccgccagcttttttcggataagctcaacgaaattaatgaaaaaatcgctccttccttcgctgttgaaagcatcgaagacgcactcaaggccgcagatacgatcggatatcccgttatgattcgctcagcctatgctctcggcggtctggggagtggcatctgcccgaatcgcgagacgctcatggacctgagcaccaaagcctttgcgatgactaaccaaattttggtggagaagagcgtgaccggatggaaggaaattgaatacgaagttgtacgcgacgccgacgacaactgtgtcacggtgtgcaatatggaaaatgtcgacgccatgggtgtgcatactggcgattctgttgtggtggcccctgcccagacgctgagtaacgcagagtttcagatgctacgtcggacgtcaatcaacgtggttcgccatttgggcattgtcggcgaatgcaatattcaattcgccctgcaccctacctccatggagtactgtatcatcgaggttaacgcgcgcctgagcagaagcagcgcactggcatcaaaagccactggctatccgctagcctttatcgccgccaaaattgccctggggattccattgccagagataaagaacgtcgtgagcggtaagactagcgcatgctttgagccatcattggactatatggtgacaaagatccctcgctgggacctggatcgttttcacggaacctctagccggattggctcttcgatgaagagcgtgggtgaggttatggcaatcggccgcacgttcgaggagagctttcagaaagctctgcgtatgtgccatcctagcatagagggcttcaccccgagattgcctatgaacaaggaatggccatcgaacctggacctgcgcaaggaactgtccgagccctctagcaccagaatctacgcgatcgccaaagccattgacgataacatgtccctggatgaaatcgagaagctcacctatatcgacaagtggttcctttacaaaatgcgcgacatcctcaacatggagaagaccctgaagggacttaatagcgagtcaatgaccgaagagaccttgaaacgcgcgaaagaaattggattcagcgacaaacagatctctaagtgcctgggtctgacggaagcgcaaacccgcgaactgaggctgaaaaagaacatccacccatgggtgaagcagattgacacactggctgcggagtacccaagcgtcacaaactacctgtatgtcacatacaatggtcaggagcacgacgtaaatttcgatgaccacggcatgatggttctgggttgtggtccgtaccacatcggtagtagcgtggagtttgactggtgcgcggtgagtagcatccgcaccctccgtcagctgggcaagaagactgttgttgtgaactgcaacccagagactgtgtctacggacttcgacgagtgcgacaagctctacttcgaggaattgagcctggaaagaattctcgacatttaccaccaggaggcatgcggcggttgcattatctcggttggcgggcagattccgaataatctggcggtgccgctgtataagaacggagtgaaaattatggggaccagcccgctgcagattgaccgtgcggaggatagatcaattttttccgcagtgctcgatgaactgaaggtggcgcaggccccctggaaggcggtcaacaccctgaatgaagcactggagttcgcgaaatctgtggattacccatgcctgttacggcccagctacgtgttgtctggttctgccatgaatgtagttttctcagaggatgagatgaaaaagttcttagaggaggcaacgcgcgtcagccaggagcacccagtcgtcctgacgaagttcgtggagggtgcccgcgaggtggaaatggacgcagtgggaaaggatggcagggttatttcccacgcaatcagcgaacatgtggaagatgccggagtgcattccggtgacgcaaccctcatgctgccgacgcagacgatctcgcagggcgccatagaaaaggtgaaagacgccaccaggaaaattgctaaggcctttgcaatctccggtcctttcaacgtgcagttcctggttaaaggcaacgatgtgctggtgatcgaatgcaacctgagggcgtccaggagctttccgtttgtctctaagactctgggtgtagacttcatcgatgtcgctaccaaagtgatgatcggtgaaaacgtcgatgagaagcacctgcctactctggatcatccgataatcccggccgactacgttgccatcaaggccccgatgttctcttggccacgtttgagagacgcagaccctattctgcgctgcgaaatggcctcaacaggggaggtggcgtgctttggtgagggtatccacaccgcattcctgaaagcaatgctcagtaccggcttcaaaatcccacaaaagggcattctgatcggcattcagcaaagcttcaggccacgctttctgggcgtcgctgaacagctgcacaacgaaggctttaagcttttcgccacagaggcaacttccgactggttaaatgccaacaacgtgcctgcaacgcctgttgcgtggccgagtcaggaaggtcagaacccttccctgtctagtatccgcaaattgatccgcgacggctctattgacctggttatcaacctgccaaataacaataccaaattcgtccatgataactatgtaatacgccgcaccgcagttgacagcggcataccgctgctgaccaatttccaggttaccaaactttttgcggaggccgtgcaaaaaagccgtaaggtggactctaaatccttatttcactaccgccagtactccgccggtaaggccgcc

SEQ ID NO: 8037 - DNA, 4500 bp, synthetic construct; identical to SEQ ID NO: 8026
  misc_feature 1..4500: note = source = /note="Description of Artificial Sequence: Synthetic coding sequence"
  source 1..4500: mol_type = other DNA

SEQ ID NO: 8038 - DNA, 4500 bp, synthetic construct
  misc_feature 1..4500: note = source = /note="Description of Artificial Sequence: Synthetic coding sequence"
  source 1..4500: mol_type = other DNA
atgactagaattcttaccgcatttaaggtggtgagaacgctcaagactggttttggatttaccaacgtgaccgcgcatcagaagtggaagttcagcagacctggaatccggttgctttccgtgaaggcacagacggcacatattgtgctggaggacggtaccaagatgaagggttactcctttggccatccctccagcgtggcgggtgaagttgtctttaacaccggtcttgggggttaccccgaagcaataaccgatcccgcatacaagggtcagatactgaccatggccaatcctatcatcggtaatggtggtgcaccagataccaccgctctggatgagcttggtcttagcaagtacttggagtccaacgggatcaaggtcagcggtctgcttgttctggattactcaaaggattacaaccactggcttgcaacgaaaagccttggacagtggctgcaagaggagaaggtgccggcaatttacggcgtcgacaccagaatgctcactaagatcatccgcgataagggtaccatgcttgggaaaattgagtttgaaggtcaaccggtggattttgtggatcctaataagcaaaatctcatagcagaagtgtctactaaggatgtcaaggtctacgggaagggaaatcctacgaaggtggtggcagtcgattgtggtatcaagaataatgtgatccggctgctcgtgaagagaggtgccgaagtccaccttgtgccatggaaccatgatttcaccaagatggagtacgatggtatcctgattgcagggggtcctggaaaccctgcactcgccgaaccgctgatacagaacgttcgaaagattctcgaatcggatagaaaagagccactgttcggaatctcaactggaaatcttataaccgggctcgcggcgggcgcaaaaacgtacaagatgtccatggcaaaccgaggacagaaccagcccgtgcttaacattactaacaagcaagcgtttatcaccgcacagaatcatggatacgcactggacaacacgcttcctgcgggatggaaaccgctctttgtgaacgtgaacgaccaaaccaacgaaggaattatgcacgaatcaaaacctttctttgcggtgcagttccacccagaagtcactccgggacccattgacactgagtacctgtttgattcattcttttccctcattaagaagggaaaagcaaccacgataacttcagtgctgccaaagcctgcgcttgtcgcgagccgagttgaggtgagcaaggttcttatccttggttcaggtggccttagcattgggcaagcaggagaatttgattactccggatcccaagccgtgaaggcaatgaaggaagagaatgtcaagactgtcctgatgaacccaaatatcgcatctgtgcagaccaacgaagttggtctgaagcaagctgataccgtctactttctgccaatcacccctcaattcgtgactgaggtgatcaaggcagaacagcctgatggactgatattggggatgggtggtcagacggcgctgaactgtggcgtggaactgttcaagaggggagtccttaaggagtacggggtgaaggtgctgggaacttctgttgagtccatcatggctactgaggatcgccagctgttctcagacaaacttaatgagattaatgagaagatcgcacccagcttcgcggtggagtccatagaagatgcacttaaggcagcagatactattggctatcctgtcatgatacgcagcgcatacgcacttggaggacttggctcgggaatttgtcctaatcgggaaaccctgatggatctgtcaactaaggcatttgccatgactaaccaaatcctcgtggaaaagtccgtgactgggtggaaagagattgaatacgaagtggtgcgcgatgccgacgacaactgtgtgaccgtgtgtaatatggaaaacgtggatgcgatgggcgtgcacactggtgattcggtggtggtggcaccagcacaaacgctttcgaatgcagaatttcaaatgcttcggcgcacttcaattaacgtcgtgaggcatctcggtattgtcggggagtgcaacattcagttcgcgctgcatccaacgtccatggaatactgtatcattgaagtgaatgcgcggcttagccgctcatcggcacttgcatcaaaggcaaccggatacccacttgctttcattgcagcaaaaatcgccctcggtattcctctgcctgagattaagaacgtggtgtctggtaagaccagcgcctgcttcgaaccatctcttgattacatggtgactaagatcccacgatgggacttggatcggtttcatggaacttcatcacggatcgggtcatcaatgaagtcggtgggtgaggtgatggccattggcaggacttttgaagaatcctttcagaaggcactgagaatgtgtcacccgtcgatcgaaggttttactccccgtctgccaatgaacaaagagtggccctcaaatctcgatctgaggaaggaactgtccgaaccttcgtcaactcggatctacgccatagcaaaagcaattgatgataacatgtcgctggacgaaatcgagaagctgacttatatcgataagtggttcctctacaaaatgcgagatattctgaatatggaaaagaccctcaagggtctgaactcggaatcaatgactgaggaaaccctgaagcgtgccaaggagatcggcttttccgataaacaaatctcgaagtgccttggactcaccgaagcgcagactcgcgaactgaggcttaagaaaaacatccatccttgggtaaagcagatagataccctggcagcggaatatccatcagtgactaactacctgtacgtcacttacaacggacaggaacatgatgtgaacttcgacgaccacggtatgatggttctggggtgtggaccgtaccatattgggtcgtcggtggaatttgattggtgcgcagtctccagcattagaacgcttcgccagctgggaaaaaagacggtggtggtgaactgtaatccagaaaccgtgtcaaccgattttgatgaatgtgacaagctgtactttgaagaactctcactcgaacggattcttgacatctaccatcaagaggcctgtggtggctgcataatctccgtgggcgggcagatccctaacaacttggccgttccactctacaaaaatggagtcaagatcatgggaacttctccactgcaaatcgaccgggccgaggatcgctccattttctctgcagtccttgatgaactcaaagtcgctcaagcaccttggaaggctgtgaacactctcaacgaagctctggaatttgcaaagtcagtggattacccttgcctgttgcggccttcctacgtcctgtccggaagcgccatgaacgttgtgtttagcgaagatgagatgaagaagtttcttgaggaagcaacccgggtcagccaggaacatcctgtcgtgctcaccaagtttgtggagggtgcaagagaagtcgagatggacgcagtcggaaaggacggacgagtgatttcgcatgctatcagtgaacatgtcgaggacgcaggagtgcacagcggcgacgccacccttatgcttcctactcaaaccatcagccagggcgcaattgaaaaggtcaaagatgctacgaggaagatcgccaaggcatttgcaatttcgggtcccttcaacgtgcaatttctggtcaagggaaacgacgtcctcgtcattgagtgtaacctgcgcgcatccagatcctttccatttgtgtccaagacccttggagtggactttatcgatgtggcaactaaggtgatgatcggggaaaatgtcgatgaaaagcatcttcccaccctggatcatcctatcatccctgctgattatgtcgccattaaagcgcctatgttttcctggcctcgcctcagagatgcagaccctattcttagatgcgaaatggcctcaaccggggaggtcgcgtgttttggagaaggaattcacacggccttcctgaaagcaatgctctcgaccggttttaagattccacaaaagggtatcctcattggtatacaacaatcgtttagaccaaggttccttggtgtggcagaacaactgcataacgaaggctttaagctctttgctacggaagcaactagcgattggctgaatgccaacaacgttcccgccacccccgtggcctggccatcgcaagagggacagaacccaagcctctcatcgatcaggaagctcattagggacggctcaattgaccttgtgataaacttgccgaacaacaataccaagttcgttcatgacaattacgtgattaggcgaaccgcagtggattccggcattcccctgcttactaacttccaagtcactaaactgtttgccgaagcagtgcagaagtcccggaaagtcgactccaagagcctgtttcattaccgacaatacagcgccggtaaggcggcc

SEQ ID NO: 8039 - DNA, 4500 bp, synthetic construct
  misc_feature 1..4500: note = source = /note="Description of Artificial Sequence: Synthetic coding sequence"
  source 1..4500: mol_type = other DNA
atgactcgtatccttaccgcattcaaagtggttaggactcttaagaccggattcggcttcactaacgtcaccgcccaccaaaagtggaagttcagccgcccagggattagactgctatcagtgaaagcgcagacagcacacatcgtcctggaggacggtactaagatgaaggggtacagcttcggtcacccttctagcgtggccggtgaagtggtgtttaacaccggacttgggggatacccagaggccattaccgatcctgcgtacaaaggacagattctgacaatggctaatcctatcatcggcaacggaggagcccccgacacgacagctctggatgagttgggcctgagcaaatacctagagagcaacggtatcaaggtttccggtcttctggtgcttgactacagcaaggattacaaccactggctcgccaccaaatccttgggacagtggctacaagaggagaaggttcccgccatttacggagtagacactcgaatgctgactaaaataatcagggacaaaggtacaatgctaggaaaaattgagtttgaagggcagccagtcgatttcgtggatcccaacaagcaaaacttaattgccgaagttagcactaaggatgtgaaagtttacgggaagggcaatcccactaaggtggtcgcagtcgattgtggcattaaaaacaacgttatcaggttgttggtaaaaaggggggccgaggtgcaccttgtgccatggaatcatgattttaccaaaatggaatatgatggtatactaattgctggaggccccgggaatcctgcactggcagaacctctgattcagaacgtgcgaaagatcctggaatctgatagaaaggagccactgttcggcatttccacagggaatctgatcaccggtttagccgccggagccaagacttacaagatgagcatggccaatcgaggtcagaatcagcccgtgctgaatataacaaacaagcaagctttcatcacagcgcagaatcacggctacgcattagacaatacactgcccgcgggttggaaacccctcttcgtgaacgtgaacgatcagacaaacgaggggattatgcacgagtcgaagcccttctttgccgtccagttccaccctgaggtgactcctggccccatagacacagagtatctgttcgactcttttttcagtctaattaaaaaaggcaaagccacaacaatcacctccgtgctgcctaaacctgctctagtagctagccgggttgaggtttccaaggtccttattcttggcagcggggggctaagtattggccaggccggggagtttgattatagcggcagtcaggccgtaaaggcaatgaaagaggagaacgtgaaaaccgtgctgatgaatccgaatatagcttctgtgcaaaccaacgaagttgggctgaagcaggcagatacggtatacttcctgcccatcaccccccagttcgttacagaagtcatcaaggctgagcagccagatggtctaatcctcggaatgggtgggcagacggcactcaattgtggggtggagttatttaaacgcggggtgctcaaggagtatggagtgaaggtccttgggacatcagtggaatctatcatggccacagaagataggcagctcttcagtgacaagcttaacgaaataaatgagaaaatagccccctcattcgctgttgaatctattgaagatgcgcttaaagccgccgatacaattggctaccccgtgatgatacggtcggcgtatgctctcgggggccttggttctggaatctgcccgaacagggaaaccctgatggaccttagtactaaagccttcgcaatgaccaaccaaatcttagtcgagaagagcgttacgggatggaaggaaattgagtacgaggttgttcgggacgccgacgataattgcgttacagtatgtaacatggagaatgtggatgccatgggtgtacatacgggagattctgtggtcgtcgcacccgcacagactctcagtaacgcagaattccagatgctacgaaggacatctattaacgtggtgcgccatttagggatagtgggtgagtgcaatatccagtttgcgcttcatcccactagcatggagtactgcattattgaggtgaacgcacgtctgagcaggtcgtctgcactcgccagtaaggccacgggctaccctcttgctttcatcgcagccaagatcgcactgggcatcccccttcctgaaatcaagaacgttgtctctggaaagacatccgcatgtttcgaaccatccctcgattatatggtgaccaagattcctcggtgggacctcgatcgctttcacggaacgtcctctcgtataggatcctctatgaaatctgtgggtgaagtgatggctatcggtaggacgtttgaggagtcatttcagaaagctctcagaatgtgtcaccccagtatcgaggggttcaccccacgtctgcccatgaacaaagaatggcctagtaacctcgaccttcgaaaagagttaagcgagccatcctcaacacgtatctatgcgattgccaaggccatcgacgataatatgtccctggatgagattgaaaagctgacttacatcgataaatggtttctgtacaaaatgcgggatatccttaatatggaaaagactctgaagggcctcaactcagagtcgatgacagaggagactctgaagcgcgctaaagaaatcggcttttcagacaaacagatcagcaagtgtctcggactgacagaggctcagacccgggagctgagattgaaaaaaaacatccacccctgggttaaacagattgacacactcgccgcggagtatccatccgtgacaaactacctttacgtgacatacaatggtcaagagcacgacgtgaattttgatgaccacggcatgatggtcctgggttgtggtccataccatatcggctcgagcgttgagtttgattggtgtgcagtcagttcaatacgcactctcagacagcttggcaagaagactgtcgtggtgaactgcaaccctgaaacagtgagcacggattttgacgaatgcgacaaactgtactttgaggagctgtccctggaacggatcctggacatataccatcaggaagcctgcggcggatgtattattagcgttggcggccagatcccaaacaatctcgcagtacccctttacaagaacggggtcaaaataatgggcacgtcccccctacagatagatagagcagaggatcggtcaattttttctgccgtgctcgacgagttgaaagtggcccaggccccctggaaggctgtcaacaccctaaacgaggcccttgagttcgctaagtcagttgattatccctgtctgctgcgcccttcatatgtcctgagcggttccgccatgaatgtcgtcttcagcgaagatgaaatgaagaaattcctggaagaggccacgagagtttcacaagaacatccagtggtgctaacgaaattcgtggaaggggctcgggaggtagagatggatgctgtcggaaaggacgggcgagtgatttcacatgccatttctgaacacgttgaggacgccggagtgcactcaggtgatgcgactttgatgctgcctacgcaaaccatcagccaaggcgcgattgagaaggtgaaggacgccaccaggaaaatcgcaaaagcgttcgcgatcagtgggccctttaatgtacaatttctggtgaaaggaaatgatgtgctggtgatcgagtgtaatctgcgcgcctcaaggtcatttcccttcgtctcgaagactttgggcgtcgattttatcgatgtggcaaccaaggtcatgatcggagaaaacgtagacgaaaagcatctcccaacattagatcaccccattatacccgcagactacgtcgcaatcaaagcacctatgttctcctggcctaggctgagagacgctgatcccattctccgctgcgagatggcttccaccggggaagtggcttgcttcggtgaagggatccacaccgcctttctgaaggcaatgttgtcaacaggtttcaaaatcccgcagaagggtattctgataggaatacagcagagtttcagaccacgttttctgggagtggccgagcaactgcataacgagggtttcaagctgtttgctactgaagccacctcagattggctaaacgctaacaatgtgcccgcaaccccggtcgcttggccaagtcaggaggggcagaatccgtccttaagctctatccgtaagctcatcagggacgggtcaattgatcttgtgatcaatcttccaaataataataccaaattcgtccacgataactacgtgatccgtcggacagctgttgattcgggaatacctctcctgacaaactttcaagtgactaaactgtttgccgaagccgtgcagaagagcaggaaagtggactccaaatcattgttccactatagacagtactctgcagggaaagcggcc

SEQ ID NO: 8040 - DNA, 4500 bp, synthetic construct
  misc_feature 1..4500: note = source = /note="Description of Artificial Sequence: Synthetic coding sequence"
  source 1..4500: mol_type = other DNA
atgacaagaattcttactgcattcaaggttgtccggaccctcaaaactggctttggtttcactaatgtcaccgcacaccagaaatggaaattcagtagacccggtattagactgctgtcggtgaaagctcaaaccgctcatatagtgctggaggacggcacaaaaatgaagggatatagcttcggtcatccctcatctgtggctggggaggtcgtgtttaatactggcttaggcgggtaccccgaggctattacagatcccgcatacaaagggcaaatcttgacaatggccaaccctattatcggtaacggaggagcccctgatacaaccgctctcgatgagttgggtctgagtaagtacttagaaagcaacggcatcaaagtgtcagggttgcttgtgctggattacagcaaggactataaccattggctggccacaaagtctctagggcagtggctgcaggaggagaaagtccctgccatctacggtgtagatacgagaatgctgaccaagatcatcagagacaagggaacaatgctcggcaaaatagaattcgaaggacaaccggtggactttgtggatcctaataagcagaacctgattgctgaggtgtctaccaaagatgtgaaggtgtacgggaaggggaaccctaccaaagtagtagctgttgactgtggtattaaaaataatgttattaggctgctggtgaaacgtggagccgaggtgcacctggtcccctggaatcatgactttaccaaaatggaatatgacggtatcctgatcgctggcggccctggaaatccagctctcgccgagccactcattcagaacgtaaggaaaatactcgagagtgatcggaaggagcctttatttggaatatctacgggaaacctcattacaggcctggccgccggagctaagacatataaaatgtctatggcgaacagaggccagaaccagccggtactaaacatcactaacaagcaggcattcatcacagctcaaaatcatgggtacgccttagacaacacacttccagccggctggaaacccctgttcgtgaatgtgaatgaccagacgaacgaaggtatcatgcacgagtcaaagccctttttcgcggtccagttccaccctgaggtgacccccggccctatcgacacagaatatcttttcgacagcttttttagtctcatcaaaaagggaaaagcaactacaatcacgtcagtgctacccaagccagcactggtcgccagcagggttgaagtgtcaaaggtgctcatcctgggctccggcgggctgagcatcggccaggctggggagtttgattacagcggctctcaggcggtgaaagccatgaaggaagagaatgtgaaaacggttctcatgaatccgaatatagcttcagtacagacgaacgaagtgggacttaaacaggcagacacggtctacttcctgcccattaccccccagttcgtcacagaggtaattaaggcggagcagccagatggcttaatactgggaatgggcggtcagaccgccctcaattgtggggtggaactatttaagcgaggcgtacttaaggagtacggcgtgaaggtgctgggaacctcagtcgagtcgataatggcaacagaagacagacagcttttctcagataaattgaatgagattaacgagaaaattgctcccagcttcgccgtagagtccatcgaggacgctcttaaggcggcggatacaattggctatccagttatgattaggtcagcctacgctttgggcggattgggctcaggcatctgccccaatagagaaacgctgatggacttatctaccaaggcattcgccatgacgaatcaaattctggtcgagaagtccgtcaccggctggaaggaaatcgagtacgaagtcgtaagagacgcagacgataattgcgttacggtctgtaacatggagaacgtggatgccatgggagttcacactggggattccgtggtagtggcacccgctcagacactctctaacgctgaattccagatgttgaggaggacaagtatcaacgtcgtccgacacctgggcatagttggcgaatgcaatatccaattcgctctgcatcccacctctatggaatattgtataatcgaagtgaatgcgaggctcagcaggtcgtccgcactcgctagcaaagccaccggctaccccttagctttcatcgcagctaagatcgcgctcgggattcccctgcctgaaattaagaacgtggttagtgggaagacaagtgcatgtttcgagccctccctggattacatggtgacaaagattccaaggtgggatcttgataggttccatggtacctcttctagaattgggagttctatgaaatcggtaggggaagtaatggcaatcgggcgaacttttgaggaatcttttcaaaaggctctgcgcatgtgtcatccatccatcgaaggattcactccccgcttgccaatgaacaaagaatggccatctaatctggacctcaggaaagagctgtcagaaccgagcagcacccgcatttatgccatcgcaaaggcaattgacgacaatatgagtctcgacgaaattgaaaaattaacatacattgataagtggtttctatataagatgcgcgacatcctcaacatggagaagactctcaaggggctgaatagtgagtcaatgactgaagaaactcttaagcgagccaaggaaatcgggttttccgacaagcagataagtaagtgcctcggcctcaccgaggcccaaaccagggagctaaggcttaagaagaacatccatccatgggtgaagcagatagataccctggccgcagaatacccttccgtcaccaactacctgtatgtgacgtacaatggacaagaacacgatgtcaattttgatgatcacggcatgatggttctcggctgtgggccatatcacatcggcagctcggtggagttcgattggtgtgccgttagctcaatcagaaccctcagacagctaggtaagaaaaccgtggtcgtgaactgtaaccctgaaaccgtgtccactgatttcgatgaatgtgataagctttacttcgaagaactgagtttggagcgaatccttgacatttaccaccaggaagcttgtggcggttgcatcatctccgtgggcgggcagattcccaacaaccttgctgtccccttatataagaatggggtgaagataatggggacctcacctctgcaaatcgacagagcagaagaccggagtatattcagcgcagtgttggatgaactgaaagtggctcaggccccttggaaggctgtgaatactctcaatgaagcgctggagttcgccaagtcagtggactacccatgcctgctgcgaccatcttatgtgctgtcaggatccgccatgaacgtcgtgttttctgaggacgagatgaaaaaatttctggaggaagccacccgagtaagccaagagcaccctgttgtgctaacaaaatttgtggagggtgctagggaagtggagatggacgctgttggtaaagatggaagagttatatcccacgctattagtgagcatgtcgaagacgccggcgtacattcaggggatgccaccctgatgcttccaacccaaaccattagccagggcgcgatcgagaaggtgaaggacgctaccagaaagatcgctaaggccttcgcaatttctgggccgtttaacgtgcaatttttggtcaagggaaatgacgtgctggtaatcgagtgtaacctgcgagcatcacgttcgttcccatttgtatctaaaactctgggtgtcgactttatcgatgtggcaaccaaagtgatgatcggagaaaacgtggatgagaagcatctgcccacgcttgaccacccaatcattccggccgactatgtcgccatcaaagcgcctatgttctcctggccgcggctgcgtgatgcagatccgattctgcgctgtgagatggcgtctaccggcgaggtggcatgtttcggcgaaggtatccacactgccttcctcaaagccatgctgtcaaccggttttaaaatcccacagaagggaattttgatcggaatccagcaaagcttcagaccacgattcctcggcgtcgccgaacagctccataacgaagggttcaaactgttcgcgacagaggctacatctgattggctgaatgccaacaacgtacctgcaaccccggtggcctggccatctcaggagggacaaaatcctagtttatcttctatcagaaaactgataagagacggtagcatcgatctggttatcaacctgcccaataataatactaagttcgtccatgataattatgtgatacggaggacagctgtggattctggaatccccctcctgacgaattttcaggttactaagctgtttgcagaggcagtccagaaatctagaaaggtggactctaagagcctgttccattacaggcagtattccgcaggcaaagccgct

SEQ ID NO: 8041 - DNA, 4500 bp, synthetic construct
  misc_feature 1..4500: note = source = /note="Description of Artificial Sequence: Synthetic coding sequence"
  source 1..4500: mol_type = other DNA
atgactcgtattctcaccgcctttaaagtggtgcgcaccctcaagactgggttcggatttaccaacgtcaccgcacaccaaaaatggaaattcagccgtccaggcataaggcttctgtcggtgaaggcgcagactgcacacattgtgctggaggatggcaccaagatgaagggttacagcttcggacatccctcatccgtggctggtgaagttgtgttcaataccggccttggggggtacccagaggcaatcactgatcccgcatacaagggacagatccttactatggcaaaccccataatcggtaatggtggggcacctgatactaccgcacttgatgaactgggactttcgaaataccttgagtccaacggcatcaaagtgtccggactgctcgtccttgactactcgaaggactataaccattggcttgcgactaaatccttgggtcaatggctgcaagaggaaaaggtccccgcgatttatggagttgatacccggatgcttactaagattattcgagacaagggcaccatgctgggaaagattgaatttgagggccaaccagtcgactttgtggatccgaataagcaaaacctgatagccgaggtgagcactaaggacgtcaaagtgtacggtaagggaaatcctaccaaggtcgtggccgtcgattgtggtattaagaacaacgtgattcgactgcttgtcaagcgcggggcagaagtgcacctcgtcccttggaaccatgattttaccaagatggagtacgatggtattctcattgccggtggacccggcaaccccgcattggcagaaccactgatccagaatgtgcgcaagatccttgaatccgacagaaaggagcctctgtttggtatttccaccggaaaccttattacgggtctggcagcaggggcaaagacttacaagatgtccatggcaaatcggggtcaaaatcagccggtgctgaacattacgaataaacaagcgttcattacggctcaaaaccacggttacgccctggacaatactctgccagcaggctggaagccactttttgtgaacgtcaacgaccaaactaacgagggaattatgcatgagtccaagccatttttcgctgtgcaattccaccctgaggtgactccaggtccaatagataccgaatacttgtttgattccttcttctcactcataaagaaaggtaaagccactaccattacttcggtgctgcctaagccagctcttgtggcctcgcgtgtggaagtgtcgaaagtccttattctgggatcgggcggtctgagcattggccaggcgggagagtttgattacagcggctcccaagcagtgaaggccatgaaggaagaaaacgtcaagactgtcctgatgaacccaaacatcgcatccgtgcaaaccaatgaagtgggtcttaaacaagcagataccgtgtacttcctgcctattactccccaatttgtgaccgaagtgatcaaagcagaacaacctgatggtttgatactcggtatgggaggccagactgcactgaactgcggagtggaacttttcaagaggggagtgcttaaggagtatggagtcaaggtgctgggaacgtccgtggagtccattatggcgactgaggatagacagctgttttcagataagctgaatgagattaatgagaagatagcaccatcatttgcagtggagtcgatagaagatgctctcaaagcagcggacacgatcggctacccagtgatgattcgcagcgcatacgcacttggtggtcttggatctggcatttgtccaaaccgcgaaaccctgatggatctgtctacgaaggcctttgcaatgacgaaccaaatcctggtcgagaagtccgtgactggatggaaggaaattgaatacgaggtggtgcgcgacgcggatgacaactgtgtgaccgtgtgtaatatggagaatgtcgatgccatgggtgtgcacacgggcgattcagtcgtcgtggcacctgcccaaacccttagcaacgcagaatttcaaatgcttcgcagaacttcgattaacgtggtgcgtcaccttggcattgtcggcgagtgtaacattcagttcgcattgcacccaacctccatggaatactgcatcatcgaggtgaacgcccggctctcgagatccagcgccctggcatccaaggcgaccggataccctcttgcattcatcgcggccaagatagcgcttggaattcccctccctgagattaagaacgtggtgtcgggtaagacctcagcgtgtttcgagccctcacttgattacatggtgaccaaaattccgagatgggatctggaccgctttcatggcacttcatctcgaattgggtccagcatgaagtccgtcggtgaggtcatggccattggccgtacttttgaggaatcatttcaaaaagctctgcggatgtgccatccctcaatagaaggttttacccctagactccctatgaacaaagaatggccatctaatctcgatctgagaaaggaactctcagagccaagcagcacccgcatttacgcaattgccaaagccatcgacgataacatgtcccttgacgagattgagaagttgacttacattgacaagtggtttctttacaagatgcgggacattctgaacatggaaaagaccctgaaggggctgaactcggaatccatgactgaagagactcttaagcgggcaaaggaaatcggcttttcggataaacaaattagcaaatgtctgggcttgaccgaagcacaaactcgggagcttcgcctgaagaagaatatccatccgtgggtgaagcaaatcgacacgctcgcggcggagtacccgtccgtgaccaactatctttacgtgacgtacaacggacaggaacatgatgtgaattttgatgatcatggaatgatggttctgggttgtggtccttaccatattgggtcaagcgtcgagttcgactggtgtgcagtgtcgtcgattcggaccctgaggcagctgggaaagaaaactgtggtcgttaattgtaacccagagactgtctcgaccgattttgacgaatgtgacaagctgtactttgaagagctgtccttggaacgaatcctggacatttaccatcaagaggcatgtggcggatgtataatcagcgtgggaggtcaaattccaaataaccttgccgtgcctttgtacaagaacggagtgaagataatgggaacgtcaccgcttcagattgatagagcagaggatcgctcgattttctcggcagtcctcgatgaactgaaagtggcgcaagcaccttggaaggcagtgaacactcttaacgaggcactggaatttgccaagtcagtcgattacccttgtctcctgcggccttcgtacgtcctttccggatcggcgatgaacgtggtgttctccgaggatgaaatgaagaaattcctggaagaggcgactcgagtatcccaagaacaccctgttgtgcttaccaaatttgtcgaaggcgcacgggaagtggaaatggacgccgtgggaaaggatggtagggtcatttcacatgcgatctccgaacacgtggaagatgccggagtgcattcgggggatgccactttgatgctccctactcaaactatttcacagggcgctatcgagaaggtgaaggacgcaaccaggaagattgctaaggcgtttgcaatttcaggcccctttaatgtgcagttccttgtgaagggtaacgacgtgctcgttattgaatgcaaccttagggcaagccgctcgttccctttcgtgtccaagactctcggagtggactttattgatgtggcaacgaaagtgatgatcggggaaaacgttgatgaaaagcatctgccaaccctcgatcatccgattatcccggcagattacgtggcaattaaggcacctatgttctcatggccccgcttgagagacgcagatccgatacttaggtgcgaaatggcaagcaccggagaggttgcttgtttcggtgaaggtattcatactgcttttctgaaggcaatgttgtccaccgggttcaaaatacctcaaaagggtatacttataggtatccaacagagcttccgcccccgctttttgggtgtggcggagcagcttcacaatgaaggattcaaactgttcgcaaccgaagccacctcggactggctcaatgcaaacaatgttcctgcaacgcccgtggcctggccatcccaggaaggtcagaacccatctcttagcagcatcagaaagctgatacgagatggttcaatagacctggtcatcaatctcccaaacaataacaccaagtttgtgcatgacaactacgtgattcgccggactgccgtggacagcggtattcctcttcttacgaattttcaggttaccaagctgtttgccgaagctgtgcagaagtcgagaaaggtcgattcgaagtccctttttcactacagacagtactctgcgggcaaggccgca

SEQ ID NO: 8042 - DNA, 4500 bp, synthetic construct
  misc_feature 1..4500: note = source = /note="Description of Artificial Sequence: Synthetic coding sequence"
  source 1..4500: mol_type = other DNA
atgacgcggattctcactgccttcaaggttgttaggacattgaaaaccgggtttggctttactaatgtcactgcccaccaaaagtggaagtttagccgacccgggattagactgttatccgtaaaggctcaaacggctcatattgtattggaagacggaacaaaaatgaaaggctatagcttcggccatcctagttccgtggcgggggaggtggtgttcaataccggcctcggtgggtacccggaagccatcaccgaccccgcatacaagggacaaattttaactatggccaaccctatcatcgggaacggaggcgctccggataccacggcgctggatgaactcgggctttctaagtatctcgaatccaacggcataaaagtgagtggtctactagttctcgactattctaaggactacaatcattggttagcgactaaaagtctcgggcaatggctgcaggaggagaaagtcccggccatatacggcgtcgataccagaatgctgactaagatcataagagacaagggaaccatgttaggaaagatcgaattcgagggtcagcccgtcgatttcgtggacccaaataagcaaaatctgatcgccgaggtatctacgaaggacgttaaagtatatggaaaagggaatcctactaaggtggttgcagtcgattgcggcatcaagaacaacgtgattcggctgctggtgaaacgaggcgccgaggtgcatctggtgccatggaaccacgactttaccaagatggaatatgacggaattctgatcgccggagggccggggaaccccgctctggccgagcccttgattcagaacgttcgaaagatattggagtcggaccggaaagagccattgtttggaatctctacgggcaatctgatcactggtttggcggcgggcgccaagacctataaaatgtcaatggctaacagagggcagaatcagcccgtgctcaatattaccaacaagcaagccttcataacggcgcagaatcacggatacgctcttgacaacacactacctgccgggtggaagcctctgttcgtgaacgtgaatgatcagaccaatgaaggcatcatgcatgagtccaaacctttcttcgcggtgcagtttcacccagaggtcacccctggtcctatcgacactgaatacttatttgactctttcttctctttgatcaagaaaggaaaggctacgaccattacatcagttctgccaaagcctgccctggtagcttctcgcgtggaggttagtaaggtcctgattctgggctcgggcgggctatccataggccaggcgggcgagttcgattattctgggagccaggcggtgaaagcaatgaaggaggaaaacgtaaaaaccgtccttatgaatcctaatatcgcgtccgttcaaactaatgaagtgggcctgaagcaggcagacaccgtatacttcctgcccatcacaccacagttcgtgaccgaggttattaaagccgaacagcctgacggcctcatcctagggatgggaggtcaaacagcactcaactgcggcgtggagttgttcaaaagaggggtgctaaaagagtacggcgtgaaggtgttgggcacctccgtcgagtccatcatggcgactgaggaccgacagctcttctcggataaactgaatgaaatcaatgaaaaaatcgctcctagcttcgcagtggagtccattgaggacgcccttaaggccgccgatacaatcgggtacccagtgatgattagatctgcttacgcccttggcgggttgggaagcggcatatgccctaatcgggagacactcatggacttatccaccaaggccttcgccatgacaaatcagattctggtggagaagtcagtgactggttggaaggagatagagtatgaagtggtgcgggatgcggacgacaactgcgttacggtctgcaatatggagaatgtggatgccatgggtgtgcacacgggggactctgttgtagttgctcccgctcagacgctgagcaatgcagagtttcagatgctacggcgtactagcattaacgtggtacgccacttgggcatagttggcgagtgcaacattcagttcgcgctgcaccctacttctatggagtattgtatcatcgaagtaaacgcaaggctgtcacgctctagcgcattagcttctaaggctacagggtacccccttgcttttattgccgccaagattgcactcggcatacctctgccagagataaaaaacgtggtcagtggaaaaacaagtgcttgctttgaacctagcctggactatatggtcaccaaaatcccccggtgggacctcgacagattccatggcactagttcccggatcggttcctcaatgaagagcgtgggagaagttatggccatcggacgaaccttcgaggagtccttccagaaagccctgcgtatgtgccacccttcgatcgagggatttacacctaggctgccgatgaacaaagagtggccaagcaacctggacctgcggaaggagctttccgaacctagcagcacgaggatatacgctatcgccaaagccatcgatgataacatgtcgctggatgaaatcgagaaactaacctatatcgacaagtggttcctgtataagatgcgggatatactcaacatggaaaagactcttaaggggctgaactcagagtctatgactgaggagacattgaaaagggcaaaggagattggattctcagacaagcagatctctaaatgtctgggtttgacagaggctcagactcgcgagctacgattgaaaaaaaatattcatccttgggtgaaacagatcgatacactggctgccgaatacccatctgtcaccaactatctatacgtgacgtataacggacaagaacacgacgtaaattttgatgatcatggcatgatggtgttgggttgtggtccataccatatcggaagcagcgtagaattcgactggtgcgccgtgtcctctattaggactctgcgccagttgggtaaaaagacagtggttgtcaactgcaaccccgaaaccgtctctactgattttgacgagtgtgataaactttacttcgaagagctctcactggagagaatcctcgacatataccatcaggaagcctgcgggggctgcattatatccgtcggtggtcagatccctaataacctggctgtacctctatataaaaatggcgtcaaaattatgggtacatcaccactgcaaattgatcgcgcagaagataggagtatcttctcagcagtgctagatgaactaaaggtggcacaggccccatggaaggcggtgaatacgctaaatgaagctcttgaattcgccaaaagtgttgactacccatgcttgctccgtccatcctatgtgctgtctggctccgccatgaatgtggttttctctgaggacgagatgaagaagtttctcgaggaagccacgagggtgagccaagaacatcctgtggttctcactaaattcgtagagggcgcccgtgaagtagagatggacgccgttggcaaagatggacgggttatctcccatgcaatttctgaacatgttgaagacgcaggagttcactctggtgatgccaccttaatgctcccgacacagacgatcagccagggggctatcgagaaggtcaaagacgctacacgcaagattgcgaaggcttttgcaatcagcggaccattcaatgtgcaattcctggttaagggcaatgacgttctggttatcgaatgcaatctcagagcgtctagaagttttcctttcgtcagtaaaacattgggagtagacttcatagatgtggcaaccaaggtgatgatcggagaaaacgtggatgaaaagcacctgccaacacttgatcaccccattattccagctgactacgtggccattaaggctcctatgttttcctggcccaggttacgcgacgctgaccctattctgaggtgtgaaatggcaagtactggagaggtggcttgctttggggagggcattcacaccgcatttcttaaagctatgctgagcaccggcttcaaaatcccacagaagggcatcctgatcggtatacagcagtcatttagacccagattccttggagtggctgaacaactgcacaacgaaggattcaagctgtttgccaccgaggccacttccgactggctcaacgccaacaatgtgcctgctaccccagtcgcatggccttctcaggagggtcagaatccctccctttcctcaatacggaagctgatccgggacggcagtatagaccttgtcatcaacctgccaaataataatacgaagttcgtgcatgacaactacgtgattaggcggacagctgtggacagcggcatcccgttgcttacaaactttcaggttaccaaactgttcgctgaggcagtgcaaaagagcaggaaggtggacagtaaatctttatttcattataggcaatattcagccggcaaagccgct

SEQ ID NO: 8043 - DNA, 4500 bp, synthetic construct
  misc_feature 1..4500: note = source = /note="Description of Artificial Sequence: Synthetic coding sequence"
  source 1..4500: mol_type = other DNA
atgactagaatcctcactgccttcaaggtggtgcgaactcttaagaccggatttggattcactaatgtgaccgcacaccagaaatggaagttcagcagacctggtataagactcctgtccgtcaaagcacaaaccgcccatattgtgctcgaagatggcacgaagatgaaaggctactcgtttggtcatccatcatcagtggcaggtgaagtggtgttcaatactggtcttggaggataccctgaagcgattactgaccctgcctacaagggacaaattctgacgatggcgaatccgatcatcggcaatggtggagcccctgataccactgcccttgatgaacttgggctgtcgaaataccttgagtcgaatgggatcaaggtgagcggtctgcttgtgctggattactcaaaggactacaatcactggctggcgaccaaatcgctgggccaatggctgcaggaggaaaaggtcccggcaatttacggtgtggatactagaatgctgaccaagattattcgcgataagggaacgatgctggggaagatcgaatttgagggtcaaccggtggattttgtggatccgaacaagcagaacttgatcgccgaggtgtctactaaagacgtcaaagtgtacgggaagggcaaccctaccaaggtggtggcagtggattgcggaatcaaaaacaacgtcatccgcctcctggtgaagaggggcgccgaagtgcatctcgtgccgtggaaccatgacttcactaagatggagtacgacggtatccttatcgcaggcggccctggcaaccctgctctcgcagagcctcttatccaaaatgtgcgaaagattctggaatccgataggaaagaaccattgttcgggatttcaactggtaacctgattacggggcttgcagcaggtgcaaagacctataagatgtcaatggctaaccgtggtcaaaaccagccagtcctgaacattactaataagcaagcatttatcaccgcacagaaccacggttacgcccttgataacaccctgccagccggatggaagcccctctttgtgaacgttaatgaccaaaccaacgaaggtatcatgcatgaatcgaagccttttttcgcagtgcagttccatcccgaagtcactcccgggcctattgataccgagtacctcttcgattcctttttcagcctcattaagaagggtaaggcaactacgataacttcagtcctccccaagccagcattggtggcatctcgagtggaggtttccaaagtcctgatactcggctccggtggcctgtcgatcgggcaagccggcgaattcgattactctggatcccaagcagtcaaggcgatgaaagaggagaacgtgaaaaccgtgttgatgaacccaaacattgcatccgtgcagactaacgaagtggggctgaagcaagcagacaccgtctatttcttgccgatcactccacaatttgtcactgaggtgattaaggcagagcaaccagacggtctgatccttggtatgggtggccagactgctcttaactgcggggtggaactgtttaagcgtggggtccttaaagaatacggggtgaaggtgctggggacgagcgtggaatcaattatggcaaccgaggatcgccagcttttctcggataagttgaatgagatcaacgagaaaattgcgccatccttcgctgtggagtcgattgaagatgcactgaaagcagccgacactattggatacccagtcatgattaggtccgcatacgcacttggaggcctgggatccggcatttgtcctaaccgggaaactctcatggacctgtcaactaaagcatttgccatgactaaccagattctggtggaaaagtcggtcaccggatggaaagaaattgaatacgaagtggttcgtgacgccgacgacaactgtgtgaccgtgtgtaacatggaaaacgtcgacgcgatgggagtccacaccggagactcagtggtggtcgcgcccgcacagactctttcaaatgctgaatttcagatgctgagacggacgtcgattaacgtggtcaggcatctgggcatcgtcggagagtgcaatattcaatttgctctccatcctacctctatggaatactgtatcattgaagtcaacgccagactgtcccggtctagcgcactcgctagcaaagcaactggttaccccctggccttcatcgcagctaagattgctcttggaattccactgcccgaaatcaagaacgtggtgtccggcaagacctcagcttgttttgaaccctcgttggattacatggtcactaagatcccacggtgggacttggatcgttttcacggcacctcgtcccgcataggaagctctatgaaatccgtgggtgaagttatggcaattgggaggacttttgaagaatcatttcaaaaggccctccgaatgtgtcacccctcgatagaaggatttactccaagactcccgatgaataaggaatggcccagcaacctggatcttaggaaagaactgagcgagccctcaagcactaggatatacgccatagctaaggcaatcgatgataacatgtccctcgacgagattgaaaagttgacctatattgataagtggtttctgtacaagatgcgggatatcctgaatatggagaaaactctcaagggacttaattcggagtccatgactgaagaaactctcaagcgggcaaaggagattggtttttcggacaaacaaatcagcaaatgtctgggcctgaccgaggcacagacccgggaacttcgcctcaagaaaaacattcatccttgggtgaagcagattgacactctcgccgcggaatatccgtccgtgacgaattacctgtatgtgacgtacaatggtcaggaacatgacgtgaattttgatgatcatggaatgatggttcttgggtgtggtccttaccatatcggaagctctgtggaatttgattggtgtgcggtttcatcgataagaaccctgcggcaactgggtaaaaagaccgtcgtggtgaattgtaatccggagactgtctccaccgatttcgatgagtgcgacaagctctactttgaggagctcagcctcgagagaatccttgatatctaccaccaggaagcatgcggaggatgcatcatttctgtcggtggccaaattcctaacaatctggccgtccctctgtacaaaaacggcgtcaagatcatgggaaccagcccactgcagattgatagagctgaggataggagcatattctcggccgtgttggatgaacttaaggtggcacaggctccttggaaagcagtgaacaccctgaacgaggctctggaatttgcaaagtccgtggactacccttgtctgctcagaccttcatacgtgttgtcagggagcgcgatgaacgtcgtcttttccgaagatgagatgaagaagttcttggaagaagcaacccgtgtctcacaagagcatcctgtggtgctgaccaagtttgtcgagggcgcacgcgaagtggagatggatgcagtgggaaaggacggacgcgtcatttcgcatgcaatctccgaacatgtcgaagatgcaggagtccactccggggatgccactctgatgctgcctactcagaccatttcgcaaggggcaattgaaaaggtcaaggatgcgactcgcaagattgcgaaggcgtttgcgatctcgggccctttcaacgtccagtttctggtcaaaggaaacgacgttctggtcattgaatgtaacttgagggctagcagatcatttccctttgtctccaagactcttggagtggactttatagacgtggcgaccaaggtgatgattggtgagaacgttgatgagaaacatcttccaacgctggaccatcccataatcccggcggattacgtggccatcaaggcacctatgttctcgtggcccaggcttagggatgcggacccaattcttcgttgcgagatggcatccaccggtgaagtcgcctgttttggtgaaggtatccataccgcatttctcaaagccatgctttcgactggatttaagatcccccaaaagggcatactgattggtatacaacaatcatttcgacctcggttcctgggcgtcgctgaacaacttcataacgaggggttcaagctgtttgcaaccgaagccacttcagactggcttaatgcaaacaatgtgccagcgaccccagttgcatggccctcacaagaaggtcagaatccatccctcagctcaattagaaaacttattcgggatggatcaatcgatctcgtcataaatctgcccaataacaatacgaagttcgtgcacgataactacgtcattcgcagaaccgccgtggattcaggaattcccctgttgacgaacttccaagtgaccaagctctttgccgaagcggtgcaaaaatccagaaaggtggactcgaagtccctcttccattatcgccagtacagcgcaggtaaggcagcc

SEQ ID NO: 8044 - DNA, 4500 bp, synthetic construct
  misc_feature 1..4500: note = source = /note="Description of Artificial Sequence: Synthetic coding sequence"
  source 1..4500: mol_type = other DNA
atgacccgcatactcactgcatttaaggtggttagaaccctcaaaaccggattcggtttcaccaacgtgaccgcacaccagaagtggaagttttcacggcctggaatccgccttttgtccgtgaaggcacaaaccgcccatattgtcctggaggacggcaccaagatgaagggttactcgtttgggcatccgagctcagtcgcaggcgaagtcgtgtttaacactgggctgggagggtaccctgaggcgattactgaccctgcgtacaaaggacagatcctcactatggctaaccccattatcggcaacgggggagcccctgataccactgcgctggatgagctgggactctcaaagtaccttgagtcgaatggtattaaggtgtccggactccttgtgctcgattacagtaaagattacaaccactggctcgcgacgaagagcctgggtcaatggcttcaggaggaaaaggtgcccgcaatttacggagtcgacaccaggatgctcaccaagattatcagagacaaggggaccatgctcggtaaaatcgagtttgagggtcagcctgttgactttgttgacccgaacaagcaaaaccttattgccgaggtgtccactaaagatgtcaaggtgtacggtaagggcaaccctaccaaggtggtggcggttgattgtggcattaagaataatgtgatacggcttctcgtgaaacggggagcagaagtccatcttgtgccctggaatcatgactttactaaaatggagtacgacggcatcctgatagcaggggggcctggtaatcccgcactcgccgaaccacttatccagaatgtgcgcaagatacttgagtccgatagaaaggaacctctgttcggaattagcactggcaacctgattacgggacttgcagccggtgcaaaaacctacaagatgtccatggcaaacagaggtcagaaccagccagtgctcaatatcactaataagcaggcattcatcaccgctcaaaatcatggctacgccctggataacactctgcccgccggttggaagccactctttgtgaacgtgaacgatcaaaccaatgaaggcattatgcatgaatcaaaacctttcttcgctgtgcaatttcaccccgaagtgaccccagggccaatcgataccgaatacctttttgatagcttcttttcgctgataaagaaaggaaaggcgaccacgattacctcggtgctccctaagcctgcactggtcgcgtcccgcgtcgaggtgagcaaggtcctgatactcggttcaggtggattgagcataggacaagcaggtgaatttgactactcagggtcgcaagcagtgaaggcgatgaaggaggagaacgtaaagactgtcctgatgaatcccaatattgcctcagtgcaaactaacgaagtgggactgaagcaggcagatactgtgtattttctgcctattacgccacaatttgtgaccgaagtgattaaagcagagcaacctgacggccttatactgggaatgggagggcagactgcgcttaattgcggtgtggaactctttaagcgtggagtcctcaaggagtacggtgtcaaggtccttggaacctcggtggaatccatcatggcaaccgaagatagacaactcttcagcgataagctgaatgagattaacgagaagatcgcaccttcgtttgcagtggagtcgatcgaagatgcattgaaggcagcggatactatcggataccccgtcatgattaggtcggcatacgcacttggcggccttggttcggggatctgtcctaacagagaaaccctgatggatctctcgactaaggctttcgcgatgaccaaccaaattcttgtggaaaagagtgtgaccggatggaaggagattgaatacgaggtggtgcgcgacgcagatgacaattgcgtgactgtctgcaatatggaaaacgtcgatgcaatgggcgtgcacaccggcgactcagtggtcgtggcaccggcacagaccctttcgaacgccgagttccaaatgctgaggaggaccagcataaatgtggtcagacatctgggtattgtcggcgagtgtaacatccagtttgcactccaccccacctcaatggaatactgcatcatagaagtcaacgccaggctctcccgctcgtctgccctggcgtcaaaggctactggttaccctcttgcattcattgcggccaagattgcactcggcatcccccttccggaaatcaagaacgtcgtctcggggaaaaccagcgcctgctttgagcctagccttgattacatggtgactaagatccctaggtgggacctggacaggttccacggcacgtcctcccggataggcagcagcatgaagtccgtgggtgaagtgatggcaatcgggcggaccttcgaagaatcctttcagaaggccctgcgcatgtgtcatccttcaatcgagggatttaccccgcggcttccaatgaacaaggaatggccaagcaacctggatctgcggaaggagctgtccgaaccatcttccaccagaatttacgcaattgcaaaggcaatagatgacaacatgtcgctggatgaaatcgaaaagctcacctacattgataagtggtttctgtataagatgagggacattctgaacatggaaaagacgctcaaaggccttaattccgaaagtatgaccgaagaaactcttaaacgcgcgaaagaaattggtttctcggacaaacagatttccaaatgtctgggcctgactgaagcacagactagagagttgcggttgaagaagaatatccatccctgggtgaagcaaatcgatactctggcggccgaatacccctcagtgactaattacctttacgtgacctacaatggacaagagcacgacgtcaacttcgacgatcacggcatgatggtgttgggatgtggaccttatcacattggctcgtcggtggaattcgattggtgtgccgtgtcgagcatccgtaccttgagacaactcggtaagaaaaccgtggtggtgaattgtaaccccgaaactgtctcgaccgattttgatgagtgcgataaactttacttcgaggagctttcgctggaacgcatccttgacatatatcaccaagaagcatgtggcgggtgtattatctcggtgggtggtcagattcccaacaacctggccgtgcctctctacaagaatggagtaaagattatggggacttcgccccttcaaattgatcgggcagaagatcgatccattttctcggcagtcctggatgaactgaaggtcgcacaagcaccatggaaggcggtgaataccttgaacgaagcactggagtttgcaaaatcggtggattatccctgtctcctcaggccttcatacgtcctttcgggatcagcgatgaatgttgtgttctcggaagatgagatgaaaaagtttctggaggaggcgacccgagtgtcgcaggaacatccagtggtcctgacgaagttcgtggaaggagcacgggaagtcgaaatggatgctgtgggaaaggatgggcgggtgatcagccacgctatcagcgagcatgtggaggatgcaggggtccattccggagatgcaacgcttatgctcccaacccagacgatttcacagggggccattgaaaaagtcaaggatgccactcgaaagattgctaaagcattcgccattagcggcccttttaacgtgcaatttctggtgaagggcaacgatgtgcttgtgattgagtgtaatcttcgtgcctccagatctttcccgtttgtgtcgaaaacgctcggcgtggactttatcgatgtggcaaccaaagtcatgataggcgagaatgtggatgaaaagcatcttcccactcttgatcatccaataatcccggcagattacgttgcaatcaaagctcctatgttttcttggcctcgcctgcgggacgcggatccaatcctgcggtgtgaaatggcgtcgaccggtgaagtggcatgttttggagagggtatccatactgcattcctgaaagcaatgctttccacgggattcaagatcccacagaagggaattctgattggtatccagcagagctttagaccaaggttcctgggtgtggcagaacaactgcataatgaaggattcaagctgttcgcaaccgaagcaacctcagattggcttaacgcaaataacgtgccagcaactcccgtcgcatggccatcgcaggaaggacagaatccgtcccttagctccattagaaaacttattagagatggatcgattgaccttgtgataaatcttcctaacaacaacaccaagtttgtccacgacaactacgtgatccgacgcaccgcggttgattcaggaattcctcttcttaccaactttcaagtcacgaaactgtttgcggaggcagtgcagaagtcaagaaaagtggactccaaatcactgtttcattacagacagtactccgccgggaaagcagcg

SEQ ID NO: 8045 - DNA, 4500 bp, synthetic construct
  misc_feature 1..4500: note = source = /note="Description of Artificial Sequence: Synthetic coding sequence"
  source 1..4500: mol_type = other DNA
atgacccggatcctgacggcgttcaaggtcgtccggacccttaaaactggctttggtttcaccaacgtcactgcgcatcagaaatggaagttttcgcggccggggatccggctgctgtctgtgaaggcgcaaactgctcatatcgtgttggaggacggaaccaagatgaaaggttactcgtttggacacccatcgtcggtcgcaggtgaagtggtgttcaacaccggactgggtggataccctgaagccatcactgatccggcttacaaggggcaaatcctgaccatggccaacccgatcattggaaatggaggagccccggacactactgcactcgacgagctggggctctctaagtacctggagtccaacggaatcaaggtgtccgggcttctggtgctggattacagcaaggattacaaccactggcttgcgacgaagagcttgggacagtggctccaagaagaaaaagtgccggccatctacggagtcgatacccgcatgctcactaagatcatccgggataagggcaccatgttgggcaagatcgagtttgaaggacagccggttgatttcgtggacccgaacaagcagaatctcatcgccgaagtgtcgactaaggacgtcaaggtttacgggaagggaaacccgacgaaagtggtggctgtggattgcggaatcaaaaacaacgtgatccgcctgcttgtgaagcgcggcgccgaagtgcacctggtgccgtggaaccacgactttaccaagatggaatacgatggtatcttgattgcgggaggaccaggaaacccagctttggccgaaccacttatccaaaacgtgcgcaagatcctcgagagcgaccgcaaagaacctttgtttggcatctccactggtaatctgattactgggctggcggcgggagccaagacctataagatgagcatggccaaccgcggacagaatcaaccagtgctgaatatcaccaataagcaagccttcatcaccgcccaaaatcatggttacgcgctggacaacacgctccctgcggggtggaagccgcttttcgtgaacgtcaatgaccagaccaacgaaggaattatgcacgaatccaagcccttcttcgcggtgcagtttcaccctgaggtgactccgggcccgattgacactgaatacctgttcgactctttcttttcgctcatcaaaaagggcaaggcaactacgataactagcgtgttgccaaagccggcgcttgttgcatcccgggtagaggtgagcaaagtgctgatcctgggaagcggaggattgtcgatcggtcaggcaggagagttcgactacagcggatcccaggccgtgaaagctatgaaggaggaaaacgtaaagactgtgctcatgaaccccaacatcgcctcggtgcaaactaatgaagtcggcctgaagcaagcagacactgtgtatttcctgccgatcactcctcagttcgtgaccgaggttatcaaggccgaacagccggatgggcttatcctgggaatgggaggtcaaaccgctctcaactgcggtgtcgaactgttcaaaaggggagtcctgaaagagtacggagtgaaggtgctgggcacttcggtggaatccatcatggccaccgaagatcgacaactgttctcggacaagctcaatgagatcaacgagaagatcgcgccttcattcgccgtggaatcaatcgaagatgctctgaaggctgctgacaccatcggttacccggtgatgattcggtcagcctacgccctgggtggcctgggctcggggatttgtccaaaccgggagactctgatggaccttagcactaaagcctttgccatgacgaaccagatcttggtcgaaaagtcagtcaccggctggaaagaaattgagtacgaagtggttcgcgatgcagacgataattgcgtcaccgtgtgcaatatggagaacgtggacgctatgggcgtgcacaccggagactccgtggttgtggcaccggcacagaccctttctaacgctgaattccagatgctgcgccgcacttccatcaacgtggtccgccatctgggaatcgtgggtgagtgcaatatccagtttgcactgcatcccacgtccatggaatactgcatcatcgaagtgaatgcaagactgtcgcgcagcagcgctctggccagcaaggcgaccgggtaccctctcgccttcatcgcggcgaagatagcactgggcatccccctgccagaaatcaaaaacgtggtgtcgggaaaaacctcggcttgtttcgagccatcactggactacatggtgaccaagatcccaagatgggacctggatagattccatggaacctcgtcaagaatcggatcgtcgatgaagtccgtgggcgaagtcatggccatcggacggactttcgaggaatccttccagaaggctctgcgcatgtgccatccgtcgatcgagggcttcactccccgccttccgatgaataaggaatggcctagcaatctcgatctgcgcaaggaactctcagagccgtcgtccacccgcatctacgccattgcgaaggcaatcgacgacaatatgagcctcgacgaaatcgaaaagctcacttatatcgacaagtggttcctgtacaagatgcgggatatcttgaatatggaaaagacgctgaagggactgaactcggagagcatgactgaagaaaccctgaaacgcgccaaagagatcggtttttcggataagcagatctctaaatgtctggggctcactgaggcccagactcgcgagctgcggcttaagaagaacattcatccttgggtgaaacaaatcgacactttggcggcggagtacccgagcgtgactaactacctgtacgtgacttacaatggccaggagcacgatgtgaacttcgacgatcacggaatgatggtgctcggatgtggaccgtaccacatcggctcctccgtggagttcgattggtgcgcggtcagtagcatccgcaccctgcggcagctgggaaagaaaactgtcgtggtgaattgtaatccggaaacggtgtcgactgattttgatgagtgtgacaagctgtatttcgaagagctgtccctcgaacgcatcctggacatctaccaccaggaagcgtgcgggggatgcatcatctcagtcggaggacagattccgaacaatctggctgttccattgtacaagaacggagtaaagatcatgggaactagccccctgcaaatcgaccgggctgaggaccgctcgatcttcagcgccgtgctggacgaactcaaggtggctcaggccccgtggaaggccgtgaacaccctcaacgaggccctcgaattcgccaaatcggttgattacccgtgcctcctcaggccctcctacgtgctgtcgggatctgcgatgaacgttgtgttctctgaagatgaaatgaagaaattcctggaagaggcaacgcgtgtgagtcaggaacatccagtggtactgactaaattcgtggagggagccagagaagtggagatggatgcggtcggaaaggatggacgagtgatctcacacgccatctccgaacacgtcgaggatgctggggtccattccggagatgctaccctgatgctgccaactcaaactatctcacaaggagccatcgaaaaggtgaaagacgccactcgcaagattgcaaaggcttttgccatcagcggaccgttcaacgtccagttcctggtgaaggggaatgacgtgctggttatcgagtgcaatctgagggcgtcgcggagcttccctttcgtcagcaagactttgggcgtggatttcattgacgtcgcgactaaagtcatgatcggggaaaatgtggacgagaaacacttgcccacccttgaccaccctatcattccggcggattacgtcgccattaaggcgcctatgttcagctggccaagacttcgcgatgccgacccgatcctcaggtgcgaaatggcctccaccggcgaggtggcctgctttggagaaggaatccatacggcattcctgaaggcaatgctgtcgactggcttcaaaatcccccaaaagggaatcctgatcggaattcaacaatcctttaggcctagattcctcggagtggccgaacagctgcacaacgaaggatttaagctctttgcgactgaggcgacttccgattggctgaacgccaataatgtcccggcgaccccggtggcctggccatcccaggagggtcaaaatcccagcctgtctagcatcagaaagttgattcgtgatggcagcatcgacctggtgataaacctgccgaataacaatacgaagtttgtccacgacaattacgtgatcagacgcaccgcggtcgatagcggaatccctctcctgactaacttccaggtcaccaagctgttcgccgaggctgtccaaaaatcacgcaaggtggactccaaatccctgtttcactaccgccaatactccgcaggtaaagccgca

SEQ ID NO: 8046 - DNA, 4500 bp, synthetic construct
  misc_feature 1..4500: note = source = /note="Description of Artificial Sequence: Synthetic coding sequence"
  source 1..4500: mol_type = other DNA
atgacccgtatacttactgccttcaaagttgtgcgcacgcttaaaactggtttcgggttcactaatgttacggctcatcagaagtggaagttctcaaggccagggattcgactgttgtctgtaaaagctcagaccgctcatattgtactagaagatggaacaaaaatgaagggttactccttcggacacccatcttcagtcgccggtgaagtggtcttcaacactggtttgggtggttatccggaggctattacagatccagcttacaaaggtcagatattaaccatggctaacccaattatcgggaatgggggcgctccagatactactgctttggacgagttgggactctccaagtatctcgagtccaacggtattaaagtctctggcctgcttgtgcttgactatagcaaggattataatcactggctcgctactaagtcgctcggacagtggctacaagaggaaaaggttcctgccatatatggtgtggatacccgtatgcttaccaagataatccgtgataaaggtaccatgctgggaaaaattgagttcgagggtcaaccggtcgactttgtcgatcctaataagcaaaacttgattgctgaggtttccactaaagatgttaaagtttatgggaaaggtaaccctacaaaagttgtagctgttgattgcggcatcaaaaacaacgtaataaggctgctagttaagcggggagctgaagttcatcttgtaccttggaatcacgattttacaaaaatggaatatgatgggatccttatagctggtggacctgggaaccctgctctagcagaaccacttattcagaacgttaggaagatccttgagtcggacagaaaggagcctcttttcgggatttccacaggtaacttaattactgggctcgctgctggtgcaaagacttataagatgagtatggccaacaggggacagaaccaacctgtgttgaatataaccaacaagcaggcctttatcacagctcaaaaccacgggtacgctttggataacactcttcctgccggttggaagcctctctttgtgaatgttaacgaccaaactaacgaagggattatgcatgaaagcaaaccattcttcgccgtgcaatttcatccagaggttacacccggtccaatagacaccgaatacctatttgactcattcttttccctcattaagaagggcaaagccactacaatcactagtgttcttccaaaaccagccctcgtcgcctccagggtggaagtgtcaaaagtcctcatcctaggcagtggggggctctctattggacaagctggagaatttgattactctggctcccaggctgttaaggcgatgaaggaagagaacgtgaaaactgttctaatgaacccgaacatcgcttcggtgcaaacaaatgaggttggtctgaaacaagctgatacagtctacttcttgccaataacacctcagtttgtgacagaagtgattaaggctgaacaacctgatggtctgatactaggtatgggtggccaaactgctttgaattgtggggttgagttatttaagcgtggtgtgctgaaggaatatggcgtaaaggttctgggtactagtgttgaatccataatggccacagaggatagacaacttttctcggacaagcttaatgagatcaatgagaagattgcacccagttttgctgttgaatccattgaggatgcgctgaaggctgccgatacaataggatacccagttatgatacgctctgcttatgccttaggtgggctaggttcaggtatttgcccaaatagggagacattgatggatttgtctaccaaggcgtttgccatgactaaccaaattcttgtcgagaaatctgttacaggatggaaagaaatcgagtatgaggtagtgagggatgctgatgataactgcgtcacagtttgcaacatggaaaatgtcgatgcgatgggagtccacactggggactcagtggttgttgctcctgctcaaacgctatcaaatgcagaattccagatgctcagaagaaccagcattaatgtggtaagacaccttggaatagttggggaatgcaatattcagttcgcccttcatcctacttccatggagtactgtataattgaggttaacgccaggctttcgcgaagcagcgcccttgcaagcaaggccactgggtatccacttgccttcattgcggctaagattgcattaggcatccctttacctgaaattaagaatgtcgtgtccggtaagacttcagcttgtttcgaaccaagcttggactacatggtcactaagatcccacgttgggatctggataggtttcatggaacgtcgtcaagaatcggttctagtatgaagagtgtgggggaagtcatggctattgggaggacctttgaggagagctttcagaaagctcttaggatgtgccatccaagtatcgagggattcacgcctagactaccaatgaataaggagtggccttcaaatcttgatcttaggaaagaactttctgagccttcttctactcgcatctatgctatagctaaagctattgatgataatatgtctcttgatgaaatagaaaagctgacttatatcgataaatggtttttgtataaaatgagagacattctgaatatggaaaaaacgctcaagggtctaaattcagagtccatgacagaagaaaccctgaagcgcgcgaaggagatcggattcagtgacaaacagatctctaagtgccttggactgaccgaggcacagacgagggaactaagactcaagaagaatatacatccctgggtgaagcaaattgatactctagctgcagagtatccgtcggtgacaaattatctttatgtgacgtataacggtcaagagcatgatgtgaacttcgatgaccatgggatgatggttcttggttgtggcccttatcatattgggtcgtcagttgagtttgactggtgcgccgttagtagcatacggactttgcggcaactaggaaaaaagaccgttgtagtcaattgtaaccctgaaactgtcagcaccgatttcgacgagtgcgataagctatacttcgaggaactatcactagaaaggattctggacatttaccaccaagaggcctgtggaggctgtattatatctgttgggggtcagatccctaataatctcgctgttcctttgtacaagaacggagtcaagatcatgggtacttctccattgcaaatcgacagagcggaagatcgttctatcttttctgcagtgttagacgaattgaaagtagcccaagctccttggaaagctgtcaacactcttaacgaagctcttgagtttgcaaaatcagtggactacccatgcttgttgaggcctagttatgtcctgagtgggtctgctatgaacgtggttttcagtgaagacgagatgaagaaattcctagaggaggcaactcgagtgtcacaagaacatcctgtggtgctcactaagtttgttgaaggcgctagggaagtagagatggatgctgttggtaaggatggcagggtcattagtcacgctatttcggagcatgttgaagatgctggggtgcacagcggtgatgctacgcttatgttgcctactcagaccatctcacagggtgccattgaaaaagttaaggatgcaacccgtaaaattgctaaagcctttgcgatttcagggcctttcaatgtgcaattcctagttaaggggaatgatgtccttgtcattgaatgtaatttgagggcatcacgttctttccctttcgtctctaagacgttgggtgttgatttcatcgatgttgccactaaagtcatgatcggtgaaaacgtcgatgagaaacacctccctacccttgaccatccaatcataccagctgactatgttgctattaaagcaccgatgttttcatggccgagacttcgagacgcagatccaatcttaagatgtgaaatggcctccacgggcgaagttgcatgctttggcgaggggattcacactgcttttcttaaggctatgctttcgacgggttttaaaatcccacaaaaaggtatcttgattggaattcaacaatctttcagacccagatttttgggtgttgctgaacaacttcataatgaaggtttcaagttattcgcaaccgaagctacctccgattggttgaacgcaaacaacgttcctgctacgcctgttgcttggccttctcaggagggtcaaaacccatccctctcatctatacgaaagttaattagggatggatcaatcgatttggtgatcaatctccccaataataatactaagtttgtccacgataactatgttatacggaggaccgctgtcgacagcgggattccccttctgacgaactttcaagtaacgaagctgttcgccgaggcagtccaaaaatctcgtaaggttgattctaaatctttgtttcactacagacaatactctgcaggtaaagcagcc

SEQ ID NO: 8047 - DNA, 4500 bp, synthetic construct
  misc_feature 1..4500: note = source = /note="Description of Artificial Sequence: Synthetic coding sequence"
  source 1..4500: mol_type = other DNA
atgacccggatcctcacagcatttaaggtggtgagaacactgaagactgggttcggatttaccaacgttacagcccatcagaagtggaagttcagtcggcccggcatcagactgctgtcagttaaagcccagacagcccacatcgttctggaagatgggaccaagatgaagggttattcttttgggcatcccagctccgttgcaggcgaggtggtcttcaataccgggctaggcggctaccccgaggcaatcactgatcctgcgtataaaggtcagatcttaactatggccaatcccattatcgggaacgggggcgcaccagacacaaccgcactggacgaactgggactgagcaagtacctcgaatctaatgggatcaaagtgtccggactcttggtgcttgactactctaaagactacaaccattggctggcaactaaaagtttaggacagtggcttcaggaggaaaaggtccctgctatctacggcgtggacacgagaatgctgacaaaaatcatcagagataaagggactatgctcggaaagatcgagttcgaggggcagcctgtggattttgtcgatcccaataaacagaacctgatcgctgaggtgtccactaaggatgtgaaggtgtatggcaaagggaacccaaccaaggtggtggccgttgattgtggaatcaaaaacaacgtgatccgactgctcgtgaagcgcggcgctgaggtgcatctggtaccatggaaccatgacttcacaaaaatggagtacgacgggattctgatagccggggggcccgggaatcctgctctggcggaaccgctcatacagaatgtgcggaaaatactagagtccgatagaaaagaaccactattcgggatcagcaccgggaacctgatcacaggcctggccgcgggtgccaagacttataagatgagcatggctaacagggggcagaatcagccggttttgaacatcaccaacaagcaggccttcattactgctcagaatcacgggtatgccctggataacactctaccagccggttggaaacctcttttcgtcaatgtgaatgaccagacaaacgaagggattatgcacgagtcaaagccctttttcgcagtgcagttccatcctgaagtgactcctggcccaattgataccgagtatttgtttgacagcttcttttcccttattaagaaggggaaagcgacgacaatcacatctgtcttgcctaaacctgcccttgtggcatctagagttgaagtgtccaaggtgttgatcttgggaagtggcgggctgagcattggacaagctggcgagttcgattatagtggtagtcaggcagtaaaagcaatgaaggaagaaaatgtcaagaccgtgctgatgaatccgaacatcgcatcagttcagactaatgaagtgggactgaagcaagccgataccgtctactttctcccaatcaccccacagttcgtgacggaggtgataaaagccgagcagcccgacggccttatcctgggcatgggaggccagacagcccttaattgcggcgtcgagctgttcaaaaggggggtgttgaaggaatatggcgtgaaggtcctgggaacttctgtagaaagcatcatggctacagaggatcggcaactatttagcgataaactgaatgaaataaatgagaagatcgccccttctttcgctgtcgaatcaatcgaagacgcacttaaggcggccgatactatcgggtaccccgtaatgattaggtctgcatatgcgctgggaggactaggctccggcatctgcccaaaccgagagacattgatggacctttccaccaaagccttcgctatgactaatcagatcctggtggagaagagtgtcaccgggtggaaggagatcgagtacgaggttgtaagagatgccgatgacaattgtgtaaccgtgtgtaacatggagaacgtcgacgctatgggagtccacaccggtgactccgtggtggtggcgccagctcagacattgtctaatgccgagtttcaaatgctcaggcgcacctcaataaatgtagtacgccacctcggaatcgttggagagtgcaatattcaattcgccctccatcccactagtatggagtactgcattattgaggtgaacgctcggttgagtcgctcgtcagccctggcatctaaggcaaccggctacccgctagccttcattgctgcaaaaattgccctgggaataccacttcctgagatcaagaacgtggtgagcggaaagacttcagcatgctttgagcctagtctggattatatggtaactaagattccccggtgggacctggacaggttccacggcacttccagtcggatagggtcctcaatgaagtcagtgggcgaagttatggcgatcggcaggaccttcgaagaatccttccagaaggcgctgcgaatgtgccacccttctatcgagggttttacaccccgactccccatgaacaaggagtggccctctaatctcgacttgaggaaggaactctcggaaccttcgtccactcgcatctacgctatcgccaaggctatcgatgataacatgtctctggacgagattgaaaagctgacttatattgacaaatggttcctatataagatgcgcgatatcttaaacatggagaaaacgctgaagggcctcaatagcgagagtatgaccgaggagactctcaaaagagcgaaagagatcgggttttccgacaaacagatcagtaaatgtctaggtctgactgaggcgcagacaagggagctgagactcaagaaaaatattcacccttgggttaagcaaattgatactctggcggcagaatacccgtctgtcactaactacctgtatgtgacatataatgggcaagaacacgacgtcaatttcgacgatcacggaatgatggtgctgggatgtggcccctaccatattggttcatctgtcgaattcgactggtgcgccgtgagttcaatacgcacgctcagacagcttggtaagaaaaccgtggttgtgaattgtaacccagaaacagtgagtactgatttcgatgagtgtgataagctctatttcgaggagctgtcactggagcggatcttggacatttaccatcaggaggcatgcggcggttgcataatttcagtgggcggccagatacctaacaatctggcagtgccgctgtataagaacggagtgaagattatgggtacctctccactgcaaatagaccgagccgaggaccggtctattttctcagccgtgcttgacgagctgaaagttgcacaggcaccttggaaggccgtgaacaccctcaacgaggcattagagtttgcaaaaagtgtcgattacccttgtctgttaaggccctcttatgttctctcaggcagcgcgatgaatgttgttttttccgaggacgagatgaaaaaattcctggaagaggccacaagagtgagccaggagcaccctgtggtcctcaccaaattcgttgagggggcgagggaggttgagatggatgctgtgggaaaggatggccgggtgatcagtcatgccatatcggagcacgtggaggatgcaggggtacactctggagacgctacactgatgttgcccacgcagaccatttcccaaggagcaattgagaaagtcaaagatgcaacacgcaaaatcgcgaaggccttcgctatttctggacccttcaatgtgcaatttcttgtgaaaggcaatgatgtcctcgtgatcgaatgcaatctacgagcgtccaggtcctttccttttgtgtcaaagactctcggagttgattttatcgatgttgccacaaaggttatgatcggagagaatgtggatgagaagcatctgccaaccctggaccaccccattatccccgcggactacgtggcaattaaggcacccatgttctcttggccacggctccgcgacgccgacccaatcctccggtgcgagatggcctctactggggaggttgcctgctttggagaaggcatccacaccgcgttcttgaaggctatgctcagcacggggtttaagataccccagaagggtattcttattggaatccaacagtcttttaggccccgttttttaggagtggccgagcagctacataacgaggggtttaaactcttcgcgaccgaagccacgagcgattggctgaatgccaacaatgtgccagcgacccccgttgcctggccaagtcaagagggccagaatccctcactgagttctatcagaaaactcatccgcgacggatccatagacctcgtgatcaatctaccaaacaataataccaaattcgtgcatgacaattacgtgatcagaagaactgccgtagactccggtatcccattactgacgaactttcaagtgacgaagctgttcgctgaagctgttcagaaaagtagaaaagttgattcaaagagcctctttcactatcggcaatatagcgctggaaaagcggcc

SEQ ID NO: 8048 - DNA, 4500 bp, synthetic construct
  misc_feature 1..4500: note = source = /note="Description of Artificial Sequence: Synthetic coding sequence"
  source 1..4500: mol_type = other DNA
atgacccggatcctgactgctttcaaagtggtgcgcactctgaaaaccggcttcggattcaccaacgtgactgcacatcagaaatggaagttctcgcgccctggcatccgcctcctgagcgtgaaagcccagacggcccacatcgtgctggaggacgggactaagatgaagggctactctttcggacaccctagctcggtggcaggcgaagtagttttcaacaccggcctcggcggctacccggaagcgatcactgaccctgcgtataagggacaaatcttgaccatggcgaacccgattatcggcaacggaggcgcaccagataccaccgctctcgatgaattgggactcagcaagtaccttgaatccaatggaatcaaggtttcaggcctgctcgtgctggactacagcaaggactacaatcactggctggccaccaagagcctgggacagtggctgcaagaggagaaggtgcctgccatctacggagtggataccagaatgctgaccaagattattcgagataaagggaccatgcttggcaagattgaatttgagggccagccggtcgacttcgtggacccgaataagcagaacctcatcgctgaagtgagcactaaggacgttaaggtgtacggaaaaggaaacccgaccaaggtcgtggcagtggactgcgggatcaaaaacaacgtgatcagactccttgtgaagcgcggagccgaggtccacctcgtgccttggaaccatgacttcactaagatggaatacgacggaatcctcatcgccggaggccccgggaatccggcactcgccgaaccactcatccaaaacgtccgcaaaatcctcgaaagcgacagaaaagagccgctgtttgggatcagcaccggaaatctgatcactggactggcagcgggcgcaaagacgtacaaaatgtcaatggctaatagggggcaaaaccaacctgtcctgaacatcacgaataagcaagccttcatcaccgcccagaatcacggatacgccctggacaacactctcccggccggatggaagccgttgttcgttaatgtgaatgatcagaccaacgaaggaatcatgcacgaaagcaaaccttttttcgccgtgcagtttcatccggaggtcacgccgggccctatcgacactgaatacctcttcgattccttcttttccttgatcaagaagggaaaagctactaccatcacctcggtgctccctaagcccgctctcgtggcctcccgggtggaagtctccaaagtcctcatcctcggatcgggcggacttagcatcgggcaagcaggagaattcgactactcgggttcgcaggccgtgaaggccatgaaggaagagaacgtgaaaactgtgctcatgaatccgaatattgcgtccgtccagaccaatgaagtcggtctgaaacaggctgacactgtgtacttcctccctattaccccacagtttgtcactgaagtgatcaaggcagagcagccggacggactgatcctgggtatgggcgggcagaccgctctgaactgtggtgtggaactgttcaagagaggagttctgaaagaatacggagtcaaggtgctcggcacctcggtcgagtccatcatggcaaccgaagatcgccagttgttcagcgacaaactgaacgaaatcaatgaaaagatcgcaccttcgtttgcagtggaaagcatcgaggacgctctgaaggcggcggataccattggataccctgtgatgatccggtcagcttacgctctgggaggactcggatctggaatctgcccaaaccgggagactctgatggacctttcgaccaaggccttcgctatgaccaaccagattctggtggaaaagtccgtgactggatggaaggaaattgagtacgaggtggttcgcgacgcggacgataactgcgtgacggtctgcaatatggaaaatgtggatgcaatgggagtgcataccggagacagcgtggtcgtggcccctgcacaaactctgtcgaatgccgagttccagatgctgagacgcacttccataaatgtggttcgccaccttggcattgtgggagagtgcaacattcaattcgccctccatccgacctccatggaatactgcatcatcgaggtgaacgcccgactgtcccgatcctcagctctggcctcgaaggctaccgggtacccgttggccttcatcgcggccaagattgcgctgggaatccccctgccagagattaagaacgtggtgtccggaaagaccagcgcatgttttgaaccgagccttgactacatggtgacgaagatcccgaggtgggacctggacagattccacggaacgagctcacgcatcggctcctcaatgaagagcgtgggtgaggtcatggcgatcggccgcaccttcgaagagagctttcaaaaggccctgcgcatgtgccacccctccatcgagggtttcacgcccaggctgccgatgaataaagaatggccatcaaatctggatctgcgcaaggaactctccgaaccctcatcgacccggatctacgcgatcgccaaagcgatcgacgataacatgtcactggatgaaattgagaagctgacctatattgataagtggttcctgtacaagatgcgcgacatcctgaacatggaaaaaacccttaaagggctgaacagcgaatcgatgacggaggaaactctgaagcgggcaaaagagatcggcttctcggacaagcaaatcagcaaatgtctggggctgacggaagcgcagactagggaactgaggctcaaaaagaatatccacccgtgggtgaagcagatcgatactctggcggctgagtacccgtctgtcaccaactacctgtacgtgacctataatggacaagaacacgatgtgaatttcgacgaccatggaatgatggtgctggggtgcggcccttaccacatcggctcatccgtggaatttgattggtgcgctgtgtcgtcaattaggaccctgcgccagctgggcaaaaagactgtggtggtcaactgtaaccccgaaaccgtctccaccgatttcgatgaatgcgacaagctctacttcgaggaactttcattggaacggatcctcgacatctaccaccaagaggcctgtggggggtgcatcatctcggtgggtgggcagatccccaacaacctggccgtgccgctctataagaatggggtgaagattatgggcacgtcaccgctgcagatcgatcgcgcggaagataggtcaatctttagcgcggtgttggacgagttgaaggtcgcgcaggccccatggaaggctgtgaacacgctgaatgaggcactcgaatttgcaaagtcagtggactacccgtgcctgcttcgcccaagctacgtcttgagcgggagcgccatgaatgtggtcttttcagaagatgagatgaagaagttcctggaagaagccacgcgcgtgagccaggaacacccagtggtgctcacgaaatttgttgaaggtgcaagagaagttgaaatggacgcggtgggaaaggacggtagggtgatctcccatgcgatcagcgagcacgtcgaggatgcaggtgtccacagcggagatgctaccctgatgcttccgactcagactatctcgcagggtgctatcgagaaggtgaaggacgcaaccagaaagatcgcgaaggcttttgcaatctcaggcccctttaacgtgcagttcctcgtcaagggaaatgatgtcctggtcatcgagtgcaatttgcgcgcttcccggtcattcccgttcgtcagcaagaccctcggcgtagactttattgacgtggcaacgaaagtcatgatcggagagaacgtcgacgaaaaacacctgcccactctcgatcacccaatcatccctgcggactatgtggccattaaggccccgatgttctcctggccgcgacttagggatgctgatcctatcctccggtgcgagatggcttcgactggcgaagtggcttgcttcggagagggaatccataccgccttcctcaaagctatgctttcaaccggattcaagattccacagaagggaatcctgatcggaatccaacagagcttcagacctcgctttcttggagtggcggaacaactgcataatgagggattcaagctgttcgcgaccgaggccacttccgactggctgaatgctaacaacgttccggctacgccggtggcctggccgagccaagagggccaaaatccatcgctgtcgagtatccggaagctgattagggacggaagcatcgacctcgtgattaatctcccaaacaacaacaccaaatttgtgcacgacaactacgtgatccgccgcactgccgtggattctgggattccgctgctgaccaacttccaggtcaccaagctgtttgctgaagccgtgcagaaatcacgcaaggtggattcaaaatccctgttccattacagacagtattccgcagggaaggcggca

SEQ ID NO: 8049 - DNA, 4500 bp, synthetic construct
  misc_feature 1..4500: note = source = /note="Description of Artificial Sequence: Synthetic coding sequence"
  source 1..4500: mol_type = other DNA
atgacgcggatactgaccgctttcaaagtcgtccggacacttaagaccgggtttggcttcaccaatgtcaccgcccaccaaaagtggaaattctctcggcctggaatcaggttgttatctgtgaaggcgcagactgcccatatcgttctagaggatggcaccaagatgaagggatacagcttcggccaccccagcagcgtggctggagaggtggtgtttaatacagggttggggggctaccctgaagcgatcactgaccctgcgtacaagggtcagattcttaccatggccaaccctattatagggaacgggggcgcgcccgatacgactgcacttgacgagctgggcttgtccaaatatctggaatccaacggcatcaaggtgtctgggctgctagtactggattactcaaaggattataatcattggctggcaacgaaaagtctgggccagtggctacaggaagagaaggtgcccgccatttacggggtcgatacgcgcatgctgacaaaaataatcagggataaaggcactatgctgggaaaaatcgagttcgaagggcagcccgtggacttcgtggaccctaacaagcaaaatctgattgcagaggtgtccaccaaggatgtgaaggtgtatggtaagggtaatccgacaaaagtggtggctgtggattgcgggattaagaacaatgtcatccgtctgttggtgaaacggggcgctgaggtacacctcgtcccttggaaccacgactttacaaagatggagtacgatgggattcttatcgctgggggccccggcaaccccgcgctcgcagaaccgctgatacagaacgtgcgcaaaatattggaaagcgatcggaaggaaccactgtttggcatctccacgggaaacctgatcacaggtctggcggccggagccaaaacctacaagatgtccatggcaaatcgggggcagaaccagccagtcctgaacattacaaacaagcaggccttcattaccgctcagaaccatggttatgcattggacaacactctgcccgccggctggaagcccttgttcgtgaatgtgaacgatcagacaaacgagggaattatgcatgagagcaagccttttttcgctgttcagtttcatccagaagtcactcctggtccaatcgacaccgaatatcttttcgactcctttttcagcttgattaagaaaggcaaggcaacgactatcacatccgtgctgccaaagccagccctcgtggccagtagggtcgaagtgagcaaggtccttattctggggagcggtggattgtccatagggcaggccggcgaatttgactactccggctcacaggccgtgaaagcgatgaaagaggagaacgtgaagactgtgcttatgaacccgaacattgcaagcgtgcagaccaacgaagtgggtttgaaacaagccgacacagtttactttctgcccattactccgcagtttgtgacagaggtgatcaaggccgaacagccggacgggttaatccttggcatgggaggacagacagcactaaactgcggcgtggagctgtttaagcggggagtactcaaagagtatggggtcaaggtgctgggcacgagtgtagaatccatcatggcaacagaagatcggcagctgttttcagacaaactgaacgagatcaatgagaagattgctcccagcttcgcagtggagtcaattgaggacgcgctgaaggccgccgacacgattggctatcccgtgatgataagatcggcctatgctttggggggcctggggagcggtatctgtcccaatagggaaacgctgatggatctatccaccaaggccttcgctatgacaaaccaaatactggtggagaaaagcgtaactggatggaaagaaattgaatatgaagtggtgagggatgccgacgacaattgcgtgaccgtatgtaacatggagaatgttgacgctatgggagtccacacgggagatagcgtggttgtggcgcctgcccagaccttaagtaacgctgagtttcagatgttacgaaggacctccatcaatgtggtgcgacacttggggattgtgggagaatgtaacattcaattcgctctacaccccacatccatggagtattgtattattgaggtaaatgctcgcctgtctcggagctccgcactggcctcgaaggccacgggctatccgttagctttcatcgcagcaaagatcgcgctcggcatcccactccccgaaatcaaaaacgtggtgagcggtaaaacttccgcatgtttcgaaccttccctggactatatggtaaccaagataccccgctgggacctcgaccggttccacgggacgtcgagtcgtatcgggagctctatgaagtccgtgggggaggtgatggctataggccggacgttcgaagaatcatttcagaaagcactccggatgtgccacccctcaattgagggtttcacacccaggttgccaatgaacaaggaatggccctcaaacctggacctgagaaaagaactgagtgaaccaagtagtacaagaatatacgccatagctaaagccattgatgacaacatgagcctcgacgagatcgaaaagctcacatatattgacaagtggtttctgtacaaaatgagggatatcctgaatatggagaaaacactcaagggcctgaactctgagtctatgaccgaggagactttgaagcgggccaaggagatcggctttagcgacaagcaaatctcaaagtgccttggcctgaccgaggcacagactagggaactcagactgaagaaaaacatccacccatgggtgaaacaaatcgacaccttggcggcagagtacccttcagttacaaactatctgtacgtgacctataacggacaggagcacgatgtgaattttgacgatcatggcatgatggtgcttggttgtggcccatatcatatcggcagctcggtcgaatttgattggtgcgctgtgagctccatccgaaccctgagacagctgggcaagaagactgttgtggtgaattgcaatcccgagacagtgtccaccgacttcgatgaatgcgataagttgtatttcgaagagctgagtttagaacgtatattagacatctaccatcaggaggcgtgcggaggttgcataatcagcgtcggcggtcaaataccaaacaatcttgctgtgcccctatacaagaatggagttaagataatgggtacctcacctttgcagatcgaccgggctgaggaccgctccatcttctcagccgttctagatgagctgaaggtggcgcaggccccgtggaaagcggtcaatactctgaacgaggcactggaattcgccaagagcgtggactacccttgtcttctaaggccgtcttatgttttaagcgggtccgccatgaacgtcgtgttttctgaagacgaaatgaagaagttcctggaggaagcaactagggtctcacaggaacatcccgtagtcctcactaaatttgtggagggagccagagaagtcgagatggatgcagtgggtaaggatggaagggtgatcagccacgccatcagcgaacatgtcgaagacgcgggggtccactcaggggatgccactctgatgcttccaacccagacgatcagccagggcgcgatagagaaggttaaagatgctactcgcaagatcgctaaggccttcgccatttccgggccctttaatgtgcagtttctggtcaagggcaacgacgtactcgtgatcgagtgcaacctccgtgcatcacgttccttccctttcgtatctaaaaccctgggggtggacttcattgacgtcgctaccaaagtgatgattggcgaaaacgttgatgagaaacatcttcctacattggatcaccctatcattcctgccgattatgtggccataaaggcccccatgttttcctggcctagactgcgtgacgccgacccaatccttcgctgcgagatggcatcgactggcgaggtggcctgtttcggggaggggatacataccgcttttctcaaggccatgttgagtacagggttcaagattccgcagaagggcatcctgatcggtatacagcagagcttcaggccaaggttccttggagtggccgaacagctgcacaacgagggctttaaactcttcgcaacagaagccaccagcgattggctgaatgctaataatgtacctgcaactccagtcgcttggcccagccaggaagggcagaacccatcactcagcagcatcaggaaattaatccgagatggatcgatcgacctagtaatcaacctacccaacaacaataccaagttcgtacatgacaattacgttattaggagaacagccgtggacagcggtatccccctgctgacaaattttcaggtgacaaagctcttcgctgaagccgtccagaagtccaggaaggttgattctaagagcctgttccactataggcaatattcggccgggaaggccgct

SEQ ID NO: 8050 - DNA, 4500 bp, synthetic construct
  misc_feature 1..4500: note = source = /note="Description of Artificial Sequence: Synthetic coding sequence"
  source 1..4500: mol_type = other DNA
atgacgagaatactcaccgctttcaaagtggtgaggaccctgaaaactggattcggtttcacgaacgtgactgcccatcaaaaatggaagttcagccgcccggggatccgactgctgtcggtcaaggcgcaaacggcccacatcgtcctcgaagatggaactaaaatgaagggatacagcttcggacacccgtcctccgtggctggagaagtggtgttcaacaccggactgggaggctatccggaggcgatcaccgatcccgcttacaaaggacagatcctcacgatggcaaacccgatcatcggaaacggaggagccccggacaccaccgcccttgacgagctcggtctttccaagtacctcgaaagcaatggcatcaaggtgtccggtctgctcgtcttggattactcgaaggactacaatcattggctggccactaagtctctgggacaatggcttcaggaggagaaagtgccggcaatttacggagtggatacgagaatgctgacgaagattatccgcgataagggcactatgcttggaaaaatcgagttcgagggacagccggtggacttcgtggacccgaataagcagaacctcatcgcggaggtgagcactaaggacgtgaaggtctacggtaagggtaacccgaccaaagtcgtcgccgttgactgtggtatcaaaaacaatgtgattcgcctgctggtgaaacggggagcagaggtgcatctcgtcccgtggaatcatgactttactaagatggaatacgatgggatccttatcgccggcggaccaggaaatcctgcactggccgagccacttatccaaaacgtgcgcaagattctggaatcagataggaaagagcccctgttcggaatcagcaccggtaacctgatcactggactcgcagccggtgctaagacttataagatgagcatggcaaaccgcggacaaaaccagccggtcctgaacatcaccaacaagcaggcgttcatcaccgctcaaaaccacggatacgcactggacaacactctcccggccggatggaagccgctttttgtgaatgtgaatgatcagacgaacgaagggatcatgcacgaaagcaagcctttcttcgctgtacaattccacccagaagtgactcccggaccgatcgacaccgaatacctgtttgactcgtttttctccctgatcaaaaaaggcaaggccacgacgatcacttcggtgctgccgaagccggctctggtggcctcgcgcgtggaagtgtccaaagtgttgatccttggctcgggagggttgtcgatcggccaggcgggagaattcgactacagcggcagccaggcggtcaaggccatgaaagaggaaaacgtgaaaactgtcttgatgaacccgaacatcgcctccgtgcaaactaacgaagtcggactcaagcaggcggatactgtgtacttcctgcctatcactcctcagttcgtgactgaagtgatcaaggctgagcagccagacggcctgattcttggaatgggcggtcagactgctctgaactgcggagtcgaactcttcaagcgcggcgtgcttaaagaatacggtgtgaaggtcctgggcacttcggtcgagtcaattatggctactgaggaccgccaacttttctcggacaagttgaacgaaatcaacgagaagatagcaccgtcctttgccgtggagtccatcgaagatgcactcaaagcagcagacaccattggctacccggtgatgatccgctcagcgtacgctctgggaggcctgggatccgggatctgtccaaacagggaaaccctgatggacctcagcaccaaggcgttcgcaatgactaatcagatcctggtggagaagtcagttaccggatggaaagaaatcgagtacgaggtggtgcgcgatgcagatgataattgcgtgaccgtctgcaacatggagaacgtggacgccatgggcgtccacaccggtgactccgttgtggtggcccccgcccagactctttcaaatgccgaattccagatgcttaggcggacttcgatcaacgtggtccggcatctgggaattgtgggagagtgcaacatccaattcgcgctccaccctacttcgatggaatactgcatcatcgaagtgaatgcgcggctgtctcggagcagcgccctcgcctccaaagcaaccggatacccgctggctttcatcgcagccaaaatcgccctgggaattcctcttccggaaatcaagaacgtggtgtcaggaaagactagtgcctgcttcgagccctccttggactacatggtcacgaagatcccacgctgggacctggacagatttcacggaacctcttcgcgcatcggctcgagcatgaagtcggtaggggaggtgatggccattggccgcactttcgaagagagctttcagaaagcactgcgcatgtgccatccgtcaatcgaaggatttactccgagacttcccatgaacaaggagtggccgagcaatctcgatctgagaaaagagctctcagaaccgtccagcacgcgcatttacgcaatcgcaaaagccattgatgacaatatgtcccttgacgagatcgaaaaactgacttacatcgacaagtggttcctctataagatgcgcgacattctgaacatggaaaagacgctgaagggactgaactccgagtcgatgaccgaagagactctgaagcgcgctaaagaaatcggtttctccgataagcagatctcgaaatgcctgggactcactgaggcgcagacccgcgaactgcgcctcaagaaaaacatccacccgtgggttaagcagatcgacaccctggccgctgagtacccatccgtgaccaactacctctacgtgacctacaacgggcaggaacatgatgtcaatttcgacgatcatggaatgatggtgctcggttgtggaccgtaccacatcggatcgtcggtcgagttcgattggtgtgcggtgtcgtcaatccggaccctgagacaactgggaaagaaaaccgtggtcgtgaactgcaaccctgaaaccgtctcgaccgatttcgatgaatgcgataagctgtacttcgaggaactgagcttggaacgaatcctggacatctaccatcaggaagcgtgtgggggctgcatcatctccgtgggcggacagattcctaataacctggctgtccctctgtacaagaacggcgtgaagattatgggcacctcgccacttcagatcgacagggctgaagatagatcgatcttctccgccgtgcttgacgaactgaaggtggcgcaggcgccgtggaaagcggtcaacaccctcaatgaagcactcgagttcgcgaagtctgtggactacccctgcctcttgcgcccgtcatacgtgctctcgggctcggccatgaacgtggtattctcggaggatgaaatgaaaaagttcctcgaggaggcgactagagtgtcacaggaacacccggtggtgttgactaaattcgtggaaggcgcgcgggaagtggagatggacgcggtcggcaaagatggacgggtgatcagccatgccatctccgaacacgtcgaagatgccggtgtccactcgggggacgcgactcttatgctcccaactcagacgatcagccagggtgcaatcgaaaaggtgaaggacgccactcgtaagatcgccaaggcttttgccattagcggtccgttcaacgtccaattcttggtcaagggaaatgacgtcctggtgatcgagtgcaacctgcgggcttcccgttcatttccctttgtgagcaagactctgggtgtggactttatcgacgtcgccaccaaggtcatgatcggggaaaacgtggatgagaaacatctcccgacgctcgaccacccaatcatcccagctgactacgtggcgatcaaggcgccgatgttctcctggccgcgactgagggatgctgacccgatcttgagatgtgagatggccagcactggcgaagtcgcgtgcttcggagagggaattcatactgcgtttctgaaggcgatgctgtcaacgggattcaagatcccgcagaaaggaatcctgatcggcatccagcaatcgttcagaccacgcttcctcggagtggccgaacaactgcacaacgaaggattcaagttgttcgcgaccgaggctactagcgattggctcaacgcgaacaatgtgcctgcgaccccggtggcgtggccgagccaggaaggacagaacccatcactcagcagcatccggaaacttatccgcgacggatccatcgacctggtgatcaatctgcctaacaacaatactaagttcgttcacgataactatgtgatccgccggaccgcggtggattcaggaattccactgcttactaactttcaggtgaccaaactgtttgccgaagcagtccagaagtctcggaaggtggactccaaaagcctgttccattatcggcagtactcggcgggtaaagcagct

SEQ ID NO: 8051 - DNA, 4500 bp, synthetic construct
  misc_feature 1..4500: note = source = /note="Description of Artificial Sequence: Synthetic coding sequence"
  source 1..4500: mol_type = other DNA
atgacgcgaatattaacggcgtttaaagtagtacgtacgttaaaaacgggttttggttttacgaatgttacggcgcatcaaaaatggaaattttcgcgtccgggtatacgtctattatcggtaaaagcgcaaacggcgcatatagtattagaagatggtacgaaaatgaaaggttattcgtttggtcatccgtcgtcggtagcgggtgaagtagtttttaatacgggtctaggtggttatccggaagcgataacggatccggcgtataaaggtcaaatactaacgatggcgaatccgataataggtaatggtggtgcgccggatacgacggcgttagatgaattaggtctatcgaaatatttagaatcgaatggtataaaagtatcgggtctattagttttagattattcgaaagattataatcattggttagcgacgaaatcgttaggtcaatggctacaagaagaaaaagttccggcgatatatggtgtagatacgcgaatgttaacgaaaataatacgtgataaaggtacgatgctaggtaaaatagaatttgaaggtcaaccggttgattttgtagatccgaataaacaaaatctaatagcggaagtatcgacgaaagatgtaaaagtatatggtaaaggtaatccgacgaaagttgttgcggtagattgtggtataaaaaataatgttatacgtctactagtaaaacgaggtgcggaagttcatttagtaccgtggaatcatgattttacgaaaatggaatatgatggtatactaatagcgggtggtccgggtaatccggcgctagcggaaccgttaatacaaaatgttcgtaaaatactagaatcggatcgtaaagaaccgttatttggtatatcgacgggtaatctaataacgggtctagcggcgggtgcgaaaacgtataaaatgtcgatggcgaatcgtggtcaaaatcaaccggtattaaatataacgaataaacaagcgtttataacggcgcaaaatcatggttatgcgctagataatacgttaccggcgggttggaaaccgttatttgtaaatgttaatgatcaaacgaatgaaggtataatgcatgaatcgaaaccgttttttgcggttcaatttcatccggaagtaacgccgggtccgatagatacggaatatctatttgattcgtttttttcgttaataaaaaaaggtaaagcgacgacgataacgtcggtactaccgaaaccggcgctagtagcgtcgcgtgtagaagtatcgaaagtattaatattaggttcgggtggtctatcgataggtcaagcgggtgaatttgattattcgggttcgcaagcggttaaagcgatgaaagaagaaaatgtaaaaacggttttaatgaatccgaatatagcgtcggtacaaacgaatgaagttggtttaaaacaagcggatacggtatattttctaccgataacgccgcaatttgtaacggaagttataaaagcggaacaaccggatggtttaatattaggtatgggtggtcaaacggcgttaaattgtggtgtagaattatttaaacgaggtgtactaaaagaatatggtgttaaagttttaggtacgtcggtagaatcgataatggcgacggaagatcgacaattattttcggataaactaaatgaaataaatgaaaaaatagcgccgtcgtttgcggtagaatcgatagaagatgcgttaaaagcggcggatacgataggttatccggttatgatacgttcggcgtatgcgctaggtggtttaggttcgggtatatgtccgaatcgtgaaacgttaatggatctatcgacgaaagcgtttgcgatgacgaatcaaatactagtagaaaaatcggtaacgggttggaaagaaatagaatatgaagtagtacgtgatgcggatgataattgtgtaacggtttgtaatatggaaaatgttgatgcgatgggtgttcatacgggtgattcggtagtagtagcgccggcgcaaacgttatcgaatgcggaatttcaaatgttacgacgaacgtcgataaatgtagtacgacatctaggtatagtaggtgaatgtaatatacaatttgcgttacatccgacgtcgatggaatattgtataatagaagtaaatgcgcgtctatcgcgatcgtcggcgctagcgtcgaaagcgacgggttatccgctagcgtttatagcggcgaaaatagcgttaggtataccgctaccggaaataaaaaatgtagtatcgggtaaaacgtcggcgtgttttgaaccgtcgctagattatatggtaacgaaaataccgcgttgggatttagatcgttttcatggtacgtcgtcgcgaataggttcgtcgatgaaatcggtaggtgaagttatggcgataggtcgtacgtttgaagaatcgtttcaaaaagcgctacgtatgtgtcatccgtcgatagaaggttttacgccgcgactaccgatgaataaagaatggccgtcgaatttagatttacgaaaagaattatcggaaccgtcgtcgacgcgtatatatgcgatagcgaaagcgatagatgataatatgtcgctagatgaaatagaaaaactaacgtatatagataaatggtttctatataaaatgcgagatatattaaatatggaaaaaacgctaaaaggtctaaattcggaatcgatgacggaagaaacgctaaaacgtgcgaaagaaataggtttttcggataaacaaatatcgaaatgtttaggtttaacggaagcgcaaacgcgtgaattacgtctaaaaaaaaatatacatccgtgggtaaaacaaatagatacgttagcggcggaatatccgtcggttacgaattatttatatgtaacgtataatggtcaagaacatgatgttaattttgatgatcatggtatgatggttctaggttgtggtccgtatcatataggttcgtcggtagaatttgattggtgtgcggtttcgtcgatacgtacgttacgtcaattaggtaaaaaaacggtagttgttaattgtaatccggaaacggtttcgacggattttgatgaatgtgataaattatattttgaagaactatcgctagaacgtatattagatatatatcatcaagaagcgtgtggtggttgtataatatcggtaggtggtcaaataccgaataatctagcggtaccgctatataaaaatggtgtaaaaataatgggtacgtcgccgttacaaatagatcgtgcggaagatcgatcgatattttcggcggttttagatgaactaaaagttgcgcaagcgccgtggaaagcggtaaatacgttaaatgaagcgctagaatttgcgaaatcggtagattatccgtgtctattacgtccgtcgtatgttctatcgggttcggcgatgaatgtagttttttcggaagatgaaatgaaaaaatttctagaagaagcgacgcgtgtttcgcaagaacatccggtagttttaacgaaatttgttgaaggtgcgcgagaagttgaaatggatgcggttggtaaagatggtcgagtaatatcgcatgcgatatcggaacatgtagaagatgcgggtgttcattcgggtgatgcgacgttaatgttaccgacgcaaacgatatcgcaaggtgcgatagaaaaagttaaagatgcgacgcgtaaaatagcgaaagcgtttgcgatatcgggtccgtttaatgttcaatttttagtaaaaggtaatgatgttctagttatagaatgtaatttacgagcgtcgcgatcgtttccgtttgtatcgaaaacgttaggtgtagattttatagatgttgcgacgaaagtaatgataggtgaaaatgtagatgaaaaacatttaccgacgttagatcatccgataataccggcggattatgttgcgataaaagcgccgatgttttcgtggccgcgtttacgtgatgcggatccgatactacgttgtgaaatggcgtcgacgggtgaagttgcgtgttttggtgaaggtatacatacggcgtttttaaaagcgatgttatcgacgggttttaaaataccgcaaaaaggtatattaataggtatacaacaatcgtttcgtccgcgatttctaggtgttgcggaacaactacataatgaaggttttaaactatttgcgacggaagcgacgtcggattggctaaatgcgaataatgttccggcgacgccggtagcgtggccgtcgcaagaaggtcaaaatccgtcgttatcgtcgatacgtaaattaatacgtgatggttcgatagatttagttataaatctaccgaataataatacgaaatttgttcatgataattatgttatacgtcgaacggcggtagattcgggtataccgttactaacgaattttcaagttacgaaattatttgcggaagcggttcaaaaatcgcgaaaagtagattcgaaatcgctatttcattatcgtcaatattcggcgggtaaagcggcg

SEQ ID NO: 8052 - DNA, 4500 bp, synthetic construct
  misc_feature 1..4500: note = source = /note="Description of Artificial Sequence: Synthetic coding sequence"
  source 1..4500: mol_type = other DNA
atgactcgcatcctcactgccttcaaggttgtgcgcacccttaagacgggcttcggatttactaatgtgacggcgcaccagaagtggaagttttcccgcccgggtatccggctgctgagcgtgaaggcgcagaccgcacacatcgtactcgaggacggaactaagatgaagggctactccttcggccacccgtcctcggtcgcgggggaggtggtgttcaacactggactgggagggtacccagaggctatcaccgatccggcctataaaggccaaatcttgaccatggccaaccctatcatcggaaacggcggagccccagacactacggcactcgacgagctcgggctctccaagtacctggagtcgaatggtatcaaagtgtcaggactcctggtgctggattacagcaaggactataaccactggctggcaactaaatcgctcggacagtggctgcaagaggagaaggtgccagccatctacggtgtggacactcggatgctgaccaaaatcatccgggacaaaggcactatgctgggcaaaatagaattcgaaggccaacccgtggatttcgtcgatccgaataagcaaaacctgatcgctgaggtgtccactaaggacgtgaaggtctacggcaaagggaatccgacgaaggtcgtcgcggtggactgcggaatcaagaacaacgtcattcggctcctggtcaagaggggagcagaagtgcatctcgtcccgtggaatcatgactttaccaagatggagtacgacggaatcctgatcgctggcggaccaggcaacccagccctcgccgaaccgttgatccagaacgtgaggaagatcctggagtcagatcgcaaggaaccgctttttggaatctcgactgggaatctgatcactggactggccgccggagctaagacttacaagatgtcgatggcgaaccgcgggcaaaaccaaccggttctgaacatcaccaataagcaggcctttatcaccgcacagaaccatggatacgctctggacaacaccctgcccgcagggtggaagccgctgttcgtgaatgtgaacgaccaaaccaacgaaggaatcatgcacgaatcgaagccgtttttcgccgtccaatttcatcctgaagtcacgccgggacctatcgataccgagtacctgtttgactcgttcttcagcctgatcaagaagggaaaggcgaccactatcacctccgtgctgcctaagccggcgctggtcgcgtcacgggttgaagtgtcgaaggtgctgattctgggatcaggcgggctgtccatcggacaagccggagaattcgattactccggatcgcaggctgtgaaggcaatgaaggaggagaatgttaagaccgtgctgatgaacccgaacatcgcaagcgtgcaaactaatgaagtgggactgaagcaggcagatactgtctacttcctgccgattacgccgcagtttgtgaccgaggtgatcaaggcagagcagccggatggtttgattctgggaatgggcggacaaaccgctctcaactgcggagtggagttgttcaagcggggcgtgctgaaggagtacggagtcaaggtgctgggaacttccgtggaaagcatcatggccactgaagataggcagcttttctccgacaaactgaacgagattaacgaaaagatcgccccctccttcgctgtcgaatcaatcgaagatgctctcaaggccgcggacactatcggataccctgtgatgatcaggtcagcgtacgcactgggagggctgggatcgggaatctgcccgaaccgagaaactctgatggacttgagcaccaaggccttcgcgatgaccaaccagattctggtggagaagtcggtcactggctggaaagaaatcgagtacgaggtagtgagagacgctgatgacaactgtgtgaccgtctgcaatatggaaaacgtggatgccatgggagtgcacactggagacagcgttgtggtggcgccggcgcagaccctctccaacgctgaattccagatgctccgcagaacctcgatcaacgtcgtgcggcacctggggatcgtcggagagtgcaacatccagttcgctctccacccaacctcgatggagtactgcatcatcgaggtgaatgcccgcctgtcaagatcgagcgcgctggcttcaaaggcaaccggatacccgttggccttcatcgcggctaaaatcgccctgggcatcccgctgcctgaaatcaagaatgtagtctcaggaaagacgtcagcttgtttcgagccgtcactggattacatggtgacgaagatcccgcggtgggacctggacagatttcacggaacttccagccgcatcggatcgtcgatgaagagcgtgggtgaagtgatggcaatcggccgcacctttgaagagtctttccagaaggcccttcggatgtgccacccctcgatagaaggcttcacgccgcgccttccgatgaacaaggagtggccttcgaacctcgatctgcggaaggaactttccgaaccgtcatctaccaggatttacgctatcgccaaggcgatcgacgacaatatgagtcttgacgaaatcgagaaactgacctatatcgataaatggttcctgtacaagatgcgcgacattcttaacatggagaaaactctgaagggtcttaacagtgagtccatgactgaagaaactctgaagagagcaaaggagattggtttctcagataagcaaatttcgaagtgtctcggactgaccgaggcacagactcgcgagctccgactgaagaagaacatccatccctgggtgaagcaaatcgacaccctggcggctgaatacccaagcgtcaccaactacctgtacgtgacgtacaacggacaagagcacgacgtgaacttcgacgatcacggcatgatggtgctgggatgtggaccgtaccacatcgggtcgtcggtcgagttcgactggtgtgccgtgtcctcgatccgcactctgcggcaactcggtaaaaagaccgtggtcgtgaactgcaacccggaaactgtttccaccgacttcgacgagtgcgataaactgtactttgaagaactgagcctggaaagaatcctcgatatctaccatcaggaagcctgcgggggatgtattatctccgtcggaggccagatccccaacaacctggcagtgccgttgtacaaaaacggagtcaagattatgggaacgtccccgctccagattgacagggcggaggaccgcagcatcttctccgcagtgctcgacgaactgaaggtcgcccaagcaccttggaaagccgtgaacaccctcaacgaagctcttgagttcgcgaaatcagtggactacccgtgcctccttcggccgagctacgttctgtccgggtcggccatgaacgttgtcttttcggaagatgaaatgaagaagtttctcgaagaggccacccgggtgagtcaggaacacccggttgtcctgaccaaattcgtggaaggggccagagaggtggaaatggacgccgtgggaaaggacggacgcgtgatctcgcacgccatttcagaacacgtggaggacgcaggagtccactccggagacgctaccctcatgctgccgactcagactattagccagggcgccatcgaaaaggtgaaggacgcaactcgcaaaatcgcgaaggcgttcgccatcagcggaccgttcaacgtgcagtttctcgtgaagggtaatgacgtgctcgtcattgaatgtaacctgagagcatcacgctcgttcccattcgtctcaaaaacccttggagtggactttatcgacgtcgcgactaaagtgatgatcggcgagaacgtcgacgaaaaacatttgcccaccctcgatcatccaatcatcccagctgactacgttgccatcaaagcgccgatgttcagctggccacggctgcgagatgctgatcccatcctgcgctgtgaaatggcttccactggtgaggtggcgtgtttcggagaggggatccataccgccttcctgaaggctatgctgagcactgggttcaagatcccgcaaaaggggatcctgatagggattcagcaatcgtttcggccgagatttctcggcgttgctgaacagttgcacaacgaaggtttcaaactcttcgccaccgaagcaacctcggattggctgaatgccaataatgtcccagctaccccggtggcatggccttcccaggaaggacaaaatccatcactgtcgtccatcagaaagctcatccgcgatggatccattgatctggtcataaacctgccgaataacaacactaaattcgtgcacgacaattacgtcatcagaaggaccgccgtggacagcggaatccctctgctcactaacttccaggtcactaagctcttcgccgaagccgtgcagaagagtcggaaagtcgattcgaagtcactgtttcattaccgccaatactcggcgggaaaggcggca

SEQ ID NO: 8053 - DNA, 4500 bp, synthetic construct
  misc_feature 1..4500: note = source = /note="Description of Artificial Sequence: Synthetic coding sequence"
  source 1..4500: mol_type = other DNA
atgacgcgcatacttactgcatttaaggtggtgaggactcttaagaccgggtttggattcacgaacgttaccgcccaccagaaatggaagtttagtagacctggcattaggctgctctcggtgaaggctcagaccgcccacatcgtactcgaggacggtaccaaaatgaagggatacagcttcggacacccttcatccgtggcaggtgaggtcgtgttcaataccggattgggaggataccctgaagcaattactgaccctgcctataaagggcaaattcttactatggcaaacccgattattggaaatgggggtgcacccgacactacggcgctggacgaactgggactctccaagtacctggaatcaaacggaattaaggtgagcggacttcttgttctggattactccaaggattacaaccattggctcgcaaccaagtcgctgggtcaatggctccaggaagaaaaggtgcccgcaatttacggggtggataccagaatgcttactaagattattcgtgacaagggaactatgcttggtaagattgaattcgaaggtcagcccgtggactttgtggaccctaataagcaaaacctcatagccgaagtgtcaaccaaagacgtgaaggtgtacggtaaaggcaaccctacgaaagtggtggccgtggactgcggtattaagaacaatgttatacgccttctcgtgaaacgaggagcagaagtgcaccttgtgccctggaaccatgattttactaaaatggaatacgatggaatcctgattgcaggaggacctggaaaccccgcgttggcagaacctctgattcaaaatgtcagaaagatcctggaatccgacagaaaggaacctctgttcgggataagcactggtaaccttattacgggactggccgcgggtgctaagacttacaagatgtccatggcaaacagaggccaaaaccagcctgtccttaacattactaataagcaggccttcataacggcccagaaccatggatacgcactcgacaacacccttccagcgggatggaagccactctttgtgaacgtcaacgaccaaactaacgagggaatcatgcatgagtcaaagccattcttcgcagtccagtttcatcccgaagtgactccaggtcctattgataccgaatacttgttcgattcgtttttctccctcataaagaaaggtaaagcaactaccatcacctcggtgctgcccaagcctgcccttgtggcatcccgagtggaagtgagtaaggtgctgatccttggttccggagggcttagtattggacaagcaggagaatttgattactccggatcacaagcagtgaaagcaatgaaggaggaaaatgtgaaaacggtgctgatgaatcccaacatcgcatcagtgcagacgaacgaggtgggcctcaagcaagccgatacggtgtacttcctcccaattaccccacagttcgtcaccgaagtgatcaaggcagaacagcctgacggccttatacttggaatgggtgggcaaaccgcccttaattgtggagtcgaattgttcaagagaggagtccttaaggaatacggggtcaaggtcctgggtacctctgtcgaatccatcatggccaccgaggatcgccaactgttttcggataagctgaacgagattaacgaaaagatcgccccttcctttgcggtggagtcgattgaagatgcgcttaaggcagcggataccattggctaccccgtgatgattagaagcgcttacgcacttggtggtcttggatccggtatctgtcccaacagagaaactctgatggatctgtcgaccaaggcattcgcgatgaccaaccaaatactggtggaaaagtcagtgactgggtggaaggaaatagagtacgaagtggtgagggatgcggacgacaactgtgtcacggtgtgtaatatggagaatgtcgacgcgatgggggtccacactggagattccgtggtggtggcaccagcccagactctctctaatgcagaattccagatgctgcggagaacctctattaacgtggtcagacatcttggaattgtgggtgagtgtaacatccagttcgcactgcatccaacctcgatggaatactgtattatcgaagtgaatgcaagactgagccgctcctcggccctggcatcgaaggccactggttacccactcgcgttcattgctgcaaagattgccctcgggatcccactccctgaaatcaaaaacgtggtgtcgggtaagacttcagcatgcttcgagccgtcccttgactacatggtcaccaagattcctagatgggaccttgataggttccatggtactagctcaagaataggttcaagcatgaagtcggtgggggaagtcatggccattggccgaacttttgaagagtcgtttcagaaggcgttgcgaatgtgtcatcctagcatcgaaggttttacccccagacttcccatgaacaaggagtggccatcgaacctcgaccttcggaaggaactgtccgaacctagctcaactaggatttacgccattgcaaaagcgatcgacgacaatatgtcgctggatgaaattgaaaaacttacgtacattgacaagtggtttctttacaagatgcgggatatcctgaacatggaaaaaactctcaagggacttaactcagagagcatgaccgaagagactctcaaaagggccaaggaaatcgggttctccgataagcagatatcgaagtgtcttggcttgacggaagcccagactcgcgaactgcggctcaagaaaaacattcacccctgggtcaagcagattgataccctggccgccgagtacccgtctgtgaccaactatctctacgttacttacaatggtcaggagcatgacgtcaactttgatgaccatggaatgatggtgctgggatgcggaccgtaccacatcggatcaagcgtggagtttgactggtgtgccgtctccagcatccgaactctgcgccagcttggaaagaaaaccgtggtggtgaactgtaacccagaaactgtgtcgactgattttgatgaatgtgataaactttactttgaagaattgagcctggaacgaatcctggacatttaccaccaggaagcatgcggaggctgcatcatttccgtgggtggacagattccaaataacctggcggtcccactctacaagaacggggtcaagatcatgggtactagcccacttcaaattgatagggcagaggacaggtcaatcttttcggcagtgcttgatgaactcaaagttgcacaagcaccttggaaagcagtgaacactcttaacgaagcactggagttcgccaagtcagtcgattacccgtgcctgctgaggccttcatatgtgctttcgggatcggcaatgaacgtggtgttttcggaagatgaaatgaagaagtttcttgaagaggcgactcgggtgtcgcaggaacaccctgtggtgcttacgaagtttgttgaaggagcccgcgaagtcgaaatggacgcagtgggaaaggacggacgcgtcatttcccatgcaatcagcgagcatgtcgaagatgcaggtgtgcactccggagacgcgactctcatgctccctactcagaccatctcacaaggggccatcgaaaaggtgaaggatgccacccggaagattgcaaaggctttcgcaattagcggtccgtttaatgtgcaattcctggtgaaaggaaacgacgtcctggtgatagaatgtaaccttagggcatcgcgctcctttccttttgtcagcaagacccttggggttgactttattgatgtcgcaactaaagtcatgattggagagaatgtcgatgaaaaacatctgcctaccctggaccatcccatcatccctgctgattacgtggcaatcaaggcacctatgttttcctggccgcgtctgcgcgacgcagacccaatactgagatgtgagatggcatccactggagaggtggcctgctttggtgagggaattcacactgcatttctcaaggcgatgctgtcaaccggcttcaagattccacaaaaggggatcctgatcggcatacaacagtcttttcgcccacgctttctgggagtggcagaacaactgcataacgagggtttcaaactttttgcaaccgaagcaacttccgactggttgaatgcaaacaacgtgcctgcaaccccagtggcttggccttcccaggagggtcagaatccatccctttcttcgatccggaaacttatccgggatggcagcattgatctggtgattaaccttcctaacaacaacactaagtttgtgcatgataactacgtgattagacgcactgccgtggatagcgggattcctctgcttactaatttccaagtgaccaaactgtttgccgaggcggtgcaaaaatcccgtaaggtggattccaagagcttgtttcattacaggcaatatagcgcggggaaggccgca

SEQ ID NO: 8054 - DNA, 4500 bp, synthetic construct
  misc_feature 1..4500: note = source = /note="Description of Artificial Sequence: Synthetic coding sequence"
  source 1..4500: mol_type = other DNA
atgacccgcatcctgactgcgttcaaagtcgtgagaacgctgaaaactggcttcggttttactaatgtcaccgctcatcaaaagtggaaattcagccgacctggaattcgattgctgtcggtcaaggctcagactgcacatattgtcttggaggacggtacgaagatgaaaggatactcgtttggtcacccgtcgtctgtggccggcgaagtcgtctttaacactggtcttggggggtacccagaagccattaccgatcctgcctacaaaggccagatcctcacgatggccaacccgattattggaaacgggggtgcaccagacaccaccgccttggacgaacttggactgagcaagtatctcgagtccaatggtataaaggtgtccggactgcttgtgctggattactcgaaggattacaaccactggctcgcaaccaagtcccttggccaatggctgcaggaagagaaggtgcccgcgatttacggagtggatactagaatgctcacgaagattatcagggacaagggtaccatgctggggaaaattgaattcgaggggcagccagttgattttgtggaccccaataagcaaaaccttatcgcagaggtgtctactaaggacgttaaggtgtatggaaaaggtaaccccactaaggttgtcgctgtcgattgtggtattaagaataatgtgatcagactgctcgtgaagcgtggagccgaagtccatctggtgccttggaaccatgactttaccaagatggagtacgatggaattctgatcgcaggaggaccaggcaatcctgcactggcagaacctttgatccaaaatgtgcgtaagatactcgaatcggaccgcaaagaacctcttttcggcatatcaactggtaatctgattactggtcttgcagcaggagcaaagacctataagatgagcatggctaacagaggacaaaaccagcccgtgcttaacataactaacaagcaagcgttcataaccgcacaaaaccacggttatgcgcttgataacactcttcctgccggatggaagcccctttttgtcaatgttaacgaccaaaccaatgagggaatcatgcatgaatctaagccgtttttcgctgtgcaattccatccagaagtcacccctggccctatcgataccgagtacctgtttgatagctttttctcactgataaagaagggcaaggccactaccatcacttcagtgctgccaaagcctgcacttgtggcctcccgagtggaagtctccaaggtgcttatccttggatcgggaggactgtcgatcggacaggcaggagaattcgactactctggatctcaagctgtgaaagccatgaaagaggaaaacgttaagaccgtccttatgaacccgaatatcgcatcagtccaaacgaacgaggtgggactgaaacaggcagataccgtttacttcctgccaattactcctcagtttgttaccgaagtgatcaaggcagagcaacccgacggactgattcttgggatggggggtcagactgcactcaactgtggagtggaacttttcaagcgcggtgttttgaaggaatacggtgtcaaggtgcttggtacttccgtggaatcaataatggccaccgaagatagacaattgttctcagataaactcaacgagattaacgaaaagattgcaccgtcatttgcagtggagtctattgaagatgcactgaaggctgcagacaccatcggttaccctgtgatgattcggtcggcctacgcactcggaggattgggttcgggaatatgtcccaaccgcgaaacccttatggatttgagcacgaaagcatttgcaatgactaaccaaatcctggtcgagaaatctgtcaccggttggaaggaaattgagtatgaagtggtgcgagatgcggatgacaattgcgtcaccgtgtgtaacatggagaatgtggacgcaatgggcgtgcacactggcgattcggtcgtggtggcacctgcacaaaccctctccaacgccgagtttcaaatgctgcgccggacctcgatcaatgtcgtgaggcatctgggaattgtgggcgaatgcaatattcagtttgcacttcatcctacctcgatggagtactgcattattgaggtgaatgcaagactgtcgagatcgtccgcactcgcgtcaaaggcaaccggctaccctctcgcttttatcgcagcaaaaatcgcccttggtattccacttcccgagataaagaatgtggtgtcaggcaaaaccagcgcttgttttgagccttcactggattacatggtgacgaaaattcctcgttgggacctggataggtttcacggaaccagctcccgaatagggagctcgatgaagtcggtgggagaggtgatggcgattggtcgaacctttgaggagagctttcagaaggcacttcggatgtgtcacccgtcgattgaaggattcaccccccggcttcctatgaacaaggagtggccgagcaacctggaccttagaaaagaactgtccgaaccctcctcgactaggatttacgccattgcaaaagcgattgatgacaacatgagcttggacgagatcgaaaagctgacctacattgataagtggtttttgtacaagatgagagatattctgaatatggagaaaacccttaagggccttaactcagaatcaatgactgaagaaactcttaagagagccaaggaaatcggattttcggataagcaaatatcgaaatgtctgggacttactgaggcccagactcgggaactgaggctgaagaaaaacattcatccttgggtgaagcaaattgatactctggccgccgaataccccagcgttaccaattacctgtacgtgacttacaacgggcaggaacatgatgtgaactttgatgaccacggaatgatggtgcttggatgcggaccataccatattgggagcagcgtggagtttgattggtgtgccgtgagctccattaggactcttagacagctgggaaagaaaaccgtggtggtcaattgtaatcctgaaactgtgtcgaccgacttcgatgaatgtgataaactttacttcgaagaactgagcctggaacgcattctcgacatctaccaccaagaagcctgcggtggttgcatcatatccgtgggcgggcagatcccaaacaacctcgcggttcctctttacaagaatggagttaagatcatggggacttcaccgctgcagattgacagagccgaagatcgttctattttctccgcagtgctggatgaactcaaagtcgcacaggcgccgtggaaggcggtgaatacgcttaacgaagcccttgagttcgcaaagtcagtggattacccgtgtctcctccggccctcctacgtgctgtcaggctcagcgatgaacgtggtgttctccgaagatgagatgaagaagtttctggaggaggcaactagagtgtcccaggagcaccctgttgtcctgaccaagttcgtggaaggagcacgggaagtggagatggatgcagtcggaaaagatggacgtgtcatctcacacgccatctcagagcatgtggaagatgcaggtgtccatagcggcgacgcaaccctgatgctcccgacgcagaccatcagccaaggggcaattgaaaaggtcaaagatgccacccgtaaaatcgctaaggcatttgcaatttcgggacctttcaatgtgcagtttcttgtgaaaggaaacgacgtcctggtgattgaatgcaacctgcgtgcctcgcgctcatttccattcgtgtcgaaaacccttggagtcgatttcatcgatgtggcgaccaaggttatgatcggtgaaaacgtggatgaaaagcatctgcctactcttgaccacccgattataccagcagactacgtcgcgatcaaggcacccatgttttcctggccaaggcttcgagacgcagaccctatcctccgatgcgagatggcgtccactggggaggtggcatgttttggcgaggggatacatactgcatttcttaaggcaatgctctcgacgggatttaagattcctcaaaaaggaatccttatcggtatacagcaatcctttagaccaaggttccttggtgtcgcagaacaactgcataacgaaggttttaagctgtttgcaaccgaagcaacctctgattggcttaatgcaaataacgtgccagcgaccccagtcgcgtggccttcacaagaaggacagaatccaagcctgagctcaattcgcaagctgattcgcgacggttccatcgatctggtgatcaatctcccaaacaacaacactaaattcgtgcacgataactacgtcattagacggaccgctgttgatagcggtattccattgctgacgaatttccaagtcacgaaactgtttgcagaagcggtgcagaagagcagaaaggtcgattctaagtcgctcttccattacagacaatactcagccggcaaggccgct

SEQ ID NO: 8055 - DNA, 4500 bp, synthetic construct
  misc_feature 1..4500: note = source = /note="Description of Artificial Sequence: Synthetic coding sequence"
  source 1..4500: mol_type = other DNA
atgacaagaattttaacagcatttaaggtagttagaacattaaagactggatttggttttactaatgttactgcacatcaaaaatggaaattttctagaccaggtattagattattaagtgttaaagcacaaactgcccatattgttttagaagatggaactaaaatgaaaggttattcatttggacatccatcttcagttgcaggagaagttgttttcaatacaggattaggtggatacccagaagctattactgatcctgcttacaagggacaaattttaactatggcaaatccaattattggaaatggaggagctccagatacaactgctctcgatgaactcggactttctaagtaccttgaatcaaatggaattaaagttagtggacttctcgttcttgattattcaaaagattataatcattggcttgcaacaaaatcattaggacaatggcttcaagaagaaaaagttccagcaatttatggagttgacactagaatgttaactaaaattattagagataaaggtacaatgttgggaaaaattgaattcgaaggtcaaccagttgattttgtagatccaaataaacaaaatcttattgccgaggtttctactaaagatgttaaagtctacggaaaaggtaatccaactaaagttgttgctgtcgattgtggtattaaaaataatgtcattagacttttagttaaaagaggagcagaagtacatttagttccatggaatcatgattttacaaaaatggaatatgatggaattttaattgctggagggccaggaaatccagctttagcagaacctttgattcaaaatgttagaaaaattcttgaatctgacagaaaagaaccattatttggtatttcaacaggaaatttaattactggtcttgcagcaggagctaaaacatataaaatgagtatggctaatagagggcaaaatcaaccagttcttaatattacaaataaacaagcttttattactgctcaaaatcatggatatgctttggataatactctaccagcaggatggaaacctttatttgttaatgttaatgaccaaactaatgaaggaataatgcatgaatcaaaaccattctttgctgtacaatttcatccagaagtaactccaggacctatagataccgaatatttatttgattcatttttttctttaattaaaaagggtaaggcaactactattacatcagtattaccaaaaccagcattagttgcttcaagggttgaagtttctaaagttttaattttagggagtggtggactttctataggacaagctggagaatttgattattctggttcacaagctgtaaaagcaatgaaagaagaaaatgttaagactgttttaatgaatccaaatattgcaagtgttcaaacaaacgaagttggattgaagcaagcagatactgtttattttttaccaattactccacaatttgttactgaagttattaaagctgaacaacctgatggtttaattttaggaatgggtggacaaacagcacttaattgtggagttgaattatttaaacgaggtgttcttaaggaatatggagttaaagttcttggaacttctgttgaatctataatggctacagaagatagacaattgttttcagataaattaaatgaaattaatgaaaaaattgcaccaagttttgcagttgagagtattgaagatgctttaaaagctgctgacacaattggatatccagttatgattagaagtgcttatgcattaggtggacttggtagtggaatttgtccaaatagggaaactttaatggatttatcaactaaggcttttgctatgacaaatcaaattctcgttgaaaaatcagttacaggatggaaggaaattgaatatgaagttgttagagatgctgatgataattgtgttacagtgtgcaatatggaaaatgttgatgccatgggagttcatacaggagattcagtagttgttgcaccagcacaaactttaagtaatgcagaattccaaatgttaagaagaacatcaattaatgttgttcgacatttaggaatagtaggtgaatgtaatattcaatttgctttacatccaacatcaatggaatattgtattattgaagttaatgcaagattgtctcgaagttcagctctagcctcaaaagcaacaggatatccacttgcttttattgcagctaagattgctctaggtattccattgcctgaaataaaaaatgttgtttcaggtaaaacttctgcatgctttgaaccttcattagactatatggtaactaaaataccaagatgggatttagatagatttcatggaacatcatctagaattggatcttcaatgaaaagtgttggagaagtaatggctattggtagaacatttgaagaatcttttcaaaaagcacttcgtatgtgtcatccaagtattgaaggttttactccaagattaccaatgaataaagaatggccatcaaatcttgatttaagaaaagaattatcagaaccaagtagtactcgaatttatgctatagctaaagctattgatgataatatgtctcttgacgaaattgagaagcttacatatattgataaatggtttttatataaaatgagagatattttaaatatggaaaagacacttaaaggtttaaattcagaatcaatgactgaagaaactctaaagagagctaaagagattggatttagtgataaacaaatttctaaatgtttaggtttaacagaagctcaaactagagaattacgattaaaaaaaaatattcatccatgggtcaaacaaattgatacattagctgctgaatatccatcagtcacaaattatctttatgttacttataatggtcaagaacatgatgttaatttcgatgatcatggaatgatggttttaggatgtggaccttatcatattggttctagtgttgaatttgattggtgtgctgtttcctcaatacgtacattgcgacaacttggaaagaaaacagtagtagttaattgtaatccagagacagttagtactgatttcgatgaatgtgataaattatattttgaagaattatctttggaaagaattttagacatttatcatcaagaggcatgtggaggatgtataatttctgttggaggacaaataccaaataatctcgctgttccattgtataaaaatggtgttaaaattatgggaacttcaccattgcaaattgacagggcagaagatagatcaatcttttctgccgttctagacgaacttaaagtagcacaagctccatggaaagctgttaatactcttaatgaagcattagaatttgctaaatcagtagattacccatgtctacttagaccatcatatgttttatctggatcagctatgaatgtggttttctctgaagatgaaatgaagaaatttttagaagaagcaacaagagtttctcaagaacatccagtcgttttaacaaaattcgtagaaggagctagagaagtagaaatggatgctgtaggaaaagatggtagagttattagtcatgctataagtgaacatgtagaagatgctggtgtacattcaggagatgcaacattaatgcttcctactcaaactatttctcaaggtgctattgagaaagttaaagatgcaactaggaaaattgcaaaagcttttgctatttctggtcctttcaatgttcaatttttagtaaaaggaaatgatgttcttgttattgaatgtaatttacgagcttcaagatctttcccatttgtttcaaaaacattaggagttgattttattgatgtggctacaaaagtaatgattggtgaaaatgtcgatgaaaaacatcttcctactttagatcatccaattattccagcagattatgttgctattaaagctcctatgttttcttggcctcgtttacgagatgctgaccctattttaagatgtgaaatggctagtacaggagaagttgcatgttttggtgaaggaattcataccgcttttttaaaggctatgctttctactggttttaaaattccacaaaaaggtatattaattggaattcaacaaagttttagaccaagatttttgggagttgcagaacaattacataatgaaggtttcaaactttttgcaactgaagctacaagtgattggcttaacgctaataatgttccagcaaccccagttgcatggccaagtcaagaaggtcaaaatccttcattatcttcaattagaaaattaattagagatggatccattgatcttgttataaatttaccaaataataatacaaagttcgttcatgataattatgttattagaagaacagctgttgattcaggtattccattgttaactaatttccaagttactaaattatttgctgaagcagtacaaaagtcaagaaaagttgatagtaaatctctttttcattatagacaatatagtgctggaaaggcagct

SEQ ID NO: 8056 - DNA, 4500 bp, synthetic construct
  misc_feature 1..4500: note = source = /note="Description of Artificial Sequence: Synthetic coding sequence"
  source 1..4500: mol_type = other DNA
atgacccggatcttgaccgcgttcaaagtggtgagaactctcaagactggttttggatttactaatgtgactgcccaccagaagtggaagttcagcagaccagggatccgacttctgagcgtcaaggctcagactgctcacatcgtgcttgaggacggtaccaagatgaagggctattcgttcggccacccgtcaagtgtcgccggagaagtggtgtttaacacgggactgggaggctacccggaagcaatcaccgacccggcctacaagggccaaatcctgactatggccaatcccattatcggaaacggaggagcgccggatactaccgccttggacgaattgggactgagcaaataccttgaatcaaacggaatcaaagtgtcaggactcctggtgttggattacagcaaggactacaaccattggctggccaccaagagcctgggtcaatggctgcaggaagaaaaagtgccagctatctacggagtggacactagaatgctgactaagatcatccgcgataagggcactatgttgggcaaaatcgagttcgagggccagccggtggattttgtggatccaaacaaacagaacctgatcgcggaggtgtcgaccaaggacgtcaaggtctacggaaagggtaatcccaccaaggtggtggcggtcgattgtggaatcaaaaacaatgtgattagacttctggttaaacggggagcagaggtgcatctggtgccgtggaatcacgacttcactaaaatggagtacgatgggattctgattgccggaggcccgggaaatccggcgctcgcggagccactgattcaaaatgtgcggaaaatcttggaaagcgataggaaagaaccactgttcgggatttcgactggaaacctgattaccggactcgcagcaggagcgaaaacctacaagatgtctatggctaaccgcggccagaatcagccggtcctcaacattaccaataagcaggccttcatcaccgcgcagaaccacggctacgcactcgacaacacgctgccagcgggatggaagcctctgttcgtgaacgtgaatgatcagactaatgaggggatcatgcatgaatcgaagccgtttttcgccgttcaattccatcccgaggttacgcccgggccgatcgacaccgaatacctgtttgacagtttcttctccttgataaagaaaggaaaagccactaccatcacttcggtgttgccgaagcctgccctggtcgctagccgcgtcgaagtcagcaaggtgctcatcctcggcagcggcggactgtcaattgggcaggccggcgaattcgactacagcggatcacaagcagtcaaggccatgaaggaggaaaacgtgaaaactgtgcttatgaaccccaatatcgcctcggtccagacgaatgaggttggactcaagcaggcagatacggtttacttcctgccaataacccctcagtttgtcacggaggtcattaaggcagagcagccagatggactcatccttggaatggggggacagaccgcgctgaattgcggagtggaattgttcaagagaggagtactcaaggagtacggcgtcaaggttttgggaacctcagtggaaagcatcatggcgaccgaggacagacagctcttctcagacaagctgaatgagatcaatgaaaagattgccccgagcttcgccgtggaaagcattgaggacgccctcaaagccgcggacaccatcggataccctgtgatgatccgctccgcctacgccctgggcggcctgggatccggtatctgtcctaatagggaaacgctgatggaccttagcaccaaggcgttcgcaatgactaatcaaatccttgtagaaaagtcggtgaccggatggaaggaaatcgaatacgaagttgtccgggacgcggatgacaactgcgtgaccgtgtgcaatatggagaacgtggacgccatgggagtccacaccggagatagcgtggttgtggcgcctgcccagaccctctccaatgccgagttccagatgctccggcgcacttcgattaatgtggtccggcaccttggcatcgtgggtgaatgtaacatccaattcgcgctccaccccacgtcaatggagtattgcatcattgaagtcaacgcaaggctctctcggtcatccgccctcgcctcaaaagccaccggatacccactcgcattcatcgccgccaagatcgcacttggaatcccccttccggaaatcaagaatgtggtgagcggtaagacttcggcctgcttcgaaccctccctggactatatggtcactaagatcccaagatgggatctcgacagattccatgggacttccagtcggattgggagctcgatgaagagcgtgggggaggtgatggcaattggacgcactttcgaagaatcattccagaaggctctgagaatgtgccacccgtctatcgaagggtttaccccacggctcccgatgaacaaggagtggccaagcaacctcgatctgcgcaaggagctcagcgaaccatcatccacgcgaatatacgcgatcgctaaggccatcgacgataacatgtcgctggacgagatcgaaaaactgacttacatcgataagtggttcctgtacaaaatgcgggatatcctgaacatggaaaaaactctgaaaggactgaacagcgaaagcatgactgaggagactctgaagagggccaaggagatcggattctcggacaagcaaatctcaaagtgccttggattgaccgaagcgcagaccagagaactgcgcctcaaaaagaacatccatccgtgggtcaaacaaatcgacactttggcggccgagtatccatccgtgaccaactatttgtacgtgacttacaacggccaggaacacgatgtgaacttcgatgaccatggtatgatggtgcttggatgcggaccataccacatcggttcttccgtcgaattcgattggtgcgctgtgagctccatccggacccttcgccaacttggaaagaaaaccgtagtggtgaactgcaatccggaaactgtgtccaccgacttcgacgaatgtgacaaactgtacttcgaagaattgtccctggaacgcatcctcgacatttaccaccaggaggcatgtggaggatgcatcatctcagttggtgggcagatacctaacaatctcgccgtcccgctctataagaatggagtgaagatcatgggaacgtcgcccttgcagattgaccgcgccgaggatagatcaatcttctccgccgtgttggacgagctgaaagtggcacaggcgccatggaaggcagtgaacaccctcaatgaggcgctcgagttcgcaaagagcgtggactacccatgcctgctgcgcccatcatacgtgctgtcaggaagcgctatgaacgtggttttcagcgaggatgagatgaagaaattcctggaagaggcaaccagggtgagccaagaacatccggtggtcctgacgaaattcgtggagggggccagagaggtcgaaatggacgcagtgggtaaggatggccgggtgatctctcatgcgatctcggagcatgttgaagatgccggagtccactcaggagacgccaccctcatgctgccgacgcaaactatctcccagggagccatcgagaaggtgaaggatgcgacccggaagattgctaaagcgtttgcaatctcgggaccttttaacgtgcagtttttggtgaagggcaatgacgtgctggtgattgaatgcaacctccgcgcctcgcggtccttcccctttgtgagcaagactttgggggtggacttcatcgacgtggcaaccaaggtgatgattggagagaacgtcgacgaaaagcacctcccgaccctggaccaccctatcattccggcagactacgtggcgatcaaggctccgatgttcagctggcctagactgagggacgcggatccgattctgagatgcgagatggccagcactggcgaagtcgcctgttttggggagggtatccacactgcgtttttgaaggcaatgctctccacgggatttaagatcccccagaaagggatcctgatcggaatccagcagagctttcggccgaggttcctcggcgtggctgaacaactgcacaacgagggcttcaagctgttcgcaaccgaggccacctccgattggctcaacgcgaacaacgtgccagcgactccggtcgcttggccttcgcaggagggccaaaacccgtcgctgagctcgatcagaaagttgattcgggacggctcaatcgacctcgtcatcaacctgccaaacaacaatactaaattcgtgcatgataactacgtgatccgcagaactgctgtggactcgggaatcccgctgcttactaacttccaggttactaagctgttcgccgaagccgtccaaaaatccagaaaagtggacagcaagtcactgtttcattaccgacaatactccgcggggaaagccgca

SEQ ID NO: 8057 - DNA, 4500 bp, synthetic construct
  misc_feature 1..4500: note = source = /note="Description of Artificial Sequence: Synthetic coding sequence"
  source 1..4500: mol_type = other DNA
atgacccggatactcacagcttttaaggtggtgagaactttaaaaacaggatttggtttcacaaacgtgaccgcccaccagaagtggaagttctcccgcccgggcattcggttactgtccgtaaaagctcagacagcccatattgttctggaagacggcacaaaaatgaaggggtactccttcgggcatccctcctccgttgctggcgaggtggttttcaatactggtctggggggctatcctgaagctataacagatccagcttataagggccaaatccttaccatggcaaacccaatcatcgggaacggcggcgccccagacacaaccgccctggacgagctgggtttgtcaaaatatctggagagtaacggcataaaagtttcagggctgctggtgctggactacagtaaggactataatcattggctggctaccaaatccctggggcagtggctccaagaagagaaggtgcctgctatctatggggtggatacacggatgctgactaagataattagagataaaggcacaatgttaggcaaaatcgaatttgagggacagccggtcgattttgtggatcctaacaagcagaacttgatcgcagaggtgagcacaaaggatgtcaaggtttatggaaagggcaatccaactaaggtagttgccgtcgactgcggcattaagaataatgttatccgtctgctggtcaaaaggggtgccgaagttcacttagtgccatggaatcatgatttcaccaagatggagtacgacggcatactcatcgccggaggcccaggtaatcccgcactggctgagcccctgatacagaatgttagaaaaatcctggaaagcgacagaaaggaacccctcttcggcatatccaccggtaatttgatcactggcttagcagccggggccaagacctacaagatgagtatggctaatcgggggcagaaccaaccagttctaaacataaccaataaacaggcctttattacagctcagaaccacggctatgcactcgacaacactctgcctgccggctggaagcccttattcgttaacgtgaatgaccagaccaacgaggggataatgcatgaaagcaaacctttttttgccgttcagtttcaccccgaggtgacacctgggccaatagacactgaatatctttttgactcttttttttctctcatcaagaaaggaaaagcaactaccataaccagtgtcctgccaaaacccgctttagttgcctccagggtggaagtgagcaaggttttaattttagggtcaggcggcctttccatcggccaggcaggcgagttcgactacagtggtagtcaagccgtcaaggccatgaaggaagagaatgttaaaaccgtgctgatgaatccaaacatcgcaagcgttcagaccaacgaggtggggctcaagcaggcagatacagtgtattttctgccaatcaccccacagttcgtgaccgaggtgatcaaggccgagcagcccgatgggctgattctgggcatgggggggcagaccgctttgaactgcggtgttgagctgttcaaacgcggggtcctgaaggagtatggggtgaaggtgctgggcacctctgttgagtccattatggcaacagaagaccgccagctattctctgataagcttaacgaaattaacgaaaaaattgctccctctttcgcagttgagtctatagaagacgctctgaaagcagcagataccatcggatatccagttatgatcagaagtgcttatgctctgggcggtctcgggtccggtatctgcccaaatagagagactctgatggacctttccaccaaggccttcgccatgacaaatcaaatcctggtggaaaagtccgtcaccgggtggaaagagattgagtacgaggtggtgagagacgctgacgataactgcgtgactgtgtgtaatatggagaatgttgacgctatgggcgtgcacacaggggacagcgtggtggtcgcccccgcccaaacactgagtaatgctgagtttcaaatgttacgaaggacttcaataaacgttgtgcgccatctggggatcgtgggggagtgcaatatccagttcgcccttcaccccacctcaatggaatattgtatcattgaagtcaatgctcgactgtctcggtccagtgcactggccagtaaggccaccggatatccactcgcatttatcgctgctaagatcgccttagggatacccctgcccgaaatcaagaacgttgtcagcgggaagacaagcgcctgctttgagccatctctggactatatggtgaccaagataccccgctgggatctcgaccgcttccatgggaccagcagtaggatcggctcctcaatgaagagtgttggggaggtgatggcaatcggccgcacatttgaggagtcctttcagaaggccctcagaatgtgccacccaagcatagagggctttactcctcgcttgcccatgaacaaggagtggccctcaaacctggatttacgcaaagaactaagcgagccaagcagcacaaggatctatgctattgctaaagctatcgatgataacatgagccttgacgagatagagaaactgacctacattgacaagtggttcctgtacaaaatgcgggacatcttaaacatggagaagaccctaaagggtctaaactcagaaagcatgaccgaagagacactgaagcgagccaaggaaataggcttctctgacaagcagatttccaagtgtctcggactcacagaggcccaaacaagagagctgcgtctgaaaaaaaatatacatccctgggtgaagcagatcgatacactggccgcagaataccctagcgtgacaaactacctctacgttacctataacggtcaggaacatgatgtgaatttcgacgaccacgggatgatggtgctgggttgtggcccttatcatatcggctctagcgtggaatttgattggtgtgccgtgtcttccattcggaccctccgccaactcggaaagaaaaccgtcgtggttaattgcaacccagagacagtcagtacagactttgatgagtgtgacaaactgtacttcgaggagttatctttagagaggatcctggacatctatcaccaagaagcatgtggagggtgcattatcagtgtgggcgggcagatccccaataatttggccgtgccactgtacaagaatggggtgaagattatgggaacaagcccactgcaaatcgatagggctgaggatagaagcatttttagtgccgtgctggatgagctgaaagtggcccaggccccatggaaagctgtgaatacccttaacgaagctttagaattcgccaagagtgtggactacccatgcctgttaaggccatcttatgtcctctcaggttctgccatgaacgtggtcttctccgaggacgagatgaagaagttcctggaggaggccacccgtgtgagtcaggaacaccccgtcgtgctaaccaaattcgtggaaggggctcgcgaagtagagatggacgccgttggaaaggatggccgagtgatatctcacgccatcagcgaacacgtggaggatgccggggtgcattccggcgacgccacactcatgctccctacccagacaataagtcagggcgccatcgagaaggtgaaagatgctacacggaagatcgcaaaggcttttgctatctctggaccattcaatgtccaatttctggtgaaggggaacgatgtgctcgttattgagtgcaacttacgggccagcaggtcctttccatttgtcagcaagacactgggggtggactttatagacgttgcaaccaaggtgatgattggcgaaaatgtcgacgagaaacatctcccgaccctggaccatccaatcatacccgcagattatgtggccataaaagctcctatgttctcttggccacgcctgagagacgctgaccctatattgcggtgtgagatggcatctacaggggaggtggcatgttttggggagggcatccataccgctttcctaaaagctatgctgagcaccggcttcaaaatcccccagaagggaattctgattgggatacagcagtccttccgtcccagattcctgggcgttgccgaacaactgcacaatgagggatttaaactgtttgccacagaggcaacatctgactggctgaatgctaataatgtgcccgccacccctgtggcatggccttctcaagagggccagaatccttccttatctagcataaggaaacttattcgtgacggctcaattgatctggtgattaatctacccaacaataatacaaaatttgtccacgataattatgttatcagacggacagcagtggattctgggattcctctgttaaccaatttccaggtgactaagctttttgccgaggcagttcagaaaagtcgtaaggtggactccaaaagcctatttcactatcgacagtatagcgctgggaaggccgcc

SEQ ID NO: 8058 - DNA, 4500 bp, synthetic construct
  misc_feature 1..4500: note = source = /note="Description of Artificial Sequence: Synthetic coding sequence"
  source 1..4500: mol_type = other DNA
atgactcgcatccttaccgcattcaaggtggtgcgtacgctcaagaccggattcggattcactaacgtcactgcgcatcaaaagtggaagttctcaaggcctggcattcggttactgtccgtcaaagcccagacggcacatatcgttctcgaagatgggactaaaatgaaaggctactcttttggacacccatcctctgtagccggggaagttgtcttcaacactgggctgggaggatatccggaagccatcactgaccccgcctacaaaggtcagatactcaccatggcaaatccaataatcggaaacggaggcgctcccgacacgacagccctggacgaattagggctgagcaaatacctggaaagcaacggcataaaagtcagcggcctgcttgttctggactactcaaaggattataatcattggcttgcgactaagagcctgggtcagtggctgcaggaagaaaaagtacccgccatttacggggtggacacacgcatgctgaccaagatcattcgagataagggtacaatgttaggtaaaatcgaattcgagggacagcccgtggacttcgtggatccaaacaagcaaaacctgattgctgaggtttctactaaggatgtaaaggtctacggaaagggtaacccaacaaaggtcgtcgccgtagactgtgggatcaagaataatgtgatcaggttattggtgaagcggggggctgaggtacacctggtaccttggaaccatgatttcacaaaaatggaatacgatggaatcctgatagccggcgggcctggtaatccagccctcgcagagccgttgatacagaatgtacgcaagatcctggaaagtgaccgcaaggagcccctatttgggataagcactggcaatcttatcacaggacttgccgctggggcaaaaacatacaaaatgtcgatggcgaataggggccaaaaccagcccgtgctgaacattaccaacaaacaggcttttattaccgcccagaatcacggatacgcactcgacaacacactgccagccggttggaaacctctgttcgtcaacgtcaatgaccagacaaacgagggcattatgcatgaatcgaagccatttttcgccgttcagtttcaccccgaggtcaccccgggccctattgacaccgaatacttgttcgacagctttttctcactcattaagaagggtaaggcaaccaccattaccagcgttttgcccaagcccgcgctggtggcttcccgggtggaggttagcaaagtactgattcttggatctgggggtctgagtattggacaggctggtgagttcgattatagcggaagtcaagcagttaaagctatgaaagaggaaaatgtgaagactgttctgatgaatccaaatattgcatccgttcagaccaatgaggtgggcctgaagcaggccgacactgtctatttcctccctattactccccagttcgtgactgaagtaattaaggctgagcaaccagatggactgatcctgggaatgggcgggcagaccgctcttaactgcggcgtggagctgttcaagcggggagtgttaaaggagtatggcgtgaaagtcttggggacctctgtcgagagtataatggccactgaggacagacagctgttttccgacaagctcaacgagattaatgaaaaaatcgctccatcctttgcagtcgaatccatcgaggatgcccttaaggccgctgacaccatcggctaccctgtcatgattaggagcgcttacgccctcggagggctcggcagcggcatatgtccaaacagggaaactctgatggacttgtctaccaaagcattcgccatgaccaaccagatactggtggagaagagtgttaccggttggaaagaaatcgagtacgaggtggtgagggatgccgatgacaactgcgttacagtgtgcaatatggagaacgttgacgctatgggtgtgcatacaggggattccgtcgtggttgcccccgctcagacactctccaatgccgagttccaaatgttacgcagaacctccataaacgtagttagacacctgggaatcgtgggcgagtgcaatatccagttcgcgctgcaccccacgagtatggagtattgcattatagaagtcaacgcccgcctgtctcgatcctcagcgctggcttccaaggcgactggctatcctttagccttcatcgcagctaaaatcgccctcgggatacccctgccggagataaagaacgtggtgtcaggtaagaccagcgcgtgcttcgagccgtcattagattatatggtcactaagatccctcgatgggacctcgatagatttcacgggacttcctccaggattggatcatcaatgaagtccgtgggcgaagtgatggcgatcggcaggacattcgaggagtcatttcagaaagcactgagaatgtgtcatccaagcattgaaggcttcacaccaaggcttccaatgaataaagagtggccaagcaaccttgatcttcggaaagagctgagcgagcccagctccaccaggatttacgccatagctaaggccatcgatgataatatgtccctcgatgaaattgagaagctcacatacatagataaatggtttttgtacaaaatgcgagacatccttaacatggaaaaaactctgaagggtttgaacagcgagtccatgacagaggagactcttaaacgagccaaagagatagggttctcagacaaacaaataagcaaatgcctggggctaacggaagcccagacacgcgagctccgtctgaaaaagaatatccatccctgggtgaaacaaatcgacaccctggccgctgagtacccctccgtgactaattacctctacgtgacctataacggccaggagcacgacgtcaattttgatgatcatggtatgatggtgctcggatgtggcccttaccacataggcagtagcgtcgaatttgattggtgtgcagtgtcatcaatcaggactcttagacaactgggaaaaaagactgtcgtcgtaaattgcaaccctgagactgtcagtaccgatttcgacgaatgcgacaagctgtacttcgaggagctgtcattagagcgcattcttgatatctatcatcaggaggcttgtgggggctgcatcattagcgttggcgggcagatcccgaataacctggccgtcccactctataagaacggagtaaaaatcatgggcaccagccctctccagatcgaccgtgcagaggatagatcgatattctctgcggtgctggatgagctgaaggtggctcaggccccatggaaggccgtgaacaccctgaatgaggctctggagttcgccaagtctgtggactacccatgtttgttacggcctagctacgttttgtctgggtcagctatgaacgtagtcttttccgaagatgaaatgaagaagttcctggaagaggctactcgagttagtcaggaacatccagtcgtccttacaaaattcgtagagggtgcccgggaggtcgaaatggacgctgttggaaaggatggtcgcgtcatctcacacgccatctcggagcacgtggaggatgctggggttcattccggggacgctacacttatgctgcccacacagaccatctctcagggagctatcgaaaaggttaaggatgcaacccgcaaaattgcgaaggcatttgcaatttcaggcccgtttaacgtacagttcctggtgaaggggaatgatgtgctggtgatcgaatgtaatctgagggcatcacggagcttcccttttgtctctaagactctcggcgtagacttcattgatgtggccacaaaggtgatgatcggggagaatgtggatgaaaagcacctgcctacgttggatcatccaatcatccctgccgactatgtagctatcaaagcacccatgttttcctggcctcggctccgggatgctgatcctattctgcgctgcgagatggcatccacgggagaagtcgcttgtttcggtgagggaatacatactgctttcctcaaagctatgttgagcactggcttcaagattcctcagaaaggcatcctcatcggaatccagcagagttttcgcccacggttcctgggtgtggccgaacagctccataatgaggggttcaaactgttcgcgactgaagccacgagcgattggctcaacgccaataacgtgcccgctacccctgtggcatggccctcacaggagggccaaaatcctagtctctcttctatccgcaagctcatccgggacggaagtatcgacctcgtcatcaatcttcctaacaataataccaaattcgttcacgacaactacgtgatcaggagaaccgctgttgattcaggaatccctctcctcacgaactttcaggtcacaaaactgttcgctgaggctgtgcagaaatcacgcaaggtggattcaaagtcactgttccactataggcagtactcagccggcaaagctgcg

SEQ ID NO: 8059 - DNA, 4500 bp, synthetic construct
  misc_feature 1..4500: note = source = /note="Description of Artificial Sequence: Synthetic coding sequence"
  source 1..4500: mol_type = other DNA
atgacccgtatacttaccgctttcaaagtcgtgcgcactctgaaaactggtttcggctttaccaacgtgaccgcacatcagaagtggaagttcagcagaccaggtatacgcctgctttccgtgaaggcgcagaccgcacatattgtacttgaagatgggactaagatgaagggatattcttttggacatccgagctccgtggcaggggaggttgtgttcaatactggcctcggaggataccccgaggcgatcactgacccagcatacaagggacagattctcactatggccaatccaatcattggcaacggaggtgctccggatactactgccttggacgaacttggtctttcgaaatacttggagtcgaatggaataaaggtgtcaggactgctcgtgctcgattactcaaaagattacaaccattggttggcaaccaagtccttgggacagtggctgcaagaagagaaggtccctgcaatttacggcgtcgatactcgcatgttgactaagattattcgcgacaaaggtaccatgctgggaaagatcgagtttgaagggcagcctgttgactttgtggatcctaataagcaaaatctgattgcagaagtgtcgaccaaggacgttaaagtctacggaaagggaaaccctactaaggtggtcgctgtcgattgcggcatcaaaaacaatgtgatcaggctcctggtgaaaaggggggcggaagtgcatctggtcccatggaaccacgattttaccaaaatggagtacgacggtattctcatagcaggaggacccgggaaccctgccctggcggagccacttattcaaaacgtccgcaagattcttgaaagtgaccgaaaggagccactctttggaattagcaccggaaatctgattactgggctcgcagcaggcgcaaagacttacaagatgagcatggcaaacagaggccaaaaccaaccggtgcttaacatcacgaataaacaggccttcattactgcgcagaaccatggttacgccctcgacaacactcttcccgcaggttggaagccactttttgtgaatgtcaacgaccaaaccaacgaaggtattatgcatgagagcaaaccctttttcgctgtccaatttcatccggaagtgactccaggccccatcgacactgaatacctgttcgacagtttcttttcgctgatcaaaaagggtaaggcaaccacgattacctcagtactgccgaaaccggcccttgtcgcatcccgggtggaagtatcgaaggtgctgattctcggatcaggcgggctcagcattggacaagcaggagaattcgattattctggatcgcaggcagtgaaggcaatgaaggaagaaaacgtcaaaactgtgttgatgaaccctaacatcgcttccgtccaaaccaatgaagtcggcctcaagcaggcagatactgtctactttcttcccatcaccccccagtttgtgaccgaagtgattaaagcagagcaacctgatggactcatcctgggtatggggggccaaaccgcgttgaattgcggcgtcgaattgtttaagcgcggggtccttaaggaatacggagtgaaggttcttggaacctccgtagaatcgattatggccaccgaagatcggcagcttttttcggataaacttaatgagataaacgaaaagattgcacctagcttcgctgtggagagcattgaagatgcactgaaggcagccgacaccatcggataccccgtgatgattcgttctgcctacgcacttggcgggctcggtagcggcatttgtcctaaccgcgagacgctgatggatctgtcgactaaggcctttgctatgactaaccaaatactcgtcgagaagtcggtcacgggttggaaggaaatcgagtacgaagtggtgagagatgcagacgataattgtgtgaccgtgtgtaacatggaaaacgtggatgccatgggtgtgcatactggagatagcgtggtggtggcgcctgcacagaccttgtcgaatgcagagtttcaaatgctgcggagaacttccataaatgtcgtgcgtcatctgggtatagtgggagaatgtaacattcaatttgcgctgcatcctacttccatggaatattgcattattgaggtgaatgcaaggctttccagatcctccgcccttgcctctaaagcaaccgggtacccgctggcattcattgcagccaagattgcacttggtatcccactgcctgaaatcaagaacgtggtcagcgggaaaacgagcgcgtgttttgaaccctcattggattacatggtcactaagattccaaggtgggacctggaccggttccatggcacttcctcgagaataggcagcagcatgaagtcagtgggcgaagtgatggcaattggaagaacttttgaagagagcttccaaaaggcacttcggatgtgtcaccctagcatcgagggctttaccccccgacttcctatgaacaaggaatggccatccaatttggatctccggaaggaactgagcgaaccttcatcaacccgcatatacgccattgccaaggctatcgatgataacatgtcgttggacgaaatcgaaaagctgacttacattgataaatggtttctgtacaagatgagagacattttgaacatggaaaagactcttaagggtctgaactcggagagtatgaccgaagaaacccttaagcgagcaaaggagattggtttttccgacaaacagattagcaaatgtctgggactgaccgaagcacaaacccgtgagcttcgacttaagaagaatattcatccgtgggtgaaacaaattgatacgctcgccgcagaatacccctcagtgaccaattacctgtacgtgacttacaatggacaggagcacgacgtgaacttcgacgatcatggaatgatggtgctgggatgcggaccataccacatcggaagttcggtggaatttgactggtgcgcagtctcatccattcgtacccttcgccagctgggaaagaaaactgtcgtggtgaactgcaatccagaaacggtttcgactgattttgatgaatgtgataaactgtactttgaagaacttagcctggagcgcatcctcgatatctatcatcaggaagcatgtggaggttgtatcatatcagtggggggtcaaattccaaacaatctggcagtcccattgtacaagaacggagttaagataatgggcacctcacctctccaaattgatcgagccgaggataggtccatctttagcgcagtgttggacgagctgaaagtggcacaggcgccttggaaggcggtgaacactctcaacgaggcactggagttcgctaagtccgtggattacccatgtctcctccgcccatcatacgtcctttcgggaagcgcaatgaacgtggtgttctcggaggacgagatgaaaaagtttctggaagaagcaactagagtgtcccaggaacatccagtcgtgcttaccaagttcgtggaaggggcaagagaagtggagatggatgcggtcggtaaagatggaagagtcatcagccacgccatcagtgaacacgtcgaagatgcaggagtccactccggtgacgccaccctcatgcttccgacgcagaccataagccagggggcaattgagaaagtgaaggacgcgacccgaaagattgcaaaggccttcgccatctccgggccttttaacgtgcaattccttgtgaagggcaacgatgtgctggtcatcgaatgtaaccttagagcgtcgcggtccttccctttcgtgtccaagacgcttggtgtggactttatcgacgttgccactaaggttatgatcggagaaaatgtcgatgaaaagcacctgcctaccttggatcatccaattatcccagctgactacgtggccattaaggcacctatgttctcatggcctcgacttagagatgcagatccaatcctgcggtgcgaaatggcatctacgggtgaagtggcttgctttggtgaaggaatccacaccgctttcctgaaggcgatgctttcaaccgggtttaagattccacaaaaaggtatcctgatcggaattcagcaatcatttcgccctcgctttctgggcgtggccgagcaacttcataatgaaggttttaagctctttgctaccgaggcgacctcggactggcttaatgctaacaatgtcccggccacccctgttgcttggccttcgcaagagggccagaaccccagtctgtcctcaattagaaaactcattagggatggatcgatagatctggttatcaaccttcccaacaataacactaagtttgttcacgacaactacgtgatcagaagaactgcagtagattccggtatacctctgcttactaacttccaagtcacgaaactgtttgctgaggcagtgcaaaagtcgcggaaagtggattccaagtcgctcttccactaccgtcagtattcagcaggcaaggcagcc

SEQ ID NO: 8060 - DNA, 4500 bp, synthetic construct
  misc_feature 1..4500: note = source = /note="Description of Artificial Sequence: Synthetic coding sequence"
  source 1..4500: mol_type = other DNA
atgaccagaatcctgaccgccttcaaggtggtgcgcactctcaagaccgggttcggattcacaaatgtcacggcccaccagaagtggaaatttagcaggcccggaatccggctgctttccgtaaaggcacaaaccgctcacattgtattggaggacggcacaaaaatgaaaggctattcattcgggcacccttcctctgtggcaggcgaggttgttttcaatactggactgggtggttatccagaggcgatcactgacccagcatacaagggccagattttgaccatggcaaaccccatcatcgggaacggcggcgcaccggacactacagcactcgacgagcttggcctgtccaaatatctagaatctaacggcatcaaagtctctggcctgcttgtgcttgattactccaaggactataaccactggcttgctactaaatccctcggacaatggttgcaggaggagaaggtgcccgcaatctacggtgttgatactcgcatgctcacgaagattatacgggacaagggcacaatgctcggtaaaatcgaatttgaagggcagcctgtagactttgttgatcccaataaacagaatctcatcgccgaagtgtccactaaagacgtcaaggtctatggaaaaggaaacccgacgaaagtcgtggccgtcgattgcgggataaaaaacaatgtcatccggctgctcgtgaaaaggggtgctgaagtccatctcgtgccttggaatcacgattttacaaagatggaatacgacggaatcctgatcgcgggaggccctggcaacccagctctagcggagccactgattcagaacgttcgcaaaattctggagtcagataggaaggagcctctgttcggcatctccaccggtaacctgatcactggactggcagccggggccaagacctataagatgagtatggcgaatcggggtcaaaatcagccggtgctcaatataaccaacaagcaggcatttatcacagcgcagaatcatggctatgcactggacaacacgttaccagcgggttggaaaccactcttcgtcaatgtgaatgatcagacaaacgaaggaattatgcacgaaagtaaacctttcttcgcggttcagttccacccggaagtaacccctgggcctatcgatacagaatacctctttgacagtttcttttcgctcattaagaagggcaaggctaccactatcacctccgtgcttcccaaacccgctttggtcgctagtcgcgtggaggtgagcaaagttctgattctgggctccggagggctatcgatcggtcaggctggcgagttcgactacagcggctctcaagcagtcaaagcgatgaaggaggaaaacgttaagacagtgctgatgaacccgaacatagccagcgtgcaaactaacgaagtgggactcaagcaggccgacactgtctactttctgccaattaccccccaatttgtgactgaggtaattaaagctgagcaacctgatggcctgatactcggcatgggaggtcagactgccctcaactgcggagtggagctgttcaagagaggcgtgctcaaggaatacggtgtcaaagtgcttggcacttctgtcgaatctattatggccactgaggacagacagctcttctcagacaaattaaatgagattaatgagaagattgcaccctcgtttgccgtggaaagcattgaggacgcactgaaagccgctgacactattggatacccagtgatgattaggtctgcctacgccctggggggtctcggcagtgggatttgcccaaatcgcgagacgttgatggacctgagcaccaaggccttcgcgatgactaatcagatactcgttgagaaaagtgtgacgggatggaaagaaattgagtatgaggtcgttagagacgctgacgataattgtgttactgtctgtaacatggaaaacgtcgacgcaatgggcgtccacacaggggattcggttgtggtggcccccgctcagacgctctctaatgcagaattccagatgctgaggagaacctctattaatgtggtacggcaccttggaatagtcggggaatgtaacattcaatttgccctgcaccctacatcaatggaatactgcatcatcgaagtgaacgccaggttgagccggtccagcgctctggccagcaaggcaactggatacccccttgcattcattgccgccaaaatcgctcttggcatccccctgccagagattaaaaacgtggtgagtggtaaaaccagcgcatgtttcgagcccagtttggactatatggtgactaaaatcccgcgatgggacctagacaggtttcatggcacatcctctcgcattggcagttccatgaagtctgtgggcgaagtaatggccattggcagaacattcgaagagagctttcaaaaagcattgcggatgtgccaccccagtatagaagggttcaccccaaggcttccaatgaacaaggagtggcctagcaacctggacctgagaaaggaactgtccgaaccgtcatcaacacgaatttacgcaatcgctaaagcaattgacgataacatgtctctcgacgagatcgagaaattgacctacatcgacaagtggttcctctataagatgcgggacattttgaatatggaaaaaactcttaaaggactgaattcagagagcatgacggaagaaactctgaagagagccaaggaaattggttttagcgacaagcagatttccaaatgcctcggattgacagaggcccagactcgcgagcttcggctcaagaagaacattcatccttgggtcaaacagatagacactctggccgccgaatacccaagtgtcacgaattatttgtatgtgacatacaatgggcaagaacacgacgtgaacttcgatgaccatggtatgatggttttgggatgtggcccataccatatcggcagctctgtagagtttgattggtgcgcagtgtcctctatccgcactttgcgccaactcggtaagaagacagtggtggtcaattgtaatccggaaacggtatctaccgacttcgatgagtgcgataaactttatttcgaggagctgtcactcgagaggattttggatatctatcaccaagaggcgtgcggagggtgtatcatatctgtgggtggtcaaatccctaacaacttggcggtgcccttgtataaaaacggtgtcaagattatgggcacaagcccactgcaaatcgaccgggccgaggaccgctctatttttagcgccgtgctggatgagctcaaggttgcgcaggccccctggaaggccgtgaatacactaaacgaagcactagagtttgcaaagtccgtggattatccttgcctgctgaggccctcatatgtcctctctggcagcgcgatgaatgttgtgttttcagaagatgagatgaaaaagttcctggaagaagcaactagagtgagccaggagcaccccgtggtcctaaccaaattcgtcgagggcgccagggaagtcgagatggatgccgtggggaaggacggacgcgtgatctcacacgcgatttccgagcacgtggaagatgctggtgtgcactctggggatgctacactgatgcttcccacacagaccatatcccagggagccattgaaaaggtgaaggatgcgacgcgaaagatcgccaaagcattcgccattagcggccctttcaacgtccagttcctggtgaagggcaacgacgtccttgtaatcgagtgtaatctgagagcctcccgtagtttcccgtttgtttcaaaaactctgggagtcgatttcattgacgtggcaacaaaagtgatgattggtgaaaatgtagatgagaaacaccttcccactttagatcaccccatcatcccggccgactacgtggctatcaaggcacctatgtttagctggccgagactacgagacgcagatccaattctccggtgtgagatggcatccacgggtgaagttgcatgcttcggcgaagggattcacactgcctttctcaaagcgatgttgtccactggcttcaagatccctcaaaagggcatattgattggcatccagcagagctttcggccccggtttctgggagtggctgagcagctgcataacgagggcttcaagctattcgccacggaggcaacctcagattggcttaacgcaaacaatgtcccggccacacccgtggcttggcccagtcaagaagggcagaacccgtccttgagttcaattcgcaaactgatccgggacgggagcattgacctcgtgatcaatttgcctaacaacaataccaagtttgtgcatgacaactacgttattagacggacagcagtggacagcggaatacctctgctaacgaacttccaggtgacgaagctgttcgctgaggcagtgcagaaaagccgcaaggttgattccaagtccttattccattaccggcagtactccgccgggaaagccgca

SEQ ID NO: 8061 - DNA, 4500 bp, synthetic construct
  misc_feature 1..4500: note = source = /note="Description of Artificial Sequence: Synthetic coding sequence"
  source 1..4500: mol_type = other DNA
atgacgcgtatcctgactgcatttaaagtagtgcgcacgctgaaaaccggcttcggttttactaacgtcactgcccaccagaagtggaagttctcccggccgggcattcgcctcctgtcggtaaaggcccagacggcacacatagttttggaagacggtacgaagatgaagggttattcgttcgggcacccgtcaagcgtggccggagaagttgttttcaacaccggattgggaggatacccggaggctatcaccgaccctgcttacaaaggccagatcttaactatggctaatccaatcatcggcaacggaggcgcacctgataccaccgctctagatgaattagggcttagtaagtatctcgagtcgaacgggataaaggtgagcggacttctcgtgttagattacagcaaagattataatcattggcttgcgacaaagtccttgggtcaatggcttcaggaagagaaggttccggcaatctatggggtcgacacccgcatgcttaccaagatcattcgtgacaaggggaccatgttaggaaaaatcgagtttgaggggcagccggtggattttgttgatccgaacaagcagaatctcatcgctgaagtctctaccaaggacgttaaggtttatggcaagggaaaccccaccaaagtggtagcagttgattgtggaatcaagaacaacgtcattcgtttgctagtcaaacgcggcgccgaagtgcacctggtcccctggaaccatgactttactaaaatggaatacgacggcattttgattgccggcgggccgggaaatccagcattggcggagcctctgattcaaaacgttcgcaagatcctggagagcgatcgaaaggagccattgtttggtattagcacgggcaatctgatcacaggcttggccgctggcgctaaaacctataagatgtcgatggcaaaccgaggtcagaatcagcccgttctgaacataactaacaagcaagcttttatcacagcccagaaccatggatacgctctagacaacacgttgccagcagggtggaagcctcttttcgtcaacgttaatgatcagacaaacgaaggtatcatgcatgagtccaagcccttcttcgccgtccagttccatccagaagttacccctggccccatcgataccgaatatctcttcgacagcttttttagtctgattaagaagggtaaggcgacgacaattacttcggtcctgcccaaacccgccctggtggccagtcgcgtagaggtctctaaggtcttgatcttgggcagtgggggactctcaatcgggcaggcgggtgaattcgattacagtggctcccaagcggtcaaagcgatgaaggaggaaaacgtgaagaccgttctaatgaatccgaacatcgcatctgttcagaccaacgaagttggtctaaagcaggcagatactgtgtatttcctacccattaccccgcaatttgtcacggaggttattaaggctgagcaacccgatggtctcatcctgggaatggggggacagactgctcttaattgcggagtggagttgtttaagcggggtgtgctcaaagaatacggagtcaaagtcctcggtactagtgtcgagtccatcatggccacagaggatcgccagttgtttagcgacaagctgaatgagatcaatgagaagatcgccccttcgtttgccgtggagtcgattgaggacgctctcaaagccgcggacacgattggttatcccgtcatgattcggtccgcgtacgcactcggcggcttgggcagtgggatctgtcctaatcgagaaactctcatggacctgtccactaaggccttcgcgatgaccaaccagatcttggtcgagaaaagtgtaacaggttggaaggaaatcgagtatgaggtggtgcgggatgcagacgacaattgcgttacagtttgtaatatggagaacgttgacgctatgggggtccatactggtgattcggttgtagtagcccctgcccaaaccctgtccaacgcagaattccagatgctgcgccgaactagcattaatgtggtccgccacttaggcatagtcggcgaatgtaatatccagtttgctttgcacccgaccagcatggaatattgcatcatagaggttaatgcaagactttctcggtctagcgcattggcctcgaaggccaccggctacccactcgcttttattgccgccaaaatagcgctgggaatcccactccccgagatcaaaaacgtcgtttcgggaaagacaagtgcatgcttcgagccttcccttgactacatggtgacaaagatacctcgctgggatctcgatcgattccatggtacgtcgtcacgcatcgggagttccatgaaatcggttggggaggtgatggccatcggcaggacattcgaggaatccttccaaaaggcgctccggatgtgccacccctcaatcgagggattcacgcctcgactccccatgaacaaagaatggccatcaaatttggatctcagaaaggagctctcggaaccctcgtccacacgcatctacgctatcgccaaggctattgacgataacatgagccttgatgagatcgaaaagctgacctatatcgacaagtggttcctatacaaaatgcgcgatatcctcaatatggaaaaaactctcaaggggctgaattcggagtcgatgacggaggaaactctgaagcgcgctaaggagataggattcagcgacaaacagatttcaaaatgcctcggtctaactgaggcacagacacgcgagttgcgtttgaaaaagaacatccacccttgggtcaaacaaatcgatacactcgcggctgagtacccgtcggtcacaaattatttgtatgtgacgtacaatggccaggaacacgatgttaatttcgacgaccacggtatgatggtcttgggttgtggtccgtaccacatcggctctagtgttgaattcgactggtgcgctgtgtcgtccattcgcacactgcgccagctggggaaaaagacagttgtcgtcaattgtaatccggagaccgtgagtaccgatttcgacgagtgtgataagttatacttcgaggaactgagcttagaaaggatcttggacatttaccatcaggaggcctgtggagggtgtataatctctgttggaggccagattccaaacaacctggccgtccctctatataagaatggggtcaagataatgggcacttccccactgcagatcgatcgcgctgaggatagaagtatttttagcgcggtccttgatgaactaaaggtagcacaggcgccatggaaggcagttaatacactgaatgaggctctggaattcgccaaaagcgtggattatccatgcttgctccgcccgagttacgttctgtcagggtctgcaatgaatgtagtattctcagaagacgagatgaagaagttcttggaggaagcgactcgggtttcacaggagcacccggttgtccttactaagttcgtggagggggcccgtgaggttgaaatggacgcagtcgggaaagatggccgcgttatttcccatgccatctctgaacatgtggaggacgcaggagttcactcgggcgatgccaccctaatgctgccaacacagacaattagccagggggccatagaaaaagttaaggatgcgaccaggaaaattgcgaaggcctttgctatttcgggtccgttcaacgtacagttcctggtcaagggcaatgatgtgctggtaatcgaatgcaacctgcgagcttcccgttctttcccattcgtctcgaaaaccctgggggttgatttcatcgacgtggcgactaaagtgatgatcggtgagaacgttgatgagaaacatttgccaacgctagatcacccgataattcctgccgattatgtagccatcaaagcgcccatgttttcatggcctcggctgagagatgcagatccgatcctgcggtgcgagatggcctccacaggggaagttgcctgctttggggaagggattcatacagcttttctgaaggcgatgttgagcacgggatttaagatccctcaaaagggaattctgattggcattcaacagtcgtttagaccccgtttcttgggtgtagcagaacagttacacaacgaaggcttcaagcttttcgcaaccgaagccacctcggattggctcaatgctaacaatgtccccgccactcctgtcgcctggccctcacaggaggggcagaacccatcgttgtcttctatccgcaagttgatccgtgacgggtcaatagatttggttatcaacttgccgaacaacaacaccaaattcgttcatgacaactatgtaattcgtagaaccgcggtggactcaggcatcccgcttttgaccaacttccaggtcacaaagctatttgccgaggctgttcagaaatcgcgcaaagtagacagtaaaagcctctttcattatagacagtattcagccggtaaggctgca

SEQ ID NO: 8062 - DNA, 4500 bp, synthetic construct
  misc_feature 1..4500: note = source = /note="Description of Artificial Sequence: Synthetic coding sequence"
  source 1..4500: mol_type = other DNA
atgactcgaatcctcactgcttttaaggtcgtgagaacgctcaaaacaggttttggattcacgaatgtcaccgcccaccaaaagtggaagttctcgcgtccaggcatccgcctgctgagtgtaaaggcacaaaccgctcacatagtgcttgaggacggcaccaagatgaaggggtactctttcggacacccatcatccgtagcgggggaggtcgtctttaacaccggcttgggtggctatccagaggccatcaccgaccctgcctataaaggtcagattctgactatggccaaccctatcatcgggaatgggggggctcccgacaccaccgcattggatgaactaggattgagtaagtacctggaatccaatggaatcaaggtttccggccttctggtgctggactacagcaaggactacaaccactggctggcaacaaaatccctgggccaatggctacaggaggaaaaggtcccagctatatatggagtcgatacccgcatgctgacaaagatcatccgcgacaaaggaactatgctgggaaagatagagtttgagggtcaacctgtggactttgttgaccctaacaaacagaatctcatcgcagaagtgtccacaaaagacgttaaagtgtacggcaaaggaaatcctaccaaggtggtcgccgtggactgcggtatcaaaaacaatgtcattcgcctcctggtcaagcgtggagcagaggttcacctggtgccctggaatcatgattttaccaaaatggagtatgacggcattttaatcgccgggggcccaggaaacccggccctcgcagagccattaattcagaatgtccggaaaatcctggaaagtgatcgaaaggagcctttgtttggaataagcacggggaatctcatcacagggctcgctgcaggagctaagacatacaagatgtcaatggctaaccgcggtcaaaaccaacctgtgttaaatattactaataagcaagctttcattaccgcacagaaccatggttatgcactagataatactttacctgccgggtggaaaccgctgtttgtgaacgtcaatgatcagaccaatgaaggtatcatgcacgagtccaagccctttttcgccgtccagtttcatcccgaagtaactcccggacctattgacaccgagtatctgttcgactccttcttcagcttgataaaaaaaggaaaagccacaactatcacatccgtgctcccaaaacctgctcttgtggcgtctagggtggaggtttccaaagttcttatcctgggctccggtggactctccattggacaggccggggaattcgattactccgggagtcaagccgtgaaagccatgaaggaagagaatgtgaagaccgtgctcatgaaccccaacatcgccagtgtgcagacaaacgaggtgggacttaaacaggcggacacagtttacttcctgcccataacccctcagtttgtgacagaagtaatcaaggctgagcagccagacggcctgattctgggcatggggggtcagaccgctttaaactgcggggtggaattgttcaagaggggtgtgctcaaggaatacggcgtcaaagtgctcgggacaagcgtggagtcaatcatggctaccgaagaccgccagctgttcagcgataagctgaacgagatcaatgaaaaaatcgcaccttcctttgccgtggagtctatcgaggatgcgctcaaggcggccgataccatagggtatcccgtgatgatcaggagcgcgtatgcactggggggcctgggttcaggcatctgtccgaaccgcgagaccctcatggacctatctacgaaggcattcgccatgactaaccagattcttgtggaaaaatccgtgactggatggaaggagatcgagtacgaggtcgtgagagacgctgatgacaactgcgtcaccgtctgcaacatggagaatgtagatgcgatgggagttcacactggcgacagtgtcgtcgtggccccggctcagaccctgtcgaacgccgagttccagatgctgcgcaggactagtatcaacgtcgtgaggcacttgggcattgtcggtgagtgtaatatccagttcgcactccatcctacatctatggaatattgcatcattgaagtcaatgccagactcagtaggagtagcgccctggctagtaaggctactggctaccccctcgcctttatcgctgctaaaatcgctctgggtatcccacttcccgaaatcaagaacgtggtttcaggtaagaccagtgcctgcttcgaaccttcccttgactatatggtgacaaagatcccacggtgggacttagacaggttccacgggacatcatcacgcattgggtccagtatgaagagcgtcggagaagtcatggcaatcggcaggacctttgaggagtcctttcagaaggccctaagaatgtgtcacccaagcatcgaggggttcaccccacggcttcctatgaacaaggagtggccatccaatctcgacctgcgaaaagagttgagcgaaccaagttccaccaggatttacgcgattgcgaaagccatagatgacaatatgtcattggacgagattgagaagctcacatacatcgataagtggttcctgtacaaaatgcgtgacattctgaatatggagaagacactgaagggtctgaattccgaatctatgacagaggaaactctgaaacgggcaaaagagattgggttctccgataaacagattagtaagtgcctggggctcaccgaggcccagactcgggaactgcggctgaaaaaaaacattcacccttgggtgaaacagattgacaccctggccgccgaatacccatcagtgaccaattacctttacgtgacttataatggtcaggagcacgacgttaattttgatgaccacgggatgatggtcctcgggtgtggaccataccatatagggagttccgtggaattcgactggtgcgccgtgtcttctatccgcactctcagacagttaggcaagaagactgttgtggtgaactgtaacccggagacagtctctacagattttgacgagtgcgacaagctatatttcgaggaattaagcctggagaggatactcgacatctaccaccaggaagcctgcggtggctgtattatttcagtgggcgggcagataccgaataacttggcagtgcccctgtataagaatggagttaaaatcatggggacaagccccctccagatcgatcgcgcagaagacagatctatcttttctgccgtgctggatgaactgaaggtagcccaagccccatggaaggctgtgaacactctgaacgaagccctggaattcgcaaagtcagtcgactacccctgtctccttcgccccagttatgtgttgtccggctctgcgatgaacgtggtcttctctgaggatgaaatgaagaaattcctcgaagaggcaacgagggtcagccaagagcaccccgttgttctcactaagtttgttgagggggcacgagaagtggagatggacgccgtcggcaaagatggcagggtcatttcacacgcaatttccgaacacgtagaggacgccggggtccactcaggtgacgctacgctgatgctgcccacccagaccatcagtcagggcgctatcgaaaaggtgaaggacgcaacgagaaaaatagccaaggcattcgccatctcaggaccgttcaacgtgcaattcttggtgaagggtaatgacgtgctggtcattgaatgcaacttgagagcgtctagatcattccccttcgtaagcaaaaccctgggagttgactttatcgacgtggcaactaaggtaatgataggtgaaaacgtagatgaaaagcacctgcccacactagaccatccaatcattccagcagactatgtagccatcaaggccccaatgttcagctggcccaggctgagggacgcggatcccattttgcggtgtgaaatggcaagcacgggggaagtggcctgcttcggagagggaatccatacagcttttctcaaagcaatgttgtctacaggctttaagattccccagaagggcatcctgatcggaatacagcagagctttcgcccaagattcctgggcgtggctgaacagctgcacaacgaagggttcaaactcttcgcgaccgaggctaccagcgactggctaaacgccaacaatgtgccagctaccccagtcgcatggccatcccaggaggggcaaaacccatccctgtcctcgattcgcaagctgattcgagatggttcaatcgatttagtgatcaacttgcccaataacaacacaaaatttgttcatgataattatgtgatccggaggacggccgtggactcagggatccctctgttgaccaatttccaggtgaccaagctgtttgccgaggcggtacaaaaaagtcgcaaggttgatagtaagagcttgtttcattataggcaatacagtgctggtaaggcagcc

SEQ ID NO: 8063 - DNA, 4500 bp, synthetic construct
  misc_feature 1..4500: note = source = /note="Description of Artificial Sequence: Synthetic coding sequence"
  source 1..4500: mol_type = other DNA
atgactcggattctgactgcatttaaggtcgtccggacccttaagaccgggtttgggttcacgaacgtaactgcgcatcaaaagtggaagttttcgcggcccggcattcgtctgctgagcgtcaaggcacagactgcacacatcgtacttgaagatggcactaaaatgaagggctacagtttcggacatccaagcagcgtggcgggcgaggtggtgttcaacaccggacttggtggataccctgaggcaattactgatcctgcgtacaaggggcagattcttactatggcaaacccaattatcggtaatggcggagcacccgacactactgcccttgatgaacttggcctctcaaagtacctggaatccaacggcatcaaagtctcgggacttcttgtcctggattactccaaggactacaaccattggcttgctactaagtccctgggacaatggcttcaggaagaaaaagtgcccgcaatttacggagttgatacccgcatgctcactaagattatccgtgataagggaaccatgctgggaaagatcgaatttgaagggcaaccagtcgattttgtggatcccaataaacaaaacttgattgccgaagtaagcactaaggacgtgaaagtgtatggtaagggtaaccctacgaaggtggttgctgtggattgtggaattaagaacaatgtcatcaggctgcttgtgaaacgaggtgcagaggtccacctggtgccatggaaccacgatttcaccaaaatggaatacgatggaatactcatcgcgggtggtcccgggaaccctgcacttgcagagccactcatccagaacgtgaggaagatccttgaatccgatagaaaggagcctttgtttggtatatcgaccggaaatctcattaccgggcttgccgccggagcgaaaacctacaagatgagcatggcaaatagagggcaaaaccaaccagtgctgaacatcaccaacaagcaggctttcattactgcccagaatcatggatatgcactcgataatactctgcctgccggatggaagcccctctttgtcaacgtgaacgaccaaactaacgaaggcattatgcatgaatcaaaacctttctttgccgtgcaatttcatcccgaggtgactccgggaccaatcgacaccgagtatctgtttgactcgttcttttccctgattaagaaaggcaaagccaccaccattacgtcggtgctgccaaaaccggcactggtggcttcgagagtggaggtgtctaaggtgctgatattgggcagtggtggtttgtcgattggccaggcaggtgaatttgattattcaggaagccaggctgtgaaggccatgaaagaggaaaacgtgaaaaccgtcctcatgaaccctaatatcgcatccgtgcaaaccaacgaagtgggacttaagcaggcggacactgtgtactttcttcctataaccccgcaatttgtgaccgaagtgatcaaggccgaacaacctgacggtcttatcctgggaatgggagggcaaaccgcacttaattgtggggtggagttgtttaagagaggagttctgaaagaatacggagtcaaagtgctggggacgtccgtggaatcaattatggccacggaggacagacaactgttctcggacaagctgaatgagattaatgaaaagattgctccatcattcgcagttgagtcgatcgaagatgcactcaaggcagcagatactatcggttaccctgtgatgatccggtccgcttacgcactcggcggacttggctccggaatctgtcccaaccgcgaaactctgatggatttgagcaccaaggcgtttgccatgaccaatcaaatacttgtcgaaaagtcagttaccggatggaaggaaatagaatacgaagtggtgagagacgcagacgacaactgtgtgaccgtgtgcaatatggagaacgtcgacgcaatgggagtccataccggagacagcgtggtggtggcaccggcacaaaccctttcaaacgccgaatttcagatgctgcggcggacctccatcaatgtggtacgccatctgggtatagtgggcgagtgcaacatacagtttgccttgcatccaaccagcatggagtactgtatcattgaagtgaacgcacggctgtcgcgctcctccgctctggcatcgaaagccactggttaccctcttgcattcattgcagcgaagattgcactggggattccacttcccgaaatcaaaaatgtcgtttccggtaagacctccgcatgttttgaaccatcacttgattacatggtgaccaagataccacgttgggatcttgatagattccacggaactagctcgagaataggctcgtcaatgaagagcgtgggagaagtgatggcaattggaaggacgtttgaggaatcgtttcaaaaagcgttgcgaatgtgtcatccctccatcgaaggctttacccctagacttccaatgaacaaagaatggccttctaacctggatcttcgtaaggaactgagcgaaccatcgagcactaggatttacgctatagcaaaagcaattgacgataacatgtcgcttgacgagattgagaagctcacttacatagacaagtggtttctgtacaagatgagagatattcttaacatggagaaaactctcaaaggtcttaactcggagtcaatgacggaagagactctgaaacgtgcaaaagaaattggattcagcgataagcaaatttcaaaatgtttgggactgaccgaagcacaaactagagaacttaggctgaagaagaacatccatccttgggttaaacaaatcgatactctcgctgccgagtacccatccgtcactaactatctttacgttacctacaatggacaagaacacgatgtcaacttcgacgatcacggcatgatggtgctcgggtgcggcccttaccatattggctcctccgtggagtttgattggtgcgccgtgtcctccatccgtacgctgcggcagctgggaaaaaagacggtggttgtcaattgtaaccctgagactgtgtcgaccgattttgatgaatgcgataagttgtacttcgaagaactcagcctcgaaagaatcctggacatctaccatcaggaagcctgtggagggtgcatcatctcagtcggtggacaaattccaaataaccttgcggtccctttgtacaaaaatggcgtcaagatcatgggaaccagccctcttcagattgatcgggcagaagatagatcaatcttttccgcagtgttggatgaactgaaagtggcacaggcaccctggaaagcagtcaatacgctcaatgaggcactcgaatttgctaagtcagttgactacccatgcctgcttaggccttcatacgtgctgtcgggcagcgctatgaatgtcgttttttcggaggatgaaatgaagaagtttctcgaagaggcgactcgcgtctcccaagaacacccagtagtcctgaccaagtttgtcgagggggcgagggaagtggagatggatgccgtgggcaaggatggtcgagtgatttcccatgcaatttccgaacatgtggaggacgcaggggtgcacagcggcgacgcaaccctgatgctgcctacccaaactatcagccagggtgcaatcgagaaggtgaaggatgcgactcgtaagattgccaaggcatttgcaatctcaggtcccttcaacgtgcagtttctggtgaaaggaaatgatgtgcttgtgatcgaatgcaaccttcgggcctcgaggtccttcccgttcgtgtcaaagaccctcggggtggacttcatcgatgtggccaccaaggtgatgattggggagaacgtggatgagaaacacctgcctactctggatcatcccatcattcctgcagactacgtggcaataaaggctcctatgttctcgtggccgcggctgcgagacgcggacccaattcttcggtgtgagatggcgtcgacgggggaagtcgcatgtttcggagaagggattcacacggcttttctcaaagcaatgttgtcaactggctttaagattccgcagaagggaattctcatcggaattcagcaatcgttcagaccaaggtttcttggtgtggcagaacagcttcacaatgaaggttttaagctgttcgcaaccgaagcgacctcggattggctgaacgcaaacaacgtgccggccacgcccgtcgcttggcctagccaagaaggtcaaaacccttccctctcctctataagaaagctcataagggatggatcgattgatctcgtgatcaatttgcccaataacaacactaagtttgtccatgataactacgtgatcaggaggactgccgtagactctggtattcctctgctcaccaatttccaagtgaccaaactgttcgcagaagcagttcagaagtccagaaaggtcgacagtaaatccctttttcattacaggcagtactccgcaggaaaggccgcc

SEQ ID NO: 8064 - DNA, 4500 bp, synthetic construct
  misc_feature 1..4500: note = source = /note="Description of Artificial Sequence: Synthetic coding sequence"
  source 1..4500: mol_type = other DNA
atgactaggatactgacggccttcaaggtggtgcgcaccctgaaaaccggctttggatttaccaacgtgacggcgcatcaaaagtggaagttttcaagaccaggaataaggctgctgagcgtcaaggcgcaaactgcacatatcgttctggaggacgggaccaaaatgaaaggctattccttcggccatccttcctcggtggcgggagaggtcgtattcaataccggactgggaggatacccggaagcgatcaccgatccggcgtacaagggtcagattctgacgatggccaacccgatcatcggcaacggaggggcgccagacaccacggcccttgatgagctgggtctttcgaagtacctggagagcaatgggattaaggtttcagggctcctggtccttgactacagcaaggattacaaccattggctcgccaccaagtcgctgggtcagtggctgcaggaagaaaaggtcccagccatctacggagtggatacccggatgcttactaagatcatccgcgataagggcactatgctgggaaagattgaattcgagggacaacccgtcgacttcgttgacccgaacaagcaaaacctcattgcggaggtcagcaccaaggacgtcaaagtctacggaaagggtaatccaaccaaagtggtcgccgtggactgtggaatcaaaaacaatgtcatcaggctcctggtgaagcgcggagctgaggtgcatctggtgccgtggaaccatgacttcaccaagatggagtacgacggcatccttatcgcaggtgggccagggaacccagcgctggcagaaccccttatccagaacgtgaggaagatcctggaatccgacaggaaagagccgctgttcggaatcagcaccggaaaccttatcaccggactggccgcgggggctaaaacttacaagatgtcaatggcaaaccggggacagaatcaaccagtgttgaacattaccaacaaacaggcgttcatcaccgctcagaaccatgggtacgctttggacaacaccctgccggccggatggaagcctctgttcgtcaatgtgaacgatcaaaccaacgagggcatcatgcatgaatcaaagcccttttttgccgtgcagttccacccggaggtgactcccggcccgattgacaccgaatacctcttcgattcgttcttttccctgatcaaaaaaggaaaggccacgactatcacgtccgtgctgccaaagccggcattggtcgcgtcgcgcgtggaagtgtcaaaggtcctgatcctgggatccggcggactgagcatcgggcaggctggcgagttcgactactcaggatcgcaggctgtcaaggccatgaaggaggagaatgtcaaaaccgtcctcatgaaccccaatattgcgtccgttcagactaacgaggtgggactgaagcaagccgacaccgtgtacttcctgcctatcactccacagttcgtgactgaagtcattaaagcggaacagccggatggactgatccttgggatgggtggtcagactgccctcaattgcggagtggaactgttcaaacgcggcgtgctgaaggagtacggcgtgaaggtgcttggaacttccgtggaatcaatcatggctaccgaggacagacaactgttctcagacaaactcaatgagatcaacgagaaaatcgccccatcgttcgcggtcgagtcgatcgaagatgcgctgaaggccgccgacactatcggttacccagtgatgatccgcagcgcttacgctcttggcggcctgggaagcggaatctgtccgaaccgcgaaaccttgatggacctctcgacgaaggcattcgcgatgaccaaccagattctggtggaaaaatcagtcactggatggaaggaaattgaatacgaagtggtccgggacgcagacgataactgcgtgaccgtgtgcaacatggaaaatgtcgacgcaatgggggtccacactggagatagcgtcgtggtggctccagcacagaccttgtcgaatgcagaatttcagatgcttagacgcacttcgatcaatgtggtgagacacctcggcatcgtcggagagtgcaacatccagttcgctttgcacccgacctccatggagtactgcatcatcgaagtgaacgccagactctccaggagttcggctctcgcctccaaggctactggatacccactggcatttatcgccgcaaagatcgccctgggaatcccgctgcctgaaatcaagaatgtggtttcgggtaagaccagcgcatgtttcgaaccgtcactggactatatggtgactaagatcccgagatgggaccttgatagatttcacggaacttcgtcacgaatcggttcgtcgatgaaatcagtgggagaagttatggcaatcggcaggaccttcgaagaatcgttccaaaaggctctgcggatgtgtcacccgagcatcgagggatttacccctcgactcccgatgaataaggaatggccgagcaaccttgatttgcggaaggaattgtcggaaccgtcgtccactaggatctacgctatcgcaaaggcgatcgacgacaacatgtcgctggacgagattgagaaactgacttacatcgataaatggttcctttacaagatgcgggatatcctgaacatggaaaaaaccctgaagggccttaattccgagtcgatgactgaggagactttgaagcgcgctaaggagatcggcttctccgataagcagatctccaaatgtctgggcctcacggaagcccaaacccgggaactgagactgaagaagaacatccacccgtgggttaaacaaatcgacaccctggcggctgagtacccgagcgtgactaactacctctacgtcacctacaatggccaagaacacgacgtgaacttcgatgaccatggcatgatggtgctgggctgcggaccttatcacatcggaagctccgtggaattcgactggtgcgccgtgtcctcgatcagaaccctgcgccagctgggaaaaaagacggtggtggtgaattgcaacccagaaactgtctccactgacttcgacgaatgtgacaagctgtattttgaggaactgtccctggagcggatcttggatatctaccaccaagaggcttgcggcggctgcatcatctcggtcggtggccagattccgaacaaccttgcggtgcccctttacaaaaatggcgttaagattatgggaacctccccgctccagatcgatcgcgccgaggaccgctcgatcttttccgcggtgctcgacgaactgaaagtggctcaggccccgtggaaagccgtgaacaccctgaacgaggccctggagttcgctaagagtgtagactacccatgcctgttgcggccatcgtacgtgctctcgggatccgcgatgaatgtcgtgttcagcgaagatgaaatgaagaagtttctcgaggaggcgacccgggtgtcccaagaacaccctgtggtgctcaccaaatttgtggaaggcgcccgggaggtcgagatggacgccgtgggaaaggacggaagggtgatctcacacgcgatctccgagcacgtggaagatgccggagtccactcaggtgacgcgaccctgatgctgccgacgcaaaccatcagccagggagcgattgagaaagtgaaggacgcaacccgcaagattgctaaggctttcgctatctcgggaccattcaatgtccaattcctcgtgaagggaaacgacgtgctggtgatcgaatgtaacctgcgagcgtcccgctcattcccgttcgtctccaaaaccctgggagtggatttcatagacgtcgcaaccaaagtgatgatcggagaaaacgtggatgagaagcatctgcccaccctcgatcaccccatcatcccggctgattacgtcgccattaaggctccgatgttctcctggccgaggctgcgggatgcagatcccattctgcgctgcgaaatggcatcgaccggcgaagtggcatgctttggggaaggcatccacactgccttcctcaaggccatgctttcaaccggcttcaagatcccccagaagggcatcctgattggaattcagcaatcgttccgcccacgattcctgggagtggccgaacaactccacaacgagggctttaaacttttcgcgactgaagcaactagcgactggctgaacgcaaacaatgttccggccactccagtggcgtggccgtcgcaagagggacagaatccgagcctgagctccatcaggaagctgatcagggacggaagcatcgatttggtgatcaacttgccgaacaataacaccaaattcgtgcatgacaattacgtgatccgccggacggccgtggattcggggatcccgctcctgaccaatttccaggtgactaaactcttcgcagaggcagtgcagaagagccgaaaggtggattcgaagtcgttgttccactaccgtcagtactctgccggcaaggccgca

SEQ ID NO: 8065 - DNA, 4500 bp, synthetic construct
  misc_feature 1..4500: note = source = /note="Description of Artificial Sequence: Synthetic coding sequence"
  source 1..4500: mol_type = other DNA
atgactaggattcttaccgcatttaaggtggtgcgtacccttaagaccggcttcggctttaccaatgtcaccgcccatcaaaagtggaagttctcgcggcctggaatccggctgctttcggtgaaggcccaaaccgcacacattgtgttggaggacgggactaaaatgaaagggtatagcttcggacatccatcatcggtcgccggagaagtcgtgttcaatactggtttgggcggctacccggaggcaattaccgacccggcatacaagggccaaatactgactatggccaaccccatcattggtaacggtggggcacctgataccaccgcgctcgatgagttgggactgtcaaagtacctggagtcaaacggaattaaggtatcgggccttctcgtgctcgactactcgaaggactataaccattggcttgcaaccaagtcacttggacagtggttgcaggaagaaaaggtgcccgcaatctacggagtggatactagaatgctgaccaagattattcgagacaaaggcactatgctcggtaaaatcgagtttgagggacagcctgtggactttgtcgatccaaacaagcagaaccttattgcagaagtgtctaccaaggatgtcaaggtgtacgggaaaggcaacccgaccaaggtggtcgcagttgactgcgggattaagaacaatgtcattcggttgctggtgaaacgaggagccgaagtgcatctcgtgccttggaatcacgattttaccaagatggaatacgatggcattctgatcgcgggtggaccagggaacccagcactcgcagaacctctgattcagaatgtcagaaagattctggagtccgatagaaaggaacctcttttcgggattagtaccgggaacctgatcaccggactggcggcaggggccaagacttacaagatgtcgatggcgaacagaggtcagaaccaacctgtccttaacataactaataagcaggccttcattaccgcacaaaatcacggatacgcacttgataacactcttcctgcaggatggaagcccttgttcgtgaacgtgaatgatcagacgaacgaaggaataatgcatgagtcaaaaccatttttcgcggtccagtttcaccctgaagtcaccccgggtcccattgatactgaatacttgttcgactctttcttttcgctgatcaaaaagggaaaagcaaccactattacttcagtgctgccgaaaccagcccttgtggcgagccgcgtcgaagtgtccaaagtcctgattctcgggagcggtgggctctcgattggacaggcaggagaattcgattactcgggttcacaggccgtgaaggcaatgaaggaagaaaatgtcaagaccgtccttatgaacccaaacatcgccagcgtccaaacgaacgaggtgggacttaagcaagctgatactgtgtacttccttcctatcaccccccagtttgtgactgaagtcattaaggcagaacaacccgatggacttattctgggtatgggagggcaaaccgccctcaactgtggcgtggagctgttcaagaggggggtgctgaaggaatacggggtcaaggtgctgggaacttccgtggagtcgattatggcaacggaagatagacagctcttttcggacaaattgaacgagatcaacgagaaaattgcaccgagctttgcagtggagtcaattgaagatgcactcaaggccgccgataccataggttaccccgtgatgattagatccgcgtatgcactgggcggcctgggatcaggaatatgccctaacagggaaaccctgatggatctttcgaccaaggccttcgccatgaccaaccagatcctcgtggaaaaaagcgtgactgggtggaaggagatcgagtacgaggtggtccgggatgccgatgataactgtgtcaccgtctgtaacatggagaatgtggacgcaatgggcgttcataccggtgattctgtggtcgtggcccctgcccaaaccttgtcgaacgcagagtttcagatgcttaggcggacgtccatcaacgtggtgcgccacctgggtattgtgggtgagtgtaacatccaattcgcactgcatcctaccagcatggaatactgtattatcgaagtcaatgcccgcctgagccggagcagcgcactggcatcaaaggcaaccggatacccccttgcatttatcgctgcaaagattgctcttggaattccactgccagagattaagaacgtggtgtcaggcaagacctcggcttgctttgagccatccctggactacatggtgaccaagatacctcgctgggatctcgaccgcttccatggtacctccagccgtattggctcctccatgaaaagcgttggtgaggttatggctattggtagaacctttgaggaatcgtttcaaaaggcactccggatgtgtcacccatcgattgaaggttttactccaagacttcctatgaacaaggaatggccgtcgaatctggatctccgaaaagaactctcagagccatcgtcgaccaggatatatgcaattgccaaggcaattgatgataacatgtcacttgacgagatcgagaagctcacctacatcgataagtggtttctctacaagatgcgggatattctgaatatggaaaagacccttaagggactcaattccgaaagcatgaccgaagaaaccctgaagagagcgaaggaaatcggattttcggacaagcagatcagcaagtgtttgggtcttactgaggcacaaacccgcgaacttaggcttaagaaaaacatacatccttgggtgaagcaaattgataccctcgcagcagagtatccttcggtcacgaattacctctacgtcacgtacaatggacaggaacacgatgtgaactttgacgaccatggtatgatggtgctgggctgtggaccgtaccatataggctcatctgtggagttcgattggtgtgcagtctcctccatacggactctgcgccaacttggtaaaaagacggtggtcgtcaactgcaaccctgaaaccgtgtcaacggactttgatgaatgcgataaactgtactttgaagaactcagcctggaacgcattctggacatataccaccaggaagcatgtggaggttgcattatctccgtgggaggtcagattccaaacaatttggcagtcccgttgtacaagaacggggtgaagatcatgggaacttccccgctccaaatcgatcgggcggaagatagatccatcttcagcgcggtgctggatgaactgaaggtcgcgcaggcgccatggaaggctgtgaatactcttaacgaggccctggagtttgcaaagtcagtcgattacccttgtctgctccgcccttcctacgtcctctcaggatccgccatgaatgtggtcttttcggaagatgaaatgaagaagtttctcgaggaagcaactcgagtgtcgcaagagcatccggtcgtccttaccaagttcgtcgaaggtgcccgggaagtggaaatggacgctgttggtaaggatggccgcgtgatttcccatgcaattagcgaacacgtggaggacgcgggggtccattctggagatgcaacgctgatgcttcccacccaaaccattagccaaggtgccatagaaaaggtgaaagacgcaacgcggaaaatcgccaaggcgtttgctatatctggcccttttaacgtccagtttcttgtgaagggtaacgacgttctggttattgaatgtaatctccgagcgagccgctcgtttccctttgtgtccaaaacgctgggagtggactttatagacgtggcaaccaaggtgatgattggggagaatgtcgacgagaagcatctccctactcttgaccatcccattatacctgccgactacgtcgcaatcaaagcaccgatgttttcgtggccacggctcagggacgccgaccctatcctgcgatgtgaaatggcatccaccggtgaagtggcttgttttggcgaaggtattcatactgcctttctgaaagccatgctgtcgacggggtttaagattccgcaaaagggaattcttatcggaattcagcaatcgtttcgtcctagatttctgggtgtcgctgaacaactgcataacgaagggtttaagctgtttgccactgaagcaacctcggactggctgaatgcaaacaacgtgcctgccactccggtcgcgtggccgtctcaagaaggtcaaaatcccagcttgtccagcattcgcaaacttatccgggacggcagcatcgatctcgtgatcaacctgcctaacaacaacaccaagttcgtgcacgataactacgtgatcagacggaccgccgtcgattcaggtatcccactccttactaacttccaggtcactaagctgttcgcagaagcagtccagaagtcgcgcaaggtggatagcaagtcgctttttcactacagacagtactcggccgggaaggcagcc

SEQ ID NO: 8066 - DNA, 4500 bp, synthetic construct
  misc_feature 1..4500: note = source = /note="Description of Artificial Sequence: Synthetic coding sequence"
  source 1..4500: mol_type = other DNA
atgacacgcatcttgacggccttcaaggtagtccggactttaaaaacaggttttggcttcaccaacgtaactgcccatcagaagtggaagttcagccgcccagggattcgattactgtccgtgaaagcccagacagcccatattgtactggaagatgggacaaaaatgaaaggctactctttcggccacccctcctctgtggctggggaggtggtcttcaatacgggactcggcggatatcccgaagccatcaccgatccagcatataaagggcagatcctcacaatggcaaatccaatcattggtaacggtggcgcacctgatacaaccgcactggatgagctcggtctcagtaaatatctggagagtaacggaatcaaggtttctggcctgctggtgttggattatagcaaagactacaaccactggctcgctaccaagtccctggggcagtggttgcaggaggagaaagttccagcaatttatggagtagatactcgcatgctgacgaagataatcagggataaggggaccatgctcggtaagatagagttcgaaggtcagcccgtggacttcgtcgaccccaacaaacagaatcttatcgccgaagtctctacgaaggacgttaaggtgtacggcaaaggcaacccaactaaagtcgtggcagtggattgcgggatcaagaataacgtcattcgactcctagtcaagcggggtgctgaagtgcatctggtcccctggaaccacgactttacgaaaatggagtatgatgggattctgatcgccgggggaccaggcaatcctgctctggctgagcccctcatccaaaacgtgcgaaaaattctcgaatctgacagaaaggaacctttattcgggataagcacagggaacttgatcactgggctggccgctggcgcgaaaacctataagatgtccatggccaatcgcggacagaaccagcccgttcttaacattaccaataaacaggcatttattaccgcccagaaccacggctatgccctggataatacactgccagccggctggaaaccgttgttcgtgaacgtcaatgaccagactaacgagggcatcatgcacgaatccaagcccttcttcgcggtgcagtttcatcccgaagtcactcctggcccaatagataccgaatacttgttcgacagctttttttcactgatcaagaaggggaaggcgacgaccattaccagtgtgttgcctaagcccgctctggtagcctcgagggttgaggtgtctaaggtcctaattctgggctctggtgggttaagcatcggccaggccggggaatttgattatagcggatctcaggccgtgaaggccatgaaagaagagaacgtaaagactgtcctaatgaacccaaatatcgcttccgtacagactaacgaagtcggcctaaagcaggctgatacagtgtatttcttgccaattacaccccagttcgtgacagaagttattaaagctgagcagcccgacggcttaattctggggatggggggccaaactgccttgaactgcggagtcgagctgttcaagagaggagtcctgaaggagtacggcgtgaaggtcttgggcacgtcagtcgaatccattatggcaacagaagaccgtcagctgtttagcgacaaactgaatgagatcaacgaaaaaatagcaccatcttttgcagtggagagtattgaagatgctcttaaagctgcggacacaatcggctatccagtcatgatccgcagtgcctacgcccttggtggtctggggagcgggatatgtccaaacagggagactctaatggatttgtcgactaaagctttcgccatgacaaaccaaatcttagtggaaaaatccgtgaccggatggaaggaaattgaatatgaggtggtccgggacgccgatgacaactgcgtgacggtgtgcaacatggagaatgtcgatgctatgggggtgcataccggggatagtgtggtggtcgcccctgctcaaaccctgtctaacgccgagtttcaaatgctcaggcgaacaagtattaacgtggtgagacatctgggaattgtaggagaatgtaatatccagtttgctctgcaccctacatctatggaatactgcattatcgaagtaaacgcaaggctgagtcgatcttctgcattagcctccaaggccactggctatccactggcctttatcgcagcgaaaatcgccctagggattccccttcctgagatcaagaacgtcgtgtctggaaagacttctgcttgtttcgaaccttccctcgattatatggtgactaagatacctcggtgggacctggatcggttccacggcacaagctcacgcatcggatctagcatgaagtcagtgggtgaggtgatggccatcgggagaacttttgaggagtcttttcagaaggctctgcgaatgtgccacccatccatcgagggattcaccccgcggctgcccatgaataaggaatggccctcaaacctggacttaaggaaggaactaagcgaaccctccagtacgcggatatacgccatagccaaggcgattgatgataacatgtccctggatgaaatagagaagttgacatatatcgataagtggtttctctataagatgcgtgatattctgaacatggagaaaacccttaaaggcctgaacagcgagagcatgactgaagagacgctgaagcgagccaaggagatcggtttctccgataagcagatctccaaatgtctcggcctgacagaagcacagacacgggaacttagattaaaaaagaatattcatccatgggtcaaacagatagacacattagctgcggagtatccctcagttactaattacctctacgtgacttacaacggacaagagcacgacgtgaactttgacgatcacggcatgatggtgctcggatgtggcccttatcacattgggagctcagtggaatttgactggtgtgctgtttcatcaatccgcaccctgcgccaactggggaaaaaaaccgttgtggtgaattgtaatcccgagaccgtgtcaacagattttgacgagtgtgacaaattgtactttgaggagttaagtctggaacggatcctcgacatataccatcaagaggcttgtggagggtgtatcatcagcgtgggaggccagatccccaacaatctagctgtacccctgtataaaaatggggtcaaaatcatgggcacctctcctttgcaaatcgatcgcgcagaggaccgcagcatttttagtgccgtattggacgaactgaaggtggcccaggccccatggaaggcggtcaacacattgaacgaggccctagagtttgctaagagtgtcgactatccatgtctcctgcgtccttcatatgtgttgagcggctccgcaatgaacgtagtgtttagtgaagatgagatgaagaaattcctggaggaggccaccagggtaagccaggagcatccggttgtgctgaccaaatttgtggaaggtgcgcgggaggtggagatggatgcagtgggcaaggatgggcgggtcatttctcacgctatatctgaacacgtggaggacgcaggagttcactccggggatgcaacccttatgctgcccacgcagactatcagtcagggggccatcgaaaaggtgaaagacgccacgcgtaagatcgcaaaagcgtttgcaataagcggcccattcaatgtgcaattcctggtcaaagggaatgacgttctcgtcatcgagtgtaatttgcgagcctcacgctccttcccattcgtttcaaagaccctgggagttgatttcatcgacgtggcaactaaggtaatgatcggcgaaaatgtggacgagaagcacctgccaactctggaccatcctattatccctgctgactatgttgcaataaaggctcctatgttcagctggcccaggttgagagatgctgaccccatattgagatgtgagatggcctcgacaggggaagtggcatgcttcggggaaggcattcacacagcatttcttaaggcaatgttgtcaactggcttcaagatacctcagaaggggatcctgatagggatccaacaaagtttccgaccacgatttctgggggttgctgagcaactccacaatgaaggctttaaattattcgcaaccgaggctacctccgactggctgaatgcaaataatgttccggcaaccccagttgcctggccctctcaagagggtcagaatccgagcctttcgtccatccgaaaactgatccgggacggctccatagacctagtgataaacctacccaataataacaccaagttcgtgcatgataattatgttataaggaggacagccgtggacagtggaattccgttgcttaccaattttcaggtgaccaagctgttcgctgaagctgtccaaaaatcacggaaagtggattctaagagtttattccattacaggcagtatagtgccggcaaggctgca

SEQ ID NO: 8067 - DNA, 4500 bp, synthetic construct
  misc_feature 1..4500: note = source = /note="Description of Artificial Sequence: Synthetic coding sequence"
  source 1..4500: mol_type = other DNA
atgacacgcattttgacggcttttaaagttgtccggacactcaagacgggatttggtttcactaacgtgactgcacaccaaaagtggaagttttctcgccccggcattcgactgttgtcggtgaaggcacaaactgcacatatcgttcttgaggatggcactaaaatgaaaggatactcttttggacacccatcgtctgttgctggagaagttgtgtttaacacaggcctaggaggttaccccgaggcgattactgaccccgcctacaagggacaaatcttaacaatggctaatcctattattggcaacggaggagctccagacacgactgcacttgatgaacttggactctctaaatacctggaatcaaacggtattaaagttagtggcttacttgtcttggactacagtaaggactataaccattggctcgctacaaagtcccttggacagtggcttcaagaagagaaagttccagccatatatggagtcgataccagaatgcttactaaaattatcagagataaaggaactatgctcggaaaaattgaatttgaaggacaacctgttgattttgtagatccgaacaaacagaaccttatcgcggaggtatctacaaaggatgtaaaagtatatggtaagggaaatccgaccaaggtcgtcgccgttgattgtggcattaagaacaatgtcattcgacttcttgttaaacgtggcgcagaagtgcatctggtgccatggaatcatgacttcactaagatggaatacgatggcatactgattgccggagggccaggtaacccagctttggctgaaccacttatccaaaacgtaagaaaaattttggaatctgatcgtaaagaacccctctttggaatctccactggaaatctaattactgggctagccgcaggcgctaaaacttataagatgtcaatggccaatcgaggacagaatcaaccggttttgaacattactaataagcaggcttttatcactgctcaaaaccatggatatgcgttggacaatacattaccagctggatggaaaccactttttgtgaatgttaatgatcaaactaacgaaggaattatgcacgaatcaaagcctttctttgcagtacagttccatccggaagtcacaccgggcccaattgatactgagtacttattcgacagtttcttctcgctaattaagaaaggtaaggcgacaaccattacgagtgttttgccaaaaccggcgctagtggcgtcacgtgtggaagtttctaaagtccttatactcggatctggcggtttgtccattggacaagcaggagagtttgattacagcggatctcaagcagtaaaggccatgaaggaggaaaatgttaaaacagtgctgatgaacccaaacattgcatctgtgcaaacaaatgaagttggactcaaacaagcagataccgtctattttttaccgatcaccccacaattcgtaacagaggtcatcaaagcagaacaaccagatggactcattctaggaatgggaggccaaacagctttgaattgcggagtggaactcttcaaacgtggagttctaaaagagtacggagtgaaagtattaggaacttcagttgaaagcataatggctactgaagatcgccaactctttagcgacaagcttaatgagatcaatgagaaaatagcaccaagtttcgcagtcgagagcattgaagacgctctgaaagcggctgataccatcgggtatccagtaatgatacgatcagcctatgccttaggaggtctcggaagtggaatatgtccaaaccgtgagacgctaatggatttatctacaaaagcttttgcaatgaccaatcaaattctggtggagaaatcagtcactggttggaaggaaatcgaatacgaagttgtccgtgatgctgatgataattgtgttacagtttgcaacatggaaaacgttgacgcaatgggagttcatacaggtgactctgtcgttgttgctcctgcacagactctgtctaacgcagagttccagatgttgcgacgtacaagcataaatgttgtccgacacttgggcatcgttggagagtgcaatattcagtttgccttgcatcccacgtctatggagtactgcattatagaagttaacgcgcgtctgagccgatctagtgctttagcctccaaagctactggatatccactggccttcattgcagctaaaattgcactaggaattcctctcccggaaattaaaaacgttgtttcaggtaagacatccgcttgtttcgagccctcgctagactacatggttactaagattccgcgttgggatctggacagattccatggaacatcaagtcgtatagggtcatcaatgaaatcagtaggagaagttatggctatcggaagaacttttgaggaatcatttcaaaaagccttgcgtatgtgccatccatcgattgaaggatttactccaaggctgcctatgaacaaagaatggccaagtaatctggatttgagaaaagaacttagcgagccaagcagtacgcgaatctatgctattgccaaagcaatcgatgataatatgagtttggacgaaattgaaaagctaacttatatagataaatggtttttatataagatgagagatatacttaatatggaaaagactcttaaaggattgaatagtgagtcaatgactgaggagacactgaaacgggctaaagaaattggattctccgacaagcaaatttcaaagtgtctgggactcacggaggctcagacaagagaacttcggctaaagaaaaatatacatccatgggtcaagcaaatagacacacttgctgccgaatatccatcagtaacaaattacttgtatgttacctacaatggacaagaacacgatgttaacttcgacgatcatggaatgatggtcctgggttgtggaccataccacatcggatcctctgttgagtttgattggtgtgccgtgagttccattagaacattgcggcaacttggaaaaaaaacagtggtcgttaactgtaatcctgagacagtctcgacagattttgatgagtgtgataagttgtactttgaggaactttctctggaacgaatccttgacatttaccaccaggaagcatgtggagggtgtattatttctgttggtggacaaatcccaaacaatctcgctgttccgttgtataaaaatggagtcaaaataatgggtacctcaccactgcagatcgatcgtgctgaagacagatctatattttcggcagtgctggatgaattgaaagtcgcgcaggccccatggaaggccgtgaatactttgaatgaggcactcgaattcgccaagtctgttgattatccgtgcttgctccgcccatcatatgtcctctcgggatcggctatgaacgttgttttttcagaagatgagatgaaaaagttcttggaagaggcaacaagagtttctcaggagcatccagtcgtcctaacgaaatttgttgaaggtgccagagaagttgaaatggacgctgtcggaaaagatgggcgggttatcagtcatgctatctcggaacatgttgaggatgcgggtgttcattcaggtgacgccacccttatgttgcccactcagacgattagccagggagcgatagaaaaggtcaaagacgccacaaggaaaatagcaaaagctttcgcgatctctgggccattcaatgtccaattcctggtgaaaggcaatgatgtcttggtcattgaatgtaatcttagagcttctcgttcatttccattcgtctctaagactttaggtgtggacttcattgatgttgccactaaagtgatgattggagagaacgtagatgaaaagcatctcccaacactggatcatccgataattcctgcggattacgttgcaatcaaagcaccaatgttttcatggccgagacttcgggatgcagatcctatcttgagatgtgaaatggcatctacaggcgaagtggcatgtttcggtgaaggtattcacaccgcattccttaaggcgatgctttcaacgggatttaagattccgcaaaaaggaattctaattggaattcagcagtcctttcggccgcgtttcctgggtgtggctgagcagctccataacgagggcttcaaactgtttgctaccgaagctacatcagattggttgaatgcgaataatgtaccagccacaccagtggcgtggccgtcacaggagggacaaaatccttccttgtcgagtattcgaaaactcattcgtgacggatcgatagaccttgtcataaatttgccgaataacaatacaaagtttgtccatgataactacgttattcgacgaacagctgtcgattccgggattccgttgttgaccaacttccaggttacaaaattgttcgcagaggctgtgcagaagtccagaaaagtcgactcaaagtctctgttccattatcgccaatactcggcgggaaaggctgct

SEQ ID NO: 8068 - DNA, 4500 bp, synthetic construct
  misc_feature 1..4500: note = source = /note="Description of Artificial Sequence: Synthetic coding sequence"
  source 1..4500: mol_type = other DNA
atgacgaggatcctcactgcatttaaggtggttaggaccctgaagacgggcttcggatttaccaacgtcacagcacaccagaagtggaagtttagccgccccggcatcaggttgctgtctgtgaaggcgcagaccgctcacattgtgcttgaagatgggaccaagatgaaaggatactcttttgggcacccaagctccgttgcaggagaggtcgtgttcaatactggcttgggtggctatcccgaagctatcaccgaccctgcctataaaggacagatcctgacaatggcaaacccaattattgggaacgggggagcacctgatactactgccttagacgagttagggctgtctaaatacctcgaaagcaacgggattaaggtgagcggtctcttagtcctcgactactccaaggattacaatcactggttggccacaaaaagcttgggacaatggcttcaggaagaaaaagtgcctgccatttacggagtggacacgcgaatgttgaccaagatcatcagagacaagggcaccatgctgggaaaaatcgagtttgaaggccagccggtagacttcgtagatcccaataagcagaacctgattgcagaagtttctacgaaagacgtgaaagtctatgggaagggcaacccgacaaaggtcgtcgctgtagactgcggcataaagaataacgtgatcagactgctggtgaaacgaggggccgaggtgcacctggtcccatggaatcatgacttcactaagatggagtatgatggtattctgattgcaggcggccccggtaaccccgctctggctgagccacttatccagaatgtgcggaagatactggagtcagatcggaaggaacctcttttcggtatatccacaggcaatttaattacgggcctagcggcaggagctaaaacctataaaatgagcatggcgaacaggggtcagaaccagcctgtgcttaatatcaccaataagcaggcattcatcactgcccagaatcacggatatgctctggacaacaccctgccagcaggctggaaaccattgtttgtcaacgtgaacgaccaaactaatgaaggtatcatgcacgagagtaaacctttctttgctgttcagtttcacccagaggttactccaggtccgattgacacagagtacctgttcgattcattcttctcgctcataaagaaaggtaaggccaccactataacctcagtgctcccaaaaccggccctggtggccagccgcgtggaagtctcgaaggttttgatcctcggatccggaggcctcagcattggtcaggctggcgagttcgactactcaggctctcaggctgtgaaggcaatgaaggaagagaacgttaagacagtgttaatgaatcccaatatagcgagcgtacagacaaatgaggtgggtctgaagcaggccgatacagtttacttcttgccaatcactccacagtttgtgaccgaagtgattaaggctgagcagcctgatggactcatactcgggatgggaggccagactgcactgaactgcggcgtcgaactattcaagcggggcgtgctgaaggaatacggggtgaaagtcctgggaacttcagtcgagtcaattatggccaccgaagacaggcagttgttttctgacaagttaaacgagattaatgagaagatcgcaccgtcattcgccgtggagtcaatcgaagacgctcttaaggctgccgataccatcggatacccggttatgatacgttctgcatacgcactgggaggcctgggctctggcatctgccctaaccgcgaaaccctgatggacctgtcaacaaaggcttttgccatgaccaaccagatccttgtcgagaaatcagtcaccggctggaaggaaattgagtatgaggtagtgagagatgctgacgacaactgcgtgaccgtgtgtaacatggaaaatgtcgacgccatgggggttcacaccggtgacagtgtagttgtcgctcctgcgcagactctttcaaacgcagaattccagatgctccgtaggacctctatcaacgtggtacgccatctgggtattgtgggcgaatgtaacattcagttcgctttgcatccaactagcatggagtactgtatcattgaggtgaatgcacgcctgagccgatctagcgcgctcgcctctaaagctaccggatatccactcgcattcattgccgccaaaattgcgttgggcattccactgcctgaaatcaaaaacgtggtttcaggcaagacatccgcttgttttgagcctagtctggactatatggttactaagattccccgctgggacctggaccgctttcacggcaccagtagcaggattggttctagcatgaagtcagtgggcgaagtcatggcaattggcagaaccttcgaggagagtttccagaaagcccttcggatgtgccatccgagcattgagggatttaccccgagattgccaatgaacaaggagtggccaagcaacttagatctgcggaaagaactgtctgaaccgtcctccactcgcatctacgctatcgctaaagctatcgatgataatatgtctctcgatgaaatcgaaaagttaacttatatcgacaagtggtttttatacaaaatgcgcgatatccttaacatggagaaaacgctaaaggggctaaacagtgaaagcatgactgaggagacacttaagcgggctaaggaaataggtttttccgacaaacaaatttctaagtgcctggggctgacagaagcccagactagggaactgaggctgaagaagaacattcatccttgggtcaaacagatagacacccttgccgcggaatatcccagtgtcacaaactatttgtacgtcacctacaacggtcaggagcacgacgttaacttcgatgatcatggcatgatggtgcttggctgtggaccttatcatatcggatcctctgtggagttcgattggtgcgccgtttccagcattaggactttgcggcagttgggaaagaagactgtggtggtgaactgtaatccagaaacagtgagcaccgactttgatgagtgtgataaactgtattttgaagagctcagcctggagcgtatcctggacatctatcatcaggaagcctgcggaggctgcattatcagcgtgggcggacaaatccccaataatctcgctgttcctttgtataaaaacggtgtgaaaatcatggggacctctcccctgcaaattgacagggctgaggacaggagcatctttagcgctgtgctagatgagctcaaggtggcccaggctccatggaaggctgttaatactcttaacgaagctctggaatttgccaagagcgtcgactatccttgtctgctaaggcccagctacgtactctccggatccgcaatgaatgtggtcttttctgaggacgagatgaaaaagttcttggaggaagctacccgggtgtcgcaggagcaccccgtggtgctaacgaagtttgtagaaggagcaagggaagttgaaatggacgctgtcggcaaggatgggcgcgtgatcagccacgcgatctctgagcatgtggaagatgcgggcgtgcactcaggtgacgctaccttgatgctcccaacccagaccatcagccagggcgctatcgagaaagtgaaagatgctacaagaaagatcgcaaaagcgtttgccatttcagggccattcaacgtccagtttcttgttaagggcaacgacgttctggtgattgaatgcaatctgcgcgcttcaagaagcttccccttcgtgagcaagaccttgggagtggatttcatcgatgtggccacaaaggtaatgatcggagaaaacgtggacgagaagcatctgcctaccttggatcacccgatcattccagctgattacgtggctataaaggccccaatgttcagttggccccggttaagggacgccgaccctatcttgaggtgcgaaatggcgtctacaggggaggtcgcatgttttggggaaggaattcatacagccttcttgaaggccatgctgtcaacaggatttaagatcccccagaaaggaatactcattggcattcagcagagctttcggcctcgcttcctgggggtcgcggaacagctgcacaatgagggtttcaagctttttgctaccgaagcaacaagtgactggctgaatgccaacaacgtgcccgccacgcccgtggcctggcccagccaggaaggacagaatcccagcctgagttctatcagaaaactgattagagatggctcgattgatctcgtgattaacctgcctaataataataccaagtttgtgcatgataactacgtcatcagaaggacggccgtggatagtggaattccgctcttgactaacttccaagtcaccaagctgttcgccgaggccgtccagaaaagcaggaaagttgattccaaatccctgttccactacagacagtatagcgctgggaaggccgct

SEQ ID NO: 8069 - DNA, 4500 bp, synthetic construct
  misc_feature 1..4500: note = source = /note="Description of Artificial Sequence: Synthetic coding sequence"
  source 1..4500: mol_type = other DNA
atgactagaatcctgaccgccttcaaggtggtccgtactctcaagacggggttcggattcacgaacgtcactgcacaccagaagtggaaattcagccgcccggggatcaggctgctctctgtcaaggcccagactgcgcacatcgtgctcgaagatggaactaagatgaaaggatactctttcggacatccctcatcggtggcgggggaggtggtgtttaacaccggcctcgggggctatcctgaagccatcactgatccggcgtacaagggacaaatcctgactatggcaaaccccatcatcggaaatggtggagccccagacaccaccgcattggatgagctcggactttctaagtacctggagtcaaacggaattaaggtatccggcctgttggtgcttgactactccaaggattacaaccattggctggccaccaaatcgctgggacagtggttgcaggaagaaaaagtgccggcaatctacggcgttgatacgcgcatgctcactaagattattcgcgataaaggaactatgctcgggaagatagagtttgagggccagccagtcgacttcgttgatccaaacaagcagaatctcatcgcagaagtgtcaaccaaggacgtcaaggtgtatggcaagggtaatccaactaaagtggtcgctgttgactgtggtatcaagaataacgtgatcagacttctggtcaagaggggcgcggaagtacacttggtgccttggaatcacgacttcaccaagatggagtacgatggaatcttgatcgctggtggaccaggaaacccagcgctggcagaacctctgatccagaatgttcgcaaaatcctcgaaagcgatcggaaggagccccttttcggtatctccacgggaaatctgatcactggacttgcagcaggagctaagacttacaagatgtcgatggctaaccgaggccagaatcagccggtcttgaatatcactaataagcaagcgttcattaccgcacaaaatcatgggtacgctctggacaatacgctgcctgcgggatggaaaccactcttcgtgaacgtgaacgaccagaccaacgaaggaatcatgcacgaatcaaagccgtttttcgcagtgcagttccacccggaggtgaccccgggaccgatcgacaccgaataccttttcgactcgtttttcagcctcatcaagaagggtaaagccaccaccatcacgagtgtgctgccgaagccggcgctcgtggcctcacgcgtggaagtgtccaaagtgcttatcctgggaagtggcggactcagcattggacaagccggcgaattcgattactcggggtcccaagcggtgaaggcgatgaaagaggaaaacgtgaaaaccgtgctgatgaaccccaatattgcctcggtccagaccaatgaggtggggctgaagcaagcggacaccgtgtacttcttgcccatcactccgcaattcgtgaccgaggtgatcaaggccgaacaacctgatggtcttatcctcggaatgggaggacagacggcactgaattgtggagtagagctgttcaagcgtggcgtcctcaaggaatacggagtcaaagtgctgggcacgtccgtggaatcgatcatggctaccgaggaccggcaactgttttccgacaaactgaacgaaatcaacgagaaaatcgcaccgtccttcgccgtcgagtcgatagaagatgctctgaaggccgccgataccatcggatacccagtgatgatcagatcggcatacgcactcggaggactcggaagtggaatctgcccgaaccgcgaaacgctgatggacctgtcaactaaggcgtttgccatgaccaaccagatcctcgtggagaaatcggtcactggctggaaggaaattgagtatgaggtggtcagagatgcagatgataactgcgtgaccgtgtgcaatatggagaacgtggatgccatgggtgtgcatactggagacagcgtagttgttgccccggctcagaccctgtctaacgcagagttccaaatgcttcgcaggacttcaatcaacgtcgtgcgccacctcggtattgtgggggaatgtaatatccaattcgccctgcaccctacttccatggagtactgtatcatcgaggtgaatgcccgcctctcaaggtcatccgctctggcatcgaaggcaacgggatacccgctggcgttcatcgccgccaagattgcgctcggaattccgcttccagagatcaagaatgtagtctccggaaaaacgagcgcctgctttgagccttcgttggactacatggtcactaagattccgcgatgggaccttgacagatttcatggaacttccagccgcatcggtagcagcatgaagtcagtcggcgaagtgatggccatcggacgcacctttgaagagtcctttcagaaagccctgcggatgtgccacccgtccatcgaggggttcaccccccgcctcccaatgaacaaggaatggccctcgaacctcgacctgagaaaagaactgtcagaaccaagctcaacccgaatctacgctatcgcaaaggccatcgacgacaacatgtcactcgatgagatcgaaaagctgacttacatcgacaaatggtttctctacaagatgcgggacatcctcaacatggaaaagactctcaagggcttgaactccgagagcatgactgaagagactcttaagcgggccaaggaaatcggattcagcgacaagcagatcagcaagtgtctcgggctgaccgaagcgcagacccgggaactccggctgaagaaaaacatccatccctgggtgaagcagatcgatacccttgcagccgagtatccctccgtcacgaactacttgtacgtgacctacaatggacaagagcatgacgtgaatttcgatgatcatggaatgatggtgctgggctgcggtccgtaccacataggttcctcggtggagttcgattggtgtgccgtgagctcgatacggactttgcggcagctcggaaaaaagacggtggtggttaattgcaaccctgaaactgtcagcaccgactttgacgaatgcgacaagctgtacttcgaggagctttccctggaacggatcctggacatttaccaccaggaagcgtgcggagggtgcatcatcagtgtgggcgggcagatcccgaacaatctggccgtcccgctctacaagaacggcgtgaaaatcatggggactagcccactccaaattgatcgggcggaagataggtccatcttttccgccgtgctggacgaattgaaagttgcgcaggcgccctggaaggcagttaacaccttgaacgaagcactcgaattcgcaaagagcgtggactacccgtgcctgctgcgcccatcctatgtgctctcaggctcggcaatgaatgtagtgttctcggaggacgagatgaagaaattcctggaagaggccacccgagtgtcccaagagcatcctgtggtgctgactaagttcgtcgaaggggcccgcgaggtcgagatggacgccgtgggaaaggatggtagagtgatcagccacgcaatctcggaacacgtggaggatgccggtgtccactcgggcgatgcaaccctgatgctgcctacccagaccatctcgcagggagcgattgaaaaggtcaaagacgccaccagaaagattgccaaggcgttcgctatatcgggccctttcaacgtccagtttctggtcaagggaaacgatgtcctcgtcatcgaatgcaatctgcgggcgtcacggtcattcccgttcgtctccaagactctgggagtggacttcatcgatgtggccaccaaggtgatgattggggaaaacgtggacgagaagcacctcccgacgctggaccacccgattatccccgccgattacgtggcaatcaaagcccctatgttttcctggccgaggctgagagacgcggacccaatcctgcgctgcgagatggcgagcactggagaagtggcctgtttcggggaaggcatccataccgcgttcctcaaggcgatgctttcgactggattcaagatcccacaaaaaggaatcctgatcggaatccagcagtcttttcggccacggttcctgggcgtggccgaacaactgcataacgagggcttcaaactgtttgcgaccgaagctacttcggactggctgaacgctaataacgtccctgctaccccggtggcttggccgagtcaagagggccagaatccttcgttgtcctcaattcgcaaactgattagggacggtagcattgacctggtcatcaacctgccgaacaataacacgaaattcgtgcacgacaactacgtgatccgccggactgccgttgactcgggcatccccctgttgaccaacttccaagtgaccaaattgttcgctgaagccgtccagaaaagcagaaaagttgacagcaagtcattgttccactatagacaatattccgccggcaaggccgct

SEQ ID NO: 8070 - DNA, 4500 bp, synthetic construct
  misc_feature 1..4500: note = source = /note="Description of Artificial Sequence: Synthetic coding sequence"
  source 1..4500: mol_type = other DNA
atgacacgcatacttacagctttcaaagtcgtacgcacattaaaaactgggttcgggttcacaaacgtgactgcacaccagaaatggaaattttcccggcctgggatacgcctcctcagtgtgaaagctcagactgctcatatagtgctcgaagatggaactaagatgaaaggatattcgtttggacacccttcttccgtcgccggggaggtagtgtttaacacagggctcggggggtatcctgaagccattacagatcctgcctataaagggcagatcctcacaatggctaatcccataatcggaaatggaggggccccagatacaacagccttagacgaactaggattgtctaagtatctggaatctaatggaattaaagtgtcaggactccttgttttagactactctaaagactataaccattggctcgccacaaaatctttagggcagtggctccaggaagaaaaggtccccgctatatatggagttgatactcgcatgctcacaaagataatccgggataaagggacgatgctagggaaaatcgagttcgaagggcagcccgtagatttcgtggatcctaataaacagaacctcatcgctgaagtgtccacaaaagatgtcaaggtgtatgggaaggggaatccaactaaggtggtggcagtggattgcggaattaaaaataatgtaataaggctgttggtgaaacggggggccgaagtccaccttgtgccttggaatcacgatttcactaaaatggaatatgatggaatactgatcgccgggggacctgggaatccagcccttgcagaacccttgatccagaatgtgaggaagatactagagtctgatcgcaaggagcctcttttcgggatatctacagggaatctcatcactggactcgctgcaggggccaaaacatacaaaatgtccatggccaaccggggacagaaccagcctgtgcttaacataacaaacaaacaggccttcataacagcccagaaccatggatacgctctcgataatactctgcctgctgggtggaaaccactcttcgttaatgtgaatgatcaaacaaacgagggaatcatgcacgagtcaaagcccttttttgcggttcagttccaccccgaagtcacaccaggaccaatagatacagaatatctgtttgactccttcttttctctgataaaaaagggaaaagccactacaattacaagtgttctgcctaaaccagctcttgtggcttctagggtcgaagtgtctaaagtgcttatacttggatctggagggcttagtatcgggcaggccggggagtttgactatagtggatcccaggcagtgaaagccatgaaagaagagaacgtcaagacagtcctcatgaaccctaacatcgcctccgttcagacaaatgaagttggattaaaacaggctgatactgtgtacttcttacctatcacaccccagttcgtgactgaggtgataaaagctgaacagcccgatgggctcatactggggatgggggggcagacagctctgaactgtggagtcgaactgttcaagagaggagttctcaaagaatatggggttaaagttctgggaacttctgttgaatctatcatggctactgaagataggcagcttttttctgataaactcaacgaaattaatgaaaaaattgctccttcctttgctgtcgagtccatagaagatgccttgaaggccgcagatacaattggataccctgtgatgataaggtccgcatacgcactggggggacttgggtcaggaatctgtcctaatagggagactttaatggatctctctacaaaagctttcgccatgactaaccagatattagtggaaaaatctgtcactggatggaaagaaatcgagtacgaagtcgtgcgcgatgcagatgataactgtgtgacagtgtgtaatatggagaatgtcgatgctatgggagtccatacaggagattctgtggtggtagcaccagctcagactttgtctaacgcggaatttcagatgttgagaaggacttccatcaatgtggtacgacatttggggatcgtaggagaatgtaatattcagtttgcattgcatcctacttctatggaatactgtattatcgaagtgaatgctcgcctctcccgtagtagtgcgctagcttctaaagccactggatatcctctcgcattcatcgctgctaaaatagcactcgggatacccctgcctgaaatcaaaaacgtggtgtctggaaaaacgtcggcttgttttgaaccgtcattagactacatggtaacaaaaatccctcggtgggatctggataggttccatgggacaagttcacggatcgggagttctatgaaatcggtgggggaagtaatggccattgggaggacatttgaagagtctttccagaaggcccttaggatgtgccacccctctatcgaagggttcactcctaggctccccatgaataaagagtggccttctaacctcgatctcaggaaagaactctccgaaccatccagtactcgaatttatgccatcgccaaagccattgatgataacatgtctctagatgaaatagagaaacttacttatatagataaatggtttctatataaaatgcgggatatccttaatatggaaaaaacattaaaaggactgaactccgaatctatgacagaagaaacacttaagcgagccaaagaaataggattctccgataaacagatctccaaatgcctcgggctgacggaagctcagacaagggagttgcggcttaaaaaaaatatacatccttgggtaaaacagatcgatacacttgcggccgagtacccatctgtcacaaattacctttatgtcacttacaatggacaggaacatgacgtcaactttgatgatcacgggatgatggtactgggatgtgggccatatcatatcggaagttctgttgagtttgattggtgtgctgtcagttccatacgcactctcaggcagctcgggaaaaaaactgttgttgtcaattgtaaccctgaaactgtaagtactgatttcgatgaatgtgataaactctacttcgaagaactgagtcttgaaaggatccttgatatttaccatcaggaggcctgtggaggatgtatcataagtgttggagggcagatccccaacaacttagctgtcccattatataaaaacggggtcaaaatcatggggacttcccccctgcagatcgatagggcagaggatagaagtatcttttctgctgtcttagatgagctgaaagtcgcacaggcaccttggaaagccgtgaacacgttgaatgaagctctggagttcgcaaaatctgttgattatccctgtctccttagaccctcttatgttttgagtgggtcagcaatgaatgtcgtattctccgaagatgaaatgaaaaaatttctggaagaagccacgagggtctcccaggaacatccagtggtgctcactaagttcgtcgaaggggcccgagaagttgaaatggatgccgtgggaaaagatggaagagtgatttctcatgcaataagtgaacatgtggaagacgcaggggtacatagtggggatgccactctcatgctccctactcagactatctcacagggagctatcgaaaaagttaaagatgctactagaaagatagccaaagcatttgcaattagtggaccttttaatgttcagttcctcgtcaagggaaatgatgtacttgtgattgaatgtaacttgagggcttccagatcatttcccttcgtatctaaaactttaggggtggacttcatcgatgtggccacaaaagtcatgatcggagaaaacgttgatgaaaaacatctccctactcttgatcaccctattatacccgcagattacgttgctatcaaagcacctatgttttcctggcctcggttgcgggacgctgatcccatcctgaggtgcgaaatggcttccactggagaggtagcatgtttcggagaaggaattcacactgccttcttgaaagccatgctttcaacaggattcaaaataccacagaaagggatattaatcgggatacagcagagttttagacccaggttccttggagtggcagaacagctccataatgaagggttcaaacttttcgccactgaagccacatctgactggttgaacgccaataacgtgcctgcaactcctgtggcctggccttcccaggaagggcaaaatccctccctctcttctatccgcaaattaatcagagacggatctatagatctggttatcaacctccctaacaataacacaaaattcgtgcacgataactatgtgatccggaggacagctgtggattccggaatacccctcctgactaacttccaggttacaaaactatttgcagaagccgtgcagaaaagtcggaaagttgatagtaaatctcttttccactatcggcagtactctgcgggaaaagccgcc

SEQ ID NO: 8071 - DNA, 4500 bp, synthetic construct
  misc_feature 1..4500: note = source = /note="Description of Artificial Sequence: Synthetic coding sequence"
  source 1..4500: mol_type = other DNA
atgacaaggattctcacggccttcaaggtggtccggactctcaagacaggcttcggcttcaccaacgtcaccgctcaccagaaatggaaattttccaggcctgggattaggcttttgagcgttaaggcccagacagcccatatcgtgctggaggacggcactaagatgaagggatactctttcggacaccccagcagcgtggccggagaggtagtttttaacaccggcctgggaggctaccctgaagctattaccgatccagcgtataaaggccagattctgacaatggcaaatcctatcataggaaatggcggtgctccagatacaactgcccttgatgagctcggcctttccaagtacctggagtctaatggtatcaaggtgagtggtctcttggtccttgattactcaaaagattacaatcactggctcgccaccaaatctctgggtcagtggttgcaggaggaaaaagtgcccgcaatttatggagtcgacacaaggatgttgacaaagattatcagagacaagggtactatgttggggaagattgagtttgagggccaacccgtggattttgttgaccctaacaagcagaatctgattgcagaggtatcaaccaaagacgttaaggtgtacggaaagggcaatcctaccaaagtggtggcggtggattgcggcatcaaaaacaatgtgattaggctgctggtcaaacggggagccgaagtgcacctcgtcccttggaatcatgacttcaccaaaatggagtatgacggtatccttattgccggcgggcctggtaatccagcattggccgagcccctgatccaaaatgtgcggaagattctggaatccgaccgcaaggagccactcttcggtattagcaccggaaatcttattacaggactcgccgccggcgctaagacttataaaatgtccatggctaatcggggacaaaatcagcccgtgctgaatattactaataagcaggcgtttatcactgcacaaaaccacggctacgctttggacaatactctgccagctgggtggaagcctctgtttgtgaatgtaaatgaccaaacaaacgagggcatcatgcatgaaagcaaaccattttttgccgtgcagttccacccggaggttacaccagggcccattgacaccgagtacttgttcgattcctttttcagcctgataaagaagggaaaggccactaccatcaccagtgtgctgcctaaaccggctctcgtggcatctcgagtggaggtgtccaaagtattgatcctgggatccgggggtctcagcataggccaagctggagagttcgactacagcggctcacaggcagtcaaggcgatgaaagaagaaaacgtcaagaccgtcctgatgaaccctaacattgccagcgtgcagacaaacgaagtgggcctcaaacaggccgacacagtgtatttcctgcccattacacctcagttcgtgacggaagttataaaagcagagcaacccgatggtttgatactgggaatgggtgggcagaccgcacttaattgtggcgtggagctctttaagcggggagtgttgaaggaatatggagtgaaggttcttggtacctctgtggagagcataatggccactgaagacagacagctgttttctgacaagctgaacgagattaatgagaagatagctccttctttcgctgtggaatcaatcgaagacgccctgaaggctgcagacaccataggataccccgtaatgattcgatccgcctacgctctgggcgggctgggatctggaatctgtccaaatagggagactctgatggacttgtccacgaaggctttcgctatgacgaaccagattttggtagagaaaagcgtcactgggtggaaggagatcgagtatgaggtggtgcgggatgcggacgacaactgcgtgacagtctgcaacatggagaatgtggacgccatgggcgtccacaccggcgactctgtggtggtggcaccagcccagacactgagcaatgctgaatttcagatgctgagacgcacttccatcaacgtggtccggcatctgggtattgtcggagagtgcaatatccagtttgcactccatcccacgagcatggaatactgtataatcgaggtgaatgctagactgtcacgatcttctgcgctggcgtccaaggctacaggctacccattggcattcattgctgccaagattgcacttgggatccccctccccgagatcaagaacgtggtgtctgggaagacttctgcctgcttcgagccttctctcgactacatggtcactaaaatacctagatgggacctcgatcggttccacggtacctccagccggatcggttcaagcatgaaaagtgtgggtgaagtcatggccatcggcagaaccttcgaggaatcctttcagaaggccctgaggatgtgtcaccccagtatcgagggatttacacccagactgcccatgaataaggaatggcccagcaaccttgatctgagaaaggagctttccgaaccaagcagcacccggatatatgccatagccaaggccattgatgacaacatgtctctggatgaaattgagaaattgacttatattgacaagtggttcttgtataagatgagagacattctcaacatggaaaaaaccctgaaggggctcaacagcgagagcatgacagaggagaccttgaagagagccaaggagatagggttcagtgacaagcagataagtaaatgccttggtttgaccgaggcccagacacgggagctgaggttgaagaagaatattcacccgtgggtgaaacagatagataccctggcagccgagtatccctccgtcaccaattacctttacgtgacatataatggtcaggaacatgatgtcaatttcgatgaccacggcatgatggtgctgggctgcggtccttaccacatcggctcatccgtcgagttcgactggtgtgctgtcagctccattagaaccctgaggcagctgggaaagaagaccgtggtagtaaactgcaaccctgagacagtgagcaccgactttgacgagtgcgacaagctgtatttcgaggagctttccctggaacggatcctggacatctaccatcaagaggcctgcggaggttgtatcatttccgtggggggccaaatcccaaataatctcgcagtccctctgtacaagaatggggtaaaaattatgggaacctctcctctccagattgatagggccgaggatcggagcatcttctcagcagtgctggacgagctgaaggtggcgcaggccccctggaaggccgttaacacgttgaacgaagccctcgaattcgctaagtccgtggattatccctgtttgctgcgccctagttatgtactgagtggatctgccatgaacgtggtattttccgaggacgagatgaagaagttcctggaagaggcaacgagagttagtcaggaacacccagtcgtgctgacaaaatttgtcgaaggtgcaagagaagtggagatggacgctgtgggaaaggacggtagagtgattagtcacgcgatctcagaacacgtagaggacgcaggagtgcactcaggcgacgcgactctgatgctgccaacacagactatcagccagggagccatcgagaaagtgaaggacgcgactagaaaaatcgcaaaagcattcgctatctcaggcccgtttaacgtacagttcctggttaaagggaacgatgtactggtaattgagtgcaatctgcgcgccagtcgcagcttcccatttgtgtctaagacactcggggtggacttcatcgatgtagcaaccaaggtcatgatcggggagaacgtggacgagaagcacctcccaaccctcgatcatccgataatacctgcggactatgtggctatcaaagcccctatgttctcttggcccagactccgggacgccgacccaatcctcagatgtgaaatggccagtaccggagaggttgcctgctttggagaaggtattcacaccgcctttctgaaggcaatgctctctaccggattcaagatcccacagaaagggatcctgattggtatccagcagagcttcaggcctaggttcctgggagttgcagagcaactgcacaacgaagggttcaagctcttcgcgacagaagccacatccgattggttgaacgccaacaatgtccccgccacccctgtagcctggccttcccaggaggggcaaaatccatcactgtcttctatccggaagcttatcagagacggctccattgacttggtcatcaatttgcccaataacaacactaagtttgtccacgacaattacgttattaggcgaacagcggtagactcaggaatccctctgctgaccaatttccaggttaccaagctgtttgcagaggccgtacaaaaaagtcgaaaagtggattctaaaagtcttttccactacagacagtattctgctggcaaggcagcc

SEQ ID NO: 8072 - DNA, 4500 bp, synthetic construct
  misc_feature 1..4500: note = source = /note="Description of Artificial Sequence: Synthetic coding sequence"
  source 1..4500: mol_type = other DNA
atgactcgcattttgaccgctttcaaggtggtgcgtacgctgaagactggatttggatttacaaacgtgacggctcatcagaagtggaagtttagccggccgggcatccgattgttgtcagttaaagcccagactgcacacatcgtccttgaagatggtaccaagatgaagggatacagttttggacaccctagcagcgtagccggagaggtcgttttcaatactggcttaggggggtaccccgaagcgatcacagacccagcttataaggggcagatacttactatggctaatcccataatcggcaacggcggggccccggatactaccgctttggacgaactgggcttatcgaagtacctggagtccaacgggataaaggtcagtggacttctggtgctggattactcaaaagattacaatcactggctcgcaacaaagagtctaggtcagtggctgcaggaggaaaaagtacctgccatatacggggtggatactagaatgctgacaaaaatcatacgggataagggtaccatgctcggaaagatcgaatttgaggggcagccagtcgacttcgtggatcccaataagcaaaacctgatcgcagaggtgagcacaaaagatgtcaaggtgtacgggaagggcaatcccacaaaggtggtggctgtagactgtggaattaagaataatgtcattcggctgctggtcaaacggggcgctgaggttcacttggtgccctggaatcacgattttacaaaaatggagtacgatgggatcctgattgccggcgggcctggaaatcccgctctcgccgagcctctgatacagaatgtgcggaaaatattggagagtgacaggaaggagcccttgttcgggataagcacaggtaacctgatcacagggctggcagctggggctaaaacttataaaatgtctatggccaaccggggacaaaatcagcctgtccttaatatcacaaataagcaagccttcattaccgcgcagaaccacggatatgcactggacaacacattacctgccgggtggaaacctcttttcgtcaacgtgaacgatcagaccaatgaaggcattatgcatgaaagtaaacctttttttgctgtccagttccaccctgaagtgacgccgggtcccatcgatacagagtacctgttcgactctttcttctctctgatcaaaaagggaaaggctacgacaatcacttcagttcttcccaaacccgctctcgttgcctcccgcgtggaagtgagcaaggtgcttattctcggatcggggggcctctcaataggtcaggctggcgaatttgattactctggcagtcaggcagtaaaggccatgaaagaagaaaatgttaaaaccgtactaatgaaccccaatatcgcctccgtgcagaccaatgaagtcggtctgaagcaagctgatacggtttatttcttgccgatcacacctcagtttgtcacagaggtgatcaaggccgagcagcccgatggcctcatcttagggatgggaggtcagactgctctaaattgcggcgtcgagctgttcaagcggggtgtgctgaaggagtacggagtgaaggtgcttgggaccagcgtggagagcataatggctactgaagatcgccagcttttcagcgataagctgaacgagataaacgaaaagattgcaccttcattcgctgttgagagtatcgaagacgccctcaaggccgccgatacaataggctaccctgtgatgatacgcagtgcctatgccctggggggcctgggatctggcatctgcccaaacagagagaccctgatggatctgagtacgaaagcattcgctatgacaaatcagatcctcgtagagaaaagtgtgacaggctggaaagagatcgagtatgaagtagtccgggacgcagacgataattgcgttactgtttgtaacatggagaacgtggatgccatgggagtccatacgggagactccgttgtcgttgcacctgcacagaccctgtcaaatgcagaatttcagatgctgaggcgcacttccataaatgtggtgagacacttgggtatcgtcggagaatgcaacattcagttcgctttacatcccacaagcatggagtattgtatcatcgaagtcaatgcaaggctgagccgatcttcagcactggcttcgaaggccaccggatatcctcttgcctttattgctgcaaaaatagccttgggcatcccactccccgagattaagaacgtggtgtcaggaaagacatcagcgtgcttcgagccaagcctcgattacatggtcaccaaaatcccccgatgggacctggaccgctttcacggcacctcctcccgaatagggtcttcaatgaagtccgttggagaggtcatggctattggccgcacctttgaagaaagttttcagaaagcactgagaatgtgccatccctcaatcgagggtttcaccccgagattgcccatgaacaaggaatggccttccaacctcgatcttcgtaaagaactctccgagccatcttccacacgcatatatgccatcgcgaaggctatcgacgacaatatgtctttggacgagattgagaagctgacgtacatcgacaaatggtttctctataaaatgcgtgacatactcaacatggagaagacccttaagggtctgaattctgagtcaatgacggaggagacgttgaaaagagccaaagaaattggattctcagataagcagatttccaagtgtctgggcctgaccgaggcgcagacacgcgagctccgcctcaagaaaaacattcatccctgggttaaacagattgatactttggccgctgaatatcctagcgtgaccaactacttgtatgtgacctacaatggacaggagcacgacgtgaatttcgacgaccacggcatgatggttctcggatgcggtccgtatcatatcgggtcctcagtagagttcgattggtgcgccgtcagctccatcaggacactgcgccagcttggaaagaagactgtcgtagtgaactgcaacccggagaccgtgtctacagatttcgacgagtgcgacaagctgtattttgaggagctgagcttggagaggatccttgacatctaccaccaagaagcatgtgggggttgtatcatctccgtgggagggcaaatccctaataatctggccgtcccactgtataagaacggggtaaagatcatgggtactagccctcttcagattgatcgggctgaagaccgaagcattttttccgctgtgctcgatgagctgaaggtggctcaagccccctggaaggcagtgaacaccctcaacgaagctctcgagtttgctaaatccgtcgactatccatgcttactgaggccgtcgtacgtactttccggttcagccatgaacgttgttttcagcgaggacgaaatgaagaagttcctcgaggaggctacaagggtgtcccaggaacacccagtagttctcactaagttcgtcgaaggagccagagaagtggagatggatgccgtgggcaaagatgggagggtgatctcccatgctatttcggagcatgttgaggatgccggcgtccacagcggtgatgccaccctcatgctacctacacaaaccatctcacaaggggcaatcgagaaggtaaaggacgctactagaaagattgctaaagcatttgccatttccgggccctttaatgtccagttcttagtcaaagggaatgatgtgctggtgatcgagtgcaatttgcgggcatcaagatcctttcctttcgtctccaaaacattgggcgtggacttcatcgatgtagccacaaaggttatgattggagagaatgtggatgaaaaacacctgccgacattggaccatccgatcattccagccgattatgtagccattaaggcccctatgttcagttggcccaggctccgggatgctgaccccatcttgaggtgcgagatggcctcgacgggtgaggttgcttgcttcggtgaaggcatccacaccgcattcctgaaggcaatgctgtcaacaggtttcaaaataccacagaagggcatcttgattggtattcagcagtccttccggccgcgcttcctgggagtagccgaacaactccataatgagggctttaaactgtttgctaccgaagccacctccgactggttgaacgccaataatgtgcctgcgactccggtagcctggccaagccaggaaggacaaaatcctagcctcagcagtattaggaagttaatccgcgatggaagcatcgatctagttattaacctgcctaataacaatacaaaattcgtgcacgataactatgttatcaggaggactgcagttgattccgggatccccttgttgaccaacttccaggtgaccaagctgtttgcagaggccgtgcagaaatcaaggaaggttgattccaagtccttattccactataggcaatattcggcgggcaaggctgcc

SEQ ID NO: 8073 - DNA, 4500 bp, synthetic construct
  misc_feature 1..4500: note = source = /note="Description of Artificial Sequence: Synthetic coding sequence"
  source 1..4500: mol_type = other DNA
atgactaggatccttactgccttcaaggtcgtcagaaccctgaaaactggatttggatttaccaatgttactgcccaccagaaatggaagttcagccgccctggcatacgactgctgtctgtgaaggcacagaccgcgcacatcgtgcttgaggacgggactaagatgaagggctactcttttggacatccgtcgtcagtggctggcgaagtcgtctttaacactggtctgggcggataccctgaagcgattaccgacccggcatacaaaggacaaatcctgaccatggcgaaccctatcatcgggaatggaggagctcctgacaccactgctctcgatgagcttggattgtcgaagtacctggagtctaacggcattaaggtgtccggactcctggttctggactactcgaaggactacaatcactggctggccaccaaatcactgggacaatggctccaggaagaaaaggtgcccgcgatctacggagtcgacacccgcatgctcactaagattatccgcgacaaaggtactatgctcggtaagatcgaattcgagggacagccggtcgacttcgtggatccgaacaagcagaacctgatcgcggaagtgtcaactaaggacgttaaggtgtacgggaagggtaatccaactaaggtggttgccgtggactgtggcatcaagaacaacgtcatcaggctgctcgtcaaacgcggcgccgaagtgcacctcgtcccgtggaaccatgattttaccaagatggagtacgacggaatcctcatcgcgggcggaccgggcaatccagccctggccgaaccactgatccaaaacgtaagaaagatccttgagtcggatcgcaaggagccacttttcggcatctccaccgggaacctcattaccggcctggctgctggcgccaagacgtacaagatgtcgatggccaatagaggacagaaccagccggtgctgaatatcactaataagcaagcatttatcactgcccagaatcatggatacgcactggacaacaccctcccagcaggatggaagcctctcttcgtaaacgtgaacgaccaaaccaatgaaggaattatgcacgaatcgaagccgttcttcgcggtgcaattccaccctgaagtgaccccggggcctatcgatacggaatacttgttcgacagcttcttctcgctgatcaagaagggaaaagccaccaccatcacctcggtgctgcctaaaccggccttggtggcttcaagagtcgaagtcagcaaggtcctcatccttggaagcgggggactttcaatcggacaggcaggggagtttgactactcgggatcgcaagccgtgaaggcaatgaaggaggaaaacgtaaaaaccgtcctgatgaacccgaatatcgcttcggtgcaaactaacgaagtaggattgaaacaggcggacacggtgtatttcctgccgatcaccccacagttcgtaactgaagtgatcaaggcagagcagcctgacggactcatcctcggcatgggtgggcaaaccgccctcaactgcggagtggagctcttcaagcggggggtgttgaaggagtacggggtcaaggtgctgggaactagcgtggaatcgattatggccaccgaagatcggcagctcttttccgacaagttgaacgaaatcaacgaaaagattgcaccatcattcgctgtggagtctatcgaagatgctctcaaggcagcggacacgatcggatatccggtgatgattcgcagcgcttacgccctgggaggactgggatcaggcatctgccccaatcgcgagactctgatggacctgtctaccaaagcgttcgcgatgacgaaccagatcttggtagagaagtcggtgacgggatggaaggagatcgaatacgaggtggtgcgcgacgcagatgataattgcgttactgtctgtaatatggaaaacgtggacgccatgggggttcatactggggattccgtggtcgtcgctccagcgcaaaccctgagtaacgctgagttccaaatgctccgccggacctccatcaacgtcgtccggcacctcggcatagtgggagaatgcaacatccaatttgccctgcacccgactagcatggaatattgcatcatcgaggtcaacgcgagactctcccggtcatccgcgctcgcctccaaggccaccggataccctttggctttcatcgctgccaaaatagctctgggcattccgctgcccgaaatcaagaacgtggtgtccggcaaaacctccgcatgcttcgaaccttccctggattacatggtcaccaaaatcccacggtgggacctggacagattccacggcacttcctcacgcatcggatcctcgatgaaatcagtgggagaggtcatggcgataggtaggactttcgaggaatcctttcagaaggcgctgcggatgtgccacccgagcatcgaaggatttacgccgcgtctcccaatgaataaagaatggcctagcaatctggacctgcggaaagagctgagcgaacccagctcgacgcgcatctacgctatcgccaaggccatcgacgacaacatgtccctcgatgagatcgagaaactgacctacattgacaagtggttcctttacaagatgcgggatattctcaacatggaaaagactctgaaaggacttaactccgaaagcatgactgaggagactctgaagcgggcgaaggaaatcggattttcagataagcagatcagcaagtgcctgggactcaccgaggcgcagacgcgcgagctgaggctgaagaaaaacatacacccgtgggtgaaacagattgacacccttgccgccgaatacccgtcggtgactaactacctgtacgtgacctataatggtcaggaacacgatgtcaacttcgatgaccatggcatgatggttctcggatgtggaccgtaccatatcggaagctcagtcgaatttgattggtgcgccgtgagctccatccggactctcaggcagctggggaagaaaaccgttgttgtcaactgtaatccggaaaccgtctccaccgacttcgatgagtgcgataagctgtacttcgaggagctcagcctcgagagaatcctggacatctaccatcaggaggcctgtggaggctgcatcatctccgtaggaggtcagatccccaacaacctggccgtgccattgtacaagaatggagtcaagattatggggacttcgccgctccagatcgacagggccgaagatcgctccatctttagtgcggtgcttgacgaactgaaggtcgcacaagcaccgtggaaagcggtgaacaccctcaatgaagcactggaattcgccaaatcggtggactacccgtgcttgttgcgaccgtcttacgtcctgtctgggtccgcaatgaatgtggtgttcagcgaggacgagatgaaaaagtttctggaagaagccacccgggtttcgcaggagcatccagtggtcctgactaaattcgtggagggagcaagagaggtggagatggacgctgtgggaaaagacgggagagtgatcagccacgccattagcgagcatgtcgaagatgctggcgtgcactcgggcgatgccaccttgatgctgccgacccaaaccatttcgcaaggtgcgattgaaaaagtgaaggatgcgacccggaaaatcgctaaggccttcgccatcagcggacccttcaatgtgcagttcctggtgaagggaaacgacgtgctggtcatcgaatgtaatctgcgggcatcccgctctttcccattcgtgtcgaaaacgttgggcgtggacttcatcgatgtggctactaaggtgatgattggtgaaaacgtggatgagaagcatctgcctactctcgaccacccgatcatcccggctgactatgtcgcaattaaggcaccaatgttttcgtggccgagactgcgagacgccgacccaatcctcagatgcgaaatggccagcactggggaggtggcctgcttcggggaaggcatccacacggccttcctgaaggcgatgctttctaccggttttaagattccacagaagggtattctgatcggcatccaacaatcgtttcgcccgagattcctcggagtcgctgaacagctgcacaatgaaggattcaagctcttcgccaccgaggccactagcgattggctgaacgcaaacaatgtccctgccaccccagtggcctggccctcgcaggagggacaaaacccctcgctgtcgtcaattcggaaactgatcagagacggcagcatcgatctggtgatcaacctccccaataacaacaccaagttcgtgcatgacaattacgttatccgccgcactgcggtcgattccggcatcccgctgttgaccaatttccaggtgactaagttgttcgcggaagcggtgcaaaagtccaggaaggtggactcgaaatcactgttccactatagacagtactcagcaggaaaggcggcc

SEQ ID NO: 8074 - DNA, 4500 bp, synthetic construct
  misc_feature 1..4500: note = source = /note="Description of Artificial Sequence: Synthetic coding sequence"
  source 1..4500: mol_type = other DNA
atgactagaattttgactgcattcaaggtggtgcgcaccctaaaaacaggatttggcttcaccaatgtgaccgcccatcagaagtggaagttctctaggcccggtatccggcttttgtccgtcaaggcacagactgcccatatcgttctggaggatggaactaagatgaaaggctacagcttcggacacccatctagtgtcgctggtgaggtcgtcttcaacactggactcgggggttaccctgaggccatcactgacccagcatataagggacaaatcctcacaatggcgaaccccattatagggaacggcggcgccccagacactaccgctctggacgaattgggcctgagcaaatacctcgagtctaatggcatcaaagtgagcggactgctcgttttggactacagtaaggattacaaccattggttagccaccaagtccctcggccagtggctccaagaggagaaagtgcccgcaatttacggagtcgatactagaatgctcactaagatcattcgagataaaggcaccatgctggggaagattgagttcgaaggacagcctgttgattttgtggaccctaataagcagaacttaatcgcagaggtctctacaaaggatgtgaaagtttacggcaagggaaaccctaccaaggtggtggccgtggactgcggaatcaagaataacgtgatccggctcctcgttaaacgcggcgcagaagtccacctcgtaccatggaaccatgattttacaaaaatggagtatgacggtattttgatcgcgggcggacccggcaatcccgcgctcgctgaaccgttgatacagaacgtgcgcaaaatcctggagtcagacaggaaggagcccctctttgggatctcaaccgggaatttaattacaggcttggccgcaggagctaagacatacaagatgtcaatggccaatcggggacaaaaccaacctgttctgaacattaccaacaagcaggcctttataaccgctcagaatcatgggtatgcactagataacacccttcctgcagggtggaagccactcttcgttaacgtcaacgatcagacaaatgaaggtatcatgcacgaaagtaaacccttttttgccgtgcagttccacccagaagtcacccctgggccaatagacaccgaatatctgttcgactcgttcttcagtctcattaaaaagggaaaagccacaaccattacctccgtcttgcccaaaccagccctcgtcgcgtctagggtggaggtgtctaaggtccttatattaggatctggagggctctccataggtcaggccggggagttcgactactccggcagccaggcggtgaaagctatgaaagaggagaatgtcaaaacagtgcttatgaaccccaacatcgccagtgtgcaaacaaacgaggtggggctcaagcaggcagataccgtctatttcttacctattactcctcagtttgtaacagaggtgattaaagctgagcagccggacggactgatcttgggcatgggtgggcagacggcacttaattgtggcgtggagctctttaagcgtggagtgctgaaggagtacggagtgaaggttctggggaccagcgtggagtcaatcatggccaccgaggaccgccagttgtttagcgataagctgaatgagattaatgaaaaaatagcaccatcctttgctgtggaaagcatagaggacgccctaaaggccgccgacacaatagggtatccagttatgataagatccgcgtatgcattaggaggattaggcagcggaatctgcccgaaccgcgagactttgatggacctctcgacaaaagcatttgctatgaccaatcagatcctggtggagaagtcagtgaccgggtggaaagaaattgagtatgaagtagtccgggatgccgacgacaattgcgttacagtctgcaacatggagaacgtagacgcaatgggcgtacacactggcgacagcgtggtggtggcgcccgcccagacattgtccaacgccgaattccaaatgctgaggcggacaagcattaacgtggtcaggcacttgggaattgtgggagagtgcaatatccaattcgcactccacccaaccagtatggagtactgtattattgaagttaatgcccggctctcccgtagctcagctctggcctctaaagccacgggctatccactggcattcattgctgctaaaatagctctgggcatacccctgccggagatcaagaatgtcgtctccgggaagacttctgcgtgctttgaaccgagtctggattacatggttactaaaatcccgcgatgggacctcgataggtttcacggcacttcttcgagaatcggatcttcaatgaaatcggttggagaggtgatggcaatcggacgtacttttgaagagtcctttcagaaggccctgaggatgtgccatccatctatcgagggctttacccccaggctgccaatgaataaggagtggccgagcaatctcgacctccgaaaagagctctccgagccttcttcgaccaggatctacgctatagcaaaagcaattgacgacaatatgagcttggacgagatcgagaaattgacttatatagacaagtggtttctttataagatgcgcgatatactcaacatggagaaaacactcaagggattgaacagcgagtctatgacagaggaaactctcaagcgggctaaggagattggattttctgataaacagatcagcaaatgtctcgggctcaccgaagctcagacaagagagctaaggttgaagaagaacattcacccctgggtgaaacagatcgataccctcgctgccgagtatccttctgtgaccaactatctctatgtgacttacaatgggcaggagcacgacgttaattttgacgaccatggcatgatggtcctcgggtgtggcccatatcacataggctcctccgtggagtttgattggtgtgccgtgtccagtattcggaccctgcggcagctgggcaaaaagactgtggtcgtgaattgcaaccccgagactgtgtcaaccgatttcgatgaatgcgataaattgtatttcgaagaactgagcttggagagaattctagatatataccaccaggaagcttgcggggggtgtatcatctctgtgggcggccagattcctaataatctggcagtgccactgtacaaaaatggagtaaagatcatgggcacttcacctttacagattgatcgtgctgaggacagaagcatattttctgcagttctcgacgagctgaaggtcgctcaggcaccatggaaagcagtgaacaccctgaatgaggccctggaatttgcgaagtcggtggactacccctgtcttctcaggccgagttacgtgttaagtggctccgcaatgaatgtggtgtttagcgaggatgagatgaagaaattcctggaagaggccacgagggtttcacaggaacatccggtggtgctcaccaaatttgtggagggggctagggaggtggaaatggatgcggtgggaaaggatggccgggtgatctcacatgcaatttcggaacatgtggaggacgctggggtgcatagtggggacgcaacccttatgctgccaacccagacaataagccaaggcgccattgaaaaagtgaaagatgcaactcgcaagattgcgaaggcgttcgcaatttccgggccttttaatgtccagttcttagtaaaggggaacgatgtgctagtaatagaatgcaacttgcgggcctctcggagctttccatttgtatcaaagaccctcggagtggactttattgacgtggcaacaaaagtgatgataggcgagaatgtcgatgaaaaacatctgccaacactggaccatcctatcatacctgctgattacgtagcgattaaagctccaatgttcagttggcctcgccttcgcgatgcggatcccatactccgctgtgagatggcatctacaggggaggtggcgtgcttcggagaggggatacacaccgcctttctgaaggccatgctatctaccgggttcaaaattccccaaaagggtatccttatcggcatccaacagtcatttcggcccaggtttctgggcgtggcagaacagctacataatgaaggatttaagctcttcgccaccgaagctacctctgattggctgaacgccaataacgtacctgccacccccgtggcctggccttctcaggaggggcagaatccatctttatctagtatcaggaaattaatccgggatggctcgatcgatctggtgatcaacctgcctaacaataataccaaatttgtccacgacaattatgtcattcggcggaccgccgtggattccggtatccccctcctcaccaatttccaggtcacaaaattgtttgccgaagccgtgcagaagtcacgaaaggttgactccaagtcactgtttcactaccggcagtactctgcaggaaaggccgct

SEQ ID NO: 8075 - DNA, 4500 bp, synthetic construct
  misc_feature 1..4500: note = source = /note="Description of Artificial Sequence: Synthetic coding sequence"
  source 1..4500: mol_type = other DNA
atgaccagaatactgacggcctttaaggtcgtgaggacgctgaagaccggcttcggattcaccaatgtcacagcccaccaaaaatggaagttctctcgccctggtataaggctgctgtcagtgaaagcccagacggcccacatcgtgttggaggacggaactaagatgaagggctactccttcggccacccctcatctgtggctggcgaggtggtctttaacaccggtctcggaggttacccggaggctatcactgaccccgcctataagggacaaatcctgacgatggctaatccgatcattggtaacggaggagctcctgatacaactgctctggatgaactgggtctgagtaaatacctcgaatctaacggcatcaaggtctctggtctgctggtgctcgactacagtaaagattataaccattggctggcgacaaaatccctcggtcagtggctccaagaggagaaagtccctgcaatctacggcgttgatactagaatgctgactaagattatccgcgataagggcacgatgctgggcaagatcgagtttgagggccaacctgtcgacttcgtcgatccaaacaagcagaatctcatagcagaggtgtccacaaaggacgtgaaggtctacggcaagggtaaccccaccaaggtcgtggcggtagactgcggcatcaagaacaacgttatcaggctcctggtgaaacgcggtgccgaggtccacctggtgccgtggaatcacgacttcactaagatggaatacgatggcatacttatcgcaggcggtccaggaaacccggcactcgctgagcccctgatacagaacgttagaaaaatcttggaaagtgaccgcaaggaaccactgtttggaatcagcaccggaaacttgattacaggccttgctgccggtgcaaagacgtataagatgagcatggccaacagaggacagaaccagcccgtcctgaatataacaaacaagcaggcattcatcaccgctcagaaccacggttacgccctggacaataccttgcctgcgggttggaagccacttttcgtcaacgtgaatgatcagaccaatgaaggcattatgcacgaatccaagccttttttcgctgttcagttccatccagaagttacccctggccctatcgataccgagtatttgttcgacagctttttcagtctcataaaaaagggcaaagctaccactataacctccgtgcttccgaaacctgcgctcgtggcaagcagagttgaggtcagcaaggtgctgattcttggcagtggtggtctctccattggccaggcaggcgagttcgactactcaggaagccaggcggtgaaggctatgaaggaggagaacgtgaagacggtcctgatgaatcccaacatcgcatcagtccaaacgaacgaagtcggactcaaacaggcagacacagtctatttcctgccaataacaccacagtttgtgacagaagtgattaaggccgaacagcccgacggcctgattctgggaatgggtggtcaaaccgctcttaactgcggcgttgagctgttcaagaggggagttctcaaggagtatggagtaaaagtgctgggcacttccgttgagagtatcatggctaccgaggacagacaattgttctcagacaaacttaacgagatcaacgaaaaaattgcaccatccttcgccgtggaatctattgaggacgctctcaaagcagccgataccattggctatcctgtcatgatccgcagtgcctacgccttgggcggcctgggaagtggcatttgtccaaatcgcgaaaccctgatggacctgtccaccaaagctttcgctatgactaatcagattctggtggagaagagcgtgaccggctggaaggaaatcgaatacgaagtcgttagggacgcagatgataactgcgttacggtttgtaacatggaaaatgtagatgcgatgggtgtgcacacaggtgattctgtggtggtcgcccccgcacagactttgtctaacgcagagtttcagatgctgagaaggaccagtataaacgttgtccgccacctgggaatagttggagagtgtaacatccagtttgctcttcaccctacttcaatggaatactgtatcatcgaggtgaatgcaaggctttcccgcagcagtgcactcgcttccaaggcaactggttatccccttgctttcatcgctgctaaaattgcgctcggcattcctctgcccgaaatcaagaacgtggtatccggtaagaccagcgcttgcttcgagccttcactggactacatggtcacaaaaataccccgctgggatttggatcgcttccatggcacttccagcagaatcggaagcagtatgaaaagcgttggtgaagtgatggcgataggaaggacctttgaggagagctttcaaaaagccctgcgcatgtgccacccatctattgaaggtttcacgccaaggctgcccatgaataaagaatggccgtctaatctcgatttgaggaaggagctgtcagagcctagttccaccagaatctacgccatcgctaaggccattgacgataacatgagtctggacgagatagaaaagctgacatacatcgacaagtggttcctttataaaatgcgcgacattctcaatatggagaaaaccctcaagggtctgaattcagaaagcatgacagaggagacactgaaaagggccaaggagattggctttagcgataagcaaatttccaaatgcttgggattgacggaagcccagacccgcgaattgcgcctcaagaagaacattcacccgtgggtaaaacagatcgacactctcgcggctgagtacccgagcgtgacaaattatctgtacgtgacctataatggtcaggagcatgacgtcaactttgacgatcatggtatgatggtcttgggatgtggtccttatcatatcggaagctcagtcgagttcgattggtgcgccgttagctccatcagaacgctccgccaactgggtaagaagactgttgtggtcaactgcaacccagaaacagtgtccacggacttcgacgaatgcgacaagttgtatttcgaggagctgtccctcgaacgcatcctggatatctaccaccaagaggcgtgtggcggctgcatcatttcagtgggcggtcagatcccgaataatctcgcggtccctctgtacaaaaatggcgttaaaataatgggtactagtccccttcagatcgatcgcgcggaagacaggtcaatcttctccgccgttttggatgagctgaaggttgcacaagctccgtggaaggcagtcaacaccctgaacgaggcgctggagttcgcaaagtctgtcgactatccgtgcttgctccgcccctcttacgtattgtcaggttcagctatgaacgtggtctttagcgaggatgagatgaagaaattcctggaggaggcaacaagagtctcccaggaacatccggtagtcctcactaagtttgtggaaggagctcgcgaggtggagatggacgcagtgggcaaggacggaagggttatctcccatgcaatctctgagcacgttgaggatgcgggagtccattctggcgacgcgacactgatgttgccgacccagacgatctcccaaggtgcgatcgaaaaggttaaggacgccactaggaaaatcgccaaagcttttgcaatatccggacccttcaacgttcagtttctggtaaagggtaatgacgtactggttatcgaatgtaatctccgcgcttctagatccttccctttcgtctccaaaactctgggagtcgatttcatcgacgtagccactaaggttatgatcggtgagaacgtggacgagaaacatctgcctactctcgaccatccaattatacccgctgattacgtggctatcaaggccccaatgttctcctggcctagactcagagatgctgacccgatactgaggtgtgaaatggctagtacgggtgaggttgcttgcttcggagagggcatccacacggcttttctcaaggccatgctctctactggctttaaaattccccagaagggcatcctgatcggaatccagcaatctttcaggccaagatttttgggtgtagccgaacagctgcacaatgagggtttcaagctcttcgcaactgaagctactagcgactggcttaatgctaataacgtccccgccactcccgtcgcctggccttctcaggagggacagaatccctcactttcctcaatccgcaagttgatccgcgacggctccatcgatctggtgatcaacctccctaacaataacacaaagttcgtgcatgacaattatgtgatccgcaggactgcagtggacagcggcatccctctcctgactaactttcaggtcacaaagctcttcgccgaggctgtccagaaaagccgcaaagttgactctaaaagtcttttccactatcgccaatacagcgccggtaaagcagcc

SEQ ID NO: 8076 - DNA, 4500 bp, synthetic construct
  misc_feature 1..4500: note = source = /note="Description of Artificial Sequence: Synthetic coding sequence"
  source 1..4500: mol_type = other DNA
atgactaggattctgactgcattcaaagtcgtgcggaccctcaagacaggtttcggcttcaccaacgtcactgcccaccagaagtggaaattttctcgtcccggaattcgcctgctttcggttaaggcacagaccgcccacattgttttggaagatgggacaaagatgaaggggtacagctttgggcacccctcgagtgttgctggggaggtggtgtttaatactggcttggggggctatccagaggccattacggatccggcatataaaggtcagatcctgaccatggccaatcccataattgggaacgggggggcccctgatactacggccttagacgaactgggcttgtctaagtatctggaatctaacggtatcaaggtttccggactgctggtgcttgactactccaaggattacaaccactggctggctaccaagtctctcggacaatggctgcaggaagagaaggtcccagctatctacggtgtcgacacccggatgttaactaagataattagggacaaggggacaatgttaggcaagatcgagttcgagggacagcctgtcgattttgtcgacccgaacaagcagaatctgattgcagaagtatccactaaagatgtgaaggtttacgggaaggggaatcccactaaggtggtcgcagtagactgtggtattaaaaataatgtgattcggctgctggtcaaacggggggcagaggtgcaccttgtgccttggaaccacgattttactaagatggaatacgacggcatcctgatcgccggcggacctggtaatcctgccctcgccgagcctctgatccagaatgtccgtaagatcctcgaatcagaccgcaaagagcccctgttcgggattagtacgggaaacctcattaccgggttagccgcaggtgccaagacatacaaaatgtctatggccaacagagggcagaaccagcccgtgctgaacatcacaaacaaacaggcctttattacggcacagaaccacggttatgccctggacaacacactgcccgccggttggaagcccttgtttgtgaatgtcaacgaccagactaacgaggggattatgcacgaatcaaaaccattcttcgcagtccagtttcacccagaagttacccccgggcccatcgataccgagtatctattcgatagtttctttagtctgattaagaaaggcaaggcaactaccatcacctcagtattacccaagcccgcacttgtggcctcacgggtcgaggtgtcaaaagtgttaatcctcggttctggtggactgtcgatcggccaagccggcgagttcgattatagtggatcgcaggctgtcaaggctatgaaggaagagaatgtgaagaccgtgctgatgaacccgaatatagccagcgtgcagaccaatgaggtaggtttaaagcaagccgataccgtgtactttctgcccatcacaccacaattcgtcacagaggttatcaaggccgagcagcccgatggtttaatcctgggcatgggaggacagaccgcactgaactgcggggtggagcttttcaagcgaggcgtactgaaagagtatggcgtgaaggttcttggcacctctgttgagagtataatggccactgaggatcgccagctgttttctgacaagctgaacgaaatcaatgaaaagattgcaccaagctttgcggtcgaatccatcgaagacgctttaaaggctgccgacactataggctacccggtgatgatcagatccgcctacgctctaggggggctcgggtcggggatatgtcctaacagagagacactgatggacctctcaacgaaagcgttcgccatgaccaatcagatcctggtagagaagtcggtcacagggtggaaagagattgaatatgaggttgtgagagatgctgatgacaactgcgtcaccgtctgcaacatggagaatgtggacgccatgggagtgcataccggtgactccgtggtggtcgctcctgcacagactttaagtaacgccgagtttcaaatgttacggcggactagcatcaatgtggtgcgccacctgggtattgtcggggagtgtaacattcagtttgcattgcaccctacatctatggagtattgcattatcgaagtaaacgccagactctcccgatcatcagccttagcttcaaaggcgacaggttaccccctggccttcatagcagcaaaaatcgccctgggcatacctctgcccgagatcaagaacgtcgtaagtgggaaaacaagcgcgtgttttgagccctcactggactacatggtcactaaaattccaagatgggacctggatcggttccacggtacaagtagcaggattggtagctccatgaagtccgttggggaggtcatggccatcgggaggacctttgaagaatccttccaaaaggcactgcgcatgtgccatcccagcatagagggctttacaccgcgtctgccaatgaacaaggagtggccaagcaacctcgatctgcgcaaagagctcagtgaaccttccagtacaagaatctacgccattgcaaaagcaattgatgataacatgtcacttgatgagatagagaagctgacttacattgacaagtggttcctgtacaagatgcgggatattttgaacatggagaagacactcaaggggttgaactctgagagcatgacagaagagaccctcaagcgcgccaaggagataggtttctctgacaagcaaatctccaaatgtcttggtttgactgaggcccagacacgcgagcttaggttaaagaagaacattcacccgtgggtcaagcaaatcgatacgttggccgccgaatatccatctgtgactaactatttgtatgtaacatacaacggccaggagcacgacgttaacttcgatgaccacggcatgatggttctcggctgcggtccctaccacattgggtcaagtgttgagttcgactggtgtgccgtgtcgagcatccgcacactccgccaactgggaaaaaaaacagtcgtggtgaactgcaatcccgaaacagtctctaccgacttcgatgagtgcgataaactgtacttcgaagaactctcattggaacgtattctggacatctatcaccaggaagcatgcgggggatgtataataagcgtaggagggcagatccctaacaatctcgcagtaccgctgtataagaatggggtcaagataatgggcacgtccccgctccagatagaccgtgccgaagacaggtcaattttctctgcggtgctggatgaacttaaagtagcacaggctccgtggaaggcagtcaatacactcaacgaggcactcgagttcgccaaatcagtcgattatccctgcctcctacgccccagctatgtacttagtgggtccgctatgaacgtggtgttttccgaagacgagatgaagaagttccttgaggaagcgacaagagtgtcccaagagcaccctgtggttctcaccaaattcgtggagggtgcgagggaggtggagatggatgcagtgggaaaggacggacgcgtgatctctcatgctatcagtgaacacgtcgaggacgccggggtccatagcggggacgctaccctgatgcttccaacacagacaatttcccaaggcgccattgaaaaagtaaaagacgccactaggaagatcgcaaaagcgtttgccatatcaggaccatttaatgtgcagttcttagtgaagggcaacgatgtgctggtgattgagtgcaatctgcgtgcctcccgcagttttcccttcgtctccaagacactaggagtcgactttattgatgtagctaccaaagtcatgatcggcgagaacgtggatgaaaagcatctgcctaccttagaccacccaattattcctgcagactatgttgccatcaaagcccctatgttttcgtggcccaggctgagagatgccgaccccattttgagatgcgaaatggcctccacgggcgaggtggcttgttttggagaaggtatccacacagcgtttctgaaagccatgcttagcacgggttttaagattccgcagaaaggcatcttaattggcatacagcaatcctttagacctagatttctgggcgtagctgagcagctgcataacgaggggtttaagttgtttgccacggaagccacgagcgactggctcaacgccaacaacgtgcccgccaccccagtagcgtggccttctcaagaaggacagaacccctctctttctagtatacggaagctcatcagggacggtagtatcgaccttgtgattaatctgccaaataacaatactaaattcgtccacgataactatgtgatccgcagaaccgccgttgactcgggtataccacttctcacaaacttccaggtgacaaagctttttgcggaggccgtacaaaagtcccggaaggtcgattctaagtcactgttccattaccgccagtatagtgcaggaaaagccgcc

SEQ ID NO: 8077 - DNA, 4500 bp, synthetic construct
  misc_feature 1..4500: note = source = /note="Description of Artificial Sequence: Synthetic coding sequence"
  source 1..4500: mol_type = other DNA
atgactcgaatactgacagcctttaaagtggtaagaacactgaagactggattcggattcacaaacgtgacagcccaccagaaatggaaattttctagacccggaatcagattattaagtgtaaaagctcagacagctcatatagtgttggaagatgggacgaaaatgaaaggatactccttcgggcatccttcttccgttgcaggagaggtggttttcaatactggactaggagggtatccagaagctataacagatcctgcttataaagggcagatcctaacaatggctaaccccattataggaaatgggggagcccccgatactacagccttggatgaactaggactaagtaaatatctggaatctaacgggattaaagtatctggactccttgtgctagactactctaaagattataaccattggttggctacaaaaagtctgggacagtggctccaggaagaaaaggtgcccgccatttacggggttgatacacgaatgctaactaaaatcattagggataaagggacgatgctaggaaaaatcgaatttgagggacagcccgtggactttgtagatccaaataagcagaatctgatcgctgaagtttctacaaaggatgtaaaagtgtatggaaaagggaaccccacaaaagtggtggccgttgattgcgggattaaaaataacgtcatccggctcctagtaaagcggggagctgaggttcacctcgtaccctggaaccatgattttactaaaatggaatatgatgggatcctcatagccgggggaccaggaaatcctgcccttgccgagcctctgatccagaatgtgcggaaaatcctggagtccgatcgaaaagaacccctctttggaatctccacagggaatctaatcactggactcgccgcaggagctaagacttataaaatgtcaatggctaacagaggacagaaccagcccgtactgaatatcacaaacaaacaggcctttataactgcccagaaccatgggtatgccctcgataacacactccctgccggatggaaacctcttttcgttaatgttaacgatcaaactaatgaaggaataatgcatgagtctaaaccattttttgccgttcagtttcacccagaagtcacaccagggcctattgatactgaatatctttttgactcattcttcagtttaataaaaaaagggaaggctactactataacaagtgtcttacccaaacctgccctcgtggccagtcgggtagaagtctccaaggtgctaatactgggaagtggaggattgtccatagggcaggcaggagaatttgattatagtgggtcacaggccgtgaaggctatgaaagaggagaacgtaaaaactgttctaatgaatcccaatatagcgtctgtgcagacaaacgaagtaggactgaaacaggcagatacggtgtatttcctccctatcacaccccagtttgttacagaggtgatcaaagctgaacagccagacggactgattcttggaatggggggacagactgcattaaactgtggggtagaattattcaaacgcggggtgctcaaagagtatggggttaaagttctaggaacatccgtcgagtctataatggctacagaagataggcagctcttctctgataaactgaacgaaataaatgaaaaaatagcccccagttttgctgttgaatctattgaagatgcactgaaagctgccgacacaataggatatcctgtgatgatcaggtctgcatatgccctggggggactagggtccggaatttgccctaacagagaaactctgatggatctctcaacaaaggcgtttgctatgacaaaccagatcctcgttgaaaagtctgttacagggtggaaggaaatagaatatgaagtagtacgtgacgctgatgacaattgtgtgactgtgtgcaacatggaaaatgtggatgccatgggagttcatacaggggattctgtggtagtggcgcccgctcagacactctctaacgctgaatttcaaatgctaaggagaacttctatcaacgtagtcagacatcttgggatagtgggggagtgcaatatacagtttgctctacaccccacatccatggagtattgtataatcgaagtaaacgctagactgtcgagatcttctgcattggcttctaaagcaacaggatatcctctggcctttattgcggccaaaatcgcactgggaataccactaccagaaataaagaatgtggtttctgggaaaacttccgcatgcttcgaaccttccctggattatatggtaacaaagatacctagatgggacctcgacaggttccacggaacgtcttctaggatcggaagttccatgaaatccgtaggagaagtgatggctatagggcgcacttttgaggagtcttttcagaaggctctgcggatgtgccatccttccatcgaggggtttacacccagattacccatgaacaaagagtggccctccaacctggatttgcggaaagaactgtctgaaccttcctctacacggatttatgctatcgctaaagcaatagatgataatatgtctcttgatgaaatcgaaaaactgacatatatcgataaatggttcttatataaaatgcgagatatcctcaatatggagaaaacactaaaagggttgaattctgagtcaatgacagaggaaacactcaaacgggctaaagaaattggattttcagataaacagatatctaagtgccttggacttactgaagcacagacaagagaactgcgccttaaaaaaaatatccacccttgggtgaaacaaatcgacactctcgcagccgagtatccctctgtgacaaactatctgtatgtcacatacaacggacaggaacatgatgtgaacttcgatgatcatggaatgatggtgctggggtgtggaccatatcacataggatcctcagtggaattcgattggtgtgcagttagtagtattcggacactgagacagctcggaaagaaaactgttgtcgtgaattgcaacccagaaactgtttcgacagatttcgatgaatgcgataaattatatttcgaagagctttctctggagcggatcctcgatatctaccatcaggaggcatgtggggggtgtataatctcagtgggggggcagatccccaataatttggcggtgcctctatacaaaaatggggtgaaaataatggggacatcgccattgcagatcgatcgggcagaggatcggagtatcttttcggctgttctggatgaactgaaagttgcacaggcgccatggaaagccgtcaatacacttaatgaggccctggaattcgctaaatccgtggattacccctgcttgctcaggccgtcatatgtcctttcaggatcagctatgaacgtagtcttttcagaagatgaaatgaaaaaattcctagaggaagccacacgggtttctcaggaacaccccgtggtcctgacaaaattcgtggaaggggctcgtgaggtcgaaatggatgctgttgggaaagatgggagggtgatctcacacgctatatctgagcatgtggaagatgcaggagtacatagtggagatgccacactcatgctcccaacacagacaatatctcagggggctatcgaaaaagtcaaggatgccacaaggaagatagccaaagcttttgcaatctctggaccattcaatgtgcagtttctagtcaaaggaaacgatgtgctagtgatagaatgtaatctacgcgcttccagaagtttccctttcgtaagtaagacactcggggtggattttatcgacgtcgctactaaagttatgataggagaaaatgtggacgaaaaacaccttcctactttggatcacccaataatccctgctgattatgtggctataaaagctccaatgttctcttggccccgattacgggatgctgatccgatacttaggtgtgaaatggccagtactggggaagtcgcctgtttcggagagggaatacacacggcctttctgaaagccatgctaagtactgggtttaaaattcctcagaaaggaattcttatcgggattcaacagtctttcaggcccagattcctcggagtggctgaacagctccacaatgaaggatttaaactgttcgcaacagaagcaacaagtgattggttaaatgccaacaatgtacctgcaactcccgtagcttggccttcacaggaagggcagaacccctcacttagttccatccggaaacttatcagggatgggagtatagatttagttatcaatctacctaataacaacacaaaattcgtgcatgacaattatgtaatacgcagaactgccgtggattctgggatccccctgctgacaaatttccaggtaacaaaacttttcgctgaagccgtgcaaaaatctaggaaggtggatagtaaatcactttttcactatagacagtattctgcaggaaaagctgcg

SEQ ID NO: 8078 - DNA, 4500 bp, synthetic construct
  misc_feature 1..4500: note = source = /note="Description of Artificial Sequence: Synthetic coding sequence"
  source 1..4500: mol_type = other DNA
atgacgcggatcctcaccgcttttaaggtcgtgcgaactctcaagacgggattcggtttcaccaacgtgaccgcgcaccaaaagtggaagttttcgcgccccggaatccggctgctttcggtgaaggcccaaaccgcccatatagtgctggaggacgggaccaagatgaagggctactcgttcggacacccgtcctcggtcgcaggggaggtcgtctttaacaccggcctggggggatacccagaagcgatcactgacccggcctacaagggacagatcctgaccatggctaaccctatcatcggaaatggaggtgccccggatacgacggcccttgatgaattgggactgagcaagtatttggaatcaaacggcatcaaggtgagcggacttcttgtgctcgattactccaaagactacaatcattggctcgctaccaagtcgctgggccagtggcttcaagaagagaaagtgccggccatctacggcgtggatactcggatgctgaccaagatcatccgcgacaagggcacgatgctggggaagatcgaattcgaggggcaaccagtggactttgtggacccgaacaagcagaatctgatcgccgaggtgtcgaccaaggatgtgaaggtctacggaaagggaaaccctaccaaggtcgtggcagtggactgcggcataaagaacaacgtcattaggctcctggtgaaacgcggtgccgaagtgcacctggtcccgtggaaccacgacttcactaagatggaatacgacgggattctcattgccggcggacctggaaaccctgccttggcagagcccctgattcaaaacgtgcggaaaatcctcgaaagcgatcggaaggaacccctcttcggaatctcgacgggaaacctgattaccgggctggcagcgggagcgaaaacttataagatgtcgatggcgaacaggggacagaaccagcccgtgctgaacatcaccaataagcaagcgttcatcaccgcccaaaaccacggatacgcccttgacaatactctccccgcaggttggaagcctctgtttgttaacgtgaacgaccagactaatgagggcattatgcacgaatctaaaccgttcttcgcagtgcaatttcatccagaggtgacgccgggtcccatcgacaccgaatacctcttcgattcattcttcagtctcatcaaaaaaggtaaggccacgaccatcacttccgtgctgccgaaacctgcactcgtggcatcgcgcgtcgaggtgtcgaaggtcctgatcctcggctcggggggcctctcgatcgggcaggccggtgaattcgactactccggaagccaggctgtcaaggctatgaaggaagagaatgtgaaaactgtcctcatgaacccgaacatcgcgtccgtgcagactaacgaagtggggctcaaacaggcggataccgtttacttccttcctatcacccctcagttcgtgactgaagtcatcaaagccgagcagccggacggactgatcttggggatgggtggtcagaccgccctgaactgcggagtggagctgttcaagagaggtgttctgaaggaatacggggtgaaggtgctgggtacctcggtggagtccattatggctaccgaggaccgccagctgttctcagacaaacttaacgaaatcaacgaaaagattgccccgtccttcgctgtggagtccatcgaggatgcactcaaggctgcggacacgatcggataccccgtgatgatccgaagcgcgtacgcactgggtgggctcggatccggcatctgcccgaaccgggaaactctgatggatctgagcaccaaggccttcgctatgactaaccagatcctcgttgaaaagtcggtgactggatggaaggagattgaatacgaggtggtgcgcgacgctgacgacaattgcgttaccgtctgcaacatggagaatgtggatgcgatgggggtgcatactggtgatagcgtcgtggtggccccggcacaaacgctgtcgaatgccgaatttcagatgcttagacgcacttcgatcaacgtggtgcggcacctggggatcgtgggtgaatgtaacatacagtttgcgctgcatccaacctccatggaatattgcattatcgaagtcaatgcgcgccttagccgtagctccgcgctggcatcaaaagccaccggatacccccttgccttcatcgccgcgaaaatcgcgctcggaatcccgcttccggaaatcaagaatgtcgtgagcggaaaaacctcagcctgcttcgaaccgtccctggactacatggtgactaagatcccgcggtgggacctggatcgctttcacgggacgtcgtcacggatcggctcaagcatgaagtcagtgggagaagtgatggccatcggccggactttcgaagagagcttccagaaggcgctgcggatgtgccatccgagcatcgaaggattcaccccgcgccttccaatgaataaggagtggccatcaaacctggacctccgtaaggagctgtcggagccgtcatcgaccaggatctacgcgatcgctaaggccatcgatgataacatgtcgttggatgaaatagaaaagctgacttacattgacaagtggttcctgtacaagatgcgggatatcctcaatatggaaaagacgctgaagggccttaactcggaatcgatgaccgaggaaactctcaagcgcgcaaaggagatcggtttctccgacaaacaaattagcaagtgcctgggattgacggaggcacagacccgggagctgcgcctgaagaaaaacatccatccttgggtcaagcaaatcgacactcttgcagccgaatacccgagcgtgaccaattacttgtacgtgacttacaatggccaagagcacgacgtgaatttcgatgatcatggaatgatggtcctgggatgcggtccgtaccatatcggctcatcagtggaattcgactggtgtgccgtctcgtcgatccgcactctgcgccagcttggaaagaaaactgtggtggtgaactgcaaccccgagactgtgtcaaccgacttcgatgaatgtgataaactgtacttcgaagaactctcgctggagagaattctggacatttatcaccaggaggcctgtggcgggtgtatcatttcggtcggaggacagatcccaaacaaccttgccgtcccgctctacaagaacggagtgaagatcatgggcacctccccgctgcaaatcgatagagcagaggaccgttcaatcttttccgccgtcctcgatgaacttaaggtggctcaggccccttggaaagctgtcaataccctcaacgaagccctcgagtttgcaaagtccgtcgattacccgtgtctcctgcgtccatcatacgtgctgtccggatcggccatgaacgtcgtgttctcagaagatgagatgaaaaagttcttggaggaagccactagagtttctcaggaacaccccgtcgtcctgaccaaattcgtggaaggagctcgggaggtggaaatggacgcggtgggaaaagacggaagagtcattagccatgcgatctcggaacatgtcgaggacgccggagtgcacagcggtgatgcaaccctgatgctccccacccagaccatcagccagggcgccatcgaaaaggtgaaagacgccacccgcaagatcgccaaagcgttcgcgatcagcggcccgttcaatgtccagttcctggtgaaggggaacgacgtgttggtaattgagtgcaatctgcgggcatcgaggtcgtttcctttcgtttcgaaaaccctgggagtggacttcatcgacgtggctaccaaggtcatgatcggagaaaacgtggatgagaaacatctcccgactctggaccatccaatcattcctgccgattacgtggcgattaaggcacccatgttctcctggccacgccttcgtgacgcagacccgatcctcagatgcgagatggcgtccacgggcgaggtggcatgcttcggagaggggatccacactgccttcttgaaagccatgctttcaaccggcttcaagataccacaaaaggggatcctgatcggaatccaacagtccttcaggccacggttcctcggagtcgctgagcaactgcacaacgaaggcttcaagctgttcgccaccgaagcgacctccgactggctcaacgctaacaatgtcccggcgactccggtggcctggccttcccaagaaggacagaatccatccctgtcgtccatcagaaagctcatcagggatggctcgattgacctggtgatcaacttgccgaacaacaacaccaagttcgtgcacgacaactatgtgattcggcggaccgctgtggactctggcatcccacttctgacgaacttccaagtgaccaaactgttcgcagaggccgtccaaaagagccgcaaagtggactcgaagtctttgtttcactaccggcagtatagcgcgggaaaggctgct

SEQ ID NO: 8079 - DNA, 4500 bp, synthetic construct
  misc_feature 1..4500: note = source = /note="Description of Artificial Sequence: Synthetic coding sequence"
  source 1..4500: mol_type = other DNA
atgacgaggatcctcaccgcctttaaggtcgtgcggaccctcaagactggattcgggtttactaatgtgactgcccatcaaaaatggaagtttagccgcccagggatccgactgctgtccgtgaaggcccagactgcgcacatcgtgcttgaagatggtacgaagatgaagggctactcgttcgggcacccctcctcagtcgccggagaagtggtgttcaacactggactggggggctacccagaggcaatcaccgatcctgcctacaagggacagatcctgacgatggcgaacccaatcattgggaacggaggagctccggataccacggctcttgacgaactcggcctcagcaagtacctcgagtccaacgggatcaaagtctcaggacttctcgtgctggattactcaaaagactacaatcattggctggcaaccaagtcgcttggtcaatggctgcaggaagaaaaggtgcccgccatctacggagtcgacactagaatgttgaccaaaatcatcagggacaaaggcaccatgcttggaaaaatcgagttcgagggccaaccggtggatttcgtcgaccctaataagcagaatctcatcgcggaggtcagtaccaaggatgtgaaggtgtacggaaaggggaatccaactaaggttgttgccgtggactgtggtatcaaaaacaacgtcatccggcttctggttaagcgcggcgccgaagtgcaccttgtcccgtggaatcacgacttcaccaagatggagtacgacggaatcctgatcgccggaggtccgggaaatccagccctggcggaacctcttattcaaaatgtcagaaaaatccttgaatccgacaggaaagaacctcttttcggaatctccactgggaacctgatcactggcctggcggcgggagccaaaacctacaagatgagcatggccaacaggggccagaaccagcctgtcttgaacattactaacaagcaagcatttatcactgcccaaaaccacggatacgcgctggataatactcttccggccggctggaagccgctgtttgtcaacgtcaacgaccagaccaacgaaggcatcatgcacgagtcgaaaccgttctttgccgttcaattccacccggaggtgacgcccggacccatcgacacggaatacctgtttgattcatttttctctctcatcaaaaagggcaaggcgacgaccatcacttccgtgctgcctaagcctgcccttgtcgcctcgcgcgtggaagtctcaaaagtcctgattctcggctccggaggcctgtcgatcggacaagccggtgagttcgactactcagggtcccaggcggtgaaggccatgaaggaggaaaacgtaaagaccgtcctgatgaatcccaatatcgcgtccgtgcagaccaacgaggtgggcctgaagcaagccgacacggtgtactttctgccgatcaccccgcagttcgtgaccgaagtgatcaaggcagaacaaccggacggactcatcttgggaatgggaggacagaccgcactgaactgcggagtcgagcttttcaagcgaggggtgctcaaggaatacggagtgaaggtgctcggaacgagcgtggaatcgattatggcgaccgaggatagacagctcttcagcgataagttgaacgagatcaacgagaagatcgccccgtcgttcgcggtagaatcaatcgaagatgccctgaaggccgccgacaccattggttaccctgtgatgatccgctcggcctacgcgctcggcggactgggaagcggtatctgccctaaccgcgagactctgatggatctgtcaacgaaggcgttcgcgatgactaaccagatactcgtggagaaatccgtgaccggttggaaggaaatcgagtacgaggtcgtccgcgatgcagatgacaattgcgttaccgtgtgcaacatggagaacgtggacgcaatgggggtccacactggagactcggtcgtcgtggcgcccgcccagactctctcgaacgcggaattccaaatgctcaggagaaccagcatcaatgtggtgcggcacctgggaattgtgggcgaatgcaatatacagttcgccttgcacccgacttccatggaatactgcatcatcgaggtgaacgcccggctgtccaggtcgagcgctctggcttcaaaggctaccggctatccgctggcgttcattgccgccaagattgctctcggaatccctctgccggagattaagaacgtcgtgtcaggaaaaacctcggcctgcttcgagccgagcctggattacatggtgaccaaaattcctcggtgggacttggatcggttccacggaaccagcagccgcatcggcagctcgatgaagagcgtgggggaagtgatggcgatcgggcgcacttttgaagaatccttccagaaggctctcaggatgtgccatccatccatcgagggattcaccccgagactcccaatgaataaggaatggccgtcgaacctggatctgcggaaggaactgagcgaacccagctccacccgcatttacgccatcgccaaggccatcgacgataacatgtcgctggacgagatcgagaaacttacctacatcgataaatggtttctgtacaagatgcgcgacatcttgaatatggaaaagactctcaagggcttgaacagcgagtcaatgactgaagagactctcaaaagggcaaaagaaatcggattttccgataagcagatctcgaagtgcctcggactgactgaagctcaaacccgggaactgcgactgaaaaagaacatccatccatgggtcaaacagattgacacccttgcagcggagtacccgtcagtgactaactatctgtacgttacctacaacggccaggaacacgacgtgaacttcgacgaccacggaatgatggtgcttggctgcggcccgtatcacatcgggagctccgtcgaatttgactggtgcgccgtttcgagcatccgcaccctgcggcaactcggtaagaaaactgtggtggtgaactgcaacccagaaaccgtttcgaccgatttcgacgagtgcgacaagttgtacttcgaagaactgtcactcgaacggatcctggatatctaccaccaggaagcatgcggtggatgcatcatctccgtcgggggacagatcccgaacaatctggcagtgcctctgtacaagaacggagtcaagatcatgggaacctcaccgttgcaaatcgatcgggccgaggaccgctcgattttctcggctgttctggatgaacttaaggtggctcaggccccatggaaggctgtgaataccctcaatgaagcgctggaatttgccaagtccgttgactacccgtgtctgctgcgcccctcgtacgttctcagcggatccgcaatgaatgtagtgttctcggaggatgagatgaagaagtttctggaagaggccacccgagtgtcccaggagcatccagtggtgttgaccaaattcgtggaaggagcccgagaagttgagatggacgccgtcggaaaggacggaagagtgatcagccacgcgatctcggagcacgtggaagatgctggagtgcacagcggagatgccacgctgatgcttccaactcaaaccatcagccaaggagcaatcgagaaggtcaaggacgcaacccggaagatcgcgaaggcgtttgctatctcgggccctttcaatgtgcagttcctcgtcaaaggtaatgacgtgctggtcatcgagtgtaatttgcgggcttccagatcgttcccattcgtgtcgaaaacgctgggagtggactttattgacgtggcgaccaaggtgatgatcggagagaatgtggatgaaaaacatctgccgactctggaccacccgatcattcccgccgactacgtggcgattaaggcgccaatgttttcgtggccgagattgcgcgacgccgatccaatcctgagatgtgaaatggcctccactggggaagttgcatgcttcggagaaggaatccacaccgcctttctgaaagccatgttgtccactggcttcaagatcccccagaagggaatcctcatcggcatccaacagtcatttaggccccgcttcctcggcgttgcagaacagcttcacaacgaaggattcaagctgtttgctactgaggccacctctgactggcttaatgccaacaatgtgccggcaaccccggtggcgtggccatcgcaggaggggcagaacccgtccctgtcctcaatccggaagctcatccgggatggaagcatcgatctcgtcatcaatctcccgaacaacaacaccaagtttgtccatgacaactacgtgatccggcggaccgccgtcgactcgggaatcccccttctcaccaacttccaagtgaccaaacttttcgccgaagcagtgcaaaagtcacgcaaggtggactcgaagtcgctgttccactaccgccagtattccgcgggcaaggccgcc

SEQ ID NO: 8080 - DNA, 4500 bp, synthetic construct
  misc_feature 1..4500: note = source = /note="Description of Artificial Sequence: Synthetic coding sequence"
  source 1..4500: mol_type = other DNA
atgacgagaattctgaccgcttttaaggtggtccggacccttaagacgggcttcggattcactaatgtgacagctcatcaaaagtggaagttttctcgcccaggcattcgcctgctgagtgtgaaggcacaaaccgcccacatagtcttggaagatggcaccaagatgaaaggatatagcttcggacatcccagtagcgtggcaggcgaggtggttttcaacaccggactgggcggttacccagaggccataactgatccggcttacaagggccagattctcactatggcgaaccctataattggaaatggtggcgcccccgataccactgccctggatgagctcggcctgagcaagtatctggagagcaacggcatcaaggtttccggtcttttggtactggattactcaaaggactataatcactggctcgccaccaaaagtctgggccagtggctgcaggaagagaaggtacccgccatttacggagtggatacgcgaatgctgacgaagataatccgcgataaaggcaccatgctaggaaagatagaattcgagggacagccggtcgatttcgtggaccctaataaacaaaacctgatagcggaggtttcgaccaaagacgttaaagtctatggcaaaggcaacccaacgaaggtcgtggctgtagattgcggaataaagaacaacgtcattcgcctcctcgtgaaacggggagccgaggtccacctggtgccgtggaaccatgatttcaccaagatggaatacgacggcatacttatcgccggcggccccggcaaccccgccctggccgaaccgcttatacaaaacgttcggaagatactggaatctgaccggaaggagccgctgtttggcatatccacaggcaaccttataacaggtcttgccgctggcgccaagacgtataagatgtcaatggccaatcgcggccaaaatcagccggttttgaatattactaacaagcaggcctttattactgcccaaaatcacgggtatgcactggacaacaccctgccggctggctggaagccattatttgttaacgtgaatgatcagaccaacgagggaattatgcacgagtcgaagccgtttttcgccgtgcaatttcacccggaagtcaccccgggcccgatagatacggagtacctatttgacagtttcttttctttgataaagaagggtaaggccacaaccattacctccgtcctcccaaaaccggctttggtggccagccgagtcgaggtcagcaaagtcctcatcctgggcagcggcggcctgtccataggacaggccggcgagtttgactacagcggatcccaggcggtgaaggctatgaaggaggagaatgtgaaaaccgtattgatgaatcccaatattgcgagtgtacagaccaacgaggttggcctaaaacaggcggacacggtgtacttcctgccgatcacaccgcaattcgtcaccgaggtgatcaaagccgagcagcccgacggattgatcctgggcatgggcggacagacggccctcaattgtggcgtggagctgttcaagcgtggagtgctgaaagagtacggagtcaaggtgctaggcacgagtgtggagtccattatggccactgaggacagacagctgttctcggacaagctgaatgagatcaacgagaaaatcgctccgagcttcgccgtagagtccatagaggacgccttgaaggctgccgatactattggctatccggttatgattagaagtgcatatgcccttgggggactgggcagcggaatttgcccgaaccgcgagacactcatggacctttcaacgaaggcattcgccatgacgaaccagatcttggtcgaaaagtcggtgacaggctggaaggagatagagtatgaggtggtgagggatgccgatgataactgcgtgactgtctgcaatatggaaaatgtcgatgccatgggagtccacaccggggactcagtcgtcgtggcccctgcccaaaccttgagcaacgctgagttccagatgcttaggcgtacgtccataaacgtggtgcgccatctgggcatcgtaggcgagtgtaatatacagttcgcactgcaccctaccagtatggaatactgtatcatcgaggtaaacgcacgactgtcgcgctcctcagcgctggcctcaaaggctacaggctacccgttggctttcatcgcggccaagattgccttgggcatacctctccccgaaattaagaatgtagtgagcggtaaaacgtcggcctgcttcgaacccagcttggattacatggtcacgaagatacccagatgggatctcgatcgcttccacgggacaagctcgcgaataggttcatcgatgaagagtgttggggaagtgatggcgattggccgcacctttgaggagagcttccagaaggcgctgcgtatgtgccacccgagtatcgagggcttcacaccccgcctgcccatgaataaggaatggccgtctaatttggatctgcgtaaagaactgtctgagccgtccagcacgcggatttacgctattgctaaggcaattgatgataacatgtcccttgatgaaattgagaaactgacatacatcgataagtggttcctttataagatgagagatattctgaatatggagaagacgttgaagggacttaattccgagtcaatgactgaggagacgcttaaacgcgccaaggaaattggctttagcgataaacagatcagcaagtgcctgggcctgactgaagcccagacaagagaactgaggctgaagaagaacattcatccgtgggtgaagcaaattgacacactggccgccgagtacccatccgtgacgaactacctctacgtgacgtataatggacaagaacatgatgttaacttcgatgaccatggcatgatggtgctgggttgtggcccgtaccatattggtagctcggtggaatttgattggtgtgccgtgtcgtcgatccgcacgctacgccagcttggcaaaaagacggttgttgtcaactgtaatccagagactgtatcgaccgactttgacgaatgcgacaagctgtacttcgaggaattgtcccttgagcgcatcctcgatatttaccaccaggaggcatgcggtggatgcatcatatcggttggaggtcagatccccaacaatctggcagtgccgttgtacaagaatggcgttaagataatgggaacctcgcctctgcagatcgatcgagccgaggatcgatccattttttccgccgttctggacgaattgaaagtcgcgcaggccccatggaaggcggttaatacccttaatgaggccctggagtttgcgaagtcggtcgactacccttgtctgctgcgcccctcatatgtcctgtcgggttcagctatgaacgttgtcttctccgaggacgaaatgaaaaaattcctggaggaagccacccgggtctcccaagagcacccagtcgtcctcactaagttcgtcgaaggtgctcgagaggtggagatggatgctgttggtaaggacggccgagtaatcagtcatgctatcagcgagcatgtcgaggacgccggagtccatagcggagacgccaccctgatgctgccgacacagaccatcagtcaaggagccatcgagaaggtgaaggacgccacccgtaagattgcaaaggccttcgcgatatcaggaccatttaacgtgcagttcctggtgaaaggcaatgatgtgttggtcatcgaatgtaatctacgcgccagccggagctttccgttcgtctctaaaacactgggcgtagatttcattgatgttgctacaaaggtgatgattggcgagaatgtcgatgagaagcacttgcctacgctggaccacccgataattccggccgactacgttgccattaaagccccgatgttctcttggccccgcctacgcgatgccgatccaatactgcgatgcgagatggcgagcacaggagaagtggcctgctttggcgagggcatccacacggcgttcctgaaggctatgctgtccaccggctttaagataccgcaaaagggcattctgatcggaattcaacagtccttccgccctcggttcttgggggtggcggagcagcttcacaacgagggattcaaactgttcgcaacggaggccacgtcggattggctgaatgccaataacgtcccggcaactcctgtggcttggccgtcccaagaaggtcagaacccatccttgtcgagcattcgaaaactgattagagacggatccatagatttggtgattaacctgccgaacaataacaccaaattcgtccatgataattacgtcatccgccgcacggcagtcgactccggtatcccgctgctgactaatttccaagtgactaagctcttcgctgaggctgtccaaaagtcgaggaaggtagattcgaagtcactattccactatcgacaatactccgcgggtaaggcggcc

SEQ ID NO: 8081 - DNA, 4500 bp, synthetic construct
  misc_feature 1..4500: note = source = /note="Description of Artificial Sequence: Synthetic coding sequence"
  source 1..4500: mol_type = other DNA
atgacccgaatccttactgcattcaaagtggtgcgcactctgaaaactgggttcggcttcaccaatgtgacagcccatcagaaatggaaatttagtcgtcctggaatccgtctgctttccgtcaaagcgcagaccgcccatatcgtgcttgaggatggaacaaaaatgaagggatactcatttgggcatccctcctccgtcgcaggcgaagtggtctttaatacagggttaggcggatacccggaagctattacagatcccgcctataaagggcagatccttactatggccaacccgataattggtaatgggggtgccccagacactaccgccctggatgagcttgggcttagcaaatatctagagagtaatggaatcaaggtgtccgggttactggtgctggactactcaaaagactataaccattggctagccactaaaagcctcgggcaatggttacaggaggagaaagttcccgccatatacggagtcgatacaaggatgctgacaaagattataagggacaaaggaacaatgctggggaaaatagaattcgagggccaaccagtggatttcgtggaccccaacaaacagaacctgatcgctgaggtttccactaaagacgttaaggtctacggaaaaggcaacccaacgaaggtggtcgcggtcgattgcggcatcaaaaacaacgtaatcagactcctagtgaagcggggcgccgaggttcaccttgtaccttggaatcacgacttcacgaaaatggaatacgatggaatcttgattgcaggcgggcccggaaatcctgcgctggccgagccactcatacaaaacgtccgaaagattcttgaaagcgacaggaaggagcccttattcggaatatccacaggtaatctcatcactgggctcgccgcgggcgccaagacctacaagatgtctatggctaatcgaggccaaaaccagccagtgttgaacattacgaacaagcaggcattcattactgcacagaatcacggttacgctctcgataatactcttccggctggctggaagccactgttcgtaaacgtaaatgaccagactaatgagggcattatgcacgaatctaagccctttttcgcagtgcagttccatcccgaggtgacacccggccccatcgataccgagtatttatttgactcttttttctcactcatcaaaaaaggaaaggcaacgaccattactagcgtgttacctaagccagctctggtcgccagccgggtggaggtgagtaaggtgttgatattgggctctggcggactctctattggccaagccggtgagttcgactatagcggtagccaagctgtgaaggctatgaaagaggaaaacgttaaaaccgttctcatgaatcctaacatcgcctctgtccaaaccaacgaagtggggctcaaacaggctgataccgtttacttcctgccaattactcctcagttcgtgacagaggtcattaaggcagagcagcctgatgggctgatcctgggaatgggtggccagactgcgctgaattgcggagtggagctgttcaagagaggtgttctgaaagaatatggggttaaggtgctggggacatcagtggagtctatcatggctacagaagaccggcagctcttcagtgataagctgaacgagattaatgaaaagattgctccttctttcgccgtggaatctatcgaagatgcgctcaaagctgctgataccattggctatcccgtcatgattcgatcagcgtatgccctgggaggcctgggctccgggatctgtccaaatagagaaaccctgatggatctaagcaccaaagcttttgccatgaccaaccagatactggtggagaagtctgtgaccggttggaaggaaatagagtacgaggtcgtgcgggacgccgatgacaattgcgtgaccgtctgcaacatggaaaatgttgatgccatgggcgtccacaccggcgactcagtcgtcgtagctcctgcccagaccctcagcaacgcagaatttcaaatgctgcgaagaacaagtatcaatgtggttagacacctgggaatcgttggcgaatgcaacatccagttcgccctgcacccgacctcaatggagtactgcatcatcgaagtgaatgcccgcctgagccggtcttctgcactggctagcaaggcgacgggctaccctttagcttttatagcagcgaaaattgccttgggcatccccctacctgagatcaagaatgttgtgagcggaaaaacaagtgcgtgtttcgagccatctctagactatatggtcacaaagatccctcggtgggaccttgacagattccacggtaccagttcaaggatcggaagttcaatgaagtctgtgggcgaagtgatggctattggacggaccttcgaagagtccttccagaaggctctgcggatgtgccatccgtcaattgaagggttcacccctcgactccctatgaataaagagtggccaagcaacctggatcttaggaaggaattgagcgagccctccagcactagaatttatgcgatcgccaaggctatcgatgacaatatgtcactggacgagatcgagaagctaacctatattgacaagtggttcctatataaaatgagggacatacttaatatggagaaaacactcaaaggtctgaattctgaatccatgaccgaagagactttgaagagagcaaaggagatcggctttagcgacaagcagatcagcaaatgcctggggttgaccgaagcccaaaccagagagttacggctgaagaaaaatatccacccctgggtgaaacagatcgacacgttagcggctgaatatccaagcgtgactaactacctgtacgtgacctataacggacaggagcacgatgtcaattttgacgatcacggtatgatggtgctgggctgcggcccctaccatatcggctcatcagtggaatttgattggtgcgccgtgtcgtctatccggactctgcgccagctagggaagaagaccgtggtggtgaattgtaacccagaaaccgtttcaacagacttcgacgagtgcgataaactttacttcgaagaactgagtctcgaacggatcctagacatctatcaccaggaagcctgcggcggatgtattatctcggtgggtggtcagattccaaataatctggctgtcccactctacaagaatggggttaaaatcatggggacttcccctctccaaatcgacagggctgaagaccggtcgatattcagcgcagtattagacgagttaaaggtggctcaggccccctggaaggccgtaaataccctgaatgaagcccttgaattcgccaagtctgtggactacccctgcctgcttcgtccctcctatgtactgagtggctccgcaatgaatgtggtgtttagtgaagacgaaatgaagaagtttcttgaagaggcaacgcgtgtgagtcaggagcaccccgtagtgctcaccaagttcgtggaaggcgccagggaagtcgaaatggacgcggttggcaaagacggaagagtgatctctcacgccatttcagaacacgtagaggacgccggagtgcattccggagacgccaccctcatgcttcctacacaaacaatatctcagggtgcaatcgaaaaggtgaaggacgcaacgagaaagatagccaaggctttcgctatcagcggtccttttaacgtgcagtttctggttaaagggaatgacgtgctggtgatcgagtgtaacttgagggcttctagatcctttcctttcgtcagtaaaacacttggcgtcgacttcatcgatgtggccaccaaggtcatgatcggagaaaatgtggatgaaaagcacctgcctactctggaccatccaattatacctgccgactatgttgcgattaaagcgcccatgttttcatggcctagacttcgggatgcagacccaatattgcgctgtgaaatggcctccacgggcgaagtcgcttgtttcggcgaagggatccatacggcctttctcaaagcaatgctttcgaccggcttcaaaatccctcaaaaggggatcttgatcggtattcagcaaagctttcgtccccggttcttaggcgtggcagaacaactccacaacgaaggcttcaagttgtttgccaccgaagcgaccagcgactggttgaacgcaaacaacgtaccggccacaccagtggcgtggccctcccaggagggccagaatcccagccttagcagcattagaaagctcatccgcgacggtagcattgacctggtgataaatttgcctaacaacaacactaagtttgtgcatgataactatgtaattagaaggaccgccgtagatagtggtatacccctgctgaccaacttccaggtcactaagttgtttgcggaagcggtgcagaagtctcgcaaagtggactctaagtctctctttcactaccgccagtattcggctgggaaagccgcg

SEQ ID NO: 8082 - DNA, 4500 bp, synthetic construct
  misc_feature 1..4500: note = source = /note="Description of Artificial Sequence: Synthetic coding sequence"
  source 1..4500: mol_type = other DNA
atgaccagaatcctgaccgcattcaaggtggtccggaccctgaaaacaggctttggcttcacaaacgtcaccgctcatcagaaatggaaatttagcagaccagggatcagactcctcagcgtgaaagcccagactgcacacattgttctagaagatgggactaaaatgaaagggtatagctttgggcatccatctagtgtggctggtgaagtcgtatttaataccggcctgggcgggtacccagaggccattacagatcccgcatacaaggggcaaattctgaccatggctaaccccatcatcggaaacggtggagctccagataccacagcattagatgagcttggactttccaagtacctagagtccaatggtataaaagtgtccggtctgcttgtgctggattattcaaaggactataaccattggctagccacgaagtctctcggacagtggttgcaggaggagaaggtgcctgccatatatggagttgatacccgcatgttaacgaagattattagggataaaggcacgatgctgggaaagattgaatttgaggggcagccggtggactttgtcgatccaaataaacagaacctcattgccgaggtgtcgactaaagatgtgaaggtgtatggaaaggggaatcctacgaaggttgtggccgtagactgcggtatcaagaataacgtgatccggttgctagtgaagagaggagccgaggtccaccttgttccgtggaaccacgactttacaaaaatggagtatgatggtattctgatcgccggagggcctggtaacccagccctcgcagagcctctgatacagaacgtgaggaagatcctcgaatctgatcgcaaggagcctttatttggtatttcaaccggcaatctgattacaggcctggcggccggggccaagacctataaaatgagtatggcaaacagagggcaaaaccagcccgtgcttaatattacgaacaagcaggctttcatcactgcacagaaccacgggtatgctctcgataataccctccccgctggttggaaacctctgttcgttaacgtgaatgatcagactaacgaggggatcatgcacgaaagtaaaccattcttcgccgtccagttccatcctgaagttacaccggggccgatagataccgaatatctgtttgatagttttttttctctgatcaaaaagggcaaggcaaccaccattaccagtgtgctaccaaagcccgccctggtggcatcccgagtggaagttagcaaagtgctgattctgggctctggggggctctccatcgggcaagctggagaattcgattattcgggctcacaggccgtgaaggccatgaaagaagaaaacgttaagacggtcctgatgaatccgaacatagcatccgtgcaaactaacgaggtgggactaaagcaggcggatacagtgtatttcctgcctataacaccacaatttgttaccgaggttattaaggccgaacaaccggatgggctgatcttaggtatgggaggccagactgctctaaactgtggagtggaactgttcaagcggggggtcctgaaggagtatggggttaaggtattaggaacatccgtggaaagcattatggcaaccgaggataggcaactgttcagtgacaaactgaacgaaattaacgaaaaaatcgcaccctcatttgctgtggagtcaatcgaagacgcactgaaagccgccgatacaatcggttatcctgtgatgattcgcagcgcctatgcgttaggcgggctgggctccggcatctgccctaacagggaaaccctgatggatctttccactaaagccttcgcaatgacgaatcagatcttggtcgaaaaaagtgtaactggctggaaggagatcgaatatgaggtggtgagggacgctgacgacaattgcgtgaccgtgtgcaatatggagaacgtggacgctatgggagtacacacaggtgattcagttgtggtggctcccgcccagaccctttcaaacgcagagttccagatgctgaggaggacgagtatcaacgtcgtacgtcacttgggcattgtgggtgaatgcaacatccagtttgcattacatcctactagtatggagtactgcattatcgaggtgaacgctcgcctgagtcgctcttcagcactggcctccaaggctacaggatacccactggcattcatcgccgcaaaaatcgctttaggaattcccctgcccgagatcaagaatgtggtctccgggaaaacatccgcttgttttgagccttctctggactacatggtaaccaagatcccacggtgggacctcgacagattccacggtactagttctagaatcggcagttctatgaagtccgtcggcgaagtcatggcgatcggcaggacatttgaggagtcgttccagaaagccctgagaatgtgtcacccctcaatagaaggcttcacgcctaggctgccgatgaataaggagtggccttcaaatcttgatctgaggaaggaattgagcgagcccagttccactagaatatacgcaattgctaaggccatcgacgacaacatgagtcttgacgagatcgaaaaactcacctatattgacaaatggtttctttataaaatgcgggatatactcaacatggagaagacacttaagggcctcaacagtgagagcatgacagaggagaccttgaagagagcaaaagagattggtttttcggacaagcagatcagcaagtgcctcgggcttacggaggcacagactcgtgagctgagactaaagaagaacattcatccgtgggtgaaacagatcgatactctggctgccgaatatccttctgtgaccaattacctgtacgtgacatacaacggacaggaacatgatgtcaacttcgatgatcacggcatgatggtgctcgggtgtggcccttaccacatagggagttccgttgaattcgactggtgtgccgtgtccagtattaggacactgcggcagttggggaaaaaaacagtagtagttaattgtaaccccgagacagtgtccacagactttgatgaatgcgacaagctatactttgaggaattatcgttagagcgcattctggatatctaccaccaagaggcctgcggcgggtgcatcattagtgtcgggggacagatcccaaacaaccttgccgtgcccctttataaaaatggcgttaaaatcatggggacaagccctctccagatcgatagggcagaggatcggtccatttttagcgcagtgctggatgagctcaaggtggcacaggctccttggaaggccgtcaacacactgaatgaagcattggaattcgcaaaatccgttgactacccatgcctcctcaggccaagctacgtacttagcgggagtgcaatgaacgtggttttctcagaggacgaaatgaagaagtttctcgaagaggccaccagggtgagtcaggaacaccctgtagtgttgaccaagttcgtcgaaggagcaagagaggtcgagatggacgccgttgggaaggacggtagagtgattagccacgcaattagtgagcacgtggaagacgccggggtccactcaggcgatgcaacacttatgctgcctacacagacaatatcacagggggctatcgagaaagtgaaggacgctacaaggaaaatagccaaagccttcgccattagcggccctttcaatgtccagtttctcgtcaagggcaatgacgtacttgtgattgagtgtaatctgagagcgtccagaagttttccctttgtctcgaagacgctgggtgtcgactttattgatgtggcaactaaagtgatgattggggagaatgtggatgagaagcatctgcccacattggatcatcccattatcccggctgactacgtggccataaaagcacctatgtttagctggccccggctcagagacgctgacccgatacttagatgtgagatggcaagtactggagaggtggcgtgttttggcgaaggaatccacacagctttcctgaaggcgatgcttagcacgggcttcaagattccacagaaggggatcctcattggtatacagcaatccttcagaccacgctttctgggcgtcgcagagcaactacacaatgaaggttttaagctttttgctaccgaagcgacctctgactggctgaacgccaataatgtgcccgctacccccgtggcgtggccttcacaggaagggcagaacccttctctatcttctattcgcaaattgattcgggacggcagcatcgacttggtgatcaatctaccaaacaataacactaagttcgtacacgacaactacgtaattcgccggactgccgtcgatagtggaatccccctgctgaccaatttccaggtgaccaagttgttcgctgaggcagtgcaaaagtcccgcaaggtcgatagcaaatcgctctttcattatcgtcagtactccgccggtaaggctgct

SEQ ID NO: 8083 - DNA, 4500 bp, synthetic construct
  misc_feature 1..4500: note = source = /note="Description of Artificial Sequence: Synthetic coding sequence"
  source 1..4500: mol_type = other DNA
atgactcggatcctgacggcatttaaggttgtgaggacccttaagaccggtttcggatttacgaacgtcaccgcacatcaaaagtggaagttttccagacccggcattcggttgttgtcagtgaaggcccagactgctcacatcgtccttgaagatggtactaaaatgaagggctactcatttgggcatccaagctcagtggcaggtgaagttgtgtttaacaccgggcttggaggttaccccgaagcaataaccgatccagcgtacaagggacagattcttaccatggctaatcccatcattggaaacggaggggcccctgatacgaccgccctcgatgaactcggtttgagcaagtacctcgagagcaacggaatcaaggtgtcagggcttctcgttcttgactacagcaaggattacaatcattggctggcaaccaagtcacttgggcagtggctgcaggaggaaaaagtccctgcaatctatggtgttgacacgagaatgttgactaaaatcattcgcgataagggtaccatgcttggaaaaatcgaatttgaaggtcaaccagttgatttcgttgaccctaataagcaaaaccttattgccgaagtgtcaaccaaggacgtgaaggtgtacggtaaggggaaccctaccaaagtggtcgcagtagattgtgggattaagaacaacgtgattcgattgctggttaagagaggcgccgaagtccatcttgtgccttggaatcacgactttactaagatggaatacgatggaatacttatcgctggaggacctgggaaccctgcgctggctgaacccctgatacaaaacgtcaggaagattctggaatcggatagaaaggagccactctttggaattagcaccggtaacctgataaccggacttgcagccggagcaaagacctacaaaatgtcgatggccaacagaggtcagaatcagccggtccttaacattacgaacaaacaggcattcatcactgcacagaaccacggctacgcacttgataacaccctccccgctggttggaaacccctgtttgtcaacgtgaacgatcaaacgaatgaaggcattatgcatgaatcgaagccattctttgctgtgcaattccacccagaagtcaccccaggcccaatcgacaccgaatacctgtttgatagctttttctcgctcattaagaagggcaaggcaaccactattacttcggtgcttccgaagccagcactggtcgcgagccgggtggaagtgagcaaggtgctgatcctgggatctggtggccttagcataggtcaggcaggcgaattcgattactccggctcccaggccgtgaaggcaatgaaagaagaaaacgtcaagaccgtcctgatgaatcccaatatcgcatcggtgcagactaatgaagtggggcttaagcaggcggataccgtttacttccttcccattactccacaattcgttactgaagtgattaaggcggagcaaccggacggtctgattctgggaatgggtggacaaactgcccttaactgtggggtggaattgttcaagaggggagtgctgaaggaatatggcgtcaaagtcctcggtacttcagtggaatcgattatggctaccgaggaccggcagttgtttagcgataaacttaatgagatcaatgaaaagattgcaccttcgttcgctgtagaatccattgaagatgcactgaaagcagcagacacgatcggttatccagttatgattaggtccgcatatgctcttggcgggctcggctcgggaatttgccccaacagagaaactttgatggacttgagcaccaaggcattcgcgatgaccaaccagatacttgtcgaaaagtcagtgaccgggtggaaggagatcgaatacgaggtggtgcgtgacgcggacgacaactgtgttaccgtgtgcaacatggagaacgtcgatgcaatgggagtgcatactggggattccgtggtcgtggcacctgcccagactctctccaacgcggagtttcagatgcttcggaggacgtctattaacgtggtgcgccacctgggaattgtgggagagtgtaacatacaatttgcgttgcatcctactagcatggagtactgcattattgaggtgaacgcaagactgtcacgctcgtcggcgttggcctcgaaggcaacgggttacccacttgcatttatcgcagcaaagatcgcactgggaattcctctgccggagattaagaatgttgtgagcggaaaaacctcagcatgctttgaacctagccttgattacatggtgactaagattcctagatgggaccttgatagatttcatggaacctcgtcgcgtataggctcctctatgaaatccgtgggagaggtgatggcaatcggaagaacctttgaagaatcgtttcaaaaggctcttagaatgtgtcatccttcgattgaaggatttaccccaagacttcctatgaacaaggaatggcctagcaatctcgatctccgaaaagagctttccgagcctagctcaactagaatttacgcgattgccaaagcgattgatgacaatatgtccctcgacgagatcgagaagctgacttacatcgacaaatggtttctgtacaagatgcgtgatatcctgaacatggaaaagaccctcaaaggactcaactccgagtccatgactgaggaaactcttaagcgggcgaaggagatcggttttagcgataagcagatttcaaaatgtcttggactcactgaagcccaaactagggaactgcgcctgaagaagaacatccatccatgggttaagcagatagacactctcgcagccgagtacccttcggttaccaactacctgtacgtgacctacaacggtcaagagcatgatgtgaatttcgatgatcatggtatgatggtccttggttgcggaccgtaccatattggttcctccgtggaatttgattggtgtgccgtgtcgagcatcagaactctgcgtcaactggggaagaaaactgtcgtggtgaattgtaaccccgagactgtgagcactgattttgatgaatgtgacaaattgtacttcgaggaactctctttggaacgcattctcgatatctaccatcaagaagcgtgcggcggatgtataatctcagtgggaggccaaataccgaacaacttggcagtgccgctttacaaaaatggcgtgaagattatgggtacctcaccactgcagatagatcgagcagaagatcgcagcattttctccgcagtgctggacgaactgaaagtcgcccaggcgccgtggaaggcggtgaacaccctcaacgaggcgctggagtttgcaaagtccgtggattacccctgcctcctccggccctcatacgtgctttccggctccgcaatgaacgtggtgttttccgaggacgaaatgaagaagttcctggaggaagcaacccgagtctcgcaggagcaccctgtcgtgcttaccaagtttgtggaaggcgcccgcgaagtggagatggatgcggtcggcaaggacggacgcgtcatctcgcatgcaatctcggaacacgtggaagatgcaggcgtgcacagcggggacgctactctcatgctgcctacgcagacgatttcccagggtgccattgagaaagtcaaggatgctactagaaagatcgcaaaagcatttgcaatttcaggaccattcaatgtgcagttcctggtgaaagggaatgatgtgcttgtgattgagtgtaatctgagagcctcccgcagcttcccgtttgtctctaagactctcggtgtggatttcatcgacgtggctacgaaggtgatgattggtgaaaatgtagacgaaaagcatctgcccactcttgatcatcccatcataccagccgattacgtggcgatcaaggctcctatgttttcttggccacggctgagggatgcggaccccattctcagatgcgagatggcatcaacgggagaagttgcctgtttcggcgaaggaattcataccgcatttttgaaggcgatgctctcgacgggttttaagattcctcagaaaggcatcctgatcggtatccaacagtcttttcggccccgattccttggcgtagcagaacagctgcacaatgaaggattcaagttgtttgcaaccgaagcaacctcggactggctgaatgcaaacaatgtgcccgcgacccccgtggcctggccttcacaagaagggcagaatccaagcctgagctcaatccgcaagctcattagagacgggtccatcgacttggtgataaatcttcctaacaataacactaagtttgtccatgacaattacgtcatccggaggaccgcggtggattcaggtattccgctgttgaccaactttcaagtcaccaagctgtttgccgaagcagtgcaaaaatcccgaaaggtcgattcgaagtcgcttttccactaccgccaatattccgcaggcaaagcggca

SEQ ID NO: 8084 - DNA, 4500 bp, synthetic construct
  misc_feature 1..4500: note = source = /note="Description of Artificial Sequence: Synthetic coding sequence"
  source 1..4500: mol_type = other DNA
atgaccagaatcttgacggctttcaaggtcgtgaggacccttaagactggcttcggattcaccaacgtgaccgcacatcagaagtggaaattttcgcgcccgggaatccggctgctcagtgtgaaagcacaaactgcacatatcgtgcttgaggacggaaccaagatgaaaggttattcattcggccatccctcgtcagtggctggcgaggtggtcttcaacaccggcctggggggttacccggaagccatcaccgatcccgcctacaagggtcaaatcctgactatggctaaccccatcatcgggaacggaggcgccccggacactactgccctggacgaattgggcctgtccaagtacctggaaagcaacggaattaaggtcagcggactcctggtgctggattactccaaggattacaaccactggctcgcaaccaagtcactcggccaatggcttcaagaagagaaggtgcctgccatctacggagtcgacacccgcatgctgactaaaatcatccgggataaaggcactatgctcggcaagatcgagttcgagggccaaccggtcgatttcgtggacccgaacaagcaaaatctgatcgcggaggtgagcactaaggacgtcaaagtctacgggaaaggaaatccgaccaaggtggtggcagtggattgtggtatcaagaacaatgtgatcagactgctcgtgaagcggggggcagaagtgcaccttgtgccctggaaccatgacttcaccaagatggagtatgatggtatcctgatcgccggcggacccggaaatccggcgctggcggaaccgctgattcagaatgtgcggaagattctggaaagcgaccgcaaggaacctctgttcggcatctcaaccgggaatctgatcaccggactcgcagctggtgcgaaaacctacaaaatgtcgatggccaacagaggacagaaccagcccgtgctgaacatcaccaataagcaggcgttcatcacggcgcaaaaccatggatacgcgctggataatactctgcctgccggatggaaaccgctcttcgttaatgtgaatgaccagaccaacgaaggaatcatgcacgaatcgaagccgtttttcgcagtgcagttccatcctgaggtgactccaggccctatcgataccgaataccttttcgactcgtttttctccctgatcaagaaggggaaggcgacgaccatcacctccgtgctccctaagccggcgctggttgcatctcgcgtggaggtgtccaaagtgctgatcttgggatcgggaggattgtcaattgggcaagcgggtgagttcgattacagcggctctcaggcggtcaaggcgatgaaagaggaaaacgttaagactgtgttgatgaacccgaacatcgccagcgtgcagactaacgaggtgggcctcaaacaagccgatactgtctacttcctgccaatcacgccgcagtttgtgaccgaggtgatcaaagccgaacaacctgacggactgatcctcggcatgggtggccagaccgccctcaattgtggcgtggaacttttcaagcgcggagtgctgaaggagtacggcgtgaaggtgctgggaacctccgtggagtcaattatggcgaccgaggaccggcaactgtttagcgacaagctcaacgagattaacgagaagatcgccccatcattcgccgtcgaatcaatcgaagacgccctcaaggccgctgacacgatcggctacccggtcatgatccggtccgcttacgctctgggagggctgggatcgggtatctgtccaaacagggagacgctcatggacctcagcactaaagcgttcgccatgaccaaccagatcctggtggaaaaatcggtcactggctggaaggaaatcgaatacgaagtggtgcgggacgccgatgacaactgcgttactgtgtgcaacatggaaaacgtggatgcaatgggcgtccacactggtgactccgtggtcgtcgcgccggcgcagacgttgtccaacgcggagttccagatgctgcggaggacttcaatcaatgtcgtgcgccacctcggaatcgtgggagagtgcaacatccaattcgccctgcatcctacttccatggaatactgcatcatcgaagtgaacgcacgcctctcgagaagctctgccctggcgtccaaggcaaccggatacccgctggcctttatcgcggctaagatcgctcttggcatccctctgccagagataaagaatgtggtgtccggtaaaaccagcgcgtgttttgagccgtcgctggattacatggtgaccaagattccgcgctgggatttggacaggttccacggaacctcgtcgagaatcggttcgtcgatgaaaagcgtcggagaagttatggccatcgggcggaccttcgaagaatcttttcagaaggccctcagaatgtgccatccgagtatcgagggattcacgccacgcctgcccatgaacaaggaatggccatcaaacttggatctccgcaaggaactgtccgaaccatcatcgaccagaatttatgctatcgcaaaggcgatcgacgacaacatgtccctggatgaaatcgagaagctcacctacatcgacaagtggttcctttacaaaatgcgggatatcttgaatatggaaaaaaccctgaagggactcaattcagaaagcatgacggaagagactctgaaacgcgctaaagagatcgggttttcagacaagcagatcagcaaatgcctgggactgaccgaagcgcaaacccgggagctccggcttaaaaagaatatccacccgtgggtgaaacagattgatacgctcgcggccgagtacccatcagtgactaactacctgtacgttacctataacggtcaagagcacgacgtgaatttcgacgatcacggtatgatggtgctcggatgcggcccgtaccatatcgggtcgtcggtagagttcgattggtgtgctgtgagctccatcagaactctgcgccagctgggaaagaaaacggtcgtcgtgaactgcaatccagaaaccgtgtcaactgactttgacgagtgcgataaactttacttcgaagaactcagcctggaacggatcttggacatctaccaccaagaggcttgcggcggctgtatcatctcggtgggaggtcagatcccaaacaatctggcagtgcctctctacaagaatggcgttaagattatgggcacctcccccctccagatcgaccgggccgaggatagatcaatcttctcagctgtcctcgacgaactgaaagtggcgcaggctccgtggaaggctgttaacactctgaatgaggcgctcgaattcgcgaagtcggtcgattacccgtgtctgctgcgaccgtcctatgtgctgtcgggatcagccatgaacgtggtgttttcggaggacgaaatgaagaaatttctcgaggaagcgacgcgggtgtcgcaggagcacccagtggtcctcactaagttcgtcgaaggtgcacgcgaagtggaaatggatgccgttggcaaggatggacgggttatatcgcacgccatctccgaacatgtggaagatgcaggagtgcacagtggggacgcgaccctcatgcttccgacccagaccatctcccagggagccattgagaaggtcaaggatgccaccagaaaaatcgcaaaggccttcgccatttcgggccctttcaacgtgcaattcctggtgaaaggcaacgacgtcctggttatcgagtgcaatctgcgggcttcgcgctcgtttccttttgtgagcaagacccttggcgtggactttatcgacgtggccaccaaggtgatgatcggagaaaatgtggacgagaagcatctgccaactctggaccacccaatcatcccagcggactacgtggccatcaaggcgccgatgttctcctggccacggctgcgcgacgccgaccctatcctgcgatgcgagatggcttccacgggagaagtggcctgttttggagagggtatccataccgcttttctcaaggcgatgctctccaccggattcaagattccgcagaagggaattctgattgggatccaacaatcgtttcgcccgcgcttcctgggcgtggcagagcagctgcacaatgagggatttaaacttttcgccactgaggcaacgtcagactggctgaacgcgaataacgtcccggcgaccccggtcgcatggccctcgcaggagggccagaacccgtccctgtcctccatcagaaagctgattagggatggtagcatcgatctcgtcattaacctgccgaacaacaataccaagttcgtgcacgacaattacgttatccgccgcactgccgtggattcaggaatcccactgctcactaacttccaggtgacgaagttgttcgctgaagcggtgcagaagtcccggaaggtggattcaaagtcgctttttcactacagacaatactcagcgggaaaggccgcc

SEQ ID NO: 8085 - DNA, 4500 bp, synthetic construct
  misc_feature 1..4500: note = source = /note="Description of Artificial Sequence: Synthetic coding sequence"
  source 1..4500: mol_type = other DNA
atgactcggattctgaccgcattcaaagtggtccggactcttaagacgggctttggcttcaccaatgtcaccgcacaccaaaagtggaagttttctcgccctggtatccgactcctcagcgtgaaggcacagaccgcacatatcgtgctggaagatggaacgaagatgaaggggtactctttcggtcacccctcatcagtggcaggagaagtggtctttaacactgggcttggaggttacccagaagcaattaccgatcccgcctacaagggtcagattcttactatggcaaaccctattatcgggaacggtggagccccagatactaccgctcttgatgaactgggactttcgaagtacctggaatccaacggaattaaggtgtcgggacttcttgtgctggattactcaaaggactataaccactggcttgcaaccaagtcgctgggacaatggctgcaagaagaaaaggtgcctgcaatttacggtgtggacaccaggatgctgacgaagatcatcagagataaaggtactatgctcgggaaaattgaattcgaaggacaaccagtcgatttcgtggatccgaataaacagaacctgattgccgaagtgtccaccaaagacgtcaaagtgtacggtaagggtaacccgaccaaggtggtggctgtggattgtggaattaagaacaatgttatccgtctccttgtgaagagaggagcggaagttcacctggtcccttggaaccacgacttcaccaagatggagtacgatggtattctcattgcaggagggcctgggaaccctgctttggcagaaccactgatacaaaacgtgcggaaaattctcgagagcgatcgtaaggagccgctgtttggaatctcgactggaaatcttattactggactcgccgcaggagccaagacctacaagatgagcatggcaaatagaggtcaaaatcagccggtgctcaacattacgaacaaacaggcatttatcactgcacagaaccacggatatgcactggacaatacccttccagccggatggaaacctctgttcgtgaatgtgaacgatcagaccaatgagggtattatgcacgaatccaagcctttctttgcagtgcaattccatccggaagtgacccctggtcctattgataccgagtacctcttcgattcattcttttctctgatcaagaagggtaaggcaaccactatcactagcgtgctccccaagcccgcacttgtcgcatcaagagtggaagtgtcaaaggtgctcattcttgggtccggtggtctgtcgataggtcaggcgggggaattcgattacagcggttcgcaagcagtcaaggcgatgaaggaggaaaatgttaagaccgtgctcatgaatcctaacattgcatcggtccaaaccaacgaagtcggtcttaagcaggctgacacggtctacttcctgccaatcactccgcagttcgtgaccgaagtgataaaagccgaacagccagatggtcttattctgggaatgggaggccagaccgcactgaactgtggtgtggaactgtttaaacgcggtgtgctgaaggagtacggagtgaaggtgctcggaacctcggtggagtccataatggccactgaggataggcagctgttctcggacaagctgaacgagataaatgagaagattgcacccagctttgcggtggaatccattgaagatgcacttaaggcagcagatactattgggtacccagtgatgatcagatccgcatacgcgcttggagggctgggttcaggaatttgccccaatagggaaacgctgatggatctttccactaaggcattcgcaatgaccaaccaaatcctggtcgagaaatccgtgaccggatggaaggagattgagtacgaagtggtcagagatgccgatgataattgcgtgaccgtttgcaatatggagaatgtagatgcgatgggcgtccacaccggcgattcagtcgtcgtcgcaccggcccagacgctttccaacgcagagttccagatgcttcggcgaacctccatcaacgtcgtccgtcatctgggcattgtgggtgaatgtaacattcaattcgcacttcatcctacctccatggaatactgcattattgaagtgaatgcaaggctgtcacgatcctcggctctcgcgagcaaggctaccggctaccctcttgcatttatcgcagccaagattgccctcggtattccgttgccagagattaagaacgtcgtctctggaaagaccagcgcatgttttgaaccaagcctggactacatggtgacgaagataccacgttgggatttggacagatttcatggcacctcctcccggatcggatcctcgatgaagtctgtgggcgaagtgatggcgataggtcgtacttttgaagagtccttccaaaaggcacttcggatgtgtcatccgagcattgagggatttactccaagactcccgatgaacaaggagtggccgagcaacctggaccttagaaaggagctttcagagcctagctccaccaggatatacgcaattgccaaagccatcgatgataacatgtccttggatgaaattgagaaactgacttacatagacaagtggtttctgtacaaaatgcgcgacattcttaacatggaaaaaactctcaagggtctgaattccgaatcaatgaccgaggaaaccctcaagagagcaaaggaaatcggattttctgacaagcaaattagcaagtgcctcggacttactgaagcccaaactagggaactgcgactcaaaaagaatatccatccctgggtgaaacaaatcgataccctggcggccgaatacccaagcgtcactaattacctttacgtgacttacaatggacaagagcacgacgtgaatttcgatgaccatggaatgatggtgctgggatgtggaccataccatatagggtcaagcgttgagtttgactggtgtgcagtctccagcattcgcacgctccgacagctgggcaaaaagaccgtggtcgtgaattgtaatcccgaaaccgtgtcgacggactttgatgagtgtgacaaactctattttgaagagctgtcgctggaacggatccttgatatctaccatcaggaggcttgtggtggatgcataatctcagtgggtggacaaattccgaacaacctcgctgtccctctctataagaacggggtcaagattatgggaactagcccgctgcagatcgacagggcagaggaccggtcgatcttttcggccgtgctggatgaacttaaggtggcacaggcaccctggaaggccgtgaatactctgaatgaagcccttgagtttgcaaagtcagtggactacccctgcctcctccgcccttcctacgtgctgtcaggatcagcaatgaacgtagtgttctcagaagatgagatgaagaagtttcttgaagaagcaactagggtcagccaggaacacccagtagtactcacgaagttcgtggaaggggctcgcgaggtcgaaatggatgccgtgggtaaggatggcagagtgatttcccatgcaattagcgaacatgtggaagatgccggtgtccattccggagacgccacccttatgctccctactcagaccatttctcaaggcgcaatcgaaaaagtgaaggacgccacccgcaagatcgccaaggcctttgcaattagcggaccctttaacgtgcaatttcttgtgaaaggaaacgatgtcctcgtgatcgaatgtaacttgagagcttcccggagcttcccatttgtgtctaagactcttggtgtggacttcatcgatgtggcaacgaaagtgatgatcggagaaaatgtcgatgaaaaacatctgcctaccctggatcatccaattatccctgcggactacgtcgcgataaaggcccctatgttttcgtggcctagactgcgcgacgcagatccgatcctgaggtgtgagatggcgtcgactggcgaagtggcttgttttggagaggggatccacactgccttccttaaggctatgctgagcaccgggttcaaaatcccacaaaaaggaatcctcataggaatacagcagagctttaggcctagattcttgggggtcgcagaacaacttcataatgaagggttcaagctgtttgccaccgaggccacttcagactggctcaacgccaacaatgtccccgcgaccccagtcgcatggccaagccaagagggtcagaacccctcactgtcgtccatccgaaagttgattcgtgatggctccattgatcttgtgatcaacttgccaaataacaacaccaagttcgtgcacgataactacgtgattcggagaacggcagtggacagcggcatcccactcttgaccaactttcaagtcactaaactgtttgcggaagccgtccaaaaaagcaggaaagtggatagcaagtcgctgttccactaccgtcagtactcagcaggtaaagcggcg

SEQ ID NO: 8086 - DNA, 4500 bp, synthetic construct
  misc_feature 1..4500: note = source = /note="Description of Artificial Sequence: Synthetic coding sequence"
  source 1..4500: mol_type = other DNA
atgacgcgcatcctgactgcttttaaggtggtgaggactttgaaaactggatttgggttcaccaatgtgaccgcacaccagaagtggaagtttagccgccctggcatcagactgctctctgtcaaggcacaaaccgcccacatcgtcctcgaagatggcaccaaaatgaaaggctacagcttcggacacccatcctccgtggctggtgaggtcgtctttaacacggggcttgggggctaccctgaggccatcactgatcccgcgtacaagggtcaaattctgactatggcaaacccgattatcggcaatggcggcgccccggacaccaccgcgcttgatgaactgggcctgtcgaaatacctggaatcaaacggtatcaaagtgtcgggtctgttggtgctcgattattcgaaggattacaaccactggctcgccaccaagtccctggggcagtggctgcaagaggagaaggtgccagctatctacggggtggacacccggatgctgactaagatcatccgcgacaaaggtaccatgctgggaaagatagaattcgagggacagccagtggacttcgtggatccaaataaacaaaacttgatcgccgaagtgagcactaaggacgtgaaggtgtacggaaaaggaaacccgactaaggtcgtggccgtcgattgcggaatcaaaaacaatgttatccgcctgctggtgaagcggggagcggaggtgcatctcgtcccttggaaccacgatttcactaagatggaatacgatggaattctcatcgcaggcggccccggaaacccggcattggccgagccactgattcaaaatgtgagaaagatcctcgagtcggaccggaaagagcccctcttcggtatctccaccgggaatctgatcaccggactggccgcgggagcgaaaacttacaaaatgagcatggccaaccggggacaaaaccaaccggtgctgaacattaccaataagcaggcatttatcactgcccagaatcacggctacgcgctggataataccctgccggccggatggaagcctctgttcgtgaacgttaatgatcagaccaatgaaggcatcatgcacgaaagcaaacctttcttcgccgtgcagttccatccagaggtcactccgggacctattgacaccgaatacctcttcgactcgttcttctcactgatcaagaaaggaaaggcgaccaccatcacctcagtgctcccgaaaccagccctggtggcgtcaagggtcgaggtgagcaaggtgctgatcctcgggtcaggcggcttgagcattggacaagcaggcgaattcgactactcggggtcccaggcggtgaaagccatgaaagaggaaaacgtcaagactgtgctgatgaacccgaacatcgcctcagtgcagactaatgaagtggggctgaagcaagcagataccgtgtactttttgccgatcaccccacagttcgtgaccgaagtgatcaaggccgaacagccggacggcctcattctgggaatgggaggacaaaccgcactgaactgcggggtcgaactcttcaagcgaggggtgctgaaagagtacggtgtgaaggtgctcggaacttcagtagagtcgattatggctacggaggaccggcaacttttctctgataaactcaacgagatcaacgagaagattgcccctagcttcgccgtcgagtcgattgaggatgccctgaaagctgccgacaccatcggatacccggtgatgatcaggtcagcctatgccctgggcggactgggaagcggaatatgtccgaatagggaaactctgatggacctgtccaccaaggctttcgcgatgactaatcaaatcctggttgagaaatcggtcactggctggaaggaaatcgaatacgaagtggtgcgcgacgccgatgataattgcgtcaccgtgtgcaacatggaaaacgtggacgcaatgggagtccataccggcgattcggtggtcgttgcgccagcacagactctctcaaacgccgagtttcaaatgctcagaagaacctccatcaacgtggtgcgtcatctgggaattgtgggagaatgtaacatccagtttgctctgcatccgacgagcatggagtattgtatcatcgaggtgaacgcgcgcctgtcccggtcctcggcgctcgcatccaaggcgacgggatacccgttggcgttcattgctgccaagatcgcgctgggcatcccccttcccgaaatcaaaaatgttgtctccggaaagacctcggcatgctttgaaccgagcctcgactacatggtcaccaaaatcccgagatgggacctggatcggtttcatggaacttcgtcgcgcataggatcaagcatgaagtccgtcggagaagtgatggcgatcggacggactttcgaggaatcattccagaaggctctgcgcatgtgccacccatccatcgagggctttaccccgcggctgcctatgaacaaggagtggccttcgaacctggacctccgtaaggagctgtccgaaccctccagcacgcggatctacgctattgctaaggccatcgacgataacatgtccttggacgaaattgagaagctgacctacatcgataagtggtttctgtacaagatgagagatatcctcaatatggaaaagactctgaagggacttaactcggaatccatgactgaagaaaccctgaagcgagccaaagaaatcggattctccgataagcagatttcaaagtgcctgggccttactgaggcgcagactcgcgaactgcggctcaaaaagaacatccatccctgggtcaagcagatcgataccttggccgccgaatacccaagcgtgacgaactacctctacgtcacttacaacggccaagagcacgacgtgaacttcgacgaccacggcatgatggtgctcgggtgcggaccgtaccatatcggtagctcggtggagtttgactggtgtgccgtctctagcatcaggacgctgcgccagctcggaaagaaaacggtggtggtgaactgtaatccggaaactgtgtcaaccgactttgacgaatgcgacaagctctacttcgaggaactctctttggagcgcattctggacatctatcatcaggaagcctgcggcggctgcatcatctccgtgggagggcagatccccaacaacctggccgtgccactctataagaatggagtcaagatcatgggaacttcgccattgcaaatcgaccgcgcagaggaccggtctatcttctcagcagtgctggacgagctgaaggtcgctcaggcaccttggaaggccgtgaacaccctgaatgaggcactggagtttgcgaagtcggtcgactacccatgccttcttcggccatcctacgtcttgtcgggcagcgcgatgaacgtggtgttcagcgaggacgaaatgaagaagttccttgaggaagcgactcgcgtctcccaggagcacccggttgtgcttactaaattcgttgagggtgcgcgcgaagttgaaatggatgctgtggggaaggacggacgggtaatctcgcacgcaatctcagaacatgtcgaagatgccggtgtccatagcggggacgcaaccctcatgctgccgacccagaccattagtcagggagccattgaaaaggtgaaggacgccactagaaagatcgctaaggccttcgctatctccggtccgttcaacgtccaattcctggtcaagggaaacgatgtgctcgtgatcgaatgcaacctccgcgcatcccgctcgtttcctttcgtgagcaagactttgggcgtggacttcatcgatgtggctaccaaagtgatgatcggagaaaatgtggatgaaaagcacctcccgactctggaccacccgatcatcccggccgattacgtggcaatcaaggctccgatgtttagctggcctcggctgcgagacgccgaccccatcctgaggtgtgagatggcttcgacgggtgaagtggcatgcttcggagaagggatccataccgccttccttaaggctatgctgtcgaccggattcaagatcccgcagaaaggaatcctgatcggtatccaacagtcattcagacctagatttctgggagtcgcggaacagctgcacaacgagggattcaaacttttcgcaaccgaagccacctccgactggctgaacgcgaacaatgtgccggccactccggtcgcctggccatcccaggagggacaaaatccatcgctctcaagcatcagaaaactgatccgcgacggttccatcgatctcgtgatcaatctccctaataacaatactaagttcgtccacgacaattacgtcatcaggcggaccgccgtggactcgggaattccactcctcactaacttccaggtgacgaagttgttcgctgaagcggtccagaaatcgcgcaaggttgactcgaagtcccttttccactacagacagtactcagcgggaaaggcggcc

SEQ ID NO: 8087 - DNA, 4500 bp, synthetic construct
  misc_feature 1..4500: note = source = /note="Description of Artificial Sequence: Synthetic coding sequence"
  source 1..4500: mol_type = other DNA
atgactcggatcctgaccgcattcaaagtggtccggacccttaagacgggcttcggattcactaacgtgactgcccaccaaaagtggaagttctctcggcccggaatccggctgctctcagtgaaagcacaaactgcgcacatcgtgttggaggacggtaccaagatgaagggttactcgtttggacacccgtcctcagtcgctggagaggtcgtctttaacactggattgggaggataccctgaggccattacggatcctgcatataagggccagatcctgaccatggccaatcctatcatcggaaacggaggagctccagacactactgccctcgatgaactgggactgagcaaatacctggaatcaaatgggatcaaggtatccggactccttgtgctcgactactccaaggattacaatcactggctcgccaccaagagcctcgggcaatggctccaggaagagaaggtgccagccatttacggggtggatactaggatgctgaccaagattatccgcgacaagggcaccatgctgggtaaaatcgaattcgaggggcaaccagtggactttgtcgacccgaacaaacagaatctcattgccgaggtgtcaactaaggatgttaaagtttacggcaaaggtaacccaacgaaggtggtggcagtggactgcggaatcaagaataacgtcatcagactgctggtgaaacgcggcgcggaggtgcatcttgtcccctggaaccatgattttaccaagatggaatacgacggcatcctgatagctggtgggccgggcaacccggcgctcgctgaaccattgatccaaaatgtgagaaaaatcctggagagcgacaggaaggaaccgctctttggtatctccactggcaatttgattactggacttgccgccggcgccaagacctacaagatgagcatggctaaccgaggacagaaccagccagtgctgaatatcacgaacaagcaagccttcatcaccgcccagaaccacggatatgcacttgataataccctgccagccgggtggaaaccgctgtttgtgaacgtgaacgatcagaccaatgagggaatcatgcacgagtcaaagccgttcttcgcagtgcaattccacccggaggtcaccccgggacctatcgacactgaatacttgtttgattcatttttcagcctgatcaagaagggcaaggctaccaccattacctcggtgctcccgaagccggccctggttgcgagccgggtggaggtcagcaaagtgctgattcttggttcagggggcctgtccatcggccaagccggcgaattcgattactcgggctcccaagcggtgaaggctatgaaggaggaaaacgtgaaaactgtgctgatgaaccctaacatcgcctcggtccaaaccaacgaggtaggactgaaacaggcggacactgtgtacttcttgccaatcactcctcagttcgtgactgaggtcatcaaggcagagcagccagatggcctgatcctcggaatgggaggacagactgcgttgaattgcggcgtcgaactcttcaagcgcggcgtgctgaaggagtacggagtgaaagtactgggaacctcagtggaatcaattatggccactgaggacagacagctgttctcggataagctgaatgaaatcaacgaaaagatcgccccatccttcgcggtggaatcgatcgaagatgctctgaaggccgctgatactattggatacccagtcatgatccgctccgcctacgccttgggaggcctcggttcgggcatctgcccgaatagagagactttgatggacctctcgaccaaggcctttgcaatgactaaccaaatcctcgtcgagaagagcgtgaccggatggaaagagatcgagtatgaggtggtcagggacgcagatgacaactgcgtgactgtgtgcaacatggaaaacgtggacgctatgggcgtgcataccggagattccgtcgtggtcgcaccggcacaaaccctgagcaatgcagaattccaaatgctgagacgcacttccatcaatgtggtgcgccatctgggaatcgtcggagaatgcaatatccaattcgccttgcaccctacctctatggaatactgcatcatcgaggtcaatgcccgtttgtcgagaagctctgcactggcatcgaaagccaccggatacccgctcgcgttcatcgctgctaagatcgcgctgggtatccccctcccggagattaagaacgtggtgtccggcaagaccagcgcttgcttcgaaccgtcacttgactacatggtcactaagatcccaaggtgggacctcgaccggttccacggaaccagctcgcgcatcggcagcagcatgaaatcggtgggcgaagtgatggcgatcggacggacctttgaggagtccttccaaaaggccctgagaatgtgccacccgtcaatcgaaggattcaccccgagactccccatgaataaggaatggccgagcaacctggatctcagaaaggaactgtcagaaccttcctccacccgcatctacgccatcgctaaagctatcgatgataacatgtcactggacgaaatcgaaaagctgacgtacatcgacaagtggtttctctataagatgcgcgacatcctgaacatggaaaagacgctcaaaggtctgaattcggaatccatgaccgaggagactctcaagagagcaaaagaaatcggcttcagcgataaacagatcagcaagtgcctggggctgaccgaagcgcagacccgggaattgcgcctgaagaagaatattcatccttgggtgaagcagatcgacaccctggccgcggaatacccgtcggtgactaattacttgtacgtgacctataatgggcaggaacacgacgtcaacttcgacgatcacggaatgatggtcctgggctgcgggccctaccacatcggctcaagcgtggagttcgactggtgcgcggtcagcagcatccggaccctgcgccagcttgggaaaaagaccgtggtggtgaattgcaaccccgagactgtctctaccgatttcgacgagtgcgacaagctgtacttcgaggagctctcgctggagcgcatcctcgacatttatcatcaggaagcatgcggaggatgcatcatctctgtgggtggacagatcccgaacaatctggctgtcccgctgtacaagaacggggtgaaaatcatgggaacgtccccactgcaaattgacagagccgaagatcggtcgatcttctccgcggtgctggatgagctgaaggtggcacaagcgccatggaaggcagtgaacactctgaatgaagcactcgagttcgctaaatccgtggattacccgtgcctgctgcgtccaagctacgtgctctcgggatccgccatgaatgtggtgttctccgaggatgagatgaagaagttcctcgaagaagccacccgggtgtctcaggagcaccctgtcgtgctgacgaaattcgtggaaggggcgcgcgaagtggaaatggacgcggtgggcaaagacggcagagtcatttcccacgctatcagcgaacacgtggaggatgcgggagtgcatagcggagacgctacgcttatgcttccgactcagactatctcacaaggcgcgatcgagaaggtcaaggacgcaactcgcaagatcgccaaagcgtttgcaatctcaggaccgtttaacgtgcagttccttgtgaaagggaacgacgtgctcgtgatagaatgcaatctgcgcgcgtcgagatcttttcctttcgtgagcaagaccctcggagtggatttcatcgacgtggcgactaaagtgatgattggcgagaacgtggatgaaaagcatctcccaactctggaccacccgatcattcctgccgactacgtggccatcaaagcaccaatgttctcctggccgcggctgagagatgcggatccgatccttcggtgcgaaatggcgtcgactggggaagtggcctgcttcggtgaaggaatccatactgccttcttgaaagcaatgctctcaaccgggttcaaaattccgcagaaggggatcctcattggaatccagcagtccttccggccacgctttcttggagtggcagagcagctgcataacgaaggattcaaattgttcgcgaccgaggcgacttctgactggctcaatgccaacaatgtccctgcaactccggttgcttggccgtcgcaagaaggacaaaacccgagcttgtcgtcgatccgcaagctgatccgcgacggatcgattgacctggtgattaacctgccaaataacaataccaagttcgtccacgacaattatgtgatccggcggactgctgtggactcgggaatcccgctcctcactaacttccaagtcaccaaactgttcgcagaggccgtgcaaaagtcccgcaaggtggattcgaaatcgctgtttcactataggcagtacagcgcgggcaaggctgcg

SEQ ID NO: 8088 - DNA, 4500 bp, synthetic construct
  misc_feature 1..4500: note = source = /note="Description of Artificial Sequence: Synthetic coding sequence"
  source 1..4500: mol_type = other DNA
atgaccagaatcttaacagcattcaaagtcgtcagaactctgaagactggatttggatttacaaacgtgacagcacatcaaaagtggaaattctctaggcccgggatcaggctactgagcgtcaaggctcagaccgctcacattgttctcgaagatggtacaaaaatgaaaggatactcgttcgggcacccctcatctgtcgcaggtgaggtggtgttcaacaccggactcgggggataccctgaggctataaccgatcctgcctacaagggccaaatccttactatggctaaccccatcatcggcaatggaggcgcgccagataccactgctctcgatgagttaggacttagtaagtatctcgaaagtaacggaatcaaggtgtctggcctcctggtccttgactactccaaagactacaaccactggctagcaacgaagtcgctgggtcagtggcttcaagaagagaaagtgcctgcaatctatggcgttgatacccggatgttaacgaagataatccgagacaagggtacaatgctgggtaaaattgaatttgagggccagccggtcgatttcgtggaccctaacaagcagaatctgatcgctgaggtgtctacaaaggacgtgaaagtttacggaaagggcaaccctaccaaagttgtggccgtggactgcgggatcaaaaacaacgtgatccgtctcctggtgaagcgtggcgccgaggtccacttggtgccgtggaatcacgatttcacaaaaatggagtatgacgggatccttattgctgggggccctggaaatcccgcacttgctgagccattgattcaaaacgttcggaaaatcctggagagtgataggaaagaaccattgtttggtatcagtaccggtaatctgatcacaggcctggccgccggcgccaaaacctacaagatgagtatggctaaccgagggcagaatcagcctgtgctgaacatcaccaacaaacaggcctttatcacagctcagaaccatggctacgctttggacaatacgctgcccgccggctggaagcctctctttgtgaatgtcaatgaccagaccaacgaagggatcatgcatgaatccaagccgtttttcgctgtgcaattccacccagaagtaacgccaggtcctatagataccgaatacctgtttgactcttttttctctctgataaagaaggggaaagctacaacaatcacctcagtgttgcccaagcccgctttagtagcgtccagggtcgaagtatccaaagttctcattttggggtctgggggcttgagcatcggccaggcaggcgaatttgactactctggaagccaagccgttaaagcaatgaaagaagaaaacgtaaagaccgtattaatgaatccgaacatagccagcgttcagactaacgaagttgggctcaaacaggccgatactgtgtatttcctcccaattacacctcaattcgtgacagaagtgataaaagcagaacaaccggacggactcatcctagggatgggaggtcagaccgcgcttaactgtggtgtggagctattcaaacgcggcgtgttgaaggaatatggcgtcaaagttctggggactagtgtagagtcgattatggccaccgaagatagacagctgttctccgacaaacttaatgaaattaatgaaaagatcgctccaagcttcgccgtcgagagtatcgaagatgccttaaaggccgctgacaccatcggctacccagtgatgatcagatctgcttacgccctgggtgggctgggctccggcatctgcccaaacagggaaactctgatggacctgagcactaaagccttcgctatgaccaaccaaatccttgttgaaaagagtgtcacgggttggaaggaaattgaatacgaagtggtccgggacgctgatgataactgcgtcaccgtgtgcaacatggagaacgtagacgcaatgggcgtacacactggcgactctgtagtggttgcaccggcccagacgctgtccaacgcggagttccaaatgctgcgcaggacctcaattaacgtggtcaggcacctcgggatcgtgggagagtgtaacatccaattcgctttacacccaactagcatggaatattgtatcatcgaagtgaacgctaggcttagcagaagcagcgcccttgcctctaaggccacgggatacccactcgcattcatcgctgcaaaaatagctcttggcattccacttccagagatcaagaatgtcgtgtctggaaaaacatcagcctgtttcgagccctctcttgattacatggtgacgaaaattccaagatgggacctcgacaggttccacgggaccagtagccggattggatcttctatgaagagcgtcggggaggtcatggcgatcggccgcacatttgaggagtccttccaaaaagctttacgaatgtgtcacccttcaatagagggcttcactcccaggcttccgatgaacaaagaatggccttcaaacctggatttaagaaaagagctctctgagccatcatccaccaggatttacgcaatcgcaaaagctatagatgacaacatgagcctggatgaaatcgaaaagcttacctatatcgataagtggttcctatacaagatgagggatatcctgaacatggagaaaaccctaaagggccttaactccgaaagcatgacagaggagaccctgaaaagagctaaggagataggcttctctgacaagcaaatttcaaaatgcctgggactaacagaagcgcaaactagagagttaaggctgaaaaaaaacattcacccgtgggttaaacagatagatacccttgccgccgaatacccgagtgtcactaactatttatacgtgacatacaacggacaagaacacgatgtcaacttcgacgatcacggtatgatggttttaggatgcggcccctaccacattggcagctcagtcgaattcgactggtgcgctgtatccagtattcggactctgaggcaactgggaaaaaaaacagtagtggttaactgcaatccagaaactgtctctacggattttgacgaatgcgataagctttatttcgaagagctctccctcgagaggatccttgacatctatcaccaggaggcttgtggaggctgtatcatttctgtaggaggccaaatccctaacaatttggctgtgcccttatacaaaaacggggtcaaaatcatgggcacctcccctctgcaaatcgaccgagccgaggaccggtctatattttccgccgttctggacgaattgaaggtggctcaggccccttggaaggctgtaaataccctgaacgaggctttagaatttgctaagagcgtcgattacccttgccttctcagaccaagttatgtattgtctggttcagctatgaatgtagtgttttcagaggatgaaatgaagaaattcttggaagaggcaacaagggtgagtcaggagcaccctgtggttcttactaaattcgttgagggggctcgggaagtggagatggacgccgttgggaaggatggacgcgttatctctcacgccatcagcgagcacgtcgaagacgcaggggttcacagcggtgacgccaccctcatgcttcctacccagactataagccagggagctattgaaaaagttaaggacgcaaccagaaagatagcaaaggccttcgctatctcagggccatttaacgtgcagttcctcgttaaggggaacgacgtgctggtgattgaatgcaatctgagagccagcaggtctttcccttttgtttcaaagacactcggagtggacttcatcgacgtcgccacaaaggtgatgataggcgagaacgttgatgagaaacatttgccaaccctggatcacccaatcattcctgcggactatgtagcaattaaggccccaatgttttcctggccaaggttgcgggacgccgatcctattcttaggtgcgagatggctagtacaggagaggtcgcctgctttggggagggcatacacacagccttcctgaaggccatgctctcaaccggttttaagatcccccagaagggcattttaatcggcattcagcaatccttcagaccgaggttcctgggcgtagcagagcagcttcataacgagggttttaagctgtttgcaactgaggctaccagcgattggctcaacgctaataacgtaccagctactccggtggcctggccttcccaggaaggtcagaacccgtccctcagcagcattagaaagttgatcagggacgggagcatcgatctggtgattaacctgcctaacaacaataccaaatttgtacatgataactacgtaattagacggaccgctgtggattccggtattcctttgctgactaatttccaagtcaccaagctttttgctgaagcggtgcagaagagtagaaaggttgacagcaaaagcctctttcactatcggcaatactctgcaggaaaagcagcg

SEQ ID NO: 8089 - DNA, 4500 bp, synthetic construct
  misc_feature 1..4500: note = source = /note="Description of Artificial Sequence: Synthetic coding sequence"
  source 1..4500: mol_type = other DNA
atgacaagaatactgactgcctttaaagtcgtgagaaccctaaagactggcttcggctttaccaatgtgaccgcacatcagaagtggaaattttctaggccaggaatacgcttattaagcgtgaaagcccagaccgcccacatagttctggaggacggaactaaaatgaagggatattccttcggccacccctctagtgtggcaggggaagtggtgttcaacacagggcttggtggttatcccgaggcaatcacagacccagcctacaaaggacaaattcttaccatggccaacccgattatcggaaatggcggcgcccccgacacaaccgccttggatgaactgggcctctctaagtatctggagagcaacgggattaaagtatccggactcctggtgctagactacagtaaggattacaaccactggctggctactaagtctctgggacaatggctccaggaagagaaggtgcccgctatatatggtgtggacacacggatgttgaccaagattataagagacaagggcactatgctcggtaaaatcgagtttgagggacagccagtggactttgtggatcctaataaacaaaaccttatagctgaggtgtcaaccaaggatgtgaaggtgtatggaaaaggcaaccctaccaaggtagtggctgtggattgcggaattaagaacaacgtgatccgcctgttggtgaagagaggagcagaagtccacttggtgccatggaaccacgactttactaagatggaatatgatggcatcctaattgccggtggacccgggaatcctgcccttgctgaaccactcatccaaaacgtgaggaaaattctggagagcgataggaaggaaccgctatttggcattagtaccgggaatctgattacaggtctcgccgccggcgcgaagacctacaagatgagcatggctaaccgcggacagaatcagccagtccttaacataacaaacaagcaggctttcatcacagcccagaatcacgggtacgccctggataacactctgccagcgggctggaaacctcttttcgtgaatgtaaatgatcagaccaacgagggcatcatgcatgaatctaaaccattttttgccgtccagttccatccagaagtgactccagggcccatagatactgagtacttgtttgactccttcttcagccttatcaagaaaggcaaggctaccactatcacgtctgtgctgcccaagcccgcactggtcgcgagcagagtggaagtgtcaaaagttctgattttaggtagtggaggcttatcaatcggacaggccggcgaattcgattactcgggtagccaagccgtgaaggcaatgaaagaggagaacgtgaaaacagttctaatgaatcccaacatagcctccgtgcaaaccaacgaggtgggcttgaagcaggcagacaccgtgtattttctgccgatcacccctcagtttgtgacggaggtgattaaagccgagcagccagatggactaatccttgggatggggggccaaacagccttaaactgcggggtggagctttttaagaggggggtactcaaagaatatggcgttaaggttctaggaaccagtgtggaatctatcatggccactgaggaccgccagctgtttagtgataagctgaatgagattaatgaaaaaatcgctccatcgttcgcagttgaaagtatcgaggacgctctaaaggctgcagacacgattggttaccctgtgatgatccggagtgcatatgcactagggggcctcgggtcaggcatatgtcctaaccgagaaactttgatggacctgtccacaaaggctttcgccatgaccaaccaaatactcgtggaaaagtccgtcacaggctggaaggaaattgagtatgaggtagtgagagatgcggatgataattgcgtcacagtctgtaatatggagaacgtcgacgccatgggtgttcacactggggatagcgtggtggtagcccccgcccagaccctcagtaacgccgagttccagatgcttcgcaggacctccatcaacgtggtgaggcacctgggtatcgtcggtgagtgcaatatccagttcgctctgcatcctacttcaatggaatattgcataatcgaagtcaatgccaggctgagccggtcttccgccctagcatcaaaagctactgggtacccgctagctttcattgccgccaagattgccttagggatccccttacccgagatcaaaaatgttgtatccgggaaaaccagcgcatgttttgaaccctccctcgattatatggttactaaaatcccaagatgggatctggaccgattccacggaacaagctcaaggatcggctccagcatgaagagcgtgggtgaagttatggcgattggaaggacctttgaagagagttttcagaaagcccttcggatgtgccatccttctattgagggctttactcctcggctgccgatgaataaggagtggccctctaatttagacctcaggaaagagttgtccgaaccatccagcactcggatctacgctatcgccaaagccatagatgacaatatgagccttgatgagatcgagaagctgacttacattgacaagtggttcctgtacaagatgagagacatccttaacatggaaaagaccctgaaaggacttaattctgagtccatgaccgaggagacactaaagagggctaaggaaatagggttttctgataaacagatctctaagtgcttgggactgaccgaagcacagacccgcgagctgcgactgaagaaaaacattcatccctgggtcaagcagatcgatacccttgctgcagaatatccttccgtaactaactacctttatgtgacatataacggtcaagaacatgatgtgaactttgacgaccatggtatgatggtgttaggctgcgggccataccacatcgggtcaagtgttgagttcgactggtgcgctgtaagctcaataagaactcttagacagttggggaagaagacagtggtagtaaattgcaaccccgagacagtttcaaccgacttcgacgagtgcgacaagttgtacttcgaagagctctcactagagaggatattggatatctaccaccaagaagcctgtggcggctgtatcatatctgttggtgggcagattcccaacaacctggctgtacctctctacaagaatggcgtgaagatcatgggaactagccccctgcagatagaccgagctgaagatcggtccatcttttcagccgttctggacgagttgaaagtggcccaggctccctggaaggccgtcaacactcttaacgaagccctcgagttcgcgaagtccgtcgactatccatgcctcctgcggccttcctacgtgctgtcaggatccgccatgaatgtcgtgtttagtgaagatgagatgaagaagtttttagaagaagctacacgggtctcacaggaacacccagttgtgcttacaaaatttgtggaaggggctcgagaggtggagatggatgctgtgggtaaggacggcagggtcattagccatgcaatcagcgagcatgtagaggatgcaggcgtccactcaggcgatgcaactttaatgttaccgacccaaaccatctcccagggcgcgatcgaaaaggtgaaggacgctactcgtaagatcgctaaggctttcgctattagcgggccctttaacgtccagttcctcgtgaaaggcaacgacgtgctggtgatcgagtgcaatctgcgggccagccggtcctttccctttgtgagcaagacactgggtgtggattttatagatgtcgcaaccaaagtcatgataggagagaatgtggacgagaaacatttacccacgctcgaccatcctattattccagccgactatgtggccataaaagccccaatgttcagctggcctaggcttcgggacgccgaccctatactgaggtgtgaaatggcctcaaccggagaggtggcatgcttcggggagggcattcacacagcgttcttaaaagccatgctgtctactggtttcaagatcccacagaagggcatactgattgggattcagcagtcttttcgcccgcgctttctgggagtggcagagcagttgcacaatgaggggtttaagttatttgcaactgaggctaccagtgactggttaaacgcgaacaacgttcccgccacgcccgtggcttggccgagccaggaggggcagaacccctcactgtcaagtatcaggaagctgattcgggatgggtcaatagatctggttatcaaccttcccaataataacaccaagttcgtacacgacaattacgtgattaggcgcaccgctgtggactctggaattccgctcctcaccaattttcaggtcaccaagttgtttgccgaggccgtacagaaatccaggaaggtcgactctaagtcgctgtttcattaccgccagtactccgccgggaaggctgcc

SEQ ID NO: 8090 - DNA, 4500 bp, synthetic construct
  misc_feature 1..4500: note = source = /note="Description of Artificial Sequence: Synthetic coding sequence"
  source 1..4500: mol_type = other DNA
atgactcgtattctgactgcattcaaggtggtgcgcaccctgaaaaccgggttcggatttacgaacgtgaccgcacaccagaagtggaagttttccagacctggtattcggctcctttccgtaaaggcacagaccgcacacattgtgctcgaggatggtactaagatgaagggctattccttcggacatccctcgtcggtggcgggcgaggtcgtctttaacactggtcttggaggataccccgaagccattaccgatccggcctacaaggggcaaatccttactatggctaatcccataatcggaaacggaggggctcccgatactaccgcactggatgaactgggcctttcgaaatacctcgagagcaacggcatcaaagtcagcggactgcttgtgcttgactactcaaaggattacaaccattggctggcaaccaagtcactgggacaatggcttcaggaggaaaaagtgccagcaatctacggagtcgacaccagaatgcttacgaagattattcgagataagggtaccatgctcggcaagattgagtttgaaggacaacccgttgattttgtggatcctaataagcagaacctgattgcagaggtgagcactaaggatgttaaggtctacggcaagggaaatcctacgaaagtggtggcagtagactgtggcattaagaataatgtcattcgcctcctggtgaaaaggggcgctgaagtccacctggtgccttggaatcatgattttaccaaaatggaatacgacgggattctcattgcaggtggtcccgggaacccagctcttgccgaaccacttattcagaacgtccgaaagatacttgaatcggacaggaaggaacccctttttggaatatcgacgggcaacttgatcactggcctcgcagcaggagccaaaacttacaaaatgtccatggccaatagaggtcagaaccaacctgtgctgaatatcaccaataagcaggctttcataactgcgcagaaccatggttacgcactggataatacccttccagcgggttggaagcctctttttgtcaacgtcaacgaccagaccaatgaaggaattatgcatgagtcgaagccattctttgcagtgcaattccatcccgaggtgacgcctgggccaattgacacggaatacttgtttgactcgttcttctccctgatcaagaagggtaaagccactactatcactagcgtcctccccaagccggcacttgtggcatcgcgcgtggaagtctcgaaggtgcttattctggggtcaggcggactgagcattggtcaagcaggagagttcgattactcaggatcacaagcagtgaaggcgatgaaggaggaaaacgtgaaaactgtgcttatgaacccaaacatcgcctcagtccaaactaatgaggtcgggttgaaacaagcggatactgtgtacttcctgcctattaccccacaattcgtgaccgaagtgattaaggcagaacaacctgatggccttatccttggaatgggagggcaaacggcattgaactgcggcgtggagctgtttaaacggggtgtgcttaaggagtacggcgtgaaggtccttgggacctccgtggaatcgatcatggcaaccgaggacagacagcttttttccgataagttgaatgagatcaacgaaaagatagccccttcgttcgcggtggaatccatcgaggacgcacttaaggcggctgataccattggatacccggtgatgatccggtccgcctatgcgcttggggggctgggatccggaatctgtccgaatagggaaaccctcatggacctctcgactaaagcatttgcaatgacgaaccagatccttgtggaaaagtccgtgactggatggaaggaaatcgaatatgaagtggtgcgagatgccgacgacaattgtgtgaccgtatgtaacatggaaaatgtcgatgcaatgggcgtccatactggagattccgtggtagtggcgccagcccagaccctgtcgaatgcagaattccaaatgctgcgaagaacctcgattaatgtggtgagacacctgggaattgtgggtgaatgcaatatccaatttgcacttcatcctacttcaatggagtactgcattattgaagtcaacgcacggttgagccggtcatctgcactggcgagcaaggccacgggataccctctcgcatttatcgcagctaaaatcgctctggggattcccctgcccgagattaagaatgtggtgtccggtaagacctcagcctgttttgaaccttcgctggattacatggttacgaagataccacgctgggatctcgatagatttcatgggacttcgagtagaattggctcttccatgaagtccgtaggagaggttatggcaatcggtagaacttttgaggaatcgttccaaaaagcgcttaggatgtgtcatccctccattgagggttttaccccaagactcccaatgaataaggaatggccatcgaatcttgacctgcgaaaggagttgagcgaacctagctcgactcggatttacgctattgcaaaagcaattgatgacaatatgtcgctggatgaaatcgaaaaacttacttacatcgataagtggtttctctacaagatgcgtgatatactcaacatggaaaagactcttaaagggctgaacagtgaatccatgaccgaagaaaccctcaaaagggccaaggagattggattttcagataagcagatttcaaagtgtcttggactgaccgaagctcagaccagggaactgcgcctgaagaagaacatccatccatgggtcaaacaaatcgacacgcttgccgctgaatacccttcggtgactaattacctttacgtgacttacaacggacaagaacatgatgtcaactttgatgatcacggtatgatggtactgggctgtggaccataccatattggttctagcgtcgaatttgattggtgcgctgtgtccagcatccgcactttgagacagctgggaaaaaagactgtcgtcgtcaactgtaaccctgaaactgtgtccaccgacttcgatgaatgcgataagctgtactttgaagaattgagcttggaacggatcctggacatttatcaccaagaagcatgtggagggtgcattatcagcgtgggaggtcaaattcccaacaatctcgcagtgccgctgtacaagaacggagttaagattatgggcaccagccctctccaaattgatcgtgcagaagatcgctcaatcttttcggccgtgctggacgagcttaaggtggcgcaggccccttggaaggctgtgaacaccctcaatgaggccctggaatttgcaaagagcgtggattacccatgtctgctgcggccaagctacgtcctttcagggtccgcgatgaatgtcgtctttagcgaagatgaaatgaagaaatttctcgaggaagccacccgcgtatctcaagagcatccagtggtcctgaccaagtttgtcgagggggcgcgtgaagtcgaaatggacgcagtgggtaaggacggacgcgtcatttcccacgctatctcagagcacgtggaggatgccggagtccattccggcgacgccactcttatgcttcctacccagaccatttcacaaggagcaatcgagaaggtgaaggatgcaactcgcaagatcgccaaggcgtttgccatatcaggcccttttaacgtgcagttcctcgtgaagggtaacgatgtcctggtgatcgaatgtaaccttagagcaagcaggtccttccctttcgtgtccaagacccttggtgtggacttcattgacgttgcaaccaaagtgatgatcggggagaacgtggatgaaaaacatctgcctacccttgaccaccccataattcccgcagactacgtggcgattaaggcccctatgttttcgtggcctaggctgcgcgatgctgatcctatactcagatgcgagatggcgtccaccggagaagttgcttgtttcggagaggggattcacactgcatttctcaaagcaatgcttagcaccggtttcaaaatacctcaaaaaggtattctgattggaatacaacaatcattccggccaagatttttgggtgttgcagaacagctgcataacgaaggattcaaactctttgcaaccgaagctactagcgactggcttaacgccaacaacgtgccagcaactcctgtggcatggccaagccaggagggtcagaatccatccctttcgtccataagaaagctcattcgggatggttcaattgacctggtcatcaacttgcctaataacaacaccaaatttgtccacgacaattatgtgatacgtcggactgcagtggattccggtatcccacttctgaccaattttcaggtgaccaaacttttcgcagaggcagtgcagaagtcgcgcaaagtggatagcaagtcgctgttccattaccgacaatactcggcaggcaaggcagcg

SEQ ID NO: 8091 - DNA, 4500 bp, synthetic construct
  misc_feature 1..4500: note = source = /note="Description of Artificial Sequence: Synthetic coding sequence"
  source 1..4500: mol_type = other DNA
atgactagaatactgactgcattcaaagtagtgcgcacactgaagaccggctttgggttcacaaatgtcactgcccatcagaagtggaagttttctagacccggaatcaggctgctgagtgtcaaggcacaaacggcacacatagtgttggaggatggtaccaagatgaagggatactcattcggccacccatcctctgtggctggagaagttgtgttcaacactgggctgggaggctacccagaagccattaccgacccagcctataaaggtcagatcctgaccatggctaaccctatcatcgggaacggtggcgctcccgacaccacagccctggatgagctgggtttaagcaaatatctagagagcaacgggattaaagtgagtggactgctggtattggattactccaaagattataatcattggcttgcgacaaagtcacttggccaatggcttcaagaggagaaggttccagctatctacggggtagacacaaggatgctcacaaaaatcatccgggacaaaggaacgatgctgggaaagatagaattcgagggacagccagttgacttcgtcgacccaaacaagcagaacctgatcgccgaggtgagcaccaaggacgtaaaggtgtatggtaagggaaaccccacgaaagtggttgcagtggattgtgggattaaaaacaacgtcattcggctgctagttaaacgcggtgctgaggtgcacctggtgccctggaaccatgatttcaccaaaatggaatacgacggcatacttattgccggtggtcctggcaacccagccctggccgagccactgatccagaacgtgcgcaagatcctggaatccgaccggaaagaacctctcttcggaataagcaccgggaacctgataacaggcctggccgccggagctaaaacttataagatgagcatggctaatcggggccagaatcagccagtgctgaacataacaaataagcaggcttttatcacagcccaaaaccatggatacgcactggataacactctccccgctggctggaagcctctattcgtgaacgtcaacgaccagacaaatgagggcattatgcacgaatcaaaacccttttttgccgtccagttccaccccgaggtcactccaggtccgattgacacagagtatctgtttgactccttcttctctctaataaaaaagggaaaagctacaaccatcacctccgtgttgccaaaacctgccctggtggcctcccgggtcgaagtctctaaagttctgatcctaggatcaggcggcttgagcattggccaggctggcgaattcgactactccggaagccaagccgtcaaagccatgaaagaagagaacgtaaagacagtcctaatgaaccccaatatcgcttccgtgcagacaaacgaggtgggcttgaaacaggcggatacagtgtattttttgccaattaccccgcagtttgtgacagaggtcattaaggccgagcagcctgatggattgatattaggcatgggaggccagaccgccctgaactgtggggtggagctgtttaagcgaggagtactgaaggaatacggagtgaaagtcttgggaaccagcgtggaaagtataatggccactgaggaccggcagctgttctccgacaaactgaatgagattaatgagaagatagcaccatctttcgcggtcgagtcaatcgaggatgctctcaaggccgccgacactataggctaccccgtgatgattcgtagtgcctatgcgcttggtggcctgggatccgggatatgccccaaccgcgaaaccctgatggacttatccaccaaagctttcgcaatgacaaaccagattctggtggagaagtcagtgaccgggtggaaagagatagaatatgaagtggtgcgagatgcagacgataattgcgtaacagtgtgcaacatggaaaacgtggacgctatgggggtgcacacgggcgactcagtggtagtggctccggctcagactctatcaaatgcggagttccagatgctgcgccgcacttccattaacgtggttagacacctgggaattgtgggtgagtgcaatattcagttcgccctccatcctacatcaatggagtactgcatcatcgaggtcaatgcaaggctttctaggagctcggctcttgcctccaaggcgaccggttacccattagccttcatcgccgccaagatagcactggggattcctctgccagaaattaagaatgtcgtgtccggaaagaccagcgcatgttttgagccctcgctcgactacatggtgacgaagatacctaggtgggatttagacaggtttcacggtacaagctcccgaatcggctcttcaatgaaaagcgttggcgaggtaatggcgatcggccgcacctttgaagagtcctttcagaaggcgctgcgaatgtgccacccctctatcgaaggcttcaccccccggcttccgatgaacaaggagtggccttctaacctggatctccgaaaggaactgtccgagccttccagtaccagaatatatgccatcgcgaaagctatcgatgataacatgtccctggatgaaatagaaaaactgacttacatcgacaagtggttcctgtataagatgcgggatattctcaatatggaaaagactctcaagggtttgaatagcgagtcaatgaccgaggagacccttaagagggccaaggaaataggttttagcgacaagcagatttcaaaatgccttggactcactgaagcacagacacgggagctgagacttaagaagaacattcatccatgggtcaaacagatagataccctcgccgctgagtacccgtccgtgaccaattatttgtatgtcacctataatggacaggagcatgacgtcaattttgatgaccacggaatgatggtgctgggttgcgggccgtaccatattggctcttctgtggaatttgattggtgcgcagtatcatccatacgtaccttacggcagttgggtaagaagacagtggtggtgaattgtaatcctgagacagtgtccaccgatttcgacgagtgtgacaagctctattttgaggagttatccctggagcgaatcctagacatctaccaccaggaggcatgcggaggctgtattatttccgtgggcggccagattccaaacaatcttgcagttcccctctataaaaacggagtcaaaatcatggggacatccccattacagattgatcgcgcggaagaccgctctatcttttccgcagtgttggatgagctgaaggtggcccaagccccttggaaggccgtcaacactttgaatgaggccttagaattcgcgaagtccgtggattacccctgcctactgcgcccctcctacgtattatccggttccgctatgaacgtggtgtttagtgaggatgagatgaagaaattcttagaggaggccactcgggtttcacaggagcaccccgtcgtgttaactaagtttgtggagggagcacgcgaagtagaaatggacgccgtaggcaaggacgggagagtcatctcacacgccatatctgaacacgtggaggacgccggcgtgcactctggtgatgcaacactgatgctgccaacgcagaccatcagtcagggcgcgatagagaaggttaaggatgctacaagaaaaattgcaaaggcgtttgcgatttcaggtcctttcaatgtccagttcctggtcaagggcaacgatgtccttgtgatcgaatgtaatctgagagcatcgcgctcattccctttcgtgagcaaaacgttgggggtcgacttcatcgatgtggcaacgaaagtcatgattggggaaaatgtcgatgagaaacatttaccgacccttgatcacccgattatccctgcggactatgtcgctatcaaagctcctatgttcagctggccacggctccgcgacgcagatccaatcctccgatgcgaaatggcatccaccggggaagtcgcatgcttcggagaagggattcacactgcttttctgaaagctatgctgagtaccgggttcaaaatcccgcagaagggcattctcatcggaatacaacagtcttttcggccccgcttcctaggagtcgctgagcaactgcacaatgaaggcttcaagttattcgccactgaggccacttcagactggctcaacgctaataatgttcccgccactcctgtggcttggccgtcccaggagggccagaaccccagcctttcttcaatccgaaaactcatccgtgatggatccattgatcttgtgatcaacctcccaaataacaatacaaagtttgtgcacgacaactatgtaattcgccggaccgcagtcgattccggcataccattactgactaatttccaggtgacaaaactctttgcagaggcagttcaaaagagcagaaaggtggatagcaagtcattattccactatagacagtattccgctgggaaagccgcc

SEQ ID NO: 8092 - DNA, 4500 bp, synthetic construct
  misc_feature 1..4500: note = source = /note="Description of Artificial Sequence: Synthetic coding sequence"
  source 1..4500: mol_type = other DNA
atgactcgcattttgactgccttcaaggtagtacgtactctgaagacaggtttcggttttactaatgtcactgctcatcaaaagtggaaattctctaggccaggtatccgtttgctctctgtgaaggcccagaccgcacacattgttcttgaggacggcactaagatgaaaggttacagctttggacacccctcctcagtggccggagaagtggtatttaacactggcctcggtggataccctgaggcaattactgaccctgcctacaaaggtcagatcctgaccatggctaacccaattattggaaacggaggcgcacctgacactactgctctggatgaattgggtttgtcaaagtatcttgagtctaacggcataaaggtttctggtcttcttgtactggactactcaaaggattacaaccactggttggctactaagagcctgggccagtggctgcaagaggagaaagtccccgccatctatggcgtggacacccgtatgctgaccaagatcatccgcgataagggaactatgctgggcaagattgagtttgagggacaaccagtggacttcgtcgaccccaataagcaaaaccttatcgccgaagtgtccactaaagacgtaaaggtttacggcaagggcaacccaaccaaagtggtcgccgtagactgcggcatcaagaacaacgtcattagattgctcgtgaagcgtggcgccgaagtgcaccttgtgccatggaatcatgactttaccaagatggagtatgacggaattctgattgccggaggccctggcaacccagcactggctgaacccctgatacagaacgtgcgtaagatccttgagtcagataggaaggagcctctcttcggtattagtaccggcaacctcattaccggactcgctgccggagctaaaacttacaaaatgtctatggccaaccgcggtcaaaaccagcccgtgcttaatatcactaacaagcaagctttcataacagctcaaaaccacggttacgccctcgacaatactctgccagccggttggaaaccactgttcgtcaatgtgaacgatcagaccaacgagggaatcatgcacgaatcaaagcctttcttcgctgtccagttccaccctgaggtgacacccggtcctatcgacactgagtacctcttcgactcctttttctccctcataaaaaagggtaaggctacaacaatcacaagcgtgctccccaaacccgctcttgtggcttccagggtcgaggtcagcaaggtgttgattctcggatccggtggactctcaattggacaggcaggagagttcgattactccggctcacaggctgtaaaggccatgaaggaggagaatgtcaagactgtgctgatgaacccaaatattgcatctgtgcaaacaaatgaagtcggcctcaagcaggctgataccgtgtatttcctcccaatcacacctcagtttgtcacagaggtgatcaaagctgagcagccagatggtctgattctgggtatgggcggacaaaccgctctgaactgcggagtggaactctttaaaaggggcgtgctgaaggagtacggcgtgaaggtcctgggcacatctgtggaatctattatggcaaccgaggaccgtcagttgttctcagacaaactcaacgaaatcaatgaaaaaatcgccccttccttcgcagtcgagtccattgaagacgcacttaaggccgcagacaccattggctatcccgttatgatccgttctgcctatgccctgggaggactgggtagcggcatttgtccaaacagggaaacattgatggacctgtctaccaaagcttttgccatgacaaaccagatcctcgtggaaaagtctgtcactggttggaaggagattgaatatgaggtggtacgcgatgctgacgacaattgcgtcactgtctgcaacatggagaatgttgacgctatgggcgttcacactggtgatagtgtagtggtggctccagcccagaccttgtccaatgctgaattccagatgcttagacgcacctcaatcaacgtggtacgtcacctcggtatcgttggtgaatgcaatattcagtttgctttgcatcctacttctatggagtactgtatcattgaggtgaacgctcgtctgtctaggtcaagtgccctcgctagcaaggctaccggttaccccctcgcttttattgctgccaagatcgctctgggaatccccttgcccgagataaagaacgtggtctccggcaagacctctgcctgtttcgagccttctctggactacatggtgacaaagattccccgctgggatctggatagattccacggaactagctcacgcattggatctagtatgaagagtgttggcgaagtcatggccatcggtcgcactttcgaggagagcttccagaaggctctgcgcatgtgtcacccatccatcgaaggattcactccacgcctgccaatgaacaaagagtggccctccaacttggacctcaggaaagagctgagtgaaccctcctccacccgcatttacgctatcgctaaggccatcgatgacaacatgtccctggacgaaatcgaaaagctgacctacattgataaatggtttctttacaagatgcgtgacatactgaatatggagaagaccttgaagggtttgaatagcgaatccatgaccgaagaaaccctgaaacgcgcaaaggaaatcggcttctccgacaagcaaattagtaagtgtttgggtctgacagaggcccaaactcgtgaacttcgtctgaaaaagaatattcacccctgggtcaagcaaattgacaccttggccgctgagtatcctagcgtcaccaactacctgtacgtgacttacaacggacaggagcatgatgtgaatttcgatgaccacggtatgatggttctgggttgtggtccctatcacatcggttctagcgtggagttcgactggtgcgctgtatcaagcatcagaaccctgagacaactgggcaagaagacagttgttgtgaattgcaatccagaaactgtgtctactgactttgatgaatgcgacaagctttattttgaagagctttccctggagaggatcctcgacatctaccaccaggaggcctgtggaggatgcatcattagtgtaggcggccagatacccaataatcttgctgtccctctttacaagaacggtgtgaaaatcatgggtacttcaccactccagatagacagggccgaggaccgttccatcttctccgcagtgctcgacgagctgaaggtcgcccaagccccatggaaagcagtgaacaccctcaacgaggctttggagttcgcaaaatccgtggattacccctgtctgctccgccccagctatgttcttagcggttcagctatgaacgtcgtattctccgaggatgaaatgaaaaagttcctggaggaggctaccagagtgagtcaggaacatcccgtggtgcttacaaagttcgtcgaaggagctagggaggttgagatggacgctgttggcaaggacggaagagtcatctctcatgctatatccgagcatgtggaagacgctggtgtccactcaggtgatgctaccctgatgctccctacacaaactatttctcaaggtgctatcgaaaaagtcaaggatgctacacgcaaaatcgcaaaggcttttgcaatctccggtcctttcaatgttcagtttcttgtcaaaggaaatgacgtgctcgttatcgagtgcaacctgcgcgccagtaggtctttcccctttgtgagcaaaaccctgggtgtagatttcattgacgttgcaaccaaagtgatgatcggcgaaaacgtcgacgaaaagcaccttccaacactggatcatccaatcattcctgctgattacgtcgctatcaaggcccctatgttctcctggcctagattgagggacgctgaccctattttgcgttgtgagatggcctccactggagaagtggcctgcttcggcgagggtatccacacagccttcttgaaagcaatgttgtccacaggatttaagatcccccaaaagggtattctgattggaatccaacaatccttccgtcccaggttcctgggcgtcgcagagcaacttcacaatgagggcttcaagttgttcgcaactgaagcaacctctgattggctgaacgccaacaacgtcccagctactccagttgcatggccctcccaagagggacagaacccttctttgtcatctatcagaaagctgatacgtgacggtagcatcgacctggttattaacctgccaaataataataccaaattcgtgcacgataactacgtgattaggaggacagcagtagactctggcattccactgctgactaactttcaggttaccaaactcttcgcagaagccgttcagaaaagccgcaaggtggattctaagagtctgttccactataggcagtactccgccggaaaagcagca

SEQ ID NO: 8093 - DNA, 4500 bp, synthetic construct
  misc_feature 1..4500: note = source = /note="Description of Artificial Sequence: Synthetic coding sequence"
  source 1..4500: mol_type = other DNA
atgacccgcattcttactgccttcaaggtcgtacgtaccctgaagactggatttggttttaccaacgtcaccgcccaccagaagtggaagttctcccgccccggcattagacttctcagcgtcaaagcccagaccgcccacatcgtcctggaggacggcactaagatgaagggttattccttcggtcatccatcaagcgtcgccggcgaggtggtcttcaacacaggactcggcggctaccccgaggccattaccgaccctgcttataagggacagatacttactatggccaatccaatcattggtaatggtggtgccccggatacaactgccctggacgagctcggtctgtctaagtacctggagtcaaatggaattaaggtgtccggtttgctagtgctggattacagtaaggattacaaccattggctggcgaccaaatctctcggccaatggctgcaagaggagaaggtcccggctatctacggtgtcgacacgcgaatgctgaccaagatcattcgcgataagggtaccatgctcggcaagatcgagtttgagggccaacccgtcgatttcgtcgaccctaacaaacagaaccttatagccgaggtgtctaccaaagacgtcaaggtctacggtaagggcaaccctaccaaggtggtcgcagttgactgcgggatcaagaataatgtgattcgcctactggtgaaacggggagctgaggtgcacctggtcccttggaaccacgacttcactaagatggagtacgacggaattcttattgcaggcggacccggtaaccctgccttggcggaacccctcatccagaacgtgagaaagattctagagtctgatcgcaaggagcccctgtttggcattagcacgggtaacctcattacgggtctcgccgccggcgccaagacgtacaaaatgtcgatggcaaaccgtggtcagaaccagccagtcctcaatataacgaacaagcaggcgttcatcactgcccagaatcacggctacgcactggacaacaccctgcctgcaggctggaaacctctgttcgtcaacgtgaacgatcaaaccaacgaaggcattatgcacgaatctaaaccgttcttcgcggtccagttccacccggaggtcacgccgggtcccatcgatacggagtatttgtttgattcgttcttttcccttattaagaaaggcaaggctactacgatcacgtcggtcctaccaaagccggcccttgttgcttctcgcgttgaggtgagcaaggtcctgattctcggctccggcggtctgagtattggtcaggcgggagaattcgactacagtggtagccaggccgtcaaagctatgaaggaggagaacgtcaagaccgtcctgatgaacccgaacatcgcctccgtccagacgaatgaggttggattaaagcaggccgacactgtctattttctacccattactcctcagtttgtcaccgaggtgattaaggctgagcagcctgatggactgattcttggcatgggcggtcagacggcattgaactgcggggtggaattgttcaaacggggtgtgctgaaggagtatggcgttaaagttttgggcacaagcgtggagtccataatggccacagaggacagacaactcttctctgataagctgaatgagataaacgaaaagattgctccttctttcgctgtggagtccattgaggacgccctgaaggctgccgacacgattggttaccctgtcatgatccgttcagcctacgcgttgggtggtttgggatccggtatatgtccaaaccgtgaaacgttgatggatttgtcgacaaaggccttcgcaatgaccaatcagatcctagtcgagaagagtgttaccggttggaaggagatagagtacgaggtcgtgcgcgacgctgacgataactgtgtcaccgtctgcaacatggaaaatgttgacgccatgggcgtgcacactggtgattctgtggtcgtggcgcccgctcagaccctaagcaacgcagagtttcagatgctccgccgcacatctatcaacgtagtccgccacctcggaatcgtgggtgagtgcaacattcagttcgctctccacccgactagcatggagtactgcatcattgaggtcaatgcccgtttatcccgttcttctgctttggcgtccaaggctacgggctatccgcttgctttcattgcggcgaagatcgccctcggcatccctctgcccgagattaagaatgtcgtttcgggtaagaccagtgcttgtttcgagccctctttggattacatggtgaccaagatcccccgctgggatttggaccggttccatggcacctcaagcagaatcggatcgtccatgaagagcgtcggcgaagtcatggcaattggtaggacctttgaagaaagtttccaaaaggcacttcgcatgtgccacccgagcattgagggttttactcctcgtttaccgatgaataaggagtggccgagcaacctggatcttcgtaaggagctgtccgagccctcctcaactcgaatctatgctattgcgaaggccatcgacgacaatatgtcgcttgacgagatcgaaaagctcacatacatcgacaagtggttcctctacaaaatgcgcgatattttgaatatggagaagacccttaaggggctcaacagcgagagcatgaccgaggagacactcaagcgtgctaaggagatcggtttctccgacaaacagatctctaagtgccttggtctcaccgaggcgcagactcgtgagcttcgcctgaagaagaacatccacccctgggtcaagcagatcgacaccctggccgcagaatatccctctgttactaactacctgtacgtgacatacaacggtcaagagcacgacgtgaacttcgatgaccacggtatgatggtgctgggttgcggaccgtatcatatcggaagttcggtcgaattcgattggtgtgcggtgagctctatcagaacccttcgccagctcggcaagaagaccgtcgtcgtcaactgcaaccccgaaaccgtgtcgaccgacttcgatgagtgcgataagctttatttcgaggaactctcgctcgaacgaatcctcgacatttaccaccaggaggcctgtggcggctgcatcatttctgttggaggacagatccctaacaatctggccgtgccactctataagaacggcgtgaaaatcatgggcacctctcctcttcaaatcgatcgtgcagaggaccgatcaatctttagcgccgtcctcgatgagctaaaagttgcacaagccccctggaaggcggttaacactctgaatgaggctctggaattcgccaaatccgtggattatccctgcctcctgcgtcctagttacgtcttgtcgggttcggcgatgaacgttgtcttcagcgaagacgagatgaagaagttcctggaggaggctactcgtgtctctcaagagcatcccgtcgtcctgaccaaattcgtggagggcgcccgcgaggtggagatggatgccgtaggtaaggacggacgcgttatttcgcacgctatttccgagcatgttgaggacgccggcgtccactctggtgatgccaccctgatgctccccacccagacaatttcgcagggagctatcgagaaagttaaggacgctacccgcaagattgcgaaggcgttcgccatctccggacccttcaacgtacagttcctcgttaaggggaacgacgtactggtcatcgagtgtaacctgagagcctccaggtcattccctttcgtcagcaagaccctgggggtcgactttattgatgtggccactaaggtcatgattggggaaaacgtcgatgagaagcacctcccgacccttgaccaccccatcattcccgcggattacgtcgccatcaaggcacctatgttctcgtggccccgcctgcgtgacgcggatccgatcctccgctgcgagatggcctcgaccggcgaggtagcgtgtttcggtgaaggtatccacaccgctttccttaaggcaatgctgagcactggcttcaaaatcccgcagaagggcatcctcattggcatccagcagagcttcaggccccgcttcttgggtgtggctgaacagttgcataacgagggtttcaagctctttgctactgaggccacgagtgactggctcaatgctaacaacgtgccggccacccccgtcgcctggcccagtcaggaaggccaaaatccttccctctcatcaatcaggaaacttatccgcgatggttcgattgatctcgtgatcaacctgcccaacaataacaccaaatttgtgcacgacaactatgtcatccgtcgcacggccgtcgactccggcatccccttgttgaccaacttccaagtcacaaagctgttcgccgaagctgtccagaaatcacgtaaggtggatagcaagagcttgttccactatcgccagtattccgccggcaaggcagca

SEQ ID NO: 8094 - DNA, 4500 bp, synthetic construct
  misc_feature 1..4500: note = source = /note="Description of Artificial Sequence: Synthetic coding sequence"
  source 1..4500: mol_type = other DNA
atgacacgcatcctgaccgcttttaaagtggtcaggacactgaaaacaggattcggctttacaaatgttacagcccaccagaagtggaaattttcgcgtcctgggataaggctgctgtcggtgaaggctcaaacagcccacattgtattggaggacgggaccaaaatgaagggatactcattcggacacccttcatccgtagctggcgaggttgtctttaacacgggcctgggggggtatcctgaagcgatcactgatcccgcatataagggacagatactgaccatggcgaacccgataatagggaatggaggcgcaccagacaccactgcccttgatgagctagggttgagtaagtacctggaatccaacggcattaaagtctcaggcctcctcgtcctcgattacagcaaggactataatcactggctcgccacaaagagtctcggacagtggctacaggaggaaaaggttccagccatttatggtgtcgacacccgcatgctgaccaagattattagagataaggggacaatgttagggaaaatcgaattcgaggggcagccagttgactttgtcgaccccaataagcagaatttaattgctgaggttagtacaaaagatgtaaaggtttacggaaagggaaatcctactaaagtcgttgccgtcgattgcggtatcaagaacaatgtcatccgtcttctcgtgaagagaggagctgaggttcacttggtgccttggaaccatgattttacaaaaatggagtacgacggcatcctcatcgcgggcgggcccggaaatccagccttggccgagcctctaatccagaacgtgagaaaaatcctggagtccgatcggaaagagcccttgttcgggatcagcaccgggaacctcatcactggattggccgccggtgccaagacctacaagatgtccatggccaatcggggccagaatcagccagtacttaatatcaccaacaaacaggcttttataaccgcacagaaccatggctacgcactggataacacgctgcctgccgggtggaaaccgctgttcgtgaacgttaatgatcagaccaacgagggcatcatgcatgagagcaaacccttctttgccgtgcagttccaccctgaggtaacaccagggcccatagacacagaatatctcttcgacagtttcttttctttgattaaaaagggcaaggctaccacgatcacaagcgtgctcccgaagcccgcactcgtggcgtcccgcgtagaggtgtctaaggtgctgattttgggctcgggaggcttgagcatcggccaagccggcgagtttgattacagcggttctcaagccgttaaggctatgaaagaggagaacgtcaagactgtgctgatgaatcctaacattgcaagcgtgcagaccaacgaagtgggactgaagcaggccgacacggtgtactttcttccaattaccccgcagtttgtgactgaagtgattaaggctgagcagcccgacggcctgatcctcggcatgggtgggcaaactgcactaaattgtggggtcgagctcttcaagcggggggtgttgaaggaatacggagtgaaagtgctgggaacatccgttgagagtattatggccaccgaggatagacagctcttttcagacaaactgaatgagatcaacgaaaaaatcgctccatcttttgccgtggaaagtattgaggatgccctaaaggctgccgatacaataggttaccctgtaatgattaggagcgcatatgccctgggcgggctgggatcaggcatttgcccaaatcgcgaaactctgatggacctgtccacaaaggcattcgcaatgacgaatcaaatcctggttgagaaatcagttaccggttggaaggaaattgagtatgaagtagtccgggatgccgacgacaattgtgtaacggtgtgcaatatggagaatgttgatgctatgggcgtgcacactggggatagcgttgtagttgctcctgcccaaacgctttccaacgctgagtttcagatgctcaggcgcacaagcataaacgtggtgaggcaccttggcatcgtgggggaatgcaacatccagttcgccctgcaccctacatccatggaatactgcattatcgaagtgaacgctagactgtcgcgaagcagtgccttagcgtcgaaagccaccggctaccctctggcgtttatagctgccaaaatcgctctgggcatcccacttcctgaaattaagaatgtcgtgagcggcaaaacatcagcatgttttgagccatccctggattacatggtgaccaagattccgagatgggatctggaccgctttcacgggacttcctctaggatcggctcttctatgaaatccgtgggcgaggtcatggctatcgggcggacatttgaggagtccttccagaaggcacttaggatgtgccacccctccatcgagggcttcaccccacgtctacctatgaataaagagtggccatccaatttggacctccggaaagagctgagcgaaccctcctccacccggatttacgcgattgccaaggccatcgacgataacatgagcttagacgaaatcgagaagctgacatacatcgataaatggtttctctacaagatgagggatattctaaatatggaaaaaaccctgaagggcttgaattctgagtcaatgaccgaggagacgctcaaacgtgcaaaggagataggtttctcggacaagcagatcagtaagtgcttgggtttgacggaggctcagactagagaactgaggcttaaaaaaaatatacatccctgggtgaaacagatcgatactttagctgctgagtatcctagcgttactaattacttgtacgtgacctataacgggcaggaacacgacgtcaattttgacgaccatggcatgatggtgctgggctgcggcccctatcatatcggtagttctgtagagttcgattggtgtgcagtgtcgtccattaggacactgcgccaactcgggaagaaaacggtcgtcgtgaattgtaaccctgagacagtttcaactgactttgacgaatgcgacaaactctatttcgaggagctcagccttgagcgcatcctggacatataccaccaggaagcctgtggcggatgtattatctctgtcggaggacagattcctaacaacttggccgtgccgttgtacaagaatggagtgaagatcatgggaacgagcccactccagatcgatcgagccgaggacaggtccatcttctcagccgtgctggacgagctgaaagttgcacaggccccatggaaggccgtcaacaccctcaatgaagctcttgaattcgcgaagtcagttgactacccctgcctactgcggccaagttacgttctgagcggcagtgccatgaatgttgtctttagtgaggatgagatgaagaaattcctggaggaggctacacgagtgtcgcaggagcaccccgtggtactgaccaagtttgtcgagggggcgcgagaggtggagatggatgcagtcggcaaagacgggcgcgttatcagccatgccatcagcgaacacgttgaagacgccggcgttcattcaggggacgctaccctcatgcttcccactcagacaattagtcagggcgccattgagaaggttaaggatgcaacccgtaaaatagcaaaggcattcgcaatctccggtccttttaatgtgcagtttctggtcaaggggaacgatgtgctggtaatcgagtgcaacctgcgggcctcgaggtcttttccatttgtttcgaaaactctaggggtggactttatcgacgtggcaacgaaagtgatgataggtgagaatgtagatgaaaaacatcttccaactcttgatcatccgataatcccagctgactacgtagcaatcaaagcccctatgttcagttggcccagactaagagatgccgaccctattctgaggtgcgaaatggcttcaaccggcgaggtggcatgcttcggggagggcattcatactgcctttctgaaggcaatgctctccaccggttttaagattccccagaaaggcattctgatagggattcagcagagtttccggccgcgctttctgggggtggctgaacagctgcataatgaagggtttaagctcttcgctactgaggcaacctccgactggctgaacgccaataatgtgcccgcaacgccggtcgcttggccttctcaggaagggcagaacccctccttgagcagcatacgaaaactaatccgcgatggttccatcgacctggtgattaacctccccaacaataacacaaagttcgtgcatgataattacgtaatccgaaggaccgccgtggactccgggattccactcctgaccaattttcaggtgacaaaactcttcgctgaggccgtgcagaaatcccgcaaggttgactctaagtctttatttcattaccgacagtattctgccgggaaggccgcc

SEQ ID NO: 8095 - DNA, 4500 bp, synthetic construct
  misc_feature 1..4500: note = source = /note="Description of Artificial Sequence: Synthetic coding sequence"
  source 1..4500: mol_type = other DNA
atgactcggattctcaccgctttcaaggtggtgagaaccctcaaaacagggtttggattcaccaacgtaacagcccaccagaagtggaagttttctcgccccggcatccggttattgtctgtgaaggctcagactgcccacatagtgctggaagacggtaccaaaatgaagggctactcgtttgggcatcccagttccgtagccggggaggtcgtattcaatactggtctaggaggctaccccgaggctattaccgacccagcatataagggccaaatcctgactatggctaacccaataatcgggaacggcggtgctcctgatacgactgcactggacgaattgggcctttctaaataccttgagtctaacggcatcaaagtttccggcctattagtactcgactactctaaagactataaccactggctggccacaaaaagtttgggtcagtggctgcaggaggagaaagtgcctgccatatacggggtggatactagaatgctgaccaagatcatccgggataaggggaccatgctcggtaaaatcgaattcgaggggcagcctgtggattttgtggatccaaacaaacagaatctgatcgccgaggtgtcgaccaaggatgttaaggtatatggtaaagggaacccgaccaaggtggtggccgtggactgcggtatcaagaacaacgtcatcaggttattggtaaagcggggggccgaagttcatttagtgccatggaaccatgattttactaaaatggagtatgacggaatcttaatcgcaggcggccccggtaatccggcgctggccgaacctctcattcaaaacgtgcgaaaaatattagagagcgatagaaaggaacccctgttcggcatctccactggcaacttgatcaccggactggccgccggtgccaagacatataaaatgtcaatggcaaaccggggacagaatcagccggtactgaatattactaataagcaagcctttattaccgcacagaatcatgggtacgccctagacaacaccctgcctgccggctggaagccattattcgtaaatgtcaacgaccagactaacgaggggatcatgcacgagtccaaacctttctttgctgtacaattccatcccgaggtcaccccgggccccatagacacggagtacttgtttgacagtttcttcagcctgatcaaaaaggggaaggccacaacaatcacaagcgtcctaccaaaaccggccctggtggcgtcacgggtggaggtaagcaaggtgctgattctggggagtggaggactttctatcggtcaggccggagagtttgactatagcggaagccaggcagtcaaggccatgaaagaggagaacgtcaaaacagtgctcatgaaccccaacatcgctagtgtgcagaccaacgaagtggggctaaagcaggctgatacagtgtacttcttacctatcactcctcagtttgttaccgaggtgattaaagcggagcagcctgatggattaatcttaggcatggggggacagacggccctgaattgcggagtggaactgttcaaacggggcgtcctcaaggagtatggagtgaaggtgctggggacatctgtggagtctatcatggctaccgaggatagacagctattctctgataaactcaacgaaatcaatgagaagatcgctcccagcttcgccgtggagtcaattgaggatgccctgaaggctgcagatacaattggatatcccgtcatgatccggagcgcctacgccctcggtggcctgggtagcgggatctgccccaacagggagacacttatggatttaagtactaaggctttcgccatgacgaaccagatcctggttgaaaagtcagtgaccggttggaaagagattgagtacgaagttgttcgggatgccgatgataattgcgttacagtctgcaatatggagaacgttgacgctatgggggtacataccggtgatagcgtcgtcgtcgcccctgctcagaccctcagtaacgccgagttccaaatgctgcgaaggacaagtattaacgttgtgcgccatctggggatcgttggggaatgtaacatccagtttgcgcttcaccctacctcgatggagtattgtatcattgaggtgaatgcacgtctgtctcggtcttccgcattagcttctaaggccaccgggtacccgctggctttcatcgctgcaaagattgctctgggaattcccctaccggagataaagaatgtggtctcagggaagacctctgcatgctttgagccttccctcgattacatggtgacaaagatccccagatgggatctagaccgcttccatggaacttccagtagaattggttcatccatgaaatccgtgggcgaggtgatggctattggtaggaccttcgaggaaagctttcagaaggcactgaggatgtgtcatccgtccatcgaaggatttacaccaaggctgcccatgaataaagagtggccctcaaatctcgacctgagaaaggaactaagtgagccctcgtctacccggatatatgctattgccaaggctatcgacgataacatgtcactggatgaaatcgagaagcttacatatattgataaatggttcctttacaagatgagagacatcctgaacatggagaaaactttgaaagggttaaactccgagagcatgacagaggagaccctgaaacgcgctaaggagatcgggttttccgacaaacagatatccaaatgccttggactgaccgaggcccaaacccgagagctgaggctaaaaaagaacattcacccctgggtgaaacagattgacactctggccgcggagtacccctcggtcactaattatctctacgtaacctacaatgggcaggaacatgatgtgaatttcgacgatcacgggatgatggtccttgggtgtggcccataccacattggctcttctgtcgagtttgactggtgcgctgtgtcaagcataagaacgttgcggcaactgggaaagaaaaccgtagtagtgaattgtaatcccgagaccgtctcaactgatttcgatgagtgcgacaagctttacttcgaagaactctctctggagaggatactggacatctaccatcaggaagcctgcggcggttgtattattagtgtaggtggtcagatacccaataatctcgcggtgccactgtacaagaatggcgtgaaaattatggggacctcaccactccagatcgaccgcgcagaggatcggagcatcttctctgccgtgttagacgaattaaaggtagctcaagctccttggaaagccgttaacaccttgaatgaggcactcgagtttgcaaagagtgtcgactatccttgtctgttacgcccttcatacgtcctgagcgggagcgctatgaacgtggtgtttagtgaggacgagatgaagaaattcttggaggaagccactagagtctcacaggaacaccctgtggtcttaacgaagttcgtggaaggcgctcgggaagtggagatggacgcggtcggaaaagatggtagagtcattagtcacgctatctctgaacacgtagaggatgctggagtgcattccggcgatgctacactgatgctgccaacccagaccatctcccagggggccattgagaaagttaaagatgcgacgcgcaaaattgcaaaagcctttgctatcagcggacccttcaacgtgcagttcctcgtgaaaggcaatgacgtcctcgtaatagagtgcaacctgcgcgcctccagaagctttcccttcgtgtctaagactttgggcgtggacttcatagatgtggcaaccaaggtgatgatcggagaaaatgtggatgagaaacatttacctacactggaccatcccatcattccagcagactacgttgccattaaggcaccgatgttctcttggcccaggctcagagatgcagacccaatcctcaggtgcgagatggctagcaccggcgaggtggcctgtttcggagaagggatccatacagcttttctgaaggcgatgctatccactggtttcaagattccgcagaaaggcatccttattggcatacagcagtccttcagacctaggtttctgggcgtagctgagcagttacacaacgaggggttcaaattatttgctactgaagcaactagtgattggctgaatgctaacaatgtccccgcaacaccggttgcctggccgagccaggaggggcaaaatccttctctgagttcaatacgcaagctgattagagacggatccatagacctcgtcatcaacctgcccaacaataacaccaagttcgtgcatgataattacgtgattcgacgcacagcggtggattcagggatcccactcctaactaatttccaggtaaccaagctgttcgcagaggccgtgcagaagtcacgtaaggttgatagtaaatccctgttccactaccgccagtattcggccggaaaggcagct

SEQ ID NO: 8096 - DNA, 4500 bp, synthetic construct
  misc_feature 1..4500: note = source = /note="Description of Artificial Sequence: Synthetic coding sequence"
  source 1..4500: mol_type = other DNA
atgactaggattctcacagcctttaaagttgtgcgaacattgaaaaccgggttcggatttaccaacgtcaccgcccaccagaagtggaagtttagtcgcccggggattagactgttgtctgttaaggcccaaaccgcccatatcgtgttagaggacgggactaagatgaaggggtatagctttggccatccttccagcgtagctggagaggtagtatttaacacagggctagggggataccctgaagcaatcaccgacccagcatacaaaggccagattctgacaatggccaacccaataatcggtaacggtggcgcaccagacactaccgccctcgacgaactgggcctctccaagtacttggaatctaacgggataaaggtttccggtctcttggtgctggactactcaaaggattataaccactggctggccacaaagtccctcggtcaatggctgcaggaggaaaaagtgcccgcaatttacggcgtggacacgcgaatgttaacaaagatcatccgggacaagggaactatgcttggtaaaattgagttcgaagggcagcccgtggatttcgtggatcccaacaagcaaaacctcatcgcggaagtaagcacgaaggatgtcaaggtgtatggcaagggcaatcccacaaaggtggtggccgtcgactgcggtattaaaaacaacgtgatacggcttctcgtgaagagaggagccgaagtacacctcgttccctggaatcatgattttacgaagatggagtatgacggcatccttattgccgggggccccggcaacccagccctagcagaaccgctgattcagaacgtaagaaaaatcctcgagagtgacagaaaggagcctctgttcgggatatctacaggcaatcttataacaggcctggccgctggcgctaaaacctataagatgtcaatggccaatagaggacagaatcaaccagtgctgaatatcacaaataaacaggcttttatcaccgcccagaatcacggatatgcacttgataatacacttcccgctggatggaaaccactatttgtgaacgtgaacgaccagaccaatgagggcataatgcatgaatccaaacctttctttgccgtacagtttcaccctgaagtcacaccagggcccatagacaccgaatacctgttcgatagcttcttctccttgattaagaagggtaaagcaactacaatcactagcgtccttcccaaaccggccctcgtggcctctcgggtggaggtctccaaggtgctcatcctcgggtccggcggactttccatcgggcaggctggggaattcgattactcgggttctcaggcagtcaaggccatgaaggaggaaaatgtcaagacggtcctgatgaatcctaacatcgcaagcgtgcaaactaatgaagtcggcctgaagcaggctgacactgtctacttcttgcccatcacacctcagtttgtcaccgaggtgatcaaggcggaacaacccgatgggttgattcttggtatgggaggacagaccgctcttaattgcggggttgaactttttaaacgtggtgtcttgaaagagtatggcgtgaaggttttgggaacatctgttgaatccatcatggcgacagaagatagacagttgttcagtgataaactcaacgagattaatgagaaaatcgcaccctccttcgcagtggaatcaattgaggacgccctgaaggccgcagacaccatcggttacccagtaatgatcagatccgcttacgctctgggcgggttgggctcaggtatatgccctaatcgggagactctcatggacttgtctactaaggcattcgcgatgaccaatcaaatactcgtagaaaagtctgtcacaggctggaaggagatagagtatgaggttgttcgcgatgcagatgataattgtgtgacagtgtgcaatatggagaatgtggatgcaatgggagttcacactggggatagtgtggtcgttgctcctgctcagaccctgagtaacgctgagttccagatgcttagacgaactagcattaatgtagtgaggcacctaggtatagttggtgagtgcaacatccagtttgcccttcatcctacttcgatggagtattgcatcatcgaggtgaacgcccgacttagcaggtcttctgctttggcatccaaagccacaggatacccacttgcctttattgcggcaaagattgcactagggatcccacttcctgagatcaaaaatgtggtcagcgggaagacttctgcttgctttgaacccagcctggactacatggtcaccaaaattccaaggtgggatttagataggttccatgggacctctagtaggatcggtagtagcatgaaatccgtgggtgaagtcatggcaatcgggcgtaccttcgaggagagcttccagaaggccttacgtatgtgtcacccgtccattgaaggcttcactcctcgactgccgatgaataaggaatggccgtccaacctcgacctgcgtaaggagttgagcgaaccctcctccacgcgaatctacgccatagctaaagccatcgacgataacatgtcccttgacgagatcgaaaagctgacttatatcgacaagtggtttctttataagatgagggacatcttgaatatggaaaagactctgaagggtctgaatagtgagtccatgaccgaggagactctaaagagagccaaggagatcggtttttctgacaaacagatcagcaagtgtctcggactgactgaagcccagactcgagaactgagattgaagaagaacatccacccgtgggttaagcagatcgatacactagccgccgagtacccctccgtgacaaactacctctacgtgacatacaacggacaggaacacgacgtgaacttcgatgaccacggcatgatggttttgggttgtggcccttaccatattggcagtagcgtggagtttgactggtgtgcggtgagctctattagaaccctgcgacagctgggaaaaaagacggtcgtagtgaattgcaatcccgagactgtgtccactgatttcgacgaatgtgataagctgtacttcgaggaactttccctcgaacgaattctggacatctatcaccaggaagcatgcggagggtgcatcatcagtgtaggtggtcaaatccccaacaatctcgcagttccattatataaaaatggcgtcaagatcatgggaactagccctctccagatcgatcgagcggaagaccgatcaatcttttccgccgtcttggatgaactgaaggtggcacaggccccgtggaaagcagttaatacactcaatgaggcattggagttcgctaagagtgtggattatccctgtctgctccgccccagttacgtgctgtcaggatctgctatgaatgtggtcttctccgaggatgaaatgaagaagtttcttgaagaagcgacccgagtgagtcaagaacacccagttgtgctcaccaaattcgtcgagggagctagggaagtggagatggacgctgttggaaaggatggcagggtgatcagccacgcaatatccgagcacgtggaagacgcaggtgtgcattcaggggatgccacactcatgttaccgacccagacaatttcacagggggccatcgaaaaagtgaaggacgcgactaggaaaatcgccaaggcctttgcgatctccggccctttcaatgtgcagttcttagtgaaaggtaacgacgtcctggtcattgagtgcaatcttcgcgccagtcgatcattcccctttgtatctaagaccctcggtgtcgacttcattgacgttgcaaccaaggtaatgattggggagaacgtcgacgaaaaacatctgccaactctggaccatcccatcattccagctgattatgtggctatcaaggctcccatgtttagttggccccggctccgcgatgctgacccgatattaaggtgcgagatggcctccacaggcgaggtagcctgctttggcgaaggaatacatacagcgttcctgaaagctatgctcagcactggattcaagataccccaaaagggtatactcatcgggatacagcagagcttccgtccgcgatttctcggggtcgccgagcagcttcataacgagggcttcaagctattcgccactgaagccaccagtgattggctgaacgcaaacaatgtcccagctactcccgttgcatggccgtcccaggagggccagaacccctccctgagctctataaggaagctgatccgagatgggagcatcgatctggtgataaacctgcccaacaataataccaagtttgttcacgataattacgtaatcaggaggaccgcggtcgactccggcatcccattgttaactaatttccaggtgacaaaactgttcgcggaggccgtgcaaaagtcacgcaaggtggactccaaaagtcttttccactacaggcagtattccgcaggaaaagcggcg

SEQ ID NO: 8097 - DNA, 4500 bp, synthetic construct
  misc_feature 1..4500: note = source = /note="Description of Artificial Sequence: Synthetic coding sequence"
  source 1..4500: mol_type = other DNA
atgactagaatactcacggccttcaaggtggtgcgaactctgaagacaggattcggatttaccaatgtgacggcacaccaaaagtggaaattttccaggcccggcatcaggctactgtctgtaaaagcacagacagctcatatcgttcttgaagacgggactaaaatgaaaggttattcctttggccatccctcttctgtggccggagaagtggtattcaatactggccttggcgggtatccagaggctatcacggatccggcctacaaagggcaaattttgacaatggccaatccaataatcggcaatggtggtgccccggacacaaccgcattagacgagctgggcctgagtaagtacctagaatcaaacgggataaaggtttcgggacttctggtcttagactattccaaggattataaccactggctagcaactaaatctttaggccagtggctgcaggaagagaaagtccccgccatttacggggtggatactcggatgttgaccaaaataatcagagataagggcaccatgctggggaaaattgaattcgaaggacaacccgtcgacttcgtcgatccgaacaaacagaacctgatcgcagaggtgagcacaaaagacgtgaaggtatacggtaagggaaatcccacaaaagtcgtggcggtggattgcgggatcaagaacaacgtgatcaggcttctagtgaaacgcggggcagaggtacacttagtaccttggaaccatgacttcacaaagatggaatacgatgggatccttattgcaggaggtccaggcaatcctgccttggcggaaccattaatccagaatgttcgcaagatcctcgagagtgaccgcaaggagcccctttttggtatcagcacaggaaaccttataaccgggctggcagcgggagccaagacttacaagatgtccatggcaaatcgcggacaaaaccagcccgttctgaatatcactaacaaacaggcctttattacggcgcagaatcacggctacgctctagacaatactctcccagcagggtggaagccattgtttgtgaacgtcaatgaccagacaaacgagggcattatgcacgaatcaaagccctttttcgccgtacagttccatcccgaggtgacccccggacccattgacaccgagtatctattcgacagctttttctccctcataaagaaaggcaaggctaccacgattacaagcgttctgccgaagcccgcactcgttgctagccgagtagaagtgtcaaaggtgctcattctcgggtcaggcggacttagcatcggtcaggcaggagagttcgattatagtgggtcccaagccgtgaaagcaatgaaggaggagaacgtgaaaaccgtgttaatgaatcccaacatagcaagcgttcaaacaaacgaagttgggctgaaacaggcagacactgtttattttttgcctataacgccgcagttcgtcacggaagtgattaaggccgaacagcctgacggactgatcctagggatgggcggccaaacagcactaaactgtggagtggaacttttcaagcggggtgttttgaaggagtatggggttaaggtcttgggcacctcagttgagtcaatcatggccacagaggaccgtcaactgttttccgacaaactgaacgagattaatgaaaagatagctccaagtttcgcagtggaatcaattgaggatgccctgaaggccgctgataccattggctaccccgtaatgataaggagcgcatacgcactagggggactcggatcaggtatatgtccaaaccgcgagactcttatggacctttccaccaaagcttttgccatgaccaatcagattctggtggagaagagtgtcacaggatggaaagagatagagtacgaagtggttcgcgatgcagacgataattgtgtgaccgtatgtaacatggagaacgtggatgctatgggggtccacactggggactccgtggtggtagccccggcacaaacactttccaacgccgaattccagatgctgcggcggactagcatcaatgttgtcagacatctgggtattgttggtgaatgtaatatccagttcgcactgcatcctacaagcatggagtactgtatcattgaagttaacgcccgactctcccgcagctccgcacttgcgagcaaagcaactgggtacccacttgcgtttattgcggccaaaattgctttagggatacccttgccagagataaaaaacgtggtatctggcaagaccagtgcttgttttgaaccaagtctcgactatatggttacaaaaatacccagatgggatctcgacagatttcacggaacctcgtcccgcattggctcatccatgaaatccgtaggcgaggtgatggcaataggtaggacattcgaagagtccttccagaaagccctgcggatgtgtcatccctctattgaagggttcaccccccggctgccaatgaacaaggaatggccctctaatctcgatctgcgcaaggaactctcggagcctagtagcacgcggatctatgctatcgctaaggccatagatgacaacatgtccttggatgaaatcgagaagctgacttacattgacaagtggtttctgtacaaaatgagggatattttgaacatggaaaaaacactaaagggactgaatagcgaatccatgactgaagagacactgaagcgcgcaaaggaaattggattttctgacaagcagatctctaagtgtctcggactcacggaagctcagacccgagagcttcggctgaagaagaatattcacccctgggtcaaacagatcgacacacttgcggcagaatacccttctgtgactaattatctctatgtgacctacaatgggcaggaacacgacgtaaactttgacgaccatgggatgatggtactaggatgcgggccttatcacatagggagcagcgtagagtttgattggtgcgccgtatcatcgatcagaacactgcggcagctgggcaagaaaacagtcgtggtgaactgtaaccctgaaacagtgagcactgacttcgacgaatgcgataaactctatttcgaggaactgagcctcgagcgtatcctcgacatctaccaccaggaggcctgtggcggttgcattattagtgttggcggtcagattcccaacaacctggcagtcccactctacaaaaacggcgtaaaaatcatgggcacttcaccactccaaatcgaccgggctgaggataggtctatttttagtgcggtcctggatgaactgaaggtggcacaggcgccttggaaggctgtgaataccctcaacgaggcattggagtttgcaaagtccgtcgactacccctgtctactgagaccgtcatatgtccttagtggatccgcaatgaacgtcgtttttagcgaggacgagatgaagaagtttcttgaggaagccacaagggtctcccaggagcatccagtggttctaactaagttcgtggagggcgctcgcgaggtcgagatggatgctgtgggaaaggatggtagagtgatctcccacgcgatctccgagcatgttgaagacgcaggcgtgcattctggggacgccacactcatgcttccgactcagacaatttcacaaggcgcaattgagaaggtcaaagacgctacgaggaagattgcgaaagcctttgcgattagtggccctttcaacgtgcagtttctcgtcaagggcaatgatgtcttagtcatagaatgcaatctgagggctagcagaagtttcccattcgtgtctaagacactgggcgtcgactttatcgacgtagccaccaaagtgatgattggagaaaacgttgacgagaaacaccttccgacactggatcatcctataatcccagccgattacgtggccattaaagccccaatgtttagttggccgagactaagagacgctgatccgatactgcgctgcgagatggctagcacgggagaggtagcttgctttggagaaggcatccatacagctttcttgaaggcgatgctgtccacaggttttaagatccctcagaaggggatcctaataggcatccagcagagttttagacctagatttctcggcgtcgccgagcagctgcacaacgagggcttcaagctcttcgctacggaggccacaagcgactggttaaacgcgaacaatgtgccagccacaccagttgcctggcctagccaggagggacagaaccccagtttgtcctcaattcgcaagcttattcgcgacgggtcaattgatttagtgataaacctgcctaacaataatacgaaatttgtgcatgacaattacgtcattcgccgcaccgccgtcgactctgggatccccctactcacaaattttcaagtcactaaactttttgcagaggccgtgcagaagagcaggaaggttgatagtaagtcgctgtttcactacaggcaatactccgccggcaaggcagcc

SEQ ID NO: 8098 - DNA, 4500 bp, synthetic construct
  misc_feature 1..4500: note = source = /note="Description of Artificial Sequence: Synthetic coding sequence"
  source 1..4500: mol_type = other DNA
atgacgcgcatcctaacagccttcaaagtcgtgcggactctgaagactggctttggtttcactaatgtcacagcacatcaaaaatggaagttctcccgccctggcattagactgctgtctgtgaaggctcaaactgcacacattgttctggaagacggcactaaaatgaaaggctacagtttcggtcacccttcgtcagtggcaggcgaggtcgtgttcaacaccggactgggcggatatccggaagcaatcacagatccagcatacaagggccagattctgacaatggccaaccctataattggcaatggcggggccccagacactactgccttggacgagcttgggctctccaaatatctggaaagcaacggcatcaaagttagcggactgctagtgctggattactccaaggattataatcactggctcgcgacgaagtctctcgggcagtggctgcaggaggagaaggtgcccgctatctatggggtggacactagaatgctaacaaagatcatccgggacaaaggtacaatgctcggcaaaattgagttcgaggggcagcccgtggactttgtggaccctaacaaacagaatctgatcgccgaggtcagcacaaaggatgtgaaggtgtacgggaaagggaaccccacaaaagttgtggccgtggattgcggtattaagaataatgtgatccgattgcttgtgaagcggggtgctgaagtgcaccttgttccgtggaatcacgattttacaaaaatggagtatgatggaatacttatagcggggggccctggcaaccccgcattagccgagcctctgatccaaaatgttcgcaaaatcctagagagcgataggaaggaacctctattcggcatttctaccgggaacctgatcacaggactcgctgcaggggctaaaacctataagatgagcatggccaacagaggacagaaccagcccgtcctgaacattaccaataagcaggcgtttataactgctcagaatcacggctacgcacttgataacaccctcccggcaggatggaagcctcttttcgtgaatgttaatgaccaaaccaacgaagggatcatgcacgagtctaagccctttttcgccgttcaattccatccggaggtgacgcctggaccgatcgatacagagtacctgttcgattctttcttctccctgatcaagaagggcaaggccaccacaatcacgtcagtgctgcctaagcctgctctggttgcttctcgggtggaagtcagtaaggtgttaatcctggggtctggcggactgagcatcggccaagccggggagttcgactactccgggagccaggccgttaaagccatgaaggaggaaaatgtgaagaccgtactaatgaaccccaatatagccagtgtgcagaccaatgaggtaggcttaaagcaggcagataccgtgtatttcctccctatcacaccccaattcgtcaccgaggtgattaaagcagagcagcccgatggcctgattttgggtatgggggggcagaccgctctgaattgtggcgttgagctctttaaaagaggtgtgttaaaagagtacggcgtgaaggtgctcggcacctcagtggagtccataatggcaactgaggatcggcagctcttctctgacaagctcaacgaaattaacgagaaaattgcaccttctttcgcagttgagtcgatcgaggacgccctcaaagccgcagatacaataggatacccagtgatgatccgatctgcctacgccttgggggggttgggatcaggaatatgtccaaatcgggagaccctgatggacctttccacaaaggcatttgccatgactaatcagattttagtggagaagtcagtaacaggatggaaagaaatcgagtacgaagtcgtgcgggatgcggacgacaactgcgtcacggtgtgtaacatggagaatgttgatgcgatgggtgtacacacaggtgactctgttgtggttgcacccgcccagactctgtctaacgcagaatttcagatgcttcgccggactagtataaatgttgtgcgccatctaggaattgttggtgaatgtaatatccagtttgccctccaccccacttctatggagtactgtattatagaagttaatgccaggctgagtcggtcaagcgcccttgcctccaaggccacaggttatccgctggccttcatcgctgcaaaaatcgcgctgggaatccctttgcctgaaatcaagaacgtggtgtccgggaaaacaagtgcctgctttgaaccatcgctggactacatggtcaccaaaatcccacggtgggatctcgatcgttttcatggtactagtagcaggatagggtcctccatgaagtcggtaggcgaagttatggccatcggaagaaccttcgaagaaagctttcaaaaggctctgcggatgtgccacccctctattgagggctttaccccgcggctgcccatgaacaaagagtggccctccaatctagatttgcgaaaggagctgagcgagcccagctcaacacgaatttacgcgattgcaaaggctatcgacgataacatgagcctagacgaaatcgagaaactcacatatatcgataaatggtttctgtacaaaatgagagacattctcaacatggagaaaactttaaaaggcctgaactctgagagcatgaccgaggagacgctgaaaagagctaaggagattggcttttccgataaacagatttccaaatgtctaggtttaacagaggcccaaacacgggaactcagactgaagaagaacattcacccctgggttaaacaaattgacacacttgcagcggaatatccttcggtcaccaattacctgtacgtgacttacaacggtcaagagcatgacgtgaacttcgatgaccacgggatgatggtactggggtgtggaccataccacatcggttcctccgttgaatttgactggtgtgctgtatcaagcatcaggaccttgagacaactgggcaagaaaactgtggtcgtgaactgcaatcctgaaactgtgtctaccgacttcgacgagtgtgataaactatacttcgaggaactcagcctcgagcgtatcctagacatctaccatcaagaagcgtgcggggggtgcatcatatctgtcgggggacagatcccaaacaacctggccgttccactctacaagaacggggtgaagatcatggggacctctccactgcaaatcgaccgggccgaggataggagtatttttagcgccgtattggacgagctcaaagtggcccaggctccgtggaaagctgttaatacccttaacgaggccttggaatttgctaagagtgtcgactacccctgcttacttagaccctcttatgtgcttagcggcagtgccatgaacgtggtcttttcagaggatgagatgaagaaatttttagaagaagcaaccagggtctcccaggagcaccccgtggttcttaccaaatttgttgagggagcaagggaagtggaaatggacgccgtggggaaagacgggcgagtcatctcccatgcaatttctgaacacgtggaagatgccggagttcactctggggatgctaccctgatgttgccaacccaaactatatctcaaggtgcgattgagaaagtcaaggatgccactcgaaagatcgctaaggccttcgccataagtggtccgtttaacgttcagtttcttgtcaagggaaatgacgtcctggtaattgaatgtaatctgcgtgcgtcccgcagctttcccttcgtgagcaagactttgggcgtcgatttcatagatgtggccactaaggtaatgattggagagaatgttgacgaaaaacatctgccaacgttggatcatcctatcattcccgcggactacgtggcaatcaaagcccccatgtttagttggccccgacttagggacgccgaccctatcttacggtgcgaaatggcctccacaggggaggtggcttgctttggagagggaatacatacagcttttctgaaggccatgctaagtaccggctttaagatcccacaaaagggcatccttatcggcatccagcagtcctttcgcccccgcttcctgggggtggcagaacagctgcacaatgaggggttcaagctattcgccaccgaagcaacatcggattggctgaatgcaaacaatgtcccagctacccccgtcgcctggccctcacaggaggggcagaaccccagtctgtcgtccataagaaaactgattcgagacgggagcatcgatttggtcatcaatctccctaacaataacaccaaatttgtgcatgacaactatgtaattaggcgaacagccgtagactctggcattccactgctcacaaatttccaggtgacgaaactctttgccgaggccgtgcaaaaatccagaaaggtggacagcaaaagcttgtttcactataggcagtacagtgccgggaaggccgcc

SEQ ID NO: 8099 - DNA, 4500 bp, synthetic construct
  misc_feature 1..4500: note = source = /note="Description of Artificial Sequence: Synthetic coding sequence"
  source 1..4500: mol_type = other DNA
atgaccagaattctgacggcttttaaagtggtgcggaccctgaagacgggatttggttttacaaacgtcaccgcgcaccagaagtggaagttctccagaccggggattaggctccttagtgtaaaagcccaaaccgcccatatagtgctggaagatggaactaagatgaagggatactctttcggccacccaagctccgtcgcgggcgaggtagtgttcaacaccggcctgggtggctatcctgaagccataacagatccagcatacaaagggcagattctcactatggccaatccgatcataggcaacggaggtgcacctgacacaacagccctggatgaacttgggttgtctaaatatctggaatcaaatgggataaaagtctctggccttcttgtgctggattacagtaaggactacaatcactggttggccacaaaatccctgggccaatggctccaggaggaaaaagtgcccgccatctatggcgtggatacaaggatgctcactaagattattagggataagggcacaatgctgggaaagatcgagttcgaaggtcagcccgtcgattttgtggaccccaacaaacagaatctgattgctgaagtgtccacgaaagacgtgaaagtgtacggtaaaggaaaccccactaaagtggtcgccgtcgactgcggcattaagaacaatgtaattagacttctggttaagcgaggggccgaagtgcatttggttccctggaatcatgactttacaaagatggagtacgatggcattctcatagcaggtggaccaggtaacccagcgctcgcagagcccctgattcagaatgtgaggaagattctcgaatctgatcgcaaggagccactgttcggcataagcaccggcaaccttatcaccgggctcgccgctggcgcgaagacatataagatgagtatggcgaaccgagggcaaaaccagccggttttgaacatcacaaacaaacaggcttttatcacagcacagaatcacggttatgctctcgataacacgctgcccgccggttggaagcctctcttcgtaaatgttaacgatcagaccaatgagggaatcatgcacgagagtaaacccttcttcgccgtgcagtttcaccccgaggttacacccgggccgatcgacaccgagtacctgttcgacagcttcttttctcttatcaaaaaggggaaagcaacaactattacaagcgtgctgccgaaaccagccttggtggcatctcgcgtggaagtaagcaaagtgctgattctgggaagcggggggcttagcattggtcaggcaggggagtttgactatagcggatctcaggccgtgaaggctatgaaggaagagaatgtaaaaaccgtgctcatgaatcccaatatagcatctgttcagactaacgaggtcggcctgaaacaggccgacaccgtgtactttctgcccattactccacaattcgtaaccgaggtgatcaaggcagaacagcccgatggcctcatactgggcatgggggggcaaactgctctgaattgcggcgtcgagctgttcaaaaggggcgtgctgaaagagtacggggtgaaggtgctgggtacgagcgtcgagagcattatggctaccgaggacagacagcttttcagcgataaacttaatgagatcaacgaaaagatcgctccctctttcgccgtggaatcaatcgaggacgcactgaaggcagccgacacgattggttaccccgtgatgatcaggtcagcttacgcactgggaggactgggctccggaatttgtccaaatcgagaaacccttatggatcttagcaccaaagcttttgccatgacaaaccagattcttgtggaaaaatccgtgaccgggtggaaggaaatcgaatatgaggtcgttagggacgccgacgacaactgcgtgaccgtctgcaacatggaaaacgtcgacgccatgggcgttcacaccggggattctgttgtcgtagcgcccgcccagacattgagcaacgcagaatttcagatgctgaggcgaacaagtattaatgtcgtccgacatctgggcatcgtgggcgagtgtaatatccagttcgctctgcacccaacatcaatggagtactgcatcatcgaagtaaatgccaggctctcacggtcctcagctctggcttccaaagcgacaggctaccctcttgcatttattgccgcgaaaatcgcactgggcatccccctccccgaaattaagaatgtggtctctggcaaaacctccgcttgtttcgagccgtccctggattacatggtgacaaagatcccaagatgggatctggaccggtttcacggcacatcatcccgcatcgggagcagcatgaagagcgtcggcgaagtgatggctattggccgcacatttgaagagtcttttcagaaggcattgagaatgtgccatccctctatcgaaggtttcacacctcgccttcctatgaacaaggagtggcctagtaacctcgatctgcgcaaggagctctctgagccatcttctacacggatctacgccatcgctaaagccattgacgacaatatgtcattggacgagatcgaaaagctgacctatatagataagtggtttctttataagatgcgagatattctcaacatggagaagacactgaaaggactcaactccgaaagtatgacagaggaaaccttgaagcgagccaaggagatcggcttctcagacaagcagatttccaagtgcctcggcctgaccgaagcccagacacgagagctgcgcctgaagaagaacatacacccctgggtgaagcagattgacacgctcgctgctgaatatccctctgtcaccaattacctctacgtgacgtacaatggccaggaacatgacgtgaacttcgatgatcatggtatgatggtcttgggatgtggcccttaccatattgggtcctccgttgagttcgactggtgtgctgtcagcagcatcagaactctgcgccaactgggcaagaagacagtagttgtgaattgcaatcctgaaacagtgagtaccgacttcgatgagtgcgacaagctttacttcgaggagttgagtctcgaaaggatactggatatctaccatcaagaggcctgcgggggttgcatcatcagtgttggcgggcagataccgaataacttggctgtgccactctacaagaacggggttaaaatcatgggaacaagcccccttcagatcgaccgggcagaggatcggagcatcttttcagcagtgttggatgaactgaaggtggcccaggccccttggaaagccgtgaatacactcaatgaggcattggaattcgcaaagtcagtagactatccctgtctccttaggcccagctacgtcctgtccggaagcgccatgaatgttgtgttcagcgaggatgagatgaagaagttccttgaagaagccacacgagtgagccaggagcacccggtcgtcctcactaagtttgtagagggcgcaagggaggtagagatggatgcagtgggtaaggatggccgcgtgatttcacatgccatcagcgagcacgttgaagacgctggtgtgcatagcggagatgcgactcttatgctgccaacccagaccatctctcagggcgctattgagaaggtgaaggacgccaccagaaagatcgccaaggccttcgccatctcaggcccattcaacgtgcaattcctggtaaagggaaacgacgtgctcgtcatcgagtgcaacctgcgcgcgagccgctcttttccctttgtttcaaagacccttggggtcgactttatcgatgtagcaactaaagtgatgattggagagaatgtggacgagaagcatctccctacactggaccatcctattattcctgcagactatgtcgcaatcaaggctcctatgtttagctggcctcgcttgcgggatgcagaccccattttgcgctgcgaaatggcttctaccggggaagtggcttgcttcggggagggcatacacactgcctttcttaaagcgatgttgagcaccgggtttaaaataccccagaaaggtatcctgatcggcatccagcagagctttcgccccaggtttttgggagtagcggagcagctgcacaacgaagggtttaaactgttcgcgacggaagcgacgtctgactggctgaatgccaataatgtgccagcgacgccagtggcatggccttctcaggaaggtcagaacccctctctcagtagtatccggaaactcatccgggatggatccatagatttggtgatcaacttgccgaacaacaatactaaattcgtgcacgataattatgtgattcgaagaacagccgtggactctgggatccccctgcttaccaacttccaggtgacaaagctgtttgctgaagccgtccagaaaagtaggaaagtggatagcaaaagcctgttccactaccgccagtatagcgcaggaaaggcggct

SEQ ID NO: 8100 - DNA, 4500 bp, synthetic construct
  misc_feature 1..4500: note = source = /note="Description of Artificial Sequence: Synthetic coding sequence"
  source 1..4500: mol_type = other DNA
atgaccaggatcttaactgcgttcaaggtggtgcggaccctgaagaccggtttcggatttactaacgtgaccgcccatcagaagtggaagttttcgagacctggtatccggctgctttcggtgaaagcccaaaccgctcacatcgtgctcgaagacgggactaaaatgaagggatactccttcggtcatcccagctccgttgcgggggaagttgtatttaatactggactcggtggctacccggaggctattactgatcccgcctataaaggccagattttgaccatggccaaccccatcatcggcaacggtggggcacctgacaccactgctctagacgagctggggctcagcaaatatttggagtccaatggtatcaaagtgtcaggactcctcgtgctcgattactccaaggactataaccattggttagcgaccaaatccttgggccaatggttgcaggaggagaaagttccagcaatatatggggtcgacacaaggatgctcacaaaaatcatcagggacaagggaaccatgctgggcaaaatagagtttgaaggtcaacccgtggacttcgtagatcccaacaaacagaacctgattgcagaagtgtcaaccaaggacgtgaaagtgtacggaaaaggaaatcccaccaaggttgtggccgtggactgtggcattaagaataatgtcatccggctgttggtgaaaaggggggccgaggttcatctggtgccctggaaccacgactttacaaagatggaatatgatggtatcctcatcgccgggggacccggtaaccctgctctcgccgagcctctgatccagaatgtgcggaagatcctggagtcagataggaaggagcctctcttcggaatatccactggcaatctcattaccggcctggctgctggagccaagacctacaaaatgtccatggcaaatcgcggtcagaatcaacccgtgctgaacatcacaaacaagcaggccttcatcacagcccagaaccacggctacgccctggataacacgttgcccgcggggtggaagcccttgtttgtgaatgtgaacgatcaaacaaacgaaggaattatgcacgaatccaagcctttctttgctgtccagtttcaccctgaggtcacaccaggaccaattgacaccgagtacctcttcgactcattcttcagcttgatcaagaaggggaaagcaaccactatcaccagcgtgctgccgaaaccggccctggtggcctccagggtggaggtgtcaaaagtgctaattctcggctctggaggattatcgatcgggcaggccggggaattcgactattctggctcccaggccgtaaaagcaatgaaagaagagaacgttaagaccgtgttgatgaatcccaacatcgcgagcgtgcagaccaatgaagttggtctcaaacaggcggacaccgtgtatttccttcctattacacctcaattcgttacagaagtcattaaagctgaacaacctgatgggctgattctcggcatgggaggacagacagctctgaactgcggggtggagctgtttaagcgaggcgtcttgaaagagtacggagttaaagtattgggaacctccgtggaatccattatggcaaccgaggaccggcagctgttcagcgacaagcttaacgagatcaacgaaaagatcgccccatccttcgctgtagagtccatcgaagacgccctgaaagcggcggacaccataggctaccctgtcatgatccgaagtgcctatgctctgggggggctcgggtcaggaatatgtcccaatcgcgaaactctgatggatctcagtacaaaggcattcgccatgactaatcagatcttggttgagaaaagcgttactggatggaaggagattgagtacgaggttgtgagagacgctgatgacaactgtgtaaccgtttgcaacatggagaacgtggatgccatgggcgtccatactggcgattctgtggtggtggcgcccgcccagaccctgtctaatgctgagttccaaatgctgcggcgaacctctatcaacgtcgtgaggcatttgggcatagtgggtgagtgcaacatccagttcgccttacatcctacatcaatggaatattgtattattgaggtgaacgcccgcctgtcaagatcctctgctctagccagcaaagccacgggttacccactcgcctttattgcagctaagatcgcactgggcatcccccttccagaaatcaaaaatgtggtgagcggcaagacatccgcttgttttgaaccctctctggactacatggtgaccaaaataccacgctgggacctagacagatttcatggcacaagtagtaggatcggatcatccatgaagtccgtgggtgaggttatggcaatcggcagaaccttcgaagaatcgtttcaaaaggctctgagaatgtgccaccccagtattgagggcttcactcccagactgcctatgaacaaggagtggccgtctaatctggacttaagaaaggagctctcagagcccagcagcacaagaatatacgcaatagccaaggcaattgatgacaacatgagcctagatgaaatcgaaaaactcacttacatcgacaaatggtttctgtacaagatgagagatattctgaatatggagaagacgctgaagggactcaacagcgagagtatgactgaggagactctaaaaagggcgaaggaaatcggcttttcagataaacaaatctccaaatgccttggtctgaccgaggctcagactagggagctcaggctcaagaaaaatatacacccctgggtaaagcagattgacacactggccgcggagtatcctagtgtgaccaattatctgtacgtgacctacaatggccaggagcacgatgtaaacttcgatgaccacggaatgatggtgttgggctgcgggccctaccacattggttcatcggtcgaatttgattggtgcgctgtgtcttctattcggaccctgcgtcagctggggaaaaagactgttgtagtaaactgtaacccggagaccgtgagcaccgatttcgatgagtgcgacaagctgtacttcgaggagctgtccttagagagaatactggacatataccaccaagaggcatgtggtggctgtatcatctctgtcggagggcaaatcccaaacaatctggcagtccctctgtataagaacggggttaagatcatgggtacgagcccacttcagatcgaccgagcagaggacaggagcatcttcagtgccgtgctggacgagttaaaggtggctcaagccccctggaaggccgtgaatacgctgaatgaggccctcgagttcgccaaatccgtagattatccatgcctgctccgcccatcttatgtgctgtctggttcggctatgaacgtggtgttcagcgaagacgaaatgaagaagtttttggaggaagctacgcgcgtgtcgcaggagcaccctgtcgtcctgactaagttcgtcgagggagcccgcgaagtggagatggacgccgtcggcaaagatggtagagtcatctcacacgccatttccgagcacgtggaggacgcgggagtgcactcaggggacgcaacactgatgttgcccacccagactatatctcagggggccattgagaaagtgaaagatgccacaagaaagatcgcgaaagccttcgctatctcaggtcctttcaacgtgcagttcctggtcaagggtaacgacgtcttggtgatagagtgcaacctgcgtgccagccgatctttcccattcgttagcaaaaccctcggggtggacttcatcgacgtagcaactaaggttatgatcggcgagaacgttgacgagaagcatctgcctaccctggaccatccaatcatccccgctgactatgtcgctattaaagcccccatgttcagttggccacggcttcgggacgcggacccaattcttagatgcgaaatggcatctaccggcgaggtggcatgctttggcgagggtatccacaccgcttttctcaaggccatgctttctaccggctttaagatccctcaaaagggtatcctcattggcatccagcagtcctttagaccaagattccttggagtggctgagcaactccacaatgaaggttttaagctctttgccacggaggccaccagcgattggctgaacgctaacaacgttccggctacaccagtggcttggccaagccaagaaggccagaatccctctttgagtagtatccggaagttgatccgggacggctccattgacttagtcatcaatcttccgaataacaatacgaagttcgttcacgataactacgtcattaggcggactgcggtggacagcggcatacccctgctgactaatttccaggtcaccaagctatttgcagaggctgtgcaaaaatcccgaaaagtcgacagtaagtccttattccattatcgtcaatacagtgctggcaaggcagcc

SEQ ID NO: 8101 - DNA, 4500 bp, synthetic construct
  misc_feature 1..4500: note = source = /note="Description of Artificial Sequence: Synthetic coding sequence"
  source 1..4500: mol_type = other DNA
atgacgcggatcttaaccgcctttaaggtggtgcggactttgaaaaccggctttggctttacaaacgtgaccgctcaccagaagtggaagttttctcgacctggcatccgtctgctatctgtcaaggcgcaaaccgcgcacattgtcctggaggacgggacgaaaatgaaaggctatagcttcgggcatccatcctcagtagccggcgaagtcgtattcaacactgggctcggcggttacccagaggccatcacggaccctgcatacaagggccagatcttgaccatggcgaatcccatcattggcaatggtggggcgcctgacactacagcccttgatgagctgggactctccaagtacctggagtcaaacggaattaaggtctcggggcttctggtactggactattctaaggattacaatcactggctggcaactaaaagcctgggtcagtggctgcaggaagagaaggttcctgccatctacggagttgacaccaggatgctgactaaaattatacgagacaagggaacaatgctgggcaagattgaattcgaaggccaaccagtggacttcgtcgaccctaacaagcagaacttgatcgccgaagtgtctactaaggacgtcaaggtttatgggaaaggcaatcctaccaaagtggtcgcggtcgattgtggtatcaagaataacgtcattaggctgctcgtgaagcgtggagccgaggtacatctggtaccctggaatcacgatttcactaaaatggaatacgacggcatcctgatcgcgggggggcccggcaatcccgctttggcggaacctcttatacagaacgtgagaaagatccttgaatcagatagaaaggaacctcttttcggcatctcaacaggaaacttaatcactggcctagcagccggagcaaaaacgtacaagatgagcatggccaaccgggggcagaatcagccagtgctaaatataaccaataaacaagcttttataaccgcacagaatcatggctacgcgctagataacacattacccgccggctggaagcccctgtttgtgaacgtaaatgaccagactaacgaggggatcatgcatgaaagtaaacctttcttcgcagtgcagttccaccctgaagttacgcctggtccaatagataccgagtatctgtttgattctttcttcagcctaataaaaaagggcaaggccaccacaattacctcagtgctgccgaagccagccctggtggcctcacgcgtcgaagttagcaaggtgctgattctcggttcggggggactaagcattggacaggccggagaattcgattatagtggttcgcaggccgtgaaggccatgaaagaggagaatgttaagacagtgctcatgaaccctaacatcgcttcggtccaaaccaacgaagtgggcctgaaacaggccgacacagtttattttctgcccatcactcctcagttcgtgactgaggtgatcaaagccgaacagcccgatggcctgatcctgggcatgggaggacaaactgcattgaactgtggagtcgagctgtttaaacgcggggtgctcaaggagtatggagtgaaggtgctgggcacaagtgtggaatctatcatggcgacagaggacaggcagctcttttcggataagctaaacgaaattaatgagaaaatagctccaagttttgcagtagagtccatcgaagatgcattaaaggcagccgacaccatcggttatccagtgatgatacgctctgcctacgctttgggcgggcttgggtccggaatctgtccaaatcgggagacactcatggacctgagcactaaggcgtttgcaatgacgaatcagattcttgtcgagaaaagcgtgacagggtggaaagagattgagtacgaggtagtgagggacgcggatgacaactgtgtgacagtgtgcaacatggagaacgtggatgcaatgggggttcatacaggtgactcggtcgtggtggcccccgcgcagacattgagtaacgccgaatttcaaatgctgcgccgaacctccatcaacgttgtacggcatttaggaattgttggcgaatgcaatatccagttcgcccttcacccgacttctatggaatattgcattatcgaggtaaacgcacggttaagccggtcgagcgccttggcatcaaaggctactggatatcccttagccttcatcgcagccaaaatcgctctcggaatcccactccccgagattaagaacgtggtctccggtaagacttccgcttgttttgagccctccttggattacatggtcacaaaaattccaaggtgggacctggaccgctttcacgggacatcctctcggattggctccagtatgaaaagcgtaggtgaagtgatggctatcgggaggacatttgaggaatccttccagaaagccctgcggatgtgtcacccctccattgaggggtttaccccgaggctgccaatgaataaggaatggccttccaatctcgatctgcgcaaagaactgtcagaaccatcaagtacccgtatatacgctatcgcaaaggccattgatgataacatgtcacttgatgagatcgagaaactgacttacatcgataagtggttcctgtacaagatgcgagacatcctcaacatggagaagactcttaagggcctaaacagcgagagcatgactgaagaaaccctgaagagagcaaaggagatagggttctcagacaagcagatttccaaatgtctgggcctgacagaagcccagactcgggagctgcgcctcaaaaagaacatccacccctgggtaaaacaaatcgacacactggcagcagagtatccgtcagtaacgaattacctctatgttacctacaatgggcaggagcacgacgttaactttgatgaccatgggatgatggtgttaggatgtggaccgtatcacataggatcttcggtggagtttgactggtgtgctgtgagttccattagaacccttaggcagcttggtaagaagaccgtggtggtcaactgtaatccagaaacggtgagtaccgattttgatgagtgcgacaagctctatttcgaggagctcagtctggaacggattctggacatctatcaccaagaggcgtgcggtggatgtatcattagcgttggcggccagatacctaacaatttagcagtgcccctttacaagaacggagtcaaaatcatgggaacatcacccctccagatcgatagggcggaagaccgttctattttcagcgccgtgttggatgaacttaaagtagcccaggcaccttggaaagcggttaataccctcaacgaggcccttgagtttgcgaaaagcgtggattacccctgtctgcttcggcctagttatgtgctgtccgggtcggccatgaatgttgtgttctccgaggacgagatgaagaaatttctagaggaggccacccgggtaagccaggaacatccagtggtactgaccaagtttgttgagggggctagagaagtagagatggatgccgttggcaaggatgggcgagtgataagccacgccataagcgagcacgtggaagacgctggcgtgcatagcggggatgcgacgctgatgttacccacccagacgatttctcagggtgcaattgaaaaggtgaaagatgctactagaaaaatcgcgaaagcatttgccattagcgggcccttcaacgtgcagtttctcgtgaagggcaatgatgtcctggtgattgaatgcaatctgcgtgcaagtagaagttttccatttgtgtcaaagacactgggcgtggatttcattgacgttgccacaaaggtaatgatcggcgaaaatgtggatgaaaagcatttgcccactctggatcatcccataatccccgcagactacgtggcgataaaagcgccaatgttcagctggcctcgcctccgagacgctgatcccattctgcgctgtgagatggcctcaacgggggaggtcgcttgcttcggggagggaattcacaccgctttcctaaaggccatgcttagcactggtttcaaaatcccccagaaggggattcttattggtatacagcagtccttccgtccccgctttcttggtgtggcagagcagctgcacaacgagggatttaagctatttgccacagaggcaaccagcgattggctgaacgctaacaatgtgcctgcaactcctgtagcatggccctcacaggaaggtcagaatccttctctgtcctcgatacggaagctaattagggacggttccattgatttggtgatcaacttgccaaacaataacactaagtttgtgcatgacaactacgtcattcgtcggacagccgtagattctggaattccgctgctgactaattttcaagtgactaagttgtttgcagaggctgtgcagaagtctagaaaggtagattccaaatctctgttccactaccggcagtactcagcaggtaaggccgca

SEQ ID NO: 8102 - DNA, 4500 bp, synthetic construct
  misc_feature 1..4500: note = source = /note="Description of Artificial Sequence: Synthetic coding sequence"
  source 1..4500: mol_type = other DNA
atgaccagaattctcactgcattcaaggtagtgcgcacactcaaaactggatttgggtttacaaatgtgacagcacaccagaagtggaagttttcgcgcccgggcatccgtttactgtctgttaaagcacagactgcccacatagttctagaagacggcacaaaaatgaagggatattctttcggtcacccttctagtgtcgcaggagaggttgtcttcaatacaggattgggtgggtaccctgaggccattacagatcctgcctacaagggccaaatactgacaatggcaaacccgattattggcaacgggggtgcaccagataccaccgccctggacgagctcgggctgagcaagtatctggagtccaatggtattaaggtatcagggctccttgtactcgactacagcaaagattacaaccactggctggccacaaaatctctcgggcagtggctccaggaagagaaagtgcctgctatatacggagtggacactaggatgctgactaagattatcagggacaaagggactatgctgggcaagatcgagtttgagggtcagcccgttgattttgtggacccaaataagcagaacctgattgccgaagttagcacaaaggatgtgaaggtgtacgggaaaggcaatcccaccaaggtggtggcagtagactgcgggatcaaaaacaacgtgatacgccttctggtcaagaggggtgccgaggtacatctggtgccttggaaccacgatttcacaaagatggaatatgatggtattttgatcgccgggggaccaggtaaccctgccctggccgagccactgattcagaacgtgcgcaagatattggagagcgaccgcaaagaacccctctttgggatcagcacaggaaaccttatcactggcctggccgctggcgcaaaaacttacaagatgagcatggcgaacaggggccagaatcaaccggttttgaatataactaacaagcaggcgtttatcacagcccagaatcacggctacgccctggataatacactgcccgccggctggaagcccctgttcgtgaatgtgaacgatcaaacaaacgaggggattatgcacgaaagtaagccgttcttcgcagtgcagtttcatccagaagtgacccctgggcctatagatactgagtacctatttgattcatttttctctttgataaagaaaggcaaggcaaccacgatcactagcgtgcttcccaagccggccttggtggcgagccgagtcgaggtctcaaaggtacttattctgggaagtggaggtctgtctattgggcaggctggcgaattcgattactccgggagtcaggcagtgaaagccatgaaggaggaaaatgtgaagacagtgctcatgaatccaaacattgcctcggtgcagacaaatgaggtaggcctgaagcaggccgacacagtgtattttctccccattaccccccagttcgtcaccgaggtgattaaggcagaacagccggatggattaatcctgggaatgggcgggcagactgccctcaactgtggagtcgagctttttaagcggggagtattgaaagaatacggcgttaaagtgctggggacatcggttgaaagcataatggctactgaggaccgacagctgttctcggataagttaaacgaaattaatgagaagatcgctccttctttcgctgttgagagcatcgaggacgctctcaaggccgccgatactattggctatccggtaatgattcggagtgcgtacgcactcggcggattgggatccgggatatgtcctaatcgagaaaccttgatggatctaagcacgaaggcgttcgcaatgaccaatcagattcttgtcgagaaatctgtgacggggtggaaggagattgagtatgaggttgttcgcgacgccgacgataactgcgtgaccgtttgcaacatggaaaacgtcgacgctatgggggtgcataccggagatagtgtcgtggtcgcccccgcacaaacactgagtaacgcagagtttcagatgctgagacgtacaagcataaatgtggtgcgacatctgggcatagtaggggaatgcaatattcagttcgctctccatcctacctctatggaatactgcattatagaagtgaatgcccggctctctcggtcttctgccctcgcatctaaagccaccggctacccgctcgcatttatcgctgccaaaatcgcgctcggcatcccactgccagagattaagaatgtggtatccggtaaaacgagcgcctgctttgagcctagtctggattacatggtgaccaagatcccgagatgggacctggacagattccacgggacgagctctaggataggtagctctatgaagtccgttggagaagtaatggcgattgggcgaacgtttgaagaatccttccagaaggctctgcgcatgtgtcacccctctatcgagggatttactccgaggctgcctatgaacaaggaatggccaagtaatctcgacttaaggaaggagctgagtgaaccgtcctcgacaaggatttatgctatcgccaaggccatcgacgacaatatgtccttggacgaaattgaaaagctgacctacattgataagtggttcctttacaagatgagagacattctcaacatggaaaaaaccctcaaagggctcaacagtgagtcgatgacagaggagactttgaagcgcgctaaagaaataggcttctctgataagcagatttctaaatgcctcgggctcactgaggctcagacccgggagctgcgcctcaagaagaacattcacccctgggttaagcagatcgataccctggccgcggagtacccgtccgttactaattatctgtacgtgacgtataacggccaagaacacgacgtgaacttcgatgatcacggtatgatggtcctcggatgtggaccctatcatatcggttcaagtgttgaattcgactggtgtgctgtttcctccataaggactctgaggcaactggggaaaaaaacagtggttgtcaattgcaatcccgagacagtgtctaccgattttgacgagtgtgacaaactttactttgaggagctcagcttagagcgaatcttagacatctatcaccaggaggcctgtggcgggtgtatcataagcgtcggcggacagatccccaacaatctggcagtcccactgtacaagaatggcgtcaaaattatgggaactagtcctctgcagatcgatcgagccgaagaccggtctatatttagtgctgtgttggacgagctgaaggtggctcaggcgccttggaaggctgtgaacacactgaatgaagctctcgagtttgccaaaagtgtggattacccttgcttgctgcgtccatcctacgttctaagcggttccgctatgaacgtcgtgttcagcgaggatgaaatgaagaaatttctagaagaagcaactcgcgtatcccaagaacatcccgtggtgctgaccaagtttgtcgagggagcccgggaggtagagatggacgccgtgggcaaggacggtcgcgtgatctctcacgctattagtgagcacgtggaggatgcaggagttcattctggagacgctacgcttatgctgcctacgcagacaatatcccagggtgccatagagaaggtaaaggatgccactcgcaagatcgccaaagcattcgcaatctctggtccctttaatgtgcagtttcttgtgaagggcaatgacgtactggttattgagtgtaaccttagagcctcgagatcattcccctttgtgagcaagactctgggagtagactttattgatgttgccactaaggtcatgattggcgagaatgtggacgagaaacatcttcctacattagaccatccaattattcctgccgactatgtggcaataaaagctccaatgttctcatggccccgtctgagggatgcggaccccatcctgaggtgcgaaatggcctcaactggtgaagtcgcttgtttcggagaggggatccataccgcttttttaaaggccatgctgagtacagggttcaaaatcccccagaaaggcatcctcattggaatccagcagtctttccgaccaagattcctcggagtggctgagcagttgcataacgagggcttcaaattatttgccactgaggcgactagtgattggctgaacgcaaataacgttcctgccacccctgttgcgtggccatctcaggaggggcagaacccctcactgtcttcgatacggaaactgattagggacgggtctatcgacctggtgatcaatctgccgaataacaataccaagttcgtgcacgacaattatgtgattcggaggaccgctgtggacagcggaattcccctcctcaccaactttcaggtgactaagctattcgctgaggccgttcagaaatctcgtaaagttgatagcaagagcttgtttcactatcggcagtattcagcaggcaaggccgcc

SEQ ID NO: 8103 - DNA, 4500 bp, synthetic construct
  misc_feature 1..4500: note = source = /note="Description of Artificial Sequence: Synthetic coding sequence"
  source 1..4500: mol_type = other DNA
atgaccagaatcctgacagcattcaaggtggtacgcaccctcaagacggggtttggctttactaatgttacggcccatcagaagtggaaattttcaaggcctggtattcgcctactcagcgtcaaagctcagaccgcacatatcgtcttggaagatggaaccaaaatgaaaggctactcctttggacatccgtcctccgtcgccggagaggtcgtcttcaacaccgggctaggcggttacccagaggcaattacagacccagcatataagggtcagatcctgaccatggccaaccccattattggaaacggaggggcccccgacactacagctttggatgaactcggactttcaaaatatctggagagcaatggaatcaaagtaagcggcctgcttgtgctggactactctaaggactacaatcactggcttgccaccaaaagcttggggcagtggctgcaggaagagaaggtcccagccatttatggggtagacacccggatgctcaccaagatcattcgggacaaggggaccatgttgggcaagattgagtttgagggtcagcccgttgatttcgtcgatccgaataaacagaatttaatagctgaagtgtctaccaaagatgtcaaagtctacggcaaagggaatccgaccaaggtagtggccgtggactgtggcattaaaaataatgtgattcggttgttggtgaaacggggcgccgaggtccacctagtcccctggaaccacgatttcaccaagatggagtatgatggcatcctcatagcgggaggtcccggtaatcccgcgcttgcagagcccctgatccagaacgtccgtaaaatcttagaatccgataggaaagagccactgtttggcataagtactgggaatctgattaccggcctggcagcgggcgctaaaacttataaaatgtctatggcaaatcgaggacaaaaccagcccgtcttgaacataacaaataagcaggcgtttatcactgctcagaatcatggatatgcactcgataatacgcttccggcgggctggaagccccttttcgttaacgtgaatgaccagaccaacgaaggaatcatgcacgagagtaagcccttcttcgctgtccaatttcaccctgaggtcacccccggtccaattgataccgagtacctttttgattcctttttcagcctgatcaagaagggaaaagctaccactattaccagcgtactgccaaagcccgcattagtggcctctcgggttgaagtatcaaaagtcctgattctgggaagtggcggtctctcgattggccaggctggggagtttgattactcggggagccaggctgtaaaagcgatgaaggaggaaaacgtgaagacagtacttatgaaccctaatattgcctctgtccagactaatgaggttggactgaagcaggccgacaccgtgtactttctgccaatcaccccacaatttgtcaccgaagtgatcaaagcagagcagccagatggactgatcctgggaatgggcggccagaccgctctgaactgtggagtagaattattcaaacgaggagtgcttaaagagtatggcgtcaaggtgttggggacctccgtggaaagtatcatggccacggaggatcgacaactgtttagcgataagctaaacgagatcaacgaaaagatagccccaagcttcgctgttgaatcaatagaagacgcactgaaggcggcagatacaatcggttaccccgtaatgattcgaagtgcctatgctctgggcgggctgggtagtggaatttgcccgaatagagagaccctcatggacctgagcacgaaagcatttgcaatgaccaatcagattctggtcgagaaaagcgtcacgggttggaaggaaattgagtatgaagtggtaagagatgccgatgacaactgcgttactgtctgtaacatggaaaatgttgacgctatgggggtgcacaccggggatagcgtggtggtcgctcccgcacagaccctatccaacgctgagttccaaatgctgcgacgaacctctatcaatgtggttaggcacctgggaattgtgggggaatgcaatattcagttcgccctacatccaaccagtatggaatactgcatcatcgaggtgaacgcccggttgagtcggagtagtgctttggcgagtaaagccactggctaccctctcgcttttatcgcggcgaaaattgcattaggcataccattgcccgaaataaagaacgtagtgtccggcaaaacgagtgcatgtttcgagccatctctcgactacatggttactaaaatccccaggtgggaccttgatcggttccacggtacatcctctaggattgggtccagcatgaagagcgtcggtgaagtgatggcgattggaagaacctttgaggagagctttcagaaagcactgaggatgtgtcaccccagcattgaaggcttcacccctaggcttccgatgaacaaagagtggccctccaacctcgatctccgcaaggagctatcagaaccctcttcgacgcgcatctatgccattgcgaaagcaatcgatgacaacatgagcttagacgaaattgagaaattaacatacatcgataagtggttcctctataagatgcgggacatcctaaacatggagaaaaccctcaaggggctgaacagcgaaagcatgaccgaagagacattaaagagagcaaaagaaatcggcttttccgataagcaaatcagcaagtgtctgggactcacagaggcacaaactcgcgaactgcggctcaaaaagaacatacacccctgggtaaagcagatagacactctcgcagccgaatacccgtccgtcacaaactacctctatgtcacatacaatggtcaagaacacgatgttaactttgacgaccacggcatgatggtgctaggctgcggaccctatcatattgggagcagcgtcgagttcgactggtgtgcagtctcttccatcaggacacttagacagttagggaaaaaaacagtggtagtgaactgcaatccagaaaccgtttccactgatttcgatgagtgcgataagctctactttgaggagcttagccttgagagaatactggatatataccatcaggaggcttgcggcgggtgtattatatctgtgggaggacagattcctaacaatctcgcagtgccactgtataagaatggagtcaaaatcatgggaacctccccactgcagattgaccgggctgaggacagatccatctttagtgccgtgctggatgaactgaaggttgcccaggccccctggaaggcagtcaatacactgaacgaggccctggaatttgctaaaagtgtggactacccttgcctgctaaggcccagttacgtcctgagtgggtccgcaatgaacgtcgtgttcagtgaagacgaaatgaagaagtttctggaggaggccacaagagtgagtcaggaacaccccgtcgtcctgaccaaatttgtggagggagctcgggaggttgagatggacgccgtgggcaaggacggaagagtgatctcccacgcaatttccgaacacgtagaagacgcaggcgtccacagtggcgatgcaactcttatgctgcccacccagaccattagtcagggcgctatcgagaaggttaaggatgccacgcggaagattgccaaggcttttgctatctctggacctttcaatgtccagttcctcgtgaagggaaatgacgtactcgtgatcgaatgtaatttaagggcctccaggtctttcccctttgtgtctaagaccctgggggtcgattttatagacgtcgccactaaagtgatgatcggagagaacgtcgacgagaaacacttacctaccctggatcaccccatcataccagcagactatgtcgccataaaggctcctatgttcagctggcctcgcttgagagacgctgatccaatcctccgttgtgaaatggcatccaccggtgaggtggcgtgcttcggcgaggggattcacacagcgttcctaaaggccatgctcagcacaggattcaagatccctcagaaagggattttgattggcattcagcagagcttccggcctcggttcctcggcgttgctgagcaactccacaacgaggggttcaaactcttcgcgactgaggccacatccgactggctgaatgctaacaatgtgccagctactcccgtcgcctggccgagccaggagggacagaaccccagcctgagtagtattcgcaaactcatccgtgacggttctattgacctggtgataaatctgccgaacaataatacaaagttcgtccatgataactacgtgattaggaggacagcagtggattccggtattcctttgctgactaactttcaggttactaagcttttcgctgaagccgtgcaaaaaagtcggaaagttgacagtaagtccctatttcactaccggcagtactccgccgggaaagccgcc

SEQ ID NO: 8104 - DNA, 4500 bp, synthetic construct
  misc_feature 1..4500: note = source = /note="Description of Artificial Sequence: Synthetic coding sequence"
  source 1..4500: mol_type = other DNA
atgacgcgcatccttacagcctttaaagtggttcggactcttaaaaccggattcgggttcactaacgtgactgcccaccagaagtggaagttctcgagaccgggtattcggctgcttagcgtgaaggcgcagactgcacacatcgttctggaggacgggacaaagatgaaaggctactcctttgggcacccatctagtgtagccggcgaagtggtctttaatacagggctgggaggatatcctgaggcgatcacagatcccgcttacaaaggacagatcttaaccatggctaacccaataatcgggaacgggggtgctcctgacaccaccgcactagatgagttagggctgtctaagtaccttgaatccaatgggatcaaagtgagtggcctcttggtgctggactactctaaggattataaccactggctggctacgaaatctctgggacagtggttacaggaagagaaagtgcccgcgatctacggagttgacacccggatgttaaccaagatcatccgcgacaagggaactatgctgggcaagatcgagttcgaaggccagcccgtggattttgtggacccgaacaaacagaatttgatcgccgaagtcagcaccaaggatgtgaaagtttatggaaaaggaaatccaacaaaagtggtggcagttgattgcggcattaaaaacaatgttatccggctcttagtaaaacgtggggctgaggtgcatctggtgccatggaatcacgatttcacaaaaatggaatatgatggtattttgattgcaggtggccctggtaatcccgctctggcagagccactgatccagaacgtgaggaagattctcgaaagtgatcggaaggagccactcttcggcatatccaccgggaatctgatcacaggactcgccgcaggcgctaaaacgtacaagatgtccatggccaatcggggacaaaaccagccggtcttaaatatcactaataaacaagctttcatcaccgctcagaaccatgggtacgccttggacaacactctgcccgccgggtggaagccgctgttcgtgaacgtgaatgatcagacaaatgaagggatcatgcatgagagtaagcctttcttcgcagttcaatttcatccggaagttacccctggccccatcgacacagagtatctgtttgattcatttttctccctgattaagaagggaaaagccacaactataacttcggtactgcctaagccagccttggtggcttcccgggtagaagtctctaaggtattgatactcggatccggtggcctgtcaattgggcaggccggcgagttcgactactccggaagccaagcagttaaggcgatgaaggaagaaaatgtgaagaccgttctgatgaaccctaacatcgcgagcgtccagaccaatgaggtgggactgaagcaggccgacacggtgtacttcctgccaattactccccagtttgttaccgaagtaataaaagccgagcaacccgatgggctgatcctggggatgggcggccagacagcactgaactgtggtgttgaactttttaaacggggcgtgcttaaagaatatggggtgaaggttttggggactagcgtggaatcaattatggcaactgaggacagacagcttttctcggataagctgaatgagatcaatgagaagatagccccttcttttgccgtcgaaagcattgaggatgcactgaaggctgccgatacaatcggttaccccgtcatgatcagatccgcatatgcccttggagggctgggatctggtatttgccctaaccgcgagactctaatggacctgagtacgaaggctttcgccatgaccaatcaaatattggttgagaaatcagtgaccggatggaaagagattgagtatgaagttgtgagagatgccgacgataactgcgtaaccgtctgcaatatggagaacgtggacgctatgggggtccacacaggcgactctgtggtggtggcccccgctcaaactctcagcaacgccgaattccagatgctcaggaggacctccattaacgtcgtgaggcacctcggcattgtcggcgagtgcaatatccaatttgcactgcacccaacgtccatggaatattgcataatcgaagttaacgcccgcctctccaggtcatcggccctggcgtccaaagcaacaggttaccccctcgccttcatagctgccaaaattgccttgggtatcccattgccagaaatcaagaatgtcgtgagcggaaaaacatccgcctgttttgagcctagcctagattacatggtcactaaaatacctcgttgggatctggacagattccatgggacgtctagccgtatcggaagttccatgaaatccgttggggaggttatggcgatcgggcgaacattcgaggaaagttttcagaaggccctgaggatgtgccacccaagtatagaggggttcacaccaagactcccaatgaacaaagagtggcctagcaacttggacttgcgcaaggagctctcggaacctagctctactcgaatctacgctatcgccaaggccatcgatgacaacatgagcctagacgaaatcgagaagttaacctatattgacaagtggtttttgtacaaaatgcgtgacatcctgaacatggaaaagacgcttaaaggccttaactctgagtccatgactgaggagaccctgaaacgagctaaggagatcgggttttcagataagcagatcagcaagtgcttagggcttacagaggcccaaacacgggagttgcgtctcaaaaagaacatccacccatgggtcaagcagatcgacaccttggcagccgaatacccttctgtgacaaattatctgtatgtgacttataacggtcaagaacacgatgtgaactttgatgaccacggcatgatggtgctgggttgtggaccatatcatattggatcttctgtggaattcgactggtgcgcagtctcgtcgatccggacacttcggcagcttggaaagaagaccgtggtggtcaactgcaatcccgaaactgtctccacagacttcgacgagtgcgataaactgtattttgaggagctgtctttggagagaatcctggacatctaccaccaagaagcatgcggcggatgtatcatatcagtaggaggacagattccaaacaacctggccgtgcctctctataaaaacggcgtgaagatcatggggacgtctcccttacagattgacagagctgaggaccggtctatatttagtgctgtgctggacgagttgaaagttgcgcaggcaccctggaaggctgttaacaccttgaacgaagctcttgaatttgctaagtccgtagactatccctgccttctccggcccagttatgtgttgagcgggtccgccatgaatgtcgtgttcagtgaggacgagatgaagaagttcctggaagaagccacccgcgtcagccaagaacacccagtcgttctcacaaaatttgtcgagggggcccgcgaggttgagatggatgccgtaggaaaagatggtagagtgatttcgcacgcgattagcgagcacgtggaagacgcaggtgttcactccggcgatgccacactcatgctgcccacacagacgatatctcagggagccattgaaaaggtaaaggatgctacacgtaaaatcgctaaggcatttgccatttctggtccttttaatgtgcaattcctggtcaagggcaatgacgtgttggtaattgagtgtaatctgcgggcttcccggtcgttcccctttgtctcgaagacgctgggcgtggactttatcgatgtggccaccaaggtgatgattggggagaatgtcgatgagaaacatttgccaacgctggaccaccctatcataccagccgactatgtggctatcaaggccccgatgttcagttggcctagattacgcgatgctgatcctatcctgagatgcgagatggccagtactggcgaggtggcctgttttggggaggggatccacacggcttttctgaaggccatgctctctactggctttaagatcccccagaagggaatcctgattgggatccaacagtctttccggccacgctttttgggcgtggcggagcagttgcataatgaaggctttaagttgtttgctactgaggccacatccgactggctgaacgctaacaacgtgccagcgaccccagtagcttggccgtctcaggaaggacagaacccaagcctctctagtattcgcaaactgatacgggacggctccatagatctcgtgattaatttgccaaataataatactaaattcgtccacgataattatgtcattcgtaggacagctgtcgactctgggatcccgttgctcactaactttcaagtgacaaagttgttcgccgaagccgttcagaaatcacgcaaggtggactccaaaagcctgtttcattacaggcagtatagtgccgggaaggcagct

SEQ ID NO: 8105 - DNA, 4500 bp, synthetic construct
  misc_feature 1..4500: note = source = /note="Description of Artificial Sequence: Synthetic coding sequence"
  source 1..4500: mol_type = other DNA
atgacgcgaatactaacggcgtttaaagtagtacgaacgttaaaaacgggttttggttttacgaatgtaacggcgcatcaaaaatggaaattttcgcgaccgggtatacgtctactatcggtaaaagcgcaaacggcgcatatagtattagaagatggtacgaaaatgaaaggttattcgtttggtcatccgtcgtcggtagcgggtgaagtagtatttaatacgggtctaggtggttatccggaagcgataacggatccggcgtataaaggtcaaatactaacgatggcgaatccgataataggtaatggtggtgcgccggatacgacggcgctagatgaactaggtttatcgaaatatctagaatcgaatggtataaaagtttcgggtctactagtactagattattcgaaagattataatcattggttagcgacgaaatcgttaggtcaatggttacaagaagaaaaagtaccggcgatatatggtgtagatacgcgaatgttaacgaaaataatacgtgataaaggtacgatgttaggtaaaatagaatttgaaggtcaaccggtagattttgtagatccgaataaacaaaatctaatagcggaagtatcgacgaaagatgttaaagtatatggtaaaggtaatccgacgaaagttgtagcggttgattgtggtataaaaaataatgttatacgtttactagtaaaacgaggtgcggaagtacatttagttccgtggaatcatgattttacgaaaatggaatatgatggtatactaatagcgggtggtccgggtaatccggcgctagcggaaccgctaatacaaaatgttcgaaaaatattagaatcggatcgaaaagaaccgctatttggtatatcgacgggtaatttaataacgggtttagcggcgggtgcgaaaacgtataaaatgtcgatggcgaatcgtggtcaaaatcaaccggtactaaatataacgaataaacaagcgtttataacggcgcaaaatcatggttatgcgttagataatacgttaccggcgggttggaaaccgttatttgttaatgtaaatgatcaaacgaatgaaggtataatgcatgaatcgaaaccgttttttgcggtacaatttcatccggaagtaacgccgggtccgatagatacggaatatctatttgattcgtttttttcgttaataaaaaaaggtaaagcgacgacgataacgtcggtattaccgaaaccggcgttagtagcgtcgcgagttgaagtatcgaaagttttaatattaggttcgggtggtttatcgataggtcaagcgggtgaatttgattattcgggttcgcaagcggtaaaagcgatgaaagaagaaaatgtaaaaacggtattaatgaatccgaatatagcgtcggttcaaacgaatgaagttggtctaaaacaagcggatacggtatattttctaccgataacgccgcaatttgttacggaagtaataaaagcggaacaaccggatggtctaatactaggtatgggtggtcaaacggcgttaaattgtggtgtagaattatttaaacgtggtgtattaaaagaatatggtgtaaaagttttaggtacgtcggtagaatcgataatggcgacggaagatcgacaattattttcggataaattaaatgaaataaatgaaaaaatagcgccgtcgtttgcggttgaatcgatagaagatgcgctaaaagcggcggatacgataggttatccggttatgatacgatcggcgtatgcgttaggtggtctaggttcgggtatatgtccgaatcgtgaaacgctaatggatttatcgacgaaagcgtttgcgatgacgaatcaaatactagttgaaaaatcggtaacgggttggaaagaaatagaatatgaagttgttcgtgatgcggatgataattgtgtaacggtatgtaatatggaaaatgtagatgcgatgggtgttcatacgggtgattcggtagtagtagcgccggcgcaaacgctatcgaatgcggaatttcaaatgttacgacgaacgtcgataaatgtagttcgacatttaggtatagtaggtgaatgtaatatacaatttgcgctacatccgacgtcgatggaatattgtataatagaagttaatgcgcgtctatcgcgatcgtcggcgttagcgtcgaaagcgacgggttatccgctagcgtttatagcggcgaaaatagcgctaggtataccgttaccggaaataaaaaatgtagtatcgggtaaaacgtcggcgtgttttgaaccgtcgctagattatatggtaacgaaaataccgcgttgggatttagatcgttttcatggtacgtcgtcgcgtataggttcgtcgatgaaatcggttggtgaagtaatggcgataggtcgaacgtttgaagaatcgtttcaaaaagcgctacgaatgtgtcatccgtcgatagaaggttttacgccgcgtttaccgatgaataaagaatggccgtcgaatttagatctacgtaaagaattatcggaaccgtcgtcgacgcgaatatatgcgatagcgaaagcgatagatgataatatgtcgttagatgaaatagaaaaattaacgtatatagataaatggtttttatataaaatgcgtgatatactaaatatggaaaaaacgctaaaaggtttaaattcggaatcgatgacggaagaaacgctaaaacgtgcgaaagaaataggtttttcggataaacaaatatcgaaatgtctaggtttaacggaagcgcaaacgcgagaactacgtttaaaaaaaaatatacatccgtgggtaaaacaaatagatacgttagcggcggaatatccgtcggttacgaattatttatatgtaacgtataatggtcaagaacatgatgtaaattttgatgatcatggtatgatggttttaggttgtggtccgtatcatataggttcgtcggttgaatttgattggtgtgcggtatcgtcgatacgtacgttacgtcaattaggtaaaaaaacggttgtagtaaattgtaatccggaaacggtatcgacggattttgatgaatgtgataaactatattttgaagaactatcgctagaacgaatactagatatatatcatcaagaagcgtgtggtggttgtataatatcggtaggtggtcaaataccgaataatttagcggtaccgttatataaaaatggtgtaaaaataatgggtacgtcgccgttacaaatagatcgagcggaagatcgttcgatattttcggcggtactagatgaactaaaagtagcgcaagcgccgtggaaagcggtaaatacgctaaatgaagcgttagaatttgcgaaatcggttgattatccgtgtttactacgtccgtcgtatgttttatcgggttcggcgatgaatgtagtattttcggaagatgaaatgaaaaaatttttagaagaagcgacgcgagtatcgcaagaacatccggtagttttaacgaaatttgttgaaggtgcgcgagaagtagaaatggatgcggttggtaaagatggtcgtgtaatatcgcatgcgatatcggaacatgttgaagatgcgggtgtacattcgggtgatgcgacgctaatgctaccgacgcaaacgatatcgcaaggtgcgatagaaaaagtaaaagatgcgacgcgaaaaatagcgaaagcgtttgcgatatcgggtccgtttaatgtacaatttctagtaaaaggtaatgatgttctagtaatagaatgtaatctacgtgcgtcgcgttcgtttccgtttgtatcgaaaacgttaggtgttgattttatagatgtagcgacgaaagttatgataggtgaaaatgtagatgaaaaacatttaccgacgttagatcatccgataataccggcggattatgtagcgataaaagcgccgatgttttcgtggccgcgattacgtgatgcggatccgatattacgatgtgaaatggcgtcgacgggtgaagtagcgtgttttggtgaaggtatacatacggcgtttctaaaagcgatgttatcgacgggttttaaaataccgcaaaaaggtatattaataggtatacaacaatcgtttcgtccgcgttttttaggtgtagcggaacaattacataatgaaggttttaaattatttgcgacggaagcgacgtcggattggttaaatgcgaataatgtaccggcgacgccggttgcgtggccgtcgcaagaaggtcaaaatccgtcgctatcgtcgatacgtaaactaatacgagatggttcgatagatttagtaataaatttaccgaataataatacgaaatttgtacatgataattatgtaatacgtcgaacggcggttgattcgggtataccgttactaacgaattttcaagtaacgaaactatttgcggaagcggttcaaaaatcgcgtaaagtagattcgaaatcgctatttcattatcgtcaatattcggcgggtaaagcggcg

SEQ ID NO: 8106 - DNA, 4500 bp, synthetic construct
  misc_feature 1..4500: note = source = /note="Description of Artificial Sequence: Synthetic coding sequence"
  source 1..4500: mol_type = other DNA
atgacccgaatcctgacagctttcaaagtcgttcgaacattaaagaccggattcggtttcactaacgtaacagcgcatcagaagtggaaattctctcgacctggaattcggttgctctctgttaaagcccagaccgcccatattgtgctggaagatggcaccaaaatgaagggatattccttcggccacccttcctctgtggcaggcgaggtggtctttaacaccggattgggagggtatcccgaggctatcactgaccctgcttacaaggggcagatcctgaccatggctaaccccatcataggcaatggcggcgctcccgatacaaccgcgttagacgagcttggtctcagtaaatatctagaatctaatgggattaaggtgtccgggcttttggtcctggactactcgaaagattacaatcattggcttgcaaccaagtccctggggcaatggctacaagaagagaaggttcccgctatctacggagttgatacaagaatgctcaccaagattatccgagacaagggtaccatgcttgggaagatcgagttcgagggccagccggtcgactttgtggatccgaataagcagaacctcatcgccgaggtgtcgaccaaggatgttaaagtgtacggtaaaggcaacccaactaaagtcgtagccgtggattgtgggatcaaaaacaacgtcattaggcttctcgtcaagaggggggccgaggtgcatctcgtgccttggaaccacgattttacaaagatggagtatgacggtatccttatcgcgggcggccccggcaaccccgcgcttgccgagcccctcatccagaatgtgcggaaaatccttgagtctgatagaaaggagccactgttcggcatctccactgggaatttgataaccggcctagctgccggcgctaagacctataagatgagcatggccaacagagggcagaatcagcccgtgctgaacattaccaataaacaggcgttcattacagcccaaaaccacggatacgccctcgataatacgctgccagcaggatggaagccacttttcgtgaacgtgaatgatcagaccaatgagggaataatgcatgaatctaagcctttcttcgccgtacagttccaccctgaggtgacgcctgggcccatcgacaccgaatatctgtttgactcctttttcagcctgataaaaaagggtaaggcgacaacgataacctctgttctgcctaagcccgcactcgttgcgagccgcgtggaggttagcaaagtgctgatcctggggtccggggggctgtcaattggacaagcaggagagtttgattacagcggctcacaagctgtcaaggcaatgaaggaggaaaacgtgaaaaccgtgctgatgaaccctaacatcgctagcgtgcagaccaatgaggtcggtcttaagcaggccgatactgtgtacttccttcccataacccctcagtttgtaacagaggtgattaaggctgaacagcctgatggcctgattttagggatgggtggacagaccgccctgaactgtggagtggagctgttcaagcgaggggtcttaaaagagtatggcgtcaaggtgctggggacctccgtggagagcattatggcaacggaggacaggcagcttttttccgataagctcaacgaaataaatgagaaaatcgccccaagcttcgctgtagagtccattgaggacgctttaaaagcagccgacaccattgggtatccagtcatgattcgatcagcgtacgctctcggcggacttggctcaggaatatgccccaacagggagacgctgatggacctcagcacgaaggcctttgcgatgaccaatcagatcctcgtcgagaagtccgtaaccggctggaaggagatagaatacgaggtggtgcgcgacgccgatgataattgtgttaccgtgtgtaatatggagaatgtagatgccatgggagtgcacacaggggactctgtggtcgtcgctccggctcagacactgagcaacgccgaattccagatgctgcgtagaactagcatcaatgtcgtacgccatctcgggatagtcggggagtgcaatatccagtttgccctgcaccctacatccatggaatactgtatcatcgaggttaacgcaagactgtcccgcagttcagcactggcgtccaaggccaccggctaccctttggctttcatcgccgccaagatcgccctcgggatcccgttacctgagattaaaaatgttgtgtcaggtaaaactagtgcctgcttcgagcccagcctggattatatggtgacaaagatccctaggtgggatcttgatcggttccatggcaccagttccaggatcggtagctccatgaagtcggtaggcgaggtgatggcaatcgggagaacttttgaagagagcttccaaaaggccctgcggatgtgccacccatctatagagggcttcaccccgagactgccgatgaacaaagaatggccatctaacctggatcttcgaaaggaattgtccgaaccttctagcacacgaatctacgccatagcaaaagccattgatgacaatatgagcctggacgaaatagagaagttgacctatatcgataagtggttcctgtacaagatgcgagatatactcaacatggaaaagacacttaaaggtctgaatagtgagagcatgaccgaagaaacgcttaaacgcgccaaagagatcggatttagcgataagcagattagtaaatgtctgggactgacagaagcacagacaagggagctcaggctgaagaaaaatatccacccctgggttaagcagatcgatactctggcggcagagtacccttcagtaaccaactacctgtacgtcacttacaacggacaggagcacgacgtgaattttgacgatcacggtatgatggtgctcgggtgtgggccctaccacattggcagctctgttgagttcgattggtgtgccgtgtcttcaatacgcacactgagacagctgggcaagaagacagtggttgtaaattgcaatcccgagaccgtgtctactgactttgatgaatgcgataagttatacttcgaagagttatcccttgagagaatcctcgatatttaccatcaggaggcttgcggcggttgcatcatctcagtgggcggccagattccaaacaacctggccgtacccctgtataaaaatggcgtaaagattatgggcacttcccctttgcagattgaccgcgctgaggacagatcgattttctctgccgtgctggatgagctcaaagtggcacaagcaccctggaaagcggtcaacaccttgaatgaggccctggagttcgcgaagtctgttgactatccttgcctcctccgcccttcttacgtgctgagcggctctgcgatgaacgtggtgttcagtgaggacgagatgaagaagttcctcgaagaagcaacccgggtgagtcaggaacacccggtggtgttaaccaagtttgtggaaggggcacgggaggtggaaatggacgctgtgggaaaagatggaagggtgatctctcatgctattagtgaacatgtggaagatgcaggggtccattccggggacgctactctaatgctgcctacacagaccatctcgcagggcgccatcgagaaggtgaaagacgcgacccgcaaaatcgcaaaggctttcgcaatcagcggccctttcaatgtacagttcctggtcaaaggcaatgatgttctggtgatcgagtgtaaccttcgggcaagcaggtcttttcccttcgtaagtaagacgttgggggtagatttcatcgatgtggcaacgaaggtcatgatcggcgagaacgtggatgaaaagcacctgcctacgcttgaccatcctattattccggcagactacgtcgccattaaagcccctatgttcagctggccgcggttaagagacgctgatcctatcctgcgatgtgagatggcttcgaccggagaggtagcatgtttcggagagggtatacacaccgcatttctgaaggcaatgctttccaccgggtttaagatacctcaaaaaggcatactcatcgggatccagcagagttttcggccgaggttcctcggtgtagctgagcagctgcataatgaaggatttaagctgttcgcaactgaagcaaccagcgattggttgaatgctaacaatgtgccggcaacccctgtcgcatggccctcccaggaggggcagaaccccagtctatccagtatcagaaaactcattagggacggaagtatcgatcttgtgatcaatctgcctaataataacacaaagtttgtccacgacaactatgtgattcgaaggaccgcagtggactctggcatcccactgctgactaattttcaggtgactaagttattcgccgaggccgtgcagaagagccggaaggtggacagcaaaagcctctttcattatagacagtattccgccggaaaagcagct

SEQ ID NO: 8107 - DNA, 4500 bp, synthetic construct
  misc_feature 1..4500: note = source = /note="Description of Artificial Sequence: Synthetic coding sequence"
  source 1..4500: mol_type = other DNA
atgacgagaatactgacagcatttaaagtagtacgcacattgaaaacgggtttcgggtttacaaacgtaacggcacatcaaaaatggaaattttctcgaccggggattcgtcttttatccgttaaagcccagacagctcatattgtactggaggatgggacgaaaatgaagggatactcttttggccatccatcttctgtcgctggtgaagtagtgtttaatacgggcctgggcgggtacccggaagcaattacggacccggcatacaaaggacaaatactgacaatggccaacccaattatcggaaatgggggggccccggacacaactgccctcgacgagctgggcctgtcaaaatacttagaatctaacggcatcaaggtttctggtttattagtcttagattattctaaggattataaccactggcttgcaaccaaaagcctgggacagtggttgcaagaagaaaaggtccctgcaatttacggggttgacaccaggatgctgaccaaaataattcgggacaaagggacaatgctgggtaaaatcgaatttgaaggccaaccagtcgatttcgtcgacccgaataagcaaaatttaattgctgaagtatcaaccaaggacgtcaaagtctacggaaaaggcaatcccacaaaagtcgttgccgtggattgtggaataaagaacaatgttattcgccttctggtcaagagaggcgctgaagtgcacctggtgccgtggaatcatgattttactaagatggagtatgatgggattcttatcgcagggggacctggaaatccggcattagcggagcctttgatacagaatgtacgcaagatcttggaatcagatcgcaaggagccacttttcggcatatctacggggaatctcattacaggtcttgccgcgggcgcaaaaacctataaaatgtcaatggcaaatagaggccagaatcaacctgttttgaatataacgaacaagcaagcctttattacagcgcagaatcatggatatgccttggacaatacgctgcccgcgggctggaagccccttttcgtgaacgtcaacgatcagacgaatgaaggcatcatgcatgagtctaaaccgttttttgcagttcaatttcatccagaggtcacgccgggcccgatcgataccgaatacctgtttgactcctttttcagcttgatcaaaaaaggcaaagctacgaccatcacgtcagtcttgcctaaaccagccctggtggcctctcgcgtcgaagtatccaaagttctcatcttaggttccggcggactttccattggccaagctggtgaatttgattattctggctcacaagcagtaaaggctatgaaggaggagaatgttaaaacagtgctcatgaacccgaacattgcaagtgttcagacaaatgaggttggattaaaacaggccgacacggtctattttttgccgattacccctcagtttgttacggaagtcattaaagcagaacagccggacggccttattttaggcatgggtggacagactgctttaaactgtggagtcgagctttttaaacggggcgtattaaaagaatatggcgtgaaagtattaggaacgagcgtggaaagcatcatggctacagaagaccgtcagctgttttcagataaactaaacgaaattaatgaaaaaattgcgccatcatttgctgtggaaagcatagaagatgcgttgaaagctgccgatacaattggctatccggtgatgatccgtagcgcttacgcccttggagggctgggtagcggcatttgtcctaaccgcgagacgctgatggacctttcaactaaggcatttgcaatgactaaccaaatcttagtagaaaaaagcgtgacaggttggaaagaaatcgaatacgaagtggtaagagatgccgatgataattgcgtaacagtttgtaacatggaaaatgtggatgcaatgggagtccacactggagattctgtggtcgttgctcctgcgcagaccctgagcaatgctgaatttcaaatgctgcgtagaacatcgatcaacgtcgtgcggcatctgggcattgttggcgagtgtaatatccaattcgccttacatccgacgtctatggaatactgcattattgaagttaacgcgcggttatccagatcttctgcacttgcgtctaaagctacaggttatccgctggcgtttattgcagcaaaaattgcgctgggtattccgctgccggaaattaagaatgtcgttagcgggaagacatctgcttgctttgaaccaagccttgattatatggttacaaaaataccccgttgggaccttgatcgcttccacggaacgtcaagcagaataggttcgagcatgaaatcagttggcgaagtgatggcgattggccgtacatttgaagaatcatttcagaaagcgttgcgaatgtgtcatccgagcattgagggatttacaccgcgattgccgatgaataaagagtggccttcaaatttagatcttagaaaggaactgtcagaaccaagtagcacacgaatttatgcgattgctaaggctattgatgataacatgtcattggatgaaatcgagaagttgacgtacattgataaatggtttctgtacaaaatgagagacattctcaatatggaaaaaacattgaaaggactgaattctgaatctatgacagaagagaccttgaaacgtgcaaaagaaattggcttttcagataagcaaatttccaagtgtcttggtttgactgaagcccaaacgcgcgagctacgcttgaaaaagaacatccatccttgggtgaagcagattgatacattggctgctgaatatccttccgtaacaaactatctttatgttacatataacggacaggagcatgatgttaactttgatgaccatggcatgatggttcttggatgtggcccttaccatattggatctagtgttgaattcgattggtgcgctgtatcctcaatccgtacattacgccaactgggtaaaaaaaccgttgtagttaactgcaatccggaaacggtatcgactgattttgacgagtgtgacaaactttattttgaagaattaagtctagaacgtattttagatatttaccatcaggaagcgtgtggaggctgtataatttcggttggcggtcaaattccaaacaatctggcagtcccgctttataagaatggagtgaaaataatgggaacttcaccgcttcagatcgatagagcagaggacagatcaattttttcagctgtcctggacgaacttaaggtagcgcaagcaccatggaaagcagttaatactttgaatgaagcacttgaatttgcaaaatctgttgattatccgtgcttactccgtccgtcatatgtactttcaggttctgctatgaatgtcgtgttctcagaagatgagatgaagaagtttttggaagaagcgacgcgcgtgtcccaggaacatcctgtcgtgttaaccaagttcgtcgagggtgcgcgtgaggtcgaaatggatgctgttggaaaagatggccgcgttatttctcacgctatcagtgagcacgttgaagatgctggcgtgcattcgggcgatgccacactgatgctgcctactcaaactatctctcagggggccattgagaaagttaaggatgctactcgcaaaatcgccaaagcttttgctatctcaggtccattcaacgtgcaatttctggtaaaaggtaatgatgtcctggttatcgaatgtaatctaagagcaagtaggtcatttccatttgtttcaaagacattgggtgttgatttcattgatgttgcgacaaaagtgatgattggcgagaacgttgacgaaaaacatcttccaactttggatcacccgataataccagcggattatgttgccattaaagcaccgatgttttcatggccacggctgagagacgctgatccaatcttaagatgtgaaatggcgtcaacgggcgaagttgcgtgttttggcgagggcatccacacagcgttccttaaagcgatgttgtcaaccgggtttaagattccgcaaaaaggtattctgattgggattcaacaatcctttcggccgcggtttctgggagtcgccgaacaacttcataatgaaggcttcaagctttttgctacggaagctacgagtgattggctgaacgcaaataatgtcccggcgacacctgtagcatggccttcacaggaaggacagaatccgtctctttcaagtatcagaaaactcatccgagacggttctatagatttagtgattaatctgccgaacaacaatacaaaatttgtgcatgataactatgttattcggcgaacagcggtcgactcaggtattccgctactcacaaattttcaggtgacaaaattgtttgcagaggcggtccaaaaatcacgtaaggtggatagcaaatcattgtttcattacagacagtatagtgctggcaaggcagcg

SEQ ID NO: 8108 - DNA, 4500 bp, synthetic construct
  misc_feature 1..4500: note = source = /note="Description of Artificial Sequence: Synthetic coding sequence"
  source 1..4500: mol_type = other DNA
atgacgaggatactaactgcattcaaagtagtgagaaccctcaagacaggctttggctttactaacgtgaccgctcaccagaagtggaagttcagccgacctggcatcaggctcttgagtgtcaaagctcagaccgcgcacatagtgctggaggatgggacgaaaatgaagggctatagtttcggccacccgagctccgtggctggcgaagtggtgttcaacaccgggctcggtggatatcccgaagcaatcacagatcccgcttacaaagggcagatcctaactatggcgaatcccattatcggcaacggcggcgcccctgataccactgctcttgatgagctgggcctttccaagtacctggagagcaatgggatcaaagtctccggtctattggtgctggactattccaaggattataaccactggttggccacgaaaagcttgggccagtggctccaggaggaaaaggtaccggcaatctacggagtggatacaaggatgcttaccaaaatcatccgcgataagggcaccatgctaggtaagattgagttcgaagggcagcccgtggatttcgtggatccgaacaaacagaacctaattgcagaagtaagtaccaaagatgtgaaggtctatggtaaaggcaatcctacaaaggtcgttgcagtggactgtggcataaagaacaacgtgattcggctgttggtcaagagaggagcagaagttcacctagtaccctggaatcatgattttaccaaaatggaatacgacggcatcctaatcgcaggcggacccgggaatcctgctttggcagagccgctcatccagaacgtcaggaagattctggagtctgatcgaaaggaacccttgttcgggatatccacagggaaccttatcactggactagccgccggagccaagacgtataaaatgagtatggctaataggggacagaatcagccagtcctgaatatcacaaacaaacaggcctttatcactgcacagaaccatggatatgcgcttgataacactttgccagccggctggaaaccactgttcgttaatgtcaatgatcagactaatgaaggtattatgcacgagtctaagcctttcttcgccgtgcagtttcatcccgaggtcacccctggccctatcgatacggaatacctgttcgatagctttttctccctcattaagaaaggcaaagctaccaccattacctctgtgctacctaagccggccctagtcgcatccagggttgaggtgagtaaggtgttaatcttgggctccggggggctgagcattggacaggccggtgaatttgattattctggttcccaggcagtgaaggctatgaaagaagagaacgtgaagaccgtcctaatgaatcctaacatcgctagcgtccagaccaatgaagtcggtctgaagcaggctgatacagtctacttcctgcctattacacctcaatttgtgacggaggtaataaaagccgaacaaccggacggtctgatcctgggaatgggcggacagactgccctgaactgcggggtggagctgttcaagagaggagtgctgaaggaatacggagtcaaagtgctggggaccagtgtggaaagtatcatggcgaccgaggacaggcagctctttagtgacaaattgaacgagataaacgagaaaattgccccttccttcgcagtggagtcaattgaagacgccttgaaggctgctgacaccatcggctatcctgtgatgataagatcggcctatgctctagggggcctcggaagtgggatttgtcctaacagggaaacactaatggacctgtctacgaaggctttcgcaatgactaaccagatactggtggaaaagagcgtgacagggtggaaggagattgaatacgaggtggttagagacgccgacgataactgcgtcactgtctgcaacatggagaatgtggacgcgatgggcgtgcatactggagactcagtggtggtggctcccgcccagacactgtccaacgccgagtttcaaatgttgagaagaacatcaatcaatgtggtcagacacttagggatagtgggcgagtgtaacatccagttcgcactccaccccacatccatggagtactgtatcatcgaggttaatgctagactatcgcggtcaagcgcccttgcctcaaaagccacaggctacccactggccttcatagcagctaagatcgcccttggaatacccctgccagaaatcaaaaacgttgtctccgggaagacatcagcgtgtttcgagccatctctggactatatggtgaccaagatcccccggtgggatttggaccggttccacggcacaagttctcggattggctcctcaatgaagagtgtgggagaggttatggcaattgggcgcacattcgaggagagctttcaaaaagccctgagaatgtgccatcccagtatcgagggattcaccccgcgacttccaatgaacaaggaatggccatccaatctcgatctgcgcaaggaactctccgaacctagctctactaggatttatgcgatcgctaaagccattgatgataacatgtctctggacgaaatcgaaaagctcacctacatcgacaagtggttcttatataagatgcgcgacatcctgaacatggaaaaaacgttgaagggccttaattccgaatcaatgacggaggaaactctgaagagggctaaggagataggcttctccgacaagcaaatctcaaaatgtcttggcttaaccgaggcacagacaagggagttgcgacttaagaaaaatattcacccatgggtgaagcagattgataccctggccgcagagtaccccagtgttacgaactacctctatgtcacctacaatggtcaagaacacgatgtcaatttcgacgatcatggaatgatggtgctcggatgtgggccatatcacattggtagcagcgtcgaatttgactggtgcgctgttagttccattaggacactgcgacagctcgggaagaaaaccgtcgtggttaactgtaaccccgagacggtatccaccgattttgatgaatgcgacaagctgtatttcgaggagctgagtctggagcggatcttagacatctatcatcaggaagcctgtggcgggtgcatcatctcagtgggagggcagattccgaacaacttggccgtgccactttacaagaacggcgtgaaaatcatggggacatcaccgcttcagatcgacagggcagaggatcgctcaatcttctccgcagtccttgacgaactcaaggtggcccaggccccctggaaagccgttaatactctgaatgaggcactcgagtttgccaagtccgtcgattacccatgtttactgcgcccatcttatgtgctttctggcagcgctatgaacgtggtcttttctgaggatgagatgaagaaattcctggaggaggcgaccagagtgtcgcaagagcatccagttgtgctgacaaaatttgtggaaggggcacgggaggtggagatggatgcagtggggaaggatggcagagttatcagtcatgcaatctccgagcacgtagaggacgccggtgtgcactccggcgatgctacactgatgctgccgacacagacaatttctcagggggcaatcgagaaagtgaaggacgcaacccggaaaattgctaaggcctttgctatcagtggcccgtttaatgtgcagttcctggtcaaagggaacgacgtgctggtcatcgagtgtaatctgcgtgctagccgctcctttccttttgtctccaagaccctgggggtcgattttattgatgtagctactaaggtaatgataggcgaaaatgtcgacgagaagcatctccccaccttagaccacccgattatcccagccgactatgtggccatcaaggccccaatgtttagctggcccagactgagagatgccgacccgattctacgctgcgagatggcgtccaccggggaggtggcatgcttcggcgagggcattcacactgcgttcctaaaagccatgttaagcacagggtttaagatccctcagaagggcattctgatcggaatccaacagtccttcagaccccggttcctcggggtcgcggaacagttgcacaatgaagggtttaagcttttcgcaacggaagccacgtccgactggctaaatgccaacaatgtacctgccacccccgtggcttggccttcgcaagagggacagaaccccagccttagcagcatccggaaactaattagggacgggagcattgatcttgtgatcaacctccccaacaacaacacgaagttcgtgcacgacaactacgtgatccggcgtacagccgttgactctggcattcccctcctgacaaatttccaggtcaccaagttgttcgccgaggctgtgcagaagagtagaaaagtggacagtaagtccctttttcattaccgccagtactccgccgggaaggccgct

SEQ ID NO: 8109 - DNA, 4500 bp, synthetic construct
  misc_feature 1..4500: note = source = /note="Description of Artificial Sequence: Synthetic coding sequence"
  source 1..4500: mol_type = other DNA
atgactaggatcctcacagctttcaaggtcgtgcggacgctgaaaactgggttcgggttcacaaatgtgacagcccatcagaagtggaagtttagcaggcctggcatacggttgctctctgtaaaggcccagactgcacatattgtcttagaggacggtacaaaaatgaaaggatattccttcggtcaccctagtagcgtagctggcgaggttgtgttcaacactggactgggcggttatcctgaggctatcactgatccagcatacaagggccagatcttaacaatggcaaatcctattattggcaacgggggcgcccccgatactaccgccctggacgagctgggtctgtctaagtatttggagtcaaatggaatcaaagtgagcggcctcctcgtattagactacagcaaagattataatcattggctggccactaagagtcttgggcagtggctgcaggaggaaaaggttcctgcaatctacggtgtggatacacggatgctgacaaaaatcattagggataaaggcactatgctagggaaaatagagtttgagggccagccagtagattttgtggatcccaataaacaaaatcttatagccgaagtttctacaaaggacgtgaaagtttatggtaagggtaacccaactaaagtcgtagccgttgactgtggaattaagaacaacgtgatcagacttctggtgaaacgtggggccgaggtgcacctcgttccctggaaccatgattttacaaagatggagtatgacgggatcctgatcgccggcggaccaggcaatcccgctctcgctgagcctctgatacagaatgtacggaagatattggagtccgatagaaaggagccactgttcggtattagtaccggaaatctgatcacagggcttgcggctggtgcaaaaacatataagatgtctatggccaatagagggcagaaccagccagtgctgaatatcacaaataagcaggctttcattactgcccagaaccacgggtacgctctcgacaacaccctgccagcgggatggaagcccttgttcgtaaatgtgaacgatcaaaccaacgagggtatcatgcacgaaagtaaacctttcttcgcagtacagtttcatccagaagttacacccggtccgattgacacggagtacttgttcgacagttttttttctctaatcaaaaagggaaaagccaccacaataacctctgtgttgcccaagcctgccctagtcgcaagtagggtagaagtgtcaaaggttttgattctcggcagcggaggcttatccatcggccaggctggggagttcgactactcaggatctcaggccgtcaaggcgatgaaagaagaaaacgtcaagactgtgctgatgaaccccaatatagctagcgtgcagaccaacgaagtcggcctgaaacaggccgacaccgtgtatttcctgcctattactcctcagttcgtaacagaagtgataaaagccgagcagcccgacggcctgatactgggcatgggcggacaaactgcccttaactgcggggtggagcttttcaaaagaggagtgctcaaggagtatggagtcaaagtcctaggtacctcagtcgaatctataatggccaccgaagatcgacagctcttctcagataaactcaatgagatcaatgagaaaatcgccccaagcttcgccgtggaatccatagaggatgcactgaaggcggcggacaccattgggtacccggtaatgatcagatccgcttatgctctgggcggacttgggtcaggtatttgtccgaatcgagagactctgatggacctttcaacaaaggccttcgccatgacaaaccaaattctcgttgaaaagtctgtgactgggtggaaagagatcgagtacgaagtggtgagagatgccgacgataactgtgtgaccgtttgcaacatggagaacgtggacgcgatgggcgtccataccggtgatagcgtagtggtcgctcccgcgcaaactctgtcaaatgccgagtttcagatgctccgacgcactagtataaacgtcgtaagacacctcgggatcgttggggaatgcaatatccagtttgcccttcacccaacctcgatggagtattgtatcattgaggtcaacgctagactgtctcgctcgtcagccttagctagcaaggcaacaggttatccccttgcatttatcgcagctaaaatcgcgctcggtatccctctgccggagataaagaatgtggtttcaggcaaaacgtccgcctgctttgagccgagcctggactacatggtcacgaagataccaagatgggatctggatcgcttccatggaaccagttcccgcatcggtagcagcatgaagtcggtgggcgaggtgatggcaatcgggcggacgtttgaggagtcatttcagaaagcattgagaatgtgccacccaagcatcgagggattcactccccgcctgcccatgaataaggaatggcccagcaatctggatcttagaaaagaactaagcgagccctccagcacccgtatctacgcaatcgctaaggccatcgatgataacatgtcgttagacgaaattgagaaactgacttatattgataagtggtttctgtacaaaatgcgggatatcctcaatatggagaaaactcttaagggcttgaatagtgaatcaatgacagaggagactttgaagcgagccaaagagataggattttcggataaacagataagcaagtgcttgggactgaccgaggcacagacaagggaactgcgacttaaaaagaacattcacccatgggtgaaacagatcgataccctggctgctgaatacccaagcgtgacaaattacctatacgtcacatacaatggccaggagcacgacgttaacttcgatgaccacggaatgatggtgttgggctgtggtccctatcacatcggctcctccgtggagttcgactggtgcgccgtcagctccatcagaacactgcgacagctagggaagaagacagtggtggtaaactgcaaccctgagacagttagtacagatttcgacgagtgcgacaaattgtactttgaagagctgagtcttgagcgaatcctggatatctaccatcaagaggcgtgcggagggtgcatcatctcagtcggcgggcagattcctaacaacctggctgtccccctatacaagaatggtgtgaagattatgggaacctcaccgttacagattgatcgagctgaagatcgaagcatcttcagtgctgttctggacgaactgaaggttgctcaagctccttggaaggcggtaaatactctgaacgaggctctagagttcgccaagtctgtggactacccatgcctgctgcgccctagctatgtactatccggttctgccatgaatgtcgtgttctccgaggacgagatgaaaaagttcctggaggaggcaacccgggtatcccaggaacacccagtggtcctgaccaaattcgtggagggcgcgagagaagtggaaatggacgccgtgggtaaagatggtcgtgtgatttcccacgcaatttccgagcatgtcgaagacgccggcgtacactctggggatgcaacattgatgctgccaactcagaccattagtcagggcgcaattgagaaagtgaaggatgccaccagaaagatagcaaaagcctttgccatctcagggccattcaacgtgcagtttttggtcaaaggcaatgatgttctggttatcgagtgtaatctcagggcctccaggagcttcccattcgtgtctaagacactcggtgtggatttcatagatgtggcaaccaaggtgatgatcggtgaaaatgtggatgagaagcatctccctaccttagatcaccctatcatacctgctgattacgtggcaattaaagcacccatgtttagctggcctaggctccgggatgcagatccaattttaaggtgcgaaatggcctctacaggcgaggtggcctgcttcggagagggaatacacaccgccttcctgaaagcgatgctcagtacaggcttcaaaataccccagaaaggaattctgattgggatccaacagtctttcaggcctcggttcctaggggttgcggaacagctgcataacgagggattcaagctgttcgcgactgaagccaccagcgattggctgaacgccaataacgtgcctgctactcctgttgcttggccttcgcaggaggggcagaatcctagcctcagcagtatccgcaagctgatccgggacggctccatagacttagtgatcaacttgccaaacaataacaccaagttcgtgcacgataattacgtgatccggcggaccgccgttgactctggcattcctttgctgactaattttcaggtaacaaaactgttcgcagaggccgtgcagaagagtaggaaagtcgattcaaagtccctgtttcattatcggcagtactccgccggaaaggccgct

SEQ ID NO: 8110 - DNA, 4500 bp, synthetic construct
  misc_feature 1..4500: note = source = /note="Description of Artificial Sequence: Synthetic coding sequence"
  source 1..4500: mol_type = other DNA
atgacacggatcctcaccgctttcaaggtggtccgcacactgaaaacaggctttggcttcaccaacgtgaccgcacaccagaagtggaagttctccagacccgggatcagactcctcagcgtgaaggctcagacagcccacatcgtcctcgaagatgggacaaaaatgaaaggctattccttcggacacccatctagcgtggctggcgaagttgtgtttaacacaggactggggggctatcctgaagcaatcaccgacccggcgtataagggtcagatacttacgatggccaatcctatcataggtaatgggggtgcccctgacactacagccctggacgagctaggcctgagcaaatacctggagtcaaacggtatcaaggtgagcggacttcttgtgctggactattcaaaagattataaccattggctggcaacaaagagtctggggcaatggctgcaggaggaaaaagtgccagctatctacggcgtcgatacccggatgctaactaaaattatacgggataagggcacaatgctcggaaaaattgagtttgagggtcagccggtagattttgtggaccccaataagcagaacctgattgccgaagtttcaacaaaggatgtcaaagtttatggaaagggtaaccccactaaggtcgttgccgttgattgcggcattaagaataacgtcatccggctgctggtgaaaaggggggccgaggtgcacctggtgccatggaatcatgatttcactaagatggaatatgatggcattcttattgcgggcggccccggtaaccccgcactggcggagcccctgatccagaatgtgcgaaaaatcctggaaagcgacagaaaagaaccactctttggaatatctactggcaatctgattaccggtctggccgccggtgcaaaaacgtataaaatgtccatggcaaaccgcggacaaaatcagcccgttctgaacataactaacaagcaggcgtttattacggcacagaaccatggctacgcgcttgacaacacgttgcctgccgggtggaaacccctgttcgttaacgtgaacgatcagactaacgagggaatcatgcacgaaagcaaaccttttttcgccgtccaattccatccagaagtgacacccgggcctatcgatacagagtatctgttcgattctttcttttccctgatcaaaaaaggcaaggctactacaatcaccagcgtcttgcccaagccagcactggtcgcatcacgcgttgaggtttctaaagtgctgatcctgggaagtgggggcttatcaattgggcaggctggggaatttgactattcaggttcccaggctgtcaaggccatgaaggaagagaacgtgaagacggtgttgatgaatccgaacatcgcgtcagtccagaccaacgaggtcggtctaaagcaggccgatactgtatactttctacccattaccccccaattcgtcaccgaggtcatcaaagccgagcaacccgacggactcatactggggatgggaggccagactgccttgaactgtggcgtggagctattcaaacgaggggtgctgaaagagtacggtgttaaggttctcggtacaagcgtggagtctattatggcaaccgaggacaggcagctgttcagtgataaattgaatgaaatcaatgagaagatcgccccctccttcgccgtggaaagtattgaggacgcccttaaagctgctgataccattggatacccggtgatgatacgaagtgcctacgccctgggggggctgggtagcggcatctgtcctaacagagagactttgatggacttgtccaccaaagcttttgcgatgacaaatcaaatccttgtcgagaaaagcgtcaccggatggaaggagattgagtatgaggtggttagagatgccgacgacaactgtgtcaccgtttgcaatatggaaaacgtggatgccatgggagtgcataccggggatagtgtcgttgtggcccctgcccagaccctttctaacgccgagtttcaaatgctgcggcgaacatccatcaacgtggtacgccatctcggtattgtaggtgagtgtaacatccagttcgcactgcacccaacctcgatggaatactgtattatcgaagttaacgcccgtcttagtaggtcctcagccctcgccagcaaggccacaggatacccactggcctttatagctgctaagatcgccttggggatcccgctgcctgagattaagaacgtggtgtcaggaaaaacctctgcctgcttcgagccctccttggattacatggtgaccaagattccccgatgggatctggataggttccacggaacctccagcagaattggctctagtatgaagagcgtgggtgaggtgatggccatcggacgcaccttcgaggagagcttccagaaggccttaagaatgtgtcacccctcaatagaaggcttcactccccgtctcccaatgaacaaggagtggccctccaatctcgatctgcgcaaggagctgagtgagcctagcagcacccgaatctacgccatcgccaaggctattgatgataacatgagtcttgacgaaattgaaaaacttacttacatcgacaagtggtttctctacaaaatgcgcgacattttgaacatggaaaaaacactcaaagggctaaatagcgagtccatgactgaagaaaccctgaagcgggccaaggagatcggcttttctgataagcagattagtaagtgtctggggctgactgaggcgcagacgcgcgagctaaggctgaaaaagaacatacatccctgggtgaaacagatcgacacattggccgcagagtacccgtctgtgacgaactatctgtatgtgacttataacggccaggagcatgatgtgaactttgacgatcatgggatgatggttctgggatgtggcccataccacatagggtcctctgtggagttcgactggtgtgctgttagttccattaggactctccgccaacttggaaagaaaaccgtcgtagtgaattgcaacccagagaccgtgagcaccgatttcgacgagtgcgacaagttgtactttgaagaacttagtctggaacgcatcctggatatctaccaccaggaagcgtgtggaggttgtataatatcggttgggggtcagatccctaataatctggccgttccattatacaaaaacggagtgaaaatcatggggacaagccctttacagatagaccgtgcagaggacagatcgattttctcggcagttctcgacgagttgaaggtagctcaggcaccctggaaggccgtcaacaccctgaatgaggctctagaatttgcgaagagtgtcgactatccctgcctgctcaggccctcttatgtgctgtctggcagcgccatgaacgtggtctttagtgaggacgagatgaagaagttcttggaggaagctactcgggttagccaggagcaccccgttgtgttgacaaagttcgtagagggcgccagggaggtagaaatggatgcggtaggaaaggacggacgcgtgatctcacacgctataagtgagcacgtggaggacgccggcgtccacagcggcgatgcgacactgatgctacccacacagacaatctcacagggggctatagaaaaagtaaaggacgccactcgcaaaatagctaaagcctttgccataagcggaccattcaatgtgcagtttctcgttaaagggaatgacgtcctggtaattgagtgtaatttaagggctagccgtagctttccctttgtttcaaagactctaggggttgactttattgacgtggcgacgaaggtcatgatcggggaaaacgtggacgaaaagcatttacccacgctggatcaccccataataccggctgactatgtggccatcaaggctcccatgtttagttggcccaggcttagagacgccgatccaattctgcggtgcgaaatggcatccactggtgaggttgcctgctttggagagggtattcataccgcctttctcaaagccatgctttcaaccgggtttaaaattccccagaaagggattttgatcgggatacagcagtcctttcgaccaaggttcttgggagtggccgagcaactacacaacgagggttttaaactgttcgccactgaggctacctccgattggctgaacgccaacaacgtgccggctacacctgtcgcttggccgagtcaggagggtcagaacccgagcctctcaagtattcgcaagttgattagagacgggagcatcgacctggtcattaacctgccaaataataatactaagtttgtgcatgacaattatgttatccgccgcaccgctgtggattctggtatacctctgctgactaacttccaagtaaccaagctgttcgccgaagctgtgcaaaaatcacgaaaagttgatagtaaatcgctgttccactaccgccagtactctgcggggaaggccgcc

SEQ ID NO: 8111 - DNA, 4500 bp, synthetic construct
  misc_feature 1..4500: note = source = /note="Description of Artificial Sequence: Synthetic coding sequence"
  source 1..4500: mol_type = other DNA
atgacccgcatcctgaccgcatttaaggtggtccggaccctgaaaaccgggtttggtttcacgaatgtaacagcacaccaaaagtggaagttttccaggccaggtattcggttgctgtcggttaaggcgcagaccgcacacatagtcctggaggatggtacaaaaatgaaaggctatagcttcggtcatccatctagcgtcgccggtgaagttgtttttaacactggcctgggtggttacccagaagccatcactgacccagcatacaagggccagattttgacgatggcaaatcctattatcgggaacggcggcgcgcctgatacaacggcgctggacgagctgggtctgtccaagtatttggagagcaatggcatcaaagtgagcggcctcttggttttggattatagcaaagactacaatcattggctggccacgaagagcctgggccaatggctgcaggaagaaaaggttcctgcgatttacggcgtcgatacacggatgctgactaagataatcagagacaagggcacgatgttaggtaaaatagagtttgagggccaaccggtcgatttcgtcgaccctaataagcagaacttgattgcggaggttagcaccaaagacgtcaaagtgtacggtaaaggtaatccaaccaaagtagttgcggtggactgtggcattaaaaataatgtgattcgcctgctggtaaagagaggcgctgaagttcacttggtcccttggaatcacgacttcaccaaaatggaatatgatggaattcttattgccggtggtccgggtaacccagctcttgccgagccactgattcagaacgtgcgcaaaattctggagtccgataggaaggaaccactgtttggtattagcaccggcaacctgattacgggcctcgcagccggagcgaagacctataagatgagcatggccaacagagggcagaatcaaccggtgctcaacatcaccaacaaacaggcctttatcaccgcgcaaaatcacggctacgcgctggacaacaccctcccggctggttggaaaccactgttcgtgaatgtaaacgatcaaaccaacgagggcattatgcatgagagcaaacctttctttgctgtgcagttccacccggaagtgacgcccggccctatagatacggaatacctgtttgacagctttttcagcctcatcaagaagggcaaagctacgacaattacctctgtgcttccgaaaccggcgttggtggcgtcccgcgtcgaggtaagcaaggttctgatcctgggtagcggtggtctgagcattggtcaagctggtgagttcgattattccggttctcaagcggttaaggccatgaaagaagaaaatgtgaagaccgtcctgatgaatcctaatattgctagtgtgcaaaccaacgaggttgggctgaagcaggcggacactgtgtactttttgccaatcactccacagtttgtgactgaagtcattaaggcggagcagccggatggcctgatccttggaatgggtggccaaacggccctgaattgcggcgtcgagttgttcaagagaggtgtcctgaaggaatacggtgttaaggttctgggcaccagcgtcgagagcattatggccactgaggaccgccaactgttctcagataagctgaacgagattaacgaaaaaatagccccatcctttgcagtcgagtcaattgaggacgccctaaaagcggcagatactataggatatccggtcatgatacgctctgcctacgcactgggtggcctgggtagcggtatctgtcctaatcgtgaaactcttatggacctgagcactaaggcgttcgcgatgaccaatcagattctggttgagaaatcggtgaccggctggaaggagatcgaatatgaagtagtgcgcgacgctgatgacaactgtgtgactgtctgcaatatggaaaatgtggacgctatgggtgtacataccggtgatagcgtggtggttgcaccagcgcagacactgtctaacgctgaattccaaatgctgagacggacttcaatcaacgttgtcagacacctgggcattgtcggcgaatgcaacattcaatttgctttgcatccgacgtccatggagtattgtatcatcgaagttaatgcacggctgagccgcagcagtgcgctggcgtcgaaagctaccgggtatccactggccttcatcgccgcaaagatcgccctgggtatccccctgcccgagattaaaaatgtggtcagcggtaagacgtcagcctgcttcgagcctagcctggattacatggttacgaaaatccctcgctgggaccttgatcgcttccacggcaccagcagcagaattggcagctctatgaagtccgtgggcgaggtgatggctatcgggcggactttcgaagagtcattccagaaagcccttcgaatgtgccacccaagcatcgagggctttacgcctcggctgccgatgaacaaggagtggccaagcaatctggacctgcgtaaggaattgagcgagccgagcagcacgcgtatctatgctatcgcaaaagcaattgatgacaacatgagtctggacgaaattgagaagttgacgtacattgacaagtggttcctgtataagatgcgagacattctgaatatggaaaaaaccctaaagggcttaaattccgagtctatgaccgaagaaacccttaaacgcgctaaggaaataggcttcagcgataagcagatctctaagtgcctgggtctgacggaggcgcagacccgcgaactgcgtctcaaaaagaacattcacccttgggttaaacagatcgatacgctggccgcggagtacccaagcgtcaccaattatttgtacgtcacctataacggccaagaacacgacgtgaatttcgatgatcacgggatgatggttttgggctgcggtccatatcatatcggtagttcggtggaattcgactggtgcgcggtttccagcatccgcacactgcgccagctgggaaaaaaaacggtggtagtcaactgtaatcctgaaacggtcagcacggacttcgatgagtgcgataaactgtatttcgaagagttgtctctggagcgcatcctggacatctaccatcaggaggcttgtggtggctgcattatcagcgtcggtgggcagattccaaacaacctggcagtcccgctgtataagaatggcgtgaagattatgggtacaagcccactgcagatcgatcgcgctgaagacaggtccatttttagtgctgtgctggacgagctcaaagtggcccaggcgccgtggaaggcggtgaataccctgaatgaggccctggagtttgcaaagtctgtggattatccttgtttgctgcgtccgagctatgttctgagcggcagcgctatgaacgtggtatttagcgaggacgaaatgaaaaagtttttagaagaagctactagggtttcgcaggaacatccggtcgtcctgacaaaattcgttgaaggcgcccgggaggtagaaatggatgcagtgggtaaggatggccgcgttattagccacgctatttcggaacacgtcgaagatgccggagtgcactcaggggatgcaacgctgatgcttccgactcagactattagccagggcgccattgagaaggttaaggatgcaacgcgaaaaattgccaaggcctttgcaatttcgggcccattcaatgtgcaatttctagtcaagggcaacgatgtcctggttattgagtgcaacctgcgcgcaagccgcagcttcccttttgtctcgaaaactttgggcgtcgatttcattgacgtcgcaacgaaagtgatgattggtgagaacgtcgacgaaaagcacctgccaacgctcgatcaccctattattccggcagattacgtcgcgatcaaggcgccgatgttcagctggccacgcctgcgtgatgccgaccctattctgaggtgcgagatggccagcacgggggaagttgcatgcttcggtgagggcatacataccgccttcctcaaggctatgctcagcaccggctttaagatcccgcagaagggcattttgatcggcattcagcagagctttcgcccgcgcttcctgggggtcgcagagcagctgcacaatgaaggcttcaagctgtttgcaaccgaagcaacatccgattggctgaatgccaataacgtcccagccactcctgttgcgtggccgagccaagaaggacaaaatccgtctctctccagcattcggaaactgatccgcgatggtagcattgatttagtgattaatctgccgaacaacaatacgaagtttgtgcacgacaattacgttatacgcagaaccgctgtggattcgggaatcccactgttaacgaatttccaggtaacaaagcttttcgccgaggcagtgcagaaaagcagaaaggttgacagtaagagcctgttccactatcggcaatacagcgccggcaaggccgca

SEQ ID NO: 8112 - DNA, 4500 bp, synthetic construct
  misc_feature 1..4500: note = source = /note="Description of Artificial Sequence: Synthetic coding sequence"
  source 1..4500: mol_type = other DNA
atgacacgcatcctgaccgcttttaaggtcgtacgaaccctcaaaacaggattcggctttacgaatgtgaccgcacaccagaagtggaagttcagtagacctggcatccgcttactcagcgtaaaggcacaaaccgcccacattgttctggaagatgggaccaaaatgaaaggttattccttcggtcacccctctagtgtcgcaggggaggtggtcttcaacaccggacttggcggctatcctgaagctattaccgatcctgcatataagggacagatattaacaatggccaaccctattattggtaacggaggggccccggataccacagccctcgacgaactgggactctctaaatacttggaatcaaatggaatcaaagtatctggcctgctcgttttggattactccaaagattataaccattggcttgctacgaaaagtcttggtcagtggctccaggaggaaaaggtcccggccatttatggggtggacacacggatgctgactaaaattatacgtgacaagggtaccatgctcggaaaaattgagtttgaaggacaacccgttgacttcgtcgatcctaacaaacagaacctcattgctgaagtgtctactaaggacgtcaaagtctatggcaaaggcaacccaaccaaggtagtggccgttgattgtggaataaagaacaacgtcatcagactgctggtcaagcggggagctgaagtgcacctcgtgccttggaaccatgactttacaaaaatggaatacgatggtatcctgatagccggagggccaggcaaccccgcacttgctgaacccttgattcagaacgtgaggaagatcctggagagtgaccgcaaagaacctttgttcggcataagcactgggaacctcataactggtctggcggctggggccaagacctacaaaatgagcatggctaaccgaggccaaaaccagcctgtccttaacattactaacaagcaggccttcatcaccgcgcaaaatcacggatatgccttggacaacacgttgccagcagggtggaagccgctctttgttaacgtgaacgaccagaccaacgaaggtattatgcacgaatccaagccattctttgcagtgcaatttcaccctgaagttacccccggtccaatcgataccgaatatttgttcgacagctttttttccctgattaaaaagggcaaggccacaactattacatcagtcctgcccaaacctgccctggtagccagtagagtcgaggtgagtaaggtgctgatccttggaagcggaggcctgagcatcgggcaagctggagagttcgactactccggctcccaagctgtgaaagctatgaaggaggagaacgttaagaccgtcctcatgaatcctaacattgcttccgtgcagaccaacgaagttggactgaagcaggctgacaccgtctattttctccccattaccccacagttcgttaccgaagtcatcaaggctgaacagcccgatgggctgatcttggggatggggggccagactgcactcaactgcggagtagaacttttcaagaggggcgtcctgaaggaatacggagtcaaggtgttaggcacttcggtggaaagcattatggctactgaggaccggcagctcttttcagacaagttgaacgagataaatgaaaagattgccccatccttcgctgtagagagtatcgaagacgctctgaaggctgcagacacgattggctatccagtgatgatccgatctgcgtacgccctcggcggcctggggtctggaatttgtcctaaccgggagacactgatggacctcagtaccaaggcatttgcgatgactaatcagatcctcgtggagaagagcgtgacaggatggaaggaaattgagtacgaagtcgtgagggacgccgacgataactgcgtcacagtgtgcaatatggaaaatgttgacgcaatgggtgtccacacaggagactcagttgtcgtggctccagcacagaccctctcaaacgcagagtttcagatgcttcgaagaacgtccattaacgtggtgcggcaccttggcatcgtgggggaatgcaatattcagttcgcccttcatccgacatcgatggagtattgcattatcgaggtgaacgcacggctgagccggtcctctgcgcttgcctccaaagccacagggtatccacttgcattcatcgcagctaaaatcgccttggggatccccctgcctgagattaagaacgtggtgtccgggaagacatccgcctgctttgagccttcgctggattatatggttacaaagataccacggtgggacctggatcggtttcacggaacaagttctcggataggcagctctatgaagtccgtgggtgaggtcatggcgatcgggagaacctttgaggaatcatttcagaaagccctgcgcatgtgtcaccccagcatcgagggattcacaccaaggttaccaatgaacaaggagtggccaagtaaccttgatttgcggaaggagctttctgagccaagctcaactaggatttacgcaattgccaaggccattgacgacaacatgtccttagacgagattgaaaagctcacttatatcgacaaatggttcctgtataaaatgagagatatccttaatatggaaaagacccttaagggtctgaactccgagtctatgactgaagaaaccctaaagcgagcaaaggagattggtttctcggataagcaaatctctaaatgtttgggcttgactgaggcgcagacccgggagctgaggttgaagaaaaacatccacccgtgggtgaaacaaatcgacactctggcggcggaatacccctctgtaaccaactacctctatgtcacttataatggacaagaacatgatgtcaactttgatgaccacggaatgatggtgctagggtgcggcccataccatattgggtcgagcgtagagtttgactggtgcgcagtatcctcaatcaggactcttcgacagcttggaaagaagacagtggtcgtgaattgcaatcccgagactgtatctaccgactttgatgagtgtgacaaactgtatttcgaagagctttcattggaaaggatacttgacatatatcaccaagaggcttgtgggggatgtatcatctcagtcggcggccagattcccaataaccttgcagtcccgctttacaaaaatggtgttaagattatgggcacttcccctctgcagattgatcgcgcagaggaccgatctatattctcagcggtgttggacgaattgaaagtggcccaagcgccttggaaagccgtcaacactcttaatgaggccctggaatttgctaaaagtgtggactatccttgtctgctgaggcccagctacgtcctcagcgggagcgctatgaatgttgtcttctctgaagacgagatgaaaaagtttcttgaagaggccaccagggtttctcaggaacatcccgtcgtgctgacgaagttcgtggagggcgccagagaggtcgagatggacgccgtaggaaaggatggaagagttatctcccatgcaatctcagagcatgttgaagatgccggggtgcatagtggggacgcaacgttgatgttgcctactcagaccatcagtcaaggcgcgattgaaaaggttaaggacgcgacacgcaaaattgctaaagccttcgctatatctggccccttcaatgtacagttcctggtgaagggcaatgatgtgcttgtcatcgagtgtaacctcagagctagccggagcttcccatttgtaagtaagaccttgggcgtggacttcattgacgtggccaccaaggtcatgatcggggagaatgtggacgagaagcatctacctaccctggatcacccgatcattcccgctgattatgttgccattaaggcaccaatgttctcgtggccaaggttgcgggacgcagacccgatcctgaggtgtgagatggcatccaccggagaggttgcttgcttcggagagggtatccacactgcattccttaaggcaatgctttccacggggttcaagatccctcagaaaggtatattgattggaatccagcagtcattccgaccaagatttctgggagtcgccgagcaactacacaacgaaggcttcaagctattcgcaactgaagcaacttctgactggctgaatgctaacaatgttcctgccacccccgtcgcgtggccctctcaggagggacagaacccttccttgtcatccattagaaagttgatccgcgatggttcgatagacctcgtaatcaaccttccaaacaataacacgaaattcgtacacgacaactacgtgatacggcggactgccgtggactcgggtattcctcttctgaccaatttccaggtgactaaactgttcgccgaggctgtacagaagtcccgcaaggtggacagtaaaagccttttccactatcggcaatattccgccggaaaagcagcc

SEQ ID NO: 8113 - DNA, 4500 bp, synthetic construct
  misc_feature 1..4500: note = source = /note="Description of Artificial Sequence: Synthetic coding sequence"
  source 1..4500: mol_type = other DNA
atgactcgcattttgacggcattcaaggtcgtgcgcaccttgaaaacaggtttcggattcacgaacgttacggctcatcaaaagtggaagttctctcgacccggtatccgcctcttgtcagtgaaggcacaaactgctcacattgtgctcgaggatggtaccaagatgaaaggctactccttcggtcatccctctagtgttgctggagaggttgtatttaacaccggcctcggaggctaccctgaggccattacagatcccgcctacaagggccaaattctcacgatggccaatcctattattgggaacggcggagcccctgatacaacagctttggatgaactcggcctgtccaagtacctggagtcgaacgggattaaggtgagcggtctcttggtccttgactactcaaaggactataaccactggcttgccaccaagtccctcggccaatggcttcaagaggaaaaggttcccgcaatttatggcgtggatacacgcatgcttaccaagattattcgggacaagggaacgatgttgggcaagatcgagtttgagggtcagcctgtggactttgtcgatcccaacaaacagaacctgatcgcggaagtttctacgaaggatgtaaaagtgtatggaaaaggcaatccgactaaggtggtggctgtagactgcggcatcaagaataatgttatccgccttctcgtcaagcgaggtgccgaagttcacctggtcccatggaatcatgatttcacgaaaatggagtacgatggcattctgattgctggcggtccgggtaacccggcgttggctgagccgctcatccaaaacgtgcgcaaaatactggaatctgacaggaaagagccattatttggaatcagtaccggaaatctgatcacgggtcttgcagcgggcgctaaaacttataaaatgtctatggcgaaccgtggtcaaaatcagccggtactcaatattacgaataaacaagctttcataacggcacaaaaccatggctacgcattggacaacacgcttcccgcaggatggaaaccactttttgtgaatgttaatgaccaaaccaatgagggaatcatgcatgaaagcaagccattctttgccgtgcaattccatcctgaagttacacccggtccgatagacaccgaatatttgtttgacagtttcttcagtttgatcaagaaaggaaaggcgaccactattacctcagtccttccgaagcctgctcttgttgcttcccgtgttgaagtgtccaaggtcttgattctgggaagtggcggcctttcgatcgggcaggcgggagagtttgactattcaggcagccaggcagttaaggcaatgaaggaggaaaacgttaagactgttctgatgaatcccaatatcgcttcggtacaaaccaatgaagtcgggctgaaacaggccgacacagtctacttcttgcccattacgccccagtttgtcacagaagtcattaaagcggaacaacccgacggtctcatccttggaatgggagggcaaaccgctttgaactgtggcgtagagcttttcaagagaggtgtgttgaaagagtatggagttaaagtgttgggtacatcagtcgagtctattatggctacagaggatcggcagctttttagtgacaagttgaatgaaataaacgaaaagatcgcaccatcgtttgccgtggaatcaatcgaggatgccctgaaggcggcggacaccattggttatcccgtgatgataagatccgcctatgctttgggcgggctgggatcaggaatttgtcccaatcgcgagaccctgatggacttgtcaacgaaagcttttgccatgactaatcagatcctcgttgaaaaatcagtaacggggtggaaggagatcgaatacgaggttgtccgtgatgcggacgacaactgtgtcacagtctgtaacatggagaacgtggatgccatgggcgtgcatactggtgattcggtggtggtggcgcctgctcaaaccctttcaaacgccgagttccagatgctccgacgcacgtcgattaacgtagtgagacacctagggatcgtgggagaatgcaatattcagttcgcactgcacccaacttccatggaatactgtattatcgaggtcaatgcgcgtctctctcgttcgtcagcacttgcttccaaagctacgggctacccactagccttcatcgcggctaaaattgcacttggtatcccactgccagagatcaaaaatgttgtatcgggcaaaacctctgcttgcttcgaaccttccttggattatatggtcacaaagatcccaaggtgggatctggatcgctttcatggcacctcgagccgcattgggtcgtcgatgaaatccgtgggcgaggtcatggccattggccggacatttgaggaaagctttcaaaaggctcttagaatgtgtcacccgagtatagagggattcacccctcgactacccatgaacaaggagtggcctagcaacctcgacttgcgaaaggagctctcggagcccagctcgaccagaatttacgccatagctaaggcgattgacgataacatgtccttagacgaaatcgagaaattgacttatatcgataagtggttcctctacaagatgagggacatcttgaacatggagaagacattgaaaggactgaactcagagtctatgacggaggaaaccctaaagagggccaaggagattggtttttcagacaagcaaatttcaaagtgtcttgggctgaccgaggctcagacgcgagagttgcgccttaagaagaatattcacccctgggtcaaacaaatcgataccctggctgccgaataccccagtgtgacaaactacctctatgttacatataatggccaagaacatgacgtcaactttgatgatcatggaatgatggtgctaggttgcggtccatatcatataggctctagcgtcgaattcgattggtgtgccgttagttcgatccgaacgctccggcagcttgggaaaaagactgttgtggttaactgtaatccggagaccgtatcgacagacttcgatgagtgcgataaactttacttcgaggaactatcactcgaacggatcctcgatatataccaccaagaggcctgtggcggatgtatcattagtgtcggcggacaaatcccgaacaaccttgccgtacccctttacaagaatggtgtgaaaattatgggtactagtccactccaaatcgaccgcgccgaggatcgatctattttctctgctgtactggatgagctcaaggtggcacaagcgccttggaaagcggtaaatactcttaatgaagccctggaattcgcaaagtctgttgactacccatgtttgttgcgtcccagctatgttttgtcaggctctgccatgaatgtcgtcttcagcgaagatgagatgaaaaagtttctggaggaagccactcgcgtcagccaggagcatccagtagtcctgacaaagttcgttgaaggtgcccgcgaagtcgaaatggacgctgtggggaaggacgggagagtcatctcacacgccatctctgaacatgtcgaagacgcgggcgtgcactctggcgatgctaccttgatgctccctactcagactatttctcaaggagcgattgagaaagtcaaggacgctacacggaagatcgctaaggcattcgccatctctggaccattcaacgtgcaattcctggtaaagggtaatgacgtcttggttatcgagtgtaacttgcgcgccagtcgctcctttccattcgtgtccaagactctcggagttgatttcattgacgttgctactaaagtgatgatcggagaaaacgtcgatgaaaaacatctgcctacactagaccaccccattatacctgctgactacgtggcaataaaggcacctatgttcagctggcctcgactccgcgacgctgacccaattctgcggtgtgagatggcttccaccggcgaagttgcctgctttggggagggtatccatactgcatttttaaaagccatgctgtcgacgggtttcaagatcccgcagaaaggcatcctcattggcatccagcagtcgttccggcccagatttttaggggttgccgaacaactgcacaatgaaggttttaaactcttcgcgaccgaggctacctctgattggctaaatgctaacaatgtccctgcgaccccagttgcgtggcccagccaggaaggacagaacccctcgctgagctcaattcgcaagcttatcagggatgggagcatagacctcgttatcaacttgcccaataacaataccaagtttgtccacgataactacgtgatccggcgcactgcggttgactctggtataccattgctcacgaacttccaggtaactaagttgttcgctgaagccgtccagaaaagccgtaaggtggactcaaagtcgctgttccactatcggcaatattccgccggcaaagccgca

SEQ ID NO: 8114 - DNA, 4500 bp, synthetic construct
  misc_feature 1..4500: note = source = /note="Description of Artificial Sequence: Synthetic coding sequence"
  source 1..4500: mol_type = other DNA
atgaccagaatattgacagcctttaaagttgtacgtacccttaaaaccggctttggtttcacgaacgtcacagcgcatcagaaatggaagttttctagaccgggaattagactgctatcagtcaaggctcagacagcacacattgttttggaagatggcaccaaaatgaagggatactcttttggtcatccgtcatcggtggctggagaagtagtttttaacacaggtcttggaggctacccagaggccattactgatccagcatataagggacaaattctcacaatggcaaaccccatcataggaaacggaggagctccagatacgacagcccttgatgaactcggactgtccaaatatcttgagtcgaatggaattaaggtttctggattacttgttctcgactatagtaaggactataaccactggctggcaaccaaatccttgggacagtggctgcaagaagaaaaagttccagcaatttacggagtggataccaggatgcttacaaagatcattcgagataaggggaccatgttaggaaaaatagaatttgaaggacaaccagtagattttgttgatccaaacaaacaaaatcttatcgctgaggtttctactaaagacgtcaaggtttatggaaaaggaaatccgacaaaagttgtggctgtggattgtggaattaaaaataatgttattcggttgctggtgaaacgaggagctgaagttcatttggtgccatggaaccatgactttactaaaatggagtacgatggtattcttattgctggaggcccaggaaatccggctctcgctgagccattgattcaaaatgtccgaaaaatacttgagtctgatcgtaaagagccattgttcggaatatcgacgggaaacttaatcactggattagccgccggtgcaaagacctataaaatgtcaatggcaaatcgaggacaaaatcaacctgtgttgaacattacaaataaacaagcctttattacagctcaaaaccatggttacgcattagacaatacacttcctgccggttggaagccattgtttgttaatgtcaacgatcagactaatgaaggtattatgcatgagtcaaaaccgtttttcgccgtccagttccatcctgaagtgacacctggaccaatagatactgaatacctcttcgattcgtttttctctcttattaaaaaaggtaaagccactacaattacgagtgtactgccaaagccagctcttgttgcctcaagagtcgaagtctcaaaagttctaatcctcggtagcggaggacttagtattgggcaggctggagaattcgactacagcggatctcaagctgtgaaagcaatgaaagaagagaacgttaaaactgttctaatgaaccctaatattgcatcagtccaaacgaatgaagtcggactgaaacaagcagacacagtctatttcttgccaattactcctcaattcgtgactgaggtgattaaagcagaacagccagatggattgattttggggatgggaggtcaaacggcccttaattgcggagtcgaattgtttaagagaggagtgctcaaagaatatggcgttaaggtccttggtacatcagtcgaatcaatcatggctacagaggacagacagcttttttctgacaaactaaacgagatcaatgagaaaatagcaccatcgtttgctgtggaatcgatcgaagacgctttgaaggcagccgacactattgggtatccagttatgatacgatctgcgtatgcactgggtgggctgggatcgggaatttgtccgaatcgggagacattaatggatctatcgacaaaggcatttgcgatgactaatcaaattttagttgaaaaatccgtgaccggctggaaagaaatagaatatgaagttgtccgtgatgcagatgataactgcgttacggtttgtaatatggaaaatgtcgatgcgatgggagttcatactggagactcagttgtggttgcaccggcgcagactttatcaaatgctgaatttcagatgcttagacgcacctcgattaacgttgttcggcacttgggaatagtcggcgaatgcaatatccaattcgctttgcacccaacgtctatggaatattgtattatcgaagttaatgcaagactgtcaaggtcctcggctctagcttctaaagcgaccggatatcctttagcctttattgcagccaaaattgcacttggaattccattgccagaaattaaaaatgttgtgagcggtaaaacttccgcatgctttgaaccgtcactagattatatggtgacaaagattcctcgttgggacctagacaggttccatggaacgtcaagcagaatcggcagttcaatgaaatcagttggagaagtgatggctatcggtcgtacgtttgaagagtcgttccagaaagcgttgcgtatgtgtcacccaagcatcgaaggattcacgccacgcttgcctatgaacaaagaatggccaagcaatcttgatcttaggaaagaactctcggagccgtcatcaacacgtatctatgcaattgccaaagctatagatgacaacatgtctcttgatgaaattgaaaaacttacttacattgacaagtggtttctttataagatgagagacattctcaacatggaaaaaactctcaaaggactgaactctgaatcaatgaccgaggagacacttaagcgggcaaaagagatcggtttttccgataaacaaattagtaaatgcttgggactgacggaagctcaaacccgtgaattaagacttaaaaagaacatacacccatgggtgaaacaaatcgacaccctcgcagccgagtatccatcggtgacaaattatttatatgtcacatataatggacaggaacatgatgttaattttgatgatcacggcatgatggtcctaggatgcggtccgtaccatattggttcttcagtggagtttgactggtgtgcagttagcagtattagaactcttcgccaattgggaaaaaaaacagttgttgtgaattgcaaccctgaaactgtgtcaacggacttcgacgaatgtgataagctgtattttgaggaattgtccctcgagcgtattctcgatatttatcatcaggaagcctgtggtggttgcattatctctgtaggaggtcaaattcccaacaacttagcagtgcctttgtataagaatggagtcaaaataatgggtacttcgccccttcagattgatcgtgcagaggataggtcgatattttcagctgtacttgatgagctcaaggttgcacaagctccatggaaggcagtgaacactcttaatgaggctctagaattcgccaagtctgtcgattatccgtgcctccttcgcccttcgtatgtcctctctggatctgctatgaatgttgtcttctccgaagatgaaatgaagaaatttcttgaagaagcgactagggtgagtcaagagcacccggtcgttttgacaaaatttgtggaaggcgcccgagaagttgagatggatgctgtggggaaggacggaagagttattagtcatgctatttcagagcatgtagaagatgcaggcgtgcattccggagacgcaactttaatgttgccaacccagaccatttcacaaggggcaatcgaaaaggtcaaggacgcaacaagaaaaattgctaaggccttcgccatatcaggaccattcaacgtccaatttttggttaaaggaaacgacgtgctggttatcgaatgtaaccttcgtgcttctcgatcgttcccgttcgtctctaaaacactcggagttgattttatcgatgtggctacaaaagttatgattggagagaacgtggacgaaaaacatctacccaccctcgaccatccgattataccagctgattatgtggcaattaaagcgccaatgttctcctggccacgtctgagggatgccgaccccattttgaggtgtgagatggcttccacgggagaagttgcgtgttttggggaaggcatacatacggcttttttgaaagctatgttgtctactggatttaagataccacaaaagggtatactaatcggcattcaacaatcgttcagacctagattcctgggagtcgcagaacaattgcacaatgaagggttcaaattgttcgccacggaagctacatcagattggttgaacgctaataacgtgcctgccaccccagtggcttggccttctcaggaaggccaaaatccttctttgtcttcaattcgtaaattaattcgtgatggaagcatagatctcgttatcaacttgccgaataacaacacaaagtttgttcatgacaattatgttatccggagaacagcagtggactctggaattccactgctgaccaactttcaggttactaagttgttcgccgaagctgtccaaaaatctcggaaagtcgactccaaaagtctttttcattaccgtcaatattcagctggaaaagcggca

SEQ ID NO: 8115 - DNA, 4500 bp, synthetic construct
  misc_feature 1..4500: note = source = /note="Description of Artificial Sequence: Synthetic coding sequence"
  source 1..4500: mol_type = other DNA
atgaccagaatacttacggccttcaaggtcgtcagaaccctgaagactggcttcgggttcaccaatgtgacagcacatcaaaagtggaagtttagtagaccaggaatacggctcttgtctgtaaaggcacagacagcacacattgtgcttgaggatggcacaaagatgaaggggtattccttcggtcacccgtcttccgtggctggggaagttgtgtttaacactggtttgggtggctaccctgaggctatcaccgatccagcatacaaaggacagatcttgaccatggctaaccccatcataggtaatggaggcgctcctgacacaacagccctggatgagctgggcctctccaagtacctcgagtccaatgggatcaaagtgtcagggctgctggtgctggattactccaaggactacaaccactggctggccaccaaatcacttggtcagtggctgcaggaagagaaggttcccgccatatacggagtagataccaggatgctgactaaaattataagggacaaaggcaccatgctgggcaagatagaattcgaggggcagccagtcgactttgtggatcctaacaaacaaaacttgatcgcagaggtgagcaccaaagatgtgaaagtttatggaaaaggcaatcccactaaagttgttgcagtcgactgtggaatcaaaaacaatgtgattcggttacttgtcaagaggggagctgaggttcatctggtcccttggaatcatgactttacaaaaatggaatacgacggcattcttatcgcaggtggccccggaaaccccgctctggcagaacctctcatccagaacgtgcggaagatactcgagtcagaccgaaaagagccacttttcgggatcagcaccggcaacttgatcacaggtctggccgcaggagctaaaacctacaaaatgagcatggctaatagggggcagaaccagcccgtgctcaacatcaccaacaaacaagcgttcatcaccgcgcaaaaccacggctacgccctggataacaccctcccagccggctggaagcctctcttcgtcaacgtgaacgaccagaccaacgagggaataatgcacgagagcaagcccttcttcgcagtccaattccaccctgaggtcacccctgggcctatcgataccgagtacttatttgacagtttttttagtctgattaaaaaggggaaggccacaaccattaccagcgtcctgccaaaacctgccctggtggcgtctagagtggaggtgtccaaagtgctgatacttggctctggcggcctttcaatcgggcaagctggagagttcgactattcaggctcacaggcggtgaaagctatgaaagaggagaatgtgaaaacagtacttatgaatcctaacattgcctctgtccaaaccaatgaagtcgggctgaaacaagccgatacggtctacttccttcccatcactcctcagtttgtgactgaggtcatcaaagcagaacaacctgatggcctgatcctcggaatgggtggccaaaccgcattaaactgcggggttgaactcttcaaaaggggcgtgctgaaagaatatggagtgaaagttctgggaacatctgtggagtccatcatggctaccgaggatagacagttgttcagcgacaagctcaacgaaattaacgagaaaatagcaccttccttcgccgtcgaaagcatcgaggatgctctgaaggcggccgacacgatcgggtatccagtgatgattaggtctgcatacgccttgggaggccttggatctgggatatgcccaaaccgcgagacactgatggacctgtcaacaaaagcatttgccatgactaatcagatcctagtggagaaatccgtaaccggctggaaggagatagaatatgaagtggtcagggatgctgatgataactgcgtgaccgtctgtaacatggagaacgtcgatgccatgggggtgcatacaggcgactcggttgttgttgcgccagcacagacactgtccaacgccgagtttcaaatgttgcgcaggaccagcattaatgtcgtgagacacctcggcattgttggcgagtgtaacatccagtttgccctgcatcctacatccatggaatattgcatcattgaagttaacgccaggctttcgagaagcagcgctttggccagcaaagctaccggatatcccctggccttcatagctgctaaaatcgcacttggaattcccctgccggagatcaagaacgttgtaagcggcaaaaccagtgcatgtttcgagccatcactcgactacatggtgacaaagattccaagatgggatctcgataggtttcatggcacttccagccgcatcggatcctcaatgaagtcagtcggtgaggtgatggcaattggtaggacattcgaggaaagttttcagaaagccttgcgaatgtgccatccctctatcgaggggttcacacctagactaccaatgaacaaagagtggccatctaacttggatttaaggaaggaattgtccgaaccatctagcaccagaatttacgctatcgcaaaagcaatagacgacaacatgtcattggatgaaatcgaaaagttaacatatattgacaaatggtttctgtacaagatgagagatattctaaacatggagaaaaccctcaagggactcaacagcgagagcatgacagaagagaccctgaagagggccaaagaaataggcttctctgataagcagatcagcaaatgcctggggctcaccgaagcacagacaagggagctgagactcaaaaaaaacatacacccctgggtgaaacagattgatacactggcagcagagtatccaagcgtcactaattacctgtacgttacttataacggtcaggagcatgacgtgaactttgacgaccatggcatgatggttttggggtgcggaccgtaccacattggtagcagcgtggaattcgattggtgtgccgtgagttctatcagaacactgagacaactgggaaaaaaaaccgtcgtggttaactgcaacccggagactgtgtccaccgattttgacgagtgcgataagctgtacttcgaagagctgagcctggagaggatcctcgacatataccaccaggaggcgtgcggggggtgcataatttccgttggcgggcagatcccaaacaacctggccgtgcctttatataaaaatggagtaaaaatcatgggaaccagtccactgcagatcgaccgcgcagaagataggtccatatttagcgcagtgctcgatgagctcaaggtagcccaggccccatggaaagccgtcaatacgcttaacgaggcactggagtttgcaaaatcagtcgactatccctgtcttttgcggcctagctacgtgctgagcggcagcgcaatgaatgtcgttttttcagaggatgagatgaagaagtttctggaggaggcaactagggtctcacaggagcaccctgtggtgctgactaagtttgtggagggggctagagaagtcgagatggacgctgttggcaaggatggcagagtgatcagccacgccatttctgagcacgtcgaggatgctggcgtgcatagcggcgacgctacactgatgctgcctacgcagacgatctcacagggcgcaatcgagaaagtaaaagacgccactaggaagatcgccaaagcattcgccatctcaggcccatttaacgttcagtttttggtgaagggcaacgacgttctggtaattgagtgcaaccttcgtgcttccagatcatttccgttcgtttccaagactctcggagtcgattttatagacgtcgccactaaagtgatgattggcgagaatgtggatgagaagcacctccctaccctcgatcacccaattatccccgcagattatgtcgctatcaaggccccgatgttctcttggccgaggctgagagacgctgacccaatcttgaggtgtgaaatggcctctacaggcgaagtcgcatgcttcggggaaggtatccatacagcttttttgaaggccatgttgagtactggtttcaaaatccctcaaaagggaatcctgatcggaattcaacaaagcttcaggccaaggttcctgggagtggctgaacaactgcataacgaaggtttcaagctgtttgctactgaggccacaagcgattggctcaatgctaataatgttccagcgacccccgtggcttggcctagccaggaaggtcagaacccaagtctgtctagtatcaggaagctgatccgggatggatccatagatctcgttatcaaccttcctaataataataccaagtttgtgcacgataactatgtcattcggcgaactgcagtggatagcggaattcccctactgacaaactttcaagtgacaaagctctttgctgaagctgtccagaagtctagaaaggtcgatagcaagagcctgtttcactacaggcagtattctgcggggaaagcagca

SEQ ID NO: 8116 - DNA, 4500 bp, synthetic construct
  misc_feature 1..4500: note = source = /note="Description of Artificial Sequence: Synthetic coding sequence"
  source 1..4500: mol_type = other DNA
atgacccgaattttgactgcttttaaggtagtcaggactctgaaaacagggttcggatttactaacgtgactgcgcatcagaaatggaagttttcccggccaggcattagactactctcagtaaaagcgcagacggcacacattgtactggaagatggaacaaaaatgaagggatattcatttggccaccccagtagtgtggctggagaagttgttttcaacaccggacttggagggtatccagaggctatcaccgatccggcttacaagggtcagatccttaccatggctaatccgataatcggaaacgggggggcaccagacacgacggccttggacgaactgggattgtccaaatacctggaatctaatggcattaaggttagcgggctgctggtgctcgactactccaaagattacaaccactggctagccaccaagtcgttagggcagtggctgcaggaggaaaaggtgcccgcaatttatggggttgataccaggatgctgaccaagattattagggacaagggcacaatgctgggcaagatagagtttgaaggccaacccgtagacttcgtggatcctaataagcagaatctcatagctgaggtgtccacaaaagacgtgaaggtgtacggcaaggggaacccaacaaaagtagtcgctgttgactgcggcattaaaaacaatgtcatcagactcctggtcaaaaggggcgccgaggtgcacctagttccttggaaccatgactttaccaagatggaatatgacggcatccttatcgccggaggccccggtaatccagccctggccgaacctctcattcaaaacgtaaggaaaatacttgagagtgacagaaaggaaccactcttcggaatctcgacaggcaacctgatcacaggcctcgcagcaggagctaaaacatataagatgtcgatggctaacaggggacagaaccaaccagttctgaacatcactaacaaacaggccttcataactgcccagaaccacggctacgccctggacaacacgctgcccgcgggttggaaaccattattcgtcaacgtcaacgaccaaacaaatgagggaatcatgcacgagtcaaaaccttttttcgcagtccaattccaccccgaagtcaccccaggccccatcgatacagaatacttattcgacagtttttttagtttaatcaagaaggggaaagcaaccactatcactagcgtgctaccaaagccagcactggtagctagcagggtcgaagtctccaaagtccttattctggggagcggggggctgagcatcgggcaggccggagagttcgattacagtggaagtcaggctgtgaaagccatgaaggaagaaaatgttaaaacagttctgatgaatcccaacattgccagcgtacaaacgaatgaggtcggcctcaagcaggcagatacggtgtacttcctgcctattacgcctcagtttgtgacagaagtcataaaggccgagcagccggacggcctcattctcggtatgggaggccagactgcacttaattgcggagttgagctgtttaagagaggcgttctaaaagagtatggtgtaaaggtacttggaaccagcgtggaatcaattatggcgaccgaggacaggcagttattcagtgacaagcttaatgagatcaacgaaaaaattgccccatctttcgccgttgagtcaatcgaagatgctctcaaagcagccgatacaatcggttaccccgtcatgatacgctctgcctacgccctcgggggcttgggaagtgggatatgtcccaaccgtgagacattaatggatctgtcaacaaaggcttttgcaatgactaaccagattctggtggagaaatccgtgacggggtggaaggagatcgagtacgaagttgtcagggacgctgacgacaactgtgtgacggtgtgtaacatggagaacgtcgatgccatgggggtacatacaggcgacagcgttgtagtggcccccgcgcagacattgagcaatgccgaattccagatgctacgcagaacgtccattaacgttgtaaggcacctgggaatcgttggcgagtgcaacatccagttcgccctgcacccaacctcaatggagtactgtatcattgaggtcaatgccaggctgtcccggtcatcagcactggcttcaaaagccacaggatatcccctcgcattcattgcagccaagatagccctaggcatacccttgccagagatcaaaaatgtggtatctggtaagacatctgcctgcttcgaaccttccctggattacatggtcactaaaatccctcgctgggatctcgatcggtttcacggcacctcctccagaatagggtcctccatgaaaagcgttggcgaggtgatggcaattggacggacattcgaggagagttttcagaaggcgcttcggatgtgccatccttctattgagggtttcaccccaaggctcccgatgaacaaggaatggccctctaatctggaccttaggaaagaactaagcgaaccatcttcaacacgcatctatgccattgctaaagctatagacgataacatgtctctggatgagattgaaaagctgacctatattgataaatggtttctgtacaaaatgcgagacattctcaatatggaaaagaccttgaagggactcaatagcgaatccatgacggaggagacactgaaaagggcaaaggaaatcggtttttccgataagcagattagtaaatgtctgggcctcactgaagctcagacgagagagctgcgattgaagaaaaatatccacccctgggtgaagcagattgacacactcgctgctgagtatccctctgtaacaaattacctctatgtcacctacaacgggcaggagcacgacgtgaactttgatgaccacggcatgatggtgctcggatgcggtccttaccacattggatcctctgtcgagtttgactggtgtgctgtgtcatctattcgcacactgaggcagctcggcaagaaaacagtcgtggtgaactgcaacccagagactgtgtcaacggattttgatgagtgtgacaagctgtactttgaagagcttagtctcgaacgaattctcgacatatatcaccaagaggcctgcggcgggtgcataatcagtgtcggtgggcaaattcctaataacctggctgtgccactatacaaaaacggggtgaaaataatgggtacctcaccgctgcagatcgacagggcagaggatagatcgatctttagcgcagtcttggatgagctcaaggtcgcgcaggcgccttggaaagccgttaatactttgaatgaagccctggagttcgctaaaagcgtagactacccttgtctgctgcgcccatcctatgtgctgtctggtagcgcaatgaacgtggtcttctcggaggacgagatgaaaaaattcctggaagaggcgactcgggtaagtcaagagcatccagtggtgctgacaaagttcgtggagggcgccagagaagttgagatggacgccgtggggaaggacggcagggttatctcgcacgcaatttccgagcacgtggaagatgccggggtgcattcaggcgatgcaaccttaatgttacccacgcagaccatttctcagggggctattgagaaagtcaaggacgcaacacgcaaaattgccaaagcctttgctatcagtgggccctttaatgtgcagttcctagtcaagggaaacgacgtgctcgtgatcgagtgcaacctcagagcctctcgttcatttcccttcgtgtccaaaacactaggcgtggatttcatagacgtcgccactaaagtcatgatcggggagaatgtggatgagaaacacttgcccacactcgatcaccccattatccccgcggattacgtggccattaaggctcctatgttttcttggcctagactgcgcgatgctgacccgattttgaggtgtgagatggcttcaaccggggaagtggcatgctttggcgagggaattcacactgcgtttctgaaggctatgctatccaccggattcaagattcctcaaaaaggcatcctgattggcatccagcaaagtttcagaccccggttcctgggggtggccgaacagttgcacaacgaagggttcaaactgttcgctaccgaggccacttctgactggttgaacgccaacaatgtgcccgctacacctgtggcctggccctcgcaggaaggtcagaatccgagcctatcctctattagaaagctgataagggatggtagcatcgacctcgtcatcaatctgccaaataacaatactaaattcgtgcacgacaattatgtgattcgccggactgccgtggacagtggaatacccctgctgacgaactttcaggtgacaaaactttttgcagaagctgtgcagaagagccgcaaggtggattctaaatctctgtttcactaccggcagtacagcgccggaaaggcagcc

SEQ ID NO: 8117 - DNA, 4500 bp, synthetic construct
  misc_feature 1..4500: note = source = /note="Description of Artificial Sequence: Synthetic coding sequence"
  source 1..4500: mol_type = other DNA
atgacacgaattcttacggcttttaaggttgtgaggactctgaagactggcttcggttttaccaatgttacagcccatcagaagtggaagttttcgcgtcctggtatccggcttctcagcgtcaaagctcaaaccgctcacatagtcttagaggatggcactaagatgaagggttactcctttggtcacccatccagcgtagctggcgaagttgtgttcaatacaggattgggaggttacccagaagctattaccgaccccgcatataaggggcaaatcttgacgatggcaaatcctattatcggcaacgggggagcccctgatacaacggcactggacgaactaggactatctaaatacctcgaaagtaatggaatcaaagtttctggcttgcttgtgctcgattattcaaaggattataatcattggctagctactaaatctttaggccaatggcttcaagaggagaaagtacctgctatctatggagtggacaccaggatgcttaccaaaatcataagagataaaggcacaatgcttggcaaaattgagtttgagggtcaacccgtcgattttgttgatcctaacaagcagaatcttattgccgaggtttctacaaaagatgttaaggtttatggtaaagggaatcctactaaggttgtcgcagttgactgtggtataaagaataatgtgatcaggttgttggtcaagagaggtgctgaggtgcacctcgttccttggaatcatgattttaccaagatggaatacgatggtatactgatcgccggtggtcctggtaatcctgctcttgcagaacctttgatccaaaacgttagaaaaattttggaatccgaccgtaaagaaccacttttcggtatcagtacgggtaacttgatcacaggtcttgctgcaggagccaagacttacaagatgtctatggctaatagaggtcagaatcagccagttctcaatattactaacaagcaggcattcatcaccgcacaaaatcacggttacgccttggataacacgcttcccgcaggatggaaaccacttttcgttaatgtaaacgaccagactaacgagggaattatgcacgaaagcaagcctttcttcgccgttcaatttcatcctgaagttactccagggcccattgatacagagtacctgtttgattccttttttagtcttataaaaaagggtaaggctactacaatcactagcgttctaccgaagcccgcacttgtggctagccgcgtagaggtatccaaggttcttatccttggtagcggaggactttccattggccaggctggcgagtttgactactcaggatctcaggcggtcaaggccatgaaggaagaaaacgtgaaaactgttcttatgaatccgaatattgcgtccgttcagacgaacgaagtagggctgaagcaggcagatacagtgtattttctgccaataacacctcaattcgtcacagaagtcattaaggccgaacaacctgatggtttgattttgggaatggggggtcagacagctcttaattgcggcgtggagctctttaagcgaggcgtgttgaaagaatatggtgtaaaagtgctgggcacaagtgttgaaagtatcatggctaccgaagacaggcaacttttttccgataaattaaatgagatcaatgaaaagatagctccatcattcgctgttgaatcaatcgaagacgctcttaaagccgcggatacgattgggtatcctgtgatgatccgcagcgcctacgccttgggagggttgggaagtggcatctgccctaatagagaaactcttatggatttgtcaacaaaagcttttgccatgactaaccaaattctcgttgaaaagagtgtgactggatggaaggagatagaatacgaggttgtcagagatgctgatgataactgtgtgactgtttgtaatatggaaaacgtagatgctatgggtgttcacactggggattcagttgttgtggctcctgctcaaaccttgagcaacgcagaattccaaatgttgaggagaactagcattaacgtggtgagacatttggggatagtgggtgaatgcaacatccagtttgctcttcatcctactagtatggaatattgtatcatcgaggttaatgcgaggctaagtaggagcagtgccctggcatcaaaggctaccggttatcctcttgcgttcatcgcagcaaagatagctcttggcattccattaccagagatcaagaacgtagtatcaggtaaaacatctgcttgcttcgaaccatcattagattatatggtgacaaagataccacgctgggatcttgatagattccacggaacctcaagcagaatcgggtcatctatgaagtcggttggagaagtgatggcgattgggcgtactttcgaggagtcattccagaaggcactccgcatgtgtcatccttctattgaaggctttacacctcggctccctatgaacaaagagtggcctagcaacctagacttgcgtaaagagttgtcagagccttcttcaacgaggatctatgcaattgccaaagcaattgatgataacatgtccctagatgaaattgaaaagcttacatatatcgataagtggttcttgtataagatgagggatatcttgaacatggaaaagaccctaaagggtctaaacagtgagtcaatgactgaggagacccttaaacgggcaaaggaaatcggattcagtgataaacagatctcaaaatgtcttggattgacagaggctcagacaagagaactgcggttgaagaaaaatattcatccttgggttaaacagatcgatactttggccgcagaatatccttcggtgacgaactatctttatgtcacctataacggccaggaacatgacgtcaatttcgacgaccatgggatgatggttctgggatgtggtccatatcacataggtagctctgtcgaatttgactggtgtgccgtgtccagtatccgaactttgagacaattaggaaaaaaaacagtcgttgtgaactgtaaccctgagaccgtttccacggattttgatgagtgcgataaactgtactttgaggaactctcactggagcgaatcctcgatatttaccatcaagaggcatgtggtggttgcattatatcagttggagggcaaattccaaacaacttggctgtgcctttgtataaaaatggtgtgaagatcatgggcacgtctccactccagattgatcgagcggaagataggtccattttttcagctgttttggatgagttaaaagtggcacaggccccatggaaggccgttaacaccttgaatgaagcactcgagttcgctaagagtgtcgattatccatgcctcctgagacccagttatgtactttcaggatccgcaatgaatgtggttttttctgaagatgaaatgaaaaaatttcttgaagaggctacgcgagtttcccaggaacatcctgtggttttaactaaatttgttgagggtgctcgtgaggtggagatggatgctgtaggaaaagacggcagggttatttcccatgcaatatcagaacatgttgaggatgcgggggtgcactcaggagacgcaactctcatgcttccaacacaaaccatatcccagggagcaatcgaaaaggttaaggatgcgaccagaaaaattgcaaaggcgttcgctatctccggaccctttaacgtgcagtttttagtgaaaggcaatgatgtccttgtcatagagtgcaacctgagagcatcaagaagctttccttttgttagtaaaactcttggtgtggactttattgacgttgctactaaggtaatgataggggaaaacgtggatgaaaaacatctacctacacttgatcatccaataattcctgctgactatgttgctataaaggcaccgatgttctcttggccaaggctgcgtgacgcagatcctatcttgcgatgtgaaatggcttctactggagaagttgcctgttttggagaaggaattcatactgcctttctgaaggcaatgcttagtactgggttcaagatcccacagaaaggcatcttgataggtatacagcagtccttccgtcccagatttttgggtgttgcagagcaactccacaacgaagggttcaagctttttgcaacagaggcaacctccgattggttgaatgctaacaacgttccggctacacctgttgcatggccatcacaggaaggccagaatccgagcctttctagtatcagaaaactcatacgtgatggttcaatagatttggtcattaatctccccaacaataacactaagttcgttcatgataattacgtcattagaagaactgcagttgatagcggtatccctctcctcactaattttcaggttaccaagttgttcgctgaggcagtgcagaagtcgaggaaagtcgatagtaaatccttatttcactatcgacaatactccgctggtaaggctgct

SEQ ID NO: 8118 - DNA, 4500 bp, synthetic construct
  misc_feature 1..4500: note = source = /note="Description of Artificial Sequence: Synthetic coding sequence"
  source 1..4500: mol_type = other DNA
atgaccagaatcctgactgctttcaaggtggtgcggaccctgaaaactggattcggattcactaatgtaaccgcccaccagaagtggaagttctcccgcccaggaatccgactcctgtccgtcaaggcccaaaccgcacatatcgtgttggaggacggcaccaagatgaaaggatactcctttggccacccctcgagcgtggcaggtgaagtggttttcaatacgggcctcggaggctacccggaagcgatcactgatccagcttacaaaggccagatcctgactatggccaatcctatcatcggaaacggcggagccccggacacgaccgcgctggacgaactgggcctgtcgaagtacctggagtctaacgggatcaaagtctccggtctgctggtgctggactactccaaggattataaccattggctcgcaaccaaaagtctgggccagtggctccaggaggagaaagtgccggcgatctacggggtcgacactcggatgctgaccaagattatccgcgataaagggacgatgctgggtaagatcgagttcgaaggccaaccggtcgacttcgtggatccaaacaagcagaacctgatcgcggaggtgtcgacgaaggacgtgaaagtgtacggtaagggaaaccctaccaaggttgtcgccgtcgattgcggtatcaagaacaacgtgatccgccttctggtgaagcggggagcggaggtgcatctggtgccctggaaccacgatttcactaaaatggagtacgatgggatcctcatcgcgggaggacctggtaatcctgccctggccgaaccccttatccagaatgtgcggaagatattggaaagcgacagaaaagagccgctgtttggaattagcaccggaaacctgatcaccggattggcagcaggggccaagacttacaagatgtctatggcgaatagaggccagaaccagccggtgctgaacatcactaataaacaggcttttatcactgctcagaatcatggctacgccctggacaatacgctgccagcaggctggaagccactgtttgtgaacgtgaacgaccaaaccaacgaagggattatgcatgagtcaaagccgttctttgccgttcagtttcaccctgaagtcacgccgggacctatcgacactgaatacctgttcgatagcttcttctcgctgatcaagaaggggaaagcaaccactatcactagcgtgctgcccaagccggcactcgtcgcatcacgcgtggaagtctccaaggtgcttatcctgggctcgggaggactctcgatcggacaagcgggtgagttcgactactccggaagccaggcggtgaaggccatgaaggaagaaaacgtgaaaacggttctcatgaacccaaacattgcttcagtgcagaccaatgaggtggggcttaagcaagccgacaccgtgtacttcttgccgatcactccgcagttcgtgaccgaagtgatcaaggccgaacaaccggatggcctcatcctgggaatgggcggccaaaccgccctgaattgcggagtggaactgttcaagagaggagtgctgaaggagtacggagtcaaggtgctcggcacctcggtggaatccatcatggcgaccgaagatcgccagctgttctcggacaaactcaacgagatcaatgaaaagattgcgccgtcgtttgctgtcgaatcgattgaagatgctttgaaagccgcagacacgataggatacccggtgatgattcgctcagcctatgccctcggcggcttgggatcgggaatctgcccgaaccgcgaaactctcatggacttgtccactaaagcatttgcgatgaccaaccaaatcctggtcgagaagtcggtgactggatggaaggaaattgagtacgaagtcgtgagggatgcggatgacaattgcgtgaccgtatgcaatatggagaacgtggatgcgatgggcgtccacactggagactccgtcgtcgtggctccggctcaaaccctgtcaaacgcagaattccagatgctgcggcgcacttccatcaatgtggtccggcatctcggaatcgtgggggaatgcaacatccaattcgcactccacccaacttcaatggaatactgcatcatcgaggtgaacgctcgcctcagccgctcatcggcccttgcgagcaaggctactggttacccgctggcgtttatcgccgccaagattgccctgggaattcctttgcctgagatcaaaaacgtagtctcaggtaagacctccgcctgcttcgaaccctcccttgactacatggttacgaagattccgcggtgggacttggaccgtttccacggaacttcgtcccgcatcggatccagcatgaagtcggtcggagaagtgatggcaatcggaaggaccttcgaagagagcttccaaaaagctctgagaatgtgccacccatcaatcgaaggattcaccccgcgcctgcccatgaataaggagtggccaagtaatctggatctgcgaaaggaactcagcgagccttcgagcactcggatctacgccattgcgaaggcgatcgacgacaacatgagcctggatgaaatcgaaaagctgacctatatcgacaagtggttcctttacaaaatgcgcgacatcctgaacatggagaaaactttgaagggactcaattcagagagcatgaccgaagaaaccctgaagagagccaaggaaatcggtttctccgacaagcagatctcgaagtgcctcgggctcactgaagcgcagactcgggaactgcggctgaagaaaaacatccatccttgggtgaaacagatcgacaccctcgccgcagagtacccgagcgtgaccaactacctgtacgtgacctacaacggccaagaacatgacgtgaatttcgacgatcacggaatgatggtcctgggatgtggaccataccacatcggctcatccgtggagttcgattggtgcgccgtgtcatcgatcagaactcttcggcaactgggtaaaaagacggtggtcgtcaattgcaatccagagactgtgagcactgattttgatgagtgtgacaagctgtacttcgaggaactctcactggagcgcatcctcgacatctatcaccaagaggcctgcggaggttgtatcattagcgttggagggcagatccctaacaacctcgctgttccgctttacaagaatggcgtgaagatcatggggacctctccgctccagatcgatcgtgcggaggaccggtcgattttctccgccgtgctcgatgaacttaaagtcgcacaggccccttggaaagcagtgaacactcttaacgaggccctggaattcgctaagtcggtggattacccatgcctgctgcgaccgtcgtacgtgctctccggtagtgccatgaatgtcgtgttctccgaagatgagatgaagaagtttctggaagaagccacccgggtcagccaggagcatcctgtggtcctgactaaatttgtggaaggtgctagagaggtcgagatggacgccgtcgggaaggatggacgggtgatttcacacgcaatcagcgaacatgtggaggacgcgggcgtgcattccggagacgccactctgatgctccccacccagactatctcccagggagcaattgaaaaagtgaaggacgccacccgcaagattgcaaaggctttcgctatctcgggaccgttcaacgtccagttcctggtcaagggaaacgacgtgctcgtgatcgagtgtaacctgagagcctcgcgcagctttccgttcgtgtccaagaccctgggggtggactttatcgacgtggccaccaaagtgatgatcggagagaacgtcgacgaaaaacacctgccgaccctcgaccacccaatcatcccagcggattacgtggcaattaaggcgccaatgttctcatggccaaggctccgcgatgcggacccgatcctccgctgtgaaatggcctccacgggcgaggtggcctgtttcggagagggaatccacactgccttcctgaaggctatgctttccaccggctttaaaatcccacaaaagggaattttgatcgggattcagcaatcgtttcggcctagatttctgggggtcgcggaacaactgcacaacgaaggctttaagctcttcgcaactgaggctacctcagactggctcaatgccaacaacgtgccagctacccccgtggcgtggccgtcgcaggaaggacaaaacccgagcctctcttccatccggaagttgatcagggatggctcaatcgacctcgtcatcaatttgccgaataataacactaagttcgtacatgataactatgtgatcagaaggaccgccgtggatagcggaatccccctcctgaccaacttccaggtcaccaagttgttcgcggaggccgtccagaaatcaaggaaagtcgactcgaagagccttttccactacaggcagtactcggcaggaaaggccgcc

SEQ ID NO: 8119 - DNA, 4500 bp, synthetic construct; identical to SEQ ID NO: 8110
  misc_feature 1..4500: note = source = /note="Description of Artificial Sequence: Synthetic coding sequence"
  source 1..4500: mol_type = other DNA

SEQ ID NO: 8120 - DNA, 4500 bp, synthetic construct
  misc_feature 1..4500: note = source = /note="Description of Artificial Sequence: Synthetic coding sequence"
  source 1..4500: mol_type = other DNA
atgacccgcattctgacagctttcaaggtcgtgcgcaccctgaaaacgggattcggcttcactaacgtgaccgcccaccagaaatggaagttctcgcgccccggtatcaggttactttccgtgaaggcccagaccgcgcacattgtattggaagatgggaccaagatgaaaggatactcgttcggtcaccccagttcagtcgctggagaggtggtattcaataccggcttgggtggataccccgaggccatcacagatcccgcctataagggacagatccttacgatggcaaacccaattattggcaatggtggtgctccggacaccactgcgcttgatgaacttggcttgtcgaagtacttggagtccaacggcattaaggtcagtggtctgctggttctcgactacagcaaggattacaaccattggctcgccaccaaatcccttgggcagtggctccaagaggaaaaggtccccgctatttacggcgtcgatacgcgtatgctgacgaagattattagggataagggcaccatgctgggcaagatcgagtttgaaggccaacccgtggacttcgttgatcccaacaagcagaacctcatagctgaggtgtccaccaaagacgttaaggtgtacggtaagggcaaccctaccaaggtcgtcgccgtagactgcggtatcaagaacaacgttatccgcctcctggttaagcgcggcgcagaggtgcacctggtcccctggaatcacgacttcaccaagatggagtatgatggaattcttattgccggaggtcccggtaacccggccttggctgagcccttgatccagaacgttcgtaagattctcgagtccgatcggaaggagcccctcttcgggatctctaccggaaacctgatcaccggcctggctgccggggccaagacttacaagatgagcatggcgaatcgaggacaaaaccagcctgtgctgaatatcacgaacaagcaggctttcatcaccgcacagaatcacggctacgctttggataacacgcttcccgctggctggaaacctctcttcgttaacgttaacgaccagaccaacgaaggtatcatgcatgagtctaagcctttcttcgcagtccaatttcatcccgaggtgacgcccggccccatcgacaccgaatacttatttgattccttcttctcccttattaagaagggaaaggccacgactattacgtccgtcctccccaagcctgcgctggttgcctcccgtgtggaagttagcaaggttctcatccttggctccggcggtctgagcattggtcaggctggcgagtttgactattcgggatcacaggcggtcaaagcgatgaaggaggagaacgtcaaaaccgtcttgatgaacccgaacattgcaagcgtccagacaaacgaggtgggacttaagcaggccgacaccgtctatttcctgcccattaccccccagtttgtcaccgaggtgatcaaggcagaacaacccgacgggttgatcctcggcatggggggccagacggccctgaactgcggcgtcgagttattcaagcgtggagtgcttaaagagtacggcgtgaaggtgttgggtacttcagtcgagtcgatcatggctaccgaagaccgccagctgttttccgacaagctcaatgagataaacgagaagatcgccccgtctttcgctgtggaatcaatcgaggatgccctgaaagcggctgacactatcggttaccccgtcatgattcgcagcgcttacgcgctcggaggcctagggtccggaatttgcccaaaccgggagacgctgatggatttatcgaccaaagccttcgccatgactaatcagatcctggtggagaagtccgtcactggttggaaggagatcgagtacgaagtcgtgcgcgacgcggacgataattgcgtgactgtctgcaacatggagaacgtcgatgctatgggcgtgcataccggtgactccgtggtcgttgcccccgctcagaccctctccaatgctgagttccagatgctccggcgcaccagtattaacgttgtcagacatttgggcattgttggtgaatgcaacatccaattcgccctccaccccacgtcgatggagtactgtatcattgaagtgaacgcgcgcctctcacgttcatcagcactcgcttccaaggctaccgggtacccgctcgccttcatagccgcaaaaattgctctgggaatcccactccctgaaataaaaaacgttgtcagtgggaaaacatctgcatgcttcgaaccttccctggattacatggttaccaagatcccccgatgggacctcgaccgtttccatgggaccagctcccgaattggcagttctatgaagagtgtcggcgaggtcatggccattgggcgaacgttcgaggagtccttccagaaggccctccgtatgtgtcatccatcgatcgaaggattcactccccgcctccctatgaacaaggagtggcctagcaacttggatctgagaaaggagctttccgagcccagctccaccaggatttatgccatcgcaaaggccatcgatgacaacatgtccctggacgaaattgagaagctcacctatatcgacaaatggtttttgtataagatgcgtgacatcctgaacatggaaaagacgcttaagggccttaactcggagtccatgactgaggagacccttaagcgagccaaggaaatcgggttcagcgacaagcagatctccaagtgcctcggcctcactgaggcacagacaagggaacttagactgaagaagaacattcacccctgggttaagcagatcgacactctcgctgccgagtatccttcggttacgaactacctctacgtcacctataacggccaggagcatgatgtcaatttcgacgatcatggaatgatggttcttggttgcggaccgtaccacattggtagctcagtcgagtttgattggtgcgcggtgtcgagcatcaggactctgagacagttgggaaagaaaactgtcgttgtcaactgtaaccccgagaccgtgtccaccgacttcgacgagtgcgacaaactatattttgaggagcttagtctggagcgcatcctcgacatttatcaccaggaggcttgcggcggctgcattatctcggtgggtggtcaaatccccaacaaccttgccgttcccctttacaaaaacggggttaagatcatgggcacctcccccctccagattgatcgtgcggaggaccgcagtatcttttccgcagtccttgatgaattgaaggtcgcccaggccccgtggaaggcggtcaacaccctgaacgaagcactggagttcgcgaaatccgtcgactacccgtgcctgctgcgcccgagttacgtcctgtccggcagcgctatgaacgttgtcttcagtgaggacgagatgaaaaagttcctggaggaggcaacccgggtctcacaagaacaccctgtcgttctcacgaagttcgtcgagggagccagggaggttgaaatggacgccgtcggcaaggacggaagggtcatctcacacgccatctccgagcatgtggaggatgctggagtccacagcggcgatgccaccttgatgctgcccacccagacgatcagccagggagccatagaaaaggtgaaggacgccactcgcaagatcgccaaggctttcgccatctcgggcccttttaatgtgcagttcctcgtgaagggcaacgacgtcctcgttatcgagtgcaacttgcgcgcctcgcgttcgttccccttcgtctcgaagactctcggagttgacttcatcgatgtcgccacgaaggttatgatcggtgaaaacgtcgacgagaagcatctgccgaccctggaccacccgattattcccgcggattatgtcgctatcaaggcgcctatgttctcgtggccccgcctgcgtgacgctgatccgatcctgcgatgcgagatggcttctaccggcgaggtggcttgctttggagaaggaatccataccgcgttcttgaaggccatgctttccaccggcttcaagatcccacagaaggggatcttgattggcatccagcagtcgttccgcccgcgctttttgggtgtcgctgaacagcttcataacgaaggtttcaagctcttcgctacggaggcaacttccgactggctgaacgctaacaatgtcccggcaacccccgttgcttggcccagtcaagagggtcagaacccgagtctgtcttcgatccgaaagctgatccgcgacggatctattgacctcgtgataaatttacctaacaacaacacaaagtttgtccatgacaactacgttatcagacgtaccgctgtggattccggaatccctctccttacaaacttccaggtcaccaagctcttcgcggaggccgttcagaagtcccgaaaggtcgacagcaagtccttgttccattaccgccagtactcggccggcaaggccgct

SEQ ID NO: 8121 - DNA, 4500 bp, synthetic construct
  misc_feature 1..4500: note = source = /note="Description of Artificial Sequence: Synthetic coding sequence"
  source 1..4500: mol_type = other DNA
atgacgagaatcctgaccgcctttaaggtggtgcggaccctgaagaccggctttggttttactaatgtgacggcacaccagaagtggaagttttctcgccctggaattagactgctctctgtcaaggcccaaactgcccacatcgttctggaagatggtacaaagatgaaggggtattcattcggtcatccctctagcgtggccggtgaagttgtgttcaatacagggctgggaggctatcccgaagccattaccgacccagcttataagggacagattcttactatggcgaaccctattattgggaacggcggcgctccagatacaaccgccttggacgagctcgggctctctaaatacctcgaatccaatgggataaaagtctcgggactactggtcctggattatagtaaagattataatcactggctagccacaaagtcccttggccagtggctacaggaagagaaagtgcccgctatatacggtgtggacacccgcatgttgactaagattattcgtgataagggtactatgttgggcaaaatcgagttcgaaggacagccagtggatttcgtggaccctaacaagcaaaatcttattgccgaagtctcaaccaaagatgtgaaagtgtacggaaaaggaaatccgaccaaagttgtggctgtggattgcggcataaagaacaatgtgatccggctgctggtcaagcgtggagcagaggtccatctcgtgccctggaatcacgatttcacaaagatggagtacgatggtatcctcatcgcaggaggccccgggaacccagccctggccgaaccactgattcagaacgtgagaaaaattctggaatcagacaggaaggagccactgtttggcatcagcactggaaatttgatcaccgggctagcagcaggtgcgaaaacttacaaaatgtccatggccaacaggggccagaaccaaccagtactcaacattaccaataaacaggcctttatcactgcacagaatcacggctacgcactggacaatacactgccggctggatggaagcctctgttcgtgaacgttaacgatcagaccaatgaggggattatgcacgagtctaagccttttttcgctgttcagttccacccggaggttacaccaggaccaattgatacggaatatctcttcgattcgttcttcagtctcatcaagaaggggaaggccacaaccataacctccgttctccccaagccggcgcttgtggcaagccgggtggaagtgtccaaagtgcttatccttgggtccgggggccttagcattggccaggctggggagtttgactactctggctcacaggcagtgaaagccatgaaggaagaaaacgtgaaaactgttctgatgaaccctaatatcgcgtccgtacagaccaatgaagtagggctaaagcaggctgacacagtttactttttgcctatcaccccccagttcgtgaccgaggtaattaaagccgaacaacctgacgggctaatccttggcatgggaggtcagactgcccttaattgcggggtggagctctttaaacgtggagtgttgaaggagtacggagtgaaggttctgggtacaagcgtggaatccatcatggccacagaggatcggcaattattcagtgataagctgaatgaaatcaacgagaaaattgcaccctcttttgccgtagagagtattgaggacgcccttaaggcagctgataccatcggatatccggtcatgattcgaagtgcctacgctctcggcggactcgggagtgggatctgccccaacagagagacacttatggacctgtccaccaaggcctttgcgatgacaaaccagattttggtagagaagtcagtaaccggctggaaggaaatcgaatatgaggtcgtgcgagacgctgacgataattgtgtaacggtctgtaatatggagaatgtggacgccatgggtgtgcatactggcgactccgtggtggtggctccagcacaaactctttcaaatgccgaatttcagatgcttcgccgcaccagtatcaatgtcgtcaggcacctaggaatagtcggagaatgcaacatacagttcgctttgcatccaacttccatggaatattgcataatcgaggtgaacgcccgtctgtcccggagttcggcactcgctagcaaggctaccggctacccgctggctttcatagcagcaaagatagcgcttgggattccccttccagagataaagaacgtcgtatcgggtaagacttccgcctgcttcgaacccagcctggattacatggtaaccaaaattccgaggtgggacctagatcgattccatggcacatcttcgaggatagggtcctccatgaaatccgtgggtgaggtgatggcgatagggaggacttttgaagaaagcttccagaaggccctgagaatgtgtcacccctccatcgagggtttcactccaagactaccgatgaataaggaatggccatccaatctggatctacgaaaagaactctcagagccaagctcgacaagaatatacgctatcgcaaaggccatcgacgataacatgtctctcgatgaaatcgaaaagctgacctacatcgacaaatggttcttatataaaatgagagacatcctcaacatggagaagaccctcaaggggctcaattctgagagcatgaccgaagagacactcaagcgcgcaaaagagattggtttctccgataaacagatctccaagtgtctgggcctaactgaagcccagacaagagaactaagactcaagaagaatatccacccatgggttaagcagatcgacacacttgcggccgagtatccctctgtcactaactacctatacgtgacatacaatggacaagaacacgatgttaattttgatgaccatggaatgatggtgctgggatgcggcccatatcacatcgggagcagcgtcgaattcgactggtgcgcggtttcaagtatcaggactctgaggcaactgggtaagaagactgtggttgtaaattgtaatccggagactgtcagtaccgatttcgacgaatgtgacaagctgtacttcgaggagctatcattggaacgcattctggatatttatcaccaggaggcgtgcggggggtgcattatttcagtgggcggacagatccccaacaacttggcggtaccgctctacaagaacggcgtcaaaatcatgggcaccagccccttgcaaatcgaccgagcagaggatcggtcaatcttctccgcagtgctagacgaacttaaagtcgcccaggctccctggaaagctgtaaacacattaaatgaggcattggagtttgcgaagtccgtggattatccttgcctactcaggccctcctacgtcctctccgggagcgcaatgaacgtcgtattcagcgaagatgaaatgaaaaagttcttagaggaagcaaccagggtgtctcaagaacatcctgtggtgctgaccaagtttgtcgagggcgccagagaggtggagatggacgcagtcgggaaagatggcagagtgatcagtcatgctatctcagagcacgtcgaggacgctggcgtgcactctggagatgccacattgatgctcccgacgcagacaatcagccagggcgctattgagaaggtgaaagacgctactcggaaaatagccaaagcctttgccatcagtgggccgttcaacgtgcagtttctagtcaagggcaacgatgttctggtgattgagtgcaatctcagggcgtctcgctcttttccattcgtgtcgaaaactctaggagtggattttatagacgttgccacaaaagtcatgatcggagagaacgtggacgagaagcatctcccaacactggatcaccctatcatccctgccgactacgtcgctatcaaggcacccatgtttagttggccgcggctgcgcgatgccgacccaattttgagatgtgagatggctagcacaggggaagttgcctgcttcggcgaggggatacacactgccttcctcaaggcaatgctcagcacggggtttaagatcccccagaagggcattctgatcggcattcagcagagctttcggcctcggtttctaggggtggcagaacaactacataatgaaggctttaaactgtttgccaccgaggctacatccgattggctgaacgcaaataatgtgcctgccacccccgtggcttggccatcacaggaaggtcaaaacccctctctgtcatcaatcagaaaattgatcagggacggaagtatcgacttggtcatcaatttgcccaacaacaatacgaagttcgttcacgataactacgtgatccgccggacggccgtggattctggtatacctcttcttacgaacttccaagtaactaagctattcgctgaggctgtacagaagagccggaaggttgactcaaaatcattatttcactataggcagtatagcgcgggcaaggccgcg

SEQ ID NO: 8122 - DNA, 4500 bp, synthetic construct
  misc_feature 1..4500: note = source = /note="Description of Artificial Sequence: Synthetic coding sequence"
  source 1..4500: mol_type = other DNA
atgactagaatcttgactgcttttaaggttgttcgtacacttaaaactggattcggtttcacaaatgttactgctcatcaaaaatggaaatttagtagaccaggaattagattactttctgttaaggctcagacagctcatattgtacttgaagatggaactaaaatgaagggatattcatttggacatccatcaagtgtagctggagaagtagtatttaatactggattaggaggatatccagaagcaattacagacccagcttataaaggacaaattcttacaatggcaaatccaatcataggaaatggaggagcaccagatacaacagctcttgatgagctaggattaagtaaatatttagaaagtaatggaattaaagtttcaggtttacttgttttagattatagtaaagattataaccattggttagcaacaaaatcattaggacaatggttacaagaagaaaaagttccagctatttatggtgttgacactcgtatgttgactaaaattatcagagataaaggaactatgcttggaaaaatagaatttgaaggacaaccagttgactttgttgatccaaataaacaaaatctaatagctgaagttagtacaaaagacgttaaagtatatggaaagggaaatccaactaaagttgttgcagttgattgtggtataaaaaacaacgttattagacttttagttaaaaggggagcagaagttcatttggttccatggaatcatgattttactaaaatggagtatgatgggatactcattgcaggaggaccaggtaatccagctttagcagaaccattaatccaaaatgttcgaaaaatattagaatctgatagaaaagaaccattatttggtattagtacaggaaatttgattacaggattagctgctggagctaaaacttataaaatgtcaatggccaacagaggtcaaaatcagccagtacttaacattactaataaacaagcttttattacagctcaaaatcatggttatgctttagataatacattaccagctgggtggaaaccattattcgttaatgtaaacgatcaaactaatgaaggaattatgcatgaatcaaaaccttttttcgcagttcaatttcatccagaagttactccaggtccaattgacacagaatatctttttgattcttttttctcattaattaaaaaaggaaaagctacaacaattacaagtgttcttccaaaacctgctttagtagcaagtagagttgaggttagtaaggttttaattctaggtagtggaggattgtcaataggacaagctggagaatttgattattctgggtcacaagcagttaaagcaatgaaagaagaaaatgttaagacagttttaatgaacccaaatatagctagtgttcaaactaatgaagttggactaaaacaggctgatacagtttatttccttccaattacgcctcaatttgttactgaagtaattaaagcagaacaaccagatggtctaatattagggatgggtggacaaacagctttaaattgtggtgttgagctatttaagagaggagtacttaaagaatacggagttaaagtacttggaacatcagtagaatcaattatggcaacagaagataggcaattattttcagataaacttaatgaaattaatgagaaaattgctccatctttcgccgtagaaagtattgaagatgctttaaaggcagctgatacaattggatatccagttatgataagatcagcatatgcattaggaggtttaggaagtggtatttgtccaaatagagaaacattgatggatttaagtacaaaagcttttgcaatgacaaaccaaatattagttgaaaaatcagttacaggttggaaggaaatcgaatatgaagtggttcgtgatgctgatgataattgtgttactgtctgtaatatggaaaatgttgatgctatgggtgtacatactggtgattcagtagttgttgctcctgcacaaactctttcaaatgcagaatttcaaatgctaagaagaacatcaattaatgttgttagacatttaggaattgttggagaatgtaatattcaatttgctcttcatccaacgtcaatggaatattgtattattgaggttaatgcacgattaagtagatctagtgctttagcttcaaaagcaactggatatcctttagcttttattgctgcaaaaattgctcttggtattccattacctgagattaaaaatgtggttagtggaaaaacttcagcatgttttgaacctagtcttgattatatggtaacaaaaattccacgttgggatcttgatcgtttccatggaacatcatctcgtattggatcatcaatgaaaagtgtcggtgaggttatggctattggaagaacttttgaagaaagtttccaaaaagctttaagaatgtgtcatccatcaattgaaggatttacacctagactaccaatgaataaagaatggccatccaatcttgatcttagaaaagaattatccgaaccaagtagtacaagaatatatgctatagctaaagctatagatgataatatgtcattagatgaaattgaaaaattaacatatattgacaaatggtttttatataagatgcgagacattttgaacatggaaaaaactttaaaaggtcttaatagtgaatcaatgacagaggaaactcttaaaagagctaaagaaattggattttcagataaacaaataagtaaatgtttgggattaacagaagcacaaacaagagaattgcgtcttaaaaaaaatattcatccatgggttaaacagattgatacacttgcagctgaatatccatcagtgaccaattatttatatgttacgtataatggacaagaacatgatgtaaattttgatgatcatggaatgatggtattaggttgtggtccatatcatattggtagttcagttgaatttgattggtgtgcagttagttcaattagaactttaagacaattaggtaaaaaaacagttgttgttaattgtaatcctgaaactgtttctacagattttgatgaatgtgataaattatattttgaggaattgtcattagaaagaattttagatatttatcatcaagaagcatgtggaggatgtatcatttctgttggaggacaaatacctaataatttagcagttccactttataaaaatggtgttaaaattatgggaacttcaccattacaaatagatcgagcagaagatagatcaatattttctgctgttcttgatgaacttaaagttgcacaagcaccttggaaagcagttaatactctaaatgaggcattagaatttgctaagtctgttgattatccatgtcttttaagaccaagttatgttttatcaggatctgctatgaatgttgtctttagtgaagatgaaatgaaaaaatttttagaagaagctacaagagttagtcaagaacatcctgttgttttaactaaatttgttgaaggagcaagagaagttgaaatggatgccgttggaaaagatggaagagtcatttctcatgctatatcagaacatgttgaagatgctggagttcattcaggagatgcaacattaatgctacctactcaaactatttctcaaggtgctattgaaaaggtaaaagacgcaacacgaaaaatagctaaagcatttgctatatcaggaccatttaatgtacaatttctcgttaaaggaaatgatgttttagttattgaatgtaatcttagagcatcaagaagttttcctttcgtttcaaaaacgttaggagttgattttattgacgtcgctactaaagttatgataggagaaaatgttgatgaaaaacatttaccaactttagaccatccaattattcctgctgattatgttgctataaaagctccaatgttttcttggccaagattacgagatgctgatccaattttacgatgtgaaatggcatctactggagaagtagcatgttttggagagggaattcatacagcttttttaaaagctatgttaagtacaggttttaaaattccacaaaagggtattcttattggaatccaacaatcatttagaccaagattcttaggtgttgcagaacaattacataatgaaggatttaaattatttgcaactgaagcaacaagtgactggttaaatgctaacaatgttccagcaacaccagtagcttggccatctcaagaaggacaaaatccatcattatctagtattagaaaactaattagagatggatcaattgatttagttattaaccttccaaataataatactaaatttgtgcatgataattatgttattagaagaactgcagtcgattcaggaattccacttcttactaattttcaagtaactaaattatttgcagaagctgttcaaaagtctagaaaagttgacagtaaaagtctttttcattatagacaatattctgcaggaaaggctgca

SEQ ID NO: 8123 - DNA, 4500 bp, synthetic construct
  misc_feature 1..4500: note = source = /note="Description of Artificial Sequence: Synthetic coding sequence"
  source 1..4500: mol_type = other DNA
atgacacggatcttaactgccttcaaggtggtccgcacactgaaaaccggctttggattcactaatgtgaccgcacaccaaaaatggaagttctcccgcccaggaataagattgctgagtgtgaaggcccagacggctcatatagttctcgaagatggcacgaaaatgaaggggtattcttttggtcacccttccagcgtcgcaggggaggttgtgtttaatacgggcctgggcggatacccggaggcaattacagaccctgcctacaagggacagatccttaccatggcgaacccgatcatcgggaacgggggcgcccccgatacaacagcattagacgaactaggactgagcaagtatctggagagcaatggcatcaaggtgagcggcttactggtgctggactacagcaaggactacaaccactggctcgctacaaaatcactgggccagtggttacaggaagaaaaggtccccgcaatctatggcgtggatactcggatgctgacaaagatcatccgcgacaaggggaccatgcttggaaagatcgagttcgagggacaaccagtggattttgtcgatccgaacaagcagaatttgatagcagaggtcagtactaaggacgtcaaagtgtatggaaagggtaacccaacgaaagtggtggcggtcgactgcggcattaagaacaatgtcatacgcctgctagtgaagagaggggccgaagttcacctggtgccttggaatcatgacttcactaagatggagtacgatggcatcctcatcgccggtggccccggcaaccctgctctggcagagcccctgattcagaacgtgaggaagatcttggagagcgatagaaaggagccgttattcggcataagtaccggcaatctgatcaccggtctggccgccggcgctaaaacgtacaagatgagcatggccaatcgggggcagaaccaacctgtcttgaatatcaccaacaaacaggcattcattaccgcccagaaccatggttacgcgcttgacaacactctgcctgccgggtggaagccattatttgtaaatgtaaatgatcagacgaacgaaggcattatgcatgagtcaaaacccttctttgctgtgcagttccatcccgaagttacccctgggccgattgatacagaatacctgttcgactcgttcttttctctcattaagaagggaaaagctaccaccattacttcagttcttcccaagcctgccctggtggcgagtcgggtcgaagtgagcaaggtactcatcttgggctctggaggcctcagtattggtcaagctggggagttcgactacagtggtagccaagccgtgaaggctatgaaagaagaaaacgtgaagactgtgttaatgaatcctaatatagcctcagtgcagaccaatgaggtcggtctgaaacaggccgacaccgtctacttcctccccatcacccctcagttcgttactgaggttatcaaagccgagcagcccgatgggctcattttggggatgggggggcagaccgcgttaaactgtggggtcgagctcttcaagcggggtgttctcaaagagtacggtgtgaaagtcttgggcaccagcgtcgagtccatcatggcgacagaagaccgacaactgttcagtgacaaattaaacgagatcaacgagaaaatcgcccccagctttgccgtggaaagcatcgaagatgccctgaaagcagcagatacaatcgggtatcctgtgatgattcgcagtgcttacgctctcggcgggcttggaagcggcatttgtccgaaccgcgagacactgatggacctctctactaaggcctttgcgatgacaaatcagattctggttgagaagtccgtgaccgggtggaaggagattgagtacgaagttgtacgcgatgccgacgataattgtgtgaccgtttgcaatatggaaaatgtagacgccatgggggtgcacactggcgactcagtggtcgtggcaccagctcagactctgtctaatgcagaattccagatgttacggaggacctccattaatgtggtccgccacctgggcattgtaggagaatgcaatatccaatttgccctgcacccgacctcaatggaatactgcatcatcgaggtaaatgcccgccttagcaggagttccgccttggcctcaaaggccactggatacccactggcctttatcgctgcgaagatagcactgggcattcctctgccggaaataaaaaacgtagtgagtgggaagacttccgcatgtttcgaacctagcctcgattacatggtcaccaagataccacgatgggacctcgaccgattccacgggacttcgagcagaatcgggagctccatgaagagcgtgggcgaagttatggccattggaaggacattcgaggaatcttttcagaaggcactacgaatgtgtcaccctagcatcgagggctttacaccgagactaccaatgaataaggagtggccctccaatttagacctgaggaaagagttgagtgagccttcctccacgcgcatatacgctattgcaaaggcaattgatgataacatgtccctcgacgagattgaaaaactcacgtacatcgataagtggtttttatacaaaatgcgagatatcttaaatatggagaaaactctgaaaggcttaaattccgagagtatgactgaggagaccctgaagcgcgccaaggagatagggttctccgataagcagatttccaagtgtttgggcctcacagaggcacaaacccgcgagctgagactaaagaagaacattcacccatgggttaagcagatcgacaccttggcagcggaatacccatcagttaccaattacctttacgtcacctataatgggcaggagcatgatgttaacttcgatgaccatggcatgatggtcttgggctgtggaccttaccatatcgggagctctgtagaattcgactggtgcgcagtgagctccatccgtaccctccggcagctgggcaagaagaccgttgttgtgaactgcaatccagagaccgtttcaaccgactttgacgagtgcgataagctgtatttcgaagaactcagtttagaacggattcttgacatctatcaccaggaggcttgtggcggctgcattataagtgttggggggcagatccctaataacttagccgtacctctgtacaagaatggggtgaagataatgggcacctccccacttcagatcgatcgcgcggaagataggagcattttttcagctgtcctcgatgaactgaaagtcgctcaggcaccttggaaggccgttaacactcttaatgaagccctggaattcgcaaaatccgtggattacccttgtctgctcagaccatcatatgtgttatccggatcagcgatgaatgtggtctttagtgaagacgaaatgaagaaattcctggaggaggccacacgcgtctctcaagaacacccagtggtgctgacaaaatttgtggagggagctagggaagttgaaatggatgccgtaggcaaagatggtcgggttatcagtcacgcgataagcgagcacgtcgaggacgcaggggtgcacagtggtgacgcaactctgatgctgccaacacagaccattagccaaggcgcaatcgagaaggttaaagatgctacccgcaagatagctaaggcttttgccatctctggcccttttaatgtacagtttttggtgaagggcaatgatgtgctggtgatcgaatgtaacttgagagccagccgttcatttccatttgtgagcaagaccctgggcgtggacttcattgatgtggcaaccaaggtaatgattggcgaaaatgtggatgaaaaacacctgccgactctggaccatcctattatcccggcagactacgtggctatcaaagctccaatgttcagctggcctaggctgagagacgccgatccaattcttcgctgtgagatggcctctacaggtgaggttgcttgtttcggcgagggaatccacaccgccttcctgaaggccatgcttagcacaggttttaagatcccccagaaaggaattctgataggcatacagcagtcgttccggccaagattcctgggggtggccgagcagctgcataacgagggtttcaaactgtttgctactgaagcaacttctgactggctcaatgccaataatgtgccagctacccctgtagcatggccaagccaggagggacagaatccttctttgtctagcatccgcaagctgatcagggatggctccatagatctagtgataaacctgcctaacaacaatacaaagtttgtgcacgataattatgtgatccggagaaccgccgttgactcgggaattcctctgctgactaacttccaggtcaccaagttatttgccgaagcggtccagaaatcgcggaaagtcgattccaagtccttattccactaccggcagtatagtgctggaaaggctgcg

SEQ ID NO: 8124 - DNA, 4500 bp, synthetic construct
  misc_feature 1..4500: note = source = /note="Description of Artificial Sequence: Synthetic coding sequence"
  source 1..4500: mol_type = other DNA
atgactcggattctaacagctttcaaagtagttcgcactctaaagactgggttcgggtttactaatgtgacagcacatcagaaatggaagttttctaggcccgggataagactcctttctgtcaaagcccaaacagctcacatcgtgttagaggatgggactaagatgaaaggatattcctttggacatcctagtagtgtggccggagaagttgtatttaatacaggactaggaggataccctgaggctataacagatcccgcttataaagggcagatactcacaatggctaacccaattatcggaaacgggggggcccccgacactactgctcttgatgaactaggactgagtaaatacctggaatcaaacgggattaaagtgtctgggctgctagttttggactattctaaggattataatcattggttagcaactaagtctctggggcagtggctacaagaagaaaaggtccccgctatctatggagtggatacaagaatgcttacaaaaattatccgggacaaagggacaatgcttgggaagatcgaatttgagggacagccagtcgatttcgtcgatcctaacaaacagaatctcatcgcagaagtgtcaacaaaagatgtaaaagtgtacggaaaagggaacccaactaaagtcgtagccgttgattgtggaatcaaaaacaacgtaatccgcctgctggtgaaacgcggagcagaagtgcatttggtgccctggaaccacgattttactaaaatggaatatgatggaatactaatcgctggggggcctggaaacccagccctggctgaaccattaatacagaacgtcagaaagatattagaatcagacaggaaagaaccactatttggaatctccactgggaatttaatcactggactagctgctggagctaaaacttataaaatgtctatggccaatagggggcagaatcagccagtgctgaatatcacaaataaacaggcattcatcactgcccagaaccacgggtatgccctagataatactctgcccgccggatggaaaccactcttcgtcaacgtgaacgatcagacaaacgagggaataatgcatgagagtaaacccttttttgcagtacagttccaccctgaagttactcccggacccatagatacagaataccttttcgacagtttcttctcactgataaaaaaggggaaggcaactacaattacttctgttctgcccaaacctgctctagtcgcttcacgcgtggaagtctcaaaagtcctgattctcgggagtggagggctgtctatcgggcaagcaggggaattcgattattcaggatcacaggcagttaaggctatgaaagaagaaaatgtgaaaacagttcttatgaatccaaatatcgcttcagtgcagacaaatgaagtcgggctgaaacaggcagacacagtgtatttcctacctatcacaccacaatttgttacagaggtgataaaggctgaacagccagatggactgattctggggatgggggggcagacagcacttaactgcggggtcgaactgtttaagcggggggtgctgaaggaatatggagtgaaggtgttagggacttctgtagagtcaatcatggccacagaagaccgacagctgttctccgataagctgaacgaaatcaatgaaaaaatagccccatctttcgccgtggagtccatcgaagacgctcttaaagccgcggatacaatcggatatccagttatgatccgcagtgcttatgcactcggaggattagggtctggaatctgtccaaatcgagaaacacttatggacctgtctacaaaagcattcgcaatgacaaatcagatccttgttgagaagtctgtaactggatggaaagaaatcgaatatgaagtggttagggacgcagacgataactgcgttactgtgtgcaatatggaaaacgtcgatgcaatgggagtgcatacaggggattctgtggtagtcgccccagcccagacactgtctaatgctgaattccagatgcttcgaaggacatcaatcaatgttgtaagacacctagggatcgtcggagaatgtaacatacagttcgccctccatcccacaagtatggaatactgcatcatcgaggtgaatgcacggctttctcgctcttctgcactggcatccaaagctacagggtatccactggcattcatagcggccaaaatagcattgggaatacccctgcccgaaataaaaaatgtggtctcagggaaaacaagtgcctgctttgaaccttcactggattacatggtgacaaagattccacggtgggatctcgatcggttccatggaactagttctagaatagggtcttccatgaagtccgtcggggaagtaatggcaatcgggaggactttcgaagaatctttccagaaggcactacggatgtgtcacccatcgattgaggggtttactcctaggctccctatgaataaagagtggccctctaacttggatctgaggaaggaactatcggaaccctcatctacaaggatctacgctatagctaaagctatagacgataacatgtctctcgacgaaatcgagaaattaacatatatcgataaatggttcctttacaaaatgcgagatatactaaacatggaaaagactctcaagggattaaattcagaatctatgactgaagaaacactcaaaagagcaaaagaaatcggattttcagataaacagatatctaaatgtttagggctcacagaggctcagactcgggaacttaggctaaaaaaaaatatacacccctgggttaaacagattgatactctcgccgccgagtatccatctgtcactaattatctctatgtgacatataatgggcaggaacacgatgtgaactttgatgatcatggaatgatggtactggggtgtggaccttatcacataggatcttcagtcgaattcgattggtgtgctgtatcgagtatcagaacactacggcagctaggaaaaaaaacagttgttgtcaattgtaatcccgaaactgtatcaactgattttgatgagtgcgataagttatattttgaagaattgagtttagaacgaatactcgatatctatcatcaggaagcctgtgggggatgtatcatctccgtagggggacagatacccaataaccttgctgtgcccctctataaaaatggagttaagatcatggggacatctccactccagatagatcgagccgaggacagatctatcttttctgcagtgctggatgagctgaaagtagcccaggcaccctggaaggctgtgaacacacttaatgaagctctcgaattcgctaaatcagtcgactatccctgtctattgaggccctcttacgtactcagtgggtctgctatgaatgtggtcttctcggaagatgaaatgaagaaattcctggaggaagccacaagggtgtcacaggaacacccagttgttctcacaaaatttgtggaaggggcaagagaggttgaaatggatgccgtcgggaaagacgggagagtaatctcccacgcgatatccgaacatgtagaagatgcgggagtacactccggagatgcaacactgatgctgcccacacagacaataagtcagggggcaatagaaaaagtgaaagatgccacacggaaaatcgccaaagcctttgctatctcagggccatttaatgtccagtttctggtaaaagggaatgatgtgctagtcatagaatgtaatttaagggcttctcgatccttccccttcgtctctaagactttaggagtagatttcatcgatgtagccactaaggtgatgataggggaaaacgtggatgaaaaacatctccctacacttgatcatcccatcatacctgctgattacgtagcaatcaaggccccaatgtttagttggcccaggttgcgcgatgccgatccaatccttcgatgtgaaatggcgtctacaggggaggtcgcatgctttggagaggggatccacacagccttcctaaaagccatgctatctacggggtttaaaataccacagaaggggatactgattggaatccagcagtcgttcaggccccgatttttgggggtggccgaacagctgcataatgaggggtttaaactcttcgccactgaggctacatcagactggctcaatgccaacaatgtgcctgccactccagtagcctggccctcccaggaaggacagaacccttcactctccagtattaggaaactcatcagggatggatctatagatttagtgattaatctccccaataacaatacaaaatttgtgcacgataactacgtgataagacggacagcagttgattcagggataccacttttgactaacttccaggtaacaaaattatttgccgaagccgtacagaaatcgaggaaagtagattccaagtcgttattccactatcgacagtacagtgccggaaaagctgca

SEQ ID NO: 8125 - DNA, 4500 bp, synthetic construct
  misc_feature 1..4500: note = source = /note="Description of Artificial Sequence: Synthetic coding sequence"
  source 1..4500: mol_type = other DNA
atgactagaatactgacagcgtttaaggtggtacgcaccctaaagactggattcggattcacaaatgtcacagctcaccagaaatggaagttcagcagaccaggtataagactactctcggtgaaggcacagacggcccacattgtgctggaagatgggactaagatgaagggatactctttcggccatccctccagcgtcgccggagaagtagtgttcaacaccggtctgggcggatatcctgaggccatcacagaccccgcctacaagggtcagatactgactatggccaatcccatcatcggaaatggaggagctcccgacaccactgcactcgacgaactaggtctgtccaagtaccttgagagtaacggtatcaaggtatctggtctgctggtcttagactattccaaagactacaaccattggttagctaccaagtccctcggacagtggctgcaggaggagaaagtgccggccatatacggcgtggatacgaggatgttaactaaaataattcgggataaggggactatgctggggaaaatcgaattcgagggccagcccgtagactttgtagatccgaacaagcagaatttaattgctgaggtatcgactaaggacgtaaaagtttacgggaagggtaaccccacaaaagtcgtggcagtggactgcggtattaagaacaatgtgattcgtctgctggtcaagaggggcgctgaggtgcacctcgtgccctggaaccacgatttcaccaaaatggagtacgacggaattctaattgcaggcggccctggcaaccccgctctagccgagcccttaatccagaatgtcaggaagatcctggagagcgacaggaaggaacctttgttcggcatatcaacagggaacctgatcactggcctggctgctggcgcaaagacttacaagatgtcgatggctaacagggggcagaaccagcccgtcctaaacattactaacaaacaggctttcatcaccgctcaaaatcatggctacgcattagataacaccctgccagcgggttggaagcctttatttgtgaacgttaatgatcagacgaacgaaggaatcatgcacgaatctaaacccttcttcgcggtgcagttccacccggaggttacgcctggaccaatagacaccgaatacctcttcgatagttttttttcactcataaagaagggaaaggcaacaactatcacctcagtgctgccaaagccagccctggtggcatcgagagtggaggtgagtaaggttctaatcctcgggtctggcggtctgtcaatcgggcaggccggtgagttcgactactccgggtcccaagccgttaaagccatgaaggaagagaacgtaaaaactgtcctcatgaacccaaacatagcgtctgttcagacgaatgaggtcggactcaaacaagcagacacagtttattttctgccaatcactccgcagttcgtaactgaagtgatcaaggccgagcagcccgatgggctaattctcgggatgggcgggcagactgccctgaattgtggagtggagctgttcaagagaggagtcctgaaagagtatggcgtgaaagtcttgggcacatcagtggagtccattatggccaccgaggaccgtcagctgttttccgacaaacttaatgaaataaatgaaaagatcgccccttcattcgccgtcgagagcatcgaagatgccttgaaggctgccgatacaatcggttaccctgtaatgatacggtctgcttatgctctaggcggcctgggttctggaatatgcccaaaccgagaaacactgatggacctgagcacgaaagcgtttgctatgacgaatcagatcctggtcgagaaatccgttactggatggaaggaaatcgagtacgaggttgtgcgtgacgctgatgataattgcgtaacggtatgtaacatggagaacgtggacgcaatgggcgtgcataccggagactcagtggtggtggcccccgctcaaaccctgagcaatgctgagttccagatgctgcgacgaacgtccatcaatgtggtcaggcatctcggaattgtcggggagtgcaacatccagttcgccctccacccgacaagtatggagtactgtatcattgaagtgaatgcccgtcttagcagaagcagcgccctggcctcaaaggcaactggctatcctctggcttttatcgctgctaagattgcccttggcatccccctgcccgaaatcaagaacgtggtgtctggtaaaaccagtgcctgctttgagcctagtttagactatatggtgaccaagattccaagatgggatctcgacaggtttcatggcacatcaagccggatcggctcctcaatgaagtccgtaggggaggtcatggcgatcggacggacctttgaggagagcttccagaaagcgctcagaatgtgccacccaagcattgaagggttcaccccacggctccccatgaataaggaatggccgtctaatctggatttgcgcaaagaactttccgaaccctctagcacacggatctacgctatcgccaaggccattgatgacaatatgtcacttgacgaaatagaaaagctgacatatatcgacaagtggttcctatacaaaatgcgggacattctcaatatggagaaaacccttaagggcctcaattctgaatcaatgacagaggagacgcttaagcgagcaaaagagatcggattttctgacaaacagatcagcaagtgtttgggactgaccgaagcacagacgagagaactgagattgaaaaaaaatattcacccctgggtgaagcagatcgataccttggcagcagagtaccccagtgtgaccaactatctgtatgttacctacaatggacaagagcacgacgttaactttgatgaccatgggatgatggtgttggggtgtggtccttatcacatcggcagcagtgtggaattcgactggtgcgcagtgtcgtccataaggaccttaaggcagctgggcaagaagacagttgtggttaactgtaaccctgaaacagtgtctacggatttcgacgagtgtgacaagctgtactttgaggaactctcgctggaaagaatcctcgatatttaccaccaggaggcatgtggaggctgcattatcagcgtgggcgggcagataccaaataacttagctgtccccctgtacaagaacggcgttaaaataatggggacttccccattgcaaattgaccgcgctgaggatcggtccatcttcagtgctgtactggatgagctcaaggtggctcaggccccttggaaggcggtgaatactttgaacgaagcactggagtttgctaagtctgtggactatccttgtctacttcgtccttcctatgtgctctccgggagtgcaatgaatgtcgtgttcagtgaggacgagatgaagaaattcctggaggaggccacccgggtgtcacaggagcatcctgtggtattgacgaagttcgtagagggcgcgcgagaggtggagatggacgcagtcgggaaggacgggcgggtaatatctcatgccattagtgaacacgttgaagacgctggagtgcactctggtgacgctactctcatgctcccaacacagacaatatcccagggtgctatagagaaagtcaaggacgctacacggaaaatcgccaaggcctttgccatatctgggccttttaacgtgcagtttttggtgaagggtaatgacgtcctggtcatcgaatgcaacctgcgggcttcgcggtcatttccctttgtgtccaagaccctgggagtggatttcatagacgtggcgaccaaggtaatgatcggagaaaatgtggacgagaagcatctgcccacattggatcaccccattatccccgctgactacgtggcaattaaagcccctatgttcagttggccacgcctgcgcgatgcagatccaatcctccggtgcgaaatggcttctacaggtgaggtagcatgctttggggagggaatccacaccgcatttctcaaggctatgctgtcgaccgggtttaaaatcccacaaaaaggtatcctgatcgggatccagcaatcgtttaggcctcggtttctgggggtcgctgagcagctccataatgaaggtttcaaattatttgcgacggaagccacatcggactggttaaatgctaataacgtacccgccacacccgttgcgtggccaagccaggagggtcagaacccctctctgtcgtcgatacgtaaactcattagagacgggtccatcgacttggtcatcaacttaccaaataataataccaaattcgtgcatgacaattacgtgattaggcggactgctgtagattcgggtatcccccttctaacaaattttcaggtcacaaagctgttcgcagaagctgtgcagaagagccgcaaggtggattccaagtccctgtttcattacaggcagtactctgcgggtaaggcggca

SEQ ID NO: 8126 - DNA, 4500 bp, synthetic construct
  misc_feature 1..4500: note = source = /note="Description of Artificial Sequence: Synthetic coding sequence"
  source 1..4500: mol_type = other DNA
atgaccagaattctgacggccttcaaagtagtgcggacactcaagactggatttggcttcactaatgtcacagcccaccaaaaatggaagttctccaggccggggatcagacttctatctgtcaaggctcagaccgcccacattgtattggaagatggcacaaaaatgaaaggttactccttcgggcatcccagctctgtggccggcgaggtcgtcttcaacactggcctgggtggctatcctgaggcaattaccgacccggcgtataagggacagattctgacaatggcaaaccccatcattggtaacggaggcgctcctgataccaccgccttagatgagctgggcctgtcgaaatatctggaatcaaacggaattaaggtgagcggtcttcttgtcctggactactctaaggactataaccactggctggcaactaagtccctgggtcagtggttgcaggaagagaaggtgcccgccatctatggtgtggatactcgaatgctaacgaaaatcattcgagataagggtactatgctcggaaagatcgaattcgaggggcagcccgtcgacttcgtggatcctaacaaacagaacctgatcgctgaagtctctacaaaggacgtgaaggtgtacgggaagggcaaccccactaaggtcgtcgccgtggactgcgggatcaagaacaatgttataagacttttggtcaaacggggagctgaggtccacctcgtcccttggaatcatgactttactaaaatggaatatgacggcatcctgatcgccggcggacctggcaatcctgcccttgccgagcccctaatccagaacgtgagaaagatcctggaatccgaccgaaaggaaccactcttcggtataagtactgggaacctcataaccggcctcgctgccggtgcaaagacctataagatgtccatggcaaatcgagggcagaatcagcccgtgcttaacatcaccaacaaacaggctttcataactgctcagaatcatggctacgccctggacaacacgttgccagcaggctggaagcccctgtttgtcaatgtaaacgatcaaacaaatgaaggcatcatgcatgagtcgaagccattctttgctgtacagtttcaccctgaagttacacccggcccaatagatactgaatatctttttgactcttttttctctctcatcaagaaaggaaaagccacgaccatcacaagcgtccttcccaaacctgcgctggtggcctctagggtggaagtttcaaaggtgttgatcttaggctccggcgggctatcgatcggacaagccggtgaatttgactactctgggagtcaggcagtgaaggcaatgaaggaggagaacgtcaagacagtcctaatgaaccccaacattgcctccgtccaaaccaacgaagtgggcctgaaacaggccgatactgtctatttcctcccaataacccctcagttcgtgacggaagtcatcaaggctgagcagcctgatgggcttatattggggatggggggccagacggccctaaactgcggcgtcgaactgtttaaaagaggcgttttgaaggagtatggagttaaggtcctggggacctctgtcgaatcgattatggccactgaagaccgccagctgttttccgataagctgaatgagataaatgagaaaatcgctccctccttcgccgttgagtcaatcgaggacgctctcaaagccgccgatactatagggtacccggtgatgataagatctgcttacgcccttgggggcctgggctctggcatttgccccaatagggaaactcttatggacctgtccacgaaggcatttgcaatgaccaatcaaatcctggtggagaagtctgttaccggatggaaggaaattgagtatgaagtggttagggacgccgacgacaattgcgtgacggtgtgcaatatggagaatgtagatgccatgggtgtccatactggcgattcagtggtggtcgcccccgctcagaccctgtccaacgccgagttccaaatgcttaggaggactagcatcaatgtcgtacgacacctgggaatcgtgggtgaatgcaacattcagttcgctctccaccccacaagcatggagtattgcattattgaggtgaacgcaagactgagcaggtcatccgctctagcaagtaaggccactgggtatcccttggctttcatcgcggctaaaattgctctcggcattccccttcctgagattaaaaatgtggtgtccggtaagacgtccgcctgttttgaaccttcactggactacatggttaccaagatccctcgatgggatctggaccgttttcacgggacgagctccagaattggctcgagcatgaaaagcgtgggagaggtgatggccattggccgaacctttgaggagtcttttcagaaagcacttcgaatgtgtcacccctcaatcgaaggctttacccccagactgcccatgaataaggagtggcctagtaaccttgacctgagaaaggagctctccgaaccatcctcgacccgcatatatgctattgccaaggccatagatgacaatatgtcgctggatgagatcgaaaaacttacttatatcgataaatggttcctctacaaaatgagggacatactcaacatggagaagaccctgaagggcctgaacagcgaaagcatgacggaagaaacactgaagcgagcaaaggaaatcggattctccgacaagcaaatctcgaaatgcctgggcctcacagaagcccagacgagggagctccgactgaagaagaatattcatccgtgggtgaaacagattgacactctggccgcagagtacccctcagtgacaaactatttgtatgtgacctataacggtcaggagcacgacgtgaattttgacgatcatggtatgatggtattgggctgcgggccttatcacattggcagttccgtagaattcgactggtgcgccgtgagctcaattcgaactctccgacagctgggaaagaagactgtcgtcgttaattgcaaccccgagaccgtatccaccgattttgacgaatgcgacaaactgtattttgaggaactcagtctggagagaattctcgacatttaccatcaggaggcctgcgggggctgcatcatttccgtaggaggccagattcccaacaacttggctgttcctttatacaagaacggggtgaaaatcatggggacttcccccttgcagatagatcgtgccgaggaccgatcaatcttcagcgctgttttggatgagttgaaggttgcgcaggcgccatggaaggcagtgaacaccctcaatgaggcactggagtttgccaaatccgtcgactacccatgcctgctgaggccatcctacgttctgtctggaagcgcgatgaacgtggtttttagcgaggacgagatgaaaaagttcctcgaggaggcaacaagagtgtcacaagagcacccagtcgttcttacaaagtttgtcgagggagcgagagaagtcgagatggacgccgtggggaaagacggtagggtgatttcgcacgccatttctgagcacgttgaggacgcaggagtgcacagtggtgacgcaacactcatgctgccaacacagactatctcccagggcgcaatcgaaaaggttaaagacgcaacccgcaaaatcgcaaaggcattcgctatctccggaccctttaatgttcagttccttgtgaagggaaatgacgtgctggtgatcgaatgcaacctcagagcttctaggtcctttccttttgtgtccaaaacactcggagtcgattttatcgacgtggccacaaaggtgatgatcggggaaaacgttgatgaaaaacacctgccaacccttgatcatccgataataccagcggactacgttgctattaaggccccaatgttctcttggccgagactaagggacgcggatcctattttgagatgcgagatggcttcaacaggagaagtggcctgcttcggtgaaggcatacatactgctttcttaaaggccatgttgtccacaggcttcaagatcccacagaagggcatcctgattgggatacaacaatcttttagacctaggttccttggcgtggcagagcaactacacaatgaagggttcaagctctttgcaaccgaggctacaagcgactggttgaatgcaaacaacgtaccagccaccccagtggcgtggcctagccaggaagggcagaacccaagtctgtccagcataagaaagctaattcgcgacggaagcattgatctggtaattaatctgccaaacaataacactaaatttgtgcacgataactacgtgatacgacgaaccgcagttgacagcggcatccccttgttgaccaacttccaggtgactaaactgtttgccgaggccgtgcagaaatcacgaaaggtggatagtaaatcactgttccattacagacaatatagcgccggtaaggccgca

SEQ ID NO: 8127 - DNA, 4500 bp, synthetic construct
  misc_feature 1..4500: note = source = /note="Description of Artificial Sequence: Synthetic coding sequence"
  source 1..4500: mol_type = other DNA
atgaccaggatcctgacagcttttaaggtcgtgaggacactgaagaccgggttcgggtttacgaatgttacagcccatcagaagtggaagttcagtaggcctggaataagacttctctctgtgaaagcgcagactgctcacatcgtacttgaggatggaacgaagatgaaaggttattccttcggccatccaagcagcgttgcgggggaggtagtgttcaacaccggcctggggggctacccggaggcaattaccgatccagcctataagggacagattttgacaatggccaaccccattattggaaacggcggcgcccctgataccaccgctctggacgagttgggtctgtccaagtatctggaatccaatggcataaaagtaagcggattgctcgttcttgactacagtaaggattacaaccactggctggccacaaagagtctgggccagtggctgcaagaggagaaagtacctgcaatctacggggtggacacaagaatgttgacgaagattattcgcgacaagggaacgatgctcggcaaaatcgaatttgaaggccagcccgtcgatttcgtggacccaaacaagcagaacctgatcgccgaggtttcaacaaaagatgtaaaggtgtacggcaaaggtaaccctaccaaggtcgtcgctgtggactgcgggatcaaaaacaacgttataaggctgctggtgaagagaggtgccgaagtgcacctcgtgccttggaaccatgattttactaaaatggagtacgatggtattctcattgcagggggtccaggcaacccagcattggccgaacctctgatacaaaatgtacgcaagatactcgaaagcgaccggaaagagcccttgttcggaatctctactggaaaccttattacaggcctcgccgcaggcgcaaaaacttataagatgagtatggccaacaggggacagaatcagcctgtgttgaatattacaaataagcaggcctttatcacagcgcagaaccacggctacgctctggacaacacactccctgcgggatggaagcctcttttcgtgaacgtaaatgaccagacaaatgagggtattatgcacgaatctaagccctttttcgctgttcagttccatcctgaggtgactcctggtccaattgatacggaatacctgttcgattcattcttttcacttatcaagaagggaaaagccacgacgatcacctcagttttgccaaagcctgccctggtcgcatctagagttgaggtctctaaagtcttgatcctgggctctggcggactctctatcggtcaagcgggcgaattcgactatagcggctcccaggccgttaaggccatgaaggaggagaatgtgaaaaccgttctgatgaaccctaacattgcaagcgtacaaacaaacgaggtgggccttaagcaagcagacaccgtgtacttcctcccaataacacctcagttcgtgactgaggttatcaaagccgaacagcccgacggcctgattttgggtatgggcgggcagaccgcactgaactgcggcgtggaactctttaaacgaggggtgcttaaagaatatggggtgaaagtcctgggtaccagcgtagagagtattatggccaccgaggatcgccagctgttcagcgacaagctgaatgaaattaacgagaaaatcgccccttcctttgctgtagagagcatcgaggacgctttgaaagctgcagacacaattgggtatcccgtgatgattcgatccgcctacgcacttggaggccttggatctggaatctgccctaaccgcgagactctcatggacctgagtaccaaggcgtttgcaatgactaatcaaatcctggtggaaaagtccgtcaccggatggaaggagattgagtatgaggtcgtcagagatgccgacgataactgtgtgactgtctgtaatatggaaaacgtcgacgcaatgggagtccataccggcgattctgtggttgttgcgccagcccaaacgttgagcaacgctgagttccaaatgctgagacgcacatcaattaacgtggtgcgccacctggggatcgtgggggagtgtaatatacaattcgctttgcatcctacgagtatggagtattgtattatcgaggtcaacgctagactttcccggtcatctgctctggcatctaaggctaccgggtatcctttggcttttatcgccgctaagatagcactcggcatccctctgcctgagataaagaatgtggtgagcggcaaaacttctgcatgcttcgagccttccctggactatatggtgactaagattcctagatgggatttggatagatttcatggcaccagcagtcgcatcggatcctccatgaagtcagtcggcgaggtgatggccatagggcgaacgttcgaggaatcctttcaaaaggccttgcggatgtgtcacccttctatcgaagggtttacaccccgacttcccatgaacaaagagtggcccagtaatcttgacctgcgcaaggaactgagcgaaccctccagcacgcgaatctacgctattgccaaagccattgacgacaacatgagccttgatgagatcgagaagctgacttatatcgataaatggtttctctacaaaatgagagatatattgaatatggaaaagaccctgaaggggctgaattccgagtccatgaccgaggaaacactcaagcgcgccaaagagattgggttctcagataagcagatatccaagtgtttggggctcaccgaagcccagacaagggagctgagactgaagaagaacattcacccctgggtgaagcaaatcgataccctcgccgccgagtacccttcagtgaccaattacttgtacgtgacatataacgggcaggagcatgatgttaactttgatgatcatgggatgatggtgctgggctgtgggccctaccatatcgggtctagtgtggagttcgactggtgtgcagtttctagtatcaggactcttcgacagctggggaaaaagaccgtcgtcgtaaactgcaaccctgagaccgttagcactgactttgatgaatgcgacaagttgtacttcgaagagctgtctcttgagagaatccttgacatataccaccaggaagcctgcggaggatgtatcatctctgtaggcggtcagataccaaataacctcgccgtgcccctctataaaaatggggtgaagatcatgggcacaagtccattgcagatcgatcgggcagaggataggtccatattctcagcagtgctggacgagcttaaggtggcccaagccccctggaaggcagtcaacacacttaatgaggccctcgagttcgctaagagcgtggattatccctgtctgctcaggccaagttacgttctgagcggatcagctatgaatgttgtcttctcagaggatgagatgaaaaagttcctggaagaggcgactcgcgtgtcccaggagcaccccgtagtgctgacaaaatttgttgagggcgcccgagaagtcgaaatggacgccgtcggcaaggatggtcgcgttatttctcatgccatatctgaacacgtggaagacgcaggcgttcatagtggggacgctacattgatgttgcccacgcagaccatttctcagggtgccatcgagaaagtgaaggatgcaacccgcaagattgcgaaggctttcgccatttcagggccttttaacgtgcagtttcttgtcaagggaaatgacgtgctcgtcatcgagtgcaatctgcgagcatccaggtcctttccattcgtgagtaagacacttggagtcgatttcatagacgtcgctactaaggtgatgattggcgaaaacgtggatgaaaagcacttgccaacactcgatcacccaattatacccgccgattacgtagccattaaagcacctatgtttagttggcccagactgagagacgctgaccccatcctgcgatgtgagatggcttccacgggggaggtagcctgtttcggagagggcattcatactgccttcctcaaagccatgctctcaaccggcttcaagatcccacagaagggtattctgataggcattcagcagagtttccggcccagatttcttggggtcgcggagcagttgcacaatgaggggtttaagctgtttgctacggaggcaacgtctgattggctgaacgccaataatgtgcctgcgacaccagtggcttggccctcccaggaggggcagaatccaagcctctccagtatcaggaagctgatacgcgatggctccattgacttggtgattaatctgcccaacaataacacgaaatttgtccatgacaactacgtgatcagaaggactgctgtggacagcggtatccctctcctgaccaattttcaggtaaccaagctttttgccgaagcagttcaaaaatctaggaaagtagacagcaagagtctgtttcattatagacaatatagcgcaggcaaggcagct

SEQ ID NO: 8128 - DNA, 4500 bp, synthetic construct
  misc_feature 1..4500: note = source = /note="Description of Artificial Sequence: Synthetic coding sequence"
  source 1..4500: mol_type = other DNA
atgacgcgcatcctgacagcatttaaggtggtgaggactttgaagacaggatttggattcacgaacgtgactgcccatcagaaatggaagttctccaggcctggaatcaggctcctctccgttaaggctcaaacagcacatatagttttggaggatgggactaagatgaagggctacagcttcgggcatccgtcttccgttgcaggggaggtggtgttcaatacaggcctgggagggtaccccgaggcaataacagatccagcatacaaaggtcaaattttaacaatggctaacccgataataggcaatggaggcgctcccgatacaacggccttggatgagctgggcctgtctaaatatttggagtctaacggcataaaggtgagcggacttctcgtcctagactactcgaaagactacaatcattggttggccactaagtcactggggcagtggctacaggaagagaaggtgcctgccatatatggcgtggatacacgaatgctaactaagattatccgagacaagggcacaatgctgggaaagattgagttcgaagggcagcccgtggatttcgtcgatcctaacaagcagaacctgatcgcggaggtgagtaccaaagatgtaaaggtatatggtaagggtaacccaacgaaagtggtggccgtggactgtggtatcaagaataacgtgattaggcttttggtcaagaggggagccgaggttcatcttgttccctggaatcacgactttaccaagatggaatacgacgggattttgattgccgggggccccggaaatcctgccttggctgagccactgatccaaaacgtgcggaagatattggagagcgacaggaaggaacccttattcgggatatcaaccgggaatctaatcactggactcgccgctggggctaaaacctacaagatgtccatggccaaccgcggacagaaccagccggtgctcaatattactaacaagcaggcattcatcaccgctcagaatcacggatacgccctggataatacgctgcctgcaggctggaagcccttattcgtgaatgttaacgaccagactaacgagggcattatgcacgagagcaagccattcttcgcagtgcaattccatccagaagtaacacctggccccatcgacacagagtatcttttcgactccttcttttcattaatcaaaaaaggtaaagccaccaccataacgtcggtgctacccaaacccgccctggtggcctctcgagtggaagtttctaaggtcctgatccttggttctggcgggctttccatcggccaagcaggagaattcgattattcggggtcacaggcagtgaaagccatgaaggaggaaaatgtaaagacagtcctgatgaacccaaacattgcaagcgtgcagacgaatgaggtcgggctcaagcaggcggatacagtttattttctgcccatcactccacagttcgtgactgaggtaataaaagccgaacagcctgatgggttaattctggggatgggaggtcagactgctctgaattgtggggtcgaactgttcaagcgaggcgtccttaaagagtacggcgtgaaagttctcggtacaagtgttgaaagtattatggccacagaggatcgacagctcttcagcgacaaactgaatgagatcaatgagaaaatcgcgcccagttttgccgtagagtctatcgaggatgctctcaaagcggctgacacaatcgggtatcccgtgatgatccgatcggcctatgcccttggcggtctgggctctgggatctgtcccaatcgggagaccctgatggacttatctacaaaggcgtttgccatgaccaaccagatcctggtggaaaaatcggtaacaggctggaaagaaatcgagtacgaggttgtgcgggacgccgatgacaattgtgtgacggtctgtaatatggagaacgtagatgccatgggagtccataccggagacagcgtggtggtggccccagctcagacactgagtaacgccgaatttcagatgttacgccggacctcaataaatgtcgttcgccatttgggtattgtcggggagtgcaacatccaattcgcacttcacccaaccagcatggagtattgcatcatcgaggtcaacgccaggctgtcacggtcgtctgctctagcgtcgaaggccaccggatacccactggctttcattgctgcaaagattgcactgggaatccccttgcctgagatcaagaacgtggtgagcggcaagacaagcgcttgctttgaaccatcgctggactacatggttacaaaaattccacgatgggacttagacaggtttcacgggacctccagtcgaataggctcctctatgaagtcggtcggagaagttatggccatcgggcgtacctttgaagagagctttcagaaggctctacgaatgtgtcaccctagtattgagggtttcaccccccggttaccaatgaataaagaatggccaagcaatctcgacctccggaaggaactgagcgagccctcaagcactagaatttacgccatcgccaaagcaatcgacgataatatgagtttggatgagatcgagaaactgacgtacattgacaagtggttcctctacaagatgcgcgacatactcaatatggagaaaacgctcaagggtttgaactccgaatccatgactgaggagaccctgaaacgagctaaggagatcgggttcagtgataaacagatctccaaatgtctcgggctgactgaagcacagacaagggaattaagattgaagaagaatattcacccttgggtgaagcagattgacaccttagcggcagagtacccttctgtgactaactatctatatgtgacatataacgggcaggaacatgacgtgaattttgatgaccatgggatgatggtcctcgggtgtggtccctatcacatcggaagtagtgtggaatttgattggtgtgcagtatcatctatccgcactttgcgccagctgggaaagaagacggtggtcgtcaattgcaaccccgagaccgtgagcacagactttgacgaatgtgataagttgtacttcgaggagctctcgctggagagaatcttggacatctatcaccaagaggcctgcggcggctgcattatcagcgtaggcggccaaattccgaacaacctagctgtccccctgtataaaaatggagtgaaaatcatggggacaagtccccttcaaattgaccgcgctgaggatcggtcgatcttcagcgcagttctcgatgagctgaaagtcgcacaagcaccgtggaaggcggttaatacactcaacgaggccctggagttcgccaaaagtgtggattacccctgcttgctgagaccctcctatgtgctgtcaggctctgcgatgaatgtcgtgtttagtgaggatgagatgaagaaatttctggaggaggcgacccgggtctcccaggagcatcctgtggtactaaccaagtttgtcgagggagcaagggaggtggagatggatgctgtgggcaaggacggccgagtgatctctcacgccatcagtgagcacgtggaggatgcaggggtgcacagtggtgatgcaaccctcatgcttcctacccagactatttcacagggtgctattgaaaaagtcaaggacgccacgaggaaaattgcgaaagccttcgcaatctccggcccgttcaacgtgcagttcctagtaaagggcaacgacgtcctcgtgatcgagtgcaacttgagggcatcacggagtttccccttcgtcagcaagaccctgggagtggattttattgatgtggccaccaaagtcatgattggcgaaaacgttgatgaaaaacacctcccgacgttagatcacccgataatccctgctgattacgtcgctataaaggcaccaatgttcagctggccacggttgagagatgcagacccgatccttagatgtgagatggccagcaccggcgaggtggcttgcttcggagaaggcatccataccgcgtttctcaaagcaatgctcagtacaggtttcaagataccccagaagggcatcctgattggtatccagcagtctttccgaccacgcttcctgggcgtggccgaacaactgcacaacgagggctttaagctgttcgcaaccgaagcaacatcagattggctaaatgcgaacaacgtcccagctaccccagtggcatggccgagtcaggagggacagaacccctccttgtcctctattaggaaacttatccgagatggcagcatcgacctagtgataaacctgcctaacaataacacaaaatttgtccacgacaattacgttatccgtcggaccgcagtagacagtggaatcccgctacttactaattttcaggttacgaaattattcgccgaagcagtccagaagagtcgcaaggtcgactctaagtctctgttccattatcggcagtactcagccgggaaggccgca

SEQ ID NO: 8129 - DNA, 4500 bp, synthetic construct
  misc_feature 1..4500: note = source = /note="Description of Artificial Sequence: Synthetic coding sequence"
  source 1..4500: mol_type = other DNA
atgactcgcatattaactgctttcaaggtggtgagaacactcaaaacaggattcggatttaccaatgttacagctcatcaaaaatggaagttcagtagaccaggaataaggctgctctctgtgaaggctcagacagcacacatagtgctcgaggacgggacgaaaatgaagggttattcttttggccacccttcttctgtggctggtgaggttgtattcaacacaggcctcggaggctacccagaggcgattactgatccagcttataagggccagattctaaccatggctaaccctatcataggaaatggcggcgctccggacacaaccgcactggacgagctcggacttagcaagtacctcgagtctaatggaataaaagtgtcagggttgcttgtgctcgactacagcaaggattacaatcattggctggcaacaaaaagcctgggccagtggttgcaggaagaaaaggtccccgcgatctatggagtggatacccgcatgctgaccaaaatcatccgggacaaaggcactatgctggggaaaatcgagtttgagggacagcctgtggactttgttgaccccaataaacagaacctcatagccgaagtgagcacaaaggacgtgaaagtttatggaaaagggaacccgacaaaagtggtggcggtggattgcggaatcaaaaataacgtgattaggctgctggtgaagagaggggctgaggtgcacctggtcccctggaatcacgacttcactaagatggagtacgatggaattttaatcgccggggggccgggaaacccagcactggctgaacccctgatacaaaacgtcaggaagatactcgaatccgatagaaaagaaccactcttcggcatctctacagggaaccttatcaccggcctggccgccggagctaagacctacaaaatgtcgatggctaaccgcggtcagaaccagcccgtgctgaacatcaccaacaagcaggcttttatcacagctcagaaccacggatatgccctggataataccctgcctgccggatggaaacctctgttcgtgaatgttaacgaccagacaaatgaggggatcatgcatgaaagtaaaccttttttcgccgtccaatttcaccccgaagtgacaccgggacctatagatactgagtacctgttcgactcattcttctcccttattaagaaaggcaaagctaccacaattactagtgttctgcccaagcctgcactggtggcgagccgggttgaggtcagcaaagtgttgattttgggctctggcggtctgtctattgggcaagctggagaatttgactacagtggctctcaggcagtgaaagccatgaaggaggaaaacgtgaagactgtgctgatgaacccgaacattgcaagcgtacaaactaacgaggtgggccttaagcaggcagatactgtatatttcctgcctatcacaccgcagtttgtgacagaggtcataaaagcagaacagccggatggccttatcctggggatgggtgggcagacagcgctgaactgtggtgttgaactcttcaaaagaggagtgctcaaagaatacggggttaaagtgctcggtacctccgtggaatctatcatggcaacagaagatagacaactttttagcgataagcttaatgagatcaacgagaaaatcgccccatcttttgctgttgagtctatcgaggacgcactgaaagctgctgacacaattggctatcccgtgatgatccgcagtgcctacgccctgggcggactgggcagcggcatttgtccaaatcgtgaaactctaatggacctatccactaaagcttttgccatgacgaatcaaatcctagtggagaagagtgtcaccggatggaaggagattgagtacgaggtcgtcagagatgccgatgataactgcgtcaccgtatgcaatatggaaaacgtcgacgcaatgggcgtccatacaggcgatagtgtagttgtagcacccgcccaaacactgagcaacgctgaattccaaatgcttagaaggacaagtatcaatgttgtgcggcacttgggaatcgttggagagtgtaacatacaatttgccctccaccctacttcaatggagtactgtataatcgaggtgaacgccagactgagtcgcagctctgccttagcaagcaaggccacaggctaccctctggcatttatcgctgccaaaatcgctctgggaatccctctgcctgaaattaaaaacgtggtgagtgggaaaaccagcgcttgctttgaaccatcactggattatatggtcactaaaattccaaggtgggacctcgacagatttcacggaacttcgtctcggatcggctcctcaatgaagagtgtgggagaggtcatggccatcggcaggaccttcgaagagtcatttcagaaggcactgaggatgtgccatccaagcattgaaggatttacacccaggttacccatgaacaaggagtggcctagcaatctggacctgagaaaggagcttagcgagcccagttccacccggatctacgctattgcgaaggccatcgatgataacatgagcctcgatgagatagagaagctgacatatatcgataagtggttcttgtacaagatgcgggacattttgaacatggagaaaacccttaagggattaaacagcgaatctatgactgaggagaccctgaagcgagccaaggaaattggattcagcgacaagcagatctccaaatgcttgggccttaccgaggcccagactagagagctacgccttaagaagaacattcacccttgggtcaaacagatcgacaccctcgctgccgagtacccgagcgtcacaaactacctgtacgtgacctataacgggcaggaacacgatgttaactttgatgaccatggcatgatggtgttggggtgcggcccctatcacatcggaagcagcgttgaatttgactggtgcgctgtttcaagcattcgcactttgcggcagctcggaaagaagacagtagttgtaaactgcaaccccgagaccgtctctacggacttcgacgaatgcgacaaactttacttcgaagaactgagtctcgagaggattctggatatttatcaccaagaagcctgcggaggctgcataatatccgtgggtggacagataccgaacaacctggctgtgccactgtacaaaaatggggttaagatcatgggcacctcaccactgcaaattgatagagcggaagacaggagcatcttttcagccgtccttgacgagctgaaggtcgcccaagcaccctggaaagctgtgaatacacttaacgaggctttagagtttgctaaatctgtcgattacccctgtcttctgagaccttcttacgtgctgtctggatccgcaatgaacgtggtgttcagcgaagacgaaatgaagaaatttttggaggaggcaacacgggtctcacaagagcaccctgttgtcctgacaaaattcgtagaaggcgcaagggaagtcgagatggatgccgtgggcaaggatggaagagtgatcagtcatgccatttccgaacacgtcgaggatgccggagtgcactcaggggacgcaactctcatgctgcctacccagacaatttctcagggggcaatcgaaaaggtgaaagacgccacgagaaagatcgctaaagccttcgctatctccggtccctttaacgtgcagttcttggtaaagggaaatgacgtcctggtgatcgagtgcaatctgcgcgcaagccgttcttttccctttgtaagcaagactttgggcgtggatttcatcgacgtcgctactaaggtcatgatcggagagaatgtggacgagaagcaccttcccaccctcgaccatcccatcatcccagccgactacgtcgctataaaggcgcctatgttttcctggccaaggctccgggatgctgatcccatcttgagatgcgaaatggcaagcaccggcgaagtggcttgctttggcgagggcattcacacggcattcctgaaggctatgcttagcaccgggtttaagatcccccagaagggaatcctgattggcatccagcaatcctttagacccagattcctgggcgttgccgaacaactccataatgaggggtttaaactattcgccactgaggccacaagcgattggctgaatgcaaacaatgtcccagctaccccagtcgcatggcctagccaggagggacaaaacccatctctgagttcaatcaggaaattgattagggatggaagcattgacctggtcatcaaccttcccaacaataacacaaaatttgtgcatgataactacgtgataagaaggactgcagttgactccggtattccactgctgaccaactttcaggtgaccaaactttttgccgaggcggtgcaaaagtctcgtaaagtggattccaagagcctctttcattatcgtcagtattcagctggaaaagctgca

SEQ ID NO: 8130 - DNA, 4500 bp, synthetic construct
  misc_feature 1..4500: note = source = /note="Description of Artificial Sequence: Synthetic coding sequence"
  source 1..4500: mol_type = other DNA
atgacaagaattttgaccgcctttaaggtcgtgagaaccttaaagacaggctttggctttacaaacgtgaccgctcatcagaaatggaagttcagtcgacccgggattcgcctgctatctgttaaggcccagactgcacatatcgtcctcgaggatggcacaaaaatgaaaggctattccttcggtcatccttcctctgtcgccggagaggtggtgttcaatacagggctgggggggtatcccgaggccattacagatcctgcatacaaaggccaaatcctgaccatggccaaccctattatcggtaatgggggcgccccggatactactgccttggatgagcttggcctcagtaaatacttagagagcaacgggattaaggtgtcagggctgctcgttctggactattccaaggactataatcattggctagctaccaaaagcctggggcagtggttgcaggaggaaaaagtgccagccatctatggcgtggatacgaggatgctcaccaaaattatccgggacaagggtactatgctcggcaaaattgaattcgagggccaaccagtggactttgtagatcccaacaaacagaatctgatcgcagaggtgtcaacgaaggatgtgaaagtttatgggaagggaaacccaacaaaggttgtggcagtcgactgtgggatcaagaataacgtcatcagactgcttgtgaaaaggggtgccgaggtgcaccttgtgccgtggaatcatgattttactaagatggaatatgatggcatactaattgccgggggcccaggcaaccccgctctggccgagcccctcatacagaatgtgcggaagattctggagagcgataggaaagagcctttgtttggaattagcacaggcaacctgatcacaggactcgcagctggagctaaaacttacaagatgtccatggctaaccgtggacaaaaccagcctgtcttgaacataacaaacaaacaggcctttatcactgctcagaatcacggctatgctttggacaacacactgcccgctggatggaagcccctgtttgtgaacgtcaacgaccagactaatgagggtataatgcacgagtctaagcccttcttcgctgtgcaatttcatcccgaggttacacctggaccaatcgatacggagtatctgttcgactcattctttagcctcattaagaagggcaaggcaactaccatcacttcggtactgccaaagccagcacttgtcgcaagccgggtcgaggtgtctaaagtgttgatcctgggtagtggcggcttgtccatcggacaggctggcgaattcgattacagtggctctcaggccgttaaggctatgaaagaggaaaatgtgaagacagtgctgatgaatcccaatatcgcttccgtccagacaaatgaggtgggccttaagcaggccgacaccgtctacttcctccctattacaccacaatttgttactgaagtgattaaggccgaacaaccagatgggctgatacttggaatgggtgggcaaactgcattgaactgtggcgtggagctctttaagcgaggagttttgaaggaatatggggtcaaagtgctcggcacaagcgtcgagagtattatggccactgaggaccggcagctgttcagcgataagttgaacgagatcaatgagaaaatagccccttcgttcgccgttgagtccatcgaggacgccctgaaggctgcagacaccatcggctatcctgtgatgattaggtccgcatacgcactcgggggcttgggatctggtatctgcccgaatcgggagacactgatggacttgtccaccaaggctttcgccatgaccaatcaaattctcgttgagaaatctgtgacagggtggaaggagattgagtatgaagtcgtgagagacgcagacgataactgcgtaactgtgtgcaatatggaaaatgtggatgcgatgggggtacacacaggtgattccgtcgtggtggctccggcccagacgctgagcaatgccgagtttcagatgctgcggcggaccagcattaacgtcgtgcgccatctcggaattgtgggagagtgtaatatccagttcgctttgcatcccaccagcatggagtattgtatcatagaggtgaacgcccgcttgtctaggtccagcgctctggcctcaaaggcgactggttacccacttgccttcatagctgccaagatcgcgttgggaataccactgccagagatcaaaaatgtggtttccggaaaaaccagcgcctgtttcgagcctagtctcgattatatggttactaaaatccctagatgggaccttgatcgcttccacggcaccagtagcaggatcggctccagcatgaagagcgtcggagaggtcatggctattggtcggaccttcgaggagagttttcagaaggcgcttcggatgtgccacccctccattgaaggtttcacaccaaggctgccgatgaataaggagtggccgtcgaacttggacttgcgaaaagagttatcagaaccttcctctacacggatctatgccattgcaaaggctatagacgacaatatgtccctcgacgagatagagaagcttacttatatcgataaatggttcctctacaaaatgcgagatatcttgaatatggagaagaccctgaaaggactcaacagcgagtcgatgaccgaggagaccctaaagagggctaaagaaattggcttttcagataagcagatctctaaatgtttaggcttaacagaggcacagacacgggagctgcgtctcaagaaaaacatccatccctgggtcaaacagattgacacgctcgcagcggaatatccctccgtgacaaactacctgtacgtgacctataatggacaggaacatgatgtcaactttgacgaccatggtatgatggtactgggctgtggaccctaccacattggttcctctgtcgagttcgattggtgtgctgtttccagcattcggacactgcgacagttaggtaagaaaactgtggtggtgaactgcaatccagagacagtgtcaactgatttcgacgagtgcgataagttgtacttcgaggagctgagtttggagagaattctcgatatttatcatcaagaagcctgtggcggttgcattatatccgtgggcggccagattcctaacaatctggctgttccgctgtataagaatggggttaagatcatgggaacatccccgctccagatagatcgcgcagaagatagaagtattttttctgctgtgctggacgagctgaaagtcgctcaggctccctggaaggctgtcaatacgctcaatgaggccttggagtttgccaagagcgttgactacccctgtctgctgcggccaagctatgtccttagcggtagcgccatgaacgttgtattctctgaggatgaaatgaaaaaatttctggaggaggcaacacgagtatcacaggagcacccggtcgtgctgacgaaattcgtagagggcgcaagggaggtcgagatggatgctgtgggcaaagacgggagggtgatttcccacgccatctccgagcatgtagaggacgccggtgtgcattccggcgatgccactctcatgttgcctactcaaaccatctctcagggcgccatcgagaaagtgaaggacgctacgcggaaaatagcgaaggcctttgcgatttcaggtccattcaatgtgcagttcttagttaaagggaacgatgtgttagtaatcgagtgtaatcttagagcctccaggtcctttcccttcgttagtaaaactttaggagtggacttcatagacgtagctaccaaggtgatgataggcgagaacgtagatgaaaagcatctgccgaccctagatcatcctatcatacccgccgattacgtggccatcaaggcccccatgttttcatggcccaggttgcgcgacgcagacccaatcttgcggtgtgagatggccagcaccggagaggtcgcgtgtttcggcgaaggaatccacactgccttcctgaaggcaatgctaagcacaggttttaaaattcctcagaaaggtatcctaattggaattcagcagagttttagaccaagatttctcggagtggcagaacagctacacaacgaagggtttaagctttttgccacggaagccacctcggattggttaaatgccaacaacgttcccgctacccctgtggcttggccaagccaggagggccaaaacccttcattgtcgagcattaggaagctgattagggatggctcaattgatttggtgatcaacctgcccaacaacaacaccaagtttgtgcatgacaattatgttattagacgtaccgcagtcgactcaggaataccacttctcacaaattttcaggtcaccaagctcttcgccgaggcagtgcaaaagtcacgtaaggtggatagtaagtcactgtttcattaccggcagtacagcgctggaaaggccgct

SEQ ID NO: 8131 - DNA, 4500 bp, synthetic construct
  misc_feature 1..4500: note = source = /note="Description of Artificial Sequence: Synthetic coding sequence"
  source 1..4500: mol_type = other DNA
atgacccgaatcctcaccgcattcaaggtcgtgcggactctgaaaacaggattcggattcacaaatgtcaccgcccatcaaaagtggaagttcagtcggccagggatacggttgctctcagttaaggcccaaacagcccacatcgtcttggaagatgggacaaagatgaagggatactctttcggacacccatctagtgtggccggagaggttgtgttcaatactgggctgggcggctatccagaggctatcaccgacccggcttacaaaggacagatccttacgatggcaaatccaatcatagggaacggaggcgcacccgacactaccgccttggatgaactgggactctccaagtacttggagagtaacgggatcaaggtctcaggcctgctcgtacttgattactcaaaggattataatcactggttggctacaaagtccctgggccaatggttgcaggaggaaaaggtccctgccatttatggcgtcgataccagaatgctgacgaaaatcatccgggacaaggggacgatgctgggcaaaattgaattcgaagggcaaccggtggactttgtggaccccaataaacagaatctcattgccgaagtatctactaaggatgtcaaggtgtatggaaaggggaaccccacaaaagtcgtggccgtcgactgcggcattaagaataacgtcattcgcctgttggtgaaacgcggcgctgaagtgcatttggtcccgtggaaccatgatttcacaaaaatggagtatgacggcatactgattgcagggggtccgggaaacccagccctggccgagcctctgattcagaacgtccgcaagatcctggaatctgatcgcaaagagccgttgttcggcatttccaccggaaatcttattacgggacttgctgcaggagcaaagacatacaagatgtcaatggccaatcgggggcagaaccagcctgtactcaatatcacgaacaagcaagctttcatcacggctcagaatcacggttacgcgttggataacacactcccggccggctggaagcccctcttcgtcaacgttaacgatcaaacgaatgagggtattatgcatgagtctaaaccgttcttcgctgttcagttccacccggaagtgacacctggccccatcgatactgagtatctgttcgactcttttttctcactgatcaagaagggtaaggctacgacaatcacatccgtacttcccaaacctgcactggtcgcgagtagagtagaagtcagcaaagttcttatactgggatctggcgggttgagcatcggacaagccggtgaatttgattactcaggatcccaggctgtcaaggcaatgaaggaggaaaacgtgaagaccgtgctcatgaaccccaatattgccagcgtccagacaaatgaagtcggcctgaaacaggccgatactgtgtactttctccctattacaccacagttcgtgactgaagtgatcaaagctgagcagccagatggcctgatactgggaatggggggacaaacagcactgaattgcggggtggagttgtttaagaggggcgtcttgaaggagtacggggtcaaagtgctgggcacctccgtggaatcaatcatggccactgaggaccggcagttgttctctgataaactcaatgagattaacgagaaaatcgctcccagctttgccgtagaatccatagaagacgcactgaaggccgcggatacaatcggatacccagttatgataaggtctgcgtacgcactcggaggtctgggcagcggcatttgcccaaatcgcgagactttgatggatctgagcacaaaagcattcgctatgaccaatcagatacttgtggaaaaatccgtaaccgggtggaaagagatagaatatgaagtggtgagggacgccgatgataattgcgttaccgtgtgcaatatggagaacgtcgacgctatgggagtccacaccggagattccgttgtagtggcacccgcacaaacactgagcaatgctgagtttcagatgctgcggcggacatctattaatgtcgtgagacacctggggattgtgggagaatgcaacatccaattcgctctccaccctacatcaatggaatactgtatcatcgaggttaacgctcgcctgagcagatccagtgctctggcatccaaggccacaggatacccccttgcatttatcgctgcgaaaatcgcactcggtatcccactgccagagatcaagaacgtggtttctggtaagacctcagcttgttttgagcccagtctggactacatggtgacaaagattcctcggtgggacctggataggttccacggaacttcttcccgcatcggatcttcaatgaaaagtgtcggtgaggtgatggccattggaagaactttcgaggaaagcttccagaaggctttgaggatgtgtcaccccagcatcgaagggtttacaccaagactgccaatgaacaaagagtggccatcaaatctggacctgaggaaggagctgtctgaaccatcttccactaggatttacgctattgcaaaagcaatcgacgataacatgagtcttgacgagatcgagaaattgacctacattgataagtggttcttgtacaaaatgcgcgacatcctgaacatggaaaaaacgctgaaggggctgaattccgaatccatgactgaggagaccctgaaaagggcaaaggagattggcttcagcgataaacagatttcaaaatgtctgggcctgacagaggcccaaactcgagagcttcgcctgaagaagaatatccacccatgggtcaagcagattgacaccctggccgcagagtatccctccgtgactaactatctgtacgtgacctataatggacaagagcatgacgtaaactttgatgaccacggtatgatggtgctgggttgcggcccataccacattgggtcttcagtcgaatttgactggtgtgccgtgtcatcaatcagaacactgcggcagctcggaaagaagaccgtggttgttaactgcaatccggagactgtttccaccgattttgacgagtgtgacaaactgtacttcgaggagctgtctctggagcgaattctggacatctaccatcaagaagcttgcggaggctgtataattagtgtgggcggacagattccgaacaacctggccgtccccctgtacaagaatggagtgaaaatcatgggaactagcccactccaaatcgacagagccgaggataggtctattttcagtgccgtgctggacgaattgaaagtcgcccaggccccatggaaggcggtgaacactcttaacgaggccctggagtttgccaaaagcgtggattatccatgcctgcttaggccatcttacgttttgtccggatcagccatgaacgtcgtattcagcgaggacgaaatgaagaagttcctggaggaagccacccgcgtgagtcaagaacaccctgttgtgttgaccaaatttgtcgagggggcacgggaggtcgaaatggacgcagtgggcaaggacggacgcgtgatctctcacgcaattagtgagcacgtcgaggatgccggggtgcacagcggagacgcaactctcatgctgcctactcagacaatcagccagggcgccattgagaaagtgaaggatgccactagaaagatcgcgaaggcttttgccatctctggcccgttcaatgtccaatttctcgtgaagggtaacgatgtgttggtcatcgagtgcaatctccgagcctcccggtcatttcctttcgtgtcaaagaccctgggcgtggacttcattgatgtggcaactaaggtgatgattggggagaacgtggatgagaagcacctgccaacattggaccacccaattatacccgcagactatgttgccatcaaggctcccatgttttcctggccacgattgcgagacgccgacccaattctcaggtgcgagatggccagcacgggcgaagtggcttgctttggcgagggaatccacaccgctttccttaaggcaatgctctcaactggctttaagatacctcagaaggggatcctcatcggcattcaacagtcatttaggccccgcttcttgggcgtcgcagagcagctccacaatgagggcttcaagctgtttgcgactgaggcgactagcgactggctcaatgccaataatgttcccgccacacctgtggcctggccgagccaggagggtcaaaatccatccctttctagtatccggaaactgataagagatggctctattgatcttgtgatcaatctgcccaacaataacaccaaattcgtgcatgacaactatgtaatccggcggacggccgtggatagtgggatcccactccttaccaactttcaggttacaaagctgttcgcagaggccgtgcagaaatccaggaaagtggacagcaagtctctgtttcattaccgacaatactcagccggcaaggccgct

SEQ ID NO: 8132 - DNA, 4500 bp, synthetic construct
  misc_feature 1..4500: note = source = /note="Description of Artificial Sequence: Synthetic coding sequence"
  source 1..4500: mol_type = other DNA
atgactcgaatcctgacggccttcaaagtggtgcggacgctgaaaacagggttcggcttcaccaacgttacagctcaccaaaaatggaaatttagccggccagggatccgtctccttagcgtgaaggcgcaaactgcacacattgtactggaggatgggactaaaatgaagggttactctttcggccacccctcgtcagtggccggcgaggtcgttttcaatactgggctgggtggttatccagaagccattaccgatcctgcgtataaggggcagattttgacaatggctaatccaattataggtaatggaggtgccccggacaccactgctctcgacgaacttgggctgtcaaagtatctcgagtccaatggcattaaagtctctggactgttggtactggattattcgaaggattacaaccactggctggccaccaagtccctgggccagtggctccaggaggaaaaagtaccggccatctacggcgtggatacaaggatgcttaccaagatcatccgagataagggcactatgctcggcaaaatcgaattcgagggacagcctgtggactttgtcgaccccaacaaacagaatcttatcgccgaagtctccacaaaggacgtgaaggtctacgggaaaggcaaccctaccaaagttgtcgctgtggactgtgggatcaagaacaacgtgatacggctgctggtgaaacgcggggccgaagtccatctcgtcccatggaatcacgacttcacaaagatggaatatgatggcatccttatcgcgggcggaccgggcaacccggcactcgcggaacctttgattcaaaacgtcagaaaaattctggagtctgatcgcaaggagcctctgttcggaatctctaccggaaacttgatcaccgggctggcagccggtgctaaaacctataaaatgtcaatggcaaatcggggccagaaccagcccgtcttgaacatcacaaacaaacaagccttcatcaccgcccaaaatcatggctacgcactcgacaatacactgcccgctgggtggaagcctctgtttgtcaatgtgaacgatcagacgaacgagggcattatgcatgagtctaaaccttttttcgcagtgcagtttcatccggaggtgaccccagggccaatcgatactgagtacctgtttgattcattcttttcacttattaaaaaaggaaaagcaactacaattacttctgtacttccaaaacccgccctggtggccagccgagtggaagtgtcaaaagtgctgatactgggcagcggaggactctctatcgggcaggccggtgagttcgattattctggttcccaagctgtaaaggccatgaaagaggagaacgtgaaaaccgtcctgatgaaccctaatatcgcctctgtccaaacaaatgaggtaggattaaagcaagctgatactgtgtacttcctgcctattactccacaattcgtgactgaggttatcaaagccgagcagcctgacggactcatactcggaatgggtgggcagaccgcactcaattgtggagtcgagctcttcaaaagaggtgtgctgaaagaatacggagtaaaggtcttgggcacctccgtcgagtcgatcatggccaccgaggaccgccaattgttctcagacaagctgaatgagataaacgagaagattgcgccctctttcgccgtggaatcaatcgaggatgcactgaaggcagcagataccatcggctatcctgtgatgatccgcagtgcatacgccttagggggcttgggcagtgggatctgccccaatcgagaaaccctgatggacctgtcaaccaaggcttttgctatgaccaatcagattctggtcgagaaatccgttaccggttggaaggaaattgagtatgaggttgtacgcgatgcagacgacaactgtgtgaccgtatgtaacatggaaaacgtggatgccatgggcgtgcatacaggtgattcagtcgttgttgcacccgctcagaccctcagcaatgctgaatttcaaatgctgagaagaacgtccattaacgttgtccgacacttgggaattgtgggggaatgcaatatacagttcgcactgcatcccacttctatggagtattgtattatcgaagtcaacgctagactgagtaggagctcagctctcgcttctaaggccaccggctatccgttagcattcatcgctgccaagatagcactcggcatccccctccctgagatcaaaaacgtggtgagcggaaagacttcggcctgcttcgagccgtcattggactatatggtgacgaagataccgcgctgggacctggaccgctttcatggtacctcttcgaggatcggctcctcaatgaagagtgtgggggaagttatggcaattggcaggacgtttgaagaatcattccaaaaagctctgcgaatgtgccaccccagtattgaggggttcaccccacggttgcctatgaacaaggagtggcccagtaatttggacttgcgcaaagagctgtccgagccttcctccactaggatatacgcaatcgctaaagcaatcgacgacaatatgtcactcgacgagattgagaaactgacctacatagacaaatggtttttatataagatgcgtgatattctaaatatggagaaaaccctaaagggtctgaactccgaatccatgacagaggagacactgaaacgggctaaagaaatagggttttctgataagcagatcagtaaatgtttgggactgacagaagctcaaacaagagaattgcggctgaaaaaaaatatccatccctgggtcaagcagatcgacacgctagccgcggaatacccctccgtgacaaactatttgtacgttacgtacaatggacaggaacatgacgtcaactttgacgatcacggaatgatggtactcggctgtggcccctaccatattggatctagtgtcgaattcgattggtgcgcagtttcatcaattcgcaccctgaggcaactgggaaagaaaactgtggtggtgaattgcaatcccgaaacggtctccactgactttgatgaatgtgataagctttatttcgaagagctgtctctggagaggatacttgatatctaccatcaagaagcgtgtggcggttgcatcatttctgtaggcggccagattcccaataatttagcagtacctctttataagaacggcgtcaaaatcatgggcacatcaccattgcaaatcgacagggccgaggatagatctatcttctctgccgtgttggatgaactgaaggtggcacaagctccgtggaaagccgtgaacaccttgaatgaggcactggagtttgcaaagtcagtagattacccgtgtctcttgaggccaagctacgtactgagcggaagtgcaatgaacgtcgtattctctgaggacgaaatgaagaagtttctggaggaagcgaccagggtgagccaggagcatcctgttgtcctcaccaagttcgtcgagggcgctagggaagttgagatggatgccgtggggaaagacggacgggtgatctctcacgcgatcagcgagcacgtcgaagatgctggtgttcatagcggagacgccacattaatgctcccaacccagactatcagccagggagctatagagaaggtcaaagacgcaacacgtaagatcgcgaaagctttcgctatcagcggacctttcaatgtgcagttcctggtgaaagggaacgatgtgctggttatagaatgcaaccttcgggcgtctcgaagctttccatttgttagtaaaacactgggcgtggattttattgatgttgcaacaaaggtcatgatcggcgagaacgtggacgagaaacatctcccgacactcgatcacccgattatccctgccgactacgtggccatcaaggcccctatgttttcttggcctaggctgagagacgcggacccgattcttcggtgtgaaatggcttcaactggggaagtggcttgctttggagagggtatccatactgcatttctaaaggctatgctctcaaccggattcaaaattccgcagaagggaattctgattggaattcagcagagctttcgccctagatttttaggggtggcagagcaactccacaatgagggctttaaattgttcgccacagaggcaacatccgactggctcaatgctaacaatgtgccggccacccccgtcgcatggccttctcaggaagggcagaatccatctctctcatccatacgcaagctcattcgcgatggatctatcgatcttgtaattaatctgcccaacaataacacgaaatttgtacacgacaactacgttatacgacggacggccgtggattccggcatccccctgctcacaaatttccaagtgaccaaattgttcgctgaggcagtccagaagtctcgcaaggtggattcgaaatctctgttccactaccggcagtactcagccggaaaagcggct

SEQ ID NO: 8133 - DNA, 4500 bp, synthetic construct
  misc_feature 1..4500: note = source = /note="Description of Artificial Sequence: Synthetic coding sequence"
  source 1..4500: mol_type = other DNA
atgacaaggatcctgactgcgttcaaagttgtgcgcaccctgaagaccggatttggctttaccaacgtgaccgcacaccagaagtggaaattcagcagacccgggatccgcctgctgagcgtgaaagcacagacagcccatattgtgctggaggatggtactaaaatgaaaggatactcctttggccatccctcttcggtcgccggtgaagtggtgttcaacacaggattgggcgggtaccccgaggctatcaccgatcccgcatataagggccagatcctgaccatggccaatcctatcatcggcaacggcggagctcctgatacaaccgctctcgacgaactagggctgtctaaatatcttgagagcaatgggataaaggtgtcaggactcctcgtcttggactactctaaagattacaaccactggctggcgaccaaaagtctggggcaatggctccaagaggagaaggtcccagcaatatatggggtcgataccaggatgctgactaaaattatacgcgataaggggacgatgctgggcaaaatcgagtttgaaggccagccggtcgattttgtggacccgaataagcagaacctcatcgccgaggtgtccaccaaagacgtgaaggtttatggcaaggggaatcccacaaaggttgtggcggttgactgcgggatcaaaaacaacgtcattcgcctgctcgttaaacggggcgccgaagtgcatctcgtgccgtggaatcatgacttcacaaaaatggagtatgatggaatactgattgctggggggcccgggaacccggcactggccgaacccctcatacagaatgtgcggaagatcctggagagtgacagaaaagaaccactctttggcatttctaccggcaatttgattactggtctggctgctggagccaagacatacaagatgagtatggccaatcgaggtcagaaccagcctgtcctcaatatcacaaacaagcaggcttttataaccgcccagaaccacggatacgcgctggataacactcttccggcaggttggaaacctctttttgttaatgtaaacgaccagaccaatgaagggatcatgcacgaaagcaaaccgttcttcgcggtccagttccatcctgaagtgacacccggaccaatcgacaccgaatacctgtttgatagctttttcagcctgattaagaaaggaaaggccacgacgattacctccgtcctgcctaagccggcattggtcgcctcgcgggtcgaagtgtctaaggttctgatcctagggtcaggcggactttccataggccaggccggtgagttcgattatagcggaagccaagccgtaaaggcaatgaaagaggagaatgtgaaaacggttctgatgaaccccaatatagccagcgttcaaacaaacgaagtcgggctcaaacaggccgacaccgtctacttcctgcccattacaccccagtttgtaacagaggtaattaaggcggagcagcccgacggtctaatacttggtatgggtgggcagacagccttgaattgtggcgtggagctgtttaaacgtggcgtcctgaaagagtatggggtgaaggtgttaggcacaagcgtcgagagcatcatggccaccgaggacaggcagctattctctgacaagcttaatgaaattaatgaaaagatcgcgccttcattcgccgtggaaagcatcgaagatgccctgaaggccgccgatacaatcggatatccggtcatgataaggtctgcctacgcgcttggcggcctaggatccggaatttgtcctaatcgcgagacgctgatggacctatccactaaggccttcgctatgacaaatcagatcctcgttgaaaaaagtgtgacaggctggaaggagattgaatatgaagttgtgagagatgccgatgacaattgcgtaacggtctgcaacatggagaatgtggacgcgatgggcgtccatacaggcgactcagtggtggtggcccctgctcagaccttatccaacgctgaattccagatgctgcggcggacatctatcaatgtagtcaggcacctcggcattgtcggcgagtgtaacatccaatttgccctgcaccccaccagcatggagtattgcatcatagaagtgaacgcgaggctgtcacgttcctccgcacttgcctctaaggccactggctacccgctcgccttcattgcagctaagatcgcattgggcatccctctgcccgagatcaagaatgtggtgtccggcaaaactagtgcgtgtttcgagccaagtttagattatatggtgacgaaaatacctcgttgggatctcgataggttccatggaacctcgtcgagaattggaagcagcatgaaatcagtcggggaagttatggctatcggccgtaccttcgaagagtctttccagaaggcactaaggatgtgccacccttctatcgaggggttcaccccacgcctgcctatgaacaaggagtggccttctaacctagaccttcggaaagagttgtccgaaccgagttcgacacggatttacgcaatagcaaaagctatcgacgataatatgtcccttgacgaaatcgaaaagcttacttacattgacaagtggttcctgtataagatgagagatattctgaacatggagaagacattaaagggcctgaatagcgaaagcatgacagaggagactttgaagcgggccaaggagattggattcagtgacaagcagattagcaaatgcctggggttgaccgaagcgcagacgagggagctgagactgaagaagaacattcacccctgggtgaaacagatcgacaccttggccgctgagtacccgagcgtaactaactacctgtacgtgacctataatgggcaggagcacgatgttaattttgacgatcacggaatgatggttctagggtgtggtccttatcacattggctctagcgtcgaattcgattggtgcgcagtaagcagtatccgaactctgaggcaactgggcaaaaaaacagtggtagtcaattgtaatccggagacagtaagtacggattttgacgagtgtgacaagctttatttcgaggagctgtctttggaaaggattctggatatctatcaccaggaagcctgcggcgggtgcattatctcagttggaggccagattcctaataatctagccgtcccactgtataaaaatggggtgaagattatgggcacatccccactgcagatagatcgcgccgaggacagaagcatcttctccgctgtcctggacgaacttaaggtggctcaggccccttggaaggcggtgaacactctgaacgaagctttggaatttgccaagtcggtggactatccatgcctgttgcggccctcatacgtcttgtccggtagcgctatgaatgttgtgtttagcgaagatgagatgaagaaatttctcgaggaggctaccagggtttcacaggaacaccccgtggtgctgaccaaattcgtggaaggcgcacgggaagtcgagatggacgccgtggggaaggacgggagagtgatcagccacgctattagcgaacacgtggaagacgcgggcgtgcactctggcgatgctacacttatgctgcccactcaaacaataagccagggagcaattgaaaaagttaaggacgcaacgcgtaagatcgccaaggcattcgcaatctccgggccattcaacgtacagttcctggtaaagggcaacgacgtgctggtaatcgaatgcaatctcagagcctcccgttcatttccatttgtcagtaagacactgggagtggacttcatagacgttgccactaaggtgatgatcggggaaaacgtggatgagaagcacctgcccaccttggaccacccgattattcccgccgactacgtcgccataaaggcccctatgtttagctggccgcgtttgcgggacgctgacccaattctacgctgtgaaatggcgtctacaggggaggttgcatgtttcggtgagggcattcatacggctttcctcaaggcaatgctctcaacagggtttaagataccgcagaagggaatcctgatcggaatccagcagtctttccggccaagattcctcggagtggcggagcaactccacaatgaggggtttaaactgttcgccacagaggctacgagtgactggttaaacgccaacaacgtacccgctacaccagtcgcatggccttctcaggaagggcagaatccttccctatccagcatccggaagctgatccgagacggctcgatcgacctagtcatcaatttacccaacaataatacgaagtttgtacacgataattatgtgatccggcgaactgccgtcgatagcggcatcccactattaactaacttccaggtgaccaaattgtttgccgaggccgtgcaaaaaagccggaaggtcgactcgaaatccctatttcattaccggcagtattctgctgggaaggccgcg

SEQ ID NO: 8134 - DNA, 4500 bp, synthetic construct
  misc_feature 1..4500: note = source = /note="Description of Artificial Sequence: Synthetic coding sequence"
  source 1..4500: mol_type = other DNA
atgactcgcattttgaccgccttcaaggtagttagaactctcaagactggattcggcttcaccaacgttaccgctcatcagaagtggaaatttagtagacctggcatacgcctcctgtctgttaaggcccagaccgcacacatagtgctggaggacggaaccaagatgaagggttatagtttcggacacccttcttccgtggcaggcgaggttgtattcaacaccggcctcggcggatatccagaagccattactgatcccgcttataagggtcagatcctcactatggccaacccaatcatcggtaacggcggtgcccccgacacaactgccctggacgagctcggcctgtctaagtatctggagagcaatggcatcaaagtgtcaggtttgctcgtcctggattactcaaaagattacaaccactggctggccacaaaatctctgggccaatggcttcaggaagagaaagtgcctgctatctacggcgtggacacccgtatgctcaccaagattatacgcgataagggtaccatgctgggcaagatcgaattcgagggacagcctgttgacttcgtcgaccctaataagcaaaacctcatagcagaagtgtccaccaaggatgtcaaagtctacggaaaaggaaaccctaccaaggttgtggctgttgactgtggaattaagaacaatgttatccgcttgctggttaagcgtggcgctgaagtacacctcgtcccatggaaccacgacttcaccaagatggaatatgatggtatcctgatcgctggaggcccaggcaatcccgcccttgctgagccccttattcaaaatgtccgtaaaatcctggagtccgaccgcaaggagccacttttcggtataagtactggaaacctcattacaggtctggccgccggcgctaagacatacaagatgtccatggctaaccgcggccagaatcagccagtgctgaacattactaataagcaggcttttatcaccgctcagaaccacggttacgccttggataatactctcccagccggttggaagcccctgttcgtaaatgtcaacgaccagaccaatgagggtattatgcatgagtctaagccattttttgctgtacagtttcaccctgaagtcacacctggacctatcgacacagaatacttgtttgattccttcttttcacttatcaagaaaggcaaggctaccacaataacctctgtgttgcccaagccagctcttgtcgcaagcagggtggaagtctcaaaagtgttgatcctgggcagtggaggcctctctattggacaggccggtgaattcgattattctggatcacaagccgtcaaggctatgaaggaagagaatgtgaaaaccgtccttatgaaccccaacatcgccagcgtgcagactaatgaagttggtctgaagcaagcagacacagtatacttcttgccaatcactccccagttcgtgactgaggtcataaaagctgagcagccagacggcttgatcttgggaatgggtggacaaacagctctcaactgtggagtagagctgttcaaaagaggtgttttgaaagaatacggcgtgaaagtactgggaacctctgtggagtcaataatggccacagaagatcgtcagttgttttctgataaactcaacgagatcaacgagaaaatcgctccctctttcgctgtagaatccatcgaggacgccctcaaggccgccgacaccattggataccccgtcatgatccgttccgcctacgcacttggaggtcttggctccggaatttgccccaacagggagactctgatggaccttagcaccaaagcctttgcaatgactaaccagattctggtggaaaagtctgtgactggttggaaggaaatcgaatatgaggtcgtgagggacgccgatgacaactgtgtcaccgtttgcaacatggagaacgttgacgccatgggtgtccacacaggagatagcgtggtggtcgctcccgcacagacactgtcaaacgccgaattccagatgttgagaaggacctctatcaatgttgtgcgtcacttgggaatcgtgggcgaatgtaacattcaattcgctttgcaccccacctccatggaatactgcatcatcgaagtcaatgcccgcctcagcagatcaagcgccttggcttctaaagcaaccggttatcctctggctttcattgctgctaagattgccctgggcatccctctgcctgagattaagaacgtggtttcaggcaaaacctctgcatgttttgaaccttctctcgattacatggtgactaagatcccacgttgggacctggatagatttcacggtacttcaagcagaatcggatcctctatgaagtcagtcggtgaggtgatggcaattggacgcaccttcgaagagtccttccagaaagccttgagaatgtgtcatccctcaattgaaggcttcacacctcgcctgcccatgaacaaggagtggcccagtaacctggatttgaggaaggagctgtcagaaccctcttccacccgcatatacgctatagctaaggctatagacgataacatgtctcttgacgagatagagaaactgacttacatcgacaagtggttcctgtacaagatgagagatatattgaacatggaaaagaccttgaaaggtcttaattccgagtctatgaccgaggagaccttgaagcgtgcaaaggagataggatttagcgacaaacagatctctaagtgccttggactcaccgaagctcaaactagggaattgcgtttgaagaagaacattcatccatgggtgaaacaaatcgatactctggccgcagagtaccccagcgtaaccaattatctgtacgtcacttacaacggacaggagcacgacgttaattttgatgaccacggtatgatggtactcggctgtggtccctaccacataggctcatctgtggaattcgactggtgcgccgtcagtagcattcgtactctgagacaactgggcaagaaaactgtggttgttaactgtaaccctgagacagtgtctacagactttgatgagtgtgataagctctactttgaagagctgtccttggaacgtatcctcgatatctaccaccaggaggcctgcggtggatgcatcatctctgtgggcggacagattcccaacaaccttgccgttcccttgtacaagaacggagtgaagatcatgggaacatcccctcttcaaatagacagagccgaagataggtccatcttctctgctgtcctggacgagctgaaggtcgcccaggcaccctggaaggccgtcaatactcttaatgaagctctggaatttgctaagtcagtggactacccatgtctgcttcgcccttcctacgtgctcagtggaagtgctatgaacgtcgtgttctcagaagacgagatgaaaaagttcctggaggaagctacccgcgtgagtcaagagcaccctgtagttctcacaaaattcgttgagggcgcccgtgaagtcgagatggatgctgtaggaaaggatggcagggtaatcagtcatgcaatcagcgagcacgtcgaagacgctggcgtacattcaggtgacgctaccttgatgcttcctacacaaaccatctctcaaggagctatcgagaaggtgaaggatgccacccgcaagatcgctaaggcttttgcaatctcaggacctttcaacgttcagttcttggtgaagggcaacgacgttctcgtgatcgaatgcaacctgcgtgccagccgtagcttcccattcgtttctaaaacattgggagtggacttcatcgacgtcgccacaaaagtgatgatcggcgagaatgtcgatgagaaacacctgcccaccctggatcacccaatcatcccagctgattacgtggctataaaagcccctatgttttcctggcctcgtctgagagatgccgacccaatcctcagatgcgaaatggcatctactggcgaggtcgcctgctttggagaaggaatccatacagcttttttgaaggccatgctgtcaaccggatttaagatcccccaaaaaggtatcctgatcggtattcagcagagcttccgtcccagattcctgggagtagctgaacagttgcacaacgagggctttaagctcttcgctactgaagctaccagcgattggttgaacgcaaacaatgtccctgctactcccgtggcctggcccagtcaagagggacagaatccaagtctgagtagcatcagaaagttgatacgtgacggatcaattgacctcgtgatcaaccttcctaacaataatactaagttcgttcatgacaattacgtaatcagaagaaccgccgtcgattcaggaatccctcttttgacaaacttccaagtcactaagttgtttgccgaggctgtacagaagagtaggaaggtggactccaagagtttgttccactaccgccaatacagtgccggcaaggccgcc

SEQ ID NO: 8135 - DNA, 4500 bp, synthetic construct
  misc_feature 1..4500: note = source = /note="Description of Artificial Sequence: Synthetic coding sequence"
  source 1..4500: mol_type = other DNA
atgacccgcattctcaccgcgttcaaagtggtcaggacactgaagacgggatttgggttcactaatgttaccgcacatcagaagtggaagttcagtaggcccgggatccggctgctgtctgtgaaagctcagacagcacacatcgttctggaagatggtaccaagatgaaaggttattcatttggacatccaagtagtgtggctggtgaggtggtgttcaacactggactcggtggctatccagaagccattacggaccctgcttacaagggtcagattctgactatggcaaatccaatcattggaaatgggggagctcccgacaccactgcgctcgatgagctcggcctgagtaagtatctggagtccaacggtataaaggtgagcggactgctcgttctcgattactccaaagattataaccactggctcgccaccaagagtcttggccagtggctccaggaggagaaagttcctgccatttacggcgtggacacccgcatgctgacaaaaattattagggacaaggggaccatgttgggcaaaattgaatttgagggtcagcctgtggacttcgtggacccaaataagcagaacttgatcgccgaagtttcaaccaaagacgtgaaggtgtatggcaaagggaatccgaccaaggtcgtagctgtagactgcggcattaagaataacgtcattaggttgctcgttaaacgcggagccgaggtgcatctggttccatggaaccatgactttactaagatggagtacgatggaattcttatcgcgggcgggcctggcaaccccgcactcgctgagccgctaatacagaacgtcaggaagatcttggaaagtgatcgaaaagagcctttgtttggcatttctaccggcaacttaattacgggtctggccgccggcgccaagacctacaaaatgagcatggccaatcggggacagaatcagccagtgctgaatattacgaataaacaggccttcatcacagcccaaaaccacggatacgccctcgacaacactttgccagcgggatggaaacccctatttgtgaatgtgaacgatcagactaacgaaggcatcatgcacgagagtaagcctttttttgcagttcagtttcatcctgaagttacccccggcccgatcgatacggagtacttgtttgatagctttttttcattgataaagaagggcaaagcaactacaatcacatcagttctgcccaagcccgcccttgtcgctagtagagtcgaggtttctaaggtgctgattttaggcagtggcgggctgagcatcggccaggctggtgagttcgattattccggctcccaggctgtgaaggccatgaaggaagaaaatgttaaaacggttcttatgaaccctaatatcgctagcgtacaaaccaatgaagtcggtcttaaacaggccgacactgtctacttcctccctattactccccagtttgtgacggaagtgatcaaggcggagcagcccgacggactgattctggggatgggtggacagacagcgcttaactgcggagtcgagctattcaagcgtggcgtgttgaaggagtatggggtaaaggtattagggacttccgtagagagcataatggccaccgaggaccgacagcttttctctgacaaactgaacgagatcaatgagaagatcgctccatcttttgctgtggagtctattgaggacgccctgaaggctgcagataccattggatatcctgttatgatccggtcagcgtacgctctcggggggctgggttccggaatttgcccgaaccgggaaaccctgatggacctgtccactaaggctttcgcgatgactaatcaaatcctggttgagaaatctgtgacagggtggaaagagatcgaatatgaggtcgtaagggacgccgatgataactgcgtgaccgtctgcaatatggagaatgtcgatgccatgggcgttcatacaggggattcagtggtagttgcccccgcacagaccttgtctaatgctgaatttcagatgctgagaagaacaagtatcaatgtggttcgccatctcggaattgtaggcgagtgcaacattcagttcgcgcttcatccgacttcaatggagtactgcattattgaggtgaatgctaggctgagtagaagttcagccctggctagtaaggctacaggctatccccttgccttcatcgcggctaagatcgcactcgggattccactgcctgagattaagaacgtggtatctggcaagacctcagcttgcttcgagccctccctggactacatggtgaccaagataccgcggtgggatctagaccgcttccatggaacatccagtaggattggaagttcaatgaagtctgtcggggaggtcatggccattggtcgtacatttgaggaatcctttcagaaggctctgaggatgtgtcatcctagtatcgaggggtttactccccgattacctatgaacaaggagtggccttctaacctcgacctgaggaaagagttaagtgagccctcatctacccggatctacgctatcgcaaaggccattgatgataacatgtccttggatgagattgaaaaattgacctacattgataaatggttcctttacaaaatgcgtgacattcttaacatggagaaaacacttaagggtcttaactctgagtccatgactgaagaaacactgaaacgggcaaaggagatcggattttccgataagcagatctcgaagtgtctaggactaactgaagcccagacccgggagctgcgccttaaaaagaacattcatccttgggtgaagcagatcgacaccctggcggctgagtatccatcagtgactaattacctttacgtcacgtataatgggcaggagcacgacgtgaatttcgacgaccatggcatgatggtgttgggctgtggcccttaccacatcgggagctctgtcgagttcgactggtgcgcagtgtctagcatcaggactcttaggcaactgggcaaaaaaaccgttgtggtgaactgcaatcctgagaccgtgtccactgactttgacgaatgcgacaagttgtatttcgaagagttgagtcttgagcgcatcctggatatctaccaccaagaagcctgcggtgggtgtatcatcagtgtgggcgggcagattcctaacaatctggctgtgcctctctacaagaacggcgttaaaatcatgggtacttccccacttcagatagatagagccgaggaccggagcatttttagtgccgtgctggatgaattgaaggtagcccaggctccatggaaggcagtgaataccttaaacgaggccctagagttcgcgaagagcgtggattatccatgcctgctgcggccgtcttacgttttatccggtagtgccatgaatgtggtgttctccgaagatgaaatgaaaaagttcctggaggaagctacgcgggtgagccaggaacatcctgtggttttgactaaatttgttgagggtgcccgcgaggtggaaatggacgccgtgggaaaagacggcagagtgatcagtcatgccatctcagagcatgttgaggatgcaggtgtgcattccggtgatgcaaccctgatgttgcccactcaaaccatatcacagggtgccatcgagaaggtaaaggacgcaactcgcaagatagctaaggcctttgcaatatcaggcccttttaatgtgcaatttcttgtgaagggaaacgacgttcttgtgattgagtgcaatctgcgtgcatcacggtccttccccttcgtctccaagaccttaggagtagattttatagatgtggccacaaaagtcatgatcggcgaaaatgtagatgaaaagcacctccctacactggatcatcctataatcccggccgactacgtcgccattaaggcacctatgttcagttggcctaggctacgtgatgctgatcctattctgaggtgcgagatggcgtcgactggcgaagtcgcctgcttcggcgaaggtattcacactgcctttttaaaggccatgttaagtaccgggtttaaaataccccagaagggtatcttgatcggcatacaacagtccttcagacctagattcctcggagttgcggaacagctgcacaatgagggatttaagctcttcgctaccgaggctacatccgattggctaaatgctaacaacgtacccgctacgccggtagcatggccctcacaagagggacagaacccgtcactgtcctcaatccgcaagttaatccgcgacggttctatcgacctagtgatcaatctacctaataacaacaccaaatttgtgcacgacaactacgtgatcagaaggaccgccgtagacagcggaatccctctgctaacaaatttccaggtgacaaagctctttgctgaagccgtccagaaatcaaggaaagtggatagcaagtccctgttccattatcggcagtactccgctggcaaggccgcc

SEQ ID NO: 8136 - DNA, 4500 bp, synthetic construct
  misc_feature 1..4500: note = source = /note="Description of Artificial Sequence: Synthetic coding sequence"
  source 1..4500: mol_type = other DNA
atgacgaggatcctgactgcattcaaggtggtgcgtacgcttaagacgggttttggattcaccaacgtcacagcacaccagaagtggaagtttagcaggcccggaattaggctcttgtctgtcaaggcccagaccgcccacatagtgctcgaagacggtacaaaaatgaaagggtattcattcggccacccatcatctgtggctggcgaggttgtattcaacacaggcctcggggggtacccggaggcaatcaccgatcctgcctacaagggtcagatcctgactatggccaatccgatcattggaaacggcggggctcctgatactaccgccttggacgagctggggctcagtaaatacttggagtcaaacgggatcaaggttagcgggttgctggtcttggattacagcaaagattataaccattggttggcaaccaagtctcttggacagtggcttcaggaagaaaaggtgcctgctatctacggggtggatacgcgcatgctcacaaagattattagagacaaaggaacaatgcttgggaagattgagtttgaaggtcagcctgtggacttcgtggaccccaataagcagaatctgattgcagaggtgtccactaaggacgtgaaggtgtacggaaaaggcaatccgacgaaagtggttgccgtggactgcggaatcaaaaataatgttattcgtctgcttgttaagaggggcgccgaggtgcaccttgtgccctggaaccatgactttacaaagatggaatacgatggcattttaatagctgggggcccaggtaatccggccttagccgaaccgctgattcagaatgtccggaagattctcgagtctgatcgtaaggagcctttatttggcatcagtactggaaacctgataactggactggcagcaggggccaaaacttacaaaatgagcatggcaaatagaggccagaaccagcccgtgttgaatatcaccaataagcaggcattcattacagcccaaaatcatgggtatgcactggataacaccctgccagccggatggaagccactttttgttaatgtaaatgatcagacaaatgaggggatcatgcatgagtctaaacccttttttgctgttcagtttcaccccgaagtgacacccgggcctattgacaccgagtacctgtttgacagcttcttttcacttattaagaagggaaaggctacaacgattacttctgtgctgcctaagcccgcgttggtcgcttccagagtggaggtgtctaaggtcctgattctgggctcaggcggcctcagtatcggccaggccggtgaattcgattactctggctctcaggccgtgaaggccatgaaagaggagaacgtgaagacagtgctgatgaaccctaacatcgcctccgttcagaccaacgaagtgggcctgaaacaggctgataccgtatacttcttgcccattactccccagtttgtcaccgaggtcattaaagccgagcagcctgacggccttatattggggatgggcgggcagaccgcactgaattgtggggttgagctctttaaacggggtgtgctcaaagaatacggcgtaaaagttctcgggacaagtgtggagagtatcatggctaccgaagatagacagctcttcagcgataagcttaatgagattaatgagaagattgcgccatccttcgccgtggagtctatcgaggacgccctcaaagccgccgacaccatcggctatccggtgatgatccggtccgcatacgcattgggcggcctgggctccggaatctgtcctaacagagagaccctaatggacttgtcaactaaggcgttcgccatgacaaaccaaatccttgtggagaaatcagtcactggctggaaggagatcgagtatgaggtggttagagatgccgacgataattgtgttaccgtctgcaatatggaaaacgttgatgccatgggggttcatacaggagactctgttgtggtggcccccgcccagactttatctaatgccgagttccagatgctgcgacgtacaagcattaacgtcgttaggcacttggggatcgtcggtgagtgcaacattcagttcgcacttcatcccacctcgatggagtactgcatcatagaagttaatgcccgactgtcacggtccagcgccttggcctcgaaggcaaccggatatcccctagcattcattgctgcaaagatcgcactgggtatccctctccctgagattaagaatgtcgtgagtggcaagacttcagcgtgctttgagccctcccttgactatatggtgaccaaaatcccgagatgggatcttgatcggtttcacggcacttcttctagaatcggttcgtccatgaagagcgtcggagaagttatggcgatcggccggacgttcgaagaatcatttcaaaaggcgcttcggatgtgtcatccctcaatcgagggttttacacctcggctgccgatgaacaaagagtggccaagcaatctggacctgcgaaaagaactgtctgagccatccagcactcggatttatgcaattgcaaaagctatagatgacaatatgagcctggacgaaatcgaaaagctcacatacattgacaagtggttcctttataaaatgcgcgatattctgaatatggaaaagaccttgaaaggactgaacagtgagagtatgacagaagagacccttaagcgcgctaaagaaattgggttttctgacaagcagatctccaaatgcctgggcctaactgaagcgcaaactcgcgaattaaggctcaagaagaatattcacccatgggttaaacagatcgataccttggctgccgaatacccctctgtgacaaattacctttacgtgacctacaacggccaggagcacgacgtaaatttcgacgatcacggcatgatggtcctgggctgtggcccgtatcatatcggctcctccgtagaatttgactggtgcgcagtcagtagcatacgcactctgcgtcaactgggtaaaaaaaccgtggttgtgaattgtaacccggaaacagtatctacagattttgacgagtgtgataagctttacttcgaggaactttcactggagcgaattctggacatttaccatcaggaagcttgtggaggatgcattatttctgtaggcggacagattccgaataatctggctgtaccactctacaagaatggcgtcaagattatggggacatctccccttcagattgatagagctgaggataggtccatcttcagtgccgtgctcgatgaacttaaggtagctcaggccccttggaaagcggtgaatacgctgaatgaggctcttgagtttgctaaatctgtggattacccttgcctgctgcggccttcttatgtactgtctggatccgccatgaatgtggtcttctctgaggacgaaatgaagaagtttcttgaggaagccacacgggtgtcgcaggaacatcctgtcgtcttgactaagttcgtagagggggcccgagaggttgaaatggacgctgtcggaaaagacggaagggtgatctctcatgctatcagcgagcatgttgaagatgccggggtccactccggagatgccactctaatgctgcccactcagacaatctctcagggggcaattgagaaggtaaaagacgccactagaaaaatcgctaaagcattcgctatctctggcccattcaatgtacaatttctggtcaagggaaatgatgtgctcgtaattgaatgcaacctgagagcctcgcgcagcttcccgtttgtctctaaaactctgggcgtagatttcatcgatgtggctaccaaggtaatgattggcgaaaacgtggatgaaaagcacttacctactctggaccaccctatcatcccagccgattatgtggccatcaaggctcccatgttctcttggccaaggttgcgggacgccgatcctattctgaggtgcgagatggccagcacgggcgaagttgcctgttttggcgaggggatacacacagcatttctcaaggcgatgctcagtaccgggtttaaaataccgcagaagggcatccttattggtatccagcagtctttcaggccacgattcctgggcgtggctgagcagcttcacaacgagggatttaaactttttgctacagaagcgacaagtgattggctaaatgctaataatgtgcccgctacgcctgtcgcctggccttctcaagaggggcagaaccctagcctcagttccattaggaagctgatccgggacggctcgatcgacctcgtgataaatttgcctaataataatactaaattcgtgcacgacaattacgttattcggaggaccgccgtggacagcggcatccccttgctgaccaacttccaggtgacaaaactattcgctgaggctgtgcagaaaagcagaaaagtcgactctaaatcactctttcactaccgccagtactcagctggcaaagctgct

SEQ ID NO: 8137 - DNA, 4500 bp, synthetic construct
  misc_feature 1..4500: note = source = /note="Description of Artificial Sequence: Synthetic coding sequence"
  source 1..4500: mol_type = other DNA
atgaccaggatcttgaccgccttcaaggttgtgcggaccttgaagacagggttcggcttcactaacgtgacagcccatcagaaatggaagttctctcgccctgggattaggctcctgtccgtgaaagcccagactgctcatatagtgttggaggacgggacaaaaatgaaaggctacagcttcggacacccatcttctgtcgccggagaagtggtgttcaatactggactgggagggtatccagaggccataactgatcccgcctataaaggccagatactaaccatggcaaacccgatcataggtaacgggggggcgccagatacaaccgctttggacgaactgggcctgtcaaagtaccttgaatctaatggcataaaagtttccggcctattggtactggattactcaaaagactacaatcattggctggcgacaaagagtctgggacagtggcttcaggaggaaaaggtgcctgccatctatggggtggacacacgaatgctgaccaaaatcattcgtgataaaggaactatgctcgggaagatagagttcgagggtcaacccgttgatttcgtggacccaaacaagcagaatctcatcgctgaggtttcgaccaaagacgtcaaggtgtacggcaaagggaaccccaccaaggtggtggccgtggattgcgggatcaagaataatgtgatccgcctcctggtcaaacgtggagcagaggtccacttggtcccctggaaccacgacttcaccaagatggagtatgacggtatcctcatcgcgggtggacctgggaatcctgcactggccgagcccctgatccagaacgtgcgcaagatcctcgagtctgatcggaaggagcccttatttgggatcagcaccgggaacctgatcaccggcctggcggctggggctaagacatataagatgtcaatggctaatcgtggccagaatcagcccgtactgaacattactaacaagcaggctttcatcacagctcaaaaccacggatatgccctggataatactttacccgccggctggaaacccctcttcgtgaacgtgaatgaccagactaatgaaggaatcatgcacgaatctaaacccttctttgccgttcagtttcatcccgaagtcaccccaggcccaatcgatacagagtatcttttcgattcctttttcagtctcatcaagaagggcaaagcgacaaccatcaccagcgttctaccaaaaccggcactggtagcatctcgggtcgaggtctccaaagttctgattctcgggagtggaggactgagtatcgggcaggctggcgagttcgactactcaggctcccaggctgttaaggccatgaaggaagagaacgtgaagaccgtgctcatgaaccctaatatcgcatcagtgcagactaacgaggtgggtctgaagcaggccgataccgtctacttcctgcccataacgccccagttcgtcacagaagtgatcaaagcggaacagccggatggcctgatactgggaatgggtgggcagactgccttaaactgcggcgtcgagctcttcaagagaggggtgctcaaggagtacggcgttaaggttctgggcacatccgtcgagagtatcatggcaacggaggatagacagttgttctctgacaagctcaatgaaataaacgagaagatcgctccgtcatttgctgttgaaagtatcgaggatgccctgaaggcggccgataccatcggctatcccgtgatgatccgatctgcctatgccctcggcggacttggctctggaatctgtcccaaccgggagacactgatggaccttagtacgaaggccttcgcgatgaccaatcagatccttgtagaaaaatccgtcactggatggaaagaaattgagtacgaggtggtccgggatgccgatgataactgtgtgaccgtctgcaatatggaaaacgtcgatgcgatgggcgtgcataccggagattccgtggtggttgcaccagcacagacactgagcaatgccgagtttcagatgcttaggcgcacttctatcaacgtcgtccgacacctgggaattgtcggggaatgcaatattcagtttgcacttcatcctacgagcatggagtattgcatcatcgaagtgaacgcccgcttgagcaggagttctgcgttagcctcaaaagccactgggtaccccctggcattcatcgccgcaaaaatcgcattgggcatccccctgcccgaaattaaaaacgtggtctccggaaagacaagcgcctgcttcgagccttccctcgattatatggtgacaaagattcccaggtgggatctcgaccggtttcatggcacttcatctcgcattggctccagcatgaagtccgtgggcgaagtcatggctatcggtcggacctttgaggaatcctttcagaaagccctgaggatgtgccatcctagcattgaggggttcacacccagactacctatgaataaagagtggccatccaaccttgatctgcgaaaggagctaagtgaaccatctagcacacggatctacgccattgccaaggccatcgatgacaatatgtccttggatgagatcgagaagcttacctacatagacaaatggttcctctacaaaatgcgggatattctgaatatggaaaaaactctgaaggggcttaatagcgagtccatgacagaggaaaccctgaagagagccaaggagatcggattcagcgacaaacagattagcaagtgcctcggactgacggaggcccaaaccagggagctgcgactcaagaagaacatccatccatgggtgaagcaaatcgacacacttgctgccgagtatcccagcgtgaccaactatttatacgtgacctataatggccaggaacacgatgtgaattttgacgaccacgggatgatggttcttgggtgtggcccctatcatatagggtcctcggttgaatttgactggtgcgccgtgagctctattcggaccctcaggcagctgggaaaaaagacagttgttgtgaactgcaaccccgagaccgtgtccaccgacttcgatgagtgtgacaagctttacttcgaagagctgtcattggaaaggattctcgacatttatcaccaagaagcttgcggggggtgtattatctccgtgggggggcagatccctaataacctggccgtgccgttatataagaatggcgtgaagattatggggacctctccgttgcagatcgacagggccgaagacaggtccatcttttcggctgtcctcgacgagctgaaggtggcgcaggctccttggaaagccgtaaacaccctcaacgaagcgctggaattcgctaaatccgtggactacccttgcctcctgcgaccttcttacgttcttagtggctcagcgatgaacgtagtgttcagcgaggatgagatgaagaagttcctcgaagaggcaacgcgtgtgtcccaagagcatccggttgtgttaaccaagtttgtggagggggccagggaagtggagatggacgctgtcggcaaggacggtagagtgatctcccatgccatcagtgagcatgtggaagacgccggggtgcatagcggcgacgcaaccctcatgctgccaacccagacgattagccagggggcaattgaaaaagtgaaggacgcaacacggaagatcgcgaaggcgtttgcaatcagtggtccgtttaatgtccagtttcttgtcaaaggaaatgatgtgctggtcattgagtgcaatcttcgggcgagtaggtcgttccccttcgtgtccaaaactctcggagtcgacttcatcgacgtcgcgacaaaggtgatgattggggaaaatgtcgacgagaaacatcttcctaccctggatcatccaatcattcctgcagattatgtcgcaatcaaggctcctatgttcagctggccgcgtctgagggatgcggaccctatactgagatgtgagatggcgtctaccggtgaggtggcctgtttcggcgaaggcatccacaccgccttcctgaaagccatgctgtctacgggattcaaaattccacagaaagggatccttattggcatccagcaaagctttcgccccaggttcctgggtgtggccgaacagctgcacaacgaaggtttcaagctgtttgctacagaggccacgagcgattggcttaatgctaataacgtgcctgctacacctgtggcctggcctagtcaggagggacagaatccatccctgtcatccattcgcaaactaatacgcgacggcagcattgatctggtgataaacctccccaacaataatactaagttcgtccacgacaactatgtaatcagacgaacagcagtggattcgggcatacctctgcttactaatttccaggtgactaagctgtttgcagaggccgtgcagaaaagtaggaaggtggactctaaaagcctgttccattaccggcaatactcagccgggaaggctgct

SEQ ID NO: 8138 - DNA, 4500 bp, synthetic construct
  misc_feature 1..4500: note = source = /note="Description of Artificial Sequence: Synthetic coding sequence"
  source 1..4500: mol_type = other DNA
atgactaggatattaactgcgtttaaagtggtcaggacactaaaaacagggtttgggtttactaacgttactgcccaccagaaatggaaatttagtcgacccgggatccgattactttccgtgaaagctcagactgcccatattgtgctggaagatggaactaaaatgaaagggtattctttcgggcacccctccagtgttgccggggaagtggtattcaacactggacttggaggatatcccgaagccataacagaccctgcctacaaaggacagatccttacgatggccaatccaattatcggaaacgggggggcaccagatactactgccctcgatgaattggggctcagtaaatatctggagagtaatggaatcaaggtttctgggctgctggtgctggattattctaaagattataaccattggctcgctacaaagagtcttggacagtggctccaggaagaaaaagtgcccgcaatatatggagttgatactcggatgctcactaaaataatacgggataaaggaactatgctggggaaaatcgagtttgaaggacagccagtggattttgtggatcctaacaaacaaaatttgatcgccgaggtatcaacaaaggacgtgaaagtctacggaaaggggaatcctacaaaagtcgtagccgttgattgtgggatcaaaaataacgttataaggctcctagtcaaacgaggagctgaggtgcatttagtaccatggaaccatgattttacaaaaatggagtacgatggaatcctcatagcaggggggcccggaaatccagcattagccgaacctctcatacagaacgtgcggaaaatcctagagagtgatcggaaagaaccattatttgggatatccactggaaatttaataacaggattagccgccggagccaaaacttataaaatgagtatggcaaacagagggcaaaatcagcccgtgttaaacatcactaataaacaggctttcatcactgcacagaatcacgggtatgcactcgataatactcttccagccggatggaagcctctgtttgttaacgtgaacgatcagacgaatgaaggaataatgcatgaatctaaaccattctttgcagttcagtttcaccccgaagttactcctggacccatagatacagaatatctctttgactctttcttttcattgatcaaaaagggaaaggcaacaacaatcacaagtgttctgcccaaaccagcccttgtcgcatctagagtggaagtgtctaaagtccttatcctcgggtccggagggctgtccatcggacaggcgggggaattcgactattcgggatctcaggccgtgaaagcgatgaaagaagaaaacgtgaaaactgttttaatgaatcccaatatagcttcagtgcagacaaacgaagtgggactcaaacaggctgatacagtgtatttccttcccattactccacagtttgtgacagaagtcatcaaagccgaacagcccgatggactgatattagggatgggggggcagacagcgctaaattgcggggtcgagctcttcaaacgcggagtgctgaaggaatatggggtgaaagtactggggacatcagtagagtcaatcatggctactgaagacaggcagctgttttctgacaaacttaacgagatcaacgaaaaaatagctccttctttcgctgtagaatcaatcgaagacgccctaaaagcagcagacactatcggatatccagtcatgatcagatctgcctacgccctgggaggactcggatctggaatctgccctaatcgggaaactttgatggatctgagtacaaaagccttcgccatgacaaaccagatcctagtagaaaaaagtgtgacagggtggaaagagatagaatacgaagtagtccgggacgctgacgacaattgtgtgacagtatgtaacatggagaatgttgatgcaatgggggtgcacactggggattctgtggtagttgcccccgcccagactctctctaacgccgagttccagatgttacgtaggacaagtatcaacgtagtccgccacctcgggatagtgggggaatgcaatatacagtttgccctccatcctacaagtatggaatattgtataatcgaggtaaacgcaaggctgagtagatcttcagccctcgcatctaaagccactggatatcctttggcatttatcgccgccaaaatcgccctcgggatacctctccccgaaataaaaaatgtagtctcaggaaaaacatccgcctgtttcgaaccctccctcgattacatggtgacaaaaatccctcggtgggacctggatcggttccatgggacgtcttcccggattgggtcttcaatgaaaagtgtcggggaagtgatggctatcggacgcacattcgaagaatctttccagaaagcactacgcatgtgccatccctctatcgagggatttacaccccgtcttccaatgaataaagaatggccctcaaatctagatctaaggaaggaactatctgaaccatcttccactcgcatctatgctatagctaaagccatcgacgataatatgtccctcgacgaaatagaaaaattgacatatatcgacaaatggttcctgtataagatgcgggatatattaaacatggaaaaaacattaaaggggcttaattcagaaagtatgactgaagaaactctaaaacgcgctaaagaaataggattctctgataagcagatatctaaatgtctcgggcttacagaagcacaaacacgcgaactaagactcaagaaaaatatccacccctgggtcaagcagatcgatactctcgctgcagaatatccatctgtgacaaactatctttatgttacatacaacgggcaggaacacgacgtaaactttgatgatcacggaatgatggtgctggggtgtgggccataccatattggatcatccgtggaattcgattggtgcgccgttagttctattcgaactctccgacagcttgggaagaagacagttgtggtgaattgcaatcccgaaactgtgtctacggatttcgatgaatgcgataaactctattttgaagagctttctctggaacgaatactcgatatatatcaccaagaggcttgtggagggtgcataatctctgtcggggggcagatccccaataatctcgcagtgcctttgtacaaaaatggagttaaaatcatgggaacttctccccttcaaatagatcgagctgaggaccggtctatattttcagccgtattagatgaactcaaggtcgcccaggctccctggaaagctgtcaacactctgaacgaggccctagagtttgcaaaatccgtcgattatccttgtctgcttagaccaagttatgtactttctggatcagccatgaacgtggtgttttcagaagatgaaatgaaaaagtttctcgaagaagctactcgggtctctcaggaacatcctgtagtactcacaaaatttgtcgaaggggcacgggaagtagagatggatgctgtcggaaaggatggacgagtcatctcacatgcaatctcagaacatgttgaagatgcaggagtccattcgggagatgcaactctcatgctgccaactcagacaatatcccaaggagcaatcgaaaaagttaaagatgccacacgtaagatcgccaaagcttttgctatctctgggccttttaatgtgcagttccttgtgaaagggaatgatgtcttggtgattgaatgtaatttgagagcctcgcggtccttcccctttgtttccaaaactctaggagtggactttattgatgtggccactaaagtcatgataggagaaaacgtggatgaaaaacacctccctacacttgatcacccaatcattcccgccgattatgtggctataaaagcaccaatgtttagttggccaaggctgagggacgctgatcccatactccgttgtgaaatggcatctacaggagaagtagcgtgttttggggaagggatacacacagcattcctcaaagccatgctgagtactggatttaaaataccacagaaaggaatcctcatcgggatacaacagtcttttcgccctaggttcttaggagttgccgagcagctacataatgaggggtttaaactgttcgccactgaagcaacatccgattggctaaacgcaaacaacgtaccagcaacacctgtcgcctggccatcccaggaagggcaaaacccctccctatcaagtattcgcaaactgattagggatgggtctatcgatctcgtgataaatctgcccaataataatacaaaattcgtacatgataactatgtaatcaggcggactgccgtggattctggaataccacttctgacaaacttccaggtgacaaaactcttcgctgaagctgtccagaaatcaagaaaagtcgattctaaatctctatttcattatcgccagtactccgctgggaaagcggca

SEQ ID NO: 8139 - DNA, 4500 bp, synthetic construct
  misc_feature 1..4500: note = source = /note="Description of Artificial Sequence: Synthetic coding sequence"
  source 1..4500: mol_type = other DNA
atgacacgcattctgacagccttcaaggtcgttcgcacattgaagaccggattcggatttaccaacgtgactgcgcatcagaagtggaagttttcacggcccggaattcggctgctcagcgtcaaggctcaaacagctcatattgtgctggaggacggtactaaaatgaagggctattcctttgggcatccaagcagcgtcgcgggcgaagtagttttcaacactggactgggtggctatcctgaagccatcaccgatcccgcctataagggacagatactcactatggccaacccaatcatcggcaacgggggggctccagacacgacagcactggatgaactgggactgtctaagtacctggaaagtaatggcatcaaagttagtggcttgttagtgttagattacagcaaagactataaccactggctggccacaaagagtttgggtcagtggctccaagaggagaaagtgcctgcaatttacggcgtggatacacggatgctaactaagattattcgcgacaagggaaccatgctgggtaagattgaattcgaaggccagcctgttgattttgtggaccccaacaaacaaaatctgattgctgaagtatccactaaggacgtgaaggtctacggcaaaggcaaccctactaaagtggtcgccgtagattgtggcatcaagaacaatgtgatcaggcttttggtgaagaggggggctgaggtgcacttagtgccctggaatcatgattttactaaaatggagtacgacggaatcctgattgctggcggacctggtaatcccgctctcgctgaaccgttgattcagaacgtgaggaagatcctcgagtcagaccgtaaggaacccttgtttgggatcagtaccggaaatttgatcaccgggctagctgcgggcgccaagacttacaagatgtctatggccaataggggacagaaccagcccgtgttgaacataaccaacaagcaggccttcatcacagctcaaaatcacgggtatgcattggataacactctcccagcgggatggaaacctctatttgtcaatgtgaatgatcaaacaaatgagggaataatgcacgaatctaaaccattcttcgccgtccagttccacccagaagtgaccccggggccaatcgacaccgaatacctgttcgatagctttttctcactgatcaaaaaaggaaaggccaccacaatcactagcgtcttaccaaagcctgccctagtcgcttcaagagtcgaagtgtcaaaagtgctgatactaggaagtggagggctgtcaatcggccaggccggcgagtttgattattctggctcccaggccgtgaaagccatgaaggaagaaaatgtgaaaactgtgcttatgaatccgaacattgcttctgtacagacaaatgaagtgggactgaaacaggctgataccgtttacttcctccccatcacacctcaattcgtcacggaagtcattaaggccgaacagcctgatggcctgatcctgggaatgggaggacaaactgcactgaattgcggggtggaactgtttaaacggggggtactcaaggagtatggcgtgaaagtgcttgggacatccgttgagtcgatcatggcaacagaggaccgacagttgttttctgacaagctgaacgaaattaacgaaaaaattgccccaagctttgcagttgagagtatagaggatgccctgaaggcggcagacacaatcggataccccgtcatgatccggagtgcttacgctctcggaggacttggaagcggaatctgtccgaaccgcgagaccctgatggatctgagtactaaagcattcgcaatgactaatcagatcctggtagagaagtctgttacaggttggaaagaaattgaatatgaagtcgtgcgggatgcggatgataactgcgtaaccgtgtgcaatatggagaacgttgacgcaatgggagttcacactggggactcagtcgtggtagcgcccgcacaaacactcagcaatgctgagttccagatgttgcgccgtacctctatcaatgtggtgcgacacttgggaatagtgggagaatgcaacatccagtttgcgctgcaccctacttccatggaatattgtattatcgaggttaatgcacggctatccagatccagcgcgctggctagcaaggcgaccggatacccactcgctttcattgcagctaagatcgccctcgggattccgctgccagaaataaagaacgtggtgtcggggaagacaagcgcgtgttttgaaccttccctggactacatggtcaccaaaattccccgatgggaccttgatagattccatggtacatcttcacgtatcgggtcatccatgaagtccgtcggagaggtcatggctattgggaggactttcgaggaaagctttcagaaggcacttcggatgtgtcatccatccattgaagggttcacccctcggctgccgatgaataaggagtggccttccaatctggatctccgtaaagaactgtcagagccaagctctactcgtatctacgctatagctaaggccatcgacgataacatgtccctagatgagatcgagaaactaacgtatatcgataaatggtttctgtataaaatgcgggatatattgaatatggaaaagaccctgaaagggttaaacagtgagagcatgacagaagagacattgaaacgcgcaaaggaaatcgggttttctgataagcagattagcaagtgcttaggcctgaccgaggctcagactcgggaactccggctgaagaaaaatatccacccttgggttaaacagatcgacactctggctgcggaatatccatccgtgactaactatctgtacgtcacgtataacggtcaggaacacgacgtgaatttcgacgaccacggtatgatggtgctgggatgcgggccataccacatcgggtccagtgtcgagttcgactggtgcgctgtgtcaagcattcggacactgaggcagctcggcaaaaaaaccgtcgtagtcaattgcaatcccgagactgtcagtactgatttcgacgagtgcgataaattgtactttgaggagctatctctggagagaatcttagatatctaccatcaggaggcttgcggcggctgtattatttcagttggcggccaaattccaaataatttggctgtgccactatacaagaatggagtaaaaatcatggggaccagtccactccaaatcgatagagccgaagacaggagcatcttttctgccgtgttggacgagttaaaggtcgctcaggctccgtggaaggcggtgaataccctgaatgaagccctggagtttgccaaatctgtcgattacccctgcctactgagaccatcttacgtgctgtccggtagcgccatgaacgtggtgttcagcgaagatgaaatgaagaagtttctggaagaggccacccgtgtgagccaggagcatcccgttgtactgaccaagttcgtggaaggtgcacgcgaggtggagatggacgctgtggggaaggatggccgcgtgatctcgcatgccatctctgaacacgtggaggacgcaggggtgcacagtggtgacgccacattaatgctccccacccagactatttcccagggggcgatcgagaaagtgaaggatgccactcgtaaaattgccaaggcgtttgcaatttctgggcctttcaacgtgcagttcctcgtgaagggcaacgatgtcctcgtaatagaatgtaatctgcgggccagccgctctttcccatttgtgagcaagaccttgggggttgacttcatcgacgttgcaaccaaggtcatgatcggggagaatgttgacgaaaaacacctgccaactctagaccaccccataatccctgcggactatgtcgctattaaggcccccatgttctcctggcccaggctccgtgacgccgaccctattttacgctgcgagatggccagcacgggcgaagtcgcatgctttggcgaaggaatccacactgcgttcctcaaagccatgctgagcaccggctttaagatccctcaaaaaggcatccttatcggtatccagcagagcttcagacccagattcttgggtgtagccgagcagctccataatgaagggttcaaactttttgcgacagaggccacctccgactggcttaacgcgaacaatgtgccggcaacgccagttgcttggccttcacaggaggggcagaacccttctctgtccagtattcgaaagttgatcagggatggatctatcgacctggttatcaacctccccaataataacaccaaatttgtgcatgataattatgtgattcggaggactgctgttgactccgggattcctctgctcactaatttccaggtgaccaagctatttgccgaagccgtccagaagtccagaaaggtcgattcgaagagtctcttccactaccggcagtatagcgccgggaaggcagct

SEQ ID NO: 8140 - DNA, 4500 bp, synthetic construct
  misc_feature 1..4500: note = source = /note="Description of Artificial Sequence: Synthetic coding sequence"
  source 1..4500: mol_type = other DNA
atgacaaggattctcacagcgtttaaagtcgttagaactctcaagaccggattcggtttcactaatgtgactgctcaccaaaagtggaaattctctcgcccaggaattaggcttctgtctgtgaaagcccaaactgcgcacatcgtcctcgaggacggaaccaagatgaaaggctactctttcggtcatccttcttccgtggctggtgaagtggtgttcaatacaggtctgggaggctaccctgaagctattactgatccagcttacaagggtcagatactcaccatggctaacccaattattggtaatggaggagcccctgataccactgccttggatgagctgggtctgagtaagtacctggaatccaatggaatcaaggtgagtggtttgctggtgttggactacagcaaggactacaatcattggctggcaactaagtcacttggtcagtggctgcaggaagaaaaggttccagccatttatggagttgacactagaatgttgaccaagataatcagagacaagggaactatgctgggaaagatcgagttcgagggacaacctgtggattttgtggacccaaacaagcaaaacctcatcgctgaagtctccaccaaagatgtgaaagtttatggaaagggcaaccctaccaaagtggtggcggtcgattgcggtattaagaataacgtcataagactcctggttaagagaggcgctgaggtgcatttggttccgtggaaccacgacttcaccaagatggaatatgacggaatcctcatcgcaggcggtccgggcaacccggctctcgctgaaccacttatccaaaacgtgcgcaagattttggagtcagataggaaggaacctctgttcggaatttcaactggcaacttgatcacgggcctggccgctggagctaagacatacaagatgagcatggcaaatcgcggtcagaaccaacctgtcctgaacatcactaacaagcaggcgtttatcaccgcccagaaccacggctacgctctggacaacacactgcctgctggctggaagccattgtttgtcaacgtaaacgaccagaccaacgagggtattatgcacgaatctaaaccattttttgccgtacagtttcatccggaggtcacgccaggacccatcgacaccgaatatttgttcgactctttcttctccttgattaagaaaggaaaagctaccaccatcacttcagtccttcctaagcctgctctggtggcttccagagtcgaagtgtccaaagtgcttattctgggtagcggtggtctgtctataggacaagctggtgagttcgactactctggcagtcaggctgtgaaagcgatgaaagaagagaacgtgaagaccgttctgatgaatcctaatatcgcctctgtccagaccaacgaggtcggtcttaagcaagcggataccgtttattttctgcccatcaccccccaattcgtgacagaggtgatcaaagcagagcagcctgatggcctgatccttggcatgggcggacaaacggccctcaactgtggagtagagttgtttaagagaggcgtactcaaggagtatggtgttaaggtattgggaacctcagtagagagcataatggccacggaggacaggcaactcttcagcgacaagctgaacgagattaatgaaaagattgctcccagtttcgctgtggaatctatcgaagacgctttgaaagcagccgatactattggttatcctgttatgattcgctctgcctacgctcttggcggtttgggttccggtatctgtcccaacagggaaaccctgatggacttgtcaaccaaggctttcgcgatgacaaaccaaatactcgtggagaagagcgtgaccggttggaaagagattgaatacgaggtggtaagagacgcagacgacaattgtgtcaccgtctgcaacatggagaacgttgacgctatgggtgtgcatactggcgacagcgtcgtggttgctcctgcccagacattgtctaatgcagagtttcagatgctgagaagaacgagcattaacgtggtacgccatctgggcattgtcggtgaatgcaatatacagttcgctctgcatcctacttccatggagtactgtatcatcgaagtcaacgccagactgagcaggtcatctgctctggcttctaaggcgacgggctacccgctcgcttttatcgcggctaagatagctttgggtattcccttgccagagatcaagaatgtcgtgtcaggaaagacttctgcttgcttcgagccaagcctggattacatggttactaagatccctagatgggacctcgatcgctttcatggaaccagctctcgcatcggatcctctatgaaaagtgtgggcgaagtgatggccatcggaagaacattcgaagagtcatttcagaaagcgctcagaatgtgccacccctccattgagggcttcacgcctaggctcccgatgaacaaagagtggccaagcaacttggatctcagaaaggaactctccgagccgtcatctaccagaatttacgctatcgccaaagctatcgatgataacatgtctctcgacgaaatagagaaactgacctatatcgacaaatggttcctgtataagatgagagacattctgaacatggagaagacactgaaaggtttgaactccgaatccatgaccgaggagaccctgaagagggcaaaagaaattggattctcagataagcagatctcaaaatgcctgggacttacagaagcacaaactagagaactccgcttgaagaagaatatccatccctgggtaaaacagatcgacactcttgcggctgagtacccgagcgtgaccaactacctgtatgtcacatataatggccaagagcatgatgtcaacttcgacgaccacggaatgatggtgctgggctgcggcccgtaccacataggatccagtgttgagttcgattggtgcgctgtgtcatcaatacgcaccctgagacagctgggaaaaaagacggtcgtggtgaactgtaatccagagactgtgtcaactgatttcgacgagtgcgataagctctacttcgaggaactgtcactggagaggattttggatatctatcaccaggaagcctgtggcggatgtatcattagtgtaggaggccagatcccgaacaatctcgctgttccgctctacaaaaacggtgtgaagataatgggtactagccctcttcaaatagaccgcgcagaggatagatctattttctctgccgttctggacgagttgaaggtggcccaggccccgtggaaagcggtgaacactctgaatgaggccctcgagtttgccaaaagcgtcgactacccttgcttgctgagaccatcctatgttctttctggctctgcaatgaacgtagtcttctccgaggacgagatgaagaagttcttggaggaggccacaagggtttcacaagaacacccagttgtcctcaccaaattcgtagagggcgcacgcgaggtggagatggatgctgtgggcaaggatggccgcgttatttctcatgccatctccgaacatgtcgaggacgctggcgtgcactcaggcgatgctactctgatgctgcccacgcaaactatttcacagggtgcgatcgagaaagtcaaggatgcgacccgcaaaattgccaaggcattcgctatcagcggacctttcaacgtacagttcctggtgaagggaaatgatgtacttgttatcgagtgcaatctcagggcctcccgctcatttccttttgtgtccaagaccttgggtgttgacttcatcgatgtcgcgacgaaagtgatgatcggtgaaaatgtggacgagaagcatttgcctaccctcgaccatcctattattccggctgattacgttgccatcaaagcccccatgttcagttggcccagacttagagatgccgatcccattcttaggtgtgaaatggcttcaacaggtgaggtcgcctgtttcggagagggaattcacactgctttccttaaggcgatgctttccacaggatttaagatcccccagaagggaattctgatcggcattcagcaatctttcaggccgaggttcctcggcgtagctgaacagctccacaacgagggctttaagctgtttgccaccgaagcgactagcgactggctgaacgcaaacaacgtaccggccacgcctgtggcttggcccagccaggaaggccaaaacccgtccttgtcatccattcgcaagctgattcgcgacggatctatcgatcttgtgattaatctgcccaataacaacacaaagttcgtgcatgacaactacgtgatcagaagaaccgccgtagacagcggtattcccttgctgaccaatttccaggttacaaaattgtttgcggaggctgtgcaaaagagcagaaaggtggactccaaatccctgtttcattataggcagtactctgcaggcaaggccgca

SEQ ID NO: 8141 - DNA, 4500 bp, synthetic construct
  misc_feature 1..4500: note = source = /note="Description of Artificial Sequence: Synthetic coding sequence"
  source 1..4500: mol_type = other DNA
atgacccgtattctgacagcttttaaagttgtgcgaacgctgaagacaggttttgggttcaccaacgtcaccgcccatcaaaagtggaaattctcacgcccaggaatacgtctgttgtcggtcaaggcccagacagctcacattgtcctggaggacggcaccaagatgaagggctacagcttcggccacccgtcaagtgtggccggagaggtcgtgttcaatacgggcctaggcgggtatccggaggccatcacggatcccgcgtacaagggtcagattctaaccatggccaatccaattattggtaatggaggggcgcctgacacgaccgcgttggacgaactcggactgagcaagtacctagagtcaaacggaatcaaagtgtccggactgctcgtcctcgattactcgaaggattacaatcactggctggctacgaagtcgctcggccagtggctgcaggaggagaaggttcccgccatatacggcgttgatacccggatgctaacgaagatcatccgcgacaaaggcaccatgctaggcaagatcgaatttgaaggacagcctgtggatttcgtggatcccaataaacagaaccttatagctgaggtttccacgaaggacgtgaaggtctatggtaaaggcaatcctaccaaggtggtggccgtggactgtggcatcaaaaacaacgtgatccgtctgctggtgaagcgtggagctgaagtgcacctggtcccctggaaccatgatttcacaaagatggaatacgacggtatcctaattgctggaggccccggcaaccccgccctcgcagagccactgatccagaacgtgcgtaagatcttagaatcggatcggaaagagccactcttcggaatttccaccggcaacctaattacaggactggccgcaggcgcaaaaacctataaaatgtcgatggccaaccgcggacagaaccagcccgtgctgaacataacaaacaaacaagccttcatcacagctcaaaatcacggctatgctctggataacacactgccggcgggctggaaaccgctgtttgtcaatgttaacgatcaaaccaacgaggggataatgcacgagtcaaagcctttcttcgccgtgcagtttcatcccgaggtcaccccgggacccattgatactgaatatctgttcgattcgttcttttcactgatcaagaagggcaaagccaccaccattacctccgtgttacccaaacccgcattggtggcgagtagggtcgaggtgagtaaagtcttgatcctaggctcgggcggacttagcatcggccaggccggtgagttcgactactcggggtcccaggctgttaaggccatgaaagaggagaacgtaaagaccgtattgatgaatccgaatatcgcttcggtacaaacgaacgaggtggggctgaagcaggcagatacagtatactttctcccaattacgcctcagttcgtgacggaggtcataaaggcagaacagccggatggcctgattttaggtatgggaggccaaacggccctgaactgcggcgtggaactctttaagcgcggagtcttgaaagagtacggagtgaaggtcctgggaacatcggtcgagtcgatcatggctacagaggatcgccaactgttcagcgacaagttgaatgaaataaacgagaagatcgccccaagctttgctgtggaatccattgaggatgccctgaaggcggctgacaccataggctacccagtcatgatcaggtctgcatatgcgctgggtggactggggtcgggaatttgcccaaaccgggagactttgatggacctgtcgaccaaagccttcgccatgactaaccagattctggtagaaaagtccgttaccggctggaaggagattgagtatgaagtcgtgcgcgacgcggatgataattgtgtcaccgtctgcaacatggagaatgtggatgcgatgggagtgcacacaggcgacagcgtggtcgtcgcacctgcacagaccctctccaatgccgagtttcagatgctgcgccgcacgagcattaatgtcgtaagacatcttggaatcgttggcgaatgcaatatacagttcgctttgcatccgacctcgatggagtactgtattattgaagtcaacgcacgcctgtcgcgcagtagcgcgcttgcctcaaaggccacaggttacccgctagcatttattgccgcgaagatagcgctaggaatcccccttccggaaattaagaatgttgtctcgggtaaaacatcggcatgcttcgagcccagtttagactatatggtgacaaagattccacgctgggacttggaccgctttcacggtacctcctcccgcattggaagctcgatgaagtccgtgggtgaggtaatggccattggtcggacatttgaggagtcgttccaaaaggcactgcgcatgtgccatccgagcattgagggctttaccccgcgtctccccatgaataaggaatggcctagcaatctggatctcagaaaagagttgtccgagcctagcagcacccgtatctatgcaatcgcgaaagccatagatgataacatgtcgctcgacgagatagaaaaactgacctacatcgacaagtggttcctgtataagatgcgtgacattctgaatatggaaaagactcttaagggactgaactccgagagcatgacagaggaaactttgaagcgcgctaaggagatcgggttctctgataagcagatctccaagtgcttaggattgactgaagcccagacccgggagttgcgcctgaagaagaacattcacccttgggtaaagcagatcgacaccctagccgcagagtacccatccgtaacaaactacctttatgtgacgtacaacggacaggagcacgacgtaaacttcgacgatcacggcatgatggtcttgggatgcggaccgtaccatatcggctcctccgttgagttcgattggtgcgctgttagttcgattcgtactctgcgccagctaggcaaaaaaacggttgtcgttaactgcaacccagagacagtgagcactgacttcgacgagtgtgataagctgtacttcgaggaactgtccctggaacgcattctggatatataccaccaggaagcctgcggcggctgcatcatctccgttggaggacagatccctaacaacctggcagtcccgctctacaagaacggtgtgaagatcatgggcacttcgccgctgcagattgatcgagctgaagaccgttccattttttccgctgtcctggatgagctgaaggtggcacaggctccctggaaggccgtgaatacgcttaacgaagccttggaatttgccaagagcgtagactatccctgtctgttgaggcctagctatgtgctgtcgggcagtgctatgaacgtggttttttcggaggatgaaatgaaaaagttcctggaagaagctacacgtgtgtcgcaggagcacccggtggtactgacgaagtttgttgaaggcgccagggaggtcgagatggacgccgttggcaaagacggccgtgtgattagccatgccattagtgaacacgtggaggatgctggcgttcacagcggtgatgccacgctgatgcttcctacacaaactatttcccaaggggcgatagagaaagtcaaagatgccactcggaagattgccaaggcattcgcaataagcggtccattcaatgtacaattcctggtcaagggcaacgatgtgctggtgatcgagtgcaatttgcgagcctcccgcagttttcccttcgtgagcaaaaccttgggcgttgatttcatagacgtggcgaccaaagttatgataggagagaacgtagacgagaagcatcttcccactctcgaccacccgataatcccggctgattacgtcgccatcaaggcccctatgttctcttggccgaggttgcgagacgccgatcctattcttcgctgcgagatggctagcaccggtgaggtagcctgtttcggcgagggaatacacacagccttcctgaaggctatgctgtccaccggctttaagataccgcaaaagggtattttgatcggtattcaacagtcattccgtccgcgtttcctgggcgttgctgagcagctccacaacgaaggattcaagctgttcgcaactgaggctaccagcgactggctgaatgcgaacaatgtgcccgccaccccagtggcttggccgagtcaggaggggcagaacccatctctgtccagcattcgcaagcttatccgagacggttcaatcgatttggttattaatctgcccaacaacaatacaaagttcgtgcacgacaactacgtcattcgacggaccgcggtcgatagcggtattccgctcctcaccaactttcaggttacgaagctgttcgcagaggctgtgcaaaagtcgaggaaggttgattctaagtcgctgttccattacagacagtactcggctggaaaagccgcc

SEQ ID NO: 8142 - DNA, 4500 bp, synthetic construct
  misc_feature 1..4500: note = source = /note="Description of Artificial Sequence: Synthetic coding sequence"
  source 1..4500: mol_type = other DNA
atgaccaggattttgaccgcattcaaggtggtccgcacattaaagacaggattcggcttcacgaacgtgacagcgcaccagaaatggaagttctcacgacccggcattcggttgttatcagtcaaagcgcagactgctcatatagtccttgaagacggcaccaaaatgaagggctattctttcggccacccatccagcgtcgccggtgaagtggtgttcaacacaggcttgggaggctatcccgaagctataactgaccccgcctataagggccagattttaactatggccaatcctatcatcggtaatggcggcgcccctgacaccacagcattggatgaattggggctgtcaaagtacttggagtcaaatggtataaaagtgtctgggcttttagtgctcgattacagcaaggactataatcactggctcgcaacaaagtcactgggccagtggctccaggaggagaaggtgcccgccatttatggtgttgataccaggatgcttaccaagatcatcagagacaagggcacaatgttgggaaaaatcgaatttgagggccagcccgtcgacttcgtggatccaaacaaacagaaccttatcgcagaggtgtctaccaaggacgttaaggtgtacggcaaaggaaaccccaccaaagtcgtggcagttgactgtggcatcaaaaataacgtaatcaggctgctagtcaaaaggggcgccgaagtgcatctcgtcccctggaaccacgatttcacaaagatggagtatgatgggatcctcattgccggcggtccaggcaacccagccctggcagagccactgatccaaaacgtgcggaagatcctcgaaagcgaccggaaggaaccactgttcggcattagtacaggcaacttgatcaccggacttgccgctggcgcgaaaacgtataaaatgtcaatggctaatagaggtcagaatcagcctgtcctgaacatcacaaacaaacaggctttcattaccgcccagaatcatggatacgccctcgataatacgttgcctgctggatggaaaccgctgtttgtcaacgtcaacgaccagacgaacgagggaatcatgcatgaaagcaagccttttttcgccgtccagtttcatcccgaggtgactccaggtcctatcgacaccgaatatctatttgactctttcttctctctgatcaaaaaaggcaaagcaaccaccattactagcgtgcttcccaagccagccctagtagcatcccgcgtagaggtgtcaaaggtgttgatactgggctcagggggcctttcgatcggccaagccggcgaatttgattactcgggatctcaagcggtgaaggcgatgaaggaagaaaacgtgaagacggtcctgatgaacccgaacattgctagtgtacagaccaacgaagttgggctcaaacaagctgatacggtgtattttctgccaataacaccacaatttgtgaccgaggtgattaaggctgagcagcccgacggcctcatcctggggatgggggggcaaacagctttgaattgtggggttgagctgttcaagaggggggtacttaaggaatacggtgtcaaggtcctaggcactagtgttgaatccataatggccaccgaagatagacagctgttcagcgacaagctgaacgaaattaatgagaaaatcgccccctctttcgccgtagagtcgatcgaggacgccctgaaggccgcggatacgattggttatcctgtcatgatccgcagtgcctacgcgctgggagggctagggagcggcatctgcccgaatagggaaacccttatggatctgagcaccaaggcttttgctatgaccaaccagatcctggtggaaaagtctgtgaccgggtggaaggagatcgaatacgaggtcgtacgcgacgctgacgacaattgtgtgaccgtgtgcaatatggaaaatgtggatgcaatgggggtccacaccggtgattctgttgtcgtcgctcccgctcagacactgagcaacgctgagttccaaatgctgcggaggacctctattaacgtagtaaggcatctgggcattgtgggggagtgcaacattcagtttgctctccatccgacttcaatggaatattgtattatcgaagtcaatgctagactgagccgcagcagcgctctcgcttctaaggctactggctaccctctggccttcatagcagcaaaaatcgccctcggcatccctcttccagagataaagaatgtggtgagcgggaagaccagcgcatgcttcgagcccagcctagattatatggttacaaagatcccgcggtgggacctcgatcggttccatgggacttctagcaggatcggttcaagtatgaaaagcgtgggggaagtcatggccatcggacggacatttgaagaatcctttcagaaggcacttcgcatgtgccacccatccatcgaaggcttcacaccgaggctccccatgaataaggaatggccatctaatctcgacctaagaaaagagttaagtgagccatctagcacaagaatttatgcaatagctaaggcaatagacgataatatgtccctagacgaaatagaaaagctgacgtacatagataaatggttcctatataaaatgcgggacattcttaatatggagaagactttaaaaggcctgaattccgaatcaatgactgaggagacattgaaacgggccaaggagatcggcttttccgataagcagatctctaaatgtctgggacttaccgaggcccaaaccagggagctccggttaaagaaaaacatccatccctgggtaaagcagattgacaccctggctgcggagtacccaagcgttacaaattacctttatgtgacgtataatggccaggagcatgatgtgaacttcgacgaccacgggatgatggtccttggatgcggcccatatcatatcggatctagtgtggagttcgactggtgcgccgtgtcctctatacgcactctgcgccaactgggcaaaaagaccgtagtcgtgaattgcaacccagagaccgtttccacagatttcgatgagtgcgataaactctactttgaagagctgtccctggaacggatacttgatatttaccaccaggaagcatgtggcggttgcatcatatccgttggggggcaaatcccgaataacctcgcggtacccctgtacaagaatggcgtgaagatcatgggcacctcccctcttcagatcgaccgagcagaagacaggtccattttctctgccgttctcgacgaactcaaagtggcccaggcgccgtggaaggcagtgaatacgttaaacgaagctctcgaatttgctaagtccgttgattacccatgtctgctccggccttcgtatgtgttgtctgggtcggcaatgaacgtggtgttctccgaggacgagatgaagaagttccttgaagaagccacaagagtgtcacaggagcacccggtggtcctgacaaagtttgtggaaggcgctcgggaggtggagatggacgctgttgggaaagatggccgggtcatctcacatgccatcagcgagcatgtggaggatgctggggtgcactctggagacgcgaccttgatgcttccaacccagacaatctctcagggagccatagagaaggtgaaagatgcaacccgaaaaatcgctaaggccttcgcaatttctgggccctttaacgttcagttcctagtaaagggaaatgacgttttggtcatcgagtgtaacttgagggcctctcgcagctttccattcgtttcaaaaaccttaggggtggactttatagacgtggcaaccaaggtgatgatcggggagaacgtcgatgagaagcacctgcctacactggaccaccccattattcccgcagactacgtggctataaaggcccctatgttttcctggcctcggctacgggacgctgaccccattctgaggtgcgagatggcatctactggagaggtggcgtgtttcggagaggggatccatactgcctttctgaaggcaatgctgtcaacaggctttaagataccacagaaggggattctcatagggatacagcagagtttccggcccagattccttggggtagcggaacaactgcacaacgagggcttcaaacttttcgctacagaagctactagcgattggcttaacgcgaacaacgtgcctgccactcccgtggcgtggccctctcaggaagggcagaacccttctctctcttccatcagaaaactcataagagacgggtccatcgacctcgtgatcaacctcccgaataacaacacgaagtttgtccacgataactatgtaatcaggaggaccgcagtggactcaggtattcctttgctcaccaacttccaggttaccaagttatttgccgaggccgtgcagaagtcccgcaaggtggatagcaagtccctatttcattacaggcagtacagtgctggaaaagcggca

SEQ ID NO: 8143 - DNA, 4500 bp, synthetic construct
  misc_feature 1..4500: note = source = /note="Description of Artificial Sequence: Synthetic coding sequence"
  source 1..4500: mol_type = other DNA
atgacccgcatactgacggcattcaaagttgtccggaccctgaaaacgggcttcgggtttactaacgtaacagcgcaccaaaaatggaagttttccagaccaggaatacggctattaagcgtcaaggcccaaactgcacatatagttctggaggatggcactaaaatgaagggttacagttttggccatccatcttccgtcgctggagaggtggtctttaacaccggcctgggaggctacccggaggctattaccgaccccgcgtacaaaggacagattctgactatggcaaatcctataattggcaacgggggcgctcctgacactactgccctggacgaactgggcctgtcaaaatatctagaatcgaatggtataaaagtctcaggtctgttagtgctcgattatagtaaagactacaatcactggctggcaacaaagtccctcggtcaatggttacaggaagaaaaggtgcctgccatctatggcgtggatacacgcatgcttaccaagataatcagggataaaggaacaatgctggggaaaatcgaatttgaagggcagcccgttgattttgttgatccaaacaaacagaacctgatcgccgaggtgagcactaaggacgtaaaggtctacggaaaggggaatccaacgaaagtggtcgctgttgactgtgggataaagaacaacgtgatccgcctgctggttaagaggggggctgaggtccacctagtgccttggaatcatgatttcacaaaaatggaatacgacggcattctgatcgccggtggacccggcaatcctgccttggccgaaccactgatacagaatgtgcgcaaaatcctagaatctgacaggaaggaacctctgttcggtatcagcacggggaacctcattacgggtctggccgcaggagcaaagacctacaagatgtcgatggcaaacagagggcaaaaccagcccgtgctgaatattacaaacaaacaggccttcatcactgctcagaatcatgggtatgcgctggacaataccctgccagccggttggaagccactgttcgtcaacgttaatgatcagacaaatgaaggtattatgcatgagtccaaacctttcttcgctgtacaattccatcccgaagtgactccagggccgatcgatactgagtacctgtttgactcttttttctccctgattaagaagggtaaggctaccacaataacttctgtccttcccaagcctgcactggtcgcaagtcgcgtggaggtatctaaggtcctaatcctggggagcgggggactgtccatagggcaagccggcgagtttgattactctgggtcgcaagcagtgaaggcgatgaaggaggagaacgtgaagaccgtgcttatgaaccctaatatcgcatctgtacagactaacgaggtgggactgaaacaggcagacaccgtttatttcttacccattacaccccagtttgtcacggaggtaataaaggctgaacaacctgatgggcttatcttaggcatgggcggtcaaacagctctgaactgtggcgtggagctattcaagcggggcgtactcaaagaatatggcgtgaaagtgctgggcacgtctgtagagtctataatggcgacagaggacagacaactgttcagcgacaagcttaacgagataaacgagaagatcgcaccctctttcgcggtggaaagcattgaggatgcgctgaaagccgccgacactatcggatacccagtgatgattagatcagcctacgcactgggaggccttggctctgggatttgcccgaacagagaaaccctgatggacctgagcacaaaggccttcgccatgaccaaccagatcctggtggaaaaaagcgtgacaggctggaaggagattgaatatgaggtagtgagagatgcagacgacaattgtgtgaccgtgtgcaatatggagaacgtggacgctatgggagtccatacgggagactctgtggtggttgctccagcccagaccttgagcaacgcagagttccagatgctcagacgtactagtattaacgtggttcgtcatctgggaatcgtgggcgagtgcaacattcagttcgccctacaccctaccagcatggagtactgcattatcgaggtgaatgcgcgcttgagccgctcgtccgcactggcctcaaaagctactggctatcccctcgccttcatcgccgcgaaaatcgcacttggcatccctcttccagaaatcaagaatgtggtgagcggaaagacaagcgcctgcttcgaaccttccctggactatatggtaaccaagatacctcgctgggatctcgaccgcttccacggcacaagctcccggattggttcatcgatgaagagcgtgggagaggtaatggccataggaaggacattcgaggagtcattccagaaggctctcagaatgtgccacccatcaatcgaaggatttaccccacgactgccgatgaataaagaatggccatcaaatttggacttgagaaaagaactttccgagccttcatcaaccagaatatacgcgattgcaaaggccatcgacgataacatgtccctggatgagatcgagaagctcacttacatcgacaagtggtttctgtataaaatgagagacatccttaacatggaaaaaaccctgaaggggcttaactcagaatccatgacagaggaaacattgaagcgtgccaaggaaatcggatttagcgataaacagatctccaagtgtctgggtctgactgaggctcagacccgagaactgcgcctgaagaagaacattcatccatgggtcaaacagatcgacaccctagccgccgaatatcccagtgtgactaattacctgtatgtgacttataatgggcaggaacatgacgtgaactttgatgaccacggcatgatggttctcggatgtggaccttatcacattgggtccagcgtcgagttcgactggtgcgctgtctcttcgattaggaccttgaggcagctgggcaagaagacagttgtggtgaattgtaacccggaaacagttagcacagacttcgacgagtgtgacaagctgtacttcgaggaactgagcttggaacgtattctggatatttatcaccaggaagcctgtggaggttgcattatcagcgtcggcggccaaatccctaacaatctggccgtcccactttataaaaacggcgtgaagataatggggacctctcccctgcaaatcgatcgcgccgaagataggtccattttttctgccgtgctagatgagctgaaggtggcccaggctccctggaaagctgtcaacaccctgaatgaggccctggagttcgccaagtcagtcgattacccctgtctcctaagaccctcttacgtgttatccgggtctgcgatgaatgtggtgttctctgaagacgaaatgaagaaattcctggaggaagccacgcgtgtaagtcaggaacatccagttgtcctgaccaaatttgttgagggcgctcgggaagtagagatggacgcagtcgggaaggacggtagggtgataagccatgcgataagcgagcacgtcgaggacgctggcgtccatagcggggacgctacgcttatgttacccactcagacgatcagccagggtgcaatcgaaaaggtcaaggacgctactcggaaaattgccaaagctttcgccatctccggtccgttcaacgtgcagttcctagtgaaaggaaacgacgtgctggtaatagaatgcaacctccgagcctccaggtcatttcctttcgtgtccaagacccttggagtcgacttcatcgacgtggctaccaaggttatgattggcgaaaatgtagatgagaaacatttacctactctcgaccacccaatcatcccagccgactacgttgctatcaaagcgcccatgttctcatggccccgattgagagatgccgaccctatcctacgctgcgaaatggcgagcactggagaggtggcatgcttcggggagggcattcacacggcattcctgaaagcaatgctatcgacaggctttaaaatcccccagaagggcattttgattgggattcaacaaagcttcaggccaagattcctcggcgtggccgagcagctgcataacgagggctttaagctgttcgcaactgaagcgaccagcgattggctgaacgcaaataacgtgcctgcgacccctgtagcctggccaagccaggagggtcagaacccttcgctgtcatcgatccgcaagctgataagggatggctctattgacctggtgataaacctgcccaataacaacacaaagttcgtgcatgacaattacgtcataagaaggactgctgtcgattcaggcatacctttactcacaaattttcaggttacgaagctgttcgctgaggccgtgcagaagagcagaaaggtagattcgaagtctctgtttcactatagacaatacagcgcaggtaaagcagcg

SEQ ID NO: 8144 - DNA, 4500 bp, synthetic construct
  misc_feature 1..4500: note = source = /note="Description of Artificial Sequence: Synthetic coding sequence"
  source 1..4500: mol_type = other DNA
atgacacggatactaacagctttcaaagtggttcggaccctcaagacaggcttcggctttactaatgtcacagctcatcagaaatggaagttcagtcgcccaggaattagactgctgtctgttaaggctcaaacagcccacatcgtgctggaggacggcacaaagatgaaaggctatagcttcgggcatccaagttccgtcgcaggcgaggtggtctttaacacaggcctgggcggctaccctgaagccatcacagaccctgcctacaaggggcagatactgacaatggctaatccaataatcggcaacggtggggcccctgacaccaccgcccttgatgaattagggctcagcaagtatctggagtctaatggcataaaggtgtccggcctgctggtgctggactactctaaagattacaaccactggctggcaacaaaatcactggggcaatggctgcaggaggagaaagttccagcaatctacggcgtggacactaggatgctgactaagataattcgcgacaagggaacaatgctgggcaagatcgaatttgaagggcagccagtggacttcgtggaccctaacaagcagaacctgatcgcagaggtgtcaaccaaggacgtgaaggtgtacggaaagggtaacccaactaaggtggttgctgttgactgcggcatcaaaaataatgtgattagactgttagtcaagcggggcgccgaggtgcatttagtgccatggaaccacgattttactaagatggaatatgacggaatcctgatcgcaggaggcccaggcaacccagcccttgctgaacctttaattcaaaacgtccggaagatcctggagagtgaccgtaaggagcctcttttcggcatatctacaggaaacctgatcaccggccttgccgctggcgcaaaaacctacaagatgtcaatggcaaatcgcggtcagaaccagcctgtgctgaacattacaaataagcaggctttcattactgcccagaatcacggctacgctctggataatacactgccagccggctggaagcctctgttcgtaaatgtaaacgaccagaccaacgaagggataatgcatgagtcaaaaccctttttcgccgtccagttccacccagaggtgacacccggccctattgatactgaatacctgtttgactccttcttctctctgataaagaaaggcaaggctaccaccatcacaagcgtgcttcctaagcccgctctggtggctagcagggtcgaagtaagcaaggtgctcatcctgggcagtggtggcctgagcattggccaggcaggggaattcgattatagcggctctcaggctgtgaaagccatgaaagaagagaatgtcaaaaccgtactgatgaatcccaacatagccagcgtgcagacaaatgaggttggtctgaaacaagccgacaccgtgtacttcctccccatcacaccccagttcgtgacagaagtgataaaggctgaacagcctgacgggctgatactcggcatgggaggtcagacagcactgaactgtggggtcgagctgttcaagcggggggtcctaaaggagtacggcgtgaaggtcctggggaccagcgtcgagagcattatggccactgaagaccgccagctctttagcgacaaactgaacgagatcaacgagaaaatcgcacctagtttcgctgtagagagcattgaggatgccctgaaagcagctgatactatcggctatccagttatgataagatctgcctacgctctgggcggattaggctccggaatctgtccaaatcgggaaaccctgatggacctctctaccaaggcattcgcaatgacaaaccagatcctagtggaaaagagcgtcactggttggaaagagatagagtacgaagttgtgagggacgctgatgacaactgcgtgaccgtctgcaatatggagaatgtggacgccatgggagtacacacaggggacagcgtcgttgtcgcccctgctcagaccctgtccaacgctgaatttcagatgctgaggcgcacctctataaatgtcgttcgccacctgggcatcgtaggcgaatgcaatatccagtttgccctgcaccccacttccatggagtactgcattatcgaggtgaatgctcgactctcacggtccagcgcactggcatctaaagccaccgggtaccccctcgcttttatcgctgccaagatcgccctcggcatcccattacccgaaattaaaaatgtagtgtcaggtaagacttcagcctgcttcgagccttcccttgactatatggttaccaaaattccacgctgggacctggaccggtttcatggaacctcttcccgcataggttcctctatgaagtctgtaggggaggtgatggctattggtcgaaccttcgaagagagtttccagaaagccttaagaatgtgtcacccatccatcgaggggtttacacccaggctcccaatgaacaaggagtggcccagtaacctggacctaagaaaagagcttagcgaaccaagttccaccaggatttatgccatagccaaagctatcgacgacaacatgagtttagatgagatagaaaagctgacttatatagacaagtggttcctgtataaaatgcgggatatactgaatatggaaaaaacactgaaggggctgaactccgagtctatgaccgaagagacattaaagagggcaaaagagattggctttagcgacaagcaaattagcaagtgtttaggccttaccgaggcccagacaagagaactgagactcaaaaagaacattcacccctgggtcaagcaaatcgataccctggcagccgagtacccaagcgttaccaattatctgtatgtcacctataacggacaggaacacgatgtgaattttgatgaccatggaatgatggtgctgggctgcggaccctatcacataggaagttctgtggagtttgactggtgcgccgtgtcatccatccgtactctacggcagctaggcaagaaaaccgtcgttgtaaactgcaaccctgagaccgttagcaccgacttcgacgaatgcgataaactgtacttcgaggagctgagcctagagaggatactggacatatatcatcaggaggcttgtggagggtgcatcatctcagttggcggtcaaattcctaacaatctggccgtgcctctttacaaaaacggagtgaagatcatgggtacatcaccactacaaattgatagagcagaggatcggtctatcttttctgcagtgctggatgaactgaaggtggcccaggccccatggaaggcagttaacactctgaatgaggctttagagttcgccaagagcgtcgattatccctgcctgctgaggccaagctatgtgttaagcggttctgcaatgaacgtggtgttttctgaggatgagatgaagaaattcctggaagaggctaccagggtgagtcaggagcatcctgtcgttctgacaaaatttgtggaaggggcacgggaagtggaaatggacgccgtgggcaaggatggtcgcgtcatttcacacgccatctccgaacatgttgaggacgctggggttcactcaggtgatgccaccctcatgctccccactcagacaattagccagggcgctatagagaaagttaaagacgccaccaggaagatcgccaaagccttcgccatatccggcccatttaacgtgcaattcctggtgaaaggaaacgatgtgctggtgattgagtgtaatctccgagcctcccgttctttcccttttgtgagtaaaactctgggcgtcgacttcatcgatgtggcaactaaggtgatgattggtgagaacgttgatgagaagcatctgcccacactggatcaccccattatacccgccgattatgtggccattaaggccccaatgttttcttggccacggctgcgagacgctgaccccatcctgcgttgtgagatggcatccaccggggaagtggcttgcttcggagaggggatccacacagcctttctgaaggcaatgctgtctaccggcttcaagataccccagaagggaattctcattggcatacaacagtcttttcggcctcggtttttaggggtggcagaacagctgcataatgaggggttcaagctgttcgctaccgaagccacttctgactggctcaacgcaaacaacgtacctgctacacccgtggcctggccctcccaagagggccaaaaccctagcctaagtagcattcgaaagttgatacgtgatgggtctatagacctggtgattaacctgccaaacaataacacaaagttcgtccatgataactacgtgatacgaaggactgctgttgatagtggcataccactcctgaccaatttccaggtgaccaagctgttcgcagaggccgtgcaaaagtccagaaaggtggactcaaagagtctcttccactaccgacagtattctgccggtaaggccgct

SEQ ID NO: 8145 - DNA, 4500 bp, synthetic construct
  misc_feature 1..4500: note = source = /note="Description of Artificial Sequence: Synthetic coding sequence"
  source 1..4500: mol_type = other DNA
atgacgcggattctgacagctttcaaagtcgtgcgcaccctcaagaccggattcgggtttaccaatgtaactgcccatcagaaatggaaattcagcagaccgggcatccggctcctatctgttaaggcacaaaccgctcatattgttcttgaggatgggaccaaaatgaagggctattcgtttgggcacccctcctccgtagcgggggaggtcgtctttaacaccgggctgggcggatatcctgaggccataaccgaccccgcatacaaagggcagattctgaccatggcaaaccctataatcggtaatggcggtgcaccggatactactgctctggatgagctcggtctcagtaaatatctggagtccaacggcatcaaagttagtgggctgctggtacttgattactcaaaggattacaatcattggctcgctacaaagtccctggggcaatggctgcaagaggagaaggtccccgctatttacggcgtcgatacgcggatgctcactaaaatcataagggacaagggcacaatgctgggcaagattgaattcgaggggcagcccgtcgacttcgtggatcctaataaacagaacttgatagctgaagtctctactaaggatgtaaaagtgtacggtaaaggtaatcccacaaaggtggtggccgtcgactgtgggattaaaaacaatgtgattagactgttggttaaacgaggcgccgaagtgcacctggtgccctggaatcacgactttactaaaatggagtacgatggaatccttattgccggcggtcctgggaatccagcactggccgagccactcattcagaatgtccgcaaaattctcgaaagtgataggaaggagcctctgtttggcatctcaacgggtaacctgatcacaggacttgctgccggtgccaaaacctacaagatgagcatggctaatcgcgggcagaaccagcctgttttgaatattactaacaagcaggcttttatcacagctcagaaccacggctatgctctggacaatacattgccagctgggtggaagccactgtttgttaacgtgaatgaccagactaacgagggcatcatgcatgagagtaagccgtttttcgctgttcagttccacccagaggtaacaccggggcctatcgatacagagtatctcttcgactccttttttagtttgataaagaaagggaaagccactaccataacctctgtccttcccaagccagcactagtggccagccgggtggaagtatccaaagtcttgattctgggctccggtgggttgtctatcggccaggctggagagttcgattactccggttcccaagcagtcaaggctatgaaggaggaaaacgtgaagacagtgctcatgaaccctaatattgctagtgtgcagacgaacgaggtggggttaaagcaggccgatacagtgtattttctgccaatcaccccccagttcgttacggaagtgatcaaggcggagcagccagacggacttatactggggatgggggggcagacagcactcaactgcggggtcgagctgttcaagcggggcgttttgaaagagtatggagttaaggtgctaggcaccagtgtggaaagcattatggccactgaggacaggcagctgttctccgataaactgaacgaaattaacgagaagattgcccctagctttgcagtcgaaagcatcgaggatgcactgaaggccgcagacaccataggatatccagtgatgatccgctctgcttacgccctgggcggcctaggctcaggaatttgccctaaccgtgagactctgatggacctgagcacaaaagccttcgctatgaccaatcagatccttgttgagaaaagcgtcaccgggtggaaggaaattgaatatgaggtggtaagggatgctgatgacaactgtgtgactgtttgcaacatggagaacgtagatgcgatgggagttcatactggtgactccgttgtagtagcacctgctcagaccctttcaaatgcggaattccagatgctcaggcgtacttcaattaacgtggtgaggcatctcggcattgtgggcgagtgcaatatccagttcgctctccatcccacgtcaatggagtactgcatcatcgaagtcaacgcaaggttgagtcgatcttctgcgctggccagcaaagccactggatatccgctcgctttcatcgcagcgaagatcgcactggggattccactgcctgagataaaaaatgtggtgtccggaaagacgtcggcctgttttgaaccctccctggattatatggttaccaaaatcccccgctgggatctggaccgtttccacggcacctcttcgagaattggaagttccatgaagtccgtgggcgaggttatggctataggccgaactttcgaagaatcctttcagaaggccctgaggatgtgccaccctagtattgagggcttcacacctcggctacctatgaataaggagtggccgtctaatcttgatttaaggaaagaactgtccgaacccagctcaacccgtatttacgccatcgccaaagccatcgacgacaatatgagcctggatgagatagaaaagctgacttacatcgataagtggtttctatataaaatgagggacatattgaacatggaaaaaacgctgaaaggtctgaactcagagagcatgaccgaggagaccctgaagagggccaaggagattggcttcagcgataaacaaatcagcaagtgcttgggtctgactgaagcccagacgcgggagttaaggcttaaaaaaaacatccatccatgggttaagcagatagacacgttagctgcggagtacccctccgtaacaaattatctgtacgtgacatataatggccaagaacatgatgtcaattttgatgatcacggcatgatggtcctcggttgcggtccctatcatatcggttccagtgtggaatttgactggtgcgccgtgtcctctatacggacgttaaggcagttgggaaagaaaactgtcgtcgtcaactgcaaccccgaaactgtgagcaccgacttcgacgagtgtgacaagctttacttcgaggagctatctctggagcgaatactggatatatatcaccaggaggcatgcgggggctgcattatctccgtcgggggacagatcccaaacaacttggctgtgcccttgtataaaaacggcgtgaagatcatggggacatcccccctgcagatcgatcgggccgaagacagaagcatcttctccgcagttctggacgaactgaaggtggcccaagccccatggaaggccgttaataccctcaacgaagcccttgagttcgcgaaaagtgtggactacccttgcttactgcggcctagctatgttctgagtggcagtgccatgaatgtcgtgttctccgaagatgagatgaaaaaattcctggaggaagcaaccagagtgagccaagagcatcccgtggtactcacgaagttcgtggagggggcccgcgaagtggaaatggacgctgtggggaaagatggccgggtgatcagccatgccatatccgagcatgttgaagatgctggagtgcactcaggagacgccaccctgatgctgcccacgcagacgatatcccagggcgccattgagaaagtaaaggatgccacccgcaagatcgccaaagccttcgctatctctgggcctttcaatgtgcaatttctggtgaaggggaatgacgtcctggttattgagtgcaatttaagagcctctaggtcatttccctttgtgagcaaaaccctcggcgtggactttatcgatgttgctacgaaggttatgataggagagaacgtggatgagaagcatctgcccactctcgaccatcccattataccagcagattatgttgccatcaaagcccctatgttttcctggccccgcttgcgcgatgcagacccaatactgcgatgcgagatggcaagcactggcgaggtggcttgtttcggcgagggcattcacacagctttcttgaaggctatgctgtctacggggttcaagataccacagaaaggcattctgatcgggattcagcagagttttcgcccacgcttcctcggagttgccgaacagctccacaatgagggctttaagctatttgccaccgaggctaccagtgattggctgaatgctaacaatgtgccagcgacgccagttgcgtggcccagccaggaggggcagaatccctccttgtcctccattagaaaactgattcgcgacggtagcatcgatctggtaattaatctccctaataataataccaagttcgttcatgacaattacgtcatacgaaggaccgccgtggattccggtattcctttgctgacaaactttcaggtcaccaaactgttcgccgaggcggtgcagaaatctcgcaaagtggatagcaagagcctctttcactatcggcaatactccgccgggaaggcggct

SEQ ID NO: 8146 - DNA, 4500 bp, synthetic construct
  misc_feature 1..4500: note = source = /note="Description of Artificial Sequence: Synthetic coding sequence"
  source 1..4500: mol_type = other DNA
atgacgcgcatcctgaccgcattcaaggtcgtcaggactcttaaaacagggttcgggttcacgaacgtgactgcacatcagaagtggaagttttcgcggcctggaatccggctgctgagtgtgaaggcccagacggctcacattgtactggaggacggcacgaagatgaaagggtatagttttggacatcctagcagcgtggccggggaggtagtgtttaacaccggattgggcggatacccggaggccatcactgatccagcatacaaaggccagattcttactatggcaaaccccatcattggtaatggcggcgccccagacactaccgctctggacgaactgggattgtctaaatacttggaatccaatgggatcaaagtctccggcctgctcgttttggattactcaaaggactataatcactggctcgctaccaaatctttgggacagtggttgcaggaggagaaggtgcccgcaatctatggcgtggatacacgcatgctgacaaagatcattcgcgacaagggtaccatgcttggcaagattgagttcgaaggtcagcccgttgactttgtcgaccccaataagcagaatttgatcgctgaggtgagcactaaggacgtgaaggtgtacggcaaaggcaatcctacaaaggtggtggctgtcgattgcggaatcaaaaataatgtgattaggctcctggtcaaaagaggagccgaggtgcaccttgtaccttggaaccatgattttaccaagatggagtacgatggcatcctaattgcaggcggcccaggtaacccggctctggcagagcccctaatccagaatgttcgtaagatactggaaagcgatcgcaaagagccgctgttcggaatttcgaccggaaatctcatcacgggcctggccgccggggcaaaaacgtataagatgagcatggccaacaggggacagaaccaacctgttctgaatatcacaaacaaacaggccttcataacagctcagaatcatgggtatgcccttgacaacacactccctgctggttggaagcctctcttcgtgaacgtaaatgaccaaacaaatgaggggatcatgcacgagtcgaagcccttctttgctgtgcaattccaccccgaggtgactccaggaccaatcgatacggaatacttgtttgatagtttttttagccttatcaagaaaggcaaggcaacaactattacttccgtgttgccaaagcctgccctcgtggccagccgggtggaagttagcaaagtattgatccttgggagcggtggcctgagtataggccaagctggggaattcgattactccggctctcaggcagtgaaagccatgaaagaggagaacgtgaagacggtactcatgaatccgaatatcgcgtctgttcagaccaacgaggtgggcctgaagcaggcggatactgtgtactttctccccatcacaccccagttcgtcaccgaggtgattaaagccgagcagccagacggtctgatcctggggatgggtggccagactgcattaaactgcggagtcgaattgttcaagcggggtgtactgaaggaatatggggtgaaagttctggggacctccgtagaatccattatggccacagaagaccgccaactcttttctgataagcttaacgaaattaacgaaaagattgctccctcatttgcggttgagtctattgaggatgcccttaaagctgccgatactataggctaccctgtgatgatccgaagtgcctacgcacttggggggctgggctcgggaatttgccctaacagagaaaccctcatggatttgtccactaaggcatttgccatgacgaatcagattcttgtcgaaaagagcgttaccggctggaaggaaatagagtacgaggtggtgcgcgatgcagatgataactgcgtaacagtgtgtaacatggaaaatgtggatgctatgggggtgcatacaggtgactccgtggtcgtcgcacccgctcagacgctgtcgaatgccgagttccagatgctgcgaagaaccagtataaatgtggtgagacatttgggtatcgtgggtgagtgcaacatacagttcgccttacatcccacctccatggagtattgcatcatcgaagtgaatgcacgcctgagtcgctcatccgctctggcctccaaagccacagggtaccctctggcctttattgctgctaagatcgctctggggatcccattgccggagatcaagaatgtcgtgtctgggaaaacaagtgcctgctttgaacccagtctggactatatggtaactaaaattccgcggtgggatctggatcgcttccatggcacctcaagccggatcggttcctccatgaagagcgttggcgaggtgatggccattggccggacgtttgaggaatcctttcagaaagcgttgaggatgtgtcacccttccatagaggggtttacaccacggctgccaatgaacaaggaatggccttccaacctcgatctgaggaaagagctgtctgaaccgagcagtacacgaatttatgccatagctaaagctatcgatgataacatgtctttggatgaaatagagaaactgacatatattgataagtggtttctgtataaaatgagagatattctgaacatggagaaaactctcaaaggcctgaattcagagagtatgaccgaggagacactgaaacgggccaaggaaatcggcttcagcgataagcagatttcaaagtgtctgggattaaccgaggctcagacccgagagctgagacttaagaagaatattcacccgtgggtaaaacagattgataccctcgccgccgagtacccctctgtgaccaattacctctacgtgacctataatggccaagaacatgacgtgaacttcgatgatcacggcatgatggttctgggatgcggaccgtatcatattggatcctcagtcgaattcgattggtgcgcggtaagttcaatcaggacactgagacagctcggtaagaaaacggtggttgtcaactgcaaccccgagactgtgtccacggattttgacgagtgcgacaaactctactttgaagagttgtccctggagaggattctggacatttaccaccaggaagcctgcggtggatgtatcatctctgtgggtggacagattcccaataatttagccgtgcctctctacaagaacggcgtaaagatcatggggacgtcgcctctgcagattgaccgggctgaggatcggtctatcttcagcgccgtgctggatgagctgaaggtggcccaagctccatggaaggccgtgaacaccctgaacgaggcattagaattcgctaaaagcgtagactacccctgccttttaagaccttcctacgtcctcagtggaagcgctatgaacgttgtattttctgaggacgagatgaagaagtttctagaggaggctacccgcgtgtcccaggaacatccagtcgtcctcaccaaattcgtcgagggggccagggaggtggagatggatgctgtcgggaaggacggaagggtgatcagccacgccatcagcgaacatgtggaggacgccggcgtacacagtggagacgctactttgatgctgcctactcagacaatcagccagggcgctatcgagaaggtgaaagatgcgacaagaaagatcgccaaggccttcgcaatatccggcccattcaatgtacagtttctcgtgaaaggcaacgatgtgctggtgattgaatgcaacctgagagcatcccgcagttttcctttcgtgagcaagacacttggagtggacttcatagacgtagctacaaaagtgatgattggagaaaacgtagacgagaaacacctgccgacattagaccaccccatcattccagcagattatgtggctatcaaggcgccaatgtttagttggccccggttgagagacgctgaccccatcctgcgctgcgagatggcttccacgggcgaagtggcatgctttggcgaagggatccacactgcatttttgaaagcaatgctgtcaaccggatttaagattcctcagaaggggatactgatcggcattcagcagagctttcgtccccggttcttgggtgtcgcagaacagctccacaacgagggttttaagctcttcgcaaccgaggctacatcggactggctgaacgctaataatgtgcctgcaacacctgtagcatggcccagccaggaaggccagaatccaagcctgagtagtatcaggaaactcatccgggacggatcgatcgatctggtgataaatcttccaaacaataacacgaagttcgtccacgacaactacgtgattcgaaggactgctgtagacagcggtatccctctcttaactaacttccaggtgaccaaactgtttgctgaagctgtgcaaaaatccagaaaagttgactcgaagtctctgttccattatagacagtatagtgcagggaaggctgcc

SEQ ID NO: 8147 - DNA, 603 bp, synthetic construct
  misc_feature 1..603: note = source = /note="Description of Artificial Sequence: Synthetic coding sequence"
  source 1..603: mol_type = other DNA
atgtcaagacgggaaggctctttggaggatccacagaccgattccagcgtgagcctcctgccccatctcgaggcaaagatacgccagacgcattcacttgcgcacctcctgacaaaatatgccgagcagctactgcaggagtatgtgcagctacagggcgatccatttggactgccttctttctcccctcctagattaccggtcgctggtctgtctgcaccagctcctagtcacgccgggctgcccgttcatgagcgactgcgattggacgctgcggcgctggccgcactgccccccctgctggatgccgtctgcaggcggcaggctgaactgaacccaagagctccaaggttactgagacgactggaggacgccgcgaggcaggcaagggcactgggcgcagccgtcgaagcgctcctggcagcactgggtgccgctaacagaggaccaagggcggagcctccagcggccaccgcgagcgccgcctctgccactggtgtctttccagctaaagtgctgggcctccgagtgtgcgggttgtacagagaatggctcagcagaactgagggggacctgggacagctgctcccaggcggttccgct

SEQ ID NO: 8148 - DNA, 603 bp, synthetic construct
  misc_feature 1..603: note = source = /note="Description of Artificial Sequence: Synthetic coding sequence"
  source 1..603: mol_type = other DNA
atgtctcggcgcgagggctcgctcgaagatccccaaacggactcatcggtgagcctcctcccgcatctggaggccaaaatcagacagacccattcactggctcatctcctcaccaagtacgccgaacaattgctgcaagagtacgtgcagttgcaaggagatccgttcggacttccatcattcagcccccctaggttgcccgtggcgggactgtcagcaccagccccatcccacgccggcctcccagtccatgaaagactgcgcctcgatgcggccgctctggccgcgctccctcctttgctggacgcagtctgccggagacaggccgaactcaatccgcgcgcccctcggctgcttcggagacttgaagatgccgccagacaggcgagagctctgggagccgcagtggaagccctgcttgcagcacttggagccgcaaataggggacctcgcgcagaacccccggcagcgaccgcttctgcagcttccgccacgggtgtttttccagcgaaggtgctgggactgcgggtgtgcggtctgtaccgagaatggctgtcgcggaccgaaggtgatctggggcagctgctgccgggaggctccgcc

SEQ ID NO: 8149 - DNA, 603 bp, synthetic construct
  misc_feature 1..603: note = source = /note="Description of Artificial Sequence: Synthetic coding sequence"
  source 1..603: mol_type = other DNA
atgtcacgacgggagggctcactagaggatcctcagaccgactcctccgtctctctgctcccgcatctggaagctaaaattcggcaaacacatagcctggctcacctgttgactaagtatgctgaacagctcctgcaagagtacgtacagttgcagggggaccccttcggacttccgtctttttcgcctcccaggctgccggttgctggattatcagcccccgctccttcgcatgccggcctgcccgttcatgaacggctgcgtctggatgccgcagccctcgccgccctcccccctctcctcgatgctgtctgtcggagacaagcagaactcaaccctagagctcctcggttgttgagaagactggaggacgcagctcgccaggcccgtgcattgggagcagccgtggaggcactcttggccgctttgggagcggcaaatcgtgggcccagggctgagccgcccgccgctacagcctcagcggctagcgccacgggcgtgttccctgcgaaggtgcttgggctgcgagtgtgcggtctgtatcgcgagtggctgtcccggacggaaggagatctcggacagctacttcctggcgggtctgca

SEQ ID NO: 8150 - DNA, 603 bp, synthetic construct
  misc_feature 1..603: note = source = /note="Description of Artificial Sequence: Synthetic coding sequence"
  source 1..603: mol_type = other DNA
atgtcccgccgcgaaggatcgctcgaagatccgcagaccgatagctcggtttcgctgttgccccatctcgaagcaaagattcggcagactcactcgctggcacatctcctgactaagtacgcagaacagcttctgcaagagtacgtgcaactgcaaggtgacccattcggactgccgtcattcagcccgccgcgcctgcctgtggcggggttgagcgctccagctcctagccatgcaggtctgccggtccacgaacggctcagactggatgccgcagcgctggccgcgctgccaccactgctggacgcggtgtgccggcgccaggcggagcttaacccacgggccccgcggctcctcagaaggctcgaggacgcggccaggcaggccagagccctgggcgccgccgtcgaagctctcctcgcggccctcggggccgccaaccgggggccaagggctgaaccgcccgccgctacggcctccgcagctagcgcaactggagtttttccggccaaggtgcttggacttagagtctgtggcctctatcgcgaatggctgtcacggaccgagggcgacctgggacagctgctgccaggtggatccgcc

SEQ ID NO: 8151 - DNA, 603 bp, synthetic construct
  misc_feature 1..603: note = source = /note="Description of Artificial Sequence: Synthetic coding sequence"
  source 1..603: mol_type = other DNA
atgtcccggcgcgaaggatcgctcgaagatccacaaactgactcatccgtgtcactgctgcctcacctcgaggcgaagatccgccaaacccactcactggcgcatttgcttaccaaatatgcagaacagttgctgcaggaatacgtgcaactccaaggggacccgttcggactgccttcgttcagcccgccgaggctcccggtcgcgggactctccgccccggcgccatcccatgcaggactcccggtccacgaaagactccgcctcgatgccgcggccctggccgcgttgccgccattgctcgacgcggtctgccgccgtcaggccgagctgaaccctcgtgcgccgcgactgctgaggcggttggaggacgccgctcggcaggcccgggctttgggcgccgccgtcgaagccctgctggcggccctcggcgccgccaacagaggaccaagggccgaaccgccggctgctactgctagcgcagcatcggcgactggagtgtttcccgcgaaggtgttgggattgcgcgtgtgtggattgtacagagaatggctgtcacgcaccgaaggggacttgggacaactgctgccaggaggctcggca

SEQ ID NO: 8152 - DNA, 603 bp, synthetic construct
  misc_feature 1..603: note = source = /note="Description of Artificial Sequence: Synthetic coding sequence"
  source 1..603: mol_type = other DNA
atgagtaggagggagggaagtctggaagatccccagacagacagctcggtctctctgcttccccacttggaggctaagataagacagacccatagccttgctcatctacttaccaagtatgccgagcagttgctacaggagtatgtccagctccagggagatccgttcgggttacccagcttcagcccccccagattgccagtggctggattgagcgcccctgccccgtcccatgccggccttccagtgcacgagcggttacgtctggatgctgccgctcttgctgccctacccccactcctagacgcagtgtgcagacgacaggctgaactgaatccgcgagcgcctcgattactgcggagattggaggacgctgcaaggcaagcccgagcgctaggggccgccgtggaagccttgctggccgcccttggggccgccaacagggggcccagagccgagccccctgccgcaactgcttccgcagcctccgcaaccggggtatttcctgccaaggtgctgggactgcgtgtttgtgggttatatcgggagtggctatcaaggacagaaggagacctcggacagttgctgcccggcggcagtgct

SEQ ID NO: 8153 - DNA, 603 bp, synthetic construct
  misc_feature 1..603: note = source = /note="Description of Artificial Sequence: Synthetic coding sequence"
  source 1..603: mol_type = other DNA
atgagtaggagagagggttccttggaagatccacagacggacagctccgtcagtctattaccacacctcgaggccaaaattcgacagactcatagcctggcccacctcctcactaaatatgctgagcagctgctgcaagaatatgtgcagcttcaaggagaccccttcggattaccaagtttcagtcctccaagactcccagtcgctgggctttcggctcccgctcccagccatgctggacttcccgtgcacgaaagactccgtttggatgctgctgcactggccgcacttccacccctgctcgatgcggtttgcaggagacaggccgaacttaaccctagggctcccagactcttgcggcgtttggaggatgccgctaggcaggccagagccctgggcgcagcagttgaggcgctgttggctgccctgggggctgctaatcgagggcctagggctgaacccccggccgccaccgcctccgccgcaagtgccacaggggtctttccggccaaagtgctggggctgagagtatgcgggctatatagggaatggctgtccaggactgagggtgatctgggtcagctcctgccgggtggatcagct

SEQ ID NO: 8154 - DNA, 603 bp, synthetic construct
  misc_feature 1..603: note = source = /note="Description of Artificial Sequence: Synthetic coding sequence"
  source 1..603: mol_type = other DNA
atgagccgacgtgaagggtcgttggaggaccctcaaaccgactcgagcgtgtcactcctcccgcatcttgaagctaagatcaggcaaacccacagcctcgcccatttgctcactaagtacgctgaacaactgctccaagaatacgtgcagctgcagggagatcctttcggccttccttcgttctcgccaccacggcttcccgtggcagggctttcagcacctgcccccagtcatgctggactgccagtccacgaacggctgcgtctggacgccgcagcactggcagcgttgccgcccctgctcgatgcggtgtgccggcggcaagccgaattgaacccgcgcgctccccgcttgctgcggcgacttgaagatgccgcaagacaggcccgagcgttgggagctgccgtggaggcactcttggcggcactgggagcagcaaacaggggtccacgggcagaacctccggccgccaccgcgtctgcggcttcggcaactggagtgtttccagcgaaagtgcttggactcagagtttgcggcctgtacagagagtggctgtcgcgcacggagggtgacctgggacagctcctgccaggtggatccgca

SEQ ID NO: 8155 - DNA, 603 bp, synthetic construct
  misc_feature 1..603: note = source = /note="Description of Artificial Sequence: Synthetic coding sequence"
  source 1..603: mol_type = other DNA
atgtcgcgcagggagggtagcctcgaagatcctcagaccgactcatcagtgtccctcctgccgcatttggaggccaagatccggcagacccactctctggcccacctcttgacgaagtacgccgaacagttgctgcaggaatacgtgcaactgcaaggcgacccattcggactgccgtccttctcgccgccgcgcctgcctgtcgccggtctttcggccccagcgccttcgcacgctggtctgccagtccacgagcgccttcgactggatgctgccgcgctggcggccctcccaccactgttggacgcagtgtgccggaggcaggccgaactcaatccgcgcgccccccggttgctgagacggcttgaggatgcggcccgacaggccagagcccttggcgcagccgtggaagcactcctggcagcactgggagcggcgaaccgcggaccccgcgccgaaccgccggcagctactgcctcagcggctagcgctaccggtgtgtttccagctaaggtgctgggcctgcgtgtttgcggcttgtaccgcgagtggctgagcagaactgagggtgaccttggacaactcctgccgggtggatcggcc

SEQ ID NO: 8156 - DNA, 603 bp, synthetic construct
  misc_feature 1..603: note = source = /note="Description of Artificial Sequence: Synthetic coding sequence"
  source 1..603: mol_type = other DNA
atgtctcggagagaaggatctctcgaagatcctcagactgattcatcagtctcgctgcttcctcacctcgaggccaagatcagacaaacgcatagccttgcgcatcttcttactaaatacgccgagcaattgttgcaggaatacgtgcaactgcagggcgacccctttggactcccatccttctcaccccctcgtctgccggtggcaggcctttccgcacccgccccatcgcacgcaggactccccgtccatgagagacttcgccttgatgcggcagcacttgcagcactgccgccacttcttgacgcagtgtgtcgtagacaagctgaactgaaccctagggcacctaggctgctcagaaggctggaagatgctgcacgacaagcaagagcccttggtgctgcagtggaagcgctccttgcagcgctgggagccgcaaaccgcggcccacgggcagaaccacctgcggcgaccgcaagcgcagccagcgccaccggcgtgttcccagcgaaggtcctgggccttcgagtgtgtgggctgtatagggaatggctctcgagaactgaaggtgatctgggccaacttctgcccggcgggtcggcc

SEQ ID NO: 8157 - DNA, 603 bp, synthetic construct
  misc_feature 1..603: note = source = /note="Description of Artificial Sequence: Synthetic coding sequence"
  source 1..603: mol_type = other DNA
atgtcgcgacgtgaaggttcgttagaagatccgcaaacggattcgtcggtatcgttattaccgcatctagaagcgaaaatacgtcaaacgcattcgttagcgcatttattaacgaaatatgcggaacaactattacaagaatatgttcaattacaaggtgatccgtttggtttaccgtcgttttcgccgccgcgtttaccggtagcgggtctatcggcgccggcgccgtcgcatgcgggtctaccggtacatgaacgtctacgattagatgcggcggcgctagcggcgctaccgccgttattagatgcggtatgtcgtcgacaagcggaattaaatccgcgagcgccgcgtttattacgacgactagaagatgcggcgcgtcaagcgcgtgcgctaggtgcggcggtagaagcgttactagcggcgctaggtgcggcgaatcgtggtccgcgtgcggaaccgccggcggcgacggcgtcggcggcgtcggcgacgggtgtatttccggcgaaagttttaggtttacgtgtttgtggtttatatcgagaatggttatcgcgaacggaaggtgatttaggtcaactattaccgggtggttcggcg

SEQ ID NO: 8158 - DNA, 603 bp, synthetic construct
  misc_feature 1..603: note = source = /note="Description of Artificial Sequence: Synthetic coding sequence"
  source 1..603: mol_type = other DNA
atgtcacgccgtgagggtagtctggaggacccccagaccgattccagtgtgtcccttctgcctcatctggaagccaaaatcagacagacacacagcctggcccacttgttgacaaaatacgccgagcaactgttgcaggagtacgtgcagcttcaaggcgacccctttggcctgcccagtttttcacccccccgtctcccagtcgctggcctctccgctccagctccctcacatgccggccttcctgtgcacgagcgcctgaggttggacgcagctgctttggctgctcttccccctctgctcgacgccgtgtgtcgtaggcaagctgagttgaatccaagggctccaagactgcttaggcgccttgaggacgctgccaggcaggcccgtgccttgggagcagcagttgaagccttgctggctgctctgggcgctgcaaaccgtggcccacgcgctgaacctcctgccgctactgccagcgcagccagcgctactggtgtgttcccagcaaaggtgctcggcctgagggtctgtggactgtacagggaatggctttctcgcacagagggagatctgggtcaactgttgcccggcggcagtgcc

SEQ ID NO: 8159 - DNA, 603 bp, synthetic construct
  misc_feature 1..603: note = source = /note="Description of Artificial Sequence: Synthetic coding sequence"
  source 1..603: mol_type = other DNA
atgagcaggcgagaaggctcactggaggatccccagaccgatagctcagtgtctttgcttccacatctggaggcgaagattagacaaacccatagtcttgcacatttgctgactaagtacgcggaacaactgctgcaggaatacgtgcaactccaaggtgatccgtttggtctgccatcctttagcccacctagactgcccgtggcaggtttgtctgcaccggcaccctcccacgctggactgcctgttcacgagcggcttaggttggacgccgccgccttggccgcgcttccgccccttttggacgcagtgtgtcgtcggcaagcggaacttaatccgagggcaccaaggctccttcgccggctcgaagatgcagctcggcaggcacgcgcactgggggcagcagtcgaagcgttgctcgccgcactcggggcagccaaccgcggaccaagggccgagcctcctgcggccaccgcatcggctgcctccgccaccggagtgttccccgctaaagtgcttggcctgagagtctgcggactgtaccgggagtggctctcgcgcactgaaggtgacctcggccagcttctgcctggagggtcggcg

SEQ ID NO: 8160 - DNA, 603 bp, synthetic construct
  misc_feature 1..603: note = source = /note="Description of Artificial Sequence: Synthetic coding sequence"
  source 1..603: mol_type = other DNA
atgtcccgtagagagggcagcctggaggacccgcagacggattcctctgtctccctgctgccacacctggaggcaaagatcagacagacgcactcactggcgcacctgctcaccaaatacgcagagcagctccttcaggagtatgttcagctgcagggcgatccattcggcctaccatcctttagcccgccacggctaccagtggcaggcctgtcagctccagctcctagccatgcgggtttgcctgtacacgaaaggctgcgcctggacgcggctgccctggctgcgcttccccccctgcttgatgctgtttgcagaagacaggccgaattaaacccaagggcgccaaggctgcttcgaagactcgaagatgcagcacgacaggccagagcactaggggccgctgtggaggctttgttggcggccctgggagccgctaaccggggccctcgggccgagccaccggcagccaccgccagcgcggccagtgctactggtgtattcccagcaaaagtactcgggctgagagtatgcggcctataccgagagtggctgagcagaaccgaaggggatctgggtcagctgctgccgggaggtagtgca

SEQ ID NO: 8161 - DNA, 603 bp, synthetic construct
  misc_feature 1..603: note = source = /note="Description of Artificial Sequence: Synthetic coding sequence"
  source 1..603: mol_type = other DNA
atgtctcggagggaggggtcgctcgaggacccgcaaaccgactcatcggtgtcgctgctgccacatctggaggcaaagatcagacagacgcactcccttgcccatctgttgactaagtacgccgagcagctgctgcaggagtacgtgcagttgcagggcgaccctttcggactgccttccttcagccccccaaggctgccggtggcaggattgtcagcaccagctccgagtcacgccggactccctgtgcacgagagattgcggctcgatgcggctgccttggctgccctgccaccactcctggatgccgtgtgccggcgccaagctgagctgaacccgagagcaccacgcctgctccgccggcttgaggatgccgcgcgccaagccagagccctgggcgctgctgtggaagccctccttgcggccctcggggccgccaacagaggaccgagagcagaaccgccagcggccaccgcgagcgcggcctcggccaccggagtctttccggcgaaggtgctgggtctgagagtgtgtggcttgtaccgagagtggctctctcgcaccgagggggacctcggccagctgcttcccggcggcagcgcc

SEQ ID NO: 8162 - DNA, 603 bp, synthetic construct
  misc_feature 1..603: note = source = /note="Description of Artificial Sequence: Synthetic coding sequence"
  source 1..603: mol_type = other DNA
atgtccagacgtgagggatcgcttgaagatccacagaccgatagcagcgtgagcttgctcccccacctggaagcaaaaatcagacaaacccattcactcgcccatctgctcaccaaatacgcagaacaattgttgcaggaatacgtccagctccaaggtgacccgtttggactgcctagtttttcccctcctcgcctccccgtggcaggtctttcggcaccggcaccatcgcatgctggtctgcctgtgcacgaaagattgcggcttgatgcagcagcactcgccgcacttcctccgttgctcgacgccgtctgcagaaggcaggcggagctgaacccacgtgccccgagacttcttcggcgactcgaggatgcggcaagacaggcacgtgctctgggtgcagcggtggaggccctgctggcagcactgggggccgccaatcgtggaccacgggcggaacctcctgcggcaacggcaagcgcagcctcagctactggcgtttttcctgccaaggtccttggcctgagagtgtgtggcctgtaccgggaatggctcagccgtactgaaggagatctgggacaacttctgccgggcggttcagca

SEQ ID NO: 8163 - DNA, 603 bp, synthetic construct
  misc_feature 1..603: note = source = /note="Description of Artificial Sequence: Synthetic coding sequence"
  source 1..603: mol_type = other DNA
atgtcaagaagggagggctctttagaagacccacagaccgattcatccgtatctctgctcccacatctcgaagccaagatcaggcagacgcattctctggcccatcttttaacaaaatatgctgagcaactgttgcaggagtacgtgcagctccagggcgatccctttggcctcccctcctttagtcctccaagactgcccgtggcaggcctatcagctcctgcgccctcacacgccggccttccggtgcacgagagacttaggcttgacgcagctgccctggccgctttgcccccactgttggatgcagtgtgtaggcgtcaagcggagctgaacccccgagctcccagactccttcggcgcctggaagatgccgcgagacaagccagagctctcggtgccgccgtggaggcgcttcttgccgccttgggagctgccaacaggggcccgagagcagaaccccccgcagccactgcgtcggccgcctcagcaactggggtgtttccggccaaagtccttggcctccgagtgtgtgggctgtaccgtgaatggcttagccgaacagagggtgatctagggcaactcctgccggggggctcagct

SEQ ID NO: 8164 - DNA, 603 bp, synthetic construct
  misc_feature 1..603: note = source = /note="Description of Artificial Sequence: Synthetic coding sequence"
  source 1..603: mol_type = other DNA
atgtcccggagggagggaagcctggaggatccccaaacagattctagcgtgagcctgctcccccacctggaagcaaaaatcaggcaaactcactcactcgcccacctgctgactaagtacgcggaacagctgctgcaggaatacgtccaattacaaggcgatccttttggtctgcctagtttcagccccccaagactgcccgtagccggacttagtgcccccgcaccatctcatgccgggttgccagtgcatgagcggctgcggctagacgccgccgccctcgcggccctgcctcctctactggacgccgtctgtcgtcgacaggcggagcttaacccacgcgctcccaggctattaaggcggctcgaagacgccgcacggcaggctagggcactcggcgcagcggtggaagcactgctcgcggctctgggagctgccaaccggggccctcgagcagagccacccgccgcaaccgctagtgccgctagtgctacaggcgtgttcccagccaaggtgctcggtttgcgcgtgtgcggcctctatagggaatggctatctaggaccgagggcgatctcgggcagcttcttccaggcggaagtgct

SEQ ID NO: 8165 - DNA, 603 bp, synthetic construct
  misc_feature 1..603: note = source = /note="Description of Artificial Sequence: Synthetic coding sequence"
  source 1..603: mol_type = other DNA
atgagtagacgagaaggatctttggaagatccccagactgattcctccgtgtctctcctccctcatctcgaggctaagatacgacagactcactcgctggcccatctgctgacaaagtacgctgagcaactattacaggaatacgtgcagttacagggagatcctttcggattacccagtttctcccccccccgtctacccgttgcagggctctcagcccctgcaccatcacacgccgggttgcctgtccacgaaagactgcgactcgatgccgccgccttggctgccttgccacctctccttgacgctgtgtgtagacgtcaggctgaattgaatcctcgagccccacgcctcttaagaaggttagaagatgctgctaggcaggctcgcgcactcggggccgccgtggaagcgctgctagctgcattaggagctgctaatcgggggcccagagccgaaccaccagccgccacagcttcagccgcatctgctacaggagtgttcccagcaaaggtactcggattaagggtctgcgggctgtacagggaatggctctctagaacagaaggagacttagggcagctactcccaggggggtctgca

SEQ ID NO: 8166 - DNA, 603 bp, synthetic construct
  misc_feature 1..603: note = source = /note="Description of Artificial Sequence: Synthetic coding sequence"
  source 1..603: mol_type = other DNA
atgtcacgcagagaaggaagtcttgaggatccgcaaacagactctagcgtgtccctgctgccccaccttgaggccaaaatccgtcagacccattccttagcccacctgctgaccaaatacgccgagcaactgttacaagaatatgttcagctacagggcgatccatttggattgccgagcttcagccctccaaggctgcccgtcgcaggcctgagcgcccccgcaccttcccatgctggcttgcctgtgcacgaacggctgcgcttagatgctgcggcactggctgccttgccccccctcctcgacgccgtgtgccgtcgacaagcggagcttaacccaagggccccaagactgctaaggaggctcgaagatgctgccaggcaggctcgcgcactcggagctgccgtggaggccctgttagcagccctgggtgcagctaaccgcggaccccgtgcagagccacccgccgctaccgctagcgccgcctctgccaccggagtttttccagcaaaagtcttgggattacgcgtatgcggtttgtatcgggagtggctttcccgaactgaaggcgacctgggacaacttctgccagggggaagcgca

SEQ ID NO: 8167 - DNA, 603 bp, synthetic construct
  misc_feature 1..603: note = source = /note="Description of Artificial Sequence: Synthetic coding sequence"
  source 1..603: mol_type = other DNA
atgtcgcgacgagaaggcagcctggaggatccccagacagactcttctgtaagcttgctcccacacctggaggctaagattcggcagacgcacagtctcgcccatctcctgactaagtacgctgaacagttgctccaagagtacgttcagttacaaggcgaccccttcggattaccctcctttagcccaccaaggctgcccgtcgctgggctgagcgcacccgcaccctcacatgcaggactgcccgtgcatgaacgccttcgtttggatgccgccgctcttgctgcccttccgccgctcttagatgccgtttgtcgccgacaggccgagttaaatcctcgggcgccccgccttctccgtagactggaggacgccgccagacaggcgagggcactgggggccgctgttgaggccctgctggcagcattgggggccgctaacagggggcccagggctgagccccccgccgcaacagctagcgccgcctccgcaacaggcgtctttccagccaaggtactggggttgcgcgtatgcggtttgtacagggagtggctgagcaggaccgaaggggatttgggacagttgcttccaggtggttcagcc

SEQ ID NO: 8168 - DNA, 603 bp, synthetic construct
  misc_feature 1..603: note = source = /note="Description of Artificial Sequence: Synthetic coding sequence"
  source 1..603: mol_type = other DNA
atgagcagacgggaaggctcgctggaggacccacagacggattcttctgtgtccctcttgccacacttggaggccaaaattcgacaaacacatagcttggcgcacctgctaacaaagtacgccgagcaactcctacaggaatacgtgcagctgcagggcgacccttttgggctgcccagtttctctcctccacgccttccagttgccggcctctcagccccagcaccctctcacgcaggtctgcccgtgcatgagcgactgcgattggacgcagcggccctcgctgcactgcctccgttgctcgacgcggtttgtcgccgacaggctgaactgaatcctagggcccccagactgcttagacggctggaagacgctgcccggcaggccagagcattaggggccgccgtcgaagcacttctcgccgctctcggggcagccaaccgtgggccacgggctgaaccccctgctgccaccgctagtgccgccagtgccacaggggtcttccctgcaaaagtattaggtcttcgggtctgcggcctttacagagaatggctgtcaaggacagagggtgacctgggacagctgttgcctggcggtagtgcg

SEQ ID NO: 8169 - DNA, 603 bp, synthetic construct
  misc_feature 1..603: note = source = /note="Description of Artificial Sequence: Synthetic coding sequence"
  source 1..603: mol_type = other DNA
atgagccgacgagaggggtccttggaagaccctcagaccgacagctcagtctccctcctgcctcacctggaggcaaaaatccgccagacccacagcttggcacatctcctgactaagtatgcagaacagttgctacaggagtacgttcagctgcagggcgatccatttggcctaccttctttttctccaccacgtctcccggtggccgggttgtcagctcctgctcccagccacgccggcctacccgtgcacgagaggctgcgccttgacgccgccgccttggccgccctgcctccactgctggatgccgtttgccggcgccaagctgaactgaatcctcgggccccccgactgctgcgcaggctcgaggatgctgctaggcaagcaagagctctgggagctgccgtcgaggctcttctggcagccctgggcgccgctaatagggggccaagggctgagccacccgccgctactgcctctgccgctagcgctacaggagttttccccgctaaagtgctgggtctccgtgtctgtgggctgtaccgggagtggctcagccggaccgaaggagacctgggccaactgctgcctgggggctcggcc

SEQ ID NO: 8170 - DNA, 603 bp, synthetic construct
  misc_feature 1..603: note = source = /note="Description of Artificial Sequence: Synthetic coding sequence"
  source 1..603: mol_type = other DNA
atgagcagacgcgaggggagcttggaagatccacaaaccgatagcagcgtcagcctcctcccccatctggaggccaagattcgccaaactcatagcctcgcgcacctcttgacaaagtatgccgaacagctgctacaagagtacgtacagctgcaaggagatccgtttgggctaccatcctttagccctccccgcctcccagtggctgggctgagcgccccggcgccttcccacgctggccttcccgtgcatgagagactgcgccttgatgccgccgccctcgcagcactcccacctctgcttgatgctgtttgccgcaggcaggcggaactcaaccctcgggcacccagacttcttaggaggttagaggacgcagccagacaggctcgagccctgggcgccgctgttgaagctctgctggctgcactgggtgctgcaaaccggggaccacgtgcggaaccacccgccgcgactgcatcggccgcctccgctactggagtgtttcccgctaaagtgctaggcttgagggtgtgtgggctctatagagagtggctaagccgcacagaaggggaccttgggcagctgttacctgggggaagtgcc

SEQ ID NO: 8171 - DNA, 603 bp, synthetic construct
  misc_feature 1..603: note = source = /note="Description of Artificial Sequence: Synthetic coding sequence"
  source 1..603: mol_type = other DNA
atgtccagaagagaaggttccctggaagatccacagactgattccagcgtttcactgctgccacacttggaagcaaagatcagacaaacccattcgctggcgcatcttctgactaagtacgcggaacaacttcttcaggaatatgttcaactccaaggggatccttttggtttgcctagcttttcgccgcctcgccttcctgtggctgggctgtcggctcccgctccatcccatgcggggctgccagtccacgaaaggctgcgacttgacgccgcagccctggcagcgcttcctccacttttggatgcagtctgcagaaggcaggcagaattgaaccctagggcaccacgccttctgcgccgactggaggacgccgccagacaggcaagagctctcggtgcggcagtggaagcccttttggcagcacttggagcggcaaaccggggacccagggcagaaccaccagccgcaaccgcgtcggcggcgagcgcaaccggcgtgttccctgcgaaggtgcttgggcttcgggtgtgcggactctaccgggagtggctgtcgcgcactgagggtgatctggggcaactgcttcctggtggaagcgca

SEQ ID NO: 8172 - DNA, 603 bp, synthetic construct
  misc_feature 1..603: note = source = /note="Description of Artificial Sequence: Synthetic coding sequence"
  source 1..603: mol_type = other DNA
atgagccgccgagaaggttcgctggaagaccctcagactgattctagcgtgagcctgctgcctcatttggaggctaagataagacaaactcactctctggctcaccttctgacgaaatacgcggagcaactgctgcaggagtatgtgcaactgcagggggacccattcggcctgccttcgttttcaccaccgcgccttccagtcgcgggcctcagcgcgccagcgcctagccacgcaggcttgccagtccacgagaggcttcgtctggatgctgccgccctcgctgctctgcccccgttgttggacgcggtctgtcgccgacaggcggagctgaacccaagggctcctagattactgagacgtctggaggacgccgcccgacaggcacgcgcgctgggagcagccgtggaagccctgctagccgctcttggtgcggccaataggggaccgagggcagagcctccagcagcgacggcatcagcagcgagcgctactggtgtcttcccagccaaggttctgggcctgcgcgtttgcggcctgtacagggagtggctgagccggaccgaaggtgacctgggtcaattgctaccaggaggctccgca

SEQ ID NO: 8173 - DNA, 603 bp, synthetic construct
  misc_feature 1..603: note = source = /note="Description of Artificial Sequence: Synthetic coding sequence"
  source 1..603: mol_type = other DNA
atgtcccgccgcgaaggttctctggaagacccacagactgacagttcagtgagcctgctacctcacctcgaggctaagatccgtcaaacacactccctcgctcacctgctgacaaagtatgccgagcagctactccaggagtacgttcagctacagggtgacccgttcggccttccctccttttcaccccctcgtcttcctgttgcgggcctatccgcgcctgctccgtcccacgcaggcctgcctgtgcatgagcgcttgaggttagacgctgccgctcttgccgctcttcctccactgctggacgctgtgtgcaggaggcaagcggagttaaatccccgcgccccacggctcctgaggcggctggaggacgcagcacggcaggcgcgggcacttggcgctgccgtggaggcactccttgctgccctgggggcagcaaacagaggtccgagagcagaacccccagccgctacagcgagtgcagcttctgcaaccggcgtgttcccagccaaggtgctcggcttgagggtctgcggcctttatagggagtggttgtctcgcacagagggagatctcggacagctgctgccgggagggagtgct

SEQ ID NO: 8174 - DNA, 603 bp, synthetic construct
  misc_feature 1..603: note = source = /note="Description of Artificial Sequence: Synthetic coding sequence"
  source 1..603: mol_type = other DNA
atgagcaggcgtgaaggctcgctcgaggatccgcagacggattcaagcgtttccctgctcccccacttggaggcaaaaatccggcagactcattccctcgcccacctgctgaccaagtacgctgagcaactgcttcaggaatacgtgcagctgcaaggggacccatttggactcccatcattctcgccgcctcgcctgcctgtggcaggactgagcgccccggctccgtctcacgcggggctcccagtccatgagcggctgaggctggatgcagccgcactcgcggccctgccgcccctgctcgacgcggtgtgcaggagacaagcggaactcaatccgcgggccccgagattgctgaggcgactggaggatgcggcacggcaagcccgggcccttggtgcggctgtggaagccctcctggcggcgcttggtgccgcgaacaggggaccgcgggcggaaccgccggctgctaccgcgtcggcagcctccgccaccggtgtattcccggcaaaggtcttgggattgcgcgtgtgcggactctaccgcgagtggctgtcgagaaccgaaggtgatctcggacagctcttgccggggggaagcgct

SEQ ID NO: 8175 - DNA, 603 bp, synthetic construct
  misc_feature 1..603: note = source = /note="Description of Artificial Sequence: Synthetic coding sequence"
  source 1..603: mol_type = other DNA
atgagtcgacgcgaaggctcccttgaagacccccagaccgactctagtgtgtctctgttaccccatctggaagccaagattcgccagacccactccctcgcccacctcctgactaagtatgcagagcaactgttgcaggaatacgtgcaactacagggcgatcccttcggcctcccctctttttcccctccccggctgcctgtggctggcctcagtgctcctgctcctagccatgccggattgcccgtgcacgagcggcttagactcgatgcggccgctctggcagcactgcccccccttctggatgcagtttgcaggcgccaggccgagttgaatccacgggctccaaggctactccgtcgactggaagatgccgcacgtcaagcccgcgccctaggcgccgccgtggaagctctccttgctgccctgggagccgcaaaccgcggcccccgggctgagccccccgcagcaaccgctagcgctgcatcagcgaccggagtcttccccgccaaggtcttgggccttagagtatgcggtctgtatcgggaatggttgtcccgaaccgagggggacctaggacagctgcttcccggaggtagcgct

SEQ ID NO: 8176 - DNA, 603 bp, synthetic construct
  misc_feature 1..603: note = source = /note="Description of Artificial Sequence: Synthetic coding sequence"
  source 1..603: mol_type = other DNA
atgtcgcgcagggagggatccctggaagatcctcagactgactcatcggtcagcctcctacctcacttggaagccaaaatccgacagacgcactctcttgcacacctgctgaccaagtacgccgagcagctgctccaggagtacgttcagctgcagggggacccgttcgggctcccttccttctccccgccacgtctccctgtggccggactgtccgccccagccccttcacatgcaggcctgcccgtccacgagcgcctaaggttggatgcagcggctctcgctgccctcccccctctccttgatgctgtctgtaggcgacaggctgagcttaacccccgagccccccggctgctgcggagacttgaggacgccgcccgtcaggcgcgggctctaggagccgccgtcgaggccttactcgccgcgctcggtgcagctaacagaggacctcgggcagagccacctgctgcgaccgcaagcgccgcgtcggccacaggagtgttcccagcaaaagttctgggactgagagtgtgtggcctgtaccgggagtggttgagcaggactgaaggggaccttgggcagttgctccctggaggcagcgcc

SEQ ID NO: 8177 - DNA, 603 bp, synthetic construct
  misc_feature 1..603: note = source = /note="Description of Artificial Sequence: Synthetic coding sequence"
  source 1..603: mol_type = other DNA
atgtcacgccgcgagggatcactcgaagatccccagactgacagctcggtgtcgctgctgccacatctcgaggcgaagatccgacagactcattccctggcccacttgcttactaagtacgcagaacagctgctccaagaatacgtgcaactgcaaggcgacccctttggtctgccttcgttctccccacctcgccttccggtggctggattgagcgcaccggcgccgtcccacgccggactgccggtgcatgagcgcctcagactggatgccgccgcgctcgctgcgctgccgccgcttcttgacgccgtctgccgccgtcaggcagaactcaacccccgcgcgccgcgcctgctgagacggttggaggacgcggcgcggcaggcgcgcgccctcggcgcggccgtggaggctctgttggcagcactgggcgccgcgaaccggggaccgagagccgaaccaccggcagctaccgccagcgcggcatcggccactggtgtattccccgcaaaagtgctgggcttgcgggtgtgcgggctgtacagggaatggctgagcagaactgaaggagacttgggacagctcctgccgggaggaagtgcc

SEQ ID NO: 8178 - DNA, 603 bp, synthetic construct
  misc_feature 1..603: note = source = /note="Description of Artificial Sequence: Synthetic coding sequence"
  source 1..603: mol_type = other DNA
atgtctagaagggagggatctctagaggatcctcaaaccgactcttccgtgtcacttctcccacatttggaggccaaaatccgtcaaacacactcattagctcaccttttgactaagtacgctgagcagctcctccaagagtacgtccaactccaaggtgaccccttcggtttaccttcattcagtccacctagactgcctgtggcaggtctcagtgcgcccgcgccatcccatgcaggtttacctgtgcacgagagacttcgactagacgctgctgccttagctgcattgcccccacttttggacgctgtttgcaggaggcaggcggaattaaatcccagggcccccaggctgcttcgaaggctagaggacgcagcaaggcaagctagagcacttggggcagccgttgaagctcttttggccgctctcggagctgcaaataggggccctagggctgaaccgccagctgcgaccgcttctgctgcatctgcaactggcgtcttccccgcgaaggtcctaggactgagggtttgtggtctttatagggaatggctctcccgtactgaaggagatttggggcaattgttgccagggggtagtgca

SEQ ID NO: 8179 - DNA, 603 bp, synthetic construct
  misc_feature 1..603: note = source = /note="Description of Artificial Sequence: Synthetic coding sequence"
  source 1..603: mol_type = other DNA
atgtcccgacgtgaggggtccctggaggatccccagaccgatagttctgtgtcactcctcccgcatctggaagccaagatccgtcaaacccattctctggcccacttactgactaagtatgctgaacaactgttgcaggagtatgtccagctccagggcgaccccttcggtctgccgagcttctccccgcctcgtctgcccgtggcaggattgtctgccccggccccaagccacgcgggtctgcctgtccatgagcggctgcgcctggacgcagctgccctggcagctctaccaccacttctcgatgcagtctgcagacgacaggctgagttgaatccccgggctcccagactcctcagacgattagaggatgctgcaaggcaggctcgcgctctgggcgcagctgtggaagcactgctcgccgcacttggggccgccaacagaggcccccgagccgagcctcctgcagcaacggcttccgccgcttctgctaccggagtcttcccagcaaaagtcctgggactccgtgtttgcggcctgtatcgtgagtggctgagccgaaccgagggggatctgggtcagctgttgcccggtgggagtgct

SEQ ID NO: 8180 - DNA, 603 bp, synthetic construct
  misc_feature 1..603: note = source = /note="Description of Artificial Sequence: Synthetic coding sequence"
  source 1..603: mol_type = other DNA
atgagtcggcgagaaggcagcttggaagacccccagaccgactctagtgtcagtctgctcccacatctagaggcgaaaatccgtcagacccacagtttagctcacctgctgactaaatatgcagaacagttgctccaggagtatgtccagctgcaaggagatccatttggactaccaagcttcagccccccccgcctccctgtggccgggttgtccgcccccgctccttcacatgcgggcctacccgtccatgagaggttgaggctcgacgcggccgccttagctgctctaccccccttgctcgacgccgtatgtaggagacaggccgaattgaaccctagggcacccagattactccgccgactagaagatgccgctaggcaggcgcgagctctcggcgcagctgtagaggcccttctggccgccctcggagctgcaaatagaggacctcgcgcagaacctcccgcggccacagcaagtgccgcatccgccacaggagtatttcctgcaaaagtcctgggccttcgtgtctgtggtctctacagggagtggctgtcacgcactgaaggcgatctaggtcagctcctcccaggcggcagtgca

SEQ ID NO: 8181 - DNA, 603 bp, synthetic construct
  misc_feature 1..603: note = source = /note="Description of Artificial Sequence: Synthetic coding sequence"
  source 1..603: mol_type = other DNA
atgagtcgcagagaagggagtctcgaagaccctcagacagacagcagcgtgtccctactgcctcatctggaggctaaaatacgccaaactcacagtctcgctcacctattaaccaaatacgcagaacaactgttgcaggaatacgtccaactgcaaggcgacccttttggactgccaagtttttcaccccctagattaccagttgctggcttgtctgccccagccccttctcacgctggtctacccgtgcatgagaggctgaggctggatgctgccgccctggcagctctccctccactacttgatgctgtctgccgacggcaggccgaactaaatcctcgtgccccccgcctgctcagacggttagaagacgcagcccgccaagcaagagcactgggggccgccgtcgaggctttgttggccgccttaggggcagccaataggggacctcgggccgagcccccagccgccaccgcctccgcagccagtgctactggcgtctttcctgccaaagtcctagggctgagagtatgcggcctttatcgagaatggctcagcagaacagagggcgacctaggccagctactcccaggcggtagcgcc

SEQ ID NO: 8182 - DNA, 603 bp, synthetic construct
  misc_feature 1..603: note = source = /note="Description of Artificial Sequence: Synthetic coding sequence"
  source 1..603: mol_type = other DNA
atgagtagaagagaaggtagtttagaagatccacaaacggatagtagtgttagtcttttaccacatcttgaagctaaaattcgtcaaacacattctttggcacatttattaacaaaatatgctgaacaacttttacaggaatatgttcaattacaaggagatccattcggattaccttcattttcacctccaagattaccagtagcaggattatcagctccagccccaagtcatgcaggtcttcctgtacatgagagattaagacttgacgcagcagctttggctgcacttccacctcttttagatgcagtgtgtcgaaggcaagctgaattaaatccaagagcaccacgtcttcttcgacgtcttgaagatgctgcaagacaagctagagcattaggagcagctgtagaagctcttcttgcagcacttggagctgctaatagaggaccacgagcagagcctccagctgcaactgcttcagctgcttcagccacaggtgttttccctgcaaaagtattaggacttagagtttgtggattatatagagaatggttatcacgtacagaaggagatttaggacaattattaccagggggatcagca

SEQ ID NO: 8183 - DNA, 603 bp, synthetic construct
  misc_feature 1..603: note = source = /note="Description of Artificial Sequence: Synthetic coding sequence"
  source 1..603: mol_type = other DNA
atgtcccgccgagaagggtcgctggaggacccgcagactgattcttcggtttccctgctgccgcaccttgaggctaagattagacagacccatagcctcgctcatttgctgaccaaatatgccgaacagttgctgcaagaatatgtgcagctccagggagatccgttcggactcccgtcgttctccccacctcggctgccggtcgccggtctgtcggcaccagcaccgtcccatgcaggcctgcctgtgcacgaacggctgcgcctggatgcagccgccctcgcggccctcccaccgctgctggacgctgtgtgtcggaggcaggccgagctgaatccgcgggctccgcggcttctcaggcgattggaagatgccgctcgccaagcaagggcactcggggccgctgtggaggccctcctcgccgcattgggagcagcaaaccgcggaccgcgcgccgaaccacccgcggcgaccgcgtccgccgcttcggcgactggggtctttcccgccaaggtgcttggactcagagtgtgcggactttaccgcgaatggctcagcaggaccgagggcgatctgggacagctgctgcctggaggctcggct

SEQ ID NO: 8184 - DNA, 603 bp, synthetic construct
  misc_feature 1..603: note = source = /note="Description of Artificial Sequence: Synthetic coding sequence"
  source 1..603: mol_type = other DNA
atgagtcgacgcgagggctcccttgaagatcctcagaccgattcctctgtcagcctactgccgcatttggaggcaaagatcagacagacacactcattagcccacctcttgacaaagtacgcggagcagcttctccaagaatacgtgcagcttcagggagatcctttcgggctcccctcattttcaccaccccgcttgcctgtagccggtctatcggcccctgccccatcccacgctggtcttcctgtgcacgagcggctcaggctggacgccgcggcactagccgctctgccacccttgctcgacgcagtgtgtcggcgtcaggctgagcttaatccacgggcgcccaggctcctgcgccgtcttgaagatgcggcccggcaggcgcgtgctctgggcgcagccgtggaggccttacttgccgctttaggagccgcaaacaggggcccacgggctgaacccccggcggcaacagcctccgctgcgtctgcaaccggcgtgtttcccgccaaggtgctgggacttagagtgtgcggactgtatcgcgagtggctttccaggaccgagggggacctaggccagctgcttccgggtgggtccgcc

SEQ ID NO: 8185 - DNA, 603 bp, synthetic construct
  misc_feature 1..603: note = source = /note="Description of Artificial Sequence: Synthetic coding sequence"
  source 1..603: mol_type = other DNA
atgtcaaggagggaaggtagccttgaggacccccagaccgactctagcgtctccctgctgcctcacctggaagcaaagattagacaaacacacagcttggctcacttgcttactaaatacgcggaacagctgcttcaggagtacgttcagctgcagggtgacccttttgggttgccgagctttagccctccgcgactgcccgtggcaggactgtctgcacccgccccatctcacgcaggcctgccggtccatgagaggctgcggctggacgccgccgccctggcagcactgcccccactccttgacgcagtgtgcagacgccaggccgagctgaacccaagagctccaaggctgcttaggagacttgaggatgcagcgagacaagcccgcgccctgggcgcagcggtggaggccctcctggccgccctgggcgccgctaaccgcgggcccagggccgaaccgccagccgcaacagccagcgccgcttctgcgactggtgtgtttcccgcaaaggtgctggggctgagagtatgcggactttatagggaatggctttcacgaaccgagggcgaccttgggcagctcctgcccggaggctccgct

SEQ ID NO: 8186 - DNA, 603 bp, synthetic construct
  misc_feature 1..603: note = source = /note="Description of Artificial Sequence: Synthetic coding sequence"
  source 1..603: mol_type = other DNA
atgagtcggcgcgagggatctctggaagacccgcagaccgattctagcgtttcactcctgccacacctggaagcgaagatccgccaaactcactctctcgctcatttgttaacaaagtacgcagaacaactgctgcaagaatacgtccagctacagggagacccctttggtcttccaagcttctcccctcctaggctccccgtggccggtttgtctgcgccagccccatcacacgctgggcttcctgtacatgagcggttgcggctggatgctgccgccctcgccgccttacccccacttctggatgcggtatgtcgccgccaggcggaactgaacccgcgggctcctcgcctgctcagacgattggaggatgccgcgcgccaagcaagggcattgggagccgccgttgaagccctgctggccgctttgggtgcagcaaaccgcggaccacgagccgagcccccagccgccactgcttctgctgcatccgcgacaggagtcttcccagccaaggttttggggctgcgggtttgcggcttgtatagggaatggctgtccagaacagagggtgatctaggacagcttctcccgggcggctctgcc

SEQ ID NO: 8187 - DNA, 603 bp, synthetic construct
  misc_feature 1..603: note = source = /note="Description of Artificial Sequence: Synthetic coding sequence"
  source 1..603: mol_type = other DNA
atgtcacgccgggaaggaagtctggaagatccgcagactgatagttccgtgtcactactcccccacctcgaagcgaaaattagacaaacccatagtttggcccatctgctaacaaagtatgctgaacaattgctccaagaatatgtacagttgcagggtgaccccttcggcttgccgtcgttcagtcctccgagactaccagttgccgggttaagcgcaccagctccatctcatgctggcctgcccgtccacgagcgcttgagattagacgccgcagcattagcagcattacctccattactagacgctgtgtgcagaagacaggctgaactaaatcctcgagctccgcgactccttcgtagacttgaagacgcagcgcgccaagcacgtgctttgggagctgctgtagaggccctcctcgcagcactgggagcagctaatagaggaccaagagccgagcctccagccgcaacagctagtgcagcttcagctaccggtgtttttccagctaaggtgctaggacttagagtgtgtggtctctatcgggaatggcttagccgaactgagggagaccttggacaattgctgccaggcggatcagct

SEQ ID NO: 8188 - DNA, 603 bp, synthetic construct
  misc_feature 1..603: note = source = /note="Description of Artificial Sequence: Synthetic coding sequence"
  source 1..603: mol_type = other DNA
atgagccggcgcgaaggaagcctcgaagatccgcagacggactcgagcgtgagcctgctgccccacctcgaggcgaagattagacaaactcattcactggcacatctgctgactaagtacgcggagcagttgctgcaggaatacgtgcaacttcaaggcgaccccttcgggctgccgtcgttctcgccgccacgcctgcccgtcgcgggactctccgccccagcgccttcccacgccggactgcccgtccacgaaaggctccgcctggacgctgccgcgctggcggcactgccgccgctccttgacgccgtctgtcgccgccaagcggagctgaacccgcgggccccgcggttgcttagaaggctcgaggacgcagctaggcaggcgcgggcactgggcgcggcggtggaggcgctcctggcggctcttggtgcagctaatcggggtccccgcgcggaaccgcctgctgccaccgcatccgcggcctcggcaacgggcgtctttccagccaaagtcctggggctgcgggtctgcggactgtaccgggagtggctctccagaaccgagggggacctgggacagctcctgcctggcggcagcgcc

SEQ ID NO: 8189 - DNA, 603 bp, synthetic construct
  misc_feature 1..603: note = source = /note="Description of Artificial Sequence: Synthetic coding sequence"
  source 1..603: mol_type = other DNA
atgagtaggcgagagggttctctcgaagaccctcagaccgatagttcagtgtcgttgctgccacatctggaagcaaagatcagacagacgcactcccttgcccacctgctgaccaaatacgcggagcagctcctgcaggagtatgtccagctccagggtgatcctttcggcttgccatcatttagtccccccaggctgccggtagctgggttaagcgcgcctgccccctcacatgcaggcttgcctgtgcacgagcgtctgcggttggacgccgcagctcttgccgctctgccacctctcctcgatgcagtgtgtcgcagacaagcggaactgaatccgcgggcgcctcggctgttgcgccgactcgaggacgccgcccgacaggctcgagcgctgggagccgccgtcgaagccctgctggcagccttaggtgccgctaatagaggcccacgggcggaaccacccgctgccactgccagtgctgccagcgcaaccggagtgttccctgccaaagtgctggggttgcgtgtctgcggtctgtatagagagtggctcagcaggaccgagggggacctggggcaactcctgccaggaggctccgcc

SEQ ID NO: 8190 - DNA, 603 bp, synthetic construct
  misc_feature 1..603: note = source = /note="Description of Artificial Sequence: Synthetic coding sequence"
  source 1..603: mol_type = other DNA
atgtccaggcgcgagggcagccttgaggacccacagacggatagtagcgtatccctgctgcctcaccttgaggccaagattcgacaaacccacagcctggcacacctgttaaccaaatacgctgaacagttgctacaagagtatgtccagctccaaggggacccattcggtctgcctagcttctccccacctaggctcccagtggcaggcctcagtgcacctgccccctcccacgcaggacttcctgttcacgagaggcttcggctcgacgcagcagcgctggctgcccttcctccactccttgacgctgtgtgcaggcggcaagccgaactaaatcctagagcacctaggctgctgcggagattggaagacgccgctcgccaggcccgcgcacttggagccgccgttgaggcgctgcttgcagctttaggagccgccaacagagggccccgcgcagaacctcccgcagctaccgcgtctgctgccagcgctaccggtgtttttcctgctaaagtcctcgggctgcgtgtatgtggactgtatagggaatggttgtcccgtacagaaggagacctggggcagctcctccctggaggctctgca

SEQ ID NO: 8191 - DNA, 603 bp, synthetic construct
  misc_feature 1..603: note = source = /note="Description of Artificial Sequence: Synthetic coding sequence"
  source 1..603: mol_type = other DNA
atgtctagaagggaaggatcactggaagacccacagacagattcctctgtatcactcctgccccacctggaagcaaaaatcaggcagacacattctcttgcccatttgttaactaaatatgctgaacaactcctccaggaatatgtccagctgcaaggagacccatttggactaccaagtttttctcctcccagactcccagtagcgggactctccgctcctgcacctagtcatgccggactacctgtacatgagcggctccggctagatgccgcggccttggctgccctgcccccactgctcgatgccgtctgtcggaggcaggctgaactgaaccctcgagcccctaggctcctcagaaggttagaagatgccgcacgacaggcccgggcgctgggagctgctgtcgaagctctcctggccgcacttggggcagccaatcggggacccagggctgagccccctgcggctacagcttctgccgcatccgctactggagtgtttccagctaaagtgctaggactccgggtctgcggattataccgagaatggctcagtcggactgagggagatttgggacagctcttacccggagggtccgca

SEQ ID NO: 8192 - DNA, 603 bp, synthetic construct
  misc_feature 1..603: note = source = /note="Description of Artificial Sequence: Synthetic coding sequence"
  source 1..603: mol_type = other DNA
atgagtcggcgagaaggcagcctggaggatcctcaaacggatagcagcgtcagcctgcttcctcatctggaggcgaaaatccggcaaacacatagtctcgctcacctgctcactaagtacgcagagcagttgctacaagagtacgtccaactgcaaggagatccatttgggctgcccagcttttctccccccaggctccctgtcgctggtctgagtgctccagccccaagccatgctggattaccagtccacgagagactgcgccttgacgctgccgccttggccgccttgccaccactcctagatgcagtctgtcgccgacaggccgagctgaacccaagggccccaaggctgctgcgccggctggaggatgccgctaggcaggcaagagcactgggagcagcggtcgaagcactgctggcagctttgggagcagctaaccggggtccacgggcggagccccctgcagccactgcaagtgccgcaagtgccaccggcgtcttcccagcaaaagtccttggactcagggtttgcggcctctatcgagagtggctcagcagaaccgagggtgacctgggtcaattactgcctggtgggagcgcg

SEQ ID NO: 8193 - DNA, 603 bp, synthetic construct
  misc_feature 1..603: note = source = /note="Description of Artificial Sequence: Synthetic coding sequence"
  source 1..603: mol_type = other DNA
atgagccgacgggagggttctcttgaagatccacagactgattcctcagtgtcgctgctgcctcacctggaagccaaaattcgtcaaacccattcgctcgcacatctgctgactaagtatgcagaacaactcctccaggaatacgtccaactgcagggcgatccattcgggttgccttcctttagcccaccgaggctgccggtggcgggtctgtccgcacctgcaccttcgcatgcaggacttcctgtgcatgaaagacttagactggacgcggcagcactggcagcgctccctccactgctggatgcggtgtgtcgtcgccaggccgaattgaacccacgcgctccacggctgctgcgtcgcctggaagatgccgcacggcaggcgagagcactcggagcagccgtcgaagcccttctcgcggcccttggagctgcaaacagaggaccgagagcagaacctccagcagctaccgcatcagccgcgtccgcaactggcgtgttccctgcaaaggtgcttggtcttagggtgtgtggactctaccgagagtggctgtcacggaccgaaggagacttgggccagctgctccctgggggatcggca

SEQ ID NO: 8194 - DNA, 603 bp, synthetic construct
  misc_feature 1..603: note = source = /note="Description of Artificial Sequence: Synthetic coding sequence"
  source 1..603: mol_type = other DNA
atgtcaaggcgggaagggtctttggaagacccgcagactgactctagcgtgtccctccttcctcatcttgaggcgaagattaggcagactcactccctagcacaccttctgaccaaatatgccgaacagcttttgcaagagtatgtacagctgcagggcgaccctttcgggttgcctagcttttctcctccccggcttcccgttgccggcctatctgccccagctcccagccatgcaggcctacctgtccacgaacgactccgtttggatgccgcggcgcttgctgcattgcctcctttgttggatgccgtttgccgtaggcaggccgaactaaacccgagggctccacgactgttgcggagactcgaggacgcagcacggcaggcacgagctttgggagcagctgtcgaagccctcctcgccgctctgggagccgccaatcggggaccgcgagccgagccccctgctgccaccgctagtgccgcctccgccaccggagtgtttcccgcaaaggtattgggtctgcgggtgtgtggcctttatagagaatggctgagccgcactgagggagatctcggccagttattgcccggcggatccgcc

SEQ ID NO: 8195 - DNA, 603 bp, synthetic construct
  misc_feature 1..603: note = source = /note="Description of Artificial Sequence: Synthetic coding sequence"
  source 1..603: mol_type = other DNA
atgtccaggcgggagggctctcttgaagatccacagacagactcctccgtgtcattgttacctcatctggaagccaaaatacgtcagacgcactcactggcccacttgcttacaaagtacgctgaacagctgcttcaagaatacgtccagttacaaggtgatcccttcggcctgccctcatttagcccaccccggttacctgtggctggactgtctgcccccgccccatcacacgccggcctccctgtgcacgagcggctccgtctcgatgctgcagctctggcagcgcttccccccttgctggatgccgtatgcaggcgacaggcagagctcaatccacgtgccccccggctcttgagaagactggaggatgcagcaagacaggccagggctctcggagccgctgtcgaggctctgctggctgccttgggtgctgcaaatcgtggacctagggccgaaccgcccgccgccaccgcctcagcggcctcagctacaggtgtgtttcccgcgaaggtcctgggtctccgcgtatgcggactttacagagagtggctcagtaggactgagggcgatctcggacagctcttgcctgggggaagtgcc

SEQ ID NO: 8196 - DNA, 603 bp, synthetic construct
  misc_feature 1..603: note = source = /note="Description of Artificial Sequence: Synthetic coding sequence"
  source 1..603: mol_type = other DNA
atgtcgaggagagaggggagcctggaggatccccagacagatagttcagtgagcttgctgccacatctggaggccaagatcagacagacacactccctagcacatctgctcacaaagtacgccgaacagttactgcaggaatatgtgcagctgcagggagacccattcgggctgccgtctttcagcccgccccgcctgccggtggcgggacttagtgcgccagctcctagccatgccggcctccccgttcacgaaagactacgcctggatgctgcggcacttgccgcactgccccccctgcttgacgcggtgtgccggagacaggcggaactcaacccacgggcacctcgacttcttcggaggctcgaggatgctgcacggcaggcgagggccctgggcgccgcagtggaagccctcctggcggcactcggcgctgccaaccgaggtccaagggccgagcctcccgcagccacggcttctgctgctagcgcaaccggcgtttttccagcgaaggtcctggggctgcgagtgtgtggactgtatcgtgagtggttaagccggacagagggggatctcggacaattgctcccaggcggctccgcc

SEQ ID NO: 8197 - DNA, 603 bp, synthetic construct
  misc_feature 1..603: note = source = /note="Description of Artificial Sequence: Synthetic coding sequence"
  source 1..603: mol_type = other DNA
atgtcccggagggagggcagtcttgaagatccgcagactgattcatccgtgtcacttcttcctcatctcgaagctaaaattaggcaaacacattcgttggctcacttactgaccaagtacgccgagcagctgttacaggaatacgtgcagctgcaaggagacccgtttgggctgccatccttttccccccctaggttgccagtcgctggtctctccgcccccgcgccctcccacgccgggttgcccgttcacgaaaggctgcgtttagacgctgcggcacttgccgcactccctcctctcttggacgccgtatgcagacggcaagcggagttaaacccaagagctcctcggctgctccgcagactggaggatgctgcccgccaagctcgagccttaggcgcggccgttgaagccttgcttgcggccctcggagcggcgaaccggggaccgagagccgagccgccggctgctaccgcgagcgccgcttctgccacaggggtgttccccgctaaagttctcggcctgcgagtgtgtggcctttaccgggaatggctttcacggactgaaggggatttggggcaattgctacctgggggcagcgcc

SEQ ID NO: 8198 - DNA, 603 bp, synthetic construct
  misc_feature 1..603: note = source = /note="Description of Artificial Sequence: Synthetic coding sequence"
  source 1..603: mol_type = other DNA
atgtctaggagagagggttccttggaagacccccagaccgactcatcagtgtccttgctgcctcatctcgaggccaaaattaggcagacccattccttggctcacttgttgacaaagtacgcggaacagctgctgcaggaatacgtgcaactgcagggtgatccatttggtttgccttcattcagtccacccaggctgcccgtggctggtttgagtgctcctgctcccagccacgcaggtttgcccgtgcatgaaaggctgcgcctggacgcggccgctttggccgccctccctcctctcctcgacgctgtttgcaggaggcaggcagagttgaatcctagggccccaaggctcctccgcagactggaagatgctgcaagacaagcgcgcgctcttggtgccgctgttgaagccctgctcgcggctctgggcgctgctaaccgcggcccaagggctgagcccccagccgcgacggcctccgccgccagtgcaactggcgttttcccagcaaaagtacttggactgagggtgtgtggcctctacagggaatggctgtctagaactgagggcgatctcggccagttgttgccaggtggttcagcc

SEQ ID NO: 8199 - DNA, 603 bp, synthetic construct
  misc_feature 1..603: note = source = /note="Description of Artificial Sequence: Synthetic coding sequence"
  source 1..603: mol_type = other DNA
atgtccagacgcgaggggtctcttgaagaccctcagaccgattcaagtgtatcacttttgccgcatctcgaagccaagatcagacagacccacagcttggcgcacctgctcacaaagtacgctgagcagctcttgcaggagtatgttcagttgcagggggacccctttggcctcccgagcttctctccccccaggttgccagtcgcaggcctctcggcaccggcaccgagccacgccggccttcctgtccacgaaaggctgcgtctagacgccgcagcgctcgccgcactcccacctttgctggacgccgtctgcagacgtcaggctgagcttaacccaagagccccccgcctgctgagaaggctcgaggacgctgccaggcaggcacgcgcccttggcgccgccgtcgaagcattattagctgctcttggcgctgccaatcgcggcccaagggcagagccacctgctgccactgccagcgctgcctcggctaccggagtgtttcctgcaaaggtgttggggttgcgagtatgcggcctgtatcgtgaatggttgtcccgcacggagggggacctgggccagctcctgcccggggggagcgca

SEQ ID NO: 8200 - DNA, 603 bp, synthetic construct
  misc_feature 1..603: note = source = /note="Description of Artificial Sequence: Synthetic coding sequence"
  source 1..603: mol_type = other DNA
atgtcaaggagagaaggctcgctggaagatcctcagacggactcgtccgtctcactcctgcctcatcttgaagcaaagattaggcaaactcatagccttgcacatcttctgaccaagtacgccgaacaacttctccaggagtacgtgcagcttcaaggtgacccatttggcctgccatctttttcgcccccgcgtctcccagtggcaggcctttccgcacctgccccttcccatgcaggcttgccagtgcacgaaaggctgagacttgacgccgctgcacttgctgcacttcctccactcctcgacgcggtgtgccgccgtcaggcagaactgaaccccagggcgccacgccttcttcggagactggaagatgctgcacgccaagcccgggcgctgggtgcggcggttgaggcattgctcgctgcccttggcgccgcaaacaggggaccaagggcagagccccctgcggcaactgcatcagcagcatctgccactggagtgtttccagcgaaggtgcttggtcttagagtgtgtggtctgtaccgggaatggctttcccggacggaaggggatcttggtcaacttctgccagggggtagcgcc

SEQ ID NO: 8201 - DNA, 603 bp, synthetic construct
  misc_feature 1..603: note = source = /note="Description of Artificial Sequence: Synthetic coding sequence"
  source 1..603: mol_type = other DNA
atgtctaggcgggagggcagccttgaagacccacagacggattccagtgttagtcttctgccgcacctggaagcaaagatccgacagacccacagcctcgcccatttgttgaccaagtatgccgagcagctgttgcaggaatacgtacaactccagggcgatcccttcggattgccaagttttagtccaccacggctacctgtcgctggcttgtctgcacccgctcctagccacgccggtctgcccgtgcatgaacggctccggcttgatgcagcagctctggccgccctccccccattactggacgccgtgtgtcgaaggcaggccgagctgaatcccagggctccccgcctgctacggagacttgaagatgccgcgaggcaggcccgcgcactgggcgccgccgttgaggcgctcctcgctgccctgggggctgctaatcgcggcccgagagcggaaccacctgccgctaccgcctccgctgcatcagctaccggcgtgtttccggcaaaggtcctgggattacgtgtctgcggcctgtatcgcgagtggctgagcaggacagagggggacttaggccaactgttaccgggcggcagcgcg

SEQ ID NO: 8202 - DNA, 603 bp, synthetic construct
  misc_feature 1..603: note = source = /note="Description of Artificial Sequence: Synthetic coding sequence"
  source 1..603: mol_type = other DNA
atgtcccgtcgggagggaagtctggaggatccacaaaccgacagcagcgtctcgctcttgccgcacctcgaagcaaagatccgccagacgcattcactggctcacctgcttaccaagtacgccgaacaactgctgcaggaatacgtccaactgcagggggatccctttggcttgccatcgttcagcccgccaagactgccagtggccggactctctgccccggcaccgagtcacgccggactcccggtgcatgaacggttgcgcctggacgccgctgctcttgctgcattgccacctctcttggacgcggtgtgcaggagacaggcggagctcaatccgagagctccgcgcttgctgcgtcggctggaggatgccgcccgccaggcgagagcactgggcgccgcagtggaagcactgctcgcagctctgggggccgccaaccgcggtccccgggcagagccccctgccgcgaccgcttccgcggcgtccgcgactggagtgttccctgcgaaagtgcttggtctgcgggtctgtggactctaccgcgagtggctctcgagaactgaaggcgacctcggccagctgctgccaggaggaagtgcc

SEQ ID NO: 8203 - DNA, 603 bp, synthetic construct
  misc_feature 1..603: note = source = /note="Description of Artificial Sequence: Synthetic coding sequence"
  source 1..603: mol_type = other DNA
atgtcccggcgtgaaggtagtctggaagacccgcagactgattctagcgtttcactcctgccccacctggaggctaagatccgtcagacacactccctggcccacctgctgaccaagtacgcagagcagctactccaggagtacgtgcagctacagggcgatccctttggactcccgagtttttcaccccctcggcttccggtagccggtctgtcagccccagctccatcccacgccggacttcccgtacacgaaaggctgcgcctggacgctgccgctcttgctgcccttccacccctccttgacgctgtttgtcggcggcaagctgaactgaatccccgggcccctcgtctgctgcgccgtctcgaagatgcagctcgccaggcgcgtgctctgggcgcagccgtcgaggcgctgctggccgccctgggtgccgcgaaccgtggcccgcgcgcggagccgccggccgctaccgcaagcgccgcctctgccaccggtgtttttcccgcaaaggtgctcggcctccgtgtctgtggattgtaccgcgagtggttgagcaggactgaaggcgatcttggccaacttctccccggtggttccgcg

SEQ ID NO: 8204 - DNA, 603 bp, synthetic construct
  misc_feature 1..603: note = source = /note="Description of Artificial Sequence: Synthetic coding sequence"
  source 1..603: mol_type = other DNA
atgtcacggcgcgaaggctcgcttgaggacccacagaccgatagcagcgtgagcttgctgccccatttggaagccaagattcggcaaacgcactccctggcgcaccttctgactaaatacgcggaacagttgctccaggagtacgtgcaactgcaaggagatccgtttggtctgccatcgttctcgccgccgaggctgccggtggctggactgtccgctcccgctccttcgcacgcaggactgcctgtccacgaacgcctgcgcctggacgctgcggctttggcggctctgccaccattgctcgacgctgtgtgtcggcggcaggccgaattgaacccgcgggcccctcggttgctgaggcggctggaggatgccgcacggcaagcgagagctctgggagcggccgtggaggctctgctcgctgcactcggagcagccaacagaggacccagagccgaacctccagccgcaaccgcgtcagccgcaagcgccactggtgtgtttccggcgaaggtccttggacttagagtgtgcggactctaccgggagtggctgagccgtactgaaggagatctcgggcagctgcttccaggagggtcggct

SEQ ID NO: 8205 - DNA, 603 bp, synthetic construct
  misc_feature 1..603: note = source = /note="Description of Artificial Sequence: Synthetic coding sequence"
  source 1..603: mol_type = other DNA
atgagcaggcgcgaaggctctttggaggacccgcaaactgactcctccgtgtcgctgctgccgcacttggaagcaaagatcagacagactcatagcctcgcccacctgcttacgaaatacgccgagcaactcctccaggaatacgtgcaactccagggcgacccatttgggcttccgtcgttctcgccgccacgcctgccagtggcgggtctgtcggcgccagctcctagccacgctggacttccggtgcacgaacggctgcggctggatgccgcggcccttgcggcgctgccgccgctgttggatgccgtgtgccggcgccaggcggaactcaatccgagagcaccacggctccttcggcggcttgaggacgcggctaggcaggcccgcgccctcggggccgccgtggaagctctgctggccgcgctgggagccgccaaccgaggaccgagggcagaaccacctgcagcgacggcctcagcagcctcggcaactggtgtattcccagcaaaggtcctcggactcagagtgtgtggactctaccgcgaatggctctcccgaaccgagggcgaccttggacagctcctgccaggagggtccgca

SEQ ID NO: 8206 - DNA, 603 bp, synthetic construct
  misc_feature 1..603: note = source = /note="Description of Artificial Sequence: Synthetic coding sequence"
  source 1..603: mol_type = other DNA
atgagccggagagaagggtctctggaagacccccaaacagactcctctgtgagcttgttgccccacctggaagcaaagattagacagacacacagcctggcacaccttttgaccaagtatgcggaacagcttttgcaggaatacgttcagttgcagggcgatcccttcgggcttccaagcttctcaccgccacggttgcctgttgccggtctctccgctcccgccccatctcatgccgggctgccggtgcacgagcggctgaggctcgacgccgctgccttggccgcactgcctcccctgctcgatgcagtctgtcggaggcaggcagaactgaatccccgcgctcctcgattgttgaggagattggaagatgctgcacggcaagcgcgggccctgggggccgccgtggaggcactgctcgccgccctgggcgctgctaacaggggtccccgagccgaaccgccggccgccacggcctccgcagcctcagccaccggcgtctttccagcaaaagtgttgggtctgagagtctgtggactgtatagggaatggttgagccggaccgaaggggacctgggtcagctcctcccaggcggctcagcc

SEQ ID NO: 8207 - DNA, 603 bp, synthetic construct
  misc_feature 1..603: note = source = /note="Description of Artificial Sequence: Synthetic coding sequence"
  source 1..603: mol_type = other DNA
atgtcacgcagggaaggatcccttgaggaccctcagactgattcatctgtgagcctccttcctcatctggaggccaaaattcgccagacgcactcactggcacatctcctgaccaagtacgcagaacaactccttcaagaatacgtccaactgcaaggtgacccgttcggacttccatccttttcacctccacgactgcctgtggcaggtctttcggccccggcaccatcccatgcaggacttcctgtgcatgaaagacttcgccttgatgcggccgccctcgctgcgctcccccctctgcttgatgctgtgtgtagacgacaagccgaactcaaccctcgagcacctcgactgcttcgtagactggaagatgcggctcgccaggccagagcactgggagccgcagtcgaggcactccttgctgcactcggagcagccaacagagggcctagggccgaacctccggccgcaactgcatccgcagccagcgcaactggggtctttccagcgaaggtcctggggcttcgagtctgtggtttgtaccgcgaatggctctcgcgcactgaaggagatctgggtcaacttctgcccggaggatccgca

SEQ ID NO: 8208 - DNA, 603 bp, synthetic construct
  misc_feature 1..603: note = source = /note="Description of Artificial Sequence: Synthetic coding sequence"
  source 1..603: mol_type = other DNA
atgtctcggcgcgaaggctcgcttgaggacccccagacggactcaagcgtctcactgctccctcatctggaagccaaaattcggcaaacccattcacttgcccacctgctgactaagtacgcagaacagctgctccaagaatacgtgcaactgcaaggtgaccctttcggtctgcctagcttttcgcctcctagactgcccgttgcaggtctgtctgcacccgcaccttcgcacgccgggctgccagtccacgaaagactgcgtcttgatgcggcagctcttgcagcactgcctcccctgctggatgcagtatgtaggaggcaggcagaactcaaccctcgtgcaccgagactgcttaggcggcttgaagatgcggcacgacaggccagggcactgggggcagctgtggaagcactgcttgcggcactcggtgcagcaaatcggggcccaagagcagaaccaccagcagctaccgcgagcgccgcgtccgcaactggagtgtttcctgccaaggtgcttggcttgcgggtgtgcggactttaccgagaatggctttcgcgaactgaaggggacttgggacagcttcttcctggagggtccgcc

SEQ ID NO: 8209 - DNA, 603 bp, synthetic construct
  misc_feature 1..603: note = source = /note="Description of Artificial Sequence: Synthetic coding sequence"
  source 1..603: mol_type = other DNA
atgtccagacgggagggttcactcgaagatcctcaaaccgattcgtcagtgagcctgttgccacatcttgaagcgaagatcagacagacccactcgttggcccatctcctcaccaagtacgcagaacaacttctgcaagagtacgttcaacttcagggggatccttttggacttccatcgttcagccctccacgactgccggtggcaggtttgagcgctcccgccccgagccatgccggccttccggtccacgagcggctcagactggatgcagccgcattggcagcgttgcctcctcttctggacgccgtgtgtaggagacaggccgagctgaaccctagagccccacgcctgcttcgtaggcttgaggacgcagcaagacaggcacgcgccctgggcgcagccgtggaagctctgttggcagctctgggggctgcaaaccgcggcccccgcgctgaacctccggcagcgaccgcatccgccgcgtctgcgaccggagtgtttccagctaaagtcctcggacttagggtatgtggtctgtaccgagaatggctgtcaaggacggaaggagatctcggtcaactgttgccaggaggatccgca

SEQ ID NO: 8210 - DNA, 603 bp, synthetic construct
  misc_feature 1..603: note = source = /note="Description of Artificial Sequence: Synthetic coding sequence"
  source 1..603: mol_type = other DNA
atgtcacggcgagagggatcacttgaagatccacaaactgactcatctgtttcgctgctcccacatctcgaagcaaagattagacaaacccattcactcgcccatctcctgaccaaatacgcagaacagcttctgcaagaatacgtgcagcttcagggtgacccctttggactgccttccttctccccacctaggctgcccgtggcgggcctttcggctcccgcgccatcccacgccggtttgcctgtgcacgagagacttcgcctggatgcagcagcacttgcagcattgccccctctcctggacgcggtctgtagacggcaagctgagttgaaccctagggctccgcgtctgcttaggagactggaagatgctgcacggcaagctcgagcactcggcgcagcggtggaagcccttctcgccgcgctgggagcagcaaatcggggacctcgagccgagcctccagccgccaccgcttcggcagcgtccgcaacgggcgtttttccggctaaggtcctcggtttgagagtgtgcggactgtacagagagtggttgtctcgtactgaaggcgatcttgggcaacttcttccgggtggatcggcc

SEQ ID NO: 8211 - DNA, 603 bp, synthetic construct
  misc_feature 1..603: note = source = /note="Description of Artificial Sequence: Synthetic coding sequence"
  source 1..603: mol_type = other DNA
atgtcgcggcgagaaggatcactggaggacccgcagactgattcatctgtctcgctgcttccgcatttggaggccaagatccgccagacccactcgctggcacacctcctgactaagtacgcagaacaacttctgcaagaatacgtgcaactgcaaggcgacccattcggcctgccttcattcagcccgcctcgcctgccagtggcaggactgtcggcccccgcgccatcccacgctggactccctgtgcacgagcggctcagactcgacgcggcagccttggccgcactcccgcctctcctcgacgcagtctgccgccggcaggcggagctcaacccacgtgcgccgcggctgctgcgccggctcgaggacgcggcccgccaggcgagagccttgggagccgcagtggaggcactcctggcggcactcggcgcggccaatcggggaccacgggctgagcctccagctgcaactgcctccgctgcgtccgccaccggagtgtttccggccaaagtgctgggactgcgcgtgtgtgggctttaccgcgaatggctgtccagaactgaaggggacctcggacagctgctccctggtggatcggca

SEQ ID NO: 8212 - DNA, 603 bp, synthetic construct
  misc_feature 1..603: note = source = /note="Description of Artificial Sequence: Synthetic coding sequence"
  source 1..603: mol_type = other DNA
atgtcccgccgcgaaggctcgctcgaagatccgcagaccgactcgtcagtctccctcctgcctcatctggaagctaagatcagacagacccatagcttggcgcatcttctgactaaatacgctgaacaactgctccaggaatacgttcagttgcaaggcgacccattcggtctgccgtcgttttccccaccgcgcctccctgtggccggcctgagcgcgccggccccatcgcatgccggtctgcccgtgcacgagcggctgcggctggatgctgcggcgctggccgcactgccacctctcctggacgcagtgtgtcgccgtcaggcggagctgaacccccgggcgccgagacttctgagacgccttgaggacgccgccaggcaggctcgggccctgggtgccgccgtggaggccctcctggcggcacttggggcggcaaacaggggacctcgcgcagaaccgcccgcagccactgcatccgcagcaagcgcaaccggagtgtttccggctaaagtgctgggactgagagtctgcggactctaccgcgagtggctgagccgcaccgagggagatctgggacaactgctccccggagggtccgct

SEQ ID NO: 8213 - DNA, 603 bp, synthetic construct
  misc_feature 1..603: note = source = /note="Description of Artificial Sequence: Synthetic coding sequence"
  source 1..603: mol_type = other DNA
atgagtaggcgggaaggatcactggaggacccccagactgatagctcagtgagcctcctgccacatctggaggctaagattagacagacccacagcctggctcatctcctgacaaagtatgcagaacagctgctgcaggagtatgtgcaactgcaaggagatccctttgggctcccatctttcagtccaccacggttgccggtggctgggctgtccgcccccgcaccatctcatgccggtcttcctgtccacgaaaggctgcgcttggacgctgccgcactcgccgccttgccccccctcctcgacgcagtctgcaggaggcaggcagagctcaatcccagggcgcccaggctgctccggcgcctggaagatgccgcccgacaggccagggctctgggggctgccgttgaggctcttttggctgccctcggcgccgcgaataggggccccagggctgagccccctgccgccacggcctccgccgccagcgccacaggggtgttcccagccaaagtgctcggtctcagagtatgcggactctaccgcgaatggctctctcgcacggagggcgacttgggacagctgcttcccggcgggtccgcc

SEQ ID NO: 8214 - DNA, 603 bp, synthetic construct
  misc_feature 1..603: note = source = /note="Description of Artificial Sequence: Synthetic coding sequence"
  source 1..603: mol_type = other DNA
atgtcacgcagggaagggtcactggaggatccccaaaccgattcgagcgtgtccctgctcccgcaccttgaggcaaagatcagacagacgcactccctcgcgcacttgttgactaagtacgccgaacagcttctgcaggaatacgttcagcttcaaggagatccttttggcctgccctcctttagcccaccaagactgccagtggccggtcttagcgcaccggcaccttcgcatgcaggactgcctgtccatgagagactccgactggatgcagccgcactcgcggcactgcccccgttgttggacgcagtctgtcggcggcaagcagagctgaacccgcgtgcaccacggctcttgaggagactggaagatgctgcacggcaggcgcgggcattgggagcagcggtggaagcactgctggcagcactcggagcggcaaaccgcggaccccgggcagaacctcccgcagctaccgcaagcgctgcctcagcgactggagttttccctgcaaaggtgctcgggcttcgcgtgtgtggactgtaccgcgaatggctctcccggaccgaaggagatctgggccaactgctgccaggaggctctgca

SEQ ID NO: 8215 - DNA, 603 bp, synthetic construct
  misc_feature 1..603: note = source = /note="Description of Artificial Sequence: Synthetic coding sequence"
  source 1..603: mol_type = other DNA
atgtctaggcgtgagggctcgcttgaggatccccagacggatagctccgtttccttgctcccccacctagaagctaagattaggcagacgcattcactggcccatctgctgaccaaatacgcagaacagttactgcaggaatatgtacagttgcagggggatccgttcggactcccttcattctccccaccgcgattgcctgtcgctggattgagcgcacccgccccctcccacgctgggctgcccgtgcatgaaagactcagactggacgcagccgccctagccgccctgcccccattgctggacgcagtatgtcgtcgccaggcggaactgaaccctcgggctccacgcttgctccgtcgcctggaggatgcagccagacaggcgcgcgccctgggggctgccgtggaggcactgctcgcagcgctgggggccgctaatagagggccacgggccgagcctcccgcagctaccgcctctgccgcgtccgccaccggcgtttttcctgccaaagttctcggactgcgtgtgtgcggactgtatcgcgagtggctcagtaggacagagggggacctgggccaacttttgccgggaggctcggcc

SEQ ID NO: 8216 - DNA, 603 bp, synthetic construct
  misc_feature 1..603: note = source = /note="Description of Artificial Sequence: Synthetic coding sequence"
  source 1..603: mol_type = other DNA
atgagcagaagagagggttccttggaggatcctcaaactgactcttccgtgtcgctgttgcctcaccttgaggccaagatcaggcagacccactcactggctcacctgctgacgaaatacgcagagcaactgttgcaagaatacgttcagctgcagggagatccctttggcctcccgtcattctcgccgccaaggttgcccgtggctggcctgtcagctccggccccaagccatgcgggactgccggtgcatgaacggcttcgcctggacgctgctgcccttgccgctttgccgcccctccttgacgctgtgtgccgccggcaagcagaactgaacccacgggccccgagactgctgagaaggttggaagatgcagcgaggcaggcgcgggccctgggagcagcagtagaggcactccttgcggctctcggggcagcaaacagaggccctcgagccgaaccgccagccgccaccgcctcggccgcgtccgccaccggcgtctttcccgcaaaggtgctggggctgagagtgtgcggactctaccgagagtggctgagtcgcactgaaggggacctgggacagctgctccccggaggaagcgcg

SEQ ID NO: 8217 - DNA, 603 bp, synthetic construct
  misc_feature 1..603: note = source = /note="Description of Artificial Sequence: Synthetic coding sequence"
  source 1..603: mol_type = other DNA
atgtcacgccgggaaggaagcctggaggatccccaaactgacagctcagtgtcacttctgcctcatctcgaggccaagattaggcagacccacagtctggcacacctcctgaccaaatacgcagaacagcttctccaggaatacgtgcaactccaaggagatcccttcggactgccgtcattttcaccgccccgccttcctgtagcaggactctccgctcctgcaccatcgcacgccggtctgccggtgcacgaacgtcttagactggacgccgcggcacttgcggcacttcctccattgctggatgcagtgtgcaggcgtcaggcagaattgaaccctcgagccccacggctgctgcgcagactggaggatgcagctcgtcaagcacgcgcgcttggcgcggcagtcgaagcccttctcgcagcactgggggccgcgaatcgaggcccaagagcagaacccccagcggcaacggcgtcggcagcatcagcaactggagtgttccctgcaaaggtcctcggactcagagtctgtggactttacagagagtggctgagccggactgaaggcgatctgggtcaattgcttccgggcgggtctgcc

SEQ ID NO: 8218 - DNA, 603 bp, synthetic construct
  misc_feature 1..603: note = source = /note="Description of Artificial Sequence: Synthetic coding sequence"
  source 1..603: mol_type = other DNA
atgtccaggagagagggttcactggaagacccccaaactgatagttcagtgagcctgttgccccacttggaggctaagattaggcagactcactcacttgctcatcttctgacaaaatatgcggagcagctcttgcaggagtatgttcaactgcagggggacccttttggactgcccagcttcagtcctccgagactccccgtcgctggtctgtctgcgcccgcgcccagtcacgcaggactgcctgtgcatgagcgattacgcttggacgctgccgccttggccgctctgccacctctgttggatgcggtctgcaggcgacaggccgagctgaatccgagagctcctcggctactgcgacggttggaagatgctgcacgccaggcacgggcgttaggtgccgcagtggaggctctgcttgccgcgcttggtgcagccaatcggggacctcgtgccgagccccctgccgccaccgcatcagccgcctccgctaccggtgtgtttcccgctaaggtgttgggcctgcgtgtttgcgggctgtatcgtgaatggttgagccgtacagagggagacttgggacagcttctcccgggcgggagcgcc

SEQ ID NO: 8219 - DNA, 603 bp, synthetic construct
  misc_feature 1..603: note = source = /note="Description of Artificial Sequence: Synthetic coding sequence"
  source 1..603: mol_type = other DNA
atgtcccggcgcgagggaagcctggaagatccacaaactgattcatccgtctcgctgttgccacacctggaagcgaagatccgacagacccattccctggctcacttgcttaccaaatacgctgaacaactcctgcaggaatacgtgcagctccaaggagatccgtttggtttgccgtccttctccccgcctaggctcccagtcgcagggctgtccgccccggctccatctcatgctgggttgcccgtgcacgaacggctgcgcttggacgccgcggccctcgccgcactcccaccgctcctggacgcagtctgcagacggcaagctgaactgaacccgcgtgcccccagactgctgcggcggctggaggacgcggcgcgccaggcgcgggcgttgggagctgctgtggaggcactgctggccgcgcttggggcggcgaatcggggacctagggctgagccccctgctgcgacggcctcggcggcctcagctactggagtattccctgctaaggtcctcggtctgagagtgtgtggactttacagagaatggctttcgcgcactgagggagacttggggcagctgctgccgggcgggagcgct

SEQ ID NO: 8220 - DNA, 603 bp, synthetic construct
  misc_feature 1..603: note = source = /note="Description of Artificial Sequence: Synthetic coding sequence"
  source 1..603: mol_type = other DNA
atgtcccgcagagaaggctcccttgaggatccacaaaccgactcttcggtcagccttctcccccatctcgaagctaagattagacaaacccattcgctggcacatctcttgaccaagtacgcggagcaacttctgcaagagtacgtgcaactgcaaggtgatccatttggactcccatccttttccccacccagactgccggtggcaggactttcggcacctgcgcctagtcacgcagggcttcctgtccacgagaggcttaggctggacgcagcagctttggcggccctgccacctctgctcgacgcagtgtgtagacggcaagcagagctgaacccacgcgcgccgagactcttgagacgactcgaagatgctgcaaggcaggccagagcgctgggcgcggctgtggaagcactccttgccgcactgggtgccgcgaacagaggtccacgtgcagaaccgcctgccgcaaccgcgtcggctgcctcggccactggtgtgttcccagcgaaggtcctgggcctccgcgtttgtgggctgtaccgagagtggctgagcagaacggagggagatctggggcaactcttgcctggcggatcagca

SEQ ID NO: 8221 - DNA, 603 bp, synthetic construct
  misc_feature 1..603: note = source = /note="Description of Artificial Sequence: Synthetic coding sequence"
  source 1..603: mol_type = other DNA
atgtcgaggcgcgagggatcgcttgaggacccacaaacggactcaagtgtgtcgctgcttccacatctggaggctaagattcgccagacccattccctggcccacctgctgacgaaatacgcggagcaactcttgcaggagtacgtccagctgcagggtgacccatttggattgccatctttttcaccaccacgccttccagtcgcgggtttgagcgcgccggccccgtcgcacgcgggcctaccggttcatgagaggctcaggctcgatgccgccgcacttgcggcgctgccaccgctgctggatgccgtgtgccgccggcaggccgagctgaaccctagagcaccgaggctcctgcgccgcctcgaggatgccgcgcgtcaggcccgggcgctgggggccgcagtggaggcgttgctggccgccttaggggccgccaaccgcggcccaagagctgagcccccggccgccactgcctctgccgccagtgcgacaggggtgttccccgccaaggtgctcgggctgcgcgtgtgcggcctttaccgtgagtggctatcgcgcaccgagggagacttgggccaactgttgcccggcggctcagcc

SEQ ID NO: 8222 - DNA, 603 bp, synthetic construct
  misc_feature 1..603: note = source = /note="Description of Artificial Sequence: Synthetic coding sequence"
  source 1..603: mol_type = other DNA
atgtctcgcagagagggatccctggaagacccccagaccgattcatccgtgtccctgctgcctcacctggaagcgaagatccgccagacccatagtctcgcacacctgctgaccaagtacgcagagcagctgcttcaggagtacgtccaactccaaggggacccgtttggtctgccatcgttctccccgcctcggctgccggtggcgggcctgtcagctcccgccccttcgcacgctggactgccagtgcatgaacggctgcgactggatgcagcagccctggcagcactgccgcctctgctggatgcggtctgccggcgccaggccgaactcaatccacgcgcgcctcgcctgctgcggaggctggaggacgctgccaggcaggcccgcgctctcggggccgctgtcgaagcgctcctggccgcgctgggagccgctaaccggggtcctcgggccgagccccctgcggccacggcgtcggccgctagcgcgactggtgtgtttccagccaaggtcctcggactgagagtgtgtggactgtatcgcgaatggctgtcgcggactgaaggcgacctgggccagctgctgcctggggggagcgcc

SEQ ID NO: 8223 - DNA, 603 bp, synthetic construct
  misc_feature 1..603: note = source = /note="Description of Artificial Sequence: Synthetic coding sequence"
  source 1..603: mol_type = other DNA
atgtcgagaagggaggggagcctggaggaccctcaaaccgattcgtcggtcagccttcttccacatctggaagcaaagatacgccaaacgcactcgctggcacacttgttgacgaaatatgcagaacaacttctgcaggaatacgttcaactgcaaggtgatccctttggacttccctcgtttagccccccacgtctgcccgtggcaggactctcggccccagcaccctcgcatgctggccttcccgtgcatgagaggcttagactcgatgccgccgcactcgcagccctgccacctcttctggatgcagtgtgcagacgacaggctgaattgaacccgcgtgccccaagattgctccgacggcttgaagatgcagcaaggcaagcccgggcactcggcgcagcagtggaggcactgcttgccgccctgggggccgcaaatcgtggtccccgggcggaaccgcctgcggcaactgcatccgccgcctcagcaaccggtgtgttccctgctaaggtgcttggcctgcgggtctgtgggctgtaccgagaatggcttagccggactgagggggatcttggacagttgcttcctggaggatcagca

SEQ ID NO: 8224 - DNA, 603 bp, synthetic construct
  misc_feature 1..603: note = source = /note="Description of Artificial Sequence: Synthetic coding sequence"
  source 1..603: mol_type = other DNA
atgtctagacgtgaaggaagccttgaggatcctcagacagattctagtgtgtcccttctgccgcatcttgaagccaaaattcgccagactcatagtctcgcgcatctgctgactaaatacgccgaacaactcttacaggaatatgtgcagctgcagggcgatccttttgggctgcctagtttctcccccccaagactgcccgtagctggcctgtctgctccggccccatcccatgcagggttgccggttcatgagcgactgaggctcgacgctgctgctctagcagccttgccgccactattggatgccgtttgccgcagacaagctgagctgaatccaagagcaccccgcctcctgagaaggctggaggatgccgcccggcaagcgcgagcgctcggtgcggctgttgaagccctcttggccgctctcggagcagcaaacaggggtcctcgcgcagaacctccagctgccactgcatccgccgctagcgccacgggtgtgttccccgcaaaggtcttgggactgcgtgtgtgtggactatatcgcgaatggctcagccgaactgaaggggatctgggccagctgctgcccggaggcagcgcc

SEQ ID NO: 8225 - DNA, 603 bp, synthetic construct
  misc_feature 1..603: note = source = /note="Description of Artificial Sequence: Synthetic coding sequence"
  source 1..603: mol_type = other DNA
atgtcccggagagagggctcacttgaggacccacaaaccgatagttccgtatcacttctcccacacctcgaagctaaaatacgacagacccattccttggcccacctcctgactaaatacgccgagcaactactccaagagtacgtgcaactacagggggatcctttcggcctgccatcattctcgcctccgcgccttccagtggcgggcttgtcggcccccgcgccatcacacgcgggactgccagtccacgaacgactacggctggatgccgcggctctcgccgctctgcctccgctgctggatgctgtctgcagacgtcaggcggagcttaacccaagagcaccgcgcctgctgcgacgacttgaggatgctgctaggcaagcacgcgctttaggagccgccgtggaggccttgttggctgcattgggggccgctaatcgtggccctcgtgctgaaccgcctgccgccacggcctcggccgcctctgccacgggtgtgttcccggccaaagtgcttggcttacgtgtgtgcggattgtatcgagagtggttgtcccggactgaaggtgatctggggcaacttcttccgggaggaagtgca

SEQ ID NO: 8226 - DNA, 603 bp, synthetic construct; identical to SEQ ID NO: 8166
  misc_feature 1..603: note = source = /note="Description of Artificial Sequence: Synthetic coding sequence"
  source 1..603: mol_type = other DNA

SEQ ID NO: 8227 - DNA, 603 bp, synthetic construct
  misc_feature 1..603: note = source = /note="Description of Artificial Sequence: Synthetic coding sequence"
  source 1..603: mol_type = other DNA
atgtcgagacgcgagggaagcctggaagatccacagactgattcttcagtcagcctcctcccgcacctggaagccaagatccgccagacgcactcattggcccatctcctcactaaatacgccgaacagctgcttcaggaatacgtgcaactccagggtgacccgttcggcctgcctagcttttcccctccgcgtctgcctgtggcagggctgtcggccccggccccatcgcacgctggcctcccggtgcatgagcgactccggctggatgcagctgctctggcagcgcttcctcccctgttggacgctgtgtgcaggcggcaagccgaactcaacccgcgggcacccagactgctgcgcaggttggaggacgcggcccggcaggcccgcgcgctgggagcagccgttgaggctcttctggcagccctgggagccgcaaatcgcggaccaagagccgaaccgccagcggcgaccgcgtcagcggcctccgccaccggcgtgttcccagctaaggtcctcgggctgcgcgtctgtggactgtaccgggagtggctgtccagaaccgaaggagacttgggacaactgcttccgggtggctcggcg

SEQ ID NO: 8228 - DNA, 603 bp, synthetic construct
  misc_feature 1..603: note = source = /note="Description of Artificial Sequence: Synthetic coding sequence"
  source 1..603: mol_type = other DNA
atgtcgcgccgggaaggttcccttgaagatcctcagactgactccagcgtgtcgcttctgcctcatctggaagcaaaaatcagacagactcattcgctggcccatctcctcaccaagtacgcagaacaactgctgcaagaatacgtgcaacttcagggagatccttttggccttccttctttttcgccaccacgtctgcctgtggcgggcctgagcgcacctgcaccttcacacgcaggtctgcccgtgcatgaacggctgcggcttgacgccgcagcccttgccgctttgcctcctctgctggatgcagtgtgtcggcgacaagcagagctgaatccgcgggcaccccgcctgctgcggaggttggaagatgcggcgagacaggcacgggcactcggagcggcagttgaagccctgctggcagctcttggagcagctaaccgcggaccgcgtgctgagcctccagcagcaactgcatcagcagcctctgcgactggagtgttccctgcgaaagtgctgggtctgagagtctgcggactgtatcgagagtggctgtcaaggaccgaaggagatcttgggcagttgcttcctgggggcagcgca

SEQ ID NO: 8229 - DNA, 603 bp, synthetic construct
  misc_feature 1..603: note = source = /note="Description of Artificial Sequence: Synthetic coding sequence"
  source 1..603: mol_type = other DNA
atgtctcggagagagggctctctcgaagatccacagacagattcatccgtctcccttctgccgcatttagaagcgaagattcggcagactcattcattagctcacttactgaccaagtacgctgaacaacttctccaagaatatgttcagttgcaaggagacccgtttggcctgccgagtttctcgccgccacggttgccggtcgctggcctgtctgctccggccccttctcatgcagggctgccggtccatgaacgtctgcggctcgatgcagctgctttagcggcgcttcctccacttctcgatgcagtttgtcgtagacaagctgaacttaacccacgcgctccgcgcctgcttcgcaggctcgaagatgcggccaggcaggcccgggccttaggggctgctgtcgaggctcttcttgcggcccttggcgcggcaaatcggggtcctcgagcagaaccgcctgcagcaacggcatccgcagcatcagccacaggagtcttcccggcaaaagtgctgggactacgcgtctgcggattataccgggagtggttatcccgaacagaaggagacttgggccagctcctgccgggagggtccgca

SEQ ID NO: 8230 - DNA, 603 bp, synthetic construct
  misc_feature 1..603: note = source = /note="Description of Artificial Sequence: Synthetic coding sequence"
  source 1..603: mol_type = other DNA
atgagtcgacgggaaggttccttagaagacccccaaacagactctagcgtatcccttctgccccatcttgaagctaagatcaggcagactcactcccttgcccacttgctgaccaagtatgccgagcagctgctccaggaatatgtccagctgcagggggacccgtttgggttgccatccttcagccccccccgactgcccgtggcaggtctctccgctccagccccgtctcatgcgggcctgcctgtgcacgagcggctgcgactggacgccgcggccctcgccgctcttccaccactgctcgatgccgtatgccgtaggcaagcagagctcaatccacgcgcgcccagattgttgcgacgcctggaagacgcagctcgacaggccagggccttgggcgcggcggtggaggctctgcttgcggccctcggcgccgcaaatcgaggcccccgggctgagccgccagctgcgacggcgtctgctgccagcgccaccggagtattcccggctaaggtgctggggctccgggtgtgcggtctgtacagagaatggctgtcacgcacagagggagacttaggtcagcttctcccaggcggttccgct

SEQ ID NO: 8231 - DNA, 603 bp, synthetic construct
  misc_feature 1..603: note = source = /note="Description of Artificial Sequence: Synthetic coding sequence"
  source 1..603: mol_type = other DNA
atgagccgccgagaagggagcctggaggacccacagacagattcttctgtgagcttactgccacacctcgaggctaagatcaggcagacacattccctcgcccacctgctcactaaatatgccgagcagctcctgcaggagtacgtccagctacaaggtgatccttttggcttaccctctttttccccacccagacttccagtggcaggactgtcggcaccagcccctagccatgccgggttgcctgtgcatgagcggctaagactggatgccgcagctctagccgcattaccgccactgcttgacgctgtctgtaggcgccaggccgagcttaatccgagggcaccccgcctcttgaggcggcttgaagacgcagctcggcaggctcgagctttaggagcagctgtagaggcgctcctagcagctctgggagctgctaacaggggtccacgtgcagaaccgcccgcagcaacagcctctgcggcgtccgcaacgggcgtattccctgccaaagtattaggcctgcgggtgtgtggactttacagagagtggttgtctaggaccgaaggagatctcggtcaactgctgcctggtggcagcgca

SEQ ID NO: 8232 - DNA, 603 bp, synthetic construct
  misc_feature 1..603: note = source = /note="Description of Artificial Sequence: Synthetic coding sequence"
  source 1..603: mol_type = other DNA
atgtcaagacgggaaggttcattggaagatcctcaaaccgattcaagcgtgagccttctgcctcacctcgaggcaaagattaggcagacccactcgctcgcacacctgctgaccaagtacgcggaacaactcctccaggaatatgtgcaattgcagggtgacccctttggactcccttcgttctcaccccccagattgcctgtggctggcctctcagctcctgcaccttcccatgccggactgcctgtccatgaacgcctgcggctggatgcggcggctctggctgccctgcctcctcttctggatgcggtgtgtaggcgccaagctgagcttaaccccagagcaccaaggctgctgcgccgcctcgaggacgccgcacgccaggcaagagcgctcggagcagcagtcgaggcactgcttgcagcactgggtgcggcaaacaggggaccccgagccgagccaccagcagcaaccgcgtcggcagccagcgcaacgggagtgttcccagcaaaagtcctcggactgcgggtgtgtggactttacagagaatggctgtccaggaccgaaggcgatctgggacagcttctgcccggtggctccgcc

SEQ ID NO: 8233 - DNA, 603 bp, synthetic construct
  misc_feature 1..603: note = source = /note="Description of Artificial Sequence: Synthetic coding sequence"
  source 1..603: mol_type = other DNA
atgtccaggagagaggggtcattggaagatccccagactgattcgagcgtgtcgctgctgccgcatctcgaggcaaaaatccggcagactcactccttggcccacttgctcaccaagtacgcagaacagcttctgcaggagtacgtgcaactgcagggagatccgtttgggctgccatctttcagtccgcccagactgccggtcgctggcctgtccgcaccggccccttcccacgcgggcctgccggttcacgagcggcttagactggacgcggctgctctggcggcactgcctccgctccttgatgccgtgtgccgaaggcaggccgagctgaatccgcgcgccccacgtctgctgcgcaggctggaggacgcggcgcgccaggcgagagctctgggggccgcagtggaagcgcttcttgcggctctgggagctgccaacagaggaccacgggccgagccgccagctgcaactgcctccgccgctagcgccactggtgtgttcccggcaaaggtcctgggacttcgcgtgtgcggcctttaccgcgaatggctgtcacgcaccgaaggagatctggggcagcttctgcccggaggctcagcc

SEQ ID NO: 8234 - DNA, 510 bp, synthetic construct
  misc_feature 1..510: note = source = /note="Description of Artificial Sequence: Synthetic coding sequence"
  source 1..510: mol_type = other DNA
atgaagacccagcgtaacgggccaagcctgggcagatggtccctggtgttactgctgcttggactggtaatgccactggcaattgtcgcccaggtactctcttatcaggaggccgttctgcgggccatcgatggcataaaccaacgctcgagtgatgcaaatctgtatcggctgctggacctcgacccccgtccaactatggatggagacccagacacacctaagcccgtgtccttcacggtcaaagagacagtgtgcccacgaacaacgcagaaaagccctgaggactgcgattttaaggaagacggcctggtcaaaaggtgcgtcggcaccgtgatactgaaccaggcccgtgattcctttgacatcagctgcgacaaggacaatcgccgatccgctcggttaggtaacttcttcaggaaggtaaaagagaagatcgggggcggcttaaaaaaggtggggcaaaaaattaaggatttccttggcaacctcgtgccgcggacggcatct

SEQ ID NO: 8235 - DNA, 510 bp, synthetic construct
  misc_feature 1..510: note = source = /note="Description of Artificial Sequence: Synthetic coding sequence"
  source 1..510: mol_type = other DNA
atgaaaactcagaggaacggtccaagtttaggccggtggtctttagtactcctgctcctgggactcgtcatgccactcgcaatagtggcacaggtgttgtcttaccaggaggctgtgctcagggcgatcgatggaatcaatcagcggagtagcgacgccaatctttacaggctccttgatcttgatccgaggccaactatggatggagatcccgacacgccaaagccagtctcctttaccgtaaaggagaccgtatgtcctcgaacaacccagaaatcccccgaggattgcgacttcaaggaagacgggctggttaagcggtgcgtgggtacagtcattctgaaccaggctcgcgattcgtttgatattagctgcgataaagataacaggaggtctgccaggctcggtaacttcttccgaaaagtaaaggaaaagattggtggtgggctgaagaaggtgggccagaagatcaaggatttcctcggcaatctcgtccctcgcaccgccagc

SEQ ID NO: 8236 - DNA, 510 bp, synthetic construct
  misc_feature 1..510: note = source = /note="Description of Artificial Sequence: Synthetic coding sequence"
  source 1..510: mol_type = other DNA
atgaaaactcagcgcaatgggccttctttggggcgttggtcccttgtgttgcttctgttgggcctggtgatgccgctggcgatcgtcgcgcaagtcctcagctaccaagaagcagttcttcgcgccatcgatgggattaatcaacgttcgagtgacgccaacctgtataggctgctggatctcgacccgaggccaaccatggacggcgaccccgacaccccaaaacccgtttcctttactgtcaaggaaaccgtgtgtccgcggaccactcagaagtccccggaggattgcgatttcaaggaagatggtcttgtgaagaggtgcgtgggaactgtgatcctgaatcaggctcgcgactccttcgatatcagctgcgataaggacaacagacgaagcgcccggcttggaaacttctttcggaaggtgaaagagaaaattggaggaggcttgaagaaggtcggacagaagatcaaagacttcttgggtaacctcgtgcctcgcaccgcatca

SEQ ID NO: 8237 - DNA, 510 bp, synthetic construct
  misc_feature 1..510: note = source = /note="Description of Artificial Sequence: Synthetic coding sequence"
  source 1..510: mol_type = other DNA
atgaaaacccagaggaatggaccgagcttgggcagatggtccctcgtgctgctgttactggggttggtaatgccgctggctattgtggcgcaggtcctaagttatcaggaagccgtgttacgtgcgattgacgggattaatcagcgtagcagtgatgccaacctttaccgcctgctggacttggaccctaggcctacaatggacggcgacccagacacccccaagccggtctcctttacagttaaagagacagtttgcccccgtacaactcagaagtccccagaggactgtgatttcaaggaggatgggcttgttaagcgatgcgttggaacagtgattcttaatcaggctagagactcattcgacattagctgcgataaagataacaggcgaagtgcccgactgggtaatttctttcggaaagtcaaggagaagatcggcggcggcctgaaaaaggtgggccagaagattaaggactttctggggaacctggtccccagaacagcgagc

SEQ ID NO: 8238 - DNA, 510 bp, synthetic construct
  misc_feature 1..510: note = source = /note="Description of Artificial Sequence: Synthetic coding sequence"
  source 1..510: mol_type = other DNA
atgaagacgcagcggaacggaccttctctgggacggtggagtctggtattactgctgctgggactggtgatgcctctggccatagtggcccaggtgctgtcctatcaagaggcagtgctgcgggccatcgacggcattaatcagcgcagttcagatgcgaacctgtaccgcttgcttgacttggaccctcgcccaaccatggatggggatcccgacaccccgaaacctgtatcctttaccgtaaaagaaacagtgtgcccgaggactacccagaagtccccagaggactgtgatttcaaggaggacggcctcgtcaaaaggtgtgttgggactgtaatccttaatcaggctcgagattcctttgacatcagttgcgacaaggacaacagacgctctgcccgtcttggcaacttcttcagaaaggtgaaagagaaaatcggaggggggctaaaaaaggtgggccagaagattaaggacttccttggcaatttggtgccaaggaccgcatcc

SEQ ID NO: 8239 - DNA, 510 bp, synthetic construct
  misc_feature 1..510: note = source = /note="Description of Artificial Sequence: Synthetic coding sequence"
  source 1..510: mol_type = other DNA
atgaagacccagcggaatggccccagtcttggccggtggtccctggtgttgcttctcctgggcctggtaatgcccctcgccatagtcgcacaagtgctgagctaccaggaggcggtgctgcgggccatcgacgggattaaccagagaagttccgatgccaacttgtaccgattgctggatctggatcccaggccgaccatggatggcgacccggacaccccaaagccggtctccttcactgtaaaagagacagtgtgccctcgtaccacacagaaatctccagaagattgtgattttaaggaggacggtctagtgaagaggtgtgtaggaacagtaattttgaaccaggcccgggatagctttgacataagttgcgataaggacaaccgtcgaagtgctaggcttggtaacttcttcagaaaggtgaaagaaaagattggaggcggccttaagaaggttggccagaaaatcaaagactttcttggcaacttggtgccccggaccgcaagt

SEQ ID NO: 8240 - DNA, 510 bp, synthetic construct
  misc_feature 1..510: note = source = /note="Description of Artificial Sequence: Synthetic coding sequence"
  source 1..510: mol_type = other DNA
atgaaaactcaacggaacggcccatctctcggacgttggtctttagtgctattgcttcttggactggtgatgcctctagctattgtcgcacaggtcctctcttaccaggaagcagtgttacgggccatagatggtattaatcagaggagctcagacgccaacctgtacaggctcctcgatctcgatccgcgacctactatggacggggaccctgacaccccaaaaccagtctcgtttacagtgaaggagacagtttgtccccggacaacccagaagtcccctgaagattgcgactttaaggaggatgggctggtgaaaaggtgcgtgggaacagtgattctcaatcaagcccgcgattcctttgacatctcctgcgacaaagacaaccggagaagcgcgaggcttggcaatttcttcagaaaggtcaaagaaaagatcgggggcggcctgaaaaaagtgggacagaaaattaaagactttctcggtaacctggtgcctcgcaccgcgtct

SEQ ID NO: 8241 - DNA, 510 bp, synthetic construct
  misc_feature 1..510: note = source = /note="Description of Artificial Sequence: Synthetic coding sequence"
  source 1..510: mol_type = other DNA
atgaaaacccaacgcaacggtccctcactcggaaggtggtcgctggtgctgcttctgctcggtctggtgatgccgctggctattgtggcgcaggtgctgagttaccaggaagcagtgttgcgcgctatagacggaatcaaccagcgctccagcgacgccaacctgtacagactccttgacctcgaccctcggcctaccatggatggcgacccagataccccaaagcctgtgtcattcaccgttaaagaaactgtgtgcccgaggaccacgcaaaagtcgccggaagattgtgactttaaagaggacgggctcgtgaagcgctgtgtcggaaccgtcatcctcaaccaggcgcgcgactccttcgacatcagctgcgataaggacaataggcggagcgctcgcctcggaaatttctttcgcaaggtcaaagaaaagatcggaggtggcctcaagaaggtggggcagaagattaaggacttcctcggcaaccttgtccctcgcactgcatct

SEQ ID NO: 8242 - DNA, 510 bp, synthetic construct
  misc_feature 1..510: note = source = /note="Description of Artificial Sequence: Synthetic coding sequence"
  source 1..510: mol_type = other DNA
atgaaaacccagcgtaacggaccgtccctgggacggtggagccttgtcctgctgcttcttggtctggtgatgcctctggcaatcgtcgcacaagtgctgtcataccaagaggcagtgcttcgggcaatcgacggcattaaccagcgctcgtccgatgcgaacctgtaccgccttctggatcttgacccaagacctaccatggacggggatccagatactcctaagccagtgtcgtttaccgtcaaagagactgtgtgtcctagaaccactcaaaagtctcccgaagattgcgatttcaaggaagatggacttgtcaagcggtgtgtgggcactgtcattcttaatcaagccagagactcgttcgacatttcctgtgataaagataatcgaagaagcgcaagactgggtaactttttccgaaaggtcaaagaaaagatcgggggagggctcaagaaggtcgggcagaagattaaggactttcttggtaacctggtgccacgtactgcatca

SEQ ID NO: 8243 - DNA, 510 bp, synthetic construct
  misc_feature 1..510: note = source = /note="Description of Artificial Sequence: Synthetic coding sequence"
  source 1..510: mol_type = other DNA
atgaaaacgcagcggaatgggccaagccttggtagatggtccctcgtcctccttttgcttggactggtgatgccactcgctatagtggcacaagtcctgtcgtaccaggaagcagtgctccgcgcgattgatgggattaaccagcggtcgtcggacgccaacctttaccgactccttgatctggatccccgcccaaccatggatggggatcccgacacccctaaacccgtctcttttactgtgaaggagacggtgtgtccaaggactacccaaaaatcaccggaagattgtgactttaaggaagatggcctggtgaagcggtgcgtgggtaccgtgatcctgaaccaagcaagagacagcttcgatatttcatgtgacaaagacaacaggagatctgcacggcttggtaacttctttcgaaaagtgaaggaaaagataggagggggccttaagaaggtgggacagaagattaaagatttcctgggaaacctcgtgcctagaaccgcaagc

SEQ ID NO: 8244 - DNA, 510 bp, synthetic construct
  misc_feature 1..510: note = source = /note="Description of Artificial Sequence: Synthetic coding sequence"
  source 1..510: mol_type = other DNA
atgaaaactcagcggaatggcccatccctcggccgatggtcactcgtgctgcttttgctgggccttgtgatgcctcttgctatcgtcgctcaggttctttcgtaccaggaagccgtgcttagagctatcgacggcattaaccaacgtagttcagatgccaatttgtatcggctgctggatttggaccctcgccccacaatggatggtgatccagacacaccgaaaccagtgtcatttactgtgaaggaaaccgtctgtcctcgtaccacccaaaagagccctgaagactgcgatttcaaagaagatggccttgttaaacgatgtgtcggcacagtcatcctcaatcaggctagagacagctttgacatcagctgcgacaaggataaccgtcggagtgctagactcggcaacttcttccgcaaggtgaaagaaaagatcggcgggggcctcaaaaaggttggccagaagataaaggacttcttgggtaatctggtgcctcgcacagcctcc

SEQ ID NO: 8245 - DNA, 510 bp, synthetic construct
  misc_feature 1..510: note = source = /note="Description of Artificial Sequence: Synthetic coding sequence"
  source 1..510: mol_type = other DNA
atgaaaacccagaggaacggtccatccctcggacggtggtcgctcgtcctgcttctgctgggactggtcatgcccttggcaatcgtggcccaggtcctttcctaccaggaagcggttctgagagccattgacggcatcaatcagaggagctcagacgcaaatctgtaccgtctcctggatttggatccgaggccaaccatggatggcgaccccgacacgccaaagcccgttagcttcaccgtgaaagagactgtgtgcccgcggacgactcagaagtcgccagaggactgcgactttaaggaggacggcctggtgaagcggtgcgtcggtaccgtcatccttaaccaagcccgcgactctttcgacatcagctgtgacaaggataacagacggagcgccagactgggaaactttttcagaaaggttaaggaaaagataggtggagggctgaaaaaggtgggacaaaagatcaaagatttcctgggcaacctggtgccgcgcactgcctcg

SEQ ID NO: 8246 - DNA, 510 bp, synthetic construct
  misc_feature 1..510: note = source = /note="Description of Artificial Sequence: Synthetic coding sequence"
  source 1..510: mol_type = other DNA
atgaaaacacagagaaatggtccgagtctcggacggtggtcactcgttctcctgctcttgggtctagtcatgccactcgcaattgttgctcaggtgcttagttatcaagaagctgtgctgcgtgcaattgatggaatcaaccaacgttcgagcgatgctaatttgtatagacttctagatttggatcctaggccgacaatggacggagatccagataccccgaaaccagtcagttttactgttaaggagacggtgtgtccacgtacgacacaaaaatctccggaagattgcgattttaaggaagatggtttggttaaacggtgtgtgggcaccgttattttgaaccaagcgcgagattctttcgacatttcttgcgataaggacaatcgtcgctcagcgcgattaggaaatttttttaggaaggtcaaagagaaaatcggcggaggattaaagaaagtaggacaaaaaataaaagattttcttggcaatcttgtcccaaggacagcttcg

SEQ ID NO: 8247 - DNA, 510 bp, synthetic construct
  misc_feature 1..510: note = source = /note="Description of Artificial Sequence: Synthetic coding sequence"
  source 1..510: mol_type = other DNA
atgaaaacccaacgcaacggcccctcgttgggaagatggtcactggtcctcctgctgctgggtctggtcatgccactcgccattgtggcacaagtgctgtcctaccaggaggccgtgctgagggctattgatggcataaaccagcggtcctcagatgctaacctgtacagactcttggatctcgatccgcggcctactatggacggtgaccctgataccccaaagccagtgtcattcactgtcaaggaaactgtgtgccctcggaccacccaaaagtcgcctgaagattgtgacttcaaggaggacggtctggtgaaacggtgtgttggcacggtgatccttaatcaggcacgggactcctttgatatttcttgtgataaagacaaccgcagatctgcacgccttggtaactttttccggaaggtgaaggaaaagatcgggggtggattgaagaaggtgggacaaaagattaaagattttcttggcaatttggtgccgagaacggcgagc

SEQ ID NO: 8248 - DNA, 510 bp, synthetic construct
  misc_feature 1..510: note = source = /note="Description of Artificial Sequence: Synthetic coding sequence"
  source 1..510: mol_type = other DNA
atgaaaacccagcgaaatggcccttctttaggacgctggtccctcgtgttgttgcttctggggttggtcatgcctctagcaatagtagcccaggtgctctcctatcaagaggctgtactcagggcaattgacggtattaatcagagatcatcagacgctaatctctacaggctgctcgacctcgacccccggccaactatggatggagacccggatactccgaaacctgtcagtttcacagtgaaagagactgtttgccctcggactactcagaagtcacccgaggattgcgactttaaggaggatggcctggtgaaacggtgtgtcgggacagttattctgaaccaagccagggacagcttcgacattagttgcgataaggataatcggcggagtgccaggttgggtaattttttcaggaaagtgaaggaaaaaatcggtggaggtctcaagaaggttggccagaagatcaaggacttcctaggcaacctcgtgcccagaacagccagt

SEQ ID NO: 8249 - DNA, 510 bp, synthetic construct
  misc_feature 1..510: note = source = /note="Description of Artificial Sequence: Synthetic coding sequence"
  source 1..510: mol_type = other DNA
atgaaaactcagcggaatggaccaagcctcggtcgttggtccctggtgctccttctcctcgggctggtcatgcctctggcaattgttgcccaagtcttgtcataccaggaagccgtgctgcgggctattgatggcatcaatcaaagatcttctgatgcgaatctgtaccggctgctcgatctcgaccccaggcccaccatggatggtgatcctgatacgcctaagccggtgagcttcaccgtcaaagaaaccgtatgccccagaaccactcagaagtcaccagaggactgtgacttcaaggaggatggtctggtcaagcgatgcgtgggaactgtgatcctgaaccaggcccgcgactccttcgacatcagctgtgacaaggacaaccggaggtcagcacgtctggggaacttttttcggaaagtgaaggaaaagattggaggaggactcaagaaagtgggccaaaagataaaggattttctgggaaacctggtgcctcgaactgcaagc

SEQ ID NO: 8250 - DNA, 510 bp, synthetic construct
  misc_feature 1..510: note = source = /note="Description of Artificial Sequence: Synthetic coding sequence"
  source 1..510: mol_type = other DNA
atgaaaactcaaagaaatggcccatcactgggaagatggagcctggtcctgcttctgctcggcctggtgatgccccttgcaattgtggcccaagttctgagctaccaggaggctgtgctgagagcgatcgacggaatcaaccaacgcagctcagacgcaaatttgtaccgcttgctggacctggaccctcggcctaccatggacggggatccagatacgccgaagccagtgtctttcaccgtcaaagaaactgtgtgtccgagaactacccagaagagcccggaggactgcgatttcaaggaggacggtttggtcaagcgctgcgtcggaacggtgatcttgaatcaggcacgggattcgttcgatattagctgcgacaaggataaccggcgctcggcgcgcctgggcaatttctttcgcaaggttaaggagaaaataggcggaggactcaagaaggtgggccagaagatcaaggacttcctcggaaaccttgtgccgcggaccgcatcg

SEQ ID NO: 8251 - DNA, 510 bp, synthetic construct
  misc_feature 1..510: note = source = /note="Description of Artificial Sequence: Synthetic coding sequence"
  source 1..510: mol_type = other DNA
atgaaaacccaaaggaacggcccgtccctgggccgctggtccctggtgctcctgctcctgggactcgtcatgccgctggcaattgttgcccaggtgctgtcctaccaagaggcggtgctccgcgccattgatggcattaaccaacggtcgtccgatgccaacctgtaccggttgctcgacctggacccacgccctactatggacggcgaccccgatactcccaagccagtctcctttacggtgaaggagactgtgtgcccccgcaccactcagaaatcgccggaggactgcgacttcaaggaagatggcctggtcaaaagatgtgtcggtaccgttatcctgaaccaagccagggattcgtttgacatctcgtgcgataaggacaaccgcaggtcagctcgccttgggaatttcttccggaaggtgaaagagaaaatcggaggaggcttgaaaaaggtgggacagaagatcaaggacttcctgggaaacctggtcccgaggactgcttca

SEQ ID NO: 8252 - DNA, 510 bp, synthetic construct
  misc_feature 1..510: note = source = /note="Description of Artificial Sequence: Synthetic coding sequence"
  source 1..510: mol_type = other DNA
atgaaaactcaacgtaacgggccttcgctgggacgctggtccctcgtgttgcttcttcttggccttgtgatgccgcttgccattgtcgcacaagtgctctcctaccaggaagcagtcctgcgcgcgatcgacggtatcaaccagcgctcaagcgatgctaacctgtacagactcctcgatcttgacccccggccaacgatggatggagatccggacactccaaagcctgtctcgtttaccgtgaaggaaactgtctgccctaggaccacccaaaagtcccccgaggattgtgatttcaaggaagatggcctggtgaagcggtgtgtcggaactgtgatattgaaccaggcaagggatagcttcgatattagctgtgataaagataatcgccgttctgcgcgtctggggaatttctttagaaaagtgaaggaaaagatcggcgggggtctgaaaaaggtcggacagaagattaaagattttctgggaaacctcgtgccgagaacggcaagc

SEQ ID NO: 8253 - DNA, 510 bp, synthetic construct
  misc_feature 1..510: note = source = /note="Description of Artificial Sequence: Synthetic coding sequence"
  source 1..510: mol_type = other DNA
atgaagacgcagcggaatgggccatcactggggcgttggtctctcgtactcctgctgcttggactggtaatgccgcttgcaattgttgcacaagtgcttagctaccaggaagcagtgcttcgggctattgatggcataaatcagaggtcctccgacgcaaatttatacaggcttcttgacctcgaccctcggccaaccatggacggcgatccagacactcccaaacctgtgtccttcaccgtgaaggaaaccgtgtgccctagaacgacccagaaaagtccagaagactgcgactttaaggaggacgggctggtgaagcgctgtgtcgggactgtgatccttaaccaggcccgggactccttcgacatttcttgtgacaaagacaataggaggagcgctcgattgggcaacttcttcagaaaggttaaagagaagattggtggcggcctcaaaaaggtcggccagaagatcaaggacttcctgggcaatctggtgcccaggaccgcgtct

SEQ ID NO: 8254 - DNA, 510 bp, synthetic construct
  misc_feature 1..510: note = source = /note="Description of Artificial Sequence: Synthetic coding sequence"
  source 1..510: mol_type = other DNA
atgaaaactcagagaaacggaccgtccctcgggaggtggagcctcgtgttgctcctgttggggcttgtgatgcctctcgctatcgtggcccaggtgctttcctatcaggaagccgtgcttcgcgccatcgacggaatcaaccagcggagcagcgacgcgaacttataccgtttattagatctagatccgcgacctacgatggatggcgaccccgatacaccaaagccagtaagttttacggtcaaagaaactgtgtgcccaaggaccactcagaaatcccctgaggattgcgatttcaaggaagacgggctggtgaagcgatgtgtggggactgtcatactgaaccaggcccgtgactcattcgacatttcctgcgacaaggataatcgccgatcagcaaggcttggtaacttcttccggaaagtaaaagaaaagatcggcggtggtctgaaaaaggtggggcagaagatcaaagactttctgggcaacctagtacctcgcacggctagt

SEQ ID NO: 8255 - DNA, 510 bp, synthetic construct
  misc_feature 1..510: note = source = /note="Description of Artificial Sequence: Synthetic coding sequence"
  source 1..510: mol_type = other DNA
atgaagacacagcgcaatggtccctccttgggtcggtggtccctcgtattgcttctcctgggactcgtgatgccgctggccattgtggcccaggtgttgagctaccaggaggcggtgctgcgggccatcgatgggataaatcaaaggtcctctgatgcaaatctttatagattgctcgatttggaccctcgcccaaccatggatggagatcctgataccccgaagccagtctcctttacagtaaaagagactgtttgccccagaactacacagaagtctcctgaagactgcgatttcaaggaggatggccttgtgaagaggtgcgtcggaaccgtaatcctgaaccaggctcgcgacagctttgatatttcctgcgataaggataacagaagatcagctagactcggtaattttttccggaaggtcaaggaaaaaatcggaggtggactcaagaaagtgggccaaaagatcaaagactttctgggcaacctggtacctaggaccgcaagc

SEQ ID NO: 8256 - DNA, 510 bp, synthetic construct
  misc_feature 1..510: note = source = /note="Description of Artificial Sequence: Synthetic coding sequence"
  source 1..510: mol_type = other DNA
atgaagacccaacgaaatggcccgtcacttggtcgatggtccctcgtgttgctcctcctaggactggttatgccattggcaattgtggcccaggtcttgtcttatcaagaagccgttctaagggctattgacggcattaaccagcgctccagcgacgctaatttgtataggctcctcgatctggatccgcggccaaccatggacggcgatcctgatacaccaaagcctgttagctttacggtgaaagagaccgtgtgtccacgtaccacacagaaaagtcctgaggattgtgattttaaggaggacgggctggtaaagaggtgtgttggaacagtgattctgaatcaggctcgggattcttttgacatctcttgtgacaaagacaataggcgatccgctcggctgggtaattttttccgcaaggtgaaggagaaaataggcggcggccttaaaaaagttggacagaaaataaaggactttctcggcaacttggtgcctcgaaccgcatca

SEQ ID NO: 8257 - DNA, 510 bp, synthetic construct
  misc_feature 1..510: note = source = /note="Description of Artificial Sequence: Synthetic coding sequence"
  source 1..510: mol_type = other DNA
atgaaaacacagcggaacggaccttctctggggcggtggtctctcgtactgctgctattgggactggtgatgcccctggccatcgtagcccaggtgctctcctatcaggaagctgtgctgagggctattgatgggattaatcagcgctcttcagatgctaacctgtataggttactcgacttagatccacggcccacaatggatggggatccagatactcccaaacctgtgtctttcacagtaaaagaaacagtgtgtcctcgaacaacacagaaatctcccgaagattgcgattttaaagaggatgggctagtaaaaaggtgtgtcgggactgtaatcttaaatcaggctcgagattccttcgatatatcttgtgataaagataaccgaagatcagctcgactcggaaacttttttcggaaggtaaaagaaaaaatcgggggaggacttaagaaagtgggacagaaaatcaaggattttcttgggaatctcgtcccaaggacagcctct

SEQ ID NO: 8258 - DNA, 510 bp, synthetic construct
  misc_feature 1..510: note = source = /note="Description of Artificial Sequence: Synthetic coding sequence"
  source 1..510: mol_type = other DNA
atgaaaacccagcgcaatggcccctctctgggccggtggtcacttgttctcctgctgctcggcctggtgatgccgttggcgatcgtggcacaagtgctgagctaccaggaagccgtgctgcgggcaatcgacggaatcaatcagaggagcagcgacgcaaacctttaccgcctgctggacctggatcctagaccgaccatggatggcgacccggacactccgaagccagtgtcgtttaccgtgaaggaaactgtgtgccctcgcactactcaaaagtcccccgaggactgcgacttcaaagaggacgggctcgtgaagcgctgcgtcgggactgtgatcctcaaccaggcccgcgattccttcgacatctcgtgtgacaaggacaatcgccgctcagcgagactgggaaacttttttcgcaaggtcaaagaaaagattggtgggggtcttaagaaggtggggcagaagatcaaggatttcctgggaaacctcgtgccgcggaccgcttct

SEQ ID NO: 8259 - DNA, 510 bp, synthetic construct
  misc_feature 1..510: note = source = /note="Description of Artificial Sequence: Synthetic coding sequence"
  source 1..510: mol_type = other DNA
atgaaaacccagcggaacggaccgtcactgggacgctggtcactggtgttgttgttgctgggcttggtgatgccgctcgccatcgtggctcaggtgctctcgtaccaagaagcagtcctcagagccattgatggaattaaccaaaggagctcagacgctaacctgtaccgactcctggacctcgacccgcgtccaactatggatggggacccggacactccaaagcccgtcagcttcactgtgaaggaaaccgtgtgcccgcgcaccactcagaaatcgccggaggattgcgacttcaaggaagatggcctggtgaagcgttgtgtcggcaccgttatcctgaaccaagcacgcgactcctttgatatctcctgcgataaggataatagacggtctgcccggcttggaaatttcttcagaaaggtcaaggaaaagatcggtggcgggctgaaaaaagtgggtcagaagatcaaggattttctgggaaacctcgtgccccggaccgcgagc

SEQ ID NO: 8260 - DNA, 510 bp, synthetic construct
  misc_feature 1..510: note = source = /note="Description of Artificial Sequence: Synthetic coding sequence"
  source 1..510: mol_type = other DNA
atgaaaacccaacgtaatggaccatcattgggtcgctggagcctcgttcttttgttattgggattggttatgccattggccattgttgctcaagttctatcatatcaggaagccgtccttagagctatcgacggaattaaccaaagatcctccgatgctaatctctataggcttctcgatcttgatcctcgtccaactatggacggtgaccctgatacccccaaacctgtgtccttcactgttaaggaaaccgtatgtccccgtaccactcaaaaatctcccgaagattgcgattttaaggaggacggacttgtgaagcgatgcgttggaactgttattctcaatcaagctagggacagctttgatatttcttgtgataaagataataggaggtcagctagacttggaaacttttttcgcaaggtgaaggaaaaaattggtggtggtctgaagaaggtcgggcaaaaaattaaggactttctgggaaacttggtgccgaggacagccagc

SEQ ID NO: 8261 - DNA, 510 bp, synthetic construct; identical to SEQ ID NO: 8248
  misc_feature 1..510: note = source = /note="Description of Artificial Sequence: Synthetic coding sequence"
  source 1..510: mol_type = other DNA

SEQ ID NO: 8262 - DNA, 510 bp, synthetic construct
  misc_feature 1..510: note = source = /note="Description of Artificial Sequence: Synthetic coding sequence"
  source 1..510: mol_type = other DNA
atgaaaacccaacgcaatggaccgagtctcggcaggtggagcctggtgcttcttctgctggggctggtgatgccactggcgatcgtagcacaggtgttgtcctaccaggaggccgtccttagagcaattgatggaataaaccagcggtcctctgatgcaaacctctacagactgctcgatctcgatccaagacctactatggatggagatcccgataccccaaagccagtttcgttcaccgtgaaagagactgtctgccctcgtacgacgcaaaagtctccggaagattgtgacttcaaagaagatggtcttgtgaaaagatgtgtggggactgttatcctgaaccaggctcgtgattcctttgacatttcatgtgacaaggataacagacggtcggcacgacttggtaacttttttcgcaaagtgaaggaaaagatcggcggtggacttaagaaggtcggacaaaagatcaaggatttcctgggaaatcttgttcccagaactgcgagc

SEQ ID NO: 8263 - DNA, 510 bp, synthetic construct
  misc_feature 1..510: note = source = /note="Description of Artificial Sequence: Synthetic coding sequence"
  source 1..510: mol_type = other DNA
atgaagacacagcgcaatggtccttcactcggtcgttggtctttggttctcttgctgctgggtctagtgatgcccttggcaatcgtcgctcaggttctgtcataccaagaggccgtcttgagggccatcgacggtataaatcagcgcagctccgatgctaatttgtataggttactagacctggatccccggccgaccatggacggcgacccggatacaccaaaacctgtgtcgttcacagtgaaagaaaccgtctgtccccgaaccacccagaagagcccagaagattgcgactttaaggaggatggcctcgtcaaaagatgcgttggcaccgtgattctgaaccaggcgcgggactccttcgatatctcgtgtgataaggacaatcggaggtcggcaaggcttggaaacttctttcggaaagtgaaagaaaaaatcggcgggggtctcaagaaagtgggccaaaagataaaagacttccttggaaacctggttcctcgaacagcttcc

SEQ ID NO: 8264 - DNA, 510 bp, synthetic construct
  misc_feature 1..510: note = source = /note="Description of Artificial Sequence: Synthetic coding sequence"
  source 1..510: mol_type = other DNA
atgaaaactcagagaaacggtccaagcttggggcgctggtctttggtcctgctattgctgggcctcgtgatgccattggctattgttgcacaggtgttgtcttatcaggaggccgtgttacgcgcaatcgacggaatcaatcagcgctccagtgacgcgaacctgtacaggctgctcgatctggacccacgccctacaatggacggagatcctgacacgcctaagcccgtgtctttcacagtgaaggaaactgtctgtccgaggactacccaaaaatcacccgaggactgcgacttcaaagaggacggccttgtcaagagatgtgtggggactgtcatcctgaaccaggctagggactcattcgatattagctgcgacaaagacaacagaaggagcgcacggctgggtaactttttccgaaaggtcaaggagaagattggcggaggtcttaagaaggtgggacaaaaaattaaggatttcctggggaacctagtgccgcgcacagcctcg

SEQ ID NO: 8265 - DNA, 510 bp, synthetic construct
  misc_feature 1..510: note = source = /note="Description of Artificial Sequence: Synthetic coding sequence"
  source 1..510: mol_type = other DNA
atgaaaacccaaagaaacggaccctctcttggacgctggtccctcgtgctgcttctccttgggcttgtgatgcccctcgccatagtggcgcaagtgctctcctaccaggaggcagtcctccgcgctatcgatggaatcaatcagcgatcgtcggacgcaaacctctaccgcctgctggaccttgatcctagacctactatggacggagatcctgataccccgaaacccgtttcgttcaccgtgaaggaaactgtctgcccacggactacgcagaaatcgcctgaggattgtgacttcaaagaagatggtctggtgaaacgctgtgtgggaacggtgattcttaatcaagccagggactctttcgacatttcatgtgataaggacaatcggagatccgcaagactggggaacttttttcggaaggttaaagaaaagataggaggcggtctgaagaaggtgggccaaaagataaaggattttctcggtaacctcgtccctagaactgcgagc

SEQ ID NO: 8266 - DNA, 510 bp, synthetic construct
  misc_feature 1..510: note = source = /note="Description of Artificial Sequence: Synthetic coding sequence"
  source 1..510: mol_type = other DNA
atgaaaacacaacgcaacggtccctcattggggcggtggtcccttgttctgctgctcctgggcttagtgatgccgctagcgatcgtggcgcaggtcctgtcataccaggaagcggtgctgagggccatcgacggcatcaaccagcggtccagtgatgccaacctgtataggcttttggatctggacccgcggccaactatggatggagaccccgataccccaaaaccagtgtccttcaccgtaaaggagactgtgtgccctcggacaactcaaaagtcgccagaagactgcgactttaaagaagacggccttgttaagcggtgtgtcgggacagtcatactcaaccaagctcgagatagcttcgacatcagctgcgacaaggacaataggcgatcggcccgcttggggaacttctttcggaaggtgaaggagaagatcggcggaggactgaagaaagtgggacagaagattaaggatttccttggtaacctggtgccacggacagcctct

SEQ ID NO: 8267 - DNA, 510 bp, synthetic construct
  misc_feature 1..510: note = source = /note="Description of Artificial Sequence: Synthetic coding sequence"
  source 1..510: mol_type = other DNA
atgaaaacccagcggaatgggccgtcgctgggacgctggtcgctggtgctcctcctcctgggcctcgttatgccactcgcgatcgtggctcaggtgttgtcgtaccaagaagcggtcctcagggcgatcgacggcatcaaccaacgttcgtccgacgccaatttgtaccggctgcttgacctggatccccgaccaaccatggacggcgacccggatactccgaagccagtctcgtttactgtgaaagagactgtgtgtccacgcaccacccaaaagtccccagaggactgcgactttaaggaggacgggctggtgaagagatgcgtgggaaccgtgattctgaaccaggccagggattccttcgatatctcctgcgacaaggataaccggcggtcagcgaggctcggaaactttttcagaaaagttaaagagaaaatcggaggtggactgaagaaagtgggtcaaaagatcaaggatttcctggggaatctggtgccgagaactgcctcg

SEQ ID NO: 8268 - DNA, 510 bp, synthetic construct
  misc_feature 1..510: note = source = /note="Description of Artificial Sequence: Synthetic coding sequence"
  source 1..510: mol_type = other DNA
atgaagacgcaacgaaacggacctagcctgggcaggtggagcctggtactacttctcttgggactggttatgccgctggccatcgtagcacaggttctgagttaccaggaggctgttctgagggccatcgatggcatcaatcagcgcagcagtgatgctaacctctaccgtctgctggacctagacccgcggccgacgatggacggcgatccggacaccccaaagccggtgtcattcaccgtgaaggagacagtctgcccccgcaccactcagaaatcccccgaggactgtgacttcaaagaggacggccttgtgaagcgctgcgtgggtacagtgatcttgaaccaggcccgggattcctttgatatcagctgcgacaaggacaatcgccggagcgctcgcttaggaaacttttttaggaaggttaaggagaagataggtggcggactcaagaaggttggacagaaaataaaggatttcttgggaaatctcgtaccccgcacagctagt

SEQ ID NO: 8269 - DNA, 510 bp, synthetic construct
  misc_feature 1..510: note = source = /note="Description of Artificial Sequence: Synthetic coding sequence"
  source 1..510: mol_type = other DNA
atgaagactcagaggaacggtcccagtctggggagatggtcacttgtgcttctcctcctaggactggtgatgcctctggcaatcgtcgcacaggtgttgtcctatcaagaggccgttctccgagcgatcgacggcattaatcagcgctcgtcagacgctaacctctaccggctgctggatttggatcctcgcccgacaatggacggtgaccctgatacccctaagcctgtgagcttcacggtgaaagaaacggtttgcccacggacaactcagaagtcgccggaagattgcgatttcaaagaggacggcctggttaaacgctgtgtgggaactgtcattctgaaccaggccagggatagctttgacattagttgcgataaggataaccgcaggtctgcacggctgggaaatttctttcgtaaagtcaaggagaaaatcggtggaggtctcaaaaaggtcggccagaagataaaagatttcctcgggaacctggtcccccgaaccgcttcc

SEQ ID NO: 8270 - DNA, 510 bp, synthetic construct
  misc_feature 1..510: note = source = /note="Description of Artificial Sequence: Synthetic coding sequence"
  source 1..510: mol_type = other DNA
atgaagacccagaggaatggaccttcattgggccggtggagtctggtgctgttgcttctgggcctagtcatgcctctagccatcgtggctcaggtgctgtcctatcaggaggctgtcctgcgggcaatagatggcattaaccagagatcaagtgacgcaaatctgtaccgtctgctggacctagaccctaggcctactatggacggcgaccccgacactccgaaaccagtatcctttacagtaaaggagacagtgtgtcccaggacaactcaaaaatcccctgaagattgcgattttaaggaggatggtttagtgaaaaggtgcgtcgggaccgtgatcctgaatcaggcacgggacagttttgacatctcctgtgataaggacaaccgtaggtccgcacggttgggcaatttcttcagaaaggtgaaggagaagattggcggggggcttaagaaggtggggcagaagatcaaggatttcctcggaaacctggtgcctaggacagcgtcc

SEQ ID NO: 8271 - DNA, 510 bp, synthetic construct
  misc_feature 1..510: note = source = /note="Description of Artificial Sequence: Synthetic coding sequence"
  source 1..510: mol_type = other DNA
atgaaaacccagcgcaacggaccgagcctgggacgatggtcgcttgtgcttctcctcctgggacttgtgatgccactggctatcgtggcacaagttcttagctaccaagaagcagtcctccgcgcaattgatggaatcaaccagagatcgagtgacgcgaacctgtacagactgcttgatctggatccgcgtcctaccatggacggtgaccctgatactcccaaaccagtctcctttacggtcaaggagactgtatgccccagaaccacccaaaagtcacctgaggactgtgatttcaaggaagatggtttggtgaagagatgcgtgggtactgtgatacttaaccaggcacgcgactccttcgatatttcctgtgataaagacaatcgacggtccgcccgcctcggcaactttttccggaaagtgaaagaaaagattgggggtggcttgaagaaagtggggcaaaagatcaaggattttctgggcaacctggtgccacgtaccgcctca

SEQ ID NO: 8272 - DNA, 510 bp, synthetic construct
  misc_feature 1..510: note = source = /note="Description of Artificial Sequence: Synthetic coding sequence"
  source 1..510: mol_type = other DNA
atgaaaacgcagaggaacggcccatcactggggcgttggtctctggtccttctgctgcttggactcgtcatgccccttgccatcgtggcccaagtgctgtcctaccaggaggccgtgctgagggccatcgatggcatcaatcagaggagttccgatgccaacctatatcgcctgctggacttagacccgcggcccactatggatggagaccctgacacgccaaaacccgtcagttttactgtaaaggaaaccgtgtgtccgaggactacgcagaagtccccagaggattgcgatttcaaggaagatggtctggtgaaacgttgcgttggcactgtgattctgaatcaggcaagggacagctttgatatcagttgcgacaaggataaccgtcggtccgcccgcctgggaaacttttttaggaaggtcaaggagaagattggcggtggtctgaaaaaggtgggccagaagatcaaggacttcctcggcaacctggtccctaggacagccagc

SEQ ID NO: 8273 - DNA, 510 bp, synthetic construct
  misc_feature 1..510: note = source = /note="Description of Artificial Sequence: Synthetic coding sequence"
  source 1..510: mol_type = other DNA
atgaagacccaaaggaatgggccttccctcggccgatggtctctggtgctactgttactggggctggtgatgcccttggcgattgtggcccaggtgctctcttaccaggaagcagtgttaagggccattgacggtattaatcaacgttctagtgacgccaatctgtatcgattgcttgatcttgatcctcggccgaccatggatggcgacccagacacgcctaagcccgtgagtttcacagttaaggaaacagtttgtcccagaactacccagaagagccctgaagattgcgacttcaaagaagacgggttggtgaagaggtgcgtgggcacagtcatactaaatcaggccagggattcttttgatataagctgcgacaaggataaccggaggtccgcccgcctgggtaactttttccggaaagtaaaggaaaaaatcggcggcggactgaagaaggtaggtcaaaagatcaaggactttctgggaaatcttgttccaaggacggcctca

SEQ ID NO: 8274 - DNA, 510 bp, synthetic construct
  misc_feature 1..510: note = source = /note="Description of Artificial Sequence: Synthetic coding sequence"
  source 1..510: mol_type = other DNA
atgaaaactcagaggaatggcccatctcttggtaggtggagtctagtgctgctccttctggggctggtgatgccactggcaatcgtggcccaggtgctgtcctaccaggaggctgtattgcgtgccattgatggcataaaccagcggtcttccgatgccaacctatataggctcctcgatcttgaccctagacccacaatggatggggaccccgatactccaaagcccgtttcatttaccgtcaaggaaactgtgtgtccaagaacaacgcagaaatccccagaagactgcgatttcaaggaagacggcttggtgaaaagatgcgttggtacagtgatattgaatcaagcccgcgactcctttgacattagctgcgataaagataatcggaggtcagcgagactgggcaacttcttccgcaaagtcaaagagaagattggaggcggcctcaagaaagtgggccagaaaattaaggacttcctggggaacttagtacctcgcacagcaagt

SEQ ID NO: 8275 - DNA, 510 bp, synthetic construct
  misc_feature 1..510: note = source = /note="Description of Artificial Sequence: Synthetic coding sequence"
  source 1..510: mol_type = other DNA
atgaaaacgcagagaaatggaccatcgctcggacggtggtcgttggtcttgctcctcctcggactggtcatgcccctcgccattgtggcccaggtgctcagctaccaggaagcggtgctgcgcgctatcgacggaattaaccaaagatcttccgatgccaatctgtaccggctgctggaccttgatcctcgtccgactatggatggggacccggatactccaaagcctgtgtccttcaccgtgaaggaaactgtctgcccacgaaccacccaaaaatcaccggaggactgcgactttaaggaagatggactggtgaaacgctgcgtggggaccgttatcctgaatcaggcgcgggactccttcgacatctcatgtgataaggacaacagacgctcggcacgccttggaaactttttccggaaggtgaaggagaaaatcggtggcggtctgaagaaggtcggccaaaagatcaaggacttcctgggcaacctggtgccgaggactgcaagc

SEQ ID NO: 8276 - DNA, 510 bp, synthetic construct
  misc_feature 1..510: note = source = /note="Description of Artificial Sequence: Synthetic coding sequence"
  source 1..510: mol_type = other DNA
atgaagacacagagaaacggccctagcctgggtaggtggagtctggtgctgctgctcctgggattggtcatgccattggcaatcgttgcccaggtgctcagttatcaggaggctgttctcagagctatcgacggtatcaatcagaggtcaagtgatgcaaacctttataggttgctggatcttgacccgagacctactatggacggagacccggacacccccaaacccgtgagcttcaccgtgaaggagaccgtctgcccgaggacaacccaaaaatctcctgaggattgtgattttaaagaggacggcctcgtcaagaggtgcgtaggcacggtcatcctgaatcaggcccgggatagttttgatatcagttgtgataaggacaaccgccggagcgcaaggttgggtaatttttttcgaaaggtaaaggagaagattgggggtggactgaagaaggtgggacagaagatcaaggacttcctgggcaatctggtgccccggaccgctagc

SEQ ID NO: 8277 - DNA, 510 bp, synthetic construct
  misc_feature 1..510: note = source = /note="Description of Artificial Sequence: Synthetic coding sequence"
  source 1..510: mol_type = other DNA
atgaagacacagagaaatggcccctctctggggaggtggtcattggtgctgcttctcctgggactggtcatgccacttgccatcgtggcacaggtactgtcctaccaggaggcagtgctccgggctattgacggaattaatcagcggagctccgatgcaaacctttatcgcttactggatttggatccacgacctacgatggatggagaccccgatacaccaaaacctgtctcctttacagtgaaggagacagtctgcccccggaccacccagaagtctcccgaggactgtgatttcaaggaggacggcctggtgaaacggtgcgttggaactgtcatcctgaaccaggctcgcgactcttttgacatctcttgcgacaaggacaaccgtcggtccgctcgcctagggaacttttttcgaaaggtgaaagaaaagattggcggcgggcttaaaaaagtgggtcaaaaaatcaaggacttccttggaaatttagtaccccggacagccagt

SEQ ID NO: 8278 - DNA, 510 bp, synthetic construct
  misc_feature 1..510: note = source = /note="Description of Artificial Sequence: Synthetic coding sequence"
  source 1..510: mol_type = other DNA
atgaaaactcaaagaaacggacctagcttgggtagatggtcgctggtgctcctgcttttgggactcgtgatgccgctggcgattgtggcacaggttctttcctaccaagaagcagtgcttcgtgctatcgacggaattaaccagcgatcatccgacgcaaatctgtaccggctcttggatctggaccccaggccaaccatggacggcgacccagacacgccgaaacctgtttcgtttacggtgaaggagacggtctgccctcgaactacccagaagtctcccgaagattgcgatttcaaggaggatgggttggttaagcgatgtgtcggaaccgtgattctgaaccaggcaagggattcgtttgatatatcctgtgataaagacaatcggaggagcgcgagactgggtaactttttccggaaggtgaaagaaaagattggaggagggcttaagaaggtcggacaaaagatcaaggattttctcggcaacctggtacctagaactgcgtcc

SEQ ID NO: 8279 - DNA, 510 bp, synthetic construct
  misc_feature 1..510: note = source = /note="Description of Artificial Sequence: Synthetic coding sequence"
  source 1..510: mol_type = other DNA
atgaaaacgcaacgcaatggtccttctctgggccggtggtcgctggtgctcttgctgctgggcctcgtgatgcccctggccattgtggcacaagtgctctcgtaccaggaggcagtgctccgggcaatcgatggcatcaaccagcgatcgtcagatgcaaatctgtaccgccttctcgatcttgatcctcgtcctaccatggatggtgacccagacactcccaaaccggtgtcgtttaccgtgaaggaaaccgtgtgccctcggaccacgcagaagtcgcccgaagattgcgacttcaaagaggatggattggtcaaacggtgcgtggggacggtgattctgaaccaagcgagagattcgtttgacatttcctgtgacaaggataaccggagatcagccaggcttggcaatttctttagaaaggtgaaggaaaagatcggtggtggcctcaagaaagtgggacagaagattaaagatttccttgggaacctggttcctagaactgcaagc

SEQ ID NO: 8280 - DNA, 510 bp, synthetic construct
  misc_feature 1..510: note = source = /note="Description of Artificial Sequence: Synthetic coding sequence"
  source 1..510: mol_type = other DNA
atgaaaacccagcgcaatggaccttccctgggtaggtggagcctggtgttgctcctcttggggcttgtcatgccacttgcaatcgtcgcgcaagtgctctcgtaccaagaagcagtgctgcgggccattgatggaattaaccagaggtcctcggacgcaaatctttaccgacttctcgatcttgaccctcgccctaccatggatggagatccagatacccctaaaccagtgtcgtttaccgtgaaggagactgtgtgtcctagaacgactcaaaaatcccctgaggactgcgactttaaagaggacggtttggtcaaacgctgtgtgggaactgtgattcttaaccaggcacgggattcttttgatatatcatgtgacaaggataacaggcggagcgcgcgcctgggcaacttctttaggaaggtgaaggaaaagattggtgggggactgaagaaagtgggtcagaaaatcaaggacttcctcggcaacctggtgcctagaactgcgtca

SEQ ID NO: 8281 - DNA, 510 bp, synthetic construct
  misc_feature 1..510: note = source = /note="Description of Artificial Sequence: Synthetic coding sequence"
  source 1..510: mol_type = other DNA
atgaaaacgcagcgcaatggaccctcccttggtcgctggtcccttgtgctgctgctgcttggacttgtgatgccactggccatcgtggcacaggtgctctcctaccaagaggccgtgcttcgcgcgattgatggcataaaccaaagatcctcggatgcaaacctgtacagactccttgatctggaccctcggcccacgatggatggagatcctgacacccctaagcctgtctcattcaccgtcaaggagactgtgtgtccgcgcactactcaaaagagccccgaagattgtgactttaaagaagatggtctggtcaagagatgcgtcgggacggtgattctcaatcaagcaagagattcgtttgatatttcatgtgacaaggacaataggagatcggcacggctgggtaactttttccgaaaggttaaagagaaaatcggaggtggacttaagaaggtggggcagaagataaaagacttcttggggaatcttgttccgagaaccgcatcg

SEQ ID NO: 8282 - DNA, 510 bp, synthetic construct
  misc_feature 1..510: note = source = /note="Description of Artificial Sequence: Synthetic coding sequence"
  source 1..510: mol_type = other DNA
atgaaaactcagagaaacgggccgagcctgggcaggtggagcctggtgcttcttcttctgggcctcgtgatgcctcttgctattgtggcccaagtcctgtcataccaggaagccgtgctcagagctatcgacggaataaaccagcggtcgtcggacgcgaacctctacagactgctggacttggacccacgcccaaccatggacggtgatcccgacaccccgaagccggtgagcttcactgtgaaggaaactgtctgtccacgcactacccagaagtcaccggaggattgcgatttcaaggaggacgggctcgtgaagcgctgtgtcggcaccgtgattctgaaccaggctcgcgacagctttgatatctcgtgcgacaaagacaaccgacgctcggccagactgggcaacttcttccgcaaagtcaaagaaaagatcggagggggcctgaagaaagtgggacagaagattaaggactttctgggaaatttggtgcctcgcactgcctcc

SEQ ID NO: 8283 - DNA, 510 bp, synthetic construct
  misc_feature 1..510: note = source = /note="Description of Artificial Sequence: Synthetic coding sequence"
  source 1..510: mol_type = other DNA
atgaaaacacaacgtaacggaccaagcctgggtcgttggagcctcgttttgctgctgctgggccttgttatgcctctggccattgtggcccaggtgctgtcataccaagaggcagtattgagagcgatcgacggtatcaaccaacgcagcagcgacgccaacctgtaccgcttgctggatctggacccacgcccaacgatggatggagacccggacaccccaaagccggtgtcgttcaccgtcaaagagaccgtgtgccctaggaccacccagaagagcccagaagactgcgattttaaagaggacggtctggtgaagcggtgcgtgggcaccgtcattctgaatcaggcccgtgacagttttgatattagctgcgacaaggacaaccggcgctctgcgcgcctgggcaactttttccgcaaagtcaaggaaaagatcggcggtgggctgaagaaagtgggtcagaagattaaagactttctgggtaacttggtccctcgcacagcgtca

SEQ ID NO: 8284 - DNA, 510 bp, synthetic construct
  misc_feature 1..510: note = source = /note="Description of Artificial Sequence: Synthetic coding sequence"
  source 1..510: mol_type = other DNA
atgaagactcagcgcaatgggccctctctggggcgctggagtctggtactgttgttgttgggtctggtgatgcccctggccatcgtcgctcaggtgctctcctaccaggaggccgtgttaagagcgatcgatgggatcaaccagcgaagcagtgatgcaaacctgtaccgccttcttgacctggatcccaggccaacgatggacggcgatccggacacaccaaagccagtctcattcactgtgaaagaaactgtctgccctaggacgacccagaaaagtcctgaagactgcgattttaaggaggacggtctggtcaagcggtgtgtgggaactgtgatcctgaaccaggctcgggattctttcgacatctcttgcgataaagacaacaggagaagtgcccggctgggcaacttttttcgcaaagttaaggagaagatcggcggaggcctcaagaaggtgggtcagaagatcaaagatttcttgggcaatctggtgcccagaacagccagc

SEQ ID NO: 8285 - DNA, 510 bp, synthetic construct
  misc_feature 1..510: note = source = /note="Description of Artificial Sequence: Synthetic coding sequence"
  source 1..510: mol_type = other DNA
atgaagactcagaggaacggtccttcactgggacgatggagcttggtcctacttctgctgggactcgtcatgcctttggcgatagtcgcacaggtcctttcgtatcaagaagctgttttgagagcgattgatgggatcaaccagagaagctctgatgcgaatctttaccgactcttggatcttgatccacgccctactatggatggagatcccgacactcctaaacctgtgtccttcaccgtcaaggaaactgtatgccctcgaactacccaaaagtcaccggaggactgtgacttcaaagaggatggcctcgtcaaaagatgcgtcggtactgtaattctcaatcaggctagggactcgtttgatattagttgcgacaaggataatcgccgctcggcccggctgggtaattttttcaggaaagtaaaggagaaaatcggaggtggtttgaagaaggtcgggcagaaaattaaggacttcctagggaacctagtaccgcggacggctagt

SEQ ID NO: 8286 - DNA, 510 bp, synthetic construct
  misc_feature 1..510: note = source = /note="Description of Artificial Sequence: Synthetic coding sequence"
  source 1..510: mol_type = other DNA
atgaagacccaacgaaatgggcctagtctgggccgttggagcctggtgctgcttctactgggtctagttatgccactggctattgtggctcaggtcctgagttatcaggaagcggtgctccgtgccattgatggcattaaccagcgcagctccgacgccaatctgtacaggttgttagacttggatcccagaccaacgatggatggcgaccccgacacgcccaagcctgtgtcctttaccgtaaaagagaccgtatgtccccgcactacccagaagagtcccgaagactgcgattttaaggaggacggcctggttaagagatgtgtagggacggtgattttgaatcaagcacgcgattctttcgacatatcttgtgataaggacaacagaaggtcggcccgactcgggaactttttcaggaaggtaaaggaaaaaatcgggggcggcttaaaaaaagtgggacagaaaattaaagattttcttggcaatctggttccacgtacagcttcc

SEQ ID NO: 8287 - DNA, 510 bp, synthetic construct
  misc_feature 1..510: note = source = /note="Description of Artificial Sequence: Synthetic coding sequence"
  source 1..510: mol_type = other DNA
atgaaaactcaacgcaatgggccctcccttgggcgatggtcactcgtgcttctgcttctcggacttgtgatgcctcttgcaatcgtggcacaagtgcttagctaccaggaagctgtgctcagagctattgatggaatcaaccagcgctcctccgatgctaacctctacagacttttggatctcgatccaagaccaactatggacggggatccagatacccccaagcctgtgagctttaccgtcaaggaaaccgtgtgcccacgcacgacccaaaaatcgccagaggattgtgactttaaggaagatggtttggtcaagagatgcgtcgggactgtgatcctgaatcaggcgagggactcatttgatatttcgtgcgataaggacaaccggagatcggcccgtttgggaaacttttttcgtaaagttaaggaaaagattggcggtggcctgaagaaggtgggtcaaaagattaaagacttcctgggtaatctggtcccacgtacggcgtcc

SEQ ID NO: 8288 - DNA, 510 bp, synthetic construct
  misc_feature 1..510: note = source = /note="Description of Artificial Sequence: Synthetic coding sequence"
  source 1..510: mol_type = other DNA
atgaaaacccagcgcaacggccccagcctggggcggtggtcactcgtgctgctcctcttgggtctggtcatgccactcgccatcgtggcgcaggtgctgtcctaccaggaggctgtgcttcgcgcgatagacggaatcaatcaacgatcgagcgacgcaaacctttatcgcctcctggatttggatccccgccctaccatggacggagatcctgacacgccgaagccagtgtccttcaccgttaaggaaactgtgtgtcctcgcactactcagaagagcccggaagattgcgatttcaaggaggacggactggtcaagagatgcgtgggcaccgttattctgaatcaggctagggattccttcgatatctcctgcgacaaggacaatagaagaagcgcccggctcggaaacttctttcggaaagttaaggagaagattggcggaggattgaagaaagtagggcaaaagatcaaagactttctggggaacctggtgccgcgcaccgcgtcg

SEQ ID NO: 8289 - DNA, 510 bp, synthetic construct
  misc_feature 1..510: note = source = /note="Description of Artificial Sequence: Synthetic coding sequence"
  source 1..510: mol_type = other DNA
atgaaaacccagcgcaatggtcctagcctcggaagatggtcactggtccttctcctgctcggactggtgatgccgctcgctatcgtggcgcaggtcctgtcctaccaagaggccgtccttcgggcaatcgacggaatcaaccagagatcgtctgatgccaacctgtaccgcctcctcgacctggacccaagaccaaccatggatggagatcctgacacccctaaaccggtttccttcactgtcaaggagacggtgtgtcctagaaccacccaaaagtcgccggaggactgcgatttcaaggaggacgggttggttaagcgctgtgtgggaactgtgatcctcaaccaggcacgcgattcgttcgacattagctgcgacaaggataaccgcagatccgcgcgccttggaaactttttccgaaaggtcaaggagaagattggaggcggcttgaagaaggtgggacagaaaatcaaggacttcctgggtaatttggtcccacggactgcctcc

SEQ ID NO: 8290 - DNA, 510 bp, synthetic construct
  misc_feature 1..510: note = source = /note="Description of Artificial Sequence: Synthetic coding sequence"
  source 1..510: mol_type = other DNA
atgaaaacacagagaaacggaccttcactcgggagatggtcccttgtcctcctgcttctagggctagtgatgcccctcgctatagtcgcacaggtcctgagttatcaggaagccgttcttcgagccatcgatgggattaaccagcgatcaagtgatgccaatctctaccgcctactggatctggatcctcggccaacaatggatggagatcctgatactcccaaacccgtgtccttcactgtcaaagaaactgtttgtcctagaacaactcagaaatcgccagaagattgtgattttaaagaagatgggctggtgaaaaggtgcgtagggacagtgatcctcaatcaagctagggattcctttgatatctcctgtgataaagataataggcggagtgcaagactcggaaacttcttcaggaaagtgaaagaaaaaataggaggaggacttaaaaaggtcggacaaaagatcaaagatttcctagggaatctggtgcctcgcactgctagt

SEQ ID NO: 8291 - DNA, 510 bp, synthetic construct
  misc_feature 1..510: note = source = /note="Description of Artificial Sequence: Synthetic coding sequence"
  source 1..510: mol_type = other DNA
atgaaaacccagaggaatggaccatctctgggtcgctggtctctggtgctcttgctgctcggactcgtgatgcccctggcaattgtcgcgcaggtgctgtcctatcaggaagctgttctgagagctatcgatggtatcaaccagaggtcttcagatgctaacttgtatcgcctgctggacctcgatcctaggcccacaatggatggtgacccagacacccctaagcccgtgtcctttactgttaaggagactgtgtgccccaggaccacacagaaatcccctgaagactgtgatttcaaagaagacggtctcgtgaagagatgcgtcggcacagttatcctcaatcaagcacgcgattctttcgatatcagttgtgataaagacaacaggaggtcagcccgcctgggaaatttctttcgcaaagtcaaggaaaagatcggcggaggtttgaagaaggtcggccaaaagattaaagacttcctgggtaacttggtgccccgcacagctagt

SEQ ID NO: 8292 - DNA, 510 bp, synthetic construct
  misc_feature 1..510: note = source = /note="Description of Artificial Sequence: Synthetic coding sequence"
  source 1..510: mol_type = other DNA
atgaaaacccagaggaacggtccttcactcggcagatggtccctggtgctcctgctgctcgggctggtcatgccactcgcaattgtggcccaagtcctgtcgtaccaagaggcggtgttgcgagccattgacggaatcaaccagcggtcctccgatgccaatctctacagactcctggacttggacccacgcccaactatggatggcgatccggatacgccgaagccggtgtcgttcactgtcaaagaaacggtctgcccccgcaccactcagaagtcgccggaggactgcgacttcaaggaggacggactcgtgaagaggtgtgttggtaccgtgatcttgaaccaagcgcgtgactcgttcgatatctcgtgcgataaggacaaccgtcggtcagctagactcggaaacttcttccgcaaggtgaaggagaaaatcggcgggggactcaagaaggttggacagaaaatcaaggacttcctggggaatctggtcccccggactgcgtcg

SEQ ID NO: 8293 - DNA, 510 bp, synthetic construct
  misc_feature 1..510: note = source = /note="Description of Artificial Sequence: Synthetic coding sequence"
  source 1..510: mol_type = other DNA
atgaagacgcagcgaaacggacctagcttaggacgttggagcttagtgcttttgttgctcggtctcgtgatgccactggccatcgtggctcaagtcctctcgtatcaggaggcagtcttacgggctatagacgggattaatcagcgaagctcagacgctaacttatacaggctgttggacttggaccctcgaccaaccatggatggtgacccagatacccccaaacccgtgagttttaccgtcaaggaaacggtgtgcccaagaacgacacaaaaatcaccggaggactgcgatttcaaggaagacgggttggttaagaggtgcgttgggactgtgattctaaaccaagccagagactctttcgacatcagctgcgataaggataaccggcggagcgcacgacttggcaacttctttagaaaagtcaaggagaagatcgggggcgggctaaagaaggtgggtcagaagatcaaggacttcctagggaacctcgttcctaggacagccagc

SEQ ID NO: 8294 - DNA, 510 bp, synthetic construct
  misc_feature 1..510: note = source = /note="Description of Artificial Sequence: Synthetic coding sequence"
  source 1..510: mol_type = other DNA
atgaaaactcaaagaaatggacctagcctgggacggtggtccctcgtgctgctccttctcggactggtgatgccccttgccattgtcgctcaagtcctttcgtaccaagaagcagtgctgagggctatcgacggaatcaatcagcggtcgtcggacgccaacctctatcgcctcctggacctcgacccaagacctaccatggatggagatccggacactcctaagccggtatccttcactgtgaaggagactgtgtgccctcgcaccactcagaaatctcctgaagattgcgacttcaaggaagatggcttggttaaaaggtgcgtgggaaccgtgatcctgaaccaggcgcgggatagctttgacatcagctgcgacaaggataatagacgctcggcccggctgggcaatttcttcagaaaagtcaaggagaagattggaggaggcctcaagaaggtggggcagaagattaaggactttctgggtaatcttgtcccacggaccgcatca

SEQ ID NO: 8295 - DNA, 510 bp, synthetic construct
  misc_feature 1..510: note = source = /note="Description of Artificial Sequence: Synthetic coding sequence"
  source 1..510: mol_type = other DNA
atgaaaactcaacgcaacggccccagcttgggtcgatggtccctcgtccttcttctgctggggctggtcatgcctctcgccattgtggcccaggtactgtcttatcaggaggcggtgctccgggccatagacggcattaatcagaggtccagtgatgccaacctttaccggcttttggacctcgatcctcggcccacgatggatggagatccggacacccccaagcctgtctcctttaccgtcaaggagaccgtttgcccacgcacgacccaaaagagtcctgaggattgcgacttcaaggaggatgggcttgttaaaaggtgtgttgggactgtcattttgaatcaggcgcgagacagttttgatataagttgtgataaagacaacaggcggagcgccagactcgggaactttttccggaaggtcaaggaaaagataggaggagggttgaaaaaggtagggcagaaaatcaaagacttcctgggaaatctcgtgcctcgcaccgccagc

SEQ ID NO: 8296 - DNA, 510 bp, synthetic construct
  misc_feature 1..510: note = source = /note="Description of Artificial Sequence: Synthetic coding sequence"
  source 1..510: mol_type = other DNA
atgaaaacgcaaaggaacggaccctctctgggcaggtggtcccttgtacttttgctgctgggactggtcatgcctctggccatcgtggcacaggtgctaagttaccaagaagctgtgttaagagccattgacggcatcaatcagcgatccagcgatgctaatctatatagactcctcgacttggatccgaggcccactatggatggggacccagacacccctaagcctgtttctttcacggtgaaagaaacggtttgccctaggacaacacagaaatccccagaggattgtgactttaaggaggacggtctcgtgaagcgatgcgtaggcacagtgattctgaaccaagctagggactcctttgatattagctgtgataaggataacagaaggtccgcccgcctgggcaacttcttcagaaaagtaaaagaaaaaatcggcggaggcctgaagaaggtgggacagaaaatcaaagacttccttgggaatctcgtacccagaaccgccagt

SEQ ID NO: 8297 - DNA, 510 bp, synthetic construct
  misc_feature 1..510: note = source = /note="Description of Artificial Sequence: Synthetic coding sequence"
  source 1..510: mol_type = other DNA
atgaaaacacaaagaaatggaccaagtttaggtagatggtcattagtattattattattaggattagttatgccacttgctatagtagctcaagtacttagttatcaggaagctgttcttcgagcaattgatggaattaatcaacgatctagtgacgctaatctttatagacttttagatttagatccaaggccaacaatggatggagatccagatacaccaaagcctgtatcattcacagttaaagaaacagtctgcccacgaacaactcaaaaatctccagaagattgtgattttaaagaagacgggttagttaagagatgtgttggaacagttatattaaatcaagcaagggattcatttgacatttcgtgtgataaggataatagacgatcagcaagattaggaaattttttccgaaaagtaaaagaaaaaataggaggtggattgaaaaaagttgggcaaaaaatcaaagattttttaggaaaccttgttccacgaactgcttct

SEQ ID NO: 8298 - DNA, 510 bp, synthetic construct
  misc_feature 1..510: note = source = /note="Description of Artificial Sequence: Synthetic coding sequence"
  source 1..510: mol_type = other DNA
atgaaaactcagagaaacggaccaagcctgggacggtggtcacttgtgctgcttctccttggattggtgatgcctctcgcaatagtggcccaagtgctgagctaccaagaagccgtgctgagggccatcgatggtatcaaccaacgctcgtcggacgcaaacctctaccggcttttggacctggatccaagaccaaccatggacggagatcctgacacccctaagcccgtgtcgttcactgtcaaggaaactgtctgcccacggacgactcaaaaatcgcctgaagattgcgatttcaaggaggacgggctcgtgaagcgctgtgtgggaaccgtgattctgaatcaagcccgagattccttcgatatcagctgtgataaggacaaccggagatcagctagactgggtaactttttccgtaaggtcaaggagaagatcggcgggggcctgaaaaaggtggggcagaagatcaaggacttccttggaaacctggtgccaagaacggcgagc

SEQ ID NO: 8299 - DNA, 510 bp, synthetic construct
  misc_feature 1..510: note = source = /note="Description of Artificial Sequence: Synthetic coding sequence"
  source 1..510: mol_type = other DNA
atgaagactcagcgcaacggtccttccctcggccggtggtccctcgtgttactccttctgggactcgtgatgccgctcgctattgtcgcccaggtgctgagttaccaggaggctgtcctccgtgccattgacggtatcaaccagcggtcttctgatgctaacctctaccgcctgctcgacctcgacccccgtcctacgatggatggtgacccggacactcccaaacccgtctccttcactgtgaaggagaccgtgtgcccccgcaccacgcagaagtctcccgaagactgtgacttcaaggaggacggcctggtgaagcgctgcgtcgggaccgttattctgaaccaggcccgcgattctttcgatatttcgtgcgacaaggacaacagacggtcggctcgcctaggaaacttctttcgcaaggtcaaggagaagatcggtggtggcctcaagaaggtcggtcagaagatcaaggattttctaggcaacctcgtaccgcggaccgcctct

SEQ ID NO: 8300 - DNA, 510 bp, synthetic construct
  misc_feature 1..510: note = source = /note="Description of Artificial Sequence: Synthetic coding sequence"
  source 1..510: mol_type = other DNA
atgaaaactcaaaggaacggcccctcactcggcaggtggagcttggtactgttgctcctcggtctggtgatgccactcgcgatcgtggcacaggttctttcgtaccaggaagcggtgctgagagcgatcgatggtatcaatcaacgcagctcagacgctaatttgtacagactgctcgacctggaccctagaccgaccatggatggggacccagacaccccgaagcccgtctctttcactgtcaaggaaacggtgtgtccacggactacccagaaatctccagaggactgcgatttcaaagaggatggcctggtgaaacgttgcgtgggcaccgtcattctgaatcaagcccgggactcctttgacatcagctgcgacaaggataaccggcgctccgccaggctcggcaacttcttcaggaaggtgaaagaaaagatcggagggggactcaagaaggttggtcagaagatcaaggactttctgggaaacctggtgcctcggaccgcctcc

SEQ ID NO: 8301 - DNA, 510 bp, synthetic construct
  misc_feature 1..510: note = source = /note="Description of Artificial Sequence: Synthetic coding sequence"
  source 1..510: mol_type = other DNA
atgaaaactcaacggaatgggccgtctctgggacgatggtcactggtgctgttgcttctcgggctggtgatgcctctggcaatcgttgcacaggtgctttcgtaccaagaagccgtgctcagggccattgatgggattaaccaaaggtcctcggacgcaaatctctacagactgctggaccttgatcctcgtcctaccatggacggtgatccagatacgcctaagcctgtgtccttcactgtgaaggagactgtatgccccaggaccacccagaagagccctgaagattgcgactttaaggaggacggtcttgtgaaaaggtgtgttggcactgtgattctcaatcaggcacgggattcgtttgatatatcatgtgataaggataacagacgcagcgccagactggggaacttcttccggaaagtgaaggagaaaatcggtggcggactgaagaaggtgggtcagaagataaaggactttctcgggaatctcgtgccacgaaccgcttcg

SEQ ID NO: 8302 - DNA, 510 bp, synthetic construct
  misc_feature 1..510: note = source = /note="Description of Artificial Sequence: Synthetic coding sequence"
  source 1..510: mol_type = other DNA
atgaagacccaaagaaatggcccttcacttggcagatggtccctagtcctgctactgctcgggctggtcatgcctctcgctattgtggcccaggtcttgagttatcaggaggccgtactaagagccattgacggcatcaatcaaagatccagtgacgccaatctataccgccttctggacttggacccaaggcctaccatggacggcgatcccgatacccctaagcctgtgtccttcacagtcaaggaaaccgtgtgccctagaacaacacagaaaagtccagaagattgcgactttaaggaggatggcctggtgaagagatgtgtgggcacagtcatcctcaaccaagctagagattctttcgatatttcctgcgacaaggacaacaggaggtccgctcgcctgggtaatttttttcggaaggtaaaagagaaaatcggaggaggtctgaagaaagtgggccagaaaataaaagactttctgggcaacctcgttccaaggacagctagc

SEQ ID NO: 8303 - DNA, 510 bp, synthetic construct
  misc_feature 1..510: note = source = /note="Description of Artificial Sequence: Synthetic coding sequence"
  source 1..510: mol_type = other DNA
atgaaaacgcaacgtaatggtccgtcgttaggtcgttggtcgctagtactactactattaggtctagtaatgccgctagcgatagtagcgcaagttctatcgtatcaagaagcggtattacgagcgatagatggtataaatcaacgatcgtcggatgcgaatctatatcgtctattagatttagatccgcgtccgacgatggatggtgatccggatacgccgaaaccggtatcgtttacggttaaagaaacggtatgtccgcgtacgacgcaaaaatcgccggaagattgtgattttaaagaagatggtttagtaaaacgttgtgtaggtacggttatactaaatcaagcgcgagattcgtttgatatatcgtgtgataaagataatcgacgttcggcgcgactaggtaatttttttcgtaaagttaaagaaaaaataggtggtggtttaaaaaaagtaggtcaaaaaataaaagattttctaggtaatctagtaccgcgaacggcgtcg

SEQ ID NO: 8304 - DNA, 510 bp, synthetic construct
  misc_feature 1..510: note = source = /note="Description of Artificial Sequence: Synthetic coding sequence"
  source 1..510: mol_type = other DNA
atgaagactcagagaaacggcccatccctcgggagatggagtctggtgcttttactcttggggttggtcatgcccctggccatcgtggcgcaggtattatcgtaccaggaggcagtactccgggcaatcgatgggattaaccagcggtccagtgacgccaatttgtatcggctactggatctcgatccccggcctaccatggacggcgacccagataccccgaaacccgtgtcctttaccgtcaaggagaccgtctgccctcggaccacccagaaaagtcccgaagattgcgatttcaaggaggacggtctggttaaacgctgtgttggcaccgtgattttgaaccaggctcgtgattcttttgacattagctgtgataaggacaaccgccgttccgcgcggctgggcaacttttttcgaaaagttaaggagaagataggtggtgggctgaaaaaggtcggacagaaaataaaggactttctcggcaatctagtgccacgaactgcgtcc

SEQ ID NO: 8305 - DNA, 510 bp, synthetic construct
  misc_feature 1..510: note = source = /note="Description of Artificial Sequence: Synthetic coding sequence"
  source 1..510: mol_type = other DNA
atgaagactcaaagaaacggcccgtctctgggaagatggagccttgtcttgttactgttgggcttagtaatgccgctagctatcgtagcgcaggtgttatcttatcaagaagcagtcctgagggcgatcgatggtataaatcaaagaagcagcgatgcgaatttatacagattattggacctggatcctcgcccgacgatggacggagatccagatacgcctaaaccggttagctttacggtcaaagaaactgtctgtccgagaacaacgcagaaatcaccggaggattgtgattttaaggaggatggattggtcaaacgctgtgtgggaacagtgattctgaatcaggctagagattcttttgatattagttgtgataaggataataggaggagcgcacgtctgggcaatttctttcgaaaagtcaaggagaagataggaggcggccttaaaaaagttggtcagaagattaaagattttcttggtaatctcgtgcctcgtacagcaagc

SEQ ID NO: 8306 - DNA, 510 bp, synthetic construct
  misc_feature 1..510: note = source = /note="Description of Artificial Sequence: Synthetic coding sequence"
  source 1..510: mol_type = other DNA
atgaaaacccagcgcaacggaccctccctcggacgctggtcgctggtgctgctgctgctggggctggtgatgccactggccattgtggcacaggtgttgtcgtaccaggaagccgtcctgcgcgcaattgacggaatcaaccagaggtcctcggatgctaacctgtacagactcctggacctggatccgcggccaaccatggatggggaccccgacacgccgaagcccgtcagcttcaccgtgaaggaaaccgtgtgtcctaggaccactcagaagtcgccggaggattgtgacttcaaagaggacggactggtcaagcggtgtgtgggcaccgtgatccttaatcaagcgcgcgactcctttgacatctcctgcgataaggacaacagacgctcggctagactgggcaatttcttccggaaggtgaaggaaaagatcgggggaggcctcaaaaaggtgggccagaagataaaggacttcttgggaaacttggtgccgcggaccgcgtcc

SEQ ID NO: 8307 - DNA, 510 bp, synthetic construct
  misc_feature 1..510: note = source = /note="Description of Artificial Sequence: Synthetic coding sequence"
  source 1..510: mol_type = other DNA
atgaaaacgcagcgcaacgggccctcattagggagatggagtttggttcttctcctactcgggctggtcatgccgttggcaatagtggcgcaggtgttgagctaccaggaagctgtactgagggccattgacgggataaatcagagaagctcagatgctaacctgtataggctgctagaccttgaccccaggccaaccatggacggcgatcccgacactcccaagccggtctcctttactgtaaaggagactgtgtgcccgcgcaccacacagaaaagtcccgaggattgtgacttcaaagaagacggacttgtgaaaagatgcgtcggtactgttatcctgaatcaagccagggactcatttgatatctcctgtgataaggacaatagacgttctgctcgactgggcaatttttttagaaaggtaaaagagaagataggcggtggcttgaaaaaggttggtcagaagattaaggacttcctcgggaatctcgtgcccagaaccgcttct

SEQ ID NO: 8308 - DNA, 510 bp, synthetic construct
  misc_feature 1..510: note = source = /note="Description of Artificial Sequence: Synthetic coding sequence"
  source 1..510: mol_type = other DNA
atgaaaacccagaggaacggaccctcacttggccgttggagccttgtcctcctgctgcttggtctcgtaatgccacttgccatcgtggctcaggtgctttcatatcaggaggcagttctgagggccattgatggcattaaccaaaggtctagtgatgccaacctgtacagattgctcgatctggaccccaggcccactatggatggggatcctgacactccaaagccagttagttttacggtgaaggagaccgtgtgtcctaggaccactcagaaaagtcctgaagattgcgattttaaagaagacggacttgtgaagcgctgtgtggggactgtcattttgaatcaagcccgggactcttttgatatttcatgcgacaaggataacagacggtccgctcgtctgggtaactttttccgtaaagtgaaggagaagatcggagggggactgaaaaaggtaggccaaaaaataaaggactttctaggtaatttggttccgcggaccgcctcc

SEQ ID NO: 8309 - DNA, 510 bp, synthetic construct
  misc_feature 1..510: note = source = /note="Description of Artificial Sequence: Synthetic coding sequence"
  source 1..510: mol_type = other DNA
atgaagacccaacgcaatggtcccagtctcggacggtggtctctcgtgcttctgctactcggactcgtgatgccattggctattgtggcccaggtcctgagctatcaggaagctgtgctgcgcgcaatcgacggaatcaatcagagaagctctgacgcgaacttatacaggctgctggacctagacccccggcccacaatggacggcgatcccgacacccccaaacctgtgagtttcacagtgaaggagaccgtctgtccccggactactcaaaaatctcctgaagattgcgactttaaggaggatggcctggtcaagcgatgcgttgggactgttattttaaatcaggcccgggacagctttgacatttcatgtgacaaggataatcggaggagcgcgagactcggcaacttttttagaaaggttaaagagaaaatcggcggtggtctcaagaaagtcggacagaagatcaaagatttccttggaaacctagtgccccggactgccagt

SEQ ID NO: 8310 - DNA, 510 bp, synthetic construct
  misc_feature 1..510: note = source = /note="Description of Artificial Sequence: Synthetic coding sequence"
  source 1..510: mol_type = other DNA
atgaagacccagagaaatggtccctctctcgggcgatggagtctcgtgcttcttctgcttgggctggtcatgccattagctatcgtggcccaagtgctgagctatcaggaggctgtccttagagccattgacgggattaaccaaaggtctagcgacgctaatctgtatcgactattagatttggatccgaggcccaccatggacggagacccagatacccccaaacctgttagctttacagtgaaagagaccgtatgtcctaggactacacaaaaatcgccagaggactgcgattttaaagaggacgggttggtgaagcgctgtgtggggacggtaatactaaaccaggctcgagacagtttcgacatctcctgcgataaagacaacaggcggtcagctcgtcttggtaatttttttcgcaaagtaaaggaaaaaatcggtggcggactcaaaaaggtcggtcaaaagatcaaagactttctgggcaacctggtccctcgcactgcctcc

SEQ ID NO: 8311 - DNA, 510 bp, synthetic construct
  misc_feature 1..510: note = source = /note="Description of Artificial Sequence: Synthetic coding sequence"
  source 1..510: mol_type = other DNA
atgaagactcagcggaacgggccttccctggggcgctggtccctggttctgctgctgctgggactggtgatgcccctggctatcgtggctcaggtcctttcctatcaggaggcagtgcttcgagcaattgatggaataaaccagagaagcagcgatgcaaatttgtataggctgctggatttggacccaagacctaccatggatggagatccggatacaccgaagcctgtttccttcaccgtcaaggagaccgtgtgtcctagaactactcaaaagtctcctgaggattgtgatttcaaagaggacggcctggtaaaacgctgcgttgggacagtgatcctgaatcaagcccgggattctttcgacattagttgcgataaggacaatcgaaggagcgccagactggggaatttttttcggaaggtgaaagagaaaatcggtggggggctgaagaaagtcgggcaaaaaatcaaagactttctggggaacctcgtcccgcggacagcttca

SEQ ID NO: 8312 - DNA, 510 bp, synthetic construct
  misc_feature 1..510: note = source = /note="Description of Artificial Sequence: Synthetic coding sequence"
  source 1..510: mol_type = other DNA
atgaaaacgcagagaaacggcccctctcttggaaggtggagccttgtgctcctcctgttgggactggtcatgccgctggcgatcgtggctcaagtcctgagctaccaggaagcagttctccgcgctatcgatgggatcaatcagcggtcgtctgatgccaatctgtaccgcctgcttgaccttgatccgcgcccgacgatggacggcgacccagacactccaaaacctgtgtcgtttaccgtcaaggagactgtgtgcccgcgcactacccagaagtcgcctgaagattgcgacttcaaggaggatggcctcgtgaaacgctgcgtgggaactgtgatcttgaaccaagcccgggactccttcgacatcagctgtgacaaagacaatcggaggtccgcgcgcctggggaacttcttccgaaaggtgaaggaaaagatcggcgggggcttgaaaaaagtgggtcaaaagattaaggatttcctgggaaacctggttccacgcaccgcgtct

SEQ ID NO: 8313 - DNA, 510 bp, synthetic construct
  misc_feature 1..510: note = source = /note="Description of Artificial Sequence: Synthetic coding sequence"
  source 1..510: mol_type = other DNA
atgaaaacccagagaaatggaccctcgcttggacggtggagcctcgtccttctcctcctggggctggtgatgccactggcaatcgtggcacaggtgctgtcctaccaagaagcggtgctgagagcaattgatggcattaaccaacgatcgtccgacgccaatctgtatcgcctgcttgatctcgatcctaggcctactatggatggtgaccccgatactccaaaacctgtgtcgtttactgtgaaagaaaccgtctgcccacgaaccacccaaaagagtccagaggactgtgatttcaaagaagatggtcttgtgaagcggtgtgttggaaccgtcattctgaatcaggcacgggatagctttgatatatcctgtgataaggacaacaggcggtcggccaggcttggaaatttcttcaggaaggtgaaggaaaagatcggtggaggtttgaaaaaagtgggacagaaaatcaaagacttcctcgggaatctggtccctaggactgcttca

SEQ ID NO: 8314 - DNA, 510 bp, synthetic construct
  misc_feature 1..510: note = source = /note="Description of Artificial Sequence: Synthetic coding sequence"
  source 1..510: mol_type = other DNA
atgaagactcagcggaatggtccttccctgggccgctggtcattggtcctcctcctcctgggcctggtcatgcctctggcaattgtcgcccaagttctgtcttatcaggaagcagtgctgcgggcaattgatgggataaaccagaggtcaagtgatgccaatctctatcgcttgttggatcttgaccctaggccgaccatggacggcgacccagatacccccaagcccgtgtcctttacagtaaaagaaaccgtgtgtccacggaccacgcaaaagtcccccgaggattgtgactttaaagaggacgggctggtgaagcgctgcgtgggcaccgtgattctgaatcaagctcgcgattctttcgatatatcctgcgacaaggacaacaggagatcagctcggctggggaacttcttcaggaaggtgaaggaaaaaattggaggcgggctgaagaaagttggccagaaaatcaaagacttcttgggcaatctggtccctagaacggccagt

SEQ ID NO: 8315 - DNA, 510 bp, synthetic construct
  misc_feature 1..510: note = source = /note="Description of Artificial Sequence: Synthetic coding sequence"
  source 1..510: mol_type = other DNA
atgaagacacagcgcaacggcccctccctcggcaggtggagcctggtactcttgctcctgggcctggtcatgccacttgctattgtggctcaggtgttgtcttatcaagaggctgtcttgagggccattgacggtatcaaccaacgttcttctgacgccaacctgtaccgcctgctggatcttgatccacgtccaactatggacggtgaccccgacactccaaaaccagtctcattcaccgtcaaggaaacagtatgccccaggaccacacagaaaagtcccgaggactgcgatttcaaggaggatggtttggtcaagcgctgcgtgggaaccgttatcctcaatcaggctcgcgattctttcgacatctcctgcgacaaggataataggagatcagccaggcttggtaatttcttccgcaaggtcaaagagaagattggtggcggactcaaaaaagttggtcaaaaaatcaaggacttcctgggcaacttggttccacgtactgctagc

SEQ ID NO: 8316 - DNA, 510 bp, synthetic construct
  misc_feature 1..510: note = source = /note="Description of Artificial Sequence: Synthetic coding sequence"
  source 1..510: mol_type = other DNA
atgaagactcagcgcaacggaccgtcgctgggacgctggtcactggtgttgctcctgctgggtctggtcatgccactggcaatcgttgcccaagtgctttcataccaggaggccgtcctgagggcgattgatgggattaaccagcgttcttccgatgctaacctgtacagactcctcgacctcgacccgcgtccgactatggacggcgatccggacaccccaaagccagtgtcattcaccgttaaggaaaccgtgtgcccgcggactacccagaagagcccggaagactgcgacttcaaggaagatggccttgtgaagcgctgcgtgggcactgtgatcctgaatcaggcccgcgactcgttcgatatcagctgtgacaaagacaaccggagatcggccaggctcggaaatttcttccgcaaggttaaggaaaaaatcggaggaggactgaagaaggtcggccaaaagatcaaggattttcttggcaatctggtgccgcgcaccgcttcc

SEQ ID NO: 8317 - DNA, 510 bp, synthetic construct
  misc_feature 1..510: note = source = /note="Description of Artificial Sequence: Synthetic coding sequence"
  source 1..510: mol_type = other DNA
atgaagacccagcggaacggcccctcattgggacggtggagtctcgtgctactccttttaggactggtaatgcccctggcaatcgtggctcaggtcctgtcctaccaggaagctgtattgcgggcgatcgacggtatcaaccagcggagcagcgacgccaacctgtaccgccttttagatttggatcctagaccaacaatggacggtgacccagatactccaaaaccggtcagcttcaccgtaaaggagacagtctgccctaggaccactcagaagtctcctgaggactgcgactttaaagaagacggactcgtgaagcgctgtgtggggaccgtaatccttaaccaggcgagagatagctttgacatttcctgtgacaaagataaccgacggtccgcccggctggggaacttttttaggaaagtcaaggaaaaaatcggtggaggactgaagaaggtgggccagaagatcaaagatttcctgggaaatctggtgcccaggaccgcctca

SEQ ID NO: 8318 - DNA, 510 bp, synthetic construct
  misc_feature 1..510: note = source = /note="Description of Artificial Sequence: Synthetic coding sequence"
  source 1..510: mol_type = other DNA
atgaaaactcaaagaaatggtccatccctgggtagatggtcgctcgttcttcttctgttgggcctggtcatgcctctggccatcgtcgcccaggtgttgagctaccaagaggcagtgctccgcgcgattgacggtattaaccagagaagcagcgacgcgaatttgtaccggctcctggatctcgatccacggccgactatggatggagatcccgacacgcctaaacctgtctcctttaccgtcaaggaaactgtgtgcccacgaaccactcaaaaatcaccagaggactgtgacttcaaggaagatgggcttgtgaaacggtgtgtgggtaccgtgatcctgaaccaagcacgggattcctttgacattagctgtgataaagacaatagacgcagcgcacggcttggtaacttctttagaaaggtgaaagagaagattggaggtgggctgaagaaggtcggtcagaagataaaagatttcttggggaacctggtgcctcgaaccgcatcc

SEQ ID NO: 8319 - DNA, 510 bp, synthetic construct
  misc_feature 1..510: note = source = /note="Description of Artificial Sequence: Synthetic coding sequence"
  source 1..510: mol_type = other DNA
atgaaaacccagcgaaacggaccttcactcgggcggtggagcttggtcttgttgctgcttgggttggtgatgcccctggctatcgttgcccaggtgctttcctaccaagaagccgtcctgcgcgcgatagatggtatcaaccagcgcagctcggacgccaatctctaccggctgttggatttggacccgcgcccgacgatggacggtgatcctgacactccgaaacccgtgagcttcaccgtgaaggaaaccgtgtgtccaaggactacgcagaagtccccggaggactgcgatttcaaggaggatggcctggtgaaacgatgcgttggaaccgtgatcctgaaccaagcgcgtgactcgttcgacatttcctgcgacaaagacaatagaaggtcggcacggctcggaaactttttccggaaggtcaaggaaaagatcggcggagggctgaagaaggtcggacaaaagatcaaggattttctcggtaacctggtgccaagaactgcttct

SEQ ID NO: 8320 - DNA, 510 bp, synthetic construct
  misc_feature 1..510: note = source = /note="Description of Artificial Sequence: Synthetic coding sequence"
  source 1..510: mol_type = other DNA
atgaagacccagcggaatgggccttctttagggagatggtcactagttctgctcctgctaggactggttatgccccttgccatagtcgcccaggtgctgagctaccaagaggccgtgctgcgggccatcgatggcattaatcagagaagcagtgacgccaatctgtaccggctgctggatttggatccgaggcctaccatggacggtgaccctgatactcccaaaccagtctcctttaccgtcaaggagacggtttgccccagaaccacccagaagagccccgaggactgcgacttcaaggaagacggcctcgtaaagcgatgtgtaggaaccgtgattctcaaccaagctcgggactccttcgacatatcttgcgataaggacaaccgacggagtgcaagactcgggaacttctttagaaaggtgaaggaaaaaatcgggggtggtctgaagaaagtggggcagaagatcaaagacttcctgggaaaccttgtgccccgaactgctagc

SEQ ID NO: 8321 - DNA, 510 bp, synthetic construct
  misc_feature 1..510: note = source = /note="Description of Artificial Sequence: Synthetic coding sequence"
  source 1..510: mol_type = other DNA
atgaaaacgcagcgcgatggacactcactggggagatggtccctggtcctgctgcttctgggcttggtgatgccgttggcaatcatcgcacaggttctctcgtataaggaggcagtcctccgggcaatcgacggaatcaatcaacgctcatcagacgccaacctctaccgcttgctggacctcgatcccaggccgaccatggatggtgacccggacaccccaaaacctgtgtcgttcactgtgaaggaaaccgtctgtccgcgcaccactcagcagtctccagaagattgcgacttcaagaaggacggactggtgaaaagatgtatgggtactgtcaccctcaatcaagcacgcggatcgttcgacatttcgtgcgacaaggacaataaacggtttgccctgctgggggacttcttcaggaagagcaaggagaagatcggaaaggaattcaagcgcattgtgcagcggatcaaagatttcctgagaaatctggtcccccgcactgagtcc

SEQ ID NO: 8322 - DNA, 510 bp, synthetic construct
  misc_feature 1..510: note = source = /note="Description of Artificial Sequence: Synthetic coding sequence"
  source 1..510: mol_type = other DNA
atgaaaacgcagagagatggtcattcgctggggcggtggtctttggtgctccttcttcttgggctcgttatgcctctcgcaataatcgcgcaggtcctttcgtacaaggaagccgtccttagagcaatcgacgggattaaccagcgctcatccgatgccaacctttaccgacttctggatctcgatccgaggcctactatggacggggatcctgatacccccaagccagtgtcgttcaccgtgaaggaaacggtctgtcctcgaacgactcagcaaagcccagaggactgtgatttcaagaaggatggcctcgtcaagaggtgtatgggtactgtgactcttaaccaagccaggggatcctttgatatttcatgtgacaaggataacaagcgctttgccctgctcggagatttctttagaaagtccaaggagaaaataggaaaggagttcaaacggatcgtgcagcggattaaggatttcctgcgtaacctggtccctcgaactgaaagc

SEQ ID NO: 8323 - DNA, 510 bp, synthetic construct
  misc_feature 1..510: note = source = /note="Description of Artificial Sequence: Synthetic coding sequence"
  source 1..510: mol_type = other DNA
atgaagacacagagagatggacactctctaggtcggtggagtctcgtcttgttgctactgggccttgtcatgccgctggcaattattgcccaggtgttgagttacaaggaggccgtgctccgggctatagatggcatcaaccagcggtcatcggacgcaaacctctacaggttactggatctggatccccgccctactatggatggcgatcctgatacaccaaagcccgtttccttcacagtcaaagagactgtgtgtccaagaaccacccagcagtcaccagaggattgtgacttcaagaaagacggccttgtaaaaaggtgcatggggacagtgaccctgaatcaagccagaggaagttttgacatcagctgcgacaaggataacaagaggtttgcgcttttgggcgacttcttcagaaagagtaaggaaaaaatcggaaaggaattcaagaggattgtgcagcgtatcaaggacttcctacggaacctcgtgccccgcactgaatca

SEQ ID NO: 8324 - DNA, 510 bp, synthetic construct
  misc_feature 1..510: note = source = /note="Description of Artificial Sequence: Synthetic coding sequence"
  source 1..510: mol_type = other DNA
atgaagacccagagggatggacattctctgggccgttggtctctggtcttgcttctgttaggccttgtgatgccattagctatcatcgcacaggtgttgagctacaaagaggctgttcttcgggctattgacggcattaaccagcgaagctcggacgccaatctatacagactcctggatttggatccccgcccaacaatggacggggatcctgacacgccaaaacccgttagttttacggtcaaagagactgtctgtccccggacaacccagcaatcccctgaggattgtgatttcaaaaaagatgggctggtgaagcggtgcatgggtaccgtcactctgaaccaggctcggggtagtttcgatatcagttgtgataaagacaataagcggttcgctttgctcggtgacttcttccgaaagtcaaaggaaaagattggcaaggagtttaaacggattgtacagaggattaaggactttttaagaaacttagtaccccgtactgagtct

SEQ ID NO: 8325 - DNA, 510 bp, synthetic construct
  misc_feature 1..510: note = source = /note="Description of Artificial Sequence: Synthetic coding sequence"
  source 1..510: mol_type = other DNA
atgaagacccagcgggacggtcattccctgggacgatggtccctggttttgctgttgctcgggctagtcatgccccttgcgattatcgcccaggtcctgtcgtataaggaggctgtattgcgtgcgatcgacggtatcaaccagcgaagcagcgacgcaaacctgtaccgccttctcgacctggatccccgtcccaccatggatggtgatcccgacacacccaagcccgtcagcttcaccgtcaaggagactgtctgtccacgcaccacccaacaatcccccgaggactgcgatttcaagaaggatggcctcgtcaagcgttgcatgggcacggtcaccctcaatcaggctcggggttctttcgacattagctgcgataaggataacaagcggtttgccctcctcggagacttcttcagaaagtctaaggagaagatcggtaaggagttcaagagaatcgtccaacgaatcaaggacttcctgcggaacctcgtaccccgtaccgagtct

SEQ ID NO: 8326 - DNA, 510 bp, synthetic construct
  misc_feature 1..510: note = source = /note="Description of Artificial Sequence: Synthetic coding sequence"
  source 1..510: mol_type = other DNA
atgaagacacagcgggatggacattctctgggacgctggtccctagtattgcttctactagggctggtcatgcctttggctatcatagcacaggtgctctcctataaagaagccgtccttagagctattgacgggataaaccagagatcctcagatgcgaacctttatcgattactggatttggatccccgccccactatggacggggatcctgatactcccaaacccgtgtccttcactgtaaaagaaactgtgtgcccaagaacaactcaacagtctccagaggattgtgacttcaagaaagatggactcgtgaaacgatgcatgggaacagtaacactcaatcaggctagaggaagttttgacatatcatgcgacaaagataataaaaggttcgcccttttaggggatttcttcagaaaaagtaaagaaaagatagggaaagaattcaaacggattgtacagagaattaaagattttctccgcaatctcgtccctcgcactgaatct

SEQ ID NO: 8327 - DNA, 510 bp, synthetic construct
  misc_feature 1..510: note = source = /note="Description of Artificial Sequence: Synthetic coding sequence"
  source 1..510: mol_type = other DNA
atgaaaacacagagagacgggcattcgttaggacgatggtcactcgtgctgctacttctgggcctggtgatgcccctcgccattatcgctcaagtgctttcgtacaaggaggccgtgctgagggccatcgacggtattaatcagcggtcttccgacgcgaacctgtaccgcctgctggaccttgatccacgccccaccatggatggagaccccgacaccccaaagcccgtgtcttttaccgtcaaggagactgtgtgccccaggacgacccagcaaagccccgaggattgtgattttaaaaaagacgggctagtcaaacgatgcatgggaaccgtcactttgaaccaggcacgtgggtctttcgatatctcatgcgataaagacaacaaacggtttgcgctgttgggcgacttttttcggaagtccaaagaaaaaatcgggaaagaatttaaacgtatcgtgcaacgcattaaggatttcctgagaaatttggtgcctcgcaccgagtcc

SEQ ID NO: 8328 - DNA, 510 bp, synthetic construct
  misc_feature 1..510: note = source = /note="Description of Artificial Sequence: Synthetic coding sequence"
  source 1..510: mol_type = other DNA
atgaagacccaaagagacggccatagtttggggagatggagcctggtcctacttctcctgggcctggtgatgcctttggctataattgcacaggtgctttcttataaagaggccgtcttgagagccatagatgggataaaccaaaggtcttccgacgcaaatttgtatcgtttattggatttggatccgcgtccgacaatggacggagaccccgatacgccgaaacccgtatctttcacagtcaaagaaactgtatgcccacggacaacgcaacaatcaccggaagattgtgatttcaagaaagatggccttgtaaagcgctgcatggggacggtcacactcaatcaggcccgcggcagttttgacatctcttgtgacaaagataataagcggttcgcactgctgggcgatttttttcgtaaatcaaaagaaaaaataggaaaagagtttaagaggattgtgcagaggattaaagattttcttaggaatcttgtgccgaggactgaaagt

SEQ ID NO: 8329 - DNA, 510 bp, synthetic construct
  misc_feature 1..510: note = source = /note="Description of Artificial Sequence: Synthetic coding sequence"
  source 1..510: mol_type = other DNA
atgaagacacagcgcgacgggcatagcctgggccggtggtcactggtgctgctgcttttggggcttgtcatgcccttggccattatcgcacaagtactctcttacaaagaggcggtcctccgggctatcgatggcatcaaccagcggtccagtgacgctaatctgtacagactgctggatctcgatccgcggcctacaatggacggcgacccagacacacctaagccggtgtcctttacagtgaaagagaccgtgtgcccaaggactacgcagcagagtcctgaggattgtgatttcaagaaagacggcttggttaaaaggtgtatgggaactgtaacgctgaatcaggcaaggggatccttcgacatttcttgcgacaaagacaacaagcggttcgccctgctgggcgacttttttcgaaagtccaaggagaaaataggcaaagagttcaagcggatcgtccagcgaatcaaagatttcttgaggaatctggtgcctcgaacggaaagt

SEQ ID NO: 8330 - DNA, 510 bp, synthetic construct
  misc_feature 1..510: note = source = /note="Description of Artificial Sequence: Synthetic coding sequence"
  source 1..510: mol_type = other DNA
atgaagacacagcgggacggtcactcccttggccgatggtctctggtgctgctgcttctcggacttgttatgccgctagccataattgcccaagttctgtcctacaaagaagctgtactaagagccatagatggcattaaccagagaagtagtgatgccaatctgtatcgcctgctggacctcgaccccaggccgacgatggatggcgacccagatacacccaaacccgtttccttcacagtcaaggagaccgtgtgcccccgcaccactcagcagagtccggaagactgcgatttcaagaaggatgggcttgtgaagcgatgcatgggcactgtcaccctgaaccaagctaggggctccttcgacatcagttgcgataaagataataaacgtttcgcgctgctgggcgacttttttaggaagagcaaagaaaaaatcggcaaggagttcaaaagaattgtccagaggattaaagacttcttgagaaacctcgtgccgaggacagagagc

SEQ ID NO: 8331 - DNA, 510 bp, synthetic construct
  misc_feature 1..510: note = source = /note="Description of Artificial Sequence: Synthetic coding sequence"
  source 1..510: mol_type = other DNA
atgaagactcagagggatggccactcgttaggccgatggagcctggtacttctgcttctcggcttagttatgcccctggccatcattgctcaggtgctgtcatacaaagaggcagtcctgagggctatagatgggataaatcagcgctcaagcgacgccaacctctaccggcttctcgatctcgatcctagacccacaatggatggcgaccctgacacacccaaacctgttagctttactgtgaaagaaactgtgtgcccgaggaccactcagcagtcccctgaggattgtgactttaagaaagacggactggtcaaacgctgcatgggcacagtcaccctgaatcaagccaggggaagtttcgacatcagctgcgacaaggacaacaaaaggtttgccctgcttggcgatttttttcgtaaaagcaaagagaagatcggaaaagaatttaaacggatcgttcagagaattaaagacttcctcaggaacctggttccgagaacagagagc

SEQ ID NO: 8332 - DNA, 510 bp, synthetic construct
  misc_feature 1..510: note = source = /note="Description of Artificial Sequence: Synthetic coding sequence"
  source 1..510: mol_type = other DNA
atgaaaacccagcgggatgggcactccctgggaaggtggtcgctcgtactcctgcttctcggacttgtcatgccgcttgcgatcatcgcgcaggttctctcatacaaggaggcagtgctccgggctatcgacggtattaaccaaaggtcgtccgatgccaatctgtatagactgcttgatctggatcctaggccgactatggacggggatcccgacactccgaagccggtgtccttcaccgtgaaagaaacggtgtgccctagaaccacccagcaatcaccagaggactgtgacttcaagaaagacggtctggttaagagatgcatgggtaccgtcacgttgaatcaggcccgaggctcattcgacatctcatgcgataaagataacaagcggttcgcactcctcggcgacttttttcgcaagtccaaggagaaaatcggaaaggaattcaagcggatcgtgcagaggatcaaggatttcctgcgaaacctcgtgcctcgcactgaaagc

SEQ ID NO: 8333 - DNA, 510 bp, synthetic construct
  misc_feature 1..510: note = source = /note="Description of Artificial Sequence: Synthetic coding sequence"
  source 1..510: mol_type = other DNA
atgaagacacagcgtgacgggcacagccttggaaggtggagcctcgtcctgctgttgttgggcctagttatgcctctggctatcattgcacaagtgctatcctacaaggaggctgttcttcgggcgatcgatggaatcaaccagcgatcatccgacgcaaatctttacaggctcctcgatctggacccgcggccaaccatggacggagaccctgataccccaaagccagtgagcttcactgtgaaagagacagtctgccctcgaacaactcagcagagccccgaggactgcgattttaaaaaggatgggctggtgaaacggtgtatggggactgtgacacttaaccaggcccgcgggtcattcgatatatcgtgcgataaagacaataaacgattcgcactgctgggtgattttttcagaaagtcaaaggagaaaattggaaaggagtttaagaggatcgtgcaacggattaaggacttcctccgtaacctagtgccaagaacagagtct

SEQ ID NO: 8334 - DNA, 510 bp, synthetic construct
  misc_feature 1..510: note = source = /note="Description of Artificial Sequence: Synthetic coding sequence"
  source 1..510: mol_type = other DNA
atgaaaactcagagggatggacattctttgggaagatggtcactcgtgctcttgcttctgggattggtgatgccactggctatcatcgcccaggtgcttagctacaaggaggccgttttgcgcgctattgacggtatcaatcagagaagtagtgacgcaaatctttaccgcttgttggacctggacccacgtcccactatggacggagacccagacacacccaaacccgtctcttttaccgttaaagagacagtgtgcccaagaacaacccaacagtcccctgaagactgtgacttcaaaaaggacggactggtgaagcgctgtatgggaactgtaaccctcaaccaggcaaggggctctttcgacatctcctgtgacaaagataacaagaggttcgccttgttgggcgactttttccgtaagtccaaggaaaaaataggaaaagagttcaaacgcattgtacagcgtatcaaagactttctgagaaacctcgtcccaaggaccgaaagt

SEQ ID NO: 8335 - DNA, 510 bp, synthetic construct
  misc_feature 1..510: note = source = /note="Description of Artificial Sequence: Synthetic coding sequence"
  source 1..510: mol_type = other DNA
atgaaaacgcaaagagacggacactctctgggacgttggtcgctggtgcttttgctcctcggtttggtcatgccacttgcaatcattgcacaggtgctctcatacaaggaggcagtcctcagggcaattgatgggattaaccagcgatcaagcgatgcaaatctgtacaggcttcttgatttggaccctcgccctaccatggatggagatccagatactccaaagccagtctccttcaccgtgaaggaaaccgtgtgccctaggactacccagcaatcccccgaggattgcgatttcaagaaggacggccttgtgaaacgctgtatgggaaccgtgaccttgaaccaggcaagaggttcgttcgacattagctgcgataaagacaacaagaggtttgcactcctcggagacttctttagaaagtcgaaggaaaagattgggaaagaattcaagcgaatcgtgcaaagaatcaaggactttttgcgcaaccttgttccccggactgaaagt

SEQ ID NO: 8336 - DNA, 510 bp, synthetic construct
  misc_feature 1..510: note = source = /note="Description of Artificial Sequence: Synthetic coding sequence"
  source 1..510: mol_type = other DNA
atgaaaacccaacgcgacgggcactctctcggtcgctggagcctggttctgctgctcctagggttggtgatgccactggcaattatcgcgcaggttctaagctacaaagaggcggtgctgcgcgctatcgacggcatcaatcagcgcagcagcgacgctaatttgtaccgtttgctggatttggaccctaggccgactatggacggagaccctgatacccctaaaccagtgtcttttacggtcaaagagaccgtttgtcctcgaactacccagcaatctccagaggactgtgatttcaaaaaggacgggctggtgaaacgctgtatgggtaccgtcaccttgaaccaggcccgcggtagctttgatatttcttgcgataaggacaacaagcgctttgcgttgttgggggatttctttcgcaagagcaaggagaaaatcggaaaagaatttaaacgcattgtgcagcgaatcaaagattttctgcgcaacctcgtgccgcggaccgaatcc

SEQ ID NO: 8337 - DNA, 510 bp, synthetic construct
  misc_feature 1..510: note = source = /note="Description of Artificial Sequence: Synthetic coding sequence"
  source 1..510: mol_type = other DNA
atgaagacacagcgggacggacacagcctgggcagatggtcactagtgctgctgctgctggggttggtgatgcccctcgccataattgcccaggtgctgagctacaaggaggcagtgctgcgggcgattgatggcattaaccagaggtccagtgatgctaatctgtatcgcctcttggacctggatccaagacccactatggacggggaccccgatacccctaagcctgtgtcctttactgttaaggagacagtatgcccgcggacgacacagcagtcccccgaggactgtgattttaagaaggacgggttagtgaagaggtgcatgggaacagtcacattgaatcaggccagaggtagctttgacatttcttgcgataaggataacaaaagatttgcactgttgggggacttctttaggaagtccaaggaaaagatcggtaaagagttcaagaggatagtacagcgtatcaaagacttcctgaggaatctggtccctcgaaccgagagc

SEQ ID NO: 8338 - DNA, 510 bp, synthetic construct
  misc_feature 1..510: note = source = /note="Description of Artificial Sequence: Synthetic coding sequence"
  source 1..510: mol_type = other DNA
atgaaaactcagcgggatggccattcgttggggcgttggtccctcgtcctcctgcttctgggcctggtgatgcctctggcgatcatcgctcaagtgctctcgtacaaggaagccgtccttagagcaattgatggcattaatcaacggagctccgatgcgaatctctacagacttctcgaccttgacccccggcctactatggatggtgatcccgatacgccaaagccggtcagctttaccgtgaaggaaaccgtttgtcctaggaccacgcagcagagcccagaggattgcgacttcaaaaaggacggcctggtgaagcgatgtatgggtaccgtgactcttaaccaggctagaggctcgtttgacatttcatgtgacaaagacaacaaacgttttgcactgcttggggacttcttccgcaagtcaaaggagaaaataggtaaggagtttaagagaattgtgcaacgaatcaaggattttcttcgaaacttggtccccagaactgagtcc

SEQ ID NO: 8339 - DNA, 510 bp, synthetic construct
  misc_feature 1..510: note = source = /note="Description of Artificial Sequence: Synthetic coding sequence"
  source 1..510: mol_type = other DNA
atgaaaactcagcgggatgggcattcactaggacggtggagtcttgttctcctattactggggctagtgatgccacttgcaataatcgcccaggtactgtcctataaagaagccgtgttaagagctattgatgggataaatcagaggtcttccgacgcaaacctttataggttacttgacctcgatcccaggcctacaatggatggggatcccgacacaccaaagcccgtgtccttcacagtgaaagaaactgtgtgtccaaggactacacagcagtctcctgaggattgcgattttaaaaaagatggactcgtgaaacggtgcatggggacggtcactctcaatcaggccagggggtccttcgatatatcgtgcgataaagataacaagagatttgcactcctcggagattttttccgcaaatccaaagagaaaataggaaaagaatttaaacggattgtgcagcgcattaaagactttctccgcaacctcgtgccccgcacagaaagt

SEQ ID NO: 8340 - DNA, 510 bp, synthetic construct
  misc_feature 1..510: note = source = /note="Description of Artificial Sequence: Synthetic coding sequence"
  source 1..510: mol_type = other DNA
atgaaaacgcagcgggacggacactccctcggaaggtggtccctggtcttgctgctcctgggtctggtgatgcccctcgccatcatcgctcaggtgctgtcatacaaagaagcagtgcttcgggccatcgatggaatcaatcagcgtagctcagacgccaacctctaccggctgttggacttggacccaagacccaccatggacggagatccggatactcctaagccggtgtcgttcaccgtgaaggaaaccgtgtgcccacggacgacccagcaaagccccgaagattgcgatttcaagaaagacgggctggtgaagcgctgcatgggaaccgtgactcttaatcaggccagaggttcatttgacatctcatgcgacaaagacaacaagagattcgccttgctcggagatttcttccgcaagtctaaggaaaagataggtaaggagtttaagcgaattgttcaacggatcaaagacttcctgaggaaccttgtgccgcgcactgaatcc

SEQ ID NO: 8341 - DNA, 510 bp, synthetic construct
  misc_feature 1..510: note = source = /note="Description of Artificial Sequence: Synthetic coding sequence"
  source 1..510: mol_type = other DNA
atgaagacacaacgcgatggtcattctctgggccgctggtcactggtccttttgctgctgggtctggttatgccactcgcaatcatcgcccaggtcctttcatacaaggaggctgtgctgagggctatcgatggcattaatcagcgctcatcagatgctaatctctacagactgctggaccttgacccacgcccaacaatggacggagaccccgacactcccaagcccgtttcttttacggtcaaggaaactgtctgcccaagaaccactcaacagtctcccgaagactgcgacttcaaaaaggacggtctcgtaaagcgctgtatgggcaccgttacccttaaccaggcccgcggtagcttcgacatctcttgtgataaggacaacaagagattcgccctcctgggtgacttttttcgcaaaagcaaagagaagataggaaaggagttcaaaaggattgtacagagaattaaagacttcctgagaaatttggttcccagaacagaatct

SEQ ID NO: 8342 - DNA, 510 bp, synthetic construct
  misc_feature 1..510: note = source = /note="Description of Artificial Sequence: Synthetic coding sequence"
  source 1..510: mol_type = other DNA
atgaaaactcagagagacggacactcgctgggacggtggtcccttgtccttcttctcctcggacttgtcatgccgttggcgattattgcacaggtgcttagctacaaagaagccgtcttgcgtgctattgatggtattaaccagagatcatcggatgcaaacctttaccgccttctggatctggatcctaggccaactatggatggagatccagatacccccaagccagtgtcctttaccgtgaaagaaactgtgtgcccccgcactacccagcagtcaccagaagattgtgactttaagaaggacggcctcgtcaaaagatgtatgggtactgtgaccctgaaccaggcacggggttcattcgacatcagctgtgacaaggacaataagcgttttgcgctgcttggagacttttttcgcaaatcaaaggagaaaattggcaaggagtttaagaggatagtgcagaggattaaggatttcctgcgcaaccttgtcccaagaactgagtcg

SEQ ID NO: 8343 - DNA, 510 bp, synthetic construct
  misc_feature 1..510: note = source = /note="Description of Artificial Sequence: Synthetic coding sequence"
  source 1..510: mol_type = other DNA
atgaaaacccagcgcgacggacactctctcggtcgctggtccctggttctgctactgctgggactggtgatgcctttagcaatcatcgcacaggtgttgagttacaaggaggctgtgctgcgagccatcgatggcatcaatcaacggtcttcagacgcaaatttgtaccgattactggacctcgatccacggcctacaatggacggagatccagacacacccaagccagtctcattcactgtcaaagagaccgtttgccctcgcacaactcagcaatcccccgaagattgtgacttcaagaaggatgggttggtgaagagatgtatggggacggtgaccttgaatcaggcccggggttcgtttgacatctcctgcgacaaggataacaagaggttcgccctgctgggagatttttttagaaagagtaaagagaaaatcggtaaggagtttaaacgtatagtgcagcgaataaaagacttcctcagaaacctggtgcctcgcaccgaatcc

SEQ ID NO: 8344 - DNA, 510 bp, synthetic construct
  misc_feature 1..510: note = source = /note="Description of Artificial Sequence: Synthetic coding sequence"
  source 1..510: mol_type = other DNA
atgaagactcagagggacggacactctctagggcgatggtcactggtcctcttgctactaggcctggttatgccactcgcaattattgcccaagtgcttagttataaagaagctgtcctgagggccatagatggtataaatcagaggagctctgatgcaaatctgtatcgcttactggatctggacccgcgtccaacaatggatggtgatccagacactcctaaaccggtatcttttacagtgaaagaaacggtttgccctcgcactacccagcagtctcccgaagactgcgacttcaaaaaggatggcctggtgaaaagatgtatgggcacagtcaccttgaaccaggccagggggtcttttgatatttcctgcgataaggacaataagaggttcgccctgttgggcgatttttttagaaagtccaaagagaaaattggcaaagaattcaaaaggattgtacagcggatcaaggatttcctgagaaacctggtgccccgcaccgagagc

SEQ ID NO: 8345 - DNA, 510 bp, synthetic construct
  misc_feature 1..510: note = source = /note="Description of Artificial Sequence: Synthetic coding sequence"
  source 1..510: mol_type = other DNA
atgaaaacgcagcgggacggacatagcctgggaaggtggtcgttggtgctcctgctgttggggcttgtgatgccccttgccataatcgctcaagtcctctcgtacaaggaagccgtcctccgcgccatcgatgggatcaatcaacgcagctctgacgcgaacctgtaccggctcctcgatctcgatccacgaccaactatggacggagatccggacacgccgaagccagtttcattcaccgtgaaagagactgtgtgtccccggaccactcaacaatcgccggaagattgcgacttcaagaaggacggactggtgaagcggtgcatgggaaccgtgaccctgaatcaagcgaggggttcctttgatatttcatgtgacaaggacaacaaacggttcgccctgctgggcgactttttccggaagtcgaaggagaaaatcgggaaggaattcaagagaattgtgcaacggatcaaggatttcctcagaaacctggtgcctcgcaccgaatca

SEQ ID NO: 8346 - DNA, 510 bp, synthetic construct
  misc_feature 1..510: note = source = /note="Description of Artificial Sequence: Synthetic coding sequence"
  source 1..510: mol_type = other DNA
atgaagactcagagggacggtcacagtctgggccggtggtccctcgtgctgctacttcttggactggttatgcccttagcaatcattgctcaggtgctttcttacaaagaggccgtccttcgagccatcgacggcatcaaccagaggtccagtgacgccaatttatacaggctgctcgatcttgatcctaggcccaccatggacggagaccccgatacgcctaagccagtgtcattcaccgtgaaagaaaccgtgtgtccgagaacaacccaacagagccccgaagattgtgattttaagaaggatggcctggtcaaacgctgtatgggcactgtaactctgaaccaggcaaggggatcattcgatatcagttgtgataaggataataaacgctttgcattactgggtgacttttttagaaagtccaaggaaaaaataggtaaagagttcaaaagaatcgtccagcgtatcaaggacttcctacggaacctggtgccgcgtacagagtcc

SEQ ID NO: 8347 - DNA, 510 bp, synthetic construct
  misc_feature 1..510: note = source = /note="Description of Artificial Sequence: Synthetic coding sequence"
  source 1..510: mol_type = other DNA
atgaaaacccagcgcgacggacacagcctgggccgctggtcactggtcctgctcctcctgggactggtgatgccactcgcgataattgcccaagtcctctcttacaaggaagcggtgctccgggccattgacgggatcaatcaacggagcagtgatgcaaatctgtaccgccttcttgacctcgaccccagaccgactatggacggcgatcctgacaccccaaaaccagtgtcgttcactgtgaaagaaaccgtgtgcccccgcacgacccaacagtccccggaggactgcgacttcaagaaggatgggttggttaaacgctgtatgggaacggtgactcttaaccaggcgagaggatctttcgatatctcctgcgacaaggacaacaagcgatttgctctgttgggtgatttctttcgtaagagcaaggagaagatcggcaaggaattcaagagaatcgtgcagaggatcaaagactttctgagaaaccttgtaccgaggactgagtcg

SEQ ID NO: 8348 - DNA, 510 bp, synthetic construct
  misc_feature 1..510: note = source = /note="Description of Artificial Sequence: Synthetic coding sequence"
  source 1..510: mol_type = other DNA
atgaaaacccaacgcgacggccatagcctcggtcggtggtcattggtgctgctcctgctgggcttggtgatgccgcttgctatcatcgcacaagtgctctcgtacaaagaagcggtgctcagagcaatcgatggaatcaatcaacgctcctcagacgccaacctgtacagactgctggacctggatcctagaccgactatggacggcgatcctgacaccccgaagccggtgtcgttcaccgtgaaggaaactgtctgcccccggactacccagcagtcaccggaagattgcgatttcaagaaggatggccttgtcaagcggtgtatgggaactgttaccctgaaccaggcccgcggatccttcgatatctcgtgcgacaaggataacaagcgctttgcactgctgggggacttcttccgcaagtcaaaggagaagatcggaaaggaattcaaaagaatcgtgcagcggataaaagactttcttagaaatctcgtcccaaggactgaatcc

SEQ ID NO: 8349 - DNA, 510 bp, synthetic construct
  misc_feature 1..510: note = source = /note="Description of Artificial Sequence: Synthetic coding sequence"
  source 1..510: mol_type = other DNA
atgaagacacaacgagatggtcactccctaggacgatggagcttggttttgctgctattgggtctggttatgcctcttgctattatagcccaagttctctcctacaaagaagcagtattgagagcaatcgatggtattaaccagagaagctcagatgcaaatctgtatcgactccttgacctggacccacgtccaacgatggatggcgatccagatacacctaagcctgtctcattcactgtgaaagagactgtttgcccccgtactactcagcaatcacccgaagattgtgatttcaaaaaagatggtttggtaaagagatgtatgggaaccgtcacacttaatcaggccagaggttcgttcgacattagctgcgataaagataataaacgcttcgctctgcttggtgatttttttcggaagtccaaggaaaaaatcggtaaggagttcaagagaatagtgcagcgtatcaaggatttcctccgtaatttagttcctagaacagaatct

SEQ ID NO: 8350 - DNA, 510 bp, synthetic construct
  misc_feature 1..510: note = source = /note="Description of Artificial Sequence: Synthetic coding sequence"
  source 1..510: mol_type = other DNA
atgaaaactcagagggatggacactcattgggcagatggtcgcttgtcctgctcctgctgggactggtgatgccactcgcaatcatcgcccaggtcctctcgtacaaagaagcggttctgcgggcaattgatggaattaaccagcgatcctcggacgccaacctttacaggctgctcgacctcgatcccagacctactatggacggcgacccggatactccaaaaccggtgtcctttactgtgaaggaaaccgtgtgcccgcgcaccacccaacaatcacctgaggactgcgacttcaaaaaggacggactggtcaagagatgcatggggactgtgacgcttaaccaggctagaggtagcttcgacatctcctgtgataaggacaataagcggtttgccctgctcggagacttcttccgcaaaagtaaggagaagatcgggaaagaattcaagcgcatcgtgcagcgcatcaaggatttccttagaaatctcgtgccgaggaccgagagt

SEQ ID NO: 8351 - DNA, 510 bp, synthetic construct
  misc_feature 1..510: note = source = /note="Description of Artificial Sequence: Synthetic coding sequence"
  source 1..510: mol_type = other DNA
atgaaaactcagagggatggacattcccttggacgttggtcactcgtcctgttgctgctcggcctggtgatgccgctggcgattattgcccaagtgctttcctacaaagaggccgtcctgcgggcgatcgatggaatcaaccaacggtcctccgacgcaaatctctaccgcctcctggaccttgacccccggcctaccatggacggggacccggatactccaaagcccgtcagtttcaccgtgaaagagactgtgtgtccacggaccactcagcagagcccagaagattgcgacttcaagaaagatggccttgtgaagcgctgcatggggaccgtcaccctgaatcaggcacggggctcctttgacatctcgtgtgacaaggacaacaaacgctttgcgctgctgggggacttcttccgcaagtcaaaggaaaagattgggaaggaattcaagagaattgttcaaagaatcaaggacttcctgcggaacctggtgccgaggaccgaatcc

SEQ ID NO: 8352 - DNA, 510 bp, synthetic construct
  misc_feature 1..510: note = source = /note="Description of Artificial Sequence: Synthetic coding sequence"
  source 1..510: mol_type = other DNA
atgaaaacccagcgcgacggacattcgttgggaagatggtcgttggtcctccttcttctgggccttgtgatgccgcttgccatcatagcacaggtgcttagctacaaggaggcagtgctcagagccatcgacggaatcaaccaacgttcctcggatgcaaacctctacaggttgctcgatctggatccccgccctactatggatggcgacccggacactcccaaaccagtgagctttactgtcaaggaaaccgtgtgccctaggactacccagcaatccccagaggactgcgatttcaaaaaggatggtcttgtgaaacgttgtatgggaacggtgaccctgaatcaagcccgggggagctttgatatctcatgtgataaagataacaaaaggttcgcacttctgggagactttttccgaaaatcaaaggagaaaattggcaaggagtttaagcggattgttcaaagaattaaggattttcttcgaaacctggtcccaaggaccgaaagc

SEQ ID NO: 8353 - DNA, 510 bp, synthetic construct
  misc_feature 1..510: note = source = /note="Description of Artificial Sequence: Synthetic coding sequence"
  source 1..510: mol_type = other DNA
atgaaaacgcagagagacgggcacagtctggggcggtggtcactggtgctcctcttgctcgggctggttatgcccctcgccataatcgctcaagtactgtcatacaaggaggccgtattgagggccattgatggcataaatcagcggtccagcgacgccaacctctaccgactgctggatctggacccacgaccgactatggatggagaccctgacacaccaaagccggtctcctttactgtcaaggaaacagtctgccctaggaccacgcagcaatcccccgaggactgtgatttcaagaaggacggcctggtgaagaggtgcatgggtactgttacactgaatcaggcgaggggttcctttgacatctcctgcgacaaagacaacaagcggtttgcactgctgggtgatttttttcggaagagcaaggagaaaatcggtaaggaatttaagaggattgtccagcgaataaaagacttcctcaggaacctcgtccccaggacagagagc

SEQ ID NO: 8354 - DNA, 510 bp, synthetic construct
  misc_feature 1..510: note = source = /note="Description of Artificial Sequence: Synthetic coding sequence"
  source 1..510: mol_type = other DNA
atgaaaactcaacgagatggtcatagtttaggtagatggagtcttgttttattattattgggattagttatgccacttgctattattgcacaagtcttatcatataaagaagcagtactaagagcaatagatggaattaatcaaagatcatcagatgcaaatttatatagattattagatcttgatccacgtccaactatggatggagatcctgatactccaaaacctgttagttttactgtgaaagaaactgtttgtccaaggacaacacaacaatcaccagaggattgtgattttaaaaaggatggtttggtaaaaagatgtatgggtactgttactttaaatcaagctagaggatcatttgatatcagttgtgataaggataataaaagatttgctcttctaggagacttttttagaaaatcaaaggaaaaaattggaaaagaatttaagagaattgtacaaagaattaaagatttcttaagaaatcttgttccaagaacagaatca

SEQ ID NO: 8355 - DNA, 510 bp, synthetic construct
  misc_feature 1..510: note = source = /note="Description of Artificial Sequence: Synthetic coding sequence"
  source 1..510: mol_type = other DNA
atgaaaacccagcgggatggacacagcttggggcgatggtcgctggtgctgctcctcctcgggctcgtgatgccactcgcgattatcgcgcaggtgctgagctacaaggaggccgtcctgagggcgattgacggaatcaaccagcggagttctgacgccaatctttacagactgctcgacctggatccacgacccaccatggatggcgaccctgacaccccgaagccggtgtcatttacggtgaaagagacggtctgtccacgcactacccagcagtcgccggaagattgcgacttcaagaaggacggactcgtcaagagatgcatggggactgtcaccctgaaccaagcccgcggatcgtttgatatctcttgtgataaagacaacaaacggtttgccttgctgggagacttcttccggaaatcaaaggagaagatcggaaaagaattcaaacgcatcgtgcaacggatcaaggatttcttgagaaatttggtgccgaggactgaatcg

SEQ ID NO: 8356 - DNA, 510 bp, synthetic construct
  misc_feature 1..510: note = source = /note="Description of Artificial Sequence: Synthetic coding sequence"
  source 1..510: mol_type = other DNA
atgaaaacgcagcgcgacggacactcacttggccgctggtccctggtgctgctgctgcttggtttggtgatgccacttgcgattatcgcccaggtgctcagctataaggaggccgtcttgagagctattgacggcatcaaccagagatcatcggacgctaacctgtaccggctgctggatctggacccgcgcccaaccatggatggtgacccggatacgccgaagcctgtctctttcaccgtgaaggagacggtttgcccgcggactacccagcagtccccagaggactgcgacttcaagaaggatggattggtgaagcgttgtatgggcactgtgaccctgaatcaagcgcggggctcgtttgatatctcctgtgataaagacaataagaggttcgcactcctcggtgacttctttcggaaaagcaaggagaagatcggcaaggaattcaaaagaatcgtccagcggattaaagacttcctgcggaacctggtgccgcgcaccgagtcc

SEQ ID NO: 8357 - DNA, 510 bp, synthetic construct; identical to SEQ ID NO: 8346
  misc_feature 1..510: note = source = /note="Description of Artificial Sequence: Synthetic coding sequence"
  source 1..510: mol_type = other DNA

SEQ ID NO: 8358 - DNA, 510 bp, synthetic construct
  misc_feature 1..510: note = source = /note="Description of Artificial Sequence: Synthetic coding sequence"
  source 1..510: mol_type = other DNA
atgaaaacccagcgcgacgggcactcactgggccgttggtctctggtcctgctgctgctggggctcgtgatgccgctggcaatcatagcccaagtcctgtcatataaggaagctgtactgcgggcaatcgatggcattaaccagcgctcctcggatgctaacttgtacaggctactggatttagaccctaggcctaccatggatggcgatcctgatacaccaaaaccggtgagctttacggtgaaggaaacagtgtgccccagaacaactcaacagagtccagaagactgcgacttcaaaaaagatgggctcgtgaaaaggtgcatgggcacagtgacgctgaatcaagcccgtgggtcatttgacatttcctgtgataaagacaacaaacgcttcgcgttgctcggagatttctttcggaagtcaaaggagaagatcggtaaagagttcaagcgcatcgtgcaacgaatcaaagattttttacgtaacttggtgcctaggactgagagc

SEQ ID NO: 8359 - DNA, 510 bp, synthetic construct
  misc_feature 1..510: note = source = /note="Description of Artificial Sequence: Synthetic coding sequence"
  source 1..510: mol_type = other DNA
atgaagactcagagggacggccactcactgggtcgctggtccctggtgctgctgctcctcggcctggtaatgcctctggccatcatcgcacaagttctaagctacaaggaggcagttttgagagcaatcgatgggatcaaccagaggagctcagacgctaatttatacagactgctcgaccttgacccgcggcccaccatggatggcgacccagatacaccgaaaccggtgtcattcacagtgaaggaaaccgtgtgccctcggaccacccaacagtctcccgaagattgtgattttaagaaggatgggctggttaaacggtgcatgggtacggttacactgaaccaggctcgggggtcctttgatattagctgcgataaagataacaagcgctttgctttactgggggacttcttccgcaagtcaaaggagaaaatcggcaaggagttcaaacgaatcgtccagcggatcaaagactttctcaggaatctggtgccaaggacggaatct

SEQ ID NO: 8360 - DNA, 510 bp, synthetic construct
  misc_feature 1..510: note = source = /note="Description of Artificial Sequence: Synthetic coding sequence"
  source 1..510: mol_type = other DNA
atgaagacccagcgggacggtcactcgctgggacgctggtcacttgtcctgctccttctgggtctggttatgcccctggctatcatcgcacaagtgctgagttacaaagaggccgttctccgtgcgatcgatggtatcaatcaaaggtcgagtgatgcgaatctctaccgattgctcgatcttgacccacgtccgacgatggatggcgaccccgatacgcccaagccagtttccttcacggtgaaggagactgtttgcccacgtactacacagcagagcccggaggattgtgacttcaagaaggatggtttggtgaagcgctgcatggggactgtgaccttaaaccaagcacgagggagctttgatatttcctgcgataaagataataaacgatttgccctgttgggagatttcttccgcaagtccaaagagaagataggcaaagagtttaagcgcattgttcagcgtatcaaggattttctcaggaacctggtccctagaacagagagt

SEQ ID NO: 8361 - DNA, 510 bp, synthetic construct
  misc_feature 1..510: note = source = /note="Description of Artificial Sequence: Synthetic coding sequence"
  source 1..510: mol_type = other DNA
atgaaaacccaacgtgacggacattcccttggtcgttggagccttgtgcttctcttgcttgggctcgtgatgccccttgctattatcgcgcaagtgctttcgtacaaggaggcagtgctgagagctattgatgggattaatcagcggtcgtccgatgcaaatctgtaccggctgcttgatctggaccctagaccaactatggacggtgaccctgataccccaaagcccgtttcctttaccgtcaaggaaaccgtgtgtcccagaactactcaacaaagccctgaggattgtgacttcaagaaggatggccttgtgaagagatgtatgggaacggtgacgcttaaccaagcacgcggttcatttgacattagctgcgataaggataacaagcggttcgcacttctcggagatttcttccgcaaatcaaaggaaaagattggaaaggagtttaagcgaattgttcagcgcataaaagattttctccgtaaccttgttccacggaccgaatcc

SEQ ID NO: 8362 - DNA, 510 bp, synthetic construct
  misc_feature 1..510: note = source = /note="Description of Artificial Sequence: Synthetic coding sequence"
  source 1..510: mol_type = other DNA
atgaagacacaacgtgacgggcactcgcttggtcgatggtctttggtcctgctcttgctcgggttggtaatgccccttgctatcatcgctcaggttctgagctacaaggaagctgttttacgggcgatcgatgggattaatcaacgctctagcgacgcaaatctctacagattgttggatcttgatccgcgtccgaccatggacggtgatcccgacactccgaagcccgtgtccttcactgtgaaagagaccgtgtgccctcgaaccacccagcaaagcccagaggattgcgatttcaagaaggatgggctggttaagaggtgtatgggaacggtaacattaaaccaagccagaggctcgtttgatatatcgtgtgacaaggataacaaaaggttcgcgttgctcggcgacttctttcgaaagagtaaagagaagattggcaaggaatttaagcgcatcgtgcagaggatcaaggattttttgcgtaatctggtcccacgaaccgagagt

SEQ ID NO: 8363 - DNA, 510 bp, synthetic construct
  misc_feature 1..510: note = source = /note="Description of Artificial Sequence: Synthetic coding sequence"
  source 1..510: mol_type = other DNA
atgaaaacgcagcgtgacgggcactccttaggtcggtggagtctggttctgctactgctgggccttgtgatgcccttagccatcatcgcccaggtactgtcctacaaggaagcggtgctcagagctattgacggtattaatcagaggagctctgatgctaacctctatcgactgctcgatttggaccctagaccaaccatggatggtgatcccgacactcctaaacctgtatctttcacagtaaaagaaacagtgtgcccccgtacgacgcagcagagccccgaggattgtgattttaaaaaagatggacttgttaagcgttgcatgggcacggtgacactaaatcaggctcgcggttcctttgacatatcttgcgacaaagataataaaaggttcgccctgctcggagatttcttccggaagtccaaggaaaaaattggaaaggagtttaaacgcatcgtccagcgaattaaggattttttacgcaacctggtgccaagaacagaaagt

SEQ ID NO: 8364 - DNA, 510 bp, synthetic construct
  misc_feature 1..510: note = source = /note="Description of Artificial Sequence: Synthetic coding sequence"
  source 1..510: mol_type = other DNA
atgaagacacagagggacggccattcgctcggacggtggtccttggtactgttattgctggggctcgttatgccccttgccatcatcgctcaggtcctcagttacaaagaggccgtgctgagagcaattgacggtataaatcagcgctctagcgatgctaatctgtatcggctcctcgatttggatcctaggcctactatggacggtgatcctgatacgcccaaacccgtttcttttactgttaaagaaactgtatgtccgcggactacgcaacagtctcctgaggactgtgactttaagaaggatgggcttgtcaaacggtgcatgggcaccgtcaccctcaatcaggcccgcggctcatttgatataagctgcgacaaggataacaaacgcttcgctctactgggggattttttcaggaaatccaaggagaaaatcggcaaagagttcaagcgaatagtgcagaggatcaaagactttctgaggaatctcgtgccccgcacagaatct

SEQ ID NO: 8365 - DNA, 510 bp, synthetic construct
  misc_feature 1..510: note = source = /note="Description of Artificial Sequence: Synthetic coding sequence"
  source 1..510: mol_type = other DNA
atgaaaacccagagagacggtcatagtttggggcgttggtcactggttcttctgctactgggtctcgtgatgccacttgctattattgcacaggtgctttcatacaaggaggccgtgctgagggccatcgatggcataaatcaacggtccagtgatgccaacctgtatcgcctgctggacctggacccacggcccactatggatggcgaccctgatacccctaagcccgtgagtttcaccgtcaaggaaacagtatgcccacgtacaacacaacaatcaccagaagactgtgatttcaagaaagatggcttagtgaaacggtgcatggggacagtgaccctgaatcaagcacgcgggtccttcgacattagctgcgataaagacaacaaacggtttgccttgttaggcgacttttttcggaagagtaaggaaaaaatcggaaaagagtttaagcgaattgtgcagcgtatcaaggacttccttcggaatctggtgcccaggacagagtcc

SEQ ID NO: 8366 - DNA, 510 bp, synthetic construct
  misc_feature 1..510: note = source = /note="Description of Artificial Sequence: Synthetic coding sequence"
  source 1..510: mol_type = other DNA
atgaaaacacagcgcgatggtcacagcctgggcaggtggtctttggttcttttgctgctcggactggtcatgcccctagcaattatcgcacaggtcctgtcgtacaaagaagccgtcctgcgggcgatcgatggaatcaaccagcgcagttctgacgcaaatctgtacagactcctggacctcgaccctagacctacaatggatggagatcctgacactcctaaacctgttagttttaccgtgaaggagaccgtgtgtcctaggaccacccagcagtcacccgaggattgtgattttaagaaagatggtctggtgaagcggtgtatgggaacagtgacacttaatcaggccagaggctcttttgatatttcgtgtgataaagacaacaaaaggttcgcactgctcggagacttcttccggaaatctaaagaaaagattgggaaggagtttaaacgcattgtacaaagaatcaaggattttctcagaaacttggtcccgcggacagagtcc

SEQ ID NO: 8367 - DNA, 510 bp, synthetic construct
  misc_feature 1..510: note = source = /note="Description of Artificial Sequence: Synthetic coding sequence"
  source 1..510: mol_type = other DNA
atgaaaacacagagagacgggcacagcttgggccgttggagcctagttttgctgctgttgggactggtgatgcccctcgccattatagcacaggtgctttcctacaaggaagcggtgctgcgtgcgatagatgggattaatcagcgcagctcggatgccaacttgtacagacttctcgatctggatcctaggcctactatggacggtgaccccgacactcccaagcccgtaagttttaccgtcaaagagaccgtctgccccagaacaacccagcagagccctgaggattgtgatttcaagaaggacggcctggtgaagcgctgcatgggcaccgtgactttgaatcaggcaaggggcagctttgatataagctgtgacaaagacaacaagaggttcgctctcctcggtgatttcttcagaaaaagcaaagagaagattggcaaagaatttaagcggatcgtgcagagaatcaaggattttcttaggaatctagtccccaggactgagagt

SEQ ID NO: 8368 - DNA, 510 bp, synthetic construct
  misc_feature 1..510: note = source = /note="Description of Artificial Sequence: Synthetic coding sequence"
  source 1..510: mol_type = other DNA
atgaaaacccagcgggacggacattccctcggccgctggagcttggtcctgctgctgctcggtttggtgatgccgctggccatcatcgcccaagtgctgagctacaaggaggcagttctccgggctatcgacggaatcaaccaacggtcatccgacgcgaatctctaccgcctcctggacctcgatccccgccctactatggacggagatcccgacactccgaagcccgtctcgttcaccgtgaaggaaaccgtgtgccctcggactacccaacagtcaccagaagattgtgactttaagaaggacggcctcgtgaaacgctgtatggggactgtgactctgaatcaagccaggggatcgttcgacatctcatgcgacaaggataacaagcgcttcgccctgctgggcgactttttccgcaaatcaaaggagaagatcggcaaggaattcaagcgcattgtccagagaatcaaggattttcttaggaacttggtgccgagaactgagagc

SEQ ID NO: 8369 - DNA, 510 bp, synthetic construct
  misc_feature 1..510: note = source = /note="Description of Artificial Sequence: Synthetic coding sequence"
  source 1..510: mol_type = other DNA
atgaaaacgcagagggacgggcactcccttggacggtggagcctggtactgctgctgctcgggttggtcatgcccctagctataatcgcacaggtcctgtcttacaaagaggccgtcttacgggccatcgacggcattaaccaaaggtccagcgacgccaacctttatcggctgctagacttggacccccgaccaacaatggatggcgaccccgacactccgaagcccgtgtctttcactgtgaaggagacggtttgccctaggacgacccagcagagccctgaggactgtgattttaaaaaggatggcttggtgaagaggtgtatgggcacagttaccctgaatcaggcccgcggatcatttgatatatcctgtgacaaggacaacaagcgatttgcgttgttgggagactttttcagaaagtccaaggaaaaaattggcaaagaatttaagcgcatcgtacagagaattaaggacttcctgagaaacttagtgccacggacagagagt

SEQ ID NO: 8370 - DNA, 510 bp, synthetic construct
  misc_feature 1..510: note = source = /note="Description of Artificial Sequence: Synthetic coding sequence"
  source 1..510: mol_type = other DNA
atgaaaacgcagagggatgggcactcgcttggaaggtggagcctggtgctccttctgctcggactcgtcatgccattggccatcattgcacaagtgctctcatacaaggaagcagtgctgagggcaattgatgggatcaatcaaaggtcatcggatgcaaacctgtacagacttctggaccttgacccacgccccaccatggatggtgacccagataccccgaagccggtgtcatttaccgttaaggaaaccgtgtgtcctcgtaccactcaacaatccccagaagattgcgatttcaagaaggatggcctggtgaagcgctgtatgggtacggtgaccttgaaccaggcaaggggatcatttgatattagctgtgataaagataacaagagattcgcacttctcggagactttttccgaaagtcaaaggagaaaataggaaaggaattcaaacggatcgtccaacgcataaaagacttccttcgcaacctcgtgcccagaaccgagagc

SEQ ID NO: 8371 - DNA, 510 bp, synthetic construct
  misc_feature 1..510: note = source = /note="Description of Artificial Sequence: Synthetic coding sequence"
  source 1..510: mol_type = other DNA
atgaagacccagcgggacggacatagtctgggacggtggtctctggtacttctgcttctaggcttggtcatgcctctggccatcattgcgcaagtgctctcatacaaagaagcagtgctgcgggcaatcgatgggatcaatcaacgttcctctgatgccaatctctatcgattgctggacttggatcctcgtcctaccatggatggagaccccgatacccccaagcccgtgtcatttaccgtgaaagaaaccgtatgcccacgaacaacacagcagagtccagaggattgcgacttcaagaaagatggtttggtgaagagatgcatgggcaccgtgacattgaatcaggcccgcggcagcttcgatatctcttgcgacaaggataacaaacgctttgctctgctcggcgacttcttccgaaagtccaaggagaaaataggcaaggagtttaagaggatcgtgcagaggattaaggattttctcaggaacctggtgcccaggacagaatcc

SEQ ID NO: 8372 - DNA, 510 bp, synthetic construct
  misc_feature 1..510: note = source = /note="Description of Artificial Sequence: Synthetic coding sequence"
  source 1..510: mol_type = other DNA
atgaaaacccagcgggacggacactcactcggacgctggtcactggtcttgctgctgcttgggctggtgatgcctctggctattatcgcccaggtcctgagctacaaggaagcggtgctgcgcgctatcgatggaatcaatcagcgcagctcggatgcgaatctctaccgcctccttgacctcgacccgaggccgaccatggacggtgacccggacaccccgaaacccgtatccttcaccgttaaggaaactgtgtgcccaagaaccactcaacaatcacctgaggactgcgacttcaagaaagacggactcgtcaagcgctgcatgggcactgtgactctgaaccaagcacgcggttcgttcgacatctcatgtgacaaggacaacaagaggtttgccctgctgggggactttttcaggaagtccaaggagaaaatcggaaaagaattcaagcgcatcgtccagaggattaaagatttcttgaggaaccttgtgccacgcaccgagtcg

SEQ ID NO: 8373 - DNA, 510 bp, synthetic construct
  misc_feature 1..510: note = source = /note="Description of Artificial Sequence: Synthetic coding sequence"
  source 1..510: mol_type = other DNA
atgaaaacgcaaagagatggccactcgctgggtagatggtcgctggtcctcctgttgctgggactggtcatgccgctcgccataattgcacaggttctctcatacaaggaagccgtgctgagggccattgatggcattaaccaacgctcgtccgatgctaatctttacagattgctggatcttgacccacgccctaccatggacggggatccagatacccctaagcctgtgtcatttactgtcaaggaaactgtgtgtccgcgaacgactcaacagtccccagaagattgcgatttcaagaaggatggacttgtgaagcggtgtatgggaaccgtgactctgaaccaagccagaggttcgttcgacatttcgtgcgataaggacaataagaggtttgcactgctgggagacttttttcgtaagtccaaggaaaagattggtaaggagtttaaacgcattgtgcaacgcatcaaagactttttgcgaaacctggtgccacgcaccgaatcg

SEQ ID NO: 8374 - DNA, 510 bp, synthetic construct
  misc_feature 1..510: note = source = /note="Description of Artificial Sequence: Synthetic coding sequence"
  source 1..510: mol_type = other DNA
atgaagacacagagggacggtcactccctagggagatggtccctcgttttgctgctcttgggacttgtaatgccgcttgcaatcattgcccaagtcctgagctataaggaagctgtgttaagggcgatcgacgggatcaaccagcgctcctctgacgctaatctgtaccggctgctcgacctggatccacgtccaaccatggatggagacccagacacgcccaagcccgtatccttcactgttaaagagacagtgtgtcctaggaccacgcagcagagccctgaagactgcgatttcaaaaaggatggactggtaaagcggtgtatgggcaccgtaacactgaaccaagccagggggagtttcgacatttcatgtgataaggacaacaagcggtttgcactgctaggagacttctttagaaaatctaaggaaaagataggcaaagagttcaaacggatcgtgcaaaggattaaggacttcctgcgcaacctggtgccgcggaccgagagc

SEQ ID NO: 8375 - DNA, 510 bp, synthetic construct
  misc_feature 1..510: note = source = /note="Description of Artificial Sequence: Synthetic coding sequence"
  source 1..510: mol_type = other DNA
atgaaaacccagcgggatgggcattcccttggaagatggagcctggtgctgctgcttctcggactcgttatgccgctcgcaattatcgcccaagtgttgagttacaaggaagctgtacttagggccattgacggcataaatcaacggagctcggatgccaacctttaccgtctcctcgatcttgatcctaggcctactatggacggtgatccagataccccaaagcctgtctcattcaccgtcaaagaaaccgtgtgtccaaggacgacccagcagagcccggaggattgtgacttcaaaaaagacggacttgtcaagcgttgtatgggaaccgtgactctcaaccaggcaagaggctcctttgatatctcgtgtgacaaggataacaagagatttgcccttctgggagatttctttcggaagtcgaaggagaagataggtaaggagtttaagcggatcgtgcaacgtattaaggatttccttagaaacctggtgccccgcactgaatcg

SEQ ID NO: 8376 - DNA, 510 bp, synthetic construct
  misc_feature 1..510: note = source = /note="Description of Artificial Sequence: Synthetic coding sequence"
  source 1..510: mol_type = other DNA
atgaaaacccagcgcgatggacattcactgggacgttggtcccttgtgttgttgcttttgggccttgtcatgccgctcgcgattatcgcacaagtgctgtcatacaaggaagcagtcctgcgggccattgacggaattaaccagagatcctccgacgctaatctgtataggctgctcgatctcgatccacgccccactatggatggggaccctgatacgccaaagcccgtgagctttaccgtgaaggagactgtgtgccccagaaccactcagcaatcgcctgaggattgtgatttcaaaaaggacggtctggtcaaacggtgtatgggaactgtgactcttaaccaggcgcgcggttcgtttgacatcagctgcgacaaggataacaagagatttgcattgctgggagactttttcaggaagagcaaagaaaagattggaaaagagtttaagcgtatcgtgcagcgcattaaggattttctgaggaaccttgtgcctaggaccgaaagc

SEQ ID NO: 8377 - DNA, 510 bp, synthetic construct
  misc_feature 1..510: note = source = /note="Description of Artificial Sequence: Synthetic coding sequence"
  source 1..510: mol_type = other DNA
atgaagacccagcgcgacggtcattcactcggccggtggtctctggtactactgctgttaggccttgtgatgcctctggccattatcgcccaggttttgtcctataaggaagccgtcctacgcgccatcgacgggataaaccaacgcagctccgacgctaatctttatcgtctgctcgatttggaccctaggcccaccatggacggggaccctgatactcccaagcccgtaagttttaccgtgaaggaaaccgtgtgcccgaggactacccagcagtcccctgaagattgcgacttcaagaaggacggcctggtgaaaagatgcatgggcactgtgaccctcaaccaggctagagggagtttcgatatctcttgtgacaaggataacaaacgctttgccttgttaggtgactttttccgcaagtcgaaagaaaaaatcggcaaggaatttaaacggatagtgcagagaatcaaagacttcctgcgcaatctcgtcccaagaacagaaagt

SEQ ID NO: 8378 - DNA, 510 bp, synthetic construct
  misc_feature 1..510: note = source = /note="Description of Artificial Sequence: Synthetic coding sequence"
  source 1..510: mol_type = other DNA
atgaaaactcagagagacggccattcactgggacgctggtcgctggtgctcctcctcctgggccttgtgatgcctctcgccatcatcgctcaggtcctgagctacaaagaagcagtcttgcgcgccatcgatggaatcaaccaaagatcctctgacgctaacttgtaccgcctgctggatctggatccacgcccgactatggacggagatccggacacgcccaagccggtttcgttcactgtgaaggaaaccgtgtgccctcggaccactcaacaaagcccagaggactgcgacttcaagaaagatggactcgtgaagaggtgtatgggaaccgtgaccctcaaccaagcccgcgggagcttcgatatcagctgcgataaagacaacaagaggttcgcactcctcggggacttctttcggaagtcgaaggaaaagatcggaaaggagttcaaacgcatcgtgcaaagaatcaaagactttctgagaaatctggtgccaagaaccgaatca

SEQ ID NO: 8379 - DNA, 510 bp, synthetic construct
  misc_feature 1..510: note = source = /note="Description of Artificial Sequence: Synthetic coding sequence"
  source 1..510: mol_type = other DNA
atgaaaacccaacgggacggccatagcttgggtcgctggtcacttgtgctgctcctgcttggcctcgtcatgcctctcgccatcattgcccaggtgttgtcgtacaaggaggccgtgctgcgcgccatcgatggaatcaatcaacgctcgtccgacgctaatctctacagactcctcgacctggatcctcgcccaaccatggatggggacccagacactcctaaaccggtgtcgttcaccgtgaaagagacggtctgcccacgcaccacccaacagtcgccggaggactgcgatttcaaaaaagacggacttgtgaagaggtgcatgggtaccgtgacgctgaaccaggcacgcggatcattcgacatttcatgtgataaagacaataagcgcttcgccctgttgggagatttcttcagaaagagcaaggagaagatcggcaaggagtttaagaggatcgtgcaacgcatcaaggatttcctgcggaacctggtcccgagaactgagtcc

SEQ ID NO: 8380 - DNA, 510 bp, synthetic construct
  misc_feature 1..510: note = source = /note="Description of Artificial Sequence: Synthetic coding sequence"
  source 1..510: mol_type = other DNA
atgaagacccagagagacggccatagtctcggcagatggtctctcgtgctcttactcctagggctcgtgatgcccctggctatcattgctcaagttctgagctacaaagaagcagtgctgagggccatagacggaatcaaccagaggtcaagcgacgctaatctgtaccgcttgttagaccttgatcccaggccgacaatggacggagatccagatacccccaagccggtgagctttacagtcaaggaaactgtgtgcccaaggacaactcaacagtcccccgaagactgcgactttaaaaaagatggactggtgaagagatgcatgggaaccgtaacgctgaaccaagctaggggatctttcgatatcagctgcgacaaagataacaagagatttgccctgcttggcgattttttccggaagagcaaggagaagatcggcaaggagttcaaacgcatcgtgcagagaattaaggacttccttagaaaccttgtaccgcgcaccgaaagt

SEQ ID NO: 8381 - DNA, 510 bp, synthetic construct
  misc_feature 1..510: note = source = /note="Description of Artificial Sequence: Synthetic coding sequence"
  source 1..510: mol_type = other DNA
atgaaaacccagagagacggtcatagcctgggccgttggtcacttgtactcctcctcctggggctggtaatgcctctggccatcattgcccaagtgctgagctataaggaagcagtgctgagagccattgatgggattaaccagcggtccagcgatgccaacttgtaccgcctacttgatttggaccccagacctacgatggacggggaccctgacacccccaagccagttagctttacagtgaaagaaaccgtctgtccgaggacaacacaacaaagcccagaggactgcgacttcaagaaggacgggctcgtgaagcgatgcatgggtacagtcacacttaaccaagctcggggtagcttcgatatctcctgcgacaaagacaataagcggttcgccctgctgggcgacttctttagaaagagtaaggagaagattggcaaggaatttaagagaatcgtgcagcgtatcaaggactttctgcgaaatcttgtgccaaggaccgagagc

SEQ ID NO: 8382 - DNA, 510 bp, synthetic construct
  misc_feature 1..510: note = source = /note="Description of Artificial Sequence: Synthetic coding sequence"
  source 1..510: mol_type = other DNA
atgaaaacccagcgggacggtcacagtctcggacgctggagcctggtgctgctccttcttggcctggtaatgccgctcgcaataatcgcgcaggtgctttcatacaaggaagccgtgctgagagcgatcgacggaatcaatcagcggtcatcggatgcaaacctgtaccgcttgctcgacctggacccacggccaaccatggatggtgacccggatactccgaagccagtgtcattcaccgtgaaggaaaccgtgtgccctcgcaccactcagcaatccccggaggactgcgacttcaagaaggatggattggtgaaacgatgcatgggaacggtcaccctgaaccaggccaggggctccttcgatatctcctgcgataaggacaacaaacggttcgccctgttgggggacttctttcggaaatccaaagagaagatcggaaaggagtttaagcggatcgtgcagcggatcaaggacttcctgcggaatttggtccctcgcactgagtcc

SEQ ID NO: 8383 - DNA, 510 bp, synthetic construct
  misc_feature 1..510: note = source = /note="Description of Artificial Sequence: Synthetic coding sequence"
  source 1..510: mol_type = other DNA
atgaagacccagagggacggacacagtcttggcaggtggagcttggttctgctgttgctcgggctggtaatgcctctggccatcatagctcaggttctgtcctacaaagaggcagtgctccgggccattgacggtataaaccagaggtccagcgacgccaatctgtatcgactcctggaccttgacccaaggcctacaatggatggtgaccccgatacccctaagccggtgtcctttactgtgaaagagaccgtgtgccctcgcactacccagcagtctcctgaggactgcgattttaagaaggatggcctggtgaaacggtgtatgggcaccgtgaccctcaaccaggcccgcggcagcttcgatatttcttgcgataaggacaataaaagattcgcactcctcggcgatttctttcgcaagagtaaggagaaaatagggaaggagtttaaaagaattgtgcaacggatcaaagactttctcagaaatctcgtgccacgcacagaatcc

SEQ ID NO: 8384 - DNA, 510 bp, synthetic construct
  misc_feature 1..510: note = source = /note="Description of Artificial Sequence: Synthetic coding sequence"
  source 1..510: mol_type = other DNA
atgaaaacgcagcgcgacggtcacagcctgggccgttggtcccttgtgcttctcctcctcggtttggtgatgcctctggcgatcatagcacaagtgctgtcttacaaagaagccgttctgcgggccattgacggcattaatcagcggtcgtccgatgccaacctttataggctgcttgaccttgatcctagacctactatggatggtgaccctgatactcccaagccagtctcatttaccgtgaaggaaactgtgtgtccgcggactactcagcagtcgcccgaagattgcgatttcaagaaagatggtcttgtgaagcgttgcatgggtaccgtcaccctgaaccaagcgaggggtagcttcgatatttcatgtgataaggacaataagagattcgccctcctgggcgactttttcagaaagtcaaaggaaaagatcggaaaagagtttaagagaattgtgcagcgcatcaaggattttcttcggaatctggtccccaggactgaaagc

SEQ ID NO: 8385 - DNA, 510 bp, synthetic construct
  misc_feature 1..510: note = source = /note="Description of Artificial Sequence: Synthetic coding sequence"
  source 1..510: mol_type = other DNA
atgaagacccagagggatggacacagtctgggacggtggagcctcgtgcttctgttactgggcctcgtcatgccgttggcgataatcgctcaagtactttcatataaggaagccgtcctcagagctatcgatggaatcaaccagcggtcatccgacgctaacttatatcgcctgttggatctggacccccgcccaactatggatggggaccctgatactcccaagccggttagtttcaccgtcaaagagacggtgtgtcctaggaccacgcagcagtctccggaggattgcgacttcaaaaaggatggtcttgtcaagaggtgtatggggaccgtgacgctgaaccaagcacgcggctctttcgatatatcatgtgataaggacaacaaacgctttgctcttctgggcgatttttttcgtaagagcaaggagaaaattgggaaggaattcaagcgtattgtccaaagaataaaagacttccttaggaacctggtccctagaacggaaagc

SEQ ID NO: 8386 - DNA, 510 bp, synthetic construct
  misc_feature 1..510: note = source = /note="Description of Artificial Sequence: Synthetic coding sequence"
  source 1..510: mol_type = other DNA
atgaagacacaacgtgatggccattcacttggaaggtggtcccttgtcttattgttacttggccttgtaatgcccttagcaattatcgctcaagtattgtcttacaaggaggctgtgctacgagctatcgatgggatcaatcaaagaagttcagatgctaatctttaccggctcctcgatttggatcctcgtcccacgatggacggagatccagacacgccgaaaccagtatctttcactgtgaaagagactgtttgtccacgaacaacacagcagagcccagaggactgtgattttaaaaaagatggactcgtaaaaagatgtatgggaacagtaacactgaatcaagcgaggggatcgttcgatatttcatgcgacaaagacaataagcgatttgccctgcttggagactttttcagaaagagcaaagaaaagattggaaaggaattcaagagaattgttcaacgcataaaagactttttaaggaatttggttccacgaactgagtcc

SEQ ID NO: 8387 - DNA, 510 bp, synthetic construct
  misc_feature 1..510: note = source = /note="Description of Artificial Sequence: Synthetic coding sequence"
  source 1..510: mol_type = other DNA
atgaaaacccaacgtgatggtcattccctggggaggtggtccctggtcctgctgctgttgggattggtgatgcctcttgcaattatcgcacaggtcctttcttacaaagaggcagtccttcgagcgattgacggaatcaaccaacggtcgagcgatgcaaacctttataggctgctcgatcttgatcctagacccaccatggacggggaccccgataccccaaagcctgtgtcatttaccgtgaaggaaaccgtctgtccaaggactacgcaacagtcgcctgaggactgcgatttcaagaaggatggtctggtgaagaggtgtatgggcaccgtgactcttaaccaagcccggggttcgtttgacatatcgtgcgacaaggacaataaacgattcgcgctgttgggcgactttttccgcaagtccaaggaaaagattggaaaagaattcaagcggattgtgcaaaggattaaggattttcttagaaatcttgtgccacgtaccgaatcg

SEQ ID NO: 8388 - DNA, 510 bp, synthetic construct
  misc_feature 1..510: note = source = /note="Description of Artificial Sequence: Synthetic coding sequence"
  source 1..510: mol_type = other DNA
atgaaaacccagagagacggacattcgctgggcagatggtcactggtccttctccttcttggacttgtgatgcctcttgcaatcatcgcccaggtgctgtcttacaaggaagcagtgcttagagccatcgatggtatcaatcagagatcatcggacgcaaacctttaccggctgttggacctcgatcctcggccgactatggacggcgatcctgatactcctaaaccagtctcattcacggttaaagaaacggtgtgtccacggactacccaacaatcccctgaggactgtgatttcaagaaagatggtctggtcaagcggtgcatgggaactgttactctgaaccaagctagaggatcgtttgatattagctgcgataaggataacaagagattcgcccttctgggtgatttctttcgcaagtcaaaagaaaagataggtaaagagtttaagcgaattgtgcagcgtatcaaggactttcttagaaatctggtccctagaaccgaaagc

SEQ ID NO: 8389 - DNA, 510 bp, synthetic construct
  misc_feature 1..510: note = source = /note="Description of Artificial Sequence: Synthetic coding sequence"
  source 1..510: mol_type = other DNA
atgaaaactcagcgtgatggacacagcctgggacgctggtcgctggtgctgctcctcctgggactggtgatgccgctcgcgatcatcgctcaggtcctgagctacaaggaggcagtcctgagagccattgacggcatcaatcaaagatccagcgatgccaacttgtacaggctcctggatctcgaccccaggcctacgatggacggggacccggacaccccgaagcctgtgtcgttcactgtgaaggaaactgtgtgcccacgcaccacccagcagtccccagaggactgcgattttaagaaggatggattggtgaagcgctgcatgggcaccgtgaccttgaaccaagcccgaggttccttcgacatctcatgtgacaaagacaacaagcggttcgcgctgctgggcgacttctttcggaaatcaaaagaaaagatcggaaaggaattcaaacgcattgtccaaagaatcaaggatttccttcggaatcttgttccgcggactgagtcg

SEQ ID NO: 8390 - DNA, 510 bp, synthetic construct
  misc_feature 1..510: note = source = /note="Description of Artificial Sequence: Synthetic coding sequence"
  source 1..510: mol_type = other DNA
atgaaaacccaaagggacggacactcgcttggtcggtggagcctggtcctgttgctgctcgggctggtcatgccactggccattatagcgcaggtgctgtcctacaaagaggctgtgctccgggcaatcgatggtatcaatcaaaggtcctcggacgccaatctctaccgactccttgatctcgatccgcgcccaaccatggacggcgacccggacaccccgaagccagtctcgttcaccgtcaaggaaaccgtctgcccacgcacgactcagcagtcccccgaggattgcgacttcaaaaaggatggacttgtgaaacggtgtatggggaccgtaactctcaatcaggccagaggcagctttgatatctcatgcgataaagacaataagcgtttcgctctgttgggagattttttccgtaagagcaaggagaagatcggcaaggaattcaagagaattgtgcaacggatcaaggacttcctgcggaacttggtgcctcgcactgaatct

SEQ ID NO: 8391 - DNA, 510 bp, synthetic construct
  misc_feature 1..510: note = source = /note="Description of Artificial Sequence: Synthetic coding sequence"
  source 1..510: mol_type = other DNA
atgaaaacgcagcgcgacggtcactccttgggacggtggtcactggtgctgctcttgctgggccttgtgatgcccctggccatcatcgcacaagtcctttcgtacaaagaagccgtccttcgggcgatcgacggtatcaatcagcggagctcagacgcaaatctgtaccgccttctcgatctcgatccaaggccgactatggacggagatccagatactccgaaacctgtgtcattcaccgtgaaggaaaccgtgtgcccaagaacgacccagcagtcccctgaggactgtgacttcaagaaggatggactggtaaagaggtgcatgggcacggtgactctgaaccaggctcgtggatcgtttgacatctcatgcgataaggacaacaagagattcgccctgctcggggacttctttcgaaagtcaaaggaaaagataggaaaagagttcaaacggatcgttcaaagaatcaaagacttcctgaggaacctcgtgcctcggaccgaatct

SEQ ID NO: 8392 - DNA, 510 bp, synthetic construct
  misc_feature 1..510: note = source = /note="Description of Artificial Sequence: Synthetic coding sequence"
  source 1..510: mol_type = other DNA
atgaagacacagagggatgggcattccctcgggcgatggtctttagtcttgcttctcctcgggttggtcatgcctcttgcaatcatcgcgcaggtgttgtcatataaggaagcagtcctccgggccatagatggaatcaatcagcgctccagtgacgcgaacctgtaccgcctgcttgatctcgatccaaggcctaccatggacggggaccccgatacacctaaacctgtctctttcacagtgaaggagacagtgtgtccaagaactacacagcagagtccagaggattgcgattttaagaaagatggcctagtgaaacggtgtatgggcaccgtgacactgaaccaggcaagaggcagtttcgatatctcctgcgacaaagacaataagcgctttgcccttctgggggacttcttcaggaagtccaaggagaagattggaaaggaattcaagaggatagtgcaacggattaaggatttcctgcggaacttagtcccaaggactgagagc

SEQ ID NO: 8393 - DNA, 510 bp, synthetic construct
  misc_feature 1..510: note = source = /note="Description of Artificial Sequence: Synthetic coding sequence"
  source 1..510: mol_type = other DNA
atgaaaacccagcgcgatggacactcgttgggacggtggtccctggtgcttctgctgctcggactggtgatgccacttgctattatcgcacaggtcctgtcgtacaaggaagccgtgctgagagcgatcgacggaatcaaccaaaggagctcagacgccaacctctatcggctcctggatctggaccctcgtcctaccatggatggagatcccgacactccgaaaccagtctccttcaccgtgaaggaaaccgtgtgtccgcgaacgactcaacaatcgccggaggactgcgacttcaaaaaagacggcctggtgaagcggtgcatgggaaccgtcactctgaatcaagcgagaggatcctttgacatctcgtgcgataaagataacaaacggttcgcgctcctcggagatttcttccggaagtcaaaggagaaaattggtaaggaattcaagcgcatcgtccaacggatcaaggattttctgcgcaacctggtgccgcgcaccgaatcg

SEQ ID NO: 8394 - DNA, 510 bp, synthetic construct
  misc_feature 1..510: note = source = /note="Description of Artificial Sequence: Synthetic coding sequence"
  source 1..510: mol_type = other DNA
atgaagacccagcgggacggacattcactgggacggtggtccctggtgctgctccttttgggtctcgtgatgccacttgccatcattgcacaggtgcttagctataaagaggcggtcctgagggccatcgatggcataaaccagcggtcctccgacgccaacctgtatagactgctggatttggatccgcgacccactatggacggcgaccccgacactccaaagcctgtgtctttcactgtaaaagagaccgtgtgcccacggacaacgcagcagtcacctgaggattgcgacttcaagaaagatggactcgtgaagcggtgcatgggtaccgtgacactgaatcaggctcgaggtagtttcgatatcagttgtgataaggataataaaaggttcgctctgctgggggacttcttcaggaaaagtaaagagaaaattggcaaggagttcaagcggatcgttcagcgaatcaaggattttctcaggaatcttgtgcctagaactgagtcc

SEQ ID NO: 8395 - DNA, 510 bp, synthetic construct
  misc_feature 1..510: note = source = /note="Description of Artificial Sequence: Synthetic coding sequence"
  source 1..510: mol_type = other DNA
atgaaaacgcaacgtgatgggcacagcctcggcaggtggagcctggtgctcctcctactagggctggtcatgcctcttgcaattatcgcccaggtcctcagctataaagaggctgtcctcagggcaatcgacgggatcaaccagcgaagcagtgatgcgaacttgtaccgactgctcgacttggacccgaggccaaccatggacggtgaccccgatactcctaagcccgtctcatttaccgttaaggaaactgtgtgcccacgcaccacacaacagtcacccgaggactgcgacttcaagaaggatggacttgttaagcgatgtatgggcaccgttaccctcaatcaggcccgaggatcgtttgacatttcttgtgataaggacaataaaagattcgccctgctcggtgacttctttcgaaagagcaaagagaaaataggaaaagaattcaaacgcatcgtccagaggataaaggactttctgagaaatttggtgccccgtaccgagtcc

SEQ ID NO: 8396 - DNA, 510 bp, synthetic construct
  misc_feature 1..510: note = source = /note="Description of Artificial Sequence: Synthetic coding sequence"
  source 1..510: mol_type = other DNA
atgaaaacacagcgcgacggacactctttgggccggtggtctctagtgctgctgctgctagggttggtgatgcctctggctataatagcacaggtcctctcctataaggaagcagtgctgcgggcgatcgatggcattaatcagcgaagctctgatgctaacctctatcgcctcctcgacctggaccctcggcctaccatggacggagatccagacacaccaaaacctgtgtcgttcacagtcaaggagacagtgtgccctcgaaccactcagcagagcccagaagattgtgatttcaagaaagatggtcttgtgaaaaggtgcatgggcacagtcaccctaaatcaagcacgagggagcttcgacatctcttgtgacaaggacaacaaaaggtttgcactcttgggcgacttctttcgcaaatcaaaagaaaaaataggaaaggaatttaagcggatcgtacagcggattaaggattttttaagaaatttggttccacggacagagtct

SEQ ID NO: 8397 - DNA, 510 bp, synthetic construct
  misc_feature 1..510: note = source = /note="Description of Artificial Sequence: Synthetic coding sequence"
  source 1..510: mol_type = other DNA
atgaagactcagcgagacggccatagtctgggccggtggagccttgtgctcctcttgttgggtttagtgatgccgctcgccataatcgctcaggtgctatcctacaaagaggcagtcctgagagcaatcgatgggatcaaccagcgttcttcagacgcgaatctgtatagattactagacttggacccccggccgacaatggacggtgaccctgatactcccaaaccggtttcattcacagttaaggagacagtctgccccagaacaactcagcagtcccccgaggactgcgattttaagaaggatgggctggttaagcggtgcatggggacggtgactctgaaccaagcacgtggatctttcgacattagctgtgataaggacaataaacggtttgcactgctcggagacttctttaggaaatccaaagagaaaattgggaaggagttcaagagaatcgtgcagaggatcaaagacttcttgcggaatctcgtcccacggactgagagc

SEQ ID NO: 8398 - DNA, 510 bp, synthetic construct
  misc_feature 1..510: note = source = /note="Description of Artificial Sequence: Synthetic coding sequence"
  source 1..510: mol_type = other DNA
atgaagacccaacgagatggacactctttgggccggtggagtttggtcctcctccttctggggttagtgatgccactggccataattgctcaagttttatcgtataaggaggcagtccttcgggctatcgatgggataaaccagcggagctccgacgcgaacctgtaccgccttcttgaccttgaccctaggccaactatggatggcgaccctgatactcccaaacccgtgtccttcacagtcaaggagacggtgtgcccgaggacaacccagcagtcacctgaggactgcgatttcaagaaggacgggctggtcaaaaggtgtatggggacggtaacacttaaccaagcacgggggtccttcgatatttcttgtgacaaagacaataaacggtttgctctattgggggatttttttagaaaatcaaaggaaaagatcgggaaggagtttaaacggattgtgcagcgcatcaaggacttcctccgaaacctggtgcctcgtacagaaagc

SEQ ID NO: 8399 - DNA, 510 bp, synthetic construct
  misc_feature 1..510: note = source = /note="Description of Artificial Sequence: Synthetic coding sequence"
  source 1..510: mol_type = other DNA
atgaaaacccaacgggatggtcatagtctcggtcgatggtcgcttgtccttcttctgctggggttggtcatgcctctggccattattgcacaagtcttgagctacaaggaagcggtgctcagggcaattgatggtatcaaccagagatcaagcgatgcaaatctgtaccgacttctggatttggatccaagaccaactatggacggagatcctgacactcctaaacccgtctcctttaccgttaaggaaactgtatgccccagaacgacccaacagtccccagaagattgtgacttcaaaaaagacggacttgtaaagaggtgcatgggaactgtgaccctcaaccaggccagaggttcgttcgatatttcctgtgataaggataacaagcgatttgcactgctgggagacttctttagaaagtccaaggagaagataggaaaagagtttaagcgcatcgtgcaacgcatcaaggacttccttcggaatctggtcccacggactgaatct

SEQ ID NO: 8400 - DNA, 510 bp, synthetic construct
  misc_feature 1..510: note = source = /note="Description of Artificial Sequence: Synthetic coding sequence"
  source 1..510: mol_type = other DNA
atgaaaacccagcgcgatggtcattctttgggacgctggtcgcttgtcctgctcctgctgggactggtgatgcctctcgcgatcattgcacaagtgctctcctacaaggaggccgtcctgcgggcaatcgacggaatcaaccaacggagctctgacgctaatctttacaggcttctggatctcgatcctcgtccgactatggatggcgaccccgacacgcccaagccagtgtcctttactgtgaaagagactgtgtgtccacgcactactcagcaaagccctgaagattgcgacttcaagaaggacgggttggtgaagcgatgtatgggtactgtgacccttaatcaagcacgcggctcatttgatatcagctgtgacaaggataacaagcgctttgccctcttgggggacttctttcgcaagtcgaaggaaaagattggtaaagaattcaagagaattgtgcaacggatcaaagattttcttaggaatctggtaccgcggaccgaatcg

SEQ ID NO: 8401 - DNA, 510 bp, synthetic construct
  misc_feature 1..510: note = source = /note="Description of Artificial Sequence: Synthetic coding sequence"
  source 1..510: mol_type = other DNA
atgaagacgcagagggacggccactccctggggcgttggtctctcgtgctgctgcttctgggtctcgttatgccactggctatcatcgcacaggtgctaagctacaaagaagctgtcttgcgggccatagatggcatcaatcagcgtagttcagatgcgaacttgtacagactgctagatctggacccccggcctaccatggacggtgaccctgacacacctaagcccgttagctttactgtaaaggagaccgtttgcccacggaccacccaacagtcccctgaagactgtgatttcaaaaaagatggcctggtgaagcggtgcatgggcaccgtgacactgaatcaggcacgcggatcatttgatatcagctgcgacaaagacaacaaaaggttcgctttgttaggggatttcttcagaaagtcaaaagagaagatcggaaaggagtttaagcgcattgttcagcgtatcaaagacttcctccggaacctggtgccacggactgagtcc

SEQ ID NO: 8402 - DNA, 510 bp, synthetic construct
  misc_feature 1..510: note = source = /note="Description of Artificial Sequence: Synthetic coding sequence"
  source 1..510: mol_type = other DNA
atgaaaacacagcgcgatggacactctctcggcaggtggagcctggtcctgttactcctgggattagtgatgcccctggcaatcattgctcaggtcttgtcatacaaagaggcagtcctccgggccattgatggtatcaatcaacggtcttcagatgcaaacctttatagactcctcgacctggatccaagacctacgatggatggggaccccgacactcccaagcctgtaagtttcaccgtaaaggaaaccgtctgcccacgcactacacagcagtcaccggaagattgtgacttcaaaaaggacggactggtgaaaaggtgtatgggcaccgtgacactgaaccaggcgagggggagttttgatattagctgtgacaaagacaataaaagatttgctctgttaggtgactttttccggaagtcaaaggagaagatagggaaggagtttaaacggatagttcagaggattaaggactttctgcggaacctggtgcctcgaacggagtct

SEQ ID NO: 8403 - DNA, 510 bp, synthetic construct
  misc_feature 1..510: note = source = /note="Description of Artificial Sequence: Synthetic coding sequence"
  source 1..510: mol_type = other DNA
atgaaaacccagagagacgggcattctctggggcgctggtcactcgtcttgctgctgttgggacttgtcatgcccctcgccattattgcacaggtcttgtcctacaaggaagccgtcttgcgggctatcgatggcataaatcagaggtccagtgatgccaacttatatagacttctcgatctcgatcctcgacctacaatggatggtgaccccgacacccccaaacctgtttcttttacagtcaaggagactgtgtgcccacgaaccacgcagcagtcccccgaggactgcgatttcaagaaggacgggctagtcaaaagatgcatgggaaccgtgaccttgaaccaggcaagaggatcgtttgacatctcgtgcgataaagataataagcggttcgctctgctgggggatttcttccgtaaatccaaagagaagatcggaaaagaatttaaacgtatcgtacagcgcataaaggattttcttcgaaacctggtccccaggacagaatcc

SEQ ID NO: 8404 - DNA, 510 bp, synthetic construct
  misc_feature 1..510: note = source = /note="Description of Artificial Sequence: Synthetic coding sequence"
  source 1..510: mol_type = other DNA
atgaaaacgcaacgtgatggtcattcgctaggtcgttggtcgttagttctattattattaggtttagtaatgccgctagcgataatagcgcaagtactatcgtataaagaagcggttttacgagcgatagatggtataaatcaacgatcgtcggatgcgaatctatatcgtttactagatttagatccgcgtccgacgatggatggtgatccggatacgccgaaaccggtatcgtttacggttaaagaaacggtttgtccgcgtacgacgcaacaatcgccggaagattgtgattttaaaaaagatggtctagttaaacgatgtatgggtacggttacgttaaatcaagcgcgaggttcgtttgatatatcgtgtgataaagataataaacgttttgcgttattaggtgatttttttcgaaaatcgaaagaaaaaataggtaaagaatttaaacgtatagttcaacgtataaaagattttttacgaaatttagttccgcgtacggaatcg

SEQ ID NO: 8405 - DNA, 510 bp, synthetic construct
  misc_feature 1..510: note = source = /note="Description of Artificial Sequence: Synthetic coding sequence"
  source 1..510: mol_type = other DNA
atgaaaactcaaagggacggacattcccttggcagatggagccttgtgctcctccttcttggattggtgatgcctctcgccatcattgcccaagtgctttcatacaaggaggcggtgctccgagcaattgacggaattaaccagcgatcgtccgatgcgaacctgtacaggctgcttgatctcgatcctagacctactatggatggcgatcccgacacgccgaaacccgtgtcattcaccgtcaaggaaacggtctgtccacgcactacccaacagtccccggaggattgtgatttcaagaaggatggtttggtgaaacgatgcatgggtacggttaccctgaatcaggcacgcggctcgtttgatatctcctgcgacaaggacaacaagaggtttgcactgttgggggacttcttccgcaagagcaaagaaaagataggcaaggaattcaaaagaatagtgcaacggatcaaggattttcttagaaatttggtgccaagaactgaaagc

SEQ ID NO: 8406 - DNA, 510 bp, synthetic construct
  misc_feature 1..510: note = source = /note="Description of Artificial Sequence: Synthetic coding sequence"
  source 1..510: mol_type = other DNA
atgaaaacgcagagggacggccattcccttggaagatggagccttgtccttttgctcctcggccttgttatgcctctcgcaattatcgcacaagtcctcagctacaaggaggcagtgcttcgcgccattgatggtatcaatcaacgctcgtccgacgcaaacctgtaccggctgcttgatctggatccccgccctaccatggacggagatccggatacccctaagcctgtgtccttcaccgtgaaggaaaccgtgtgtcctcgcactactcagcaatcacctgaagattgtgatttcaaaaaagatggactggtgaagagatgcatggggaccgttaccctgaatcaagcaaggggatcatttgatattagctgtgataaggataacaaacgatttgccctgctcggagatttcttccgcaagagcaaggaaaagattggcaaggagtttaagcgcatagtccagaggattaaggatttcctcagaaatctcgtgcctagaactgaatcg

SEQ ID NO: 8407 - DNA, 510 bp, synthetic construct
  misc_feature 1..510: note = source = /note="Description of Artificial Sequence: Synthetic coding sequence"
  source 1..510: mol_type = other DNA
atgaaaacgcaacgcgacgggcacagcctcgggcgctggtcattggttcttctgctgctgggattagtcatgcccctggccattatcgcacaagtcctcagctacaaggaagcggtactccgagctatcgacggcattaatcagcggtccagtgacgccaatttgtaccggctcctagacttggaccccagacctacaatggatggagatcccgacaccccgaaaccggtctcctttactgttaaagagactgtttgcccacgcacaacacagcagtccccggaggattgcgatttcaagaaagacggtttagttaagcgctgtatgggcaccgtcactctgaatcaggcccgagggtcatttgatatctcctgcgataaggataataagcgattcgccttgcttggcgacttttttaggaagtccaaggaaaagattggaaaagagtttaaaagaatcgtacaaaggatcaaggattttctgcgaaacctagtgccaaggactgagagt

SEQ ID NO: 8408 - DNA, 552 bp, synthetic construct
  misc_feature 1..552: note = source = /note="Description of Artificial Sequence: Synthetic coding sequence"
  source 1..552: mol_type = other DNA
atggcggaccacctcatgctggccgaagggtacaggctggtacagcggcctccatcggccgctgccgcccacggaccgcatgcactccggactctcccaccctacgccggaccgggactcgattcaggcctgcgcccgcggggcgcacccctgggaccgcctccgccacggcagcctggagccctggcatacggcgccttcggccctccgtctagcttccagccatttccagctgtgccgccgccggccgctggtatcgcccacctgcaacccgtggcgaccccatacccaggacgcgcggcagccccaccaaacgcccccggaggaccgccgggacctcaaccagctccgtccgctgcggctccgcccccaccggcccatgcgttgggtggaatggatgcggaactcatcgacgaagaggcactgacttcgttggaactggagttgggactgcaccgcgtccgcgagctcccggagctcttcctggggcagtccgagttcgactgcttttcggaccttggatcggctccgccagcaggaagcgtgtcgtgt

SEQ ID NO: 8409 - DNA, 552 bp, synthetic construct
  misc_feature 1..552: note = source = /note="Description of Artificial Sequence: Synthetic coding sequence"
  source 1..552: mol_type = other DNA
atggccgatcacctgatgctggcagaggggtaccgattagtccaaaggcctcccagcgctgccgccgctcatggaccacacgcccttcggacactgccaccatatgccggaccaggtctagattctggcctccgacccaggggagctcctctggggcctcctccacctaggcagcctggagccctggcatacggcgcattcgggcctccttccagttttcaaccttttcctgccgtgccaccacccgccgccggtattgctcacttgcaacccgtagccaccccatatccaggacgggcagccgcaccccctaacgcaccaggggggcctcccggcccacagcctgctcctagtgccgcagctcccccccctcccgctcacgccctaggtggcatggacgctgagttaatcgacgaagaagctctgactagtctggaactcgagctaggcctacacagggttcgggagctacctgaactgtttctgggccagtccgagtttgactgtttctccgatctcggctctgcacctcccgccggaagcgttagctgc

SEQ ID NO: 8410 - DNA, 552 bp, synthetic construct
  misc_feature 1..552: note = source = /note="Description of Artificial Sequence: Synthetic coding sequence"
  source 1..552: mol_type = other DNA
atggcggatcatctaatgttagcggaaggttatcgtctagtacaacgtccgccgtcggcggcggcggcgcatggtccgcatgcgctacgtacgctaccgccgtatgcgggtccgggtctagattcgggtctacgtccgcgaggtgcgccgctaggtccgccgccgccgcgacaaccgggtgcgttagcgtatggtgcgtttggtccgccgtcgtcgtttcaaccgtttccggcggtaccgccgccggcggcgggtatagcgcatttacaaccggtagcgacgccgtatccgggtcgtgcggcggcgccgccgaatgcgccgggtggtccgccgggtccgcaaccggcgccgtcggcggcggcgccgccgccgccggcgcatgcgctaggtggtatggatgcggaattaatagatgaagaagcgctaacgtcgttagaattagaattaggtctacatcgagttcgagaactaccggaactatttctaggtcaatcggaatttgattgtttttcggatttaggttcggcgccgccggcgggttcggtttcgtgt

SEQ ID NO: 8411 - DNA, 552 bp, synthetic construct
  misc_feature 1..552: note = source = /note="Description of Artificial Sequence: Synthetic coding sequence"
  source 1..552: mol_type = other DNA
atggcggatcacctgatgctggccgaaggctatcgattagtgcagcgccccccctcagcggcagccgcccatggaccccacgccctcagaacactgcctccatatgccggtccagggctggactccggactgcgcccaaggggagcacccctcggtcctccccctccaagacagccgggcgcgctggcctacggggccttcggcccccccagcagcttccagccgtttcccgcagtccctcctcctgcggcaggcatcgcacatctccagccagtagcaaccccctacccgggtcgtgcggctgcgcctccaaacgccccaggaggcccgcccggtccacagccagctccctccgctgctgcacctcccccccctgcccacgctcttggcggcatggatgcagaactgatagacgaggaggccttgacttccctagagctcgaactgggcttacatagggtacgggaactgccagagctctttctggggcagtccgaattcgactgctttagcgacctggggagtgctcctccagccggatccgttagctgc

SEQ ID NO: 8412 - DNA, 552 bp, synthetic construct
  misc_feature 1..552: note = source = /note="Description of Artificial Sequence: Synthetic coding sequence"
  source 1..552: mol_type = other DNA
atggcagaccacctgatgttggctgagggatatagactcgtgcaacggcctccttcagctgcagctgcccatggtccgcatgctttgagaacccttccgccttatgctggtcccggattagattctggcctgaggccccgcggggctccacttgggcccccacccccacggcaaccaggggctcttgcctatggggcctttggccccccaagttcctttcagccttttcctgcagtcccacctcctgcagcagggattgcccacctgcagcccgtcgccaccccatacccaggcagggctgccgctccccctaatgcaccagggggcccccctggtccacagcctgcgcccagtgcggctgcccctcccccccctgcccacgccctcggcggaatggatgccgagctgattgacgaggaggctctgaccagcctagagttagagctaggtttacatagagtccgagagctccccgaactgttcttggggcagtccgagttcgattgctttagtgatcttggctcggccccccctgctggatccgtctcatgt

SEQ ID NO: 8413 - DNA, 552 bp, synthetic construct
  misc_feature 1..552: note = source = /note="Description of Artificial Sequence: Synthetic coding sequence"
  source 1..552: mol_type = other DNA
atggcagatcatttgatgctcgctgaggggtaccgcctagtccagagacctcctagcgcggccgccgctcacggcccgcatgcccttcggactctgcctccatatgccggcccaggacttgacagcggcctgaggccccgtggagcccctctcggccctcctccacccaggcagcccggcgcacttgcttatggagcgttcgggccacctagcagttttcagccatttccggctgtccctcccccagccgccggaatcgctcatttgcagcctgtggctacaccctacccaggtcgcgctgctgcacccccgaatgcacccgggggtccaccaggcccccagccagcccctagcgccgctgcccctcctccccctgctcacgccctcggaggaatggatgcagaattgatcgacgaggaggctctgacctcgctggagctcgagctgggcctgcacagggtccgtgaactgcctgagctgtttctgggacaatccgagttcgactgcttcagtgacttgggtagcgcccctccggctggatccgtctcatgc

SEQ ID NO: 8414 - DNA, 552 bp, synthetic construct
  misc_feature 1..552: note = source = /note="Description of Artificial Sequence: Synthetic coding sequence"
  source 1..552: mol_type = other DNA
atggctgatcacctcatgcttgcagaaggatacaggttggtgcagcgaccgccctccgccgcagcggcccacggaccccacgccctgcggactctgccaccttacgcgggaccagggctcgactctgggcttcgacccagaggagcaccactggggcctccaccacctaggcagcccggggctctggcctacggggcgttcgggccaccatccagtttccagccattccccgccgtgcccccacccgctgcagggatagcccatctccagccagtggctacaccctatcccgggagggcggcggctccccccaatgcccccggagggccacctgggcctcagcccgctccctccgctgctgcccctccccctcccgcacatgctctgggagggatggatgcagaactcattgatgaagaagctctcacatcactcgaactagaactagggcttcatcgggtgagggagcttcctgaactttttttaggacagtcagaatttgattgtttctccgatcttggatcggcccctccagctgggagtgtttcttgc

SEQ ID NO: 8415 - DNA, 552 bp, synthetic construct
  misc_feature 1..552: note = source = /note="Description of Artificial Sequence: Synthetic coding sequence"
  source 1..552: mol_type = other DNA
atggccgaccacctgatgttggcagagggctatcgacttgttcagaggccgccttccgctgccgctgcacatggaccccatgctcttcgtactctgcccccatacgccggccccggacttgacagtggcctgcgtccccgaggggcaccattaggacccccccctccccgacaaccgggtgccttagcttatggagcattcggaccccccagcagttttcagccttttccagctgtgccaccccctgcagcgggaatcgcacatctccagccggtggccactccctatccagggcgcgcagccgctcccccaaatgcccccggggggcctccgggcccacaacctgccccatctgccgctgcacctccgccacctgcacacgcactgggcggaatggatgcggagctaatagatgaggaggcactcacatctctcgagctggaactcggcttgcacagagtgagggagctgcccgagctgtttctgggtcagagtgagtttgattgtttctccgatttagggtcggccccaccggccggctcagtttcttgt

SEQ ID NO: 8416 - DNA, 552 bp, synthetic construct
  misc_feature 1..552: note = source = /note="Description of Artificial Sequence: Synthetic coding sequence"
  source 1..552: mol_type = other DNA
atggctgatcatttaatgttggctgaaggttatagattagtacaaagacctccaagtgctgcagcagctcatggtccacatgcattaagaacattacctccatatgctggaccagggcttgattctggtttaagacctagaggagcaccattagggccaccacctcctagacaaccaggagctcttgcttatggagcatttggtccaccatcatcttttcagccatttcctgcagttccaccaccagctgctggaatagctcaccttcaaccagttgctacaccttatccaggacgtgcagcagccccacctaatgctccaggaggtccaccaggaccacaaccagctccatcagctgcagcaccaccaccaccagcccatgcacttggaggaatggatgccgaattaatagatgaagaagctcttacatcacttgaattagaattgggattacatcgagttagagaattaccagaattatttcttggacaatcagagtttgattgtttctcagatcttggaagtgctccaccagctggatcagtatcttgt

SEQ ID NO: 8417 - DNA, 552 bp, synthetic construct
  misc_feature 1..552: note = source = /note="Description of Artificial Sequence: Synthetic coding sequence"
  source 1..552: mol_type = other DNA
atggcagatcatcttatgcttgcagaaggctacagattggtgcaacggcctccttcggccgcggcagcacacggaccacatgccctgcgtactctcccgccctacgcgggtcctggactcgactccgggttgcggcctaggggcgcaccactgggacctccaccacctcgccaacctggagcattggcatacggagccttcggtccaccctcgtcctttcaaccttttccagccgtcccaccacctgcggcagggattgcacacttgcagcctgtggcaaccccgtaccccggccgcgccgctgcgcccccaaatgcccccggaggccctcccggccctcaacctgcacctagcgctgcagcaccgcctcctccagcccacgctcttggcggtatggatgccgaacttatcgatgaggaagcactcacgtcgctggaactggagctgggattgcaccgggtgcgcgaacttcccgagctctttcttgggcagtcggaatttgattgtttctccgacttggggtcggccccgcctgccggatcagtgagctgc

SEQ ID NO: 8418 - DNA, 552 bp, synthetic construct
  misc_feature 1..552: note = source = /note="Description of Artificial Sequence: Synthetic coding sequence"
  source 1..552: mol_type = other DNA
atggcagaccaccttatgctggcagagggatacagactcgttcaacgaccaccttccgcagctgccgcacatggaccccatgctttgaggacccttccgccctacgcgggacctgggctcgattcgggacttcgcccacgtggcgcacctcttggcccgccgccgcctagacaacctggagcactggcctacggggctttcggtccccctagcagctttcaaccattccctgcagtgccacccccagcggcaggcatagcccacctgcagcccgtggccaccccttaccctggacgtgcagccgcgccgcctaacgcaccaggaggcccccctggtcctcagccagctccatcagcggcagccccgccaccgccagcacatgcacttggtggcatggacgcagaacttattgatgaagaagcactgacttcgctggaactcgagctgggcctccatagggtgcgcgagctccctgaattgtttcttggtcagtccgaatttgattgttttagtgatcttgggtctgcgccacccgcagggagcgtatcgtgc

SEQ ID NO: 8419 - DNA, 552 bp, synthetic construct
  misc_feature 1..552: note = source = /note="Description of Artificial Sequence: Synthetic coding sequence"
  source 1..552: mol_type = other DNA
atggctgaccacctgatgcttgccgagggatacagacttgtgcagcgccctccttccgcagcagccgctcacgggccacacgcgctgcggacgctgccgccttacgcaggaccaggattggacagcggcctccgcccacgcggcgcaccgctgggaccgcccccgccgcggcagcccggcgcgctcgcttatggtgctttcggacctccgtcctccttccagcctttcccagcagtgcctcctccagcggccggaatcgctcacctccagccggtcgccaccccataccctggccgggctgctgcaccgccgaacgctcctggcgggccgccgggtccgcaacccgccccctcagccgcggctccaccgcctccggcccatgcccttggagggatggatgccgaactcattgacgaagaggcactgacttcgttggagcttgaactcgggctgcatcgagttcgcgagctgccggaactgtttctggggcaaagcgagttcgactgcttttctgatctcggctcagcaccgccagccggatcagtgtcgtgc

SEQ ID NO: 8420 - DNA, 552 bp, synthetic construct
  misc_feature 1..552: note = source = /note="Description of Artificial Sequence: Synthetic coding sequence"
  source 1..552: mol_type = other DNA
atggccgaccacctcatgctcgccgagggataccggctcgtccaacgcccgccgagcgcggctgctgcacacggccctcacgccctgcgcacccttccaccctacgccggcccaggacttgattccgggctgcggccgaggggagcaccgctgggcccgccgccgccacgccagcccggagctctggcctacggtgcgttcgggccaccttcgtcgtttcagccgttcccggcagtgcctccgcctgcggccgggatcgcccacctccagccggtcgccactccttaccctggaagagcggcggcaccaccaaacgcaccgggaggacctcccggcccacaaccagctccgtcagcggctgcaccgccgccccccgcccatgccctgggtggtatggacgctgaactgatcgacgaagaggccttgacctcgctggagctcgaattgggactgcatagagtgcgagagctcccagaactgtttctgggacagtctgaattcgattgcttctccgacctgggatcagcgccaccggccggcagcgtgtcctgt

SEQ ID NO: 8421 - DNA, 552 bp, synthetic construct
  misc_feature 1..552: note = source = /note="Description of Artificial Sequence: Synthetic coding sequence"
  source 1..552: mol_type = other DNA
atggcagaccatctaatgttggccgagggctatcggctcgtgcaacgtcctccatcggccgcagcggcccacggcccgcacgctctgcgaacccttcctccgtacgccggtccaggcctggacagcggcctgcgcccacgcggtgccccacttggcccaccaccccctagacagcctggggctctcgcttatggtgctttcggtccaccgagctccttccagcctttccccgcggtgccgcccccggctgccggcatcgcccacctgcagccagtcgccaccccctaccctgggcgcgccgctgcaccaccaaatgctcccggaggcccgccgggtccacagccagccccaagcgcggctgcaccccccccacccgctcacgccctagggggaatggatgcggagttgattgatgaggaggccctgacgagcctggagctggagctcggactacacagggtgagagaactcccagagctgtttctgggccagtccgagttcgattgtttctccgatctgggaagcgcaccgccagcgggttccgtgtcctgc

SEQ ID NO: 8422 - DNA, 552 bp, synthetic construct
  misc_feature 1..552: note = source = /note="Description of Artificial Sequence: Synthetic coding sequence"
  source 1..552: mol_type = other DNA
atggctgatcacctaatgctggcggaaggctaccggctcgtgcaacggcctccttctgctgctgctgcccacggcccacatgcactcagaaccttgcctccctatgcgggtcctggccttgactctgggcttcgcccacgcggagccccacttggtcctcctcctccacgccagcccggagcactcgcctacggtgctttcggacccccgtctagcttccagccgttcccggctgttccgccaccggcggcgggaatcgcgcacctccaacccgttgcgacaccttaccccggcagagccgctgcgccgcccaacgcgccaggtggtcctccgggaccgcagcccgcacccagtgccgctgcgccgcctcctcctgcccacgcgctgggtggtatggatgctgagcttattgatgaggaggccttaacctccctagagctggaactggggttgcaccgcgtccgggagcttcccgagctgtttctcggccagtcagaattcgactgctttagtgacctcggtagtgccccgcccgcgggttcagtttcatgc

SEQ ID NO: 8423 - DNA, 552 bp, synthetic construct
  misc_feature 1..552: note = source = /note="Description of Artificial Sequence: Synthetic coding sequence"
  source 1..552: mol_type = other DNA
atggcagaccacctgatgctcgcagaggggtaccggcttgtgcagcgtcccccttcagcagcggctgcccatggaccacatgcacttcgcacgcttccaccatacgcaggccctggcctggattccggcctgcgacctcgtggggctcctctgggaccgcccccacccagacagcctggcgcactcgcatacggagcatttgggccaccctcgtcgtttcaaccattccccgcagtgcctcctccagcggcaggaatcgcacatctgcagcctgtcgctaccccttaccctggtcgtgcagcagcgccaccgaacgcccctggcggccctccaggtccacaacctgccccatcagcagcagcacctccaccgcctgctcatgcactggggggaatggatgcagaactcattgatgaggaggcgcttacttctcttgagctggaactcgggcttcatcgggtgcgggagcttccagagctgttcctgggacaatccgagtttgactgcttttcggacctgggttcggctcccccagccggtagcgtgtcctgt

SEQ ID NO: 8424 - DNA, 552 bp, synthetic construct
  misc_feature 1..552: note = source = /note="Description of Artificial Sequence: Synthetic coding sequence"
  source 1..552: mol_type = other DNA
atggccgatcacctcatgctcgccgagggttacagactggtgcagcgtcctccctcggctgctgcggcccacggaccgcacgctctccgcactttgccaccttatgccggtccgggtctggattctggcctgcggcctcggggcgcccccctaggtcctcctccaccacggcagccgggtgccctagcatatggtgccttcggtccgccctcttccttccagccgttccctgcggtgccgccccctgctgcgggaattgcccacctccagccggtggcgacgccttacccgggccgagcagctgccccgcccaacgctcccggtggaccccccggaccacaacccgcgcccagtgcagccgcgcctcccccgccagcccacgccttgggcggcatggacgctgaactcatcgatgaggaggctctgacctccctggagctcgagttgggcctacaccgtgttcgagaactgcccgagctgttcctggggcaaagcgagttcgattgcttctcggaccttgggtccgcacctcccgctggatctgtttcgtgt

SEQ ID NO: 8425 - DNA, 552 bp, synthetic construct
  misc_feature 1..552: note = source = /note="Description of Artificial Sequence: Synthetic coding sequence"
  source 1..552: mol_type = other DNA
atggcggatcacctgatgttggcggagggttaccggctggtgcaaagaccaccttcggctgccgccgcacacggtccccacgccctgcggacgctgccaccttacgccggccccggacttgactcaggacttcgaccgcggggcgcccctctggggcctcccccgccccggcagccgggagccctggcctacggagcctttgggcctccgtcctccttccagccattccctgcagtgccaccaccagccgcaggcatcgcgcacctgcaaccagtcgccactccgtaccctggaagggctgccgcccctccgaacgcgccgggtggaccgcctggacctcagccggctccttcagcagctgcgccgccgccgcccgcacatgccctgggaggaatggacgccgagctgatcgacgaggaagccctgacgtcacttgagctggaactcggcctccatagggtgcgcgagctgccggagctcttcctgggacagtccgagtttgactgtttctccgatctcggatccgcgcccccggccggatcggtgagctgc

SEQ ID NO: 8426 - DNA, 552 bp, synthetic construct
  misc_feature 1..552: note = source = /note="Description of Artificial Sequence: Synthetic coding sequence"
  source 1..552: mol_type = other DNA
atggcggaccacctcatgttagcagaagggtataggcttgtacaaaggcctcctagcgcagcagccgcccacggcccacatgccctcagaaccctgccgccatacgcaggacccgggctagacagcggcctcaggcctcgaggagcacccctgggccctccgcccccgcgacagccaggcgcactggcctacggggccttcggcccaccaagctcttttcaacctttccctgcagttccaccccctgccgcaggaatagcccacctgcagcccgttgctactccttacccgggccgagccgcagcccctcccaacgcccctggcggacccccgggaccccagccagcaccatccgccgccgcccctcccccacctgcccacgcactcgggggaatggacgctgaactcattgacgaggaggccctgacctcactggaacttgagttaggactccaccgcgtccgtgaactgccggagttatttcttggccagagtgagttcgattgtttttcggaccttgggtcagccccccctgctggatccgtgagctgc

SEQ ID NO: 8427 - DNA, 552 bp, synthetic construct
  misc_feature 1..552: note = source = /note="Description of Artificial Sequence: Synthetic coding sequence"
  source 1..552: mol_type = other DNA
atggcggatcatctgatgctggccgaggggtaccgactggttcagaggcctccttctgccgccgccgcccatggcccgcatgcacttaggacactccccccctacgcagggcccgggctggactccgggctaagacctaggggcgctccgctcggcccgccgccccctcggcaaccgggtgccctagcctacggcgcctttggcccccccagtagcttccagccttttcccgctgtaccaccccccgccgccggcatcgcccacctgcagcccgttgctactccataccccggcagggcggccgccccgcctaacgctcccggcggaccacctgggccccagcctgctccttcagccgccgcgcccccgccaccggcacacgctcttggaggtatggacgcagagcttatcgatgaagaggccttgacttccctcgagttggaacttgggctgcacagagtgagggagttgcctgaattgtttctcgggcaatctgaatttgactgcttttctgaccttggaagcgccccgccagccggatctgtttcctgc

SEQ ID NO: 8428 - DNA, 552 bp, synthetic construct
  misc_feature 1..552: note = source = /note="Description of Artificial Sequence: Synthetic coding sequence"
  source 1..552: mol_type = other DNA
atggctgaccatctcatgctggcggaaggataccgcctggtccagcgtccgccgtcggcggcagcggctcatgggccccacgcccttagaaccctgccaccatacgcggggcctggacttgattctggactccgacctcgcggcgctcccttgggaccaccaccaccgagacaacccggcgcccttgcatatggagcatttggacctccctcatccttccagccgtttccggcagttccgccccctgcagccggaatcgcccatcttcagccggtggctactccgtacccgggccgggctgccgcgcctccgaatgcccctggaggccctccaggaccgcagcccgctcccagcgcggccgccccacctccaccggcacacgcgcttggtggaatggacgccgagctgatcgatgaagaggcgctgacctcgttggagctcgaactggggctgcaccgggtgagggaactgcctgaactcttcctgggccaatccgagtttgattgtttcagcgaccttggctcagcaccgccggccggctcggtgtcttgt

SEQ ID NO: 8429 - DNA, 552 bp, synthetic construct
  misc_feature 1..552: note = source = /note="Description of Artificial Sequence: Synthetic coding sequence"
  source 1..552: mol_type = other DNA
atggcagatcatctgatgctggccgaggggtaccgcctggtccagcggccaccctctgctgctgcggcccatgggcctcatgcactgagaacgttacccccatacgcgggccccggcctggattcaggactgcggccaaggggtgcccctctcggccctccaccaccaaggcagccaggcgccctagcgtatggagcctttggtcctccctcctccttccagccatttccagctgtgccccccccagcagcaggcattgcccacctccagcctgtggcaactccgtatcccggacgcgcggcggcccctcccaacgcgcccggggggcctcccgggccacagccagctcccagcgcggccgccccgcctcctccggcccatgccctcggaggaatggacgccgagcttatcgacgaggaggccctgactagtctcgaactggagctggggctccaccgtgtgcgcgaacttccagagctgttcttgggccagtccgaattcgattgttttagcgacctaggttccgctccaccagccggctcagtaagctgc

SEQ ID NO: 8430 - DNA, 552 bp, synthetic construct
  misc_feature 1..552: note = source = /note="Description of Artificial Sequence: Synthetic coding sequence"
  source 1..552: mol_type = other DNA
atggcagaccacctgatgcttgctgagggttaccgcctggtacagcggcccccttcagcagcagcggcccatggaccacatgcgctgcggaccctcccaccttacgcgggcccaggccttgatagcggcctgcgtcctaggggtgctcctctcggcccccctccccctcgccagccgggggccctggcctacggagcgttcggacctccttccagctttcagccttttcctgccgtacctccccctgccgcgggaattgcccacttacagccagtcgcaacgccctatcctggcagggctgcggcacctccaaacgcacctggtggccccccggggccgcagcctgcccccagtgcggccgcacctcccccccctgctcacgccctgggaggcatggacgcagagcttattgatgaggaagccctgacctccctagagctggagctagggttacaccgcgtgcgggagctaccagaattgttccttggccagtcagagttcgattgtttcagcgacctcggctccgcaccacccgccggttctgtgagctgt

SEQ ID NO: 8431 - DNA, 552 bp, synthetic construct
  misc_feature 1..552: note = source = /note="Description of Artificial Sequence: Synthetic coding sequence"
  source 1..552: mol_type = other DNA
atggccgatcatctgatgcttgctgaggggtacagattggtgcaaagaccaccaagcgccgccgcagcccacggtccacatgccctccgtactctccctccatacgcgggaccaggtctggattcggggcttcggccgcggggcgcaccactgggtccgccacctcctcgccaacccggtgcactcgcatacggcgcattcggccccccatcatctttccagccgtttccagcagtgccaccacctgcagcaggaatcgcacacctgcaaccagtcgcgaccccttaccctggtagagcggcggcaccgccaaatgcacctggagggccacccggaccgcaaccagccccaagcgcagcagcccctccacctcctgcacacgcactgggagggatggatgcagaactcattgacgaggaagccctgacgagcctcgagctggaacttggactgcaccgggtgagggagctgccagagcttttcctgggacagtcagagtttgattgcttctccgatctgggctcggcgccccctgcgggctcagtctcctgc

SEQ ID NO: 8432 - DNA, 552 bp, synthetic construct
  misc_feature 1..552: note = source = /note="Description of Artificial Sequence: Synthetic coding sequence"
  source 1..552: mol_type = other DNA
atggccgatcatcttatgctagcagaaggctatcgcctggtgcagagacccccgtctgcagctgccgcgcacggaccacacgccctacggacactgccaccgtacgcagggccaggcctggattctgggctccggccccggggagcacccctgggtccaccgccaccaaggcagcccggcgccctcgcgtacggtgccttcgggccaccttcaagcttccagcccttccccgctgtccccccacccgccgccggaatagcacacctgcagccggttgccactccctatcctggacgtgccgcagcccctcccaatgccccagggggaccccccggaccccagccagcccccagtgccgcagccccccccccacccgcccatgccttaggggggatggatgcagaactcattgatgaagaggccttgaccagtcttgagctggagttgggtttgcaccgcgtgagagaactgcccgagttattcctgggacaaagcgagttcgattgctttagcgacctgggatcagccccccccgccggctctgttagttgc

SEQ ID NO: 8433 - DNA, 552 bp, synthetic construct
  misc_feature 1..552: note = source = /note="Description of Artificial Sequence: Synthetic coding sequence"
  source 1..552: mol_type = other DNA
atggccgaccacctgatgttggcagaggggtacaggctggtacaaagacccccctcagcagcggccgcgcacggaccgcatgcgctgaggacactgcccccatacgccggaccgggcctggattccgggcttaggccacggggagctccactcggacctccacccccacggcagccaggtgccctcgcatacggcgcattcggtcctccttcctccttccagcccttcccagcggtgcccccccctgccgctggcattgcccatctccagccagtggccactccgtaccctggcagggctgcggcaccacccaatgcgcctggtgggccccctggaccacaacctgcgcccagcgcagcagctccccccccccccgcccacgcactgggcggcatggatgctgagcttatcgacgaagaggccctcactagcctggagctggaattaggattgcaccgcgtccgagagctaccagagctgtttctgggccaatctgagtttgactgtttttccgatctgggaagtgctcctcctgcagggagcgtgtcctgt

SEQ ID NO: 8434 - DNA, 552 bp, synthetic construct
  misc_feature 1..552: note = source = /note="Description of Artificial Sequence: Synthetic coding sequence"
  source 1..552: mol_type = other DNA
atggccgaccatctaatgttagctgaggggtacagactggtgcagaggcccccgagcgcagctgccgcacacggcccacatgccttgaggacgctgcctccctatgccggacccggcctggacagcggactccgcccacgcggtgctccccttggcccccctccccctcgtcaacctggagctttggcctatggcgctttcggacctcctagttcatttcagccctttccagcggtgccccctcccgctgctggcattgcccatctgcagcctgtggcgactccctatcccggccgggcagccgcaccacctaacgcaccagggggacctccagggcctcagcccgcgccgtcagccgcggccccacctcccccagcccatgcgctgggaggcatggatgcggagctaatcgacgaggaagctttgacgagtcttgagttggaacttggacttcatcgagtgagagagctgccagagttgtttctggggcagagcgaatttgattgtttctctgatctggggtccgccccccctgctgggtccgttagctgt

SEQ ID NO: 8435 - DNA, 552 bp, synthetic construct
  misc_feature 1..552: note = source = /note="Description of Artificial Sequence: Synthetic coding sequence"
  source 1..552: mol_type = other DNA
atggcagatcacctgatgcttgccgagggatacagacttgttcaacggcctccctccgcggccgcagcacacggaccacatgcactgagaacgctgcctccctacgctggacctggactggattcgggcctccgtccacgtggagccccactggggcccccaccacccagacagcctggagccctggcatacggagcattcggcccgccttcgtcgtttcaaccttttccagcggtgccaccccctgcagcgggtattgcacacctgcaaccagtggcaaccccataccctggccgggcagcagctccgcctaacgcccccggggggcctccaggtcctcagccggcgcccagcgcagccgctccacctccaccagcacatgcacttggaggcatggatgctgagcttatcgacgaagaagcgttgacttccctcgaactcgaactcggacttcatcgggtccgggaacttccagaattgtttttgggtcagtcagagttcgattgtttcagcgatctgggatcagcacctcccgccggtagcgtgtcctgc

SEQ ID NO: 8436 - DNA, 552 bp, synthetic construct
  misc_feature 1..552: note = source = /note="Description of Artificial Sequence: Synthetic coding sequence"
  source 1..552: mol_type = other DNA
atggccgatcacctcatgctggcagagggttatagactggtccagcgtcccccatccgctgccgctgctcatggcccacacgcactcaggaccctgcctccatatgccggcccaggcttggattcaggactgcgccctcgtggagcacctctgggcccccctcccccaagacagccaggagctctcgcctacggtgccttcggcccccccagcagcttccagccattccctgcagtccctcccccagcagccggtatcgcccatctgcaacctgttgcaactccctatcccggaagagcagccgctccacccaacgcccctggaggaccccccggtccacagccagctcccagcgccgctgctcccccaccacccgctcacgctttgggaggaatggacgctgagttgatcgatgaggaggctctgaccagtctcgagctcgagctcggactccaccgcgtgagggagttgcctgaactcttccttggccagtcagagtttgactgcttctccgacctcggttctgcacccccagctggctcagtcagctgt

SEQ ID NO: 8437 - DNA, 552 bp, synthetic construct
  misc_feature 1..552: note = source = /note="Description of Artificial Sequence: Synthetic coding sequence"
  source 1..552: mol_type = other DNA
atggccgaccatcttatgctggcagaagggtacagactcgtgcaacgtcctccctcggcagcagcagcccacggaccacacgcactccggacgcttccaccttacgcaggaccaggtcttgatagcggacttagacccagaggagcaccactgggaccaccccctccaaggcagcccggggcacttgcctacggggcattcggtcctccttccagcttccaaccgttcccagcagtgccccctcctgcagccggcatcgcacatctgcagcctgtggcgactccgtacccaggccgtgcggcagccccaccgaatgcgcccggaggaccaccaggtccccagcctgcgccttcggcagccgctcctcctcccccagcacacgcactgggcgggatggacgcggagctcattgatgaagaggccctcacctcgctggagctggagcttgggcttcatcgggtgagggaacttccggaattgtttctggggcagagcgaatttgattgtttttccgatctggggagcgccccacctgcaggaagcgttagctgt

SEQ ID NO: 8438 - DNA, 552 bp, synthetic construct
  misc_feature 1..552: note = source = /note="Description of Artificial Sequence: Synthetic coding sequence"
  source 1..552: mol_type = other DNA
atggccgaccacctgatgcttgcggagggctaccgccttgtccaacgtccgccatccgcagcagccgcgcacggtcctcatgcgctcagaactcttcccccatatgctggcccaggacttgactccggcctgaggccacgaggcgcgccgttgggaccccctccccctagacaacctggggcattggcttacggggcattcggtcctccctcgtcgtttcagccatttcctgctgtgcctccgccagcagcagggatcgctcatctgcagcctgtggccaccccttacccaggaagagccgcagcaccacccaacgcaccaggaggaccaccaggcccccagcctgctccaagcgccgcggcacccccaccccctgcacatgcacttggaggaatggatgccgaacttattgatgaggaagctctgacttcacttgagttggaactcggacttcatcgggtgcgtgaactgccagaactctttctggggcaatccgaattcgattgcttttcagatctgggaagcgccccgcctgcaggttcggtatcgtgt

SEQ ID NO: 8439 - DNA, 552 bp, synthetic construct
  misc_feature 1..552: note = source = /note="Description of Artificial Sequence: Synthetic coding sequence"
  source 1..552: mol_type = other DNA
atggcggaccatctgatgctggccgagggataccgcctcgtgcagaggcccccgagcgccgcggcagcgcacggcccacatgccctccggactctcccgccgtacgccggcccgggtcttgattccggattgcgcccacgcggcgctcctttggggcctccgcccccgagacagccaggggcactcgcttacggagcctttgggcctccttcgtcgttccagccttttccggccgtgcccccacctgccgccggaatcgcccatctgcaaccagttgcgactccttacccgggacgcgccgctgcgccacctaacgcgcctgggggaccgccaggaccgcagcctgccccatcggctgcagccccgcctccaccggcccatgcgcttggggggatggacgcggaactgattgatgaggaagcgctgacctcgctggagctcgagctgggattgcaccgggtgcgggagctgccagaactgttcctggggcagtccgaattcgattgcttttcagacctgggctccgcgccgcctgctggatcggtgtcctgt

SEQ ID NO: 8440 - DNA, 552 bp, synthetic construct
  misc_feature 1..552: note = source = /note="Description of Artificial Sequence: Synthetic coding sequence"
  source 1..552: mol_type = other DNA
atggcggatcatctcatgctggcagaaggttatcgcctggtgcagcgaccaccgtccgcggccgccgctcacggcccccacgccttgcgaacccttccgccctacgccggaccgggcctggactcggggctgcgcccacggggagccccgctcggcccgccacctccaagacagcctggggccctggcctacggagcgttcgggccaccgtcgagcttccagccgttccctgcagtacccccaccggctgccggtatcgctcacttgcaacccgtcgccactccgtacccagggagggcagccgcgccaccaaacgcgccgggtggaccgccgggacctcagcccgcaccttccgcagctgctccgccgccgcctgcacacgctctgggaggcatggacgcagaacttattgatgaagaggccctgacctcgctcgagctcgaacttggattgcatcgcgtgcgggaactgccggagctgttcctgggccaatcagaatttgactgcttttctgacctcgggtcagcgccaccagccggatccgtgtcatgc

SEQ ID NO: 8441 - DNA, 552 bp, synthetic construct
  misc_feature 1..552: note = source = /note="Description of Artificial Sequence: Synthetic coding sequence"
  source 1..552: mol_type = other DNA
atggccgatcatcttatgcttgcggaaggctaccgccttgtgcaaagaccaccctcagccgcagcagcacatgggccacatgcactcaggactctgccaccctacgcaggtccaggcctcgatagtggtcttaggccgcgcggtgctcctctgggcccacctccacccagacaaccaggagctctcgcgtacggtgcatttggacctcctagctcctttcaacctttcccggccgtgcctccacccgctgccggaatcgctcatctccaaccagtggcaaccccatatcccggacgagcagcagcgccacccaacgcaccagggggacctcccggccctcaaccagcaccatcggctgccgcacctcccccaccagcacacgcacttggaggaatggatgcagagctgattgatgaagaagcactcacttcactcgagctggaactgggtctgcacagagtgagagaacttcctgagctttttctggggcagtcggaatttgattgtttttcggacctgggatccgcacctccagcgggttccgtgtcctgt

SEQ ID NO: 8442 - DNA, 552 bp, synthetic construct
  misc_feature 1..552: note = source = /note="Description of Artificial Sequence: Synthetic coding sequence"
  source 1..552: mol_type = other DNA
atggctgaccacttgatgcttgccgagggttaccggctggtccaacgcccgccgagtgccgccgcggcacacggtccacacgcgctgcgcactctcccaccctatgccgggcctggcctcgacagcggccttcgccctcgcggcgcccctctgggccccccacctcctcgtcagcctggtgccctagcctacggagcttttggaccccccagttctttccagcctttcccggctgtgcctcctccggccgcggggatagcccacctgcaaccggtggctactccctatcccggaagggctgctgctcccccaaacgcccccggcggcccacccggaccacaacccgcaccgtccgccgcagcccctccccctcccgcccacgctcttggcggcatggatgcagagcttattgacgaggaagcccttacatctctggaactcgaattgggtcttcacagagtgagggagctgcctgaactgtttctgggccagagcgaattcgattgcttttcagatctggggagcgccccaccagctggatctgtgagctgc

SEQ ID NO: 8443 - DNA, 552 bp, synthetic construct
  misc_feature 1..552: note = source = /note="Description of Artificial Sequence: Synthetic coding sequence"
  source 1..552: mol_type = other DNA
atggccgaccatcttatgctggcagagggataccgtctagtgcagagacctccaagcgctgccgccgcacacggacctcacgccctacgcacactgccaccatatgcaggccccggcttagatagcggcctcaggccgaggggagctccattgggacccccacctccccgccaacctggggccctagcctatggtgcattcgggcccccatcatccttccaacctttccccgccgtgcccccgccagctgcgggtatcgcccaccttcagccagtagccacaccctacccaggccgcgctgccgcccctccgaatgcaccaggtgggccaccagggccccagcccgctccgtcagcagcagccccccctccaccggctcatgcacttggcgggatggacgctgaactcatcgatgaagaggctctaacttccctggagctcgagctcggattgcaccgggtccgcgaacttcccgaattattcctaggccagtctgaattcgattgtttcagcgatcttggaagtgccccgcctgcggggtctgtgtcctgt

SEQ ID NO: 8444 - DNA, 552 bp, synthetic construct
  misc_feature 1..552: note = source = /note="Description of Artificial Sequence: Synthetic coding sequence"
  source 1..552: mol_type = other DNA
atggctgatcatctgatgctggctgaaggctataggctggttcagaggccacctagtgcagctgccgcgcatgggccccacgccctccgaacccttccaccttacgcgggaccgggactcgactcaggacttcgccctcgaggcgctcctttgggaccaccaccccccagacagccaggcgctcttgcctatggcgcattcggacctccgtcttcctttcagccctttccagccgttcctcctcccgctgctgggatcgcccacctccagcctgtggctacgccctaccccgggagagccgcggccccaccaaatgcaccaggggggccccccggtccccagcccgctcccagtgctgcagccccccctccaccagcacacgctctcggaggcatggacgcagaactgattgacgaagaggccttgacttctttggaattggaactcggcctgcacagagtcagggagcttccagagctgttcctgggccagtccgaattcgactgtttctctgatctggggagtgcccctcctgccggcagtgtcagctgc

SEQ ID NO: 8445 - DNA, 552 bp, synthetic construct
  misc_feature 1..552: note = source = /note="Description of Artificial Sequence: Synthetic coding sequence"
  source 1..552: mol_type = other DNA
atggctgatcacttgatgctggcggaggggtaccgtctggttcagaggccgccttctgctgccgcggctcacggaccccatgccttaagaaccctccctccttatgcaggccccggcttggatagtggattgaggcctaggggggcaccccttggtccacctccaccacgacaacctggagcactcgcttacggtgcatttggaccaccaagtagtttccagccgttccctgctgtgcctccgcccgctgcaggtatagcccatttgcaaccggttgctaccccttatccaggccgggccgccgctccacccaatgcacctggtggacccccgggtccacagccagctccttccgctgctgccccccctccccccgctcacgctctcggaggcatggatgctgagctaatcgatgaagaggcgcttacatctctggaacttgaactcggactccatagagtcagagagcttcctgagctatttcttggtcaatctgaattcgactgtttctctgatctcggctccgctccgccagctggctctgtgtcttgt

SEQ ID NO: 8446 - DNA, 552 bp, synthetic construct
  misc_feature 1..552: note = source = /note="Description of Artificial Sequence: Synthetic coding sequence"
  source 1..552: mol_type = other DNA
atggccgaccacctcatgcttgcagaaggttaccgcctggtgcaacggccgccatcagcagccgccgctcacggtccccacgcactgcgcacgttgccgccctacgccggccccggactagactcgggcctgcgcccccgcggcgcgccactgggacccccccctcccagacagcctggcgccctggcttacggggcattcggtcccccttcctcttttcaaccctttcctgctgtccctccacccgccgctggtattgcacacctgcagcccgtggcgacaccatatcccgggagagccgcagcaccgccaaatgcccccggcggccccccaggaccacagccagcacccagcgcagccgctcccccaccgccagctcatgcgcttggaggtatggatgccgagctgatcgacgaagaagctctgactagcctcgagctcgagctcgggttgcaccgagtcagagagctgcctgaactgtttcttggccagtcagaattcgattgcttctccgacctagggtcagcgccccctgctggaagcgtttcctgc

SEQ ID NO: 8447 - DNA, 552 bp, synthetic construct
  misc_feature 1..552: note = source = /note="Description of Artificial Sequence: Synthetic coding sequence"
  source 1..552: mol_type = other DNA
atggcggaccaccttatgcttgctgaaggatatagactcgtgcaaagaccaccttcagcagccgcagcgcatggccctcatgccctgcggactttgccaccgtacgctgggcccggattggacagcggactccggcctagaggcgcacccctgggccctcctccaccaaggcagccaggagcacttgcatacggtgcgttcgggcctccttcgtcgtttcaaccttttcccgcagtgcctcctcctgcagccggaattgcacatcttcaacccgtggctactccgtaccctggtagagcagcagcccctcctaatgcacctggcggtccgccaggtccccaaccagccccgtccgcggcagcacctcccccacccgcacacgcactgggagggatggatgcagaacttattgatgaggaggcacttacctcccttgagcttgaattgggacttcatcgggtcagagaacttccagaactcttcctgggacaatccgagttcgactgtttctccgatctcggctcagcaccgccggcaggatccgtgtcgtgc

SEQ ID NO: 8448 - DNA, 552 bp, synthetic construct
  misc_feature 1..552: note = source = /note="Description of Artificial Sequence: Synthetic coding sequence"
  source 1..552: mol_type = other DNA
atggctgatcacctcatgttagccgaaggataccgcctggttcaaagaccaccttcggccgcagccgcccatggcccacacgcattacgaaccctgcccccatatgcgggccctgggctcgacagcggtctaagaccaaggggggctccactgggtccaccaccacccagacagcccggcgctctggcctacggcgcgttcggaccgccatccagttttcagccctttcccgctgttccaccacctgcagcgggaatcgctcatctgcagcctgtggccactccatacccaggaagagccgcagccccccctaatgccccgggtggcccccccggaccacagcctgctcctagcgctgcggcccctcctccacctgcccacgccctgggtggaatggatgccgagctcatcgacgaagaagccttgacttccctggagctagagctggggttgcacagggtgcgagagctcccagaactgttcctcggtcagagcgagtttgactgcttcagtgatttgggctctgcccccccggcgggcagtgtgagttgc

SEQ ID NO: 8449 - DNA, 552 bp, synthetic construct
  misc_feature 1..552: note = source = /note="Description of Artificial Sequence: Synthetic coding sequence"
  source 1..552: mol_type = other DNA
atggccgaccatctcatgctggctgagggataccgactcgtgcagaggcctccgtcagcggccgcggcacacggcccgcacgcgctccggacccttcctccatatgcaggccccggtctggattccggactgcgcccacgcggcgccccacttggcccaccgccacctagacagccgggagccctcgcctacggcgctttcggacccccgagctcgttccagccttttcctgctgtgccgccgccggccgctggtattgcacacctgcagccagtggcaactccgtacccggggagagccgctgccccgcctaacgctcctggtggacccccgggcccacaacctgcgccgtctgcggcggccccgccaccacctgcccacgccttgggagggatggatgccgaactcatagacgaggaggcgctgacttccctcgaattggaactcgggctgcatcgggtcagagaactgcctgaactcttcctggggcaatcggagtttgactgtttctcggatctcggcagcgcaccgccagctggaagcgtctcgtgc

SEQ ID NO: 8450 - DNA, 552 bp, synthetic construct
  misc_feature 1..552: note = source = /note="Description of Artificial Sequence: Synthetic coding sequence"
  source 1..552: mol_type = other DNA
atggccgaccatcttatgttggccgagggataccgcttggtgcaaagacctccgtccgcagccgcggcacatggaccccacgcacttcgtactctccctccctacgcaggccccggcctcgactccggcctgaggcctaggggagctccacttggcccacctccacctcggcagcctggtgcacttgcctacggcgcattcggtcccccttcatcatttcaaccattcccagctgtcccgccacctgccgcgggtatagcacatctgcagcctgtggcgaccccgtacccaggtagagccgcagcgccacctaacgcacctggtggcccccctggacctcagccagcaccctccgcggcagcccctccccctcctgcccatgcactcggagggatggacgccgaactgattgacgaagaagcattgacctcccttgaactggaacttggactccatcgggtcagggaacttccggaactctttctgggacaatcggagtttgattgtttttccgaccttgggtcggcgccgcctgcaggatccgtctcttgc

SEQ ID NO: 8451 - DNA, 552 bp, synthetic construct
  misc_feature 1..552: note = source = /note="Description of Artificial Sequence: Synthetic coding sequence"
  source 1..552: mol_type = other DNA
atggcagatcatctgatgctcgccgagggctataggttggtccagagaccgccaagcgccgccgcagcccacggaccacacgcacttcgaacactacctccatatgcagggccagggctagactcagggctgcggccgcgaggagcgccactgggcccaccacccccgcgccagcctggggcactagcatatggggccttcggccctccaagttcttttcagccctttcccgcagttccaccccctgccgcggggattgcacatctgcaacctgtcgccacaccatatcccggccgcgctgcagcaccacccaacgcccctggaggtcccccggggccacagcccgccccctcagccgcggcgcctccacctcctgcccacgccctgggtggcatggacgcggagctgatcgacgaagaagctttaacctctctggaacttgagctcggattgcatagggtgcgagaactcccggaactgttcctcggtcagagtgagttcgattgttttagtgacttaggaagcgccccccctgccggttcagtgtcctgc

SEQ ID NO: 8452 - DNA, 552 bp, synthetic construct
  misc_feature 1..552: note = source = /note="Description of Artificial Sequence: Synthetic coding sequence"
  source 1..552: mol_type = other DNA
atggcggatcatctgatgctcgcggagggttatcgtctggtccagaggccgcctagcgctgccgccgctcatggaccccacgctctccgcacactcccaccatatgctggaccaggcctcgatagcgggttgcgccctcgtggagcacctctgggcccacccccaccccggcagccgggcgccctagcctacggtgcttttgggccgccgagttcattccagcccttcccagctgtgcctccacctgccgccgggatcgcccatctccagcccgtcgcaacaccatatccagggcgcgccgccgctcctccaaacgccccaggtggtccgcctggtcctcagccagccccctccgccgcggcgccaccaccaccagctcacgcgctgggcggtatggacgccgagctcatcgacgaggaggcactgacctctctcgagctcgagctgggcttgcatcgcgtaagagaacttcccgagctattcctgggtcagtccgagttcgattgtttttcagatctagggtccgctcccccggctggctcagtgtcctgt

SEQ ID NO: 8453 - DNA, 552 bp, synthetic construct
  misc_feature 1..552: note = source = /note="Description of Artificial Sequence: Synthetic coding sequence"
  source 1..552: mol_type = other DNA
atggccgatcaccttatgcttgccgaaggataccggttggtccagcggccaccctcagctgccgcggctcacggcccacacgcgctgcggactctccctccgtacgccgggccaggactggatagcggactccggcctagaggcgcacctttgggccctcctccgcctaggcagcctggcgcgctcgcttacggagcatttggtcctccatcgtccttccaacctttcccagccgtgccaccgccggccgctgggatcgcccacctccaaccagtggccactccgtaccccggaagagccgccgctccacccaacgccccgggcggaccaccaggaccgcagcccgcaccatcggctgctgccccgccgcccccagcacacgccctcggaggaatggacgcagagctcatcgatgaagaagcgctgacttcactggagctggaactgggactgcatcgcgtgcgcgaactgccggagctcttccttggacagagcgagtttgactgcttctccgacctgggcagcgccccgccagccgggtcggtgtcatgt

SEQ ID NO: 8454 - DNA, 552 bp, synthetic construct
  misc_feature 1..552: note = source = /note="Description of Artificial Sequence: Synthetic coding sequence"
  source 1..552: mol_type = other DNA
atggccgatcacctcatgctggcagaaggatataggctcgtgcaaaggcctcctagcgccgcagctgcccacggcccacacgccttgcgcaccctgccaccgtatgccggccctggactggattctggattgagacctagaggtgcccctctgggaccgccacctccacgccaacccggcgcccttgcatatggtgctttcggacctccttcttcattccagccttttcccgctgttcctcctcctgccgctggaatcgcgcatctccagccagtggcaaccccgtaccccggccgggccgccgctccgccgaacgctcccggcggaccacctggcccccaaccggcaccatctgctgctgcgcctccccctcccgcccacgctctgggcggcatggacgctgagttaatcgacgaagaggctcttacaagcctggaattggaactgggactgcacagagtacgcgagttgcccgagctgttcctcggacaaagcgagttcgattgcttcagcgacctgggaagcgctccacctgctggtagcgtatcttgc

SEQ ID NO: 8455 - DNA, 552 bp, synthetic construct
  misc_feature 1..552: note = source = /note="Description of Artificial Sequence: Synthetic coding sequence"
  source 1..552: mol_type = other DNA
atggcggaccatctcatgctagcagagggttataggctcgtacagaggcctccctctgctgccgctgctcatggccctcacgccctgcgcacattgcccccttacgctggcccaggattagattctggactgcgccctaggggggcaccactgggacctccccctcctaggcagcccggcgccctcgcttacggagcttttggacctccaagttctttccaacctttcccagcggtaccacccccggcggccgggattgctcacctgcagcctgttgcaactccctatcctgggcgcgcggctgctccgcctaacgctccaggtggcccccccggcccacagcccgcaccttccgcagcagccccaccccctcccgctcatgccttgggcggtatggacgcagagctgatagacgaggaggccctgacaagcctggaattggagctgggattgcaccgcgttagagagctccccgagctctttcttggtcaaagcgagttcgattgcttcagcgaccttgggagcgccccaccagccgggtcagtgagttgc

SEQ ID NO: 8456 - DNA, 552 bp, synthetic construct
  misc_feature 1..552: note = source = /note="Description of Artificial Sequence: Synthetic coding sequence"
  source 1..552: mol_type = other DNA
atggcagatcatcttatgctcgcagaaggataccgactcgtgcagcgacctcccagcgcagccgctgcgcatgggcctcatgcactgcgcaccctccctccatatgccggcccaggactggattccggactgcgcccacggggagcaccgctcggtcctcctccgcctcgtcagccaggcgcgctggcatacggagcctttggcccacccagctcgtttcagccctttcccgcagtccctcccccagcagcaggtatagcgcatctccaacccgttgccactccataccctggcagagcggccgcccctcctaacgcacctggaggacctcctggtcctcaaccagcaccatcggcagccgcaccacctcctcctgcacacgcacttggagggatggatgcagaactgattgatgaggaagcacttactagccttgaactggagttgggactgcatcgcgtcagagaactcccagaactttttctggggcagtccgagttcgattgtttttcggatcttggctcggcccctccagccggatccgtctcgtgt

SEQ ID NO: 8457 - DNA, 552 bp, synthetic construct
  misc_feature 1..552: note = source = /note="Description of Artificial Sequence: Synthetic coding sequence"
  source 1..552: mol_type = other DNA
atggccgaccacctgatgctggctgaggggtatcgcctcgtacaaaggccgcccagtgccgctgccgcccacgggccccacgcgctgaggactctcccgccgtacgccgggcccgggctcgactctgggctgcgccctaggggcgcaccattgggccccccaccccctcgccagccaggggcactggcctatggtgcctttgggcccccaagttcctttcagccgttcccagctgtgccaccaccagccgctggcatagcacatctgcagcccgttgcaaccccatatcctggaagggctgctgctccgcccaacgcgccaggcggcccacctggacctcagcccgccccatcagcagcggccccacctccacctgcccacgccttgggaggaatggatgccgagttgatcgatgaagaggccctcacatccctcgaactggagctgggattgcatcgagtgagagagctgcctgaacttttccttggacagtccgaatttgactgctttagcgacctgggtagcgctcctccagcaggcagcgtgtcttgt

SEQ ID NO: 8458 - DNA, 552 bp, synthetic construct
  misc_feature 1..552: note = source = /note="Description of Artificial Sequence: Synthetic coding sequence"
  source 1..552: mol_type = other DNA
atggcagaccatttaatgctcgccgaaggttaccgtctggttcagaggcccccgagtgctgccgcagcacacgggccccatgctttacgcacacttcccccgtacgcagggcctgggctggattcgggacttcgaccacgcggagcgcccctaggacccccgcctccaaggcagcctggggccctggcatacggggctttcggaccaccttcctcttttcaacctttcccggccgtgccccctcccgctgcgggcattgcacacctacaacccgtcgccacgccttaccctggccgcgccgctgctcccccaaacgctcctggtggcccccctggtccccaacccgctcctagcgctgccgctcccccacctccagcgcatgccctggggggcatggacgccgaactgattgacgaggaggccctgacgagcttggagttggagctgggtctgcatagagtgcgggagctacccgagctcttcctgggtcagagtgaatttgactgctttagcgacctgggaagcgccccgccagcaggttcagtgtcgtgc

SEQ ID NO: 8459 - DNA, 552 bp, synthetic construct
  misc_feature 1..552: note = source = /note="Description of Artificial Sequence: Synthetic coding sequence"
  source 1..552: mol_type = other DNA
atggcagaccacctgatgctcgcagaaggatacagactcgtgcagcgcccgccttcggctgccgccgctcatggcccccatgccctccggaccctccccccgtatgctggccctgggctcgactccgggctgcgcccgaggggcgccccgcttggaccgccaccgcctcgccaacctggtgcgctggcttacggcgcattcgggcccccgtcgtccttccaaccattccctgctgtgcccccgccagcggcgggtatcgcccacctccagccagtcgcaaccccctacccagggcgggctgctgcgcctccaaacgcaccgggaggcccgccggggccgcagccggcgccctccgccgccgccccgcctccgccagctcacgcactgggaggtatggatgcagagttgatcgatgaggaagccctgacttcattggaactggagctgggactccaccgggtacgcgagctgcccgaattgtttctgggacagtcggaatttgactgtttctcagacctcggatctgccccaccggcaggatcggtgtcctgc

SEQ ID NO: 8460 - DNA, 552 bp, synthetic construct
  misc_feature 1..552: note = source = /note="Description of Artificial Sequence: Synthetic coding sequence"
  source 1..552: mol_type = other DNA
atggccgaccacttgatgctggcggaggggtacaggctggtccagcgcccgccgtcagcggcagccgcccatggccctcatgcgctgagaaccttgcccccgtacgccggacctggactcgattcaggcttgcggccgcgcggggcgccgctgggtcctccaccaccaagacagccgggagcgctcgcatacggcgctttcggacccccgtcgtcatttcagccttttccggccgtgccacctcccgccgctggaatagcacacctccaacctgtggccactccatacccgggacgtgcagcggccccacctaacgccccaggtggtccgccgggaccacagccggctccgtccgccgctgccccaccgccgccggcgcacgcgctggggggaatggacgctgaacttatcgacgaagaggcattgacctcccttgagctggaactgggcctgcatcgggtccgggagctgcccgagctcttcctcgggcaaagcgaattcgattgtttctccgaccttggctcggcgcctcccgctggaagcgttagctgc

SEQ ID NO: 8461 - DNA, 552 bp, synthetic construct
  misc_feature 1..552: note = source = /note="Description of Artificial Sequence: Synthetic coding sequence"
  source 1..552: mol_type = other DNA
atggcggaccacctgatgctcgccgaaggttaccggctcgttcagagaccgcccagcgccgctgcagcccatggtccccacgcccttcggacactgcctccatacgctggtcctggtcttgatagtggccttaggcctcgcggcgctccattggggccacctcctcccagacagccaggggccctggcctatggagctttcggacctcccagctcctttcagcccttcccggcggtccccccgccagctgccggcattgcacatctgcagcctgtggccaccccctaccctggcagagccgccgcacctcccaacgcacccggcggaccacctggaccccaaccggccccgagcgccgccgccccaccaccgcctgcacacgccctcggtggtatggacgcggagcttatcgatgaagaggccctgacatcgcttgagctggaactgggtttgcacagggtccgtgagttaccggagctgttcttggggcagtccgaatttgattgtttctccgaccttggcagcgcccccccagctggctctgtaagttgt

SEQ ID NO: 8462 - DNA, 552 bp, synthetic construct
  misc_feature 1..552: note = source = /note="Description of Artificial Sequence: Synthetic coding sequence"
  source 1..552: mol_type = other DNA
atggcagatcatctgatgctggcagagggttacagattggtccaaaggccaccaagcgcagcagcagcccatggaccccacgcgcttcggactctcccgccatacgcaggcccggggctcgactccggtttgcgcccacgcggggccccactcggtccaccacctccaagacagcctggagcactggcatacggggctttcggaccgccatcctcctttcaaccgttccctgcagtgccccctcctgccgcagggattgcccatctgcagccagtggcgactccttaccccggcagggcagcagcacctcccaatgcaccaggtggaccacctggaccacagccagcaccgagcgccgccgcgcctccgccacctgcgcatgcactgggaggaatggatgcggagcttatcgacgaagaagcgctgacctccctggaattggagcttggactccatcgcgtgcgcgagctgcctgagctgtttctgggacaatcggaatttgattgtttttcggacctgggatccgcaccccctgctggtagcgtctcctgt

SEQ ID NO: 8463 - DNA, 552 bp, synthetic construct; identical to SEQ ID NO: 8429
  misc_feature 1..552: note = source = /note="Description of Artificial Sequence: Synthetic coding sequence"
  source 1..552: mol_type = other DNA

SEQ ID NO: 8464 - DNA, 552 bp, synthetic construct
  misc_feature 1..552: note = source = /note="Description of Artificial Sequence: Synthetic coding sequence"
  source 1..552: mol_type = other DNA
atggctgatcacctcatgttagcagaaggctaccggcttgtgcagagaccaccatcagctgctgctgctcacggaccacatgccttgcgtacacttccaccatacgcaggaccaggtttagatagcggccttcgcccgagaggtgcgcctttgggtccaccaccaccgcgacagcctggtgctctggcgtacggagctttcggaccgccatcgtccttccagccattcccagccgttccaccaccagcagcgggaatagcccatttacaaccggttgccacaccgtatccagggagggcggcggcaccaccgaacgcaccgggtggaccaccagggccacaaccagcaccatctgctgctgctccgccgccaccggcacatgctcttggaggtatggatgcggagctgatagatgaggaagcccttacatctcttgaactcgaacttggtctgcaccgagttcgtgagttgccagagctttttcttggacagtcagagtttgattgttttagcgatcttggatctgcaccaccggcaggtagcgtatcgtgc

SEQ ID NO: 8465 - DNA, 552 bp, synthetic construct
  misc_feature 1..552: note = source = /note="Description of Artificial Sequence: Synthetic coding sequence"
  source 1..552: mol_type = other DNA
atggccgatcatttaatgctggctgagggctaccgcctagtgcaacggccaccctccgccgccgccgcgcacggaccccatgccttgagaacgctgcctccctatgccggaccaggcctcgactccggccttaggccacggggggctccactgggcccccctccacccagacagcctggggctcttgcttatggcgccttcgggcccccaagttccttccagcctttcccagccgtgccccccccagccgcagggatcgctcacctgcagcctgtcgcaacgccctaccctggtcgagccgctgcccccccaaacgctcccggaggcccaccgggcccccagcccgctcctagcgccgctgcccctccaccacccgcgcacgcgttgggggggatggatgccgaactcatagatgaagaggctctcaccagtcttgagctggaactgggcctgcatcgagttcgggagcttcctgagctgtttcttggccagagcgagttcgactgcttctcagatctgggttccgccccccccgcgggaagcgtgagctgc

SEQ ID NO: 8466 - DNA, 552 bp, synthetic construct
  misc_feature 1..552: note = source = /note="Description of Artificial Sequence: Synthetic coding sequence"
  source 1..552: mol_type = other DNA
atggcagaccatctcatgcttgccgaaggctacaggctggtgcagcgacctccatcagccgcagcagcacacggcccacatgcccttaggacccttcctccttacgcaggaccgggtctggattccgggctgcgtcctcgtggcgcccccctcgggcctccacctcccagacaacctggtgccctggcgtacggcgcttttgggccaccatcgtccttccaaccatttccagctgtgcccccacccgccgccgggatcgcccacctgcaaccagttgcaactccttaccccggacgtgcggcagcaccacccaatgcaccaggcggtccacccggaccacagcctgcgcctagcgcagcagcacctccccctcctgcgcatgcactgggtggcatggatgcggaattgattgatgaagaggcgcttacctcgcttgagctcgaactcggtctgcatcgcgtgagagaactccctgaactttttcttggacaatcggaatttgactgtttctccgatctgggaagcgcaccaccggctggatcagtctcttgt

SEQ ID NO: 8467 - DNA, 552 bp, synthetic construct
  misc_feature 1..552: note = source = /note="Description of Artificial Sequence: Synthetic coding sequence"
  source 1..552: mol_type = other DNA
atggccgaccacctgatgttggccgagggctaccggctggtgcagaggcccccatctgctgcagccgcacacggacctcacgcacttaggacactgcctccttacgccggccccggtcttgactccggccttcgtccacgaggcgccccgctagggccccctccacctcgccagccgggggcgctggcttatggggcctttggaccgcccagttccttccagcccttcccagcagtgccccctcccgctgctgggattgcccatctccagccagtggccaccccttatccgggacgcgctgccgcccctccaaacgccccgggaggcccccccggcccccagcctgctccaagcgctgccgcaccaccccctcccgcccacgccttgggtggcatggatgccgagctgattgatgaggaagctctcactagcctggaactggaattgggactgcatcgggtccgcgagctcccagagctatttttgggacaatctgagttcgattgcttctcggatctgggttccgcaccacctgccggttcggtcagctgc

SEQ ID NO: 8468 - DNA, 552 bp, synthetic construct
  misc_feature 1..552: note = source = /note="Description of Artificial Sequence: Synthetic coding sequence"
  source 1..552: mol_type = other DNA
atggccgatcatctgatgctcgccgaagggtaccgcctcgtccagcgcccaccctccgccgccgcggctcacggaccccatgccttgcgaactctgccaccgtacgctggcccagggcttgactctggtcttcgacccagaggggcccctttggggccgccgcctcctaggcagcccggagccctcgcctatggcgcctttggcccccccagcagctttcagcccttcccggccgtccccccaccggccgccggaatcgcacacttacagcctgtcgcaacgccataccccggcagggccgccgctccgcctaatgcacccggaggaccccccggaccacagcccgctccttctgctgctgctccccctccaccagctcacgccctggggggcatggacgcagagcttattgatgaagaagccctaacaagcctcgagttggaattgggcctccaccgcgttcgagagctgccagagttgttcctgggtcagagcgagttcgactgcttctcggacttagggagcgcacccccagctggaagtgtcagctgc

SEQ ID NO: 8469 - DNA, 552 bp, synthetic construct
  misc_feature 1..552: note = source = /note="Description of Artificial Sequence: Synthetic coding sequence"
  source 1..552: mol_type = other DNA
atggcagatcatctcatgcttgcagaaggctatcgcctggtgcagcgtccacccagtgctgctgccgcacacggacctcatgcgctgcggacgttgcctccctacgcgggcccaggcctggactccggcctccgtcctcggggtgccccactgggacctccgccccctcgtcagcccggggccctagcctacggcgcattcggccctccaagtagcttccagccctttccagcagtacctcctcccgccgcgggaattgctcaccttcagcctgtggccaccccttaccccgggcgggcagcggctccccccaacgcccccggcggaccccccgggccccagcccgcgcctagcgctgcagctccccccccccctgctcacgctcttggcgggatggatgcggagttaattgatgaagaagcattgaccagcctcgagctcgagctgggcctccatagggtccgtgagctgcccgagctttttctgggacaaagcgagttcgactgctttagtgatctagggtccgccccacctgccgggagtgtgtcgtgt

SEQ ID NO: 8470 - DNA, 552 bp, synthetic construct
  misc_feature 1..552: note = source = /note="Description of Artificial Sequence: Synthetic coding sequence"
  source 1..552: mol_type = other DNA
atggctgatcacctgatgctggcagaagggtaccggctggtgcagcgcccgccgagcgctgcggctgctcacggcccgcatgccctccgcaccctgcccccgtacgcgggaccgggactggactctggactgcgcccgaggggcgcgccactcgggcctccgccgccacggcagcctggtgccctcgcatacggcgcctttgggcccccatcatcgtttcagcctttcccagcagtcccgcctccggcggctggcatcgcgcacctgcaaccggtcgccactccttatccgggaagggcggcggcccctcccaacgcgcccgggggaccccccggtccgcaaccagcacccagcgctgcggcacctccaccgccggcacacgcgttggggggaatggacgcagaactgatcgacgaagaggctctcacctccctggaactggagctcggattgcatcgagtccgcgagctcccggaactttttctcggacagtcggagttcgattgtttttcggaccttggctctgcaccaccagcgggctcggtgtcgtgc

SEQ ID NO: 8471 - DNA, 552 bp, synthetic construct
  misc_feature 1..552: note = source = /note="Description of Artificial Sequence: Synthetic coding sequence"
  source 1..552: mol_type = other DNA
atggcggatcatcttatgctcgcggaaggatacagactcgtgcagcggccaccaagcgcggcagctgcgcacggaccgcacgctctgcgcactctgccaccatacgccggccctggactggactccgggctccggccacgcggagcaccccttggtccgccacccccacgccagccaggtgccctggcgtatggggctttcggcccgccgtcctcgttccaaccgttcccggccgtcccgccacctgctgctggtatcgcacacctgcagccggtggctacgccgtacccaggcagggcggctgcgccgccgaacgctcccgggggtccgcctggaccgcagcccgcaccgagcgctgctgccccacctccacccgcccacgcactcggcggcatggacgccgagctgatcgatgaagaagctctgacttccctcgagctcgaactgggactccaccgcgtgagagagctgccggaacttttcctcggacagagcgaattcgactgcttctctgacctcggatcagcgccacctgccgggtccgtctcatgc

SEQ ID NO: 8472 - DNA, 552 bp, synthetic construct
  misc_feature 1..552: note = source = /note="Description of Artificial Sequence: Synthetic coding sequence"
  source 1..552: mol_type = other DNA
atggcagaccacctcatgctggctgagggttatcggctggtgcagaggcctccatcagctgcagccgcccacggaccacacgccttgaggaccttgccaccatatgctggccctggactggactccggcctgcgtccccgcggggcaccccttgggcctcccccacctcgccaacctggtgctctggcctacggtgctttcggtcctccgtcctcttttcagccatttccagccgtgccaccccccgcagccggcatcgcgcacttacagcctgtagcgactccctatcctggtcgcgccgccgcacctcctaacgcaccaggggggccacccggaccccagcctgccccctccgcagctgcacctccacctccagcccatgcgctcggaggtatggacgctgaactgattgatgaagaagctctcacatccctggagctggagctcggactgcaccgtgttcgggagctaccagagctcttcttgggacagtctgagtttgactgtttttccgacttaggcagcgcaccgcccgccggcagcgtttcctgc

SEQ ID NO: 8473 - DNA, 552 bp, synthetic construct
  misc_feature 1..552: note = source = /note="Description of Artificial Sequence: Synthetic coding sequence"
  source 1..552: mol_type = other DNA
atggcagaccacttaatgcttgccgaaggttacagactggtgcagcgaccaccttctgctgccgccgctcacggcccacatgcgctgcgaacgttgcctccttacgccggccctgggctggattctgggctgaggccgcgaggcgctccgttaggccctccccccccccggcagccaggagctctcgcatacggcgcgttcggcccaccatcaagttttcaacctttccccgccgttccacccccagccgcaggcattgcccatctccagccagtcgccaccccataccccggtcgggctgctgcaccaccaaacgctcccggtgggccccccggccctcagccggccccctccgctgcggcaccaccaccccccgcacacgcactgggcggcatggatgccgagctgattgatgaagaagcactcactagcctggaactggagttgggactgcatagggttagggagttacccgagttgtttctggggcagtctgagtttgattgtttctctgacctggggtcggcgcctcctgccggtagcgtgagttgc

SEQ ID NO: 8474 - DNA, 552 bp, synthetic construct
  misc_feature 1..552: note = source = /note="Description of Artificial Sequence: Synthetic coding sequence"
  source 1..552: mol_type = other DNA
atggctgaccatttgatgctcgccgagggatatcgccttgtgcaacgtccaccgagcgccgccgctgcacacgggccgcacgcactccggaccctgccaccctatgccggccctggactcgattcaggcttacgcccacgaggcgccccactgggaccaccgcccccccgacagccaggagccctcgcatacggcgcatttggcccaccctcaagtttccagccttttccagcagtacctcctccagctgctggtattgcacatttgcagcccgtcgcaacaccctacccaggccgggccgccgctccgcctaatgcaccagggggacccccaggaccacagcccgccccatcagcagcagcaccgcctccccctgctcatgccctgggcggaatggacgcggagctaattgacgaagaggctcttaccagcctagagctagaactgggcctgcaccgtgtccgcgagctccccgagctttttctgggtcaatcagaattcgattgcttctccgatctggggagtgcacctcccgcggggagtgtctcttgt

SEQ ID NO: 8475 - DNA, 552 bp, synthetic construct
  misc_feature 1..552: note = source = /note="Description of Artificial Sequence: Synthetic coding sequence"
  source 1..552: mol_type = other DNA
atggcagaccacttaatgttggctgaaggctatcgtcttgtccaaagaccgccttctgcggctgcagcccatggcccacatgcgcttcgaaccctccctccttacgcaggtcctggattagattcaggattgagaccgaggggggcaccgttgggtcctccgccacctcgtcagccgggagctttggcatacggagcctttggaccaccgtcttcctttcagccttttccagcagttccaccgccagctgcaggtatcgctcacctgcagccggtcgcaacaccttatcctggcagggctgctgcgccacctaacgcacccggcggaccgccgggtcctcagccggcgccttccgccgcggcaccaccgccgccagcacacgctttggggggcatggatgccgagctcattgacgaggaagcactaacaagcttagagttagaactaggtcttcatcgagtacgcgaactccctgaactgtttctgggtcagagtgaatttgattgcttttccgatctgggaagcgctccgccggcgggttcagttagttgt

SEQ ID NO: 8476 - DNA, 552 bp, synthetic construct
  misc_feature 1..552: note = source = /note="Description of Artificial Sequence: Synthetic coding sequence"
  source 1..552: mol_type = other DNA
atggccgaccacctaatgttggccgaaggataccgtctggtgcagcggccgccatccgcagccgctgcccacgggccacacgcactaaggactctgcctccctatgccggcccaggtctggatagcggtctgcggccccgcggagctccacttggcccaccacctcccaggcaacccggagctttagcctacggcgccttcgggccgccctcctcattccagccattcccagctgtacccccacccgctgcgggaatcgcccatctgcaacccgtcgctaccccttaccctggaagggccgccgcaccgcctaacgccccagggggtccccctggcccacaacccgcaccgagcgctgctgcaccccccccaccagcgcatgctcttggaggcatggacgcagagttgatcgatgaggaggccctaaccagtctagagctggagctggggctgcaccgggtccgcgaactccccgagctgttccttggccagtcagagtttgattgttttagtgacctggggagcgccccccctgccggatccgtctcctgt

SEQ ID NO: 8477 - DNA, 552 bp, synthetic construct
  misc_feature 1..552: note = source = /note="Description of Artificial Sequence: Synthetic coding sequence"
  source 1..552: mol_type = other DNA
atggcggatcacctcatgctcgccgaaggttaccgtttggtccagcgaccccctagcgcagccgcggcacacggaccccacgccctgagaactcttcccccctacgcaggcccagggctggactcggggctcagaccgcgtggtgccccactcggaccaccacctccgaggcagccgggggcgctcgcctacggtgcattcggccccccatcctctttccaaccttttccggccgtccctccaccagccgcaggcattgcacatctccaacctgtcgcaactccgtacccaggtcgggcagccgcgccgccaaacgcaccggggggcccacctggtcctcaacctgccccctcggcagcggcaccgccccctcctgcacatgccttggggggaatggatgcagaactgatcgatgaggaagccctgacgagccttgaactcgaacttggtttgcatcgcgttcgagaactccctgagcttttccttgggcagtcagagtttgattgcttttccgatctgggaagcgctcctcctgccggatcggtgtcctgt

SEQ ID NO: 8478 - DNA, 552 bp, synthetic construct
  misc_feature 1..552: note = source = /note="Description of Artificial Sequence: Synthetic coding sequence"
  source 1..552: mol_type = other DNA
atggccgaccacctgatgctggcagagggataccggctggtccagcgccctccatcagccgccgcagcccatggaccgcatgccctcaggaccttgcctccatacgcaggaccggggctcgattccggactgaggccccgtggcgctccgctcggaccgccgcccccgcgccagcctggagctctggcgtacggggccttcggaccaccttcgtcctttcagccattcccagccgttcctccgccggccgctggaattgcccacttgcagccggtggcgaccccctacccgggacgcgccgccgcccctcctaacgctccaggagggccaccggggccgcagcccgcgccgtctgcggccgccccgcccccgccggctcatgctcttggcggcatggacgcagaactcatcgacgaagaagccctcacctcgctggaactggaactgggactccatagagtgcgcgaattgccggaactttttcttggacaatccgaattcgattgcttcagcgacctgggaagcgcgcccccggcaggctcggtgtcgtgc

SEQ ID NO: 8479 - DNA, 552 bp, synthetic construct
  misc_feature 1..552: note = source = /note="Description of Artificial Sequence: Synthetic coding sequence"
  source 1..552: mol_type = other DNA
atggccgaccaccttatgctggccgagggataccgcctggtgcaaagaccgccatcggctgctgccgcacacggaccccatgcgctgagaactctgcctccgtacgccggcccgggattggactcgggactgcggcctcggggtgccccgctgggacccccgccgccacgccaaccaggagcactcgcgtacggcgctttcggaccgccctcgtccttccagccgttccctgccgtgccaccaccggcggcaggaattgcgcatctccagcccgtcgctaccccttacccgggacgagctgcagcccctccaaacgctccgggcgggccgcctgggcctcagccggcgccctcagcggccgcaccacctccaccggcgcacgcgctgggcgggatggacgccgagctgatcgacgaagaagccctgacctcactggaactcgagctcggccttcacagagtccgagaacttccagaactctttttgggtcagtcagaatttgattgtttcagtgatctggggagcgccccgccggccggctccgtgtcctgc

SEQ ID NO: 8480 - DNA, 552 bp, synthetic construct
  misc_feature 1..552: note = source = /note="Description of Artificial Sequence: Synthetic coding sequence"
  source 1..552: mol_type = other DNA
atggcggatcatcttatgctcgctgagggttaccgcctggtgcaaagacctccctccgccgcggccgcacatggaccacacgctctcagaaccctgcccccatatgcaggaccaggactggattcgggcctgaggcctagaggcgccccccttgggccaccaccacctagacaacctggagcactggcatacggagcatttggtcctccctcgagctttcaacctttccctgcagtccctccacccgccgccggaatagcacatctgcaacctgtggcaactccttaccctggccgcgcagcagccccaccaaatgccccaggtggtcctccaggccctcaaccagcgccttccgctgcagcgcctcccccgccagcccatgcactgggaggtatggatgccgaactcatcgacgaagaagcattgacctcccttgagctggaactgggactgcaccgggtgagagagctcccagaactgtttctcggacagagcgagtttgattgtttttccgaccttggaagcgcaccgcctgccggaagcgtgtcatgt

SEQ ID NO: 8481 - DNA, 552 bp, synthetic construct
  misc_feature 1..552: note = source = /note="Description of Artificial Sequence: Synthetic coding sequence"
  source 1..552: mol_type = other DNA
atggcggatcatctgatgcttgcagaaggatatcgcctcgtccaacggcctccttccgccgcagctgcgcatggtcctcacgcactcagaacccttccgccatacgcaggccctgggctggactctggacttcggccaagaggggccccactcggccctccccctccgaggcagcctggagcacttgcatacggagcatttggaccaccctcctcattccaaccatttcccgcagtgcctccacccgctgcagggatagcacatctgcagccagtcgctaccccttaccctggtcgagcagcagccccgcccaacgccccgggtgggccaccaggtccccaacctgctccaagcgctgcggctcctcctcctccagcacatgcccttggaggcatggatgcagaactgattgatgaagaagcacttacttcgcttgagttggaactcggtctgcaccgagtgcgcgagctcccagaactctttttgggccaatccgagtttgactgcttcagcgatctgggctctgctcccccggcaggatcggtgtcgtgt

SEQ ID NO: 8482 - DNA, 552 bp, synthetic construct
  misc_feature 1..552: note = source = /note="Description of Artificial Sequence: Synthetic coding sequence"
  source 1..552: mol_type = other DNA
atggcggatcacctcatgttggctgaaggatacaggctggtccagcggccaccctcagctgctgctgctcacggaccacacgcacttaggactctgccgccatacgctggaccagggctcgactccggcctgaggcctcggggcgccccactgggcccaccccctccaagacagcccggtgcactggcttacggagcattcgggcccccatccagcttccagccttttccggccgtgccaccgccggctgcgggtatcgctcatctccagccagtggctaccccctatccagggagagccgccgccccacctaatgcccctggtggaccgccagggccacagcctgcaccttcagctgcagccccaccacctccggctcatgcattgggcggaatggacgccgaactcatcgacgaagaagccctcacctctttggagctggagctcgggttgcaccgcgtgcgcgagcttccagaactgtttttgggccagagcgagtttgactgtttctctgaccttggatccgcccctccagctggaagcgtcagttgt

SEQ ID NO: 8483 - DNA, 552 bp, synthetic construct
  misc_feature 1..552: note = source = /note="Description of Artificial Sequence: Synthetic coding sequence"
  source 1..552: mol_type = other DNA
atggcggaccacctgatgctcgctgaaggataccggctggtgcagcgcccaccgagtgctgctgcagcgcatggcccacatgcacttcgaaccctgccgccgtacgccgggccgggactggactcgggactccggcctaggggagctccactgggcccgcccccaccgcgccaaccaggcgctctggcctacggcgcatttggaccaccaagcagcttccaaccctttcctgcagtgccaccaccggccgccggtatcgcacatcttcagccagtcgcaaccccatacccggggagagcggccgcgcctcctaacgccccgggcgggcctcccggaccgcagccggcccctagcgcagctgcccctcctcctccagcacatgctctcgggggaatggatgccgagctgatcgacgaggaagcactgacttcgctggagctggaactcgggctgcaccgggtgcgcgaactgccggagctctttcttggtcagtcagagttcgattgcttctcagatcttggaagcgctccgcctgcgggaagcgtgtcgtgt

SEQ ID NO: 8484 - DNA, 552 bp, synthetic construct
  misc_feature 1..552: note = source = /note="Description of Artificial Sequence: Synthetic coding sequence"
  source 1..552: mol_type = other DNA
atggccgaccatctcatgctggcagagggatacaggttggtccagaggcctccgagcgcagctgctgctcacggaccgcacgcgctgaggactctgcctccgtatgctggccccggtctggattctggccttagaccaagaggagccccacttggtcctcctccacctaggcagccaggcgctttggcttacggtgcctttggccctcccagttcatttcagccctttccagccgtgccaccccccgccgcgggtatagcgcacctgcagccggtcgccaccccttacccaggccgcgcggctgctcctccaaacgctccaggaggaccccctggcccacagcccgcaccatcagctgccgctcccccccccccggcccacgcgcttggaggaatggatgcggagttgatagacgaggaggccctgacatctttggaactggagctgggtctccatagggtgcgcgaactgcctgagctgttcctgggtcagtcagagttcgactgtttctccgatctcggcagcgctccgccagccggttctgtaagctgt

SEQ ID NO: 8485 - DNA, 552 bp, synthetic construct
  misc_feature 1..552: note = source = /note="Description of Artificial Sequence: Synthetic coding sequence"
  source 1..552: mol_type = other DNA
atggcggaccatctcatgctggctgaaggctatcgccttgtgcagagaccaccatccgctgccgctgcacacgggccccacgctctgcggactctgcccccttatgccggcccaggcctggatagtggactccgcccaaggggagcccccctaggaccaccccccccccgccaacccggagcactcgcttacggtgcattcggaccccccagctccttccagcctttcccggccgtgccacccccagcagcagggatcgcacatctgcagcctgtggcgacaccctatcccggtcgcgccgccgcccctccaaatgcacccggaggacctccagggccacagccagccccaagcgcagctgctccccctccccccgcccatgcgctgggcggaatggatgctgagctcattgatgaggaagctctcactagtctggagctggaactgggactgcaccgggtgcgcgagctacctgagttgtttttgggtcagtcggagtttgactgcttttctgacctcggaagcgcccctcctgccggttccgtgagttgt

SEQ ID NO: 8486 - DNA, 552 bp, synthetic construct
  misc_feature 1..552: note = source = /note="Description of Artificial Sequence: Synthetic coding sequence"
  source 1..552: mol_type = other DNA
atggcggaccatctgatgctggctgaggggtatagactcgtacagcggcctccttcagcagcagccgcgcatggtccacatgctctccgcacattgcccccgtatgccgggccaggtttagacagtggactaagacctaggggtgcaccactggggcctccccccccaaggcaacccggagccctggcatacggcgcttttggcccccctagcagcttccagccttttcctgctgtgccgcctccagccgccgggatagcacacctccagcccgtcgctacgccctaccctgggagagcggccgctccacccaacgccccagggggaccacccgggccacaacccgctccctcggcggccgctcctccccctcccgcacatgcactggggggcatggacgctgaactgattgatgaggaggccctcacgtctttagagctggagctgggtctccatcgcgtgcgcgaactcccagagttgttcctggggcagagtgagttcgactgttttagtgacttgggcagcgcaccaccagccgggtcagtctcctgt

SEQ ID NO: 8487 - DNA, 552 bp, synthetic construct
  misc_feature 1..552: note = source = /note="Description of Artificial Sequence: Synthetic coding sequence"
  source 1..552: mol_type = other DNA
atggcagatcatctgatgcttgcagaaggatacaggctcgtccagaggcctccctcagcagcagcggcgcatggccctcacgcactcaggaccctgcctccatacgcagggccaggcctggactctggacttagaccacgcggcgcacctcttggccctccacctcctagacaacctggtgcactggcctacggagcgtttggacctccttcatcgtttcagccttttccagcggtccctcctccagccgccggtatcgcgcatcttcaacctgtggccactccatatcccgggagagccgccgcacccccaaatgctccgggtggtcccccggggccacagccagcaccctcggcagcagcccctccaccgcctgcacacgcactgggtgggatggatgccgagctgattgatgaagaagccttgacttccctcgagctggaactcggtctgcatcgtgtgcgggaactgcctgagctgtttttgggacagtccgaattcgattgcttctcggaccttggctcagcaccacctgcgggaagcgttagctgc

SEQ ID NO: 8488 - DNA, 552 bp, synthetic construct
  misc_feature 1..552: note = source = /note="Description of Artificial Sequence: Synthetic coding sequence"
  source 1..552: mol_type = other DNA
atggctgatcacttaatgctggcagaaggttataggctagttcaaaggcccccatcggccgcagccgctcacgggccacacgcccttagaactttgcccccctacgcaggcccagggctcgattccggtctgaggcctcggggcgctcccttgggccctccacctccccgtcagcctggtgccctggcctatggcgctttcggcccaccttcctccttccagccttttccggccgtccctccacctgctgctggaatcgcccatctgcagcccgttgccaccccctaccctgggagagccgccgctcctcccaacgctcccggcggtccccccggtccacagccagccccaagcgctgctgctcctccgccacccgcccacgcactgggaggcatggatgccgaattaattgacgaagaggcactgacctcgctggagctggagttgggtctccacagggtcagagagctacccgaacttttcctcgggcagtctgaatttgactgtttcagtgatctcggtagcgctcctcctgcaggctctgttagctgt

SEQ ID NO: 8489 - DNA, 552 bp, synthetic construct
  misc_feature 1..552: note = source = /note="Description of Artificial Sequence: Synthetic coding sequence"
  source 1..552: mol_type = other DNA
atggcggatcaccttatgcttgccgaagggtatcggttggtgcagcgccccccttctgcggctgcagcccacggaccccatgctctgcgcactctgcccccctatgcagggcccgggctcgattccgggttgagaccgcggggggcccccctgggacccccgcccccgcgccaacccggagcattggcatatggagccttcgggccacctagttcgttccagccattccccgcagttcctccccccgctgcaggaatagcacatctccagcctgtggctactccttatccaggacgggccgccgcgcccccaaacgctcctggaggaccacctggaccacagccagcaccttctgctgcagctcctcctcctcctgcccacgcattaggagggatggacgccgaacttatcgatgaagaggcactcacaagtcttgaactagaactggggcttcaccgagtgcgcgaattaccagaacttttcctaggacagagtgaattcgattgttttagtgacttaggatccgcaccacccgctgggtccgtctcatgt

SEQ ID NO: 8490 - DNA, 552 bp, synthetic construct
  misc_feature 1..552: note = source = /note="Description of Artificial Sequence: Synthetic coding sequence"
  source 1..552: mol_type = other DNA
atggcagaccacctgatgctggctgaaggataccgccttgtccagcggccgccgtccgcggcggccgcccatggtccgcacgccctgagaacgctgccgccctacgccgggccaggactggattccggtctgcgccccaggggtgcgccactcgggccacccccgccgcggcagccaggagcgttggcctacggagcatttggaccgccgagctctttccagccattcccggccgtcccaccccctgccgccggtatcgcacacttgcagccggtggcgaccccgtacccgggacgggcggcagcacctccgaatgcaccaggtggcccgcctggaccgcagccagccccatcagcggcagccccaccgccgccagcccatgccctcgggggcatggacgccgaactcatcgatgaagaggctctgacctcgctggaactcgagctcgggctccatcgggtgcgagagctcccggagctgttcctggggcagtcagaatttgattgcttctccgacctcggctccgcgccgcccgctggatcagtctcgtgc

SEQ ID NO: 8491 - DNA, 552 bp, synthetic construct
  misc_feature 1..552: note = source = /note="Description of Artificial Sequence: Synthetic coding sequence"
  source 1..552: mol_type = other DNA
atggccgatcacctcatgctagcagaagggtatcggctggtccagcgccccccatctgccgcagcggctcatggaccgcatgctctgaggacactgccaccatatgctggccccgggttggatagtgggctgagacctcgaggggccccgttgggaccacctcctccccgccaacctggagccttagcttatggagctttcggccctcctagtagcttccagccttttccggctgtgcccccccccgccgcagggatcgctcacctgcagcctgtcgctaccccttatcccgggcgggccgccgctcctcctaacgcccctggaggccccccgggcccccagcccgcaccaagcgccgcagcccctccgcccccggcacacgcactaggcggcatggatgcagaacttatcgatgaagaagccctcacttcccttgagctcgaactgggactacacagggtgcgggagctccccgagctgtttcttgggcagagtgagtttgattgcttctcagacctgggttctgccccccctgctggatcagtcagttgt

SEQ ID NO: 8492 - DNA, 552 bp, synthetic construct
  misc_feature 1..552: note = source = /note="Description of Artificial Sequence: Synthetic coding sequence"
  source 1..552: mol_type = other DNA
atggccgatcacctgatgctcgctgaaggttaccgcctcgtgcagcggccgcctagcgccgccgcggcccacggtccgcacgcattgagaaccctgccaccctacgccggacctggcctggactccggcctccgaccgcggggtgcaccgctgggaccgcccccaccacggcaaccaggtgccctggcctacggagcctttgggccaccttcaagtttccagccgttccctgctgtcccgccgccggccgccgggatcgctcatctccagcccgtcgccaccccctacccgggacgcgcggccgctccaccgaacgcgccaggcggcccaccaggcccgcagccagcaccatccgccgccgcgcctccgcctcctgcacatgcactcgggggaatggacgctgaattgatcgacgaggaagcacttacttccctggagctggaactcggcctgcacagagtgcgcgaattgccagaattgtttctggggcaatcggaattcgattgcttttccgatctgggctcggctcctccggccggctccgtcagctgc

SEQ ID NO: 8493 - DNA, 552 bp, synthetic construct
  misc_feature 1..552: note = source = /note="Description of Artificial Sequence: Synthetic coding sequence"
  source 1..552: mol_type = other DNA
atggcggaccatctcatgctggccgaagggtatcgccttgtgcagcgtcctcctagcgcggctgcggcccacggtcctcatgctctgagaactctgccgccatatgccggtccgggcctcgactccggactgcgacctcggggagcaccactgggcccaccgccaccccgccagcctggtgctcttgcatatggcgcctttggccctccttcttccttccaaccctttcccgccgtgccgccaccggccgccggcatcgcccacttacagcctgttgcaacgccatacccgggccgcgctgcggcccctccgaacgcaccaggaggtccccctgggccacagccagctcctagcgcagccgccccaccgcccccggcccacgccctgggcggtatggacgccgagcttatcgacgaagaggcattaactagcttggagctggagctgggcctccaccgcgttcgcgagctccctgagctcttcctgggacagtccgagttcgactgttttagcgacctgggcagcgcacctcctgctggcagcgtgtcctgt

SEQ ID NO: 8494 - DNA, 552 bp, synthetic construct
  misc_feature 1..552: note = source = /note="Description of Artificial Sequence: Synthetic coding sequence"
  source 1..552: mol_type = other DNA
atggcagatcatctgatgctcgcggaaggataccgattggtccagcgcccacctagtgcggcagcggcacacggaccacatgcccttaggacgctcccgccgtacgcggggcccggcctggattccggcctccgtccgaggggtgctccgctcggaccaccaccaccgcgccaacctggcgctcttgcttacggtgccttcggtccacctagcagctttcaacctttcccggccgtgcctccacctgcagcgggtatcgcacacctgcaaccggtcgccaccccctaccccggacgcgccgctgcccctcctaacgccccgggagggccccccggaccgcagccggcgccttcagctgccgctccacctccgccggcacacgccctgggaggaatggacgccgaactgattgatgaagaagcgctgacctcgcttgagctcgaactgggactccatagagtcagagagctgccggagctcttcctgggccagtccgaattcgactgcttcagcgacctcgggtcagccccgcctgccggctcggtgtcgtgc

SEQ ID NO: 8495 - DNA, 3195 bp, synthetic construct
  misc_feature 1..3195: note = source = /note="Description of Artificial Sequence: Synthetic coding sequence"
  source 1..3195: mol_type = other DNA
atgaaaattcttatccttggtatctttcttttcctgtgctcaacaccagcctgggctaaggaaaagcactactatatcggaatcatcgaaactacttgggactacgcctctgatcatggcgagaaaaagctgatctcagttgacactgagcattccaacatttacctgcagaatggcccagataggattggaagattgtataagaaagctctctacctgcagtatactgacgagacctttagaaccactattgagaagccagtgtggctgggctttctgggcccaattatcaaggctgagaccggcgataaagtgtacgtgcatcttaaaaacctggcgtctagaccatataccttccactctcacggaatcacgtactataaggagcatgaaggcgcaatatatccggataataccactgactttcaaagagctgatgataaggtgtatccgggtgaacagtatacatacatgctgctcgctaccgaagaacagtcaccgggtgaaggcgacggaaattgtgtcaccagaatctatcattcccacattgacgcccctaaagacatcgctagcggccttattggccccttgattatttgcaaaaaggactccctggataaggagaaggaaaaacacatcgaccgcgaattcgtggtgatgttctctgtcgtcgatgagaatttctcatggtatttggaggataacataaagacgtactgctccgagcctgaaaaggtagataaggacaacgaggacttccaggagtctaaccgcatgtacagcgtgaatggttacaccttcggctccctgccaggtctttctatgtgtgcagaagatagagtgaagtggtaccttttcggcatgggaaacgaggtggacgtgcacgccgccttctttcatggacaggccctcacaaacaagaattaccgcattgacaccattaacctgttccctgctacgctgttcgatgcatacatggttgctcagaacccaggcgagtggatgctctcctgtcagaatctgaaccaccttaaagcaggacttcaagccttcttccaggttcaagagtgtaataagagctcctctaaggataatattagaggtaaacatgtgcgccactattacatcgccgcagaggagatcatttggaattacgcgccaagcggaatcgatatctttactaaggagaacctgaccgcacccggctcagattcagccgttttcttcgagcagggtactacgagaataggtggatcatataaaaagctcgtgtacagagagtataccgacgccagttttaccaaccgcaaagagcgcggtccagaagaggagcatctgggtatccttggcccggtgatctgggcagaggtgggagataccatccgcgtgacgttccacaacaagggagcttacccgctctctatcgagcctatcggagttaggttcaacaaaaataacgaaggaacttactatagccccaactacaaccctcagtctagaagtgttcctcccagcgcttctcacgtcgctcctacagaaacatttacttacgagtggaccgttcccaaggaagtgggtcctacgaacgccgatcccgtttgcctggcgaagatgtactacagcgccgtcgaccctaccaaggatatcttcacaggcctgattggtccaatgaagatctgcaagaaaggtagcttgcacgccaacggcagacagaaagatgtggacaaagaattctatctcttccccactgtttttgatgagaatgaatctctgctcctggaagacaatataagaatgtttaccacagctccagaccaggtcgataaggaggacgaggacttccaggagtcaaataaaatgcactcaatgaacggcttcatgtacggtaaccaacccggcctgactatgtgtaagggcgattcagtggtgtggtacttgttctcagcaggtaacgaggcagacgttcatggcatttacttttctggcaatacctacctttggcgcggcgaaaggcgcgacacagctaacttgttccctcaaactagcctgacgctgcatatgtggcccgacaccgagggtaccttcaacgtggaatgtctgaccacagatcactatacgggaggaatgaagcagaaatacactgtgaaccaatgccgccgccaaagtgaagactccactttttatcttggagagaggacatattacatcgccgctgtggaggtagagtgggactactccccacagagagaatgggagaaagagcttcatcacctgcaagagcagaatgtttcaaacgcgttcctggacaagggcgaattttacatcggaagtaagtacaaaaaagtggtctacagacaatatacagactccaccttcagagtgccagtggaacgcaaagctgaggaggaacatttgggtatcctgggacctcaactccacgccgacgttggagacaaggtcaagataatttttaaaaatatggctaccaggccctacagtatccacgcccatggcgtccagacagaatcctctacggtaacaccaacattgccaggcgaaactctgacatacgtctggaagataccagaacgcagtggtgccggtaccgaggacagtgcatgtatcccctgggcatactactctaccgtcgaccaggttaaggacctctatagcggactgatcggcccacttatcgtctgtaggaggccctatctcaaggtattcaaccccagacgcaagctggagttcgccctcctgtttctggtgtttgacgaaaatgaatcctggtacctggacgataatattaaaacatactccgatcaccccgagaaagtcaacaaagatgacgaagagttcatcgaatcaaacaagatgcacgcaattaacggcagaatgtttggtaacttgcagggactgacaatgcacgtgggtgacgaggtgaattggtatctcatgggaatgggtaacgaaattgatctgcatacagtccacttccatggccacagtttccagtataagcaccgcggagtatactcaagtgatgtttttgatatcttcccaggcacataccagactctggagatgttcccaagaacaccaggaatctggctgctccactgccatgtgaccgaccatatacacgctggcatggagaccacctacaccgtcttgcagaatgaggatacaaaatctggt

SEQ ID NO: 8496 - DNA, 3195 bp, synthetic construct
  misc_feature 1..3195: note = source = /note="Description of Artificial Sequence: Synthetic coding sequence"
  source 1..3195: mol_type = other DNA
atgaagatcctcatcctcggcatcttcctgttcctttgctcgactcctgcatgggccaaggagaaacactactacatcggaatcatcgagactacgtgggactacgccagcgaccacggagaaaagaagctgatctcggtggatactgagcactctaacatctaccttcaaaatggaccggaccgcatcggcagattgtataagaaggccctgtacttgcaatacactgacgaaaccttcagaaccaccatcgaaaagccagtttggctggggttcttgggacccattatcaaagcagagacgggcgataaggtctacgtccatcttaagaacctggcttcgcgcccatacacgttccattcccatggaatcacctactataaagagcacgaaggagctatctacccggacaataccactgacttccaacgggctgacgacaaagtgtacccgggtgaacaatacacctacatgttgctcgctactgaggagcagagccctggggaaggcgacggaaactgcgtgaccaggatttaccattcccacatagacgcccctaaggacattgcctctgggctcatcggaccgctcattatctgcaaaaaagactcgctcgataaagagaaggaaaagcacatcgaccgggaatttgtggtgatgttttcagtggtggacgaaaacttcagctggtacctggaggacaacatcaagacttactgctcagaaccagaaaaagtcgacaaggacaacgaggacttccaggaatctaaccgcatgtactcagtcaatggatacacctttgggagtctgcctggcctgtcgatgtgcgcggaggatagggtgaagtggtacctgttcggaatggggaacgaggtggatgtgcacgcggccttcttccacggacaggctttgaccaataagaactaccgcatcgacaccatcaacctgttcccggccactctgtttgatgcctacatggtggcacagaatcctggtgaatggatgctcagctgtcagaacctgaatcatctcaaggccgggcttcaagcattcttccaggtgcaggaatgcaataagtcctcctctaaagacaatatcaggggcaagcacgtgcgccattactacatagccgctgaagaaatcatctggaactacgcgccttcaggaatcgacatctttaccaaggagaacctgacggccccggggtcggactccgccgtgttcttcgaacaggggactacccgcatcggaggaagctacaagaagctggtgtatcgcgaatacaccgacgcatcattcaccaaccgcaaagaacgggggccagaggaagagcatctgggcatcctgggtccggtgatctgggctgaagtgggcgacacgatccgcgtcacgttccacaataagggggcatacccactcagcattgagcctatcggcgtgcgcttcaataagaataacgaagggacgtattactcgccgaactacaatccacaaagccggtccgtgcccccttccgcgtcacacgtggcccctactgagacgtttacttacgaatggaccgtccccaaggaagtcggtccgaccaatgccgatccagtgtgcctggccaagatgtattactcggcggtggatccgaccaaggatatcttcactggactcattggaccgatgaagatttgtaagaagggctccctgcacgcaaacggacggcagaaggatgtcgataaggaattctatctgttcccgacggtgtttgacgagaatgaatcgcttctgctggaggacaatattcggatgtttactaccgcgccagaccaagtggacaaggaggatgaagatttccaggaatcgaacaagatgcactcaatgaatggttttatgtacggtaaccaaccgggcctgaccatgtgcaagggcgacagcgtggtttggtatctgttctcggcgggaaacgaggctgacgtgcacggaatttacttctccggaaacacttacctctggcggggagagcggagagatactgcaaacctgttcccccaaacttccttgactctgcatatgtggccggatactgaaggcactttcaacgtcgaatgcctgaccactgatcattacaccggcggaatgaagcagaaatacaccgtgaaccagtgtagacgacagtcggaggactccaccttttacctcggggaacggacctattacatcgctgctgtggaggtcgagtgggactactctccacagcgggagtgggaaaaggagcttcaccacctgcaagagcagaatgtctccaacgcatttctggacaagggagagttctacatcggatcaaagtataagaaggttgtgtatcgccagtacaccgactcaaccttccgcgtgccagtcgaacgcaaggcggaggaagaacatctgggaatcctgggcccacagctgcatgcggacgtgggcgataaagtgaaaatcatctttaagaatatggcaacgcggccgtacagcatccacgctcacggggtgcagaccgaatcaagcacggtgacccccaccctgcctggagaaaccctcacctacgtgtggaagataccggaacgctcgggggccgggaccgaggactcggcatgcatcccatgggcttactattcgacggtggaccaggtgaaagatctgtactccggccttatcggccctctcatcgtttgtcgtcgcccgtatcttaaagtgtttaacccgaggagaaaactggaatttgccctgctgttcctcgtattcgacgagaatgagtcttggtacttggacgacaacatcaaaacgtactcagatcaccccgaaaaggtgaacaaagatgatgaagagtttatcgaatccaacaagatgcatgctatcaatggccggatgttcggcaacctgcagggactgaccatgcacgtcggagacgaggtcaactggtacctcatgggaatgggtaacgaaatcgatctccataccgtgcacttccatggacactctttccagtacaagcacagaggagtgtactcctctgacgtttttgacatcttcccgggaacctaccaaactttggagatgtttccaagaactccgggaatctggctcctgcattgccatgtgactgatcacatccacgcgggcatggagactacttacaccgtcctgcaaaacgaggacactaagtccggc

SEQ ID NO: 8497 - DNA, 3195 bp, synthetic construct
  misc_feature 1..3195: note = source = /note="Description of Artificial Sequence: Synthetic coding sequence"
  source 1..3195: mol_type = other DNA
atgaaaatactcatcctgggaatctttctgttcttgtgttcaactcccgcatgggcaaaagagaaacattactacatcgggattattgaaaccacctgggactacgcatccgaccatggcgagaagaaactcattagcgtggacaccgaacacagcaatatctacctgcaaaacggtccagatcggatcggacgtttgtacaagaaagctctgtacctgcagtacactgacgaaacttttcgcactactatcgaaaagcctgtatggcttggtttcctcggtccaataatcaaagcagaaaccggagataaggtgtatgttcatctcaagaatcttgcgtcccggccttacacctttcattcacatggtattacctactacaaggaacatgaaggggccatttaccctgataacactaccgactttcagcgggcggacgataaggtctatcccggagaacaatacacttacatgctcctcgcaaccgaagagcaatctccgggagaaggtgacggtaactgtgtgacccggatttaccactcacacatcgacgcacctaaggatatagcctccggtctgataggacctctgatcatatgtaaaaaggactccctggacaaagagaaagagaagcacattgatagggagttcgtcgtgatgttttcggtggttgatgaaaacttcagctggtacctggaagataacatcaaaacttactgctcggagcccgaaaaggttgacaaggataacgaggattttcaggaaagtaaccgtatgtactcggtcaacggctacacctttggtagcctccctggtctgagcatgtgcgcagaagatcgggtcaagtggtacttgtttggaatgggcaacgaagtggacgtccatgccgcctttttccatggtcaagcactgactaacaagaactaccgcattgataccattaacctctttcctgcgactctgtttgatgcatacatggtggcacagaacccaggcgagtggatgctctcgtgccaaaatctgaatcacctgaaagcggggctccaggcatttttccaggtccaagaatgcaacaaatctagctccaaggataacatacgagggaaacacgtccggcattactatattgcagcggaagaaatcatctggaactacgctccctcaggtattgatatcttcaccaaggaaaacctgaccgcaccaggatcggattccgcagtgtttttcgagcagggcactactaggattggcgggtcttataagaaattggtgtacagagagtacactgatgcatcgtttaccaatcggaaggaaaggggaccggaggaagaacaccttggaatattggggcccgtcatctgggctgaggtgggagataccatccgagtcacctttcacaataagggagcatatccactctcaattgaacccattggggtgagatttaacaaaaacaacgagggtacctattactcacctaactacaatccccaatcccgatcggtaccccctagcgcatcgcacgtggcaccaaccgaaacttttacttatgagtggaccgttccaaaagaggtgggacctaccaatgccgacccagtgtgtctcgccaagatgtactactccgccgtggatcccaccaaggatatcttcacgggactgattggtcccatgaagatttgtaaaaagggctcccttcacgcaaatggtagacaaaaggatgtggataaggagttttacctgttcccaaccgtttttgacgagaacgagtccctcctgttggaggataacattcgcatgtttactaccgcacctgaccaggtcgacaaagaggatgaggacttccaagaatcgaataagatgcatagcatgaacggatttatgtatggtaaccaaccaggcctgaccatgtgtaaaggagactcggtggtgtggtacctgttctccgccggaaatgaagccgacgtccatggtatttacttctccggaaacacgtacctttggcgtggtgaacgacgagacactgctaacctgtttccacaaacttcacttacgcttcacatgtggcctgatactgaagggacgtttaacgtggaatgtctgaccaccgatcattacacgggaggcatgaagcaaaagtacacggtgaaccaatgtagacgccagagcgaggatagtaccttttacctgggcgaaaggacttattacattgccgccgtggaagtggaatgggattactcgccgcagagggaatgggagaaggaattgcatcacctgcaggagcagaacgtctcgaatgcattccttgacaagggcgaattctatatcgggagcaagtacaagaaagtcgtttacagacaatacaccgattccacttttcgggtgccagtggagagaaaggcagaagaagaacatttgggaattctgggacctcaacttcatgcagatgtgggagataaggttaagattatctttaagaacatggccactagaccctacagcatccatgcacacggcgtccaaacggaatcatcaactgtcacgccgaccctcccgggggagactctgacttatgtgtggaaaatcccagaacgatcaggagcaggaaccgaagatagtgcatgcattccatgggcctactacagcactgtcgatcaagtgaaggatctttactcgggacttattggacctttgatcgtctgtaggcgtccgtaccttaaagtgttcaatcccagacgtaagctcgagttcgcccttcttttcctcgtgtttgatgagaacgaatcttggtatcttgacgacaatatcaaaacgtactcggatcatcccgaaaaggtgaacaaagatgacgaagagtttattgaatccaataagatgcacgctatcaacggccgaatgttcgggaaccttcagggactgactatgcatgtgggcgatgaggtgaattggtaccttatgggtatgggtaatgaaattgacttgcacaccgtccatttccatggacactccttccagtataagcatagaggagtctactcctcggatgtgtttgacatttttcctggtacctaccagactctcgagatgtttccgcggacgccaggtatttggcttctccattgtcatgttacggatcatatccatgcaggcatggaaaccacctacaccgtgctgcaaaacgaggacaccaagagcgga

SEQ ID NO: 8498 - DNA, 3195 bp, synthetic construct
  misc_feature 1..3195: note = source = /note="Description of Artificial Sequence: Synthetic coding sequence"
  source 1..3195: mol_type = other DNA
atgaagatcctgatcctgggtatcttcttgttcttgtgcagcaccccggcctgggccaaggagaagcactactatatcggtatcattgagactacgtgggactacgcctcagatcatggggaaaagaagttgatttccgttgataccgaacactctaacatctacctgcagaacgggcccgatcggattggccggctgtacaagaaagctctctacctccaatacacggacgaaaccttccggaccaccatcgagaagcctgtgtggttgggatttctggggccaatcatcaaggctgaaaccggagacaaggtctatgttcacctcaaaaatctggcgtctcggccatacacttttcactcgcacgggattacctactacaaggagcacgaaggcgcaatctacccggataacactactgatttccaaagggcagatgataaagtgtacccgggggaacagtacacctatatgctgctggccactgaagagcagtcccccggtgagggagacggaaactgcgtcacccggatctaccactcacatatcgacgcacctaaggacatcgcgtccggcctcatcgggcctcttatcatttgcaaaaaggacagcctcgacaaagagaaagagaaacatatcgaccgggagtttgtcgtgatgttctccgtggttgacgaaaacttctcgtggtacctggaagataacattaagacctactgctccgagcctgagaaagtggacaaagacaacgaagatttccaagagagcaacaggatgtactcagttaatggatacacgttcggatcgctccctggactgtcgatgtgcgcagaggaccgggtgaagtggtacctcttcgggatgggaaacgaagtggatgtccatgccgcgttctttcatggacaggcgcttaccaataagaactaccggatcgacaccatcaatttgttcccagccactctcttcgacgcatacatggtggctcagaaccctggtgaatggatgcttagctgtcagaacctgaaccatcttaaggccggactccaggccttctttcaggtgcaggaatgcaacaagtcgagctcaaaggacaacatacgcgggaagcacgttcggcactactacatcgccgcagaagagatcatttggaattacgcaccgagcggcatcgacatctttaccaaggaaaatctcactgcgcccgggagcgacagcgccgtattctttgaacagggcaccacgcgcattggaggatcgtacaaaaagctggtgtaccgcgaatacaccgatgcctcgttcactaatagaaaggagcgtggcccggaagaagaacatcttggaatcctgggacctgtgatctgggctgaggtgggagacaccattagggtcactttccataacaaaggagcctacccgctctcaatcgaaccaatcggggtcagattcaataagaataatgaaggcacctactactctcccaattacaacccgcagtcccggtcggtcccgcccagtgcgagccacgtggcacccaccgaaaccttcacttacgaatggactgtgccaaaggaagtcggacccaccaacgcggatccggtgtgtctcgcaaaaatgtattactcagcggtcgacccaactaaggacatcttcaccggccttatcggtcctatgaaaatctgtaagaagggcagcctgcacgcgaatggacgccaaaaggacgtggataaggagttttacctgttccctaccgtgttcgatgagaacgagtccttgctcctggaggacaacatcagaatgttcacgactgctccggaccaggtggacaaggaggatgaggacttccaggagagcaataagatgcattcgatgaacggattcatgtacggaaaccagcctggcctcaccatgtgcaaaggggattcggtggtctggtacctgttctctgcgggcaacgaggccgacgtgcatggaatctacttctccgggaatacctacctgtggcgcggagaaagacgcgataccgcaaatctcttcccgcaaacttccctgactctgcatatgtggccggataccgagggtaccttcaacgtcgaatgcttgactactgatcactacaccggtggaatgaaacagaagtacactgtcaaccaatgccgccgacagtccgaggactccactttttacctgggagagagaacttattacatagccgccgtagaggtcgaatgggattactcaccgcaaagagagtgggaaaaggaactgcaccatttgcaggaacagaacgtgtctaatgccttcctggacaaaggggagttttacatcggatcgaagtataagaaagtggtgtaccggcaatatactgattcgaccttcagagtgccggtggaaagaaaagccgaagaagaacaccttgggattctgggaccgcaactccatgcggacgtgggagacaaagtcaagatcatcttcaagaacatggctactcgcccgtactcaatccatgctcatggtgtccaaactgaatcttcaactgtgaccccaaccctgccaggcgaaacccttacttacgtgtggaaaatcccggagcgatcaggagccggaactgaagatagcgcctgtataccgtgggcatactattcaactgtcgatcaagtgaaggacttgtactcggggctcattgggcctctgatcgtgtgcaggcgcccgtacctcaaagtctttaacccaaggcgcaaactggagttcgccctgctcttcctggtatttgatgaaaacgagtcctggtacctggatgacaacatcaagacctactcggaccaccccgagaaggtgaataaggacgacgaagagtttatcgaatcgaataagatgcacgctatcaacggccggatgttcggaaacctgcagggactcacgatgcacgtaggcgatgaggtgaattggtacctgatgggcatgggtaacgaaattgatctgcacactgtgcacttccacggacatagctttcagtacaaacaccgcggggtctactcctcagacgtgttcgacatcttcccaggtacgtatcaaactttggaaatgtttcctagaacgcctggcatctggctcttgcactgccacgttactgaccatatccacgctggcatggagacgacctacacggtgttgcagaatgaagatactaagtccggg

SEQ ID NO: 8499 - DNA, 3195 bp, synthetic construct
  misc_feature 1..3195: note = source = /note="Description of Artificial Sequence: Synthetic coding sequence"
  source 1..3195: mol_type = other DNA
atgaaaattctgattctcggaatctttctttttctctgcagcactcctgcatgggcaaaggaaaagcattactacatcgggattatcgaaacgacttgggactacgcatccgatcatggagaaaagaagctgatctcggtcgatacggagcactcgaacatttacctgcaaaatggaccggatcggatcggtcggctgtacaagaaagcactttatctgcagtacaccgatgagacttttagaactaccatagaaaagcctgtgtggctgggatttcttggacctatcattaaggctgagacgggcgacaaggtttatgtgcatcttaagaacctcgccagccgcccatacacctttcactcccacggaattacctactacaaggaacatgaaggggccatctacccggataataccactgactttcaaagggctgacgataaagtgtaccctggagagcagtacacttacatgctgctggccaccgaagaacaatcccctggagaaggcgacggtaactgtgtgaccagaatttaccattcgcacatcgatgccccaaaggacatcgcctcaggactcattggacctctgataatctgcaagaaagactccctggacaaagaaaaagaaaaacatattgatagggaatttgtcgtgatgttttcggtcgtggacgaaaacttctcctggtaccttgaagataacattaagacctattgttccgaacctgaaaaggtcgataaggataacgaagattttcaagaatctaataggatgtacagcgtcaacggatacacctttggctcgctgcccggattgtcaatgtgcgcagaagatcgcgtgaaatggtacctttttggaatgggaaatgaagtcgatgtccacgcagcgttttttcatgggcaggcactcaccaataagaactaccggatcgataccataaacctttttccggcaacgctgttcgacgcctatatggtggcgcaaaatcctggcgagtggatgctgtcatgccagaacttgaatcatctcaaggcaggcctgcaggcgttcttccaggtccaagagtgtaataagtcgtcatcaaaggataacattagaggtaagcatgtgagacactactacatagccgctgaagaaatcatctggaactatgcaccatcaggtatcgatatcttcactaaggaaaacctcaccgcaccagggagcgactctgcagtgtttttcgagcagggaaccaccaggatcggaggatcctacaagaagctggtctaccgggagtacaccgacgccagcttcactaatcgcaaggaacgcggtccagaagaggaacacctgggcatacttggacccgtgatttgggcagaagttggtgatacgatcagagtgacgttccataacaagggagcataccccctgtcgatcgagccaataggggtgcggtttaacaaaaacaacgagggaacttactactctccaaattacaaccctcaatcgagatctgtgcctccttccgcttcccacgtggcacctaccgaaacctttacgtacgaatggaccgtcccgaaggaggtcggaccaaccaatgccgacccagtgtgtttggcaaaaatgtactactccgcagtggatcccacgaaagacattttcactggactgatcgggccaatgaagatatgtaagaagggatccctgcatgcaaatggccggcaaaaggatgtggataaggagttttacttgttcccaactgtgtttgatgagaacgaatcgctgcttctggaggacaacattaggatgttcaccaccgcacctgatcaagtcgataaggaggatgaggactttcaagaaagtaataagatgcactcgatgaatggttttatgtatggtaaccaaccggggctcaccatgtgtaagggcgattccgtggtgtggtaccttttctcggcaggaaatgaggctgatgtccatggaatatacttctccggtaatacgtacctgtggaggggggaaagacgcgatacggccaacctctttcctcaaacttcccttacgcttcatatgtggccggatactgaaggaactttcaatgtggaatgcctgacgaccgatcattacactggcggaatgaagcaaaagtacacggtgaatcagtgtagacgacagagcgaggatagcactttttaccttggtgaaagaacttattacattgcagctgtggaggtcgaatgggattatagcccccaacgtgaatgggaaaaggaactgcaccacctccaagagcaaaatgtctccaacgcctttcttgacaaaggagaattctacattggatccaagtacaaaaaagtcgtgtaccggcaatacactgatagcacctttcgagtgcccgtggaacgaaaagctgaggaggaacatctgggaattcttggcccccagctccatgcggatgtgggtgacaaggtgaagatcattttcaaaaacatggccacccgcccatacagcattcacgcccatggtgtacaaactgagtcctcgaccgtgacccctacccttccgggtgagactctgacttacgtgtggaagatcccagagagatcgggagcagggaccgaagattcggcatgtattccttgggcctactactccactgtggaccaagtcaaggatctttactccggccttatcgggcctctcatcgtgtgtcgacgtccttatcttaaggtgttcaatccaaggagaaagttggaattcgcacttctctttttggtgtttgacgaaaacgaatcttggtatctcgatgacaacattaagacttacagtgatcacccagaaaaggtcaacaaagacgacgaagagtttatagagtcgaacaaaatgcatgcaattaacggcagaatgtttggtaaccttcaaggacttactatgcatgtgggcgatgaagtcaactggtacttgatgggaatgggtaacgagattgatcttcataccgtgcatttccacggacattcctttcagtacaaacatcgcggcgtgtactcaagcgacgtgtttgatatctttccaggtacgtaccaaactctggaaatgttcccaagaacccctggaatttggcttctgcattgtcacgtcaccgaccacattcatgccggaatggaaaccacttacacggtgcttcagaatgaagatacgaagagcggt

SEQ ID NO: 8500 - DNA, 3195 bp, synthetic construct
  misc_feature 1..3195: note = source = /note="Description of Artificial Sequence: Synthetic coding sequence"
  source 1..3195: mol_type = other DNA
atgaaaattctgattttaggaatttttctttttctgtgctcaacaccagcctgggcgaaggaaaaacattattacatcggcattatcgagacaacctgggactacgcctcagatcacggagagaagaaactgatatccgtcgatacagagcactctaacatctacctacagaacggtccggacaggatcggcaggttgtacaagaaggccctctacttgcaatataccgatgaaacgtttcggaccaccatagaaaaaccggtctggctgggtttcctgggaccaatcataaaggctgaaacaggcgataaggtttacgttcatctgaaaaacctagctagcagaccatataccttccatagccatgggattacatactataaagaacatgaaggcgccatctacccagacaacactaccgacttccagagagctgacgataaagtctaccccggtgagcagtatacttacatgctgttggccactgaggaacagagtcctggcgaaggcgacggcaactgtgttactaggatatatcattctcatattgacgcacccaaagacatcgctagtggactcattggaccactgattatctgcaaaaaagactccctcgataaagagaaagagaagcacatcgatcgggagttcgttgttatgttcagcgtcgtcgatgagaatttctcttggtacctggaagacaatataaagacctactgttcagagcctgaaaaggttgataaggataatgaagacttccaggaaagtaaccgtatgtattctgtcaatggatacacattcggttccctacccggtctctcgatgtgtgccgaagatcgggtcaagtggtacctctttggcatgggcaatgaagtggatgtccacgctgcattctttcacggccaggcattgacgaacaaaaattatcgaatcgataccatcaacttattccctgccacattgttcgatgcgtacatggtcgcccaaaatcctggagaatggatgctgagctgtcagaatctgaaccatctcaaagctggtctgcaagcgttttttcaggtgcaggaatgcaataaatcatcttccaaagataacatccgggggaaacacgtgcggcattactatattgccgcggaggaaatcatctggaattatgctcccagtggaatcgatattttcacgaaggagaacctgaccgcgccgggaagtgattctgccgtgttcttcgagcaagggaccactcgcatcgggggatcttacaaaaagctggtgtatagagagtatacagatgcctcttttacaaaccggaaggaaagggggcccgaggaggagcacctcggcattctgggccccgtaatttgggctgaggtcggggatacaatacgagtgacattccacaataaaggggcctatcctttgtccatcgaaccaatcggtgtgcgcttcaataagaacaacgaggggacttactactctcccaattacaatccccagtccaggagtgttcctccctctgcctcacatgtggcccccaccgagaccttcacttatgaatggaccgtccccaaagaagtgggcccaacgaacgcagatcctgtatgcttggccaaaatgtattattccgctgtcgatccgacaaaggacattttcactggactaatcggacccatgaagatctgcaaaaaggggtcgttgcatgcgaatggccggcagaaggacgtcgataaggagttctacttgttccccaccgtgttcgacgagaatgaatctctgcttcttgaagataacattcgcatgttcacaacggccccagaccaggtggataaggaggatgaagacttccaggagtccaacaagatgcacagtatgaacggatttatgtatggaaatcagcccggcttgactatgtgcaagggtgattccgtcgtatggtatcttttctccgctggaaacgaggcagacgttcacggcatatatttttctggcaatacctatctctggagaggcgagcgcagagatactgctaacctgtttccccagacgtcccttactctgcacatgtggccggatacagagggcaccttcaatgtggaatgccttactacggaccactatacaggcggtatgaaacaaaaatacacggtgaaccagtgtcggcggcagtctgaagattcaaccttttatctcggagaacggacctattacatcgcggcggtcgaggtggagtgggattactcaccacagagggagtgggaaaaagaactccaccacttgcaggaacaaaacgttagcaatgctttcctggataaaggtgaattctacatcggaagtaagtacaagaaggtggtttatcgacaatacacagacagcacattcagagtccccgtggagcgaaaagccgaggaagaacacctggggattcttggcccccagttacatgctgatgtaggtgacaaggtgaaaatcatcttcaaaaatatggctacccgcccatactctattcatgcccacggcgtgcagaccgaatcatccacagtgacccctacactgccgggggagaccctgacatatgtttggaaaatcccagagcgttctggcgcgggcaccgaagactctgcctgtattccttgggcctattactctaccgtggaccaagtgaaagacctttattcaggtctgataggtccacttatcgtatgcagacgaccttatctaaaagtgttcaaccccagacgaaaactggaatttgctttgctgttcctggtgtttgacgaaaatgagagctggtatctggatgacaatattaaaacatactccgaccaccccgagaaggttaacaaggatgatgaggaattcatcgaaagcaacaagatgcatgccattaatggccgcatgtttggcaacctgcagggtttgacgatgcatgttggggacgaggtgaactggtatttaatggggatggggaacgaaatcgacttacacacagtgcattttcatgggcactcattccaatataagcatagaggagtgtattcaagcgatgtttttgacatttttccgggcacatatcaaaccttagagatgttccctcggacacctggaatatggctgttacactgtcatgtcacagaccacatccacgctggaatggaaactacttataccgtgctgcagaatgaggataccaaatctggc

SEQ ID NO: 8501 - DNA, 3195 bp, synthetic construct
  misc_feature 1..3195: note = source = /note="Description of Artificial Sequence: Synthetic coding sequence"
  source 1..3195: mol_type = other DNA
atgaagatcctgatcctggggatttttcttttcctctgttcgacccctgcatgggcgaaggaaaaacattactatatcggcatcattgagactacctgggattacgcatcggatcacggagagaagaaattgatttccgtggataccgaacattccaatatctacctgcagaatggcccagatcgcattgggagattgtacaaaaaggccttgtaccttcaatatacggacgaaacctttcggacgaccatcgaaaagccagtgtggcttggatttcttggcccaataatcaaagcagaaaccggagataaggtgtacgtgcacctgaagaatcttgcatcgaggccctacactttccactcccacgggattacctactacaaagaacacgaaggagctatctaccctgataataccaccgatttccagcgggccgatgacaaagtctatccaggagaacagtacacctacatgctccttgccaccgaagagcaaagccccggggagggagatggaaattgcgtcactcgtatttaccattcgcatattgacgcacctaaggatatagcatcagggctgattggccctttgattatctgtaagaaggattcgcttgacaaggagaaggaaaagcatattgaccgggaatttgtcgtgatgttttcggtggtggatgaaaacttttcgtggtacctggaggataacattaagacctactgttcagaaccagaaaaggtcgataaggataatgaagatttccaggaaagcaatagaatgtattcggtcaatggttacacttttggctccttgcctggactttcaatgtgtgcagaagatagagtgaagtggtacctgttcggaatgggtaacgaggtggatgtgcatgccgccttttttcacggtcaagctcttacgaataagaattacagaattgatactattaaccttttccccgcaaccctgtttgatgcctatatggtggcccagaatccaggtgaatggatgctgtcgtgtcaaaacctgaatcatctgaaggcaggtctgcaagcgtttttccaagtgcaagagtgcaacaagtcctcatccaaagataacatccgaggtaagcatgtcagacactattacatagcagcagaagagataatctggaactacgctcctagcggcattgacatctttaccaaagagaatctcaccgcacctggatccgattcagcggtgttctttgaacaaggaaccactagaattggaggatcctacaagaaactggtgtacagagagtatactgatgcttcgtttaccaacagaaaggagagaggacctgaagaggaacatctcgggattttgggcccagtgatctgggcagaggtgggcgataccattagagtcacctttcataacaagggtgcttaccctctgtccatcgaacctataggggtcagatttaacaagaataatgaaggaacctactactcacctaattacaacccacaaagccgcagcgtgccaccctccgcgtcgcacgtggctccaaccgagacgtttacctacgaatggaccgtgccaaaggaggtcgggcccactaacgccgacccagtgtgtctcgccaagatgtactacagcgcagtcgacccgaccaaggacatattcaccggtctgattggacccatgaagatatgcaagaagggttcgctgcatgcgaacgggcgccagaaggatgtggataaggaattctacctgttcccaaccgtattcgatgagaatgagtccctccttctggaggacaacatccgtatgtttactaccgcgccagatcaggtcgacaaagaagatgaagattttcaagagtcgaacaagatgcattccatgaatggtttcatgtacgggaaccaacccggtctgaccatgtgtaagggtgattcagtcgtgtggtaccttttctctgcagggaacgaggccgatgtccatgggatttacttttcaggtaacacttatctgtggagaggggagcgcagagacactgctaatctgttccctcaaacttccctgactctgcatatgtggcctgacaccgagggcacttttaacgtggaatgcctgactactgaccattacaccgggggcatgaagcagaagtacactgtgaatcaatgtaggagacagagcgaagatagtacgttctacttgggagaacgaacctactacatcgcagcggtcgaagtcgagtgggattacagccctcaaagagaatgggaaaaggagcttcaccacctccaagaacagaacgtgtccaatgcgttccttgataagggagaattctacataggttccaaatacaaaaaggttgtgtacagacaatacacggatagcacctttcgagtgcctgtcgagcggaaggcggaggaagaacacctgggtattctcggtccccaactgcacgccgatgtcggcgataaagtgaagatcatctttaagaacatggcgaccaggccctacagcatccacgctcacggcgtgcaaaccgaatcctcgaccgtgaccccaactctgccaggagaaaccctgacctacgtgtggaagattcctgaaaggtcgggcgccggtactgaagattccgcatgtattccttgggcctactacagcaccgtcgaccaggtcaaggatttgtactcggggctcattggtcctctgatcgtttgtagacgtccttaccttaaagtgtttaaccctcggcgtaaacttgaatttgcccttctcttcctggtgttcgacgagaatgaatcctggtaccttgacgacaacataaagacgtactcggaccatccagaaaaggttaacaaagatgatgaagagttcatagaatcgaacaaaatgcatgcaattaacggacgcatgttcggtaaccttcagggcctgaccatgcatgtgggcgatgaagtgaactggtacttgatgggaatgggaaacgagatcgatctgcacaccgtgcattttcacgggcactcctttcaatacaaacatcgaggggtgtacagctcggacgtgtttgacatatttccgggtacctaccaaacgcttgagatgttcccacgcacgcccggcatttggctgcttcactgtcatgtcaccgatcatatccacgcaggaatggagactacctacactgtgctgcagaatgaggataccaagagcgga

SEQ ID NO: 8502 - DNA, 3195 bp, synthetic construct
  misc_feature 1..3195: note = source = /note="Description of Artificial Sequence: Synthetic coding sequence"
  source 1..3195: mol_type = other DNA
atgaagatcctgatcctggggatcttcctctttctttgtagcaccccagcatgggccaaggaaaagcattactacattggtatcatcgaaacaacgtgggactatgccagcgaccatggcgaaaagaagctgatttctgtggacacagagcattcaaatatctacctccagaacggccccgatagaatcggcagactttacaaaaaagccctgtatctgcagtatactgatgaaactttccgcacgactatagagaagcccgtgtggctcgggttcctgggtcccattattaaagccgaaacgggcgacaaggtgtacgtccacctcaagaatttggccagcagaccctatacgtttcactcacacggcattacatactacaaagagcatgaaggcgcaatttatccagataacacgacagactttcagcgggcggatgacaaggtttaccccggtgaacagtatacatatatgctgcttgcaactgaggaacagtcccccggggaaggggatggcaactgtgtgacaaggatctaccacagccacatcgatgcacccaaggatatagcctctggattgatagggcccctgatcatatgtaagaaggattctttggacaaagagaaagagaagcacatcgatcgagagttcgtcgtgatgttctcagtggtggacgaaaatttctcctggtatctggaggataatattaaaacatactgcagtgagcccgagaaggtggacaaagataatgaggatttccaggaatctaatcggatgtactccgttaacggatataccttcggctccctgcctggcctctcaatgtgcgccgaggacagggtcaaatggtatttgttcggaatggggaatgaggtagatgtgcatgccgcctttttccatgggcaggcactgacaaataaaaactaccgaatagacaccattaatctcttccctgccactttgttcgatgcatacatggtagcacagaaccccggagagtggatgctgtcttgccagaacctgaaccatttgaaggccggtcttcaggctttttttcaagtgcaagaatgtaataaaagtagtagcaaagataacatcagggggaagcacgtgcgccactattacatagccgccgaggagatcatatggaactacgctccatctggtatcgacatcttcacgaaagaaaacctgacagccccagggtctgatagcgccgtgttttttgaacagggcacaacacgcatcggaggcagctacaagaaactcgtgtatagagagtacacagatgctagcttcaccaatagaaaggaacgggggccagaggaggagcatctgggaattctgggtccagtgatctgggcggaggtgggcgacactatccgcgtgacgtttcataacaagggagcctatcctctgtctatcgagcccataggcgttcggttcaacaaaaacaacgagggcacttactactccccaaattacaatcctcaatcaagaagcgtgccgccatctgcctctcacgttgcacccactgaaactttcacttatgagtggaccgtacctaaagaggtaggccccacgaatgcagatcccgtgtgcctggcgaagatgtactattcagccgtggatcccactaaggatattttcactggactgatcggcccaatgaagatctgtaaaaaaggttcccttcatgcgaacggaagacagaaggatgtggacaaggagttctacctttttcctaccgtgttcgatgaaaacgagtctctgcttcttgaggataacattagaatgttcactaccgcccctgaccaggtggataaagaggatgaggatttccaggaatcaaataaaatgcattccatgaatggtttcatgtacgggaatcaaccaggattgaccatgtgcaaaggagactctgtcgtttggtacctctttagtgccggcaacgaagccgacgttcatggcatttactttagcggcaatacatatctctggcggggcgagagaagggacaccgctaacctctttcctcagacttccctgacacttcacatgtggccagatacagaggggacattcaatgtcgagtgcctgacgacagaccattacaccggggggatgaagcagaagtataccgtgaaccagtgccggcgacagtctgaggattctaccttctacctcggtgagaggacatactatatcgccgccgtggaagtggagtgggattatagcccgcagagggagtgggagaaggagctccaccacctgcaagaacaaaatgtcagtaatgccttcctggacaaaggcgagttctacattggtagtaaatataagaaggtggtgtatagacagtacaccgactccacattccgagtacctgttgaacgcaaagctgaggaagagcatctgggcattctgggcccacagctccacgctgatgtgggagacaaggtgaagatcatcttcaagaacatggctacaagaccctattcaatccatgcccacggggtgcaaaccgaaagctccaccgtgacgcccacactgcccggcgagaccctcacatatgtgtggaaaattcccgaacgatcaggtgccgggactgaggacagcgcttgtattccgtgggcttattactccaccgttgatcaagtcaaggacctgtacagcggtctcataggccctctcatcgtgtgtaggcgcccttatctcaaggtgtttaacccgagacgaaagctcgaatttgcactcctgtttttggtgttcgatgaaaacgagtcttggtacctcgacgataatatcaagacgtattccgaccacccggaaaaggtgaacaaggacgatgaggaattcatcgagtctaataagatgcacgcaataaatggcaggatgtttgggaatctgcagggattgacaatgcacgtgggcgatgaggtaaactggtaccttatgggaatgggaaatgagatagatctccacaccgtgcactttcacggccactccttccaatacaagcaccgaggcgtgtattctagcgatgtgttcgacattttccccggcacttatcagacattggagatgttccctaggactccgggaatttggctgctccattgccacgtaacagaccatatccacgcaggtatggaaacaacctatactgttttgcaaaacgaggatacaaaaagcggg

SEQ ID NO: 8503 - DNA, 3195 bp, synthetic construct
  misc_feature 1..3195: note = source = /note="Description of Artificial Sequence: Synthetic coding sequence"
  source 1..3195: mol_type = other DNA
atgaaaatcttaattctgggcatttttctgttcctctgcagcactccggcatgggccaaggaaaaacattattacatcggtatcatcgaaactacctgggactatgccagtgaccacggggagaaaaaactcattagtgtggacaccgagcatagtaacatctaccttcagaacggacccgacagaatcgggaggctctataagaaagccctctatttgcaatacactgacgaaaccttccgaacaactatcgagaagcctgtgtggttgggttttctgggacctattatcaaggctgagacaggagataaagtttacgtgcatcttaaaaatcttgcaagtcggccttatacatttcacagtcatggcattacttactacaaggagcatgaaggagcaatctacccagacaacaccaccgatttccagcgggctgacgacaaggtgtatccaggcgaacaatatacttatatgctgctggccactgaggagcagagccctggcgagggagacggtaactgcgtgactaggatttatcacagccatatagatgctcctaaggatatcgccagcgggttgattggccccttgataatctgcaaaaaggactcgctggacaaggagaaggagaagcacattgatcgtgaatttgttgtcatgttcagtgtagttgatgaaaacttttcatggtatttggaggacaacatcaagacctactgctctgaaccagagaaagtggataaggacaacgaggacttccaagagtctaatcgcatgtactctgtgaatggttacactttcggttccctgcccgggttatctatgtgtgcggaggaccgggtgaaatggtacctgtttgggatggggaatgaagtcgacgttcacgcggccttctttcacggtcaggcattaaccaacaaaaactatagaatcgataccataaaccttttccccgctacgctttttgacgcgtacatggtagcccagaatcccggcgaatggatgcttagctgtcagaaccttaatcatctgaaagccggactccaggcttttttccaagtgcaggagtgtaacaagagctcttcaaaagacaacatccggggaaaacacgtgcggcattactatatagccgcagaagaaatcatttggaattatgctccaagcggtatagacatttttaccaaggagaatctgacagccccagggtcagactctgctgtttttttcgagcaggggactaccaggattggcggctcttacaaaaagcttgtgtaccgcgagtataccgatgcaagcttcacaaaccgcaaagaacgagggcctgaggaggagcatctgggtattttgggtcccgtgatctgggccgaagtgggggacacaatcagagtaacctttcataacaagggagcctacccgctgagtatagagccaattggagttcggttcaataagaacaatgagggtacttactactcgcccaattataatccccagtcaaggagtgttcccccatccgcatcacatgttgcacccacggaaacttttacctacgaatggactgtgcctaaagaggtgggcccaaccaatgcagaccccgtctgtttggcaaagatgtattattcagccgtggaccctacgaaggatatctttacagggctgatcggacctatgaaaatatgcaaaaaggggtcccttcatgcaaatgggcggcagaaagacgtggacaaagaattctatctattcccaaccgtttttgatgaaaacgaatccttgctcctagaggacaacattcggatgttcaccacggcgcctgaccaagtggataaggaagacgaagacttccaggagtccaacaagatgcactcaatgaacggttttatgtacggcaatcaaccagggctgacaatgtgtaagggtgattccgtggtctggtacctcttctctgcggggaatgaggcagatgtccacggcatctatttcagcgggaacacttatttatggagaggggagcgcagagacacagccaatctgtttcctcagacttcactgacccttcacatgtggcccgatactgaaggcaccttcaatgtcgagtgtctcactaccgaccactataccggaggcatgaagcaaaaatatacagtaaaccaatgcaggcgacagagcgaagattctacgttctacctgggggagagaacctactatattgctgctgtcgaggtggagtgggattactcccctcagagagagtgggaaaaagagctgcaccatctccaagaacagaatgtaagcaatgccttcttggataaaggggaattctacatcgggtcaaaatataagaaagtggtataccggcagtacaccgattccacgtttcgcgtcccggtggagaggaaagcagaggaggagcacctgggcatcttgggcccccagctacacgctgatgtcggagacaaagtcaaaataatattcaaaaacatggctacgcggccgtattccattcacgcgcacggggttcagacagagtcaagcacggtgacacccacactgcctggagagaccctcacatacgtgtggaaaattcctgagcgaagtggggccggcactgaggatagcgcttgcattccttgggcttactattccacagtggatcaagtgaaggatctgtactccggattaataggcccattgattgtgtgtcgccgcccgtacctaaaggtgtttaatccgagacggaagctggagttcgcattgctgtttctggtattcgacgagaacgagtcctggtatctggacgataacatcaaaacctattccgaccatcctgagaaagtgaacaaggatgacgaagaattcatagaaagcaacaagatgcacgccataaatggacgtatgttcggaaatctgcagggcctgacaatgcacgtgggggacgaggttaattggtatttaatgggtatgggcaatgagatcgatttgcacactgtgcactttcatggccactccttccaatataagcaccggggcgtctatagctccgatgttttcgatatcttccctggcacatatcagacactcgaaatgtttcccaggacaccaggtatctggctgcttcactgccatgtcacagatcacatccacgctggcatggaaactacatatacagtgcttcagaatgaagacactaagtccgga

SEQ ID NO: 8504 - DNA, 3195 bp, synthetic construct
  misc_feature 1..3195: note = source = /note="Description of Artificial Sequence: Synthetic coding sequence"
  source 1..3195: mol_type = other DNA
atgaaaatcttaattttgggcatctttctatttctttgcagtacaccagcctgggctaaggagaagcattattacatcggtatcattgagactacttgggactacgccagcgatcatggggaaaagaagcttatctctgtagatacggagcactccaatatctacctgcagaacggtccggaccgcataggcagactctataagaaagccctgtacctgcagtacaccgatgagacattcaggacaacgatagaaaaaccagtatggttgggattcctgggtcccataataaaggctgaaaccggcgataaggtgtatgtgcatttgaagaatctagcttcacgcccctatacctttcactcccacggcatcacttactacaaagagcacgagggggctatctatcctgataacactacagacttccagagggcagatgataaggtctaccctggcgaacagtacacctacatgctactagcgactgaagagcagagcccaggcgaaggagacggaaattgtgtcacccgaatctaccattcccatatcgacgcccctaaggacatcgcctctggcctgatcggtcctctgatcatatgtaagaaagactctttggacaaggagaaggagaaacacatagatagggaattcgttgttatgtttagtgtcgtcgacgaaaatttctcctggtacctggaagataatataaaaacatactgttctgagcccgagaaggtggacaaagacaacgaggattttcaagagtcaaatagaatgtactcggtcaatggatacacattcggttccttgcctggactgagcatgtgtgccgaagaccgcgtgaaatggtatttgtttgggatggggaatgaggtagatgtgcacgccgccttctttcacgggcaggcactcactaataaaaattaccgtatcgacacaattaacttgttcccagccactctctttgatgcgtatatggtcgcccagaaccccggagaatggatgctttcttgtcagaatctgaaccaccttaaggcagggctgcaggccttctttcaggttcaggagtgtaataaatcatcaagcaaggataacattaggggtaagcacgtgcggcactactacatcgcagccgaagagattatctggaattatgcaccgagcggcatcgacatattcactaaggaaaatttgacagctcctggctccgacagcgctgtatttttcgagcaaggcacaacacggatcggcggttcatataagaagctggtgtatagggagtacacagacgcgtctttcacaaatcgcaaggagaggggacctgaggaagaacatctgggaatactgggacccgtgatatgggctgaggtcggggacaccattagagtaactttccacaacaagggggcctacccactgtcaatcgagcctatcggcgtccgctttaacaaaaacaatgagggcacatattacagccccaactacaatccccaatcacgcagcgtcccccctagcgcgagtcacgtggccccgacagaaacctttacttacgagtggacggtgcctaaagaggtcggacccaccaatgcagaccccgtctgtctggccaaaatgtattacagcgcagtggatccaacaaaagacatctttacaggtctcatagggcccatgaagatttgtaaaaagggatccctacatgccaatgggagacagaaagatgttgacaaggaattctatctgttcccaaccgtcttcgacgagaacgagagccttctgctcgaagacaatatcaggatgtttacaaccgccccagaccaggtggataaggaggatgaggatttccaggagtcaaacaaaatgcattcgatgaatgggttcatgtacgggaatcaacccggactgacaatgtgtaaaggggatagcgttgtatggtaccttttctctgcaggaaacgaggctgacgtccatggaatctacttctcagggaacacttatctgtggcggggcgagcgccgcgacaccgctaacctgttcccgcagacatccttgactttgcacatgtggccggacaccgagggtacatttaatgtcgagtgcctgactaccgaccactatacagggggaatgaaacaaaagtacacagtgaaccagtgtcgcaggcaatctgaagattccaccttctatcttggtgagcgcacatactatattgccgccgtagaagtggagtgggactattcccctcaacgtgaatgggagaaggagcttcaccatctgcaggaacagaatgtctcaaatgccttcctagacaaaggggaattctatatcggcagcaaatacaagaaggtggtgtaccgccagtacactgattctaccttccgcgttccagttgaacggaaagcagaagaggagcacctaggtatactaggaccccagctccacgccgacgtgggtgataaggtaaaaataatattcaaaaatatggcaacccggccatactcaattcacgcccacggagtccaaaccgaaagctctaccgtgacccccaccctccctggggagactctaacatacgtctggaagatcccggagaggagcggggcaggaacagaggactccgcatgtataccatgggcttattacagtaccgtagatcaagtaaaggacttatattcagggctcatcggccctctcattgtgtgtcgtcgcccatatctgaaggtgtttaacccaaggcgcaaattggagttcgctctgctatttctggtcttcgacgagaacgagtcctggtacttggacgacaacatcaagacctatagtgaccacccagaaaaggtgaataaggacgacgaagaattcatcgaatccaacaaaatgcacgcgattaatggtagaatgttcggtaatttgcaggggctaactatgcacgtaggggacgaagtcaactggtaccttatgggtatgggaaatgagatcgatttgcatacagtgcatttccacggtcattcctttcaatataaacaccgtggcgtctactcttctgacgtcttcgacattttccccgggacatatcagactctcgagatgttccccagaacccccggcatttggctgctccactgccacgttacagaccacatccatgccggaatggaaactacctacactgtccttcagaacgaagatactaagagtggc

SEQ ID NO: 8505 - DNA, 3195 bp, synthetic construct
  misc_feature 1..3195: note = source = /note="Description of Artificial Sequence: Synthetic coding sequence"
  source 1..3195: mol_type = other DNA
atgaaaattctcatactgggaatttttctattcctatgtagcacaccagcttgggccaaggaaaaacattattacatcgggattatcgaaactacttgggactacgccagcgaccacggggagaaaaaactgattagcgtagataccgagcactcaaacatttacctgcagaacggaccggaccggatcggccgcctgtataaaaaagctctctacctgcaatacacagacgaaacctttagaacaacaatcgaaaagcctgtgtggctcgggttcttaggcccaatcatcaaggcagagactggcgataaggtctatgtccatctgaaaaaccttgcgtccagaccatataccttccattcacatggaatcacttactataaggaacacgagggagctatctatccggataacaccaccgattttcagcgggcagacgacaaagtgtatcccggagaacagtacacatacatgctactggccaccgaggaacagagtcctggtgagggggacggcaactgtgtcactcgcatttaccattcccacattgacgctcctaaagacatcgcaagcggtctgatcggtccactcatcatctgcaagaaagatagtctggacaaggagaaggagaagcacatcgacagggagttcgtggtgatgtttagcgtggtggatgaaaatttctcttggtacctggaagacaacattaagacatactgtagtgagcccgagaaagtagataaagacaacgaggatttccaggagtctaatcgaatgtactccgtcaatgggtatactttcggctctctgccaggattgagcatgtgcgctgaggaccgcgtgaagtggtatctgttcggaatggggaatgaggttgatgtccacgctgccttctttcatggtcaggcgctgacgaataagaattaccggattgacactattaatctgtttccagcgacactcttcgatgcgtacatggtagcccagaatcccggcgagtggatgttatcttgtcaaaacttgaatcacttgaaggccggcttgcaggctttctttcaagtgcaagagtgtaacaagtcgagtagtaaggacaacatcaggggcaagcatgtgcgtcattattacatcgccgccgaggagattatatggaattacgcccctagcggcattgacatttttacaaaagaaaacctaacagctccaggcagcgattctgccgtgttttttgaacagggcaccacgcggataggggggagctacaaaaagctagtgtacagagagtacaccgatgcatctttcactaaccggaaagagcgtggccctgaggaagagcatcttggcatcctggggccagtgatttgggctgaagtgggggatacgatcagggtgacatttcataataagggcgcctacccactgtctatcgagcccattggagtccggtttaacaagaataatgagggaacttactacagtccaaattacaaccctcagtcaagaagtgtgccccctagcgcaagtcatgtggcacctacagaaacatttacctacgagtggactgtgccaaaggaggtcggcccgaccaacgccgatccagtgtgtctcgcgaaaatgtactacagtgctgtggatcctacaaaagacatcttcacggggctaattggccccatgaagatctgtaaaaaaggttccctgcacgctaacggccggcagaaagatgttgataaggagttctacctgttccctacggttttcgatgaaaacgagagcctgcttctcgaagacaatattcgtatgttcacaactgctcctgatcaggtggataaggaggacgaggattttcaggaatccaacaaaatgcactccatgaacgggtttatgtacggcaatcagccggggctgacaatgtgtaagggcgacagtgtcgtgtggtacctgttctctgctggtaatgaggctgatgtgcacggcatttacttttccggcaatacttacctgtggcgaggagagcggcgcgacacagctaacctgttccctcagaccagcttaacactacatatgtggcccgatacagagggcacttttaacgtggaatgtctgacgacggatcactacacgggcggcatgaagcagaagtatacagtgaaccaatgccgaaggcagagcgaagactcaactttttacctgggcgagcgtacgtattacatcgctgctgtagaggtggaatgggactactccccccagagagagtgggagaaggagctccatcatcttcaggagcagaacgtttcaaacgcttttctggataaaggagaattttatatagggtcaaagtacaaaaaagtcgtctaccggcagtacacagatagcacattccgggtgcccgtcgagcgaaaggctgaagaggagcacttagggatcctaggcccacagctgcacgccgatgttggagacaaggtcaaaatcatcttcaagaacatggctacccggccatacagtattcacgcacatggagtccagaccgagagtagcacagtgacccctaccctcccaggcgaaactttgacatacgtgtggaagatccccgaaaggtccggggcgggcaccgaggattcagcgtgtatcccctgggcctactactctactgtcgaccaggtcaaagacctctattctggacttattggccccttaatcgtttgtagacgcccctacctaaaggttttcaaccctcgcaggaagctcgagttcgccttgctattcttggtgttcgacgagaacgaatcttggtacctcgatgacaatatcaaaacttattctgatcaccccgagaaggtgaataaggacgacgaagaattcattgagtctaataaaatgcacgccatcaatgggcggatgttcgggaaccttcaaggcctgacaatgcatgtcggagatgaggtaaattggtaccttatgggaatgggtaatgaaatcgacctgcacacagtacatttccacgggcactcatttcagtacaagcatcggggggtgtactcaagcgacgttttcgacattttcccagggacataccaaactcttgaaatgttcccgcgcaccccagggatctggctgctgcattgccacgtgaccgatcacatccatgctggtatggaaacgacatatacagtgttacagaacgaggatactaagagcggg

SEQ ID NO: 8506 - DNA, 3195 bp, synthetic construct
  misc_feature 1..3195: note = source = /note="Description of Artificial Sequence: Synthetic coding sequence"
  source 1..3195: mol_type = other DNA
atgaaaatccttatcttgggaatcttcctcttcctctgcagcacccccgcatgggcaaaggagaagcactattacatcggaattatcgaaaccacctgggactacgcgtccgatcatggcgaaaagaagctcatttccgtcgatactgagcactcgaatatctacctgcagaacggcccggatcgcatcggacggctgtataagaaagctctgtacctccagtacactgatgaaacctttcggaccactattgaaaagccggtgtggctgggattcctgggaccgatcatcaaggcggaaaccggcgataaggtctacgtgcacctcaaaaacctggcgtcccgcccgtacactttccactcacacggtatcacctactataaggaacatgagggagcaatctacccggacaacaccactgatttccagcgggctgatgacaaggtgtaccctggtgagcagtacacttacatgttgctggcgactgaagaacagtcgccaggagaaggcgacggcaattgcgtgacccggatttaccactcgcatatcgatgctcctaaagacatcgcatccggcctgatcggccccctgattatctgcaaaaaggattcactggacaaggaaaaagagaaacatattgacagagaattcgtcgtgatgttttccgtagtggacgaaaacttttcgtggtacctggaggacaatatcaagacttattgctcagaacctgagaaggttgacaaagacaatgaagatttccaggagagcaaccgcatgtactctgttaatggttataccttcggcagcctcccaggtttgtcgatgtgcgccgaagatcgcgtgaagtggtacctcttcggcatgggcaacgaagtggatgtccacgccgccttctttcacggacaagcgctcacgaataagaattaccgcatcgacaccatcaatctcttcccagccactctgttcgatgcatacatggtggcccaaaatcctggagaatggatgttgtcctgccagaacctgaaccacttgaaggccggtctgcaagccttttttcaagtgcaagagtgcaacaaatcaagcagcaaggacaacatcagagggaaacatgtcagacactactacatcgccgcagaggagatcatctggaactacgccccgtcaggtatcgacatctttaccaaggagaaccttactgcgccgggatcggactccgctgtgttctttgagcagggaaccactaggatcggcggaagctacaagaagctggtctaccgggaatatactgacgcgagctttaccaatcggaaggaacggggaccggaggaggagcatctgggaattctgggaccggtcatttgggcagaagtgggcgacactattagagtgacctttcacaacaagggcgcctaccctctgtcgatcgagccgatcggcgtcaggttcaacaagaataacgaaggaacctactactccccgaactacaatccgcagagccggtccgtgcctccgtcagcctcgcatgtggccccgaccgaaacgtttacttacgaatggaccgtcccaaaggaggtcggaccaaccaacgccgacccggtgtgcctggcgaagatgtactactcagcggtggatcctaccaaggatatcttcactggattgattggcccaatgaagatctgcaagaaaggttccctccatgccaacggacgccagaaggacgtcgacaaggaattctacctctttccgactgtgttcgacgaaaacgaatccctgctgctggaggataacatccgcatgttcactaccgcgccagatcaggtggataaggaggacgaggacttccaggaaagcaacaagatgcactcaatgaatggcttcatgtacggaaatcaacctggcctgaccatgtgcaaaggcgactccgtggtgtggtacctgttcagcgctggcaatgaggccgatgtgcacggtatttacttctcaggtaacacctacttgtggcgcggcgagcgccgcgatactgccaatctgttcccacagacctcgctgactctccatatgtggccggataccgagggaactttcaatgtggaatgcctgactactgaccattacactgggggcatgaaacagaagtacacggtgaaccagtgtagacgccagtccgaagatagcacgttttacctgggagaacgaacctattacatcgctgccgtggaagtggagtgggactactcccctcaacgggagtgggaaaaggaactccatcacctgcaagagcagaacgtcagcaacgcattcctcgacaaaggcgagttttacattggatccaagtacaaaaaggtggtgtaccgccaatacaccgactccacttttcgcgttcctgtggagaggaaggcggaggaggaacacctgggaatcctgggaccacaattgcacgctgacgtcggagataaggtgaagataatcttcaagaacatggcgactcggccgtactcgatccacgcccacggcgtccagactgagagcagcaccgttactccgactctccctggagagactctcacttacgtgtggaagatcccggaacgcagcggagccggaaccgaagatagcgcgtgcatcccatgggcttactactcaaccgtggatcaggtcaaggacctgtactccggactcatcggaccgctgatcgtgtgccgcaggccttacttgaaagtgttcaacccaagacggaagctggaattcgcgttgctgttcctggtgtttgacgaaaacgagagctggtacctcgatgataacatcaaaacctacagcgaccatccagagaaagttaacaaggacgacgaggaattcatcgagtcaaacaagatgcatgccatcaacgggcgcatgttcggcaatctgcaaggactgaccatgcatgtgggagatgaagtcaattggtacctgatgggaatgggcaatgagatcgacctccacaccgtgcattttcacgggcacagctttcaatacaaacatcggggagtctactcatcggacgtgttcgacattttccctggaacctaccagactttggagatgttcccgagaacgcccggtatctggctccttcattgtcatgtcactgaccatatccatgctggcatggagactacttacactgtgctgcagaacgaggacaccaagtcaggg

SEQ ID NO: 8507 - DNA, 3195 bp, synthetic construct
  misc_feature 1..3195: note = source = /note="Description of Artificial Sequence: Synthetic coding sequence"
  source 1..3195: mol_type = other DNA
atgaagatattaatcctcggtatttttctcttcctgtgttctacccctgcatgggcaaaggagaagcattactatataggcatcatcgaaaccacttgggattatgccagcgaccacggggagaagaaactgataagtgtggatacagagcactctaatatctatctgcagaatggacccgatcggatagggcgcctgtacaaaaaagccctgtacctgcagtataccgatgagacctttcggaccacaattgaaaagccagtctggctgggattcctaggccccataatcaaggccgaaacaggcgataaggtttacgtgcaccttaagaacttggcctcacggccctacacattccacagtcatggcattacctactataaggagcatgaaggcgccatatacccggataacacgacagactttcagagagcagacgacaaagtctaccccggggagcagtacacgtacatgctcctggctacagaagagcagtctccaggagagggcgacggaaactgcgtgacccgcatctatcactcacatatcgacgctccaaaggatattgcttcaggactcataggccccttgattatatgtaagaaagattcccttgataaggaaaaggagaaacacatcgatcgtgaattcgtcgtcatgtttagtgttgtcgatgagaacttttcctggtatctagaagataatatcaagacatactgctctgagcctgagaaagtggataaggataatgaagatttccaggagagcaataggatgtatagcgttaacggatatacgtttgggagcctccccggcctgtctatgtgcgcagaagatagggtcaaatggtacctgttcggaatgggaaacgaggtggacgtccacgcagcattttttcatgggcaagccctgactaacaagaattatcggatagacaccatcaacctttttccggcaaccctcttcgacgcgtacatggtcgctcaaaaccctggggaatggatgctgtcatgccaaaacctcaaccacctaaaagcagggctgcaagctttttttcaggtccaagagtgtaacaagagttcgtctaaggacaacatcagaggcaagcatgtgcgccattactacatcgccgccgaagagattatttggaactacgccccttcagggatcgatatttttactaaagagaatctcactgctcccgggtccgatagtgcagtgttcttcgaacagggcaccactagaatcggcgggagctataagaagctggtgtaccgggagtacactgacgccagtttcacaaaccgcaaagaacgtggacctgaagaagaacatcttggcattctgggacctgtaatctgggccgaggtcggcgacacaatcagggtgacatttcacaataagggtgcctacccactttccatcgaaccaataggggtccgttttaataagaataacgagggaacatactattccccaaattacaatccgcagagtaggagcgtacccccaagcgccagccacgtggcgcccacggagacattcacttacgagtggactgtgccaaaggaggtcggaccaacgaatgctgacccggtatgtctagcgaagatgtactattcagccgtagaccctactaaggatatctttactggactgataggaccaatgaaaatctgtaagaaaggctccttgcatgccaatgggagacagaaagatgtggacaaagagttctacttgtttcctacagtgtttgatgaaaatgagtcccttctcctggaggacaatatccgaatgtttacgacggctccagatcaggtggataaagaggacgaagactttcaggagagcaacaaaatgcattctatgaatgggttcatgtatgggaaccaacccgggctcactatgtgcaagggcgactcagtcgtgtggtatcttttctctgctggcaacgaggcagatgtgcacggtatttacttctcaggtaatacttacctatggcgtggagaaaggcgggataccgccaacctgttcccacagacatccctgactctgcacatgtggccagacacagagggaacattcaatgtggagtgtcttactaccgaccattacacggggggaatgaagcagaagtacaccgtcaatcagtgtagaaggcaatccgaagactcaacattctacctcggggaacgcacatactatattgcagcggtggaggttgagtgggactattcaccacagcgggagtgggagaaggagctgcatcacctgcaggagcagaacgtgtcaaatgcctttttagacaagggagagttctatatagggtcaaagtacaagaaagtcgtctatagacagtataccgatagtacctttcgcgtgcccgtcgaacgaaaagcagaggaggagcacctcggaatcctgggcccacaattgcacgccgacgtcggagacaaggtgaagataatcttcaagaacatggccacaaggccatatagcatccatgcccacggagtgcagactgagtctagcaccgttacacctacactccccggagagaccctcacctacgtgtggaaaattccagagcggagtggtgcagggacggaagactccgcctgcatcccatgggcgtactacagcaccgtggaccaggttaaggacctgtatagtggcctcattggaccactgattgtgtgcaggaggccctacttgaaggtgtttaacccaaggaggaaactcgagtttgccctgttgtttttagtttttgatgaaaacgagtcatggtatctcgacgataatataaaaacatacagcgaccacccagagaaggtaaacaaggacgacgaagagttcatagagtctaacaaaatgcatgccattaatgggcgcatgttcgggaacttgcaaggactgaccatgcatgtcggagacgaggtgaactggtatctgatgggaatggggaacgagatagacctgcacaccgttcacttccatgggcactcctttcagtataagcaccgcggcgtttacagcagtgacgtgttcgacatctttcccggtacctatcagaccctggaaatgttccctcggactcctggtatctggttactacactgccatgtgactgatcacatccatgcaggcatggagactacatacacggtgttgcagaacgaagacaccaagagcgga

SEQ ID NO: 8508 - DNA, 3195 bp, synthetic construct
  misc_feature 1..3195: note = source = /note="Description of Artificial Sequence: Synthetic coding sequence"
  source 1..3195: mol_type = other DNA
atgaagatcctcattcttggcattttcttgtttttgtgtagtacgccggcatgggcgaaggaaaaacactactatattggcatcattgagactacatgggattacgcctctgatcatggcgaaaagaaacttatctctgttgacacggagcattctaatatctaccttcagaatgggcccgaccgtatcggaagactttataaaaaagctttatatttgcagtatactgatgagacatttaggacaacaatcgagaagccagtctggcttggctttttgggacccatcataaaagctgagaccggtgacaaggtctatgtgcacctaaaaaacttggcatcgcgaccctatacgttccactcccacggcatcacatactacaaggagcatgaaggagctatttatccagataacactacagattttcagcgggcagatgacaaggtataccccggcgaacaatacacgtacatgttgcttgcgaccgaagaacagtcccccggagaaggggatggcaattgtgtgacacgtatttatcacagtcatatagatgcccctaaagatatcgcaagcggtcttattggacccctcatcatttgcaagaaggattccctagacaaggagaaggagaaacatatcgatagagagttcgtcgttatgttttccgtggttgatgaaaatttctcttggtatctcgaagataatatcaaaacctactgcagtgaacccgaaaaagtggacaaggataacgaagatttccaagaatcaaaccgtatgtattccgtcaacggctatacttttggttctcttccaggcctatcaatgtgcgcggaagaccgtgttaaatggtacctttttggaatggggaatgaagttgacgttcacgccgcattcttccatggtcaagcgctgacaaacaagaattatcggatcgatacaattaacctattccctgctacactcttcgatgcttacatggtcgcacagaatccgggggagtggatgctctcctgtcagaatttaaaccacctgaaggcaggcctccaagcttttttccaagtacaggaatgtaataaaagcagctccaaggataacatccgtggtaagcacgttcggcattactacattgcggcagaagaaatcatttggaactacgcgccatctggcattgatatcttcactaaagagaatctaactgctccgggttccgatagtgcagttttcttcgagcaaggaaccacacgaattggaggctcttataaaaagctcgtgtatcgagagtatactgacgcttcgtttacgaatcggaaggagcgcggccctgaagaagagcatctaggtatactaggcccagtgatctgggccgaggtaggggacaccatccgcgtgacctttcataataaaggcgcttaccccttatcgattgagcctatcggtgtgcgcttcaacaagaacaacgagggaacgtactatagccctaactataatcctcaatcgcggtccgtccccccgtcggcatcgcatgttgcaccaaccgaaaccttcacgtacgaatggaccgtccccaaagaggtcggcccaacaaatgcagatccagtttgtttggccaagatgtactacagcgccgtggatccaaccaaggatatattcacgggactcataggacctatgaaaatatgtaagaaaggatcgctccacgcaaacggacgccaaaaagatgtggacaaggagttttatttgtttccaaccgtcttcgatgaaaacgagagcttgttgctggaggataacattcgtatgtttaccaccgcaccggaccaagtagataaggaggatgaagacttccaagagtccaacaagatgcatagcatgaacggtttcatgtatggaaatcaaccaggcttgactatgtgcaaaggtgactcggtggtctggtatctctttagtgccggtaatgaagctgatgtccatgggatatacttttctggcaacacatacttgtggcgcggagagagacgcgacaccgccaacctgttcccccagacatctctgacccttcatatgtggcccgacaccgaaggcaccttcaatgtggagtgccttaccactgaccactacacaggcgggatgaaacagaagtataccgtaaatcaatgtagaaggcaatcagaggattccacgttctatctcggagagcggacctattatatcgcggcagtcgaggtagaatgggattattcacctcaacgtgagtgggagaaggaattacaccatttacaggaacagaacgtttctaatgcattcctagataagggtgagttctatattggttcgaagtacaagaaggtggtctataggcagtacacagactccaccttccgggttcctgtggaacgtaaggctgaggaggagcatctcggtatcttgggcccacaacttcacgccgacgtcggagacaaggtgaagatcatcttcaaaaacatggccactcgtccgtacagcattcacgctcatggagtccagacggagagctccaccgtaactcctacactcccgggggaaacactgacgtacgtctggaagatcccggaaaggtcgggtgcagggactgaagattctgcttgcataccatgggcatattattccactgtggaccaagttaaggatttatacagcggtctcatagggccgttaatcgtgtgtcgtaggccatatcttaaggttttcaatcctcgtcggaaacttgagtttgcgctgttgttccttgtttttgacgagaatgagtcgtggtacttggatgataacattaagacgtacagcgatcaccccgaaaaggttaacaaggatgacgaggagtttattgagtccaataagatgcatgcgataaacggtaggatgttcgggaacctacagggtttgactatgcacgtgggcgatgaggtcaattggtatcttatgggcatggggaacgaaattgaccttcatacggtgcacttccacggacattcctttcaatacaagcataggggtgtgtattcaagcgatgtgttcgacatttttcccggaacatatcagaccctcgagatgtttccacgcacgccaggcatttggttgcttcattgccatgtcaccgaccatattcacgcaggaatggagaccacgtatactgtcttacaaaatgaggatactaagtctggc

SEQ ID NO: 8509 - DNA, 3195 bp, synthetic construct
  misc_feature 1..3195: note = source = /note="Description of Artificial Sequence: Synthetic coding sequence"
  source 1..3195: mol_type = other DNA
atgaaaatcctgatcctgggaatctttctgttcctatgttccactccagcttgggccaaagagaaacactattacattggtattatcgagacgacatgggactatgcatctgatcacggagaaaaaaaactcataagcgtggatacagaacacagtaacatctaccttcaaaacggtcctgaccggattggccgcctctataagaaagccctctacctccagtacaccgacgaaacattcagaaccactatagagaaacctgtttggcttggtttcctgggaccaattattaaggcggagaccggggataaggtgtacgttcacttgaaaaatttggcctcccgtccatatacatttcactcccacggtataacatattacaaagagcatgaaggcgctatctatccagacaacacaaccgattttcagcgcgccgacgataaagtatatcctggagaacagtacacttatatgttgctcgccacagaagaacagagtccaggcgagggagatggaaactgtgtcaccagaatttaccattctcatatcgatgctcccaaagatatcgcaagcggactgatcggaccattaatcatttgcaaaaaagatagcctggacaaagagaaggagaagcatatcgatagggaattcgtagttatgttttctgttgtcgatgaaaacttttcctggtacctggaagataacattaaaacgtattgcagtgaaccagagaaggtagacaaagacaacgaggatttccaggaaagcaaccggatgtactctgtaaacggatacacttttggatccctgccggggctgtctatgtgtgcggaggaccgagtcaaatggtacctcttcggcatgggaaatgaggtggacgtgcacgcagcttttttccacggccaggcgcttaccaataagaactacagaatcgatacaatcaacttgttccccgccaccctctttgatgcttacatggtcgctcagaaccccggcgagtggatgctctcatgtcaaaatctgaaccatttaaaggctgggcttcaggcattcttccaagttcaagaatgcaataagtcatcttctaaggataacataagaggaaagcatgtgcgccattactacatcgctgctgaggaaatcatctggaattacgcaccgagcggtattgatatctttaccaaagagaacctgaccgcccccggatcagacagcgccgtcttctttgagcaaggcacaacccgcatcggcggcagctataagaaactggtctaccgcgaatatacagacgcgtctttcaccaaccggaaagagcgcggacccgaggaggaacatctaggtatacttggccccgtgatctgggccgaggtgggagataccatccgtgtgacctttcataacaagggtgcttaccccctcagcatcgaacctattggtgtgcgcttcaacaaaaataacgaaggtacatactattctcctaattataatccacagtcccgctctgttcctccctccgcctctcacgttgctcctactgagacattcacctatgaatggaccgtacctaaggaagtgggacctacaaacgcagacccagtgtgcctggctaaaatgtactactcagcagtagaccctacaaaagatatttttaccggcctcatcggcccgatgaagatatgcaagaagggaagcctccatgctaacggccggcagaaggatgtcgacaaagagttctatctgtttccaaccgtctttgatgagaacgagtctctgctcctggaggataacatacggatgttcacgaccgctcctgatcaggtcgataaggaggacgaggactttcaggaaagtaataaaatgcacagcatgaacggctttatgtacggcaaccagcccggactgactatgtgtaaaggagactcagtcgtatggtacctgtttagcgcaggcaatgaagcagatgtgcacggaatctactttagcggcaatacttatctttggaggggcgaacggagggacacggctaatctttttccccagacttcactcactctgcacatgtggccagatactgaaggaactttcaacgtggaatgccttaccactgatcattatacaggcggaatgaaacagaagtacaccgtgaaccaatgcagaaggcagagcgaagatagcaccttttatctgggggagagaacctactacattgccgccgtggaagtcgagtgggactattcacctcagcgcgagtgggaaaaggaactgcatcatctacaggaacagaatgtgagcaatgcattcttggataaaggcgaattctacatcggatcaaaatacaagaaagttgtctatcggcaatacacagatagtaccttccgagtgccagtggagagaaaggcggaggaagaacacttggggatcttagggccccaactgcacgcagacgttggcgacaaggtcaaaatcatttttaagaacatggccactaggccttactcgattcacgcacatggcgttcagactgagagctctacagttacacctacccttccaggcgaaaccctcacctatgtgtggaagatccccgaaagaagtggtgcaggaactgaggatagcgcttgcatcccatgggcatattactctaccgtcgaccaagttaaagacctgtatagcgggttgatcggacctcttattgtctgtagaaggccatatctgaaagtcttcaatccaaggcgaaaactggaatttgcccttctcttcctggtgttcgatgaaaacgagagctggtacctcgacgacaacatcaaaacctatagcgaccatcccgaaaaagtgaacaaagacgacgaggagtttatcgagtctaacaagatgcatgcgattaacggaaggatgtttggaaacctccaagggctgaccatgcacgtgggcgacgaggtgaattggtacctgatgggaatgggtaatgagatcgacctgcacactgtgcattttcacggccacagcttccagtacaaacacaggggagtgtactcctctgatgttttcgacatctttcctggtacttaccagaccttagaaatgttccctcgcacccccgggatttggctcctgcactgtcatgtgaccgatcacatccatgcaggcatggagaccacctataccgtcctgcaaaacgaggataccaagtctggt

SEQ ID NO: 8510 - DNA, 3195 bp, synthetic construct
  misc_feature 1..3195: note = source = /note="Description of Artificial Sequence: Synthetic coding sequence"
  source 1..3195: mol_type = other DNA
atgaaaatactgatcctcggaattttcctgttcctatgctccacccccgcctgggcaaaggaaaaacattattacatcgggatcatcgagactacatgggattacgcctcagaccacggggaaaaaaagctgatttccgtcgacactgagcactcaaacatatatctgcaaaacggaccagatagaataggccgcctgtacaaaaaggccttatatttacaatatacggacgaaacattcaggaccacaatcgagaagccggtgtggctaggattcctgggtcccatcattaaagcggaaaccggggacaaagtgtatgtgcaccttaagaatctggcctcacggccctacactttccattcccacggcattacctactataaggagcacgagggggccatttaccccgacaataccactgacttccagcgcgccgacgataaggtttatcccggagagcaatatacatatatgcttttggctacagaggaacagtcccctggcgagggcgacggtaactgcgtgacgcgcatttaccactcccacattgacgcacctaaagacatcgcgtcagggctgatcggccctctcattatttgcaagaaggacagcttagacaaggaaaaagagaaacatatcgacagggagtttgtagtgatgtttagtgtggttgacgagaatttttcttggtacctcgaggataatatcaaaacatactgctctgaaccagagaaagtggataaagataatgaagacttccaggaaagtaaccgcatgtacagtgtgaacggttacacgttcggttctctgcctggactgagcatgtgcgccgaggaccgggtcaagtggtatttattcggcatgggcaacgaagtggacgtgcacgccgctttcttccatggacaggcactgacaaataaaaactatcgtatcgacacaatcaatctcttcccagctacactgttcgatgcatatatggtagctcaaaatcccggcgagtggatgctatcatgccaaaatctgaaccacttgaaagccggactgcaagcgttttttcaagttcaagaatgcaataagtcaagctcgaaagataatattcggggaaagcacgtccgccactactacatcgccgctgaggaaataatatggaattacgcccctagcgggattgatatttttactaaagagaacctgaccgctcctggctctgatagtgctgtgttcttcgagcagggaactacacgcatcgggggaagttacaagaaactggtttacagggaatatacggacgccagcttcactaaccgaaaagagaggggcccagaggaggagcatctcggtatcctagggcccgtgatatgggccgaggtcggagacacgatacgcgtgaccttccacaacaagggggcgtatcctcttagcatcgaacccattggggttcggtttaataagaacaatgaaggcacttactactcaccgaactataatcctcagagtcggtccgtgcctccatcggccagtcatgtcgcccctactgaaacattcacttacgaatggacagtgcccaaggaggttggacctaccaatgcggatcctgtgtgcttggcaaagatgtactactccgcagtagatcctacgaaggacattttcaccggcctcattggccctatgaagatctgcaaaaaaggcagtcttcacgctaatggtcgacagaaggatgtagacaaggagttttaccttttccccacggtgtttgacgaaaacgagtcccttctgttggaggataacatcaggatgttcacgaccgcacctgatcaagtcgacaaagaggatgaagattttcaagaaagtaataaaatgcactccatgaacggtttcatgtatggcaaccaacctggcctgaccatgtgtaaaggcgatagtgtggtgtggtatctgttttccgctggcaacgaggctgacgtgcacggcatctatttcagtggaaatacatatttgtggaggggcgagcgccgcgacacagcgaacttgttcccccagacgtctctgaccttacacatgtggcctgataccgagggcacttttaatgtggagtgtctcacaaccgatcattacaccggcggtatgaaacagaaatacaccgttaatcagtgcagacgtcagtctgaagacagcaccttttacctcggcgagaggacgtactatattgccgctgtggaggtcgagtgggattattcaccccaaagagaatgggaaaaagaactgcaccacctgcaagaacagaacgtgagtaacgcgtttctggacaaaggtgagttctacatcggctctaagtacaaaaaagtggtatatcgccaatacaccgactcgacttttagggtccccgttgaaaggaaggctgaagaggagcatctaggcatccttggaccacaactacacgcggacgtcggggacaaagtgaagataatatttaaaaacatggccactaggccgtattcaatccatgcccacggggtccagaccgagagctccacagtgacccccaccttgccaggagagacactcacgtacgtatggaagattcccgagcggtccggggccggtacggaggactctgcttgcatcccttgggcatattattccaccgttgaccaggtgaaggatttatacagcggactgatcggcccactaatcgtctgcaggcgcccctatctgaaggttttcaaccctcggaggaagctggagtttgcactgttgtttctggtgtttgatgaaaacgaatcctggtatctcgatgataacatcaagacttattctgaccatccagagaaggtgaacaaagatgatgaggaattcatagaatctaataagatgcatgccatcaacggtcgcatgtttggcaatcttcagggcttgactatgcatgttggcgatgaggtcaattggtacctcatggggatgggcaatgagatagacctccataccgttcacttccacggacacagcttccaatataagcataggggcgtgtactcatcggacgtgttcgatatctttcctggcacataccaaacgcttgaaatgttccctcgtactccaggcatttggctgctgcattgtcacgttacggaccacatacatgctggcatggagaccacttacacagttttgcagaatgaagataccaagtccgga

SEQ ID NO: 8511 - DNA, 3195 bp, synthetic construct
  misc_feature 1..3195: note = source = /note="Description of Artificial Sequence: Synthetic coding sequence"
  source 1..3195: mol_type = other DNA
atgaagatccttattctggggattttcttgttcctttgcagcacccccgcgtgggccaaagagaagcattactacattgggattattgagacgacttgggattacgcatctgatcatggggagaagaaactcatatccgtggacaccgagcactcgaacatctatctccaaaatgggcctgaccggattggtagattgtacaagaaggccttgtacctgcagtatactgatgagactttcaggactactatcgagaagcctgtgtggcttggttttctgggccccataatcaaagccgaaaccggcgacaaggtttacgtgcatctgaagaatcttgccagccgcccttacactttccattcgcatggtattacctactacaaggagcatgagggagcaatttacccagataataccaccgattttcaacgagccgatgataaagtgtaccccggagagcaatacacttacatgcttctggcaaccgaggaacagtcccctggtgaaggagatggcaattgcgtgactagaatttaccactcgcatatcgatgcaccaaaggacattgcatccggtctgatcggccccctgatcatctgcaagaaagattccctggataaggaaaaggagaaacatattgatagggagttcgtggtgatgttttcggtggtggatgagaatttctcctggtacctcgaagataacattaagacctactgttcagagccagaaaaggtggataaagacaacgaagatttccaagagtccaacagaatgtattcggtgaacggatatacttttggatcacttcccggactctcgatgtgcgcagaagatagggtcaagtggtacctttttggaatgggtaacgaagtggacgtccatgctgcattctttcatggccaggcactgaccaacaagaactacagaatcgatactattaacctgttcccagccaccctgttcgatgcgtacatggtggcacaaaaccctggtgagtggatgctgtcatgtcaaaacctgaaccatttgaaggcaggattgcaggcatttttccaagtgcaagaatgtaataagtccagcagcaaggataacattcggggtaagcacgtcagacactactacattgccgcagaggaaatcatatggaactacgcaccatcaggaatcgacattttcaccaaggaaaacctgacggcaccggggagcgattcagccgtattctttgaacagggtaccacccgtatcggagggtcatacaagaagttggtgtatcgagaatacactgatgcgtcatttactaaccgaaaggaaagaggtcccgaggaagagcatctgggaatcctgggccctgtgatttgggcagaggtcggagacaccatccgtgtgactttccacaacaagggtgcataccccctttcaatcgaacctatcggggtgagatttaacaagaacaacgagggtacctactactcgcccaactataatcctcagagcaggtccgtgcctccttctgcaagccacgtcgcacctaccgaaaccttcacttacgaatggactgtgcccaaggaggtgggccctactaatgcagacccggtgtgtctcgctaagatgtattacagcgcagtcgaccccaccaaggacatctttaccggtttgatcgggcctatgaagatttgtaaaaagggctcgcttcatgccaacggacgtcaaaaggacgtcgataaagagttttaccttttcccaaccgtgttcgacgaaaacgaatcacttctcctcgaggacaacatacggatgtttaccaccgcgccagaccaagtggacaaggaggatgaggactttcaagaaagtaacaagatgcattcgatgaacggttttatgtacggtaatcaaccaggtctgaccatgtgtaaaggggactcggtcgtctggtacctgttctccgcaggtaacgaagcagatgtgcacggaatatacttttcgggtaatacttacctctggcgaggagaacgtcgcgacactgcaaacctttttccacaaacgtcgctgaccctgcatatgtggccagatactgaaggaacttttaacgtggagtgtttgacgacggatcactacaccggcggtatgaagcagaagtacaccgttaatcagtgtcgtagacagtcagaagattccacgttttacctgggggaaaggacttactatatagcagcagtggaagtcgagtgggattactccccacagcgggagtgggagaaggaactccatcatctccaagaacaaaacgtctcgaacgcattcctggacaagggggaattctacatagggtcaaagtacaagaaagtggtgtacaggcagtacacggattcgacttttcgcgtgcctgtggaaagaaaagccgaagaagaacacttgggtattctgggacctcagctccatgctgatgtgggagacaaggtcaagatcattttcaagaacatggcaacccggccctactcgatccatgcccatggcgtgcagactgagtcatcaactgtgactccaactctccctggtgaaactctgacctacgtctggaagattccagaacggtccggagccggaaccgaagattcagcttgtattccttgggcgtactactccacggtcgaccaggtgaaggatctttactcaggtctgatcggaccactgatcgtctgtaggcgtccctacctcaaggtgtttaatcctaggagaaaactggaatttgcactgctctttctggtgtttgacgagaatgagtcgtggtaccttgatgataacatcaaaacctactcggatcatcctgaaaaggtcaacaaagacgatgaggagtttattgagtccaataagatgcatgctattaacggacgaatgtttggtaatcttcagggtctgacgatgcatgtgggggacgaagtgaactggtacctgatgggaatgggaaacgaaattgatcttcatactgtccacttccatggccattcctttcagtacaaacaccggggcgtctattcaagtgatgtgtttgatatcttccctgggacttaccagacgctggaaatgtttcctagaacccctgggatctggctgctgcattgccacgtgaccgatcatattcacgccggtatggaaaccacctacaccgtcctccaaaacgaggatactaaatcgggt

SEQ ID NO: 8512 - DNA, 3195 bp, synthetic construct
  misc_feature 1..3195: note = source = /note="Description of Artificial Sequence: Synthetic coding sequence"
  source 1..3195: mol_type = other DNA
atgaagatcttaatactgggcattttcctttttttatgttccactcccgcttgggctaaagagaagcattactacatcggaataatagaaactacttgggactacgctagcgaccacggcgaaaaaaagctgatatctgtcgataccgagcacagcaacatatatctacaaaacggtcccgaccgcattggtaggttgtacaaaaaggccctgtatctccagtacactgatgagactttcaggaccaccatagagaagcctgtgtggttgggctttttaggcccaatcatcaaggcagaaacaggtgacaaggtatacgtgcacctgaaaaatctggcctcccggccatatacatttcacagccatggcatcacttactacaaagaacacgagggggccatctaccctgataacactactgacttccagcgtgctgacgacaaggtatacccaggcgaacagtacacatatatgctcctggctactgaggagcagtcacctggcgagggagacggtaactgtgtgacaaggatttatcatagccacattgacgccccgaaggatattgcgtcgggcttgatcggacccctgatcatctgcaaaaaagacagtcttgacaaggagaaagagaaacacattgacagagagtttgtagtgatgttctctgtggtggacgaaaactttagctggtacctcgaagataatattaagacatactgttctgagcccgagaaggttgataaagataatgaagatttccaggagtcgaatcggatgtactctgtaaatggatatacatttggctctctcccagggctttctatgtgcgccgaggacagggtgaagtggtatctgtttggtatgggcaatgaagtcgacgttcacgccgcctttttccacggacaggcgttgaccaacaagaactatagaatagacacgatcaatttatttcctgcaacactgtttgacgcctacatggtggcccagaaccctggagagtggatgctgtcctgtcagaatttgaaccatctgaaggcgggtttgcaggccttttttcaagtgcaggaatgcaataaatcctccagtaaggacaatataagaggcaaacacgtgcgacattactacatcgccgcagaggaaatcatttggaattatgcgccgtcaggaatagacatttttaccaaagagaacctgactgctccgggcagtgattcagcagtgttcttcgagcaagggactacacggatcgggggttcctataaaaaactggtttaccgcgagtacacggatgccagctttacgaatcgtaaagaaagggggcccgaggaagagcatctcggcatcctggggcccgtgatttgggccgaggtgggagatactatcagagtaaccttccataataagggagcctatcccttgtctatagaaccaatcggagtcaggttcaacaagaataatgagggcacctactatagccctaactacaatcctcagagccgatccgtgccaccttctgcttcgcatgtggctcctacggagactttcacgtacgaatggaccgtccccaaggaagtcgggccaacaaacgccgaccctgtctgtctagcgaagatgtattatagcgctgtcgacccgaccaaggacatattcacaggcttaatcggcccgatgaaaatttgtaagaaggggtccctgcacgcaaacggaagacagaaggacgtggacaaggagttttacctgtttcctacggtctttgacgagaacgagtcacttctgctggaggacaacattcgcatgtttacaactgcccctgaccaggtggataaagaggatgaagacttccaagaaagtaacaaaatgcactccatgaacgggtttatgtatggcaaccaaccaggactgaccatgtgtaagggtgactccgttgtctggtacctgttctccgctggaaacgaagcggatgtgcacgggatctattttagcggtaatacgtatctttggcggggagagagaagagacactgccaacctgtttccacagacctcccttacactgcatatgtggccagacactgagggtacatttaatgtggagtgccttacaaccgatcactacacgggcggaatgaagcaaaaatacactgtcaatcagtgtcgaagacagtcagaggattccacgttttaccttggcgaacgcacttattacattgcagcagtggaagtggaatgggactactctcctcaacgggaatgggaaaaggaacttcaccacctccaggaacaaaatgtcagcaacgcattcctggataaaggcgaattctacattggatccaagtataagaaagtggtgtaccggcaatacaccgactccacattcagggtgcccgtcgagcggaaagctgaagaagagcatcttggaattcttgggccccaactgcacgcggacgttggagacaaggtgaagatcatttttaagaatatggccacccgtccgtactcaatccacgcccatggagtgcagacagaatctagcactgtaacacccacactgcccggcgagacattaacgtacgtgtggaagatcccagaacgttctggcgctggaaccgaggactctgcttgcatcccctgggcatattactcgactgtggatcaggtgaaagatctgtactcaggtctgatcgggcccctgattgtgtgtagacgcccgtacctgaaagttttcaaccctaggcgcaagctggagttcgcgctcctgtttctggtgttcgacgagaatgagtcttggtatcttgacgacaacatcaaaacatattctgatcatccagagaaggtaaacaaggatgacgaagagttcatcgagagcaacaaaatgcatgcaattaatggacggatgttcggcaacctgcaagggctaactatgcatgtgggagacgaagtgaattggtatctgatgggaatggggaatgagattgacttgcacactgttcacttccatggccattcatttcagtacaaacaccgcggcgtgtacagcagcgatgtgttcgacatatttcccggaacctaccaaactttggaaatgttcccccgcactcccggaatatggctcctgcactgccatgttacagatcacatccacgctggaatggaaaccacatatacagtattacagaatgaagataccaagtccgga

SEQ ID NO: 8513 - DNA, 3195 bp, synthetic construct
  misc_feature 1..3195: note = source = /note="Description of Artificial Sequence: Synthetic coding sequence"
  source 1..3195: mol_type = other DNA
atgaagatcctcatcctcgggatcttcctcttcctgtgctcgactcctgcatgggccaaggagaaacactactacatcggaatcatcgagactacctgggattatgcgtccgaccacggagaaaagaagttgatcagcgtggatactgaacactcgaacatctacttgcagaacgggccggaccggattggacgcctgtacaaaaaggctctctacctgcaatacaccgatgaaaccttccggacgaccatcgaaaagccggtgtggcttggctttctcggaccaatcatcaaggccgaaactggcgacaaagtgtacgtgcatctcaagaacctggcatccagaccatataccttccacagccatggaattacgtactacaaggagcacgaaggcgcaatttacccagataacactactgacttccagcgcgcagacgataaggtctacccaggagagcaatacacctatatgctgctcgccactgaagagcaatcaccaggggaaggggatgggaactgcgtcacccggatctaccattcccatattgatgctcctaaggatatcgcatcgggcttgatcggaccgctgataatctgtaagaaagacagcttggacaaggagaaggaaaagcacatcgacagagagttcgtcgtgatgttcagcgtcgtcgacgaaaacttctcctggtatctcgaagataacattaagacttactgctcagagcccgagaaggtcgacaaggacaacgaagattttcaggagtccaaccgcatgtactcggtcaatggttacactttcgggtcgctcccgggactgtcaatgtgcgccgaggaccgcgttaagtggtatcttttcggaatgggtaatgaagtggatgtgcacgctgccttcttccacgggcaggcacttaccaataagaattacagaatcgacaccatcaatctgttcccagctaccctcttcgacgcatacatggtggcccagaatcctggcgaatggatgctgtcatgccaaaatctgaaccatctgaaggcaggactgcaggcctttttccaggtccaggaatgtaataagtcctcgtccaaagacaacatccggggaaagcacgtgagacattactacatcgcggcagaggagattatctggaactacgccccttccggaatcgacatattcactaaggagaacctcaccgcccctggatcagacagcgctgtgttcttcgaacagggaaccactcggatcgggggatcgtacaagaagctggtttaccgcgagtacacggacgcctccttcaccaacaggaaagaacggggcccggaggaagaacacttgggtattctcggtcctgtgatctgggccgaagtgggcgacacgattcgcgtgaccttccataacaagggagcatacccgctgtccatcgaacctatcggagtgcggttcaataagaacaatgaaggaacttactactccccgaattacaacccacagtcgcgctccgtcccaccgtcagcatcgcatgtggcccctaccgagacttttacctacgagtggaccgtcccgaaggaagtgggaccaacgaacgcggaccctgtgtgtctggctaaaatgtattacagcgccgtggatcctactaaggacatctttaccggactgatcggaccgatgaagatttgtaagaaagggagtctgcatgctaatggacgccagaaggatgtggataaggagttctacctgttcccaactgtgttcgatgaaaacgagtccctgctgctggaggacaatattcgtatgttcaccacggcgccagaccaagtggacaaggaagatgaggacttccaagaatccaacaaaatgcactccatgaacggttttatgtacggaaaccaaccggggttgacgatgtgcaagggggacagcgtggtttggtatctgttctctgccggaaacgaggctgatgtccacggaatttacttctcaggaaacacttatctgtggagaggcgaaagacgcgacactgccaacctgtttccgcagacctccctcaccctccatatgtggccggacaccgaaggcacgtttaacgtggaatgtttgacgaccgaccactacaccgggggaatgaagcagaagtacactgtgaatcagtgtcgcagacagtcggaggactcgactttctacctgggagaacggacttactatatcgcggccgtcgaagtggaatgggattacagcccccaacgcgaatgggaaaaagaactgcaccacttgcaggagcagaacgtgtcgaacgcgttcctcgacaagggagagttctacatcggatccaagtacaaaaaagtggtgtacagacagtataccgactccaccttcagagtgccggtggagcgcaaggcggaagaagagcacctcggcatcctgggtccgcagctgcacgccgatgtgggggacaaggtgaaaatcattttcaagaatatggcgaccagaccttactccatccacgcccacggcgtccagaccgagtcgtcaactgtgactccgacgttgcctggagaaactcttacttacgtgtggaaaatcccagaacgctcgggtgcagggaccgaggacagcgcgtgcatcccatgggcctactactcaacggtggaccaagtgaaggacctctactccggacttatcggaccgctcatcgtgtgcaggcggccgtacttgaaagtgttcaatccccggcgcaagttggagttcgccctcctgtttctggtgtttgacgagaacgagtcgtggtacctcgatgataacatcaaaacctattcggaccatcctgagaaggtgaacaaggacgatgaggagtttatcgaatcgaataagatgcatgccattaacggacgcatgttcggcaacctccagggccttaccatgcatgtgggagacgaagtgaattggtatttgatggggatgggaaatgagatagacctccacactgtccactttcatggtcacagcttccagtacaagcatcgcggtgtctactctagcgatgtgtttgacatcttccctggaacgtaccagactctggaaatgttcccacgcaccccgggtatttggctgctgcactgccatgtgaccgaccatatccatgccgggatggaaaccacgtacactgtgctgcagaacgaggacactaagtcaggc

SEQ ID NO: 8514 - DNA, 3195 bp, synthetic construct
  misc_feature 1..3195: note = source = /note="Description of Artificial Sequence: Synthetic coding sequence"
  source 1..3195: mol_type = other DNA
atgaagatcctgattctgggaatttttctgtttctgtgtagtacgccagcctgggccaaggagaagcattactacatcgggatcattgagactacctgggactacgcatctgaccacggagagaaaaagctcataagcgtcgacactgagcacagcaacatctatctccagaatgggccggataggataggccggctgtataaaaaggcactttacctgcaatacaccgatgagactttccgcactaccatcgagaaacctgtctggctgggtttcttagggccaatcataaaagccgagacaggagacaaggtctatgtgcacctcaagaatcttgccagccggccctacaccttccattcccacggaatcacttattataaagaacacgaaggagcaatctaccctgacaacaccaccgacttccagagagccgatgacaaagtctatcccggggaacagtatacatacatgttgctggccacagaagaacaaagccccggagagggggacggtaattgtgtaacgcggatttaccactcccatatagacgcgcccaaggacatcgcgtcaggcctgataggaccactgattatttgcaaaaaggattcccttgataaggagaaggagaaacacatcgaccgggaattcgttgtcatgttttctgtggtggatgagaatttcagctggtacctggaggacaatattaaaacgtattgttcagaacccgagaaggtagacaaagacaatgaagattttcaggagtctaaccgtatgtatagcgttaatggttatacgttcggatcactccctggtctgtccatgtgtgctgaagatcgtgttaagtggtatctgttcggaatgggtaacgaggtcgatgtgcatgccgctttctttcatgggcaagcactcaccaacaagaattataggatcgacacaattaatctgtttcctgctaccctatttgacgcatatatggttgctcagaatccgggcgagtggatgctatcctgccagaacttgaaccacctgaaagcaggactgcaggcattcttccaggtacaggagtgcaataaatcatcgtccaaagataacatacgaggcaagcatgtgcgccactactatattgctgccgaggaaattatatggaactacgccccatcggggatagatatttttaccaaggagaatctgacagccccgggcagcgatagtgccgtcttctttgaacagggtactactcggataggcggttcctataaaaagctagtgtatcgtgaatatacagatgctagttttaccaatcgcaaagagcgagggcctgaggaggaacacttgggcatcctaggacccgtgatatgggcagaagtgggggatacaataagagtcacattccacaataagggtgcttatcccctttctatagagccaatcggagtgcgttttaacaaaaataacgaaggcacatattactcacctaactacaacccacagagcaggtcggtgcccccatcagcctcccatgttgcccccacagaaaccttcacttatgagtggaccgtcccaaaagaagtggggcctacgaatgcggaccccgtgtgcctcgccaaaatgtactacagtgccgtcgacccaacgaaggatatctttactggtttaattggtcccatgaagatttgcaagaagggcagcttacacgcaaacgggagacaaaaggacgtggacaaggagttttacctgtttcctacggtatttgatgaaaatgaatccctactgctcgaagataacattcgcatgttcactaccgctcccgaccaagtggacaaagaggacgaagattttcaagaaagcaacaaaatgcactccatgaatggcttcatgtatggcaatcagccaggactgaccatgtgtaaaggtgactccgtcgtctggtatttgttcagcgcaggcaacgaggccgacgttcatggaatttacttctccgggaatacttatctgtggagaggggagaggcgagacactgctaacctgtttccccagacttctcttacactgcatatgtggcctgacactgaaggtacctttaatgttgaatgcctcactacagatcattatacagggggcatgaaacaaaagtacaccgtaaatcagtgtcgcaggcagagtgaggattctaccttctatctgggcgagcggacttactatattgcagctgtggaggtggagtgggattactccccacagcgggaatgggagaaggagctgcaccaccttcaggaacagaacgtgagcaatgcgttccttgataagggcgaattttacataggatctaagtacaaaaaggtggtatacaggcagtatacagattcaacatttagagtccccgtcgagcggaaggcagaggaggagcatctgggaatcctgggcccacagcttcacgctgacgtaggtgacaaggtgaaaataatttttaaaaacatggcaactcgtccatacagtattcacgcgcatggagtacagacggaaagctctacagtcacccccactctgcctggagaaactttgacctatgtctggaagattccagaacggtctggcgccggcactgaggattcagcctgtatcccgtgggcctattactctaccgttgaccaggtgaaggacctttactctggacttatcgggcctctaatcgtgtgtcgtaggccttacctgaaggtgtttaacccccgcaggaagcttgaattcgccttactgttcttagtcttcgacgagaacgaatcatggtacctggacgacaacatcaagacttactccgatcatccggaaaaagttaataaagatgacgaagagtttattgagtctaacaagatgcacgccatcaatggacggatgttcggcaacttgcaggggctcacaatgcatgtgggagatgaagtaaattggtaccttatgggaatgggcaatgagattgacctgcacactgtccatttccacgggcattcttttcagtacaaacatagaggtgtgtacagttctgacgtctttgatatattccctggcacttatcagacactcgagatgttcccccgtacaccaggaatttggttgctgcactgccacgttactgaccacatacacgcaggcatggagacgacctacaccgtgctgcaaaatgaggatactaagtctggt

SEQ ID NO: 8515 - DNA, 3195 bp, synthetic construct
  misc_feature 1..3195: note = source = /note="Description of Artificial Sequence: Synthetic coding sequence"
  source 1..3195: mol_type = other DNA
atgaagattttaattctgggcatctttctcttcctgtgcagcacgccagcctgggctaaagagaagcactattatatcgggattatagaaactacatgggattacgcaagcgaccacggggaaaaaaagctgataagtgtggacaccgaacatagtaacatctatctccagaatggccccgatagaatcggccgcctctacaagaaggcactatacttacagtataccgacgagacttttaggactaccatcgagaagcctgtgtggcttgggtttctagggccgataatcaaggccgaaacaggcgacaaggtgtatgtacacctgaaaaacctggcttcccggccctacaccttccacagccacggaattacctactataaggagcacgagggcgccatatatccagacaacactactgacttccagagagctgatgacaaggtttatcccggggagcaatacacatatatgctattggctacggaggagcagtcccccggagagggggatggaaactgcgtgacgagaatataccattcacacatcgacgcaccaaaagacatcgctagtgggcttataggaccattgatcatctgtaaaaaagactctctggacaaagaaaaggagaaacacattgatcgggagtttgtggtaatgttcagtgttgtcgatgaaaattttagctggtatctcgaggacaacatcaaaacctactgctccgaacctgagaaggtggataaagataacgaagacttccaggagtcaaatcgtatgtactctgtaaatgggtacacgtttggtagtttgcctgggctgtcaatgtgcgccgaggacagagtcaagtggtacttatttggaatgggcaatgaagttgacgtccatgctgcgttctttcatggccaagctttgaccaataaaaactataggatagacacaatcaacctgttccctgccactctctttgatgcatatatggtggcccaaaatccgggcgaatggatgctgagctgtcagaatcttaaccacctgaaggccggtctgcaggccttctttcaagtgcaggaatgtaataagtccagctccaaagacaacattaggggtaagcatgtgcggcactattatatcgccgccgaggagattatttggaattacgccccatcgggcatcgacatctttaccaaggagaatctgacagctccaggcagcgacagcgcggtgttcttcgaacagggaactacccgcataggtgggagctacaagaaactggtgtatcgcgaatatacagacgcgtccttcactaaccggaaggagaggggccccgaagaggagcacctgggtatcctggggcctgtcatctgggccgaagtgggtgacactattagagtgacattccacaataagggcgcctaccccctgagcatcgagccaattggcgttcgctttaacaagaacaacgaaggcacctactattcgcctaattacaacccccagtcaagatccgtccctccctcagctagtcatgtggcacccaccgagacctttacttacgagtggaccgttccgaaagaagtgggccccaccaacgctgacccagtctgccttgccaaaatgtattattccgctgtggatcccactaaggacatctttaccgggctgatcggccccatgaagatctgtaaaaaaggtagtctgcatgcaaatgggcggcagaaggatgtggacaaggaattctacctctttccaactgtgttcgacgagaatgagagtttattgctcgaagacaatattcggatgtttactacagctcccgatcaggtcgataaagaagacgaggactttcaagaaagtaacaaaatgcacagtatgaacggttttatgtatggcaatcagcccggcctcacgatgtgtaaaggagactctgtggtctggtacctattttctgccggaaatgaagcggatgtccacggaatttatttttccggcaacacatacctatggcgtggggaaagacgggataccgccaatctgttccctcagaccagccttacactgcacatgtggccagacacagagggaacctttaacgttgaatgcctgactaccgatcactatacgggcggaatgaagcagaaatacaccgtaaaccagtgcaggagacaatctgaggactcgactttttacttgggggagaggacctattacatagcagccgtagaggtggagtgggactattcaccacagcgggagtgggagaaggagcttcaccatctgcaggagcagaacgtgtccaacgctttcctcgacaagggcgaattttatatcggctctaagtataagaaggtggtgtatcggcagtacacagactctacctttagggtgccagtggaaagaaaggccgaagaggagcatctcggtatcctgggcccacaattgcacgcagatgtcggtgataaagtgaagattatattcaagaatatggctactcggccatactcaatccacgctcacggagttcaaaccgagtcaagtacagtgactcctaccctaccaggcgagacattgacatatgtgtggaaaataccagaacggagcggcgcaggaaccgaggatagcgcatgtattccgtgggcgtattactccacagtagatcaggtgaaggacctgtattctggactgatcgggccactgatcgtgtgtagacgtccctacctcaaggttttcaacccacgcagaaagctggaatttgccttactgtttctggtctttgatgagaacgagtcatggtatctagacgataatatcaaaacatattcagaccatccagaaaaggtgaacaaagacgatgaggaattcattgaaagcaacaaaatgcacgctatcaacggcaggatgttcgggaacctccagggattaaccatgcacgtgggagacgaggtaaattggtatttgatgggcatgggtaatgagattgacttacacacagttcatttccacgggcactcattccagtataaacaccggggggtgtacagtagcgacgtctttgacatcttcccaggcacctaccagacactcgagatgtttccccggacacccgggatctggctcttacactgccatgttacagatcacattcacgcgggcatggagaccacatatacagtgctacagaatgaggacactaaatcgggc

SEQ ID NO: 8516 - DNA, 3195 bp, synthetic construct
  misc_feature 1..3195: note = source = /note="Description of Artificial Sequence: Synthetic coding sequence"
  source 1..3195: mol_type = other DNA
atgaaaatcctcatcctgggcatcttcctgttcctatgctctacccccgcctgggcgaaggagaagcactattatattggtatcatcgaaacgacctgggactacgcaagcgaccatggagagaaaaagctcatctccgtggataccgaacacagtaacatctaccttcagaacgggcccgataggattggtcggttgtacaaaaaagcgttgtatcttcagtataccgatgagacctttcggaccactattgaaaagcccgtttggctaggattcttaggccccattataaaagcagagaccggggacaaggtctacgtgcatctgaaaaacctcgctagtcggccgtatacgttccacagtcacggaattacctattacaaagagcacgagggggccatctatccggacaatactacagatttccagcgcgcggacgataaggtataccccggcgaacagtatacgtatatgctcctggccacagaggaacaatccccgggggaaggggatggaaattgcgttaccaggatttatcattcccacattgatgcaccaaaggacattgcttctggtcttattggccccctcattatatgcaagaaggactcattggacaaggaaaaggagaaacatattgacagggaattcgtggttatgtttagcgttgtcgatgaaaacttttcctggtacttggaggataacatcaagacttactgttctgagccggagaaagtggataaggacaacgaggatttccaggaatcaaaccgcatgtacagcgtgaatgggtatacattcggaagcttacccggcctttccatgtgcgcggaagaccgcgtcaagtggtatcttttcggaatggggaacgaggtcgatgtccacgctgcatttttccacggacaggctttgaccaataagaactatcgcatcgacactatcaacttgttccccgctactttgttcgacgcctacatggtcgcccagaatcccggtgaatggatgctgagttgtcagaatctgaaccatctcaaggctggcctgcaggccttttttcaggtccaggaatgcaacaagtcttcttcaaaagataatattaggggcaaacacgtccgccattattacatcgcagcagaagagattatttggaactacgctccctcagggatcgacatttttaccaaggaaaacctgacagctccaggttctgatagcgcagtctttttcgaacagggtacaacaagaataggcgggtcctacaaaaagctggtttatagggagtatacagatgcgtcctttacaaacaggaaggagagaggcccagaagaggaacatcttggaattttaggaccggtcatctgggctgaagtgggagataccattcgggtgacgtttcataacaagggcgcctatccactgtccattgagcccatcggagtgcggttcaacaagaacaatgagggcacctattattccccaaactataaccctcaaagccggtctgtccccccatccgctagtcatgtggcccctaccgagacatttacctacgagtggacagtccccaaggaggtcggcccaaccaacgctgacccagtgtgcttggcaaaaatgtattactccgctgttgatcccacaaaagacatttttacgggcctgatcggcccaatgaaaatttgcaagaaaggaagcttgcacgccaatggccggcagaaggacgttgacaaggaattctacctgttccctaccgtctttgacgaaaatgagagcctcctgctggaagataatatccggatgttcacaacagccccagaccaggtggataaggaggacgaggatttccaggagagtaacaagatgcatagcatgaacggttttatgtatggtaatcaacccgggctgacgatgtgcaaaggggattccgtggtatggtaccttttttcggcaggaaacgaagccgatgtacatggaatttatttctctggcaacacctacctatggcgcggagagcgccgagatacagctaatttattccctcagacatccctcaccctccacatgtggcctgacacagaggggacctttaatgtagagtgtctcacaaccgatcactataccggaggcatgaagcaaaagtacactgtgaaccagtgcaggcgccaatctgaggactccaccttttacctgggcgagcgtacttattatattgccgcagtcgaggtagaatgggattattccccacagcgggaatgggaaaaagagcttcaccacctgcaggagcagaatgtgagcaatgcatttctcgacaaaggagagttctacatcgggtctaagtacaaaaaagtggtttataggcagtacactgatagcacatttcgcgtgcctgtcgagcgcaaagctgaggaagaacacttgggaattctaggtccccagctccacgcagatgtgggagataaggttaaaattattttcaaaaacatggcaacacgaccatattcaatccatgcacacggggtgcagactgaatccagtactgtgactcccaccttgcctggggagacactgacgtacgtgtggaagatcccagagcgatcaggagcgggcacagaagactctgcttgcataccatgggcctactatagcaccgtggaccaggttaaagacctttatagcggcctgattgggcctttgatagtgtgcagaaggccctatctaaaggtgttcaaccctcggcgcaagctggagtttgctctcctctttctggttttcgacgaaaacgagagttggtacctggacgataacattaaaacatattcagaccaccccgaaaaggtgaataaggatgatgaggagtttatcgagtccaataagatgcatgccatcaatggccgcatgttcggaaatctgcagggtttgacaatgcacgtcggggacgaggtaaattggtatctcatgggcatgggaaacgaaatcgacctgcacacagtgcattttcatggccactcctttcagtataagcatcgaggagtttattccagcgatgtttttgacatctttcccggcacataccaaaccctggagatgtttccacgcacacccggcatttggctgctccactgtcatgtgacggaccacatacatgcgggcatggaaacaacttacacggttcttcagaatgaagacaccaagagcgga

SEQ ID NO: 8517 - DNA, 3195 bp, synthetic construct
  misc_feature 1..3195: note = source = /note="Description of Artificial Sequence: Synthetic coding sequence"
  source 1..3195: mol_type = other DNA
atgaagatacttatacttggtattttcctctttctttgttccacgccagcctgggccaaagaaaagcattactacattgggattatcgaaaccacttgggattacgcatcagaccatggagagaaaaagctgattagcgtggacacggagcatagcaacatttaccttcaaaacggtcctgatcgaattggtcgtctttacaagaaggcactttacctgcaatacactgatgaaaccttcagaaccactattgaaaaaccagtgtggcttggtttccttggtcctatcatcaaggcagaaaccggtgacaaagtctatgtgcatctgaaaaacctcgcatcgcgtccgtatactttccactcgcatggtattacctactacaaggaacacgaaggagcaatttaccctgataatacgaccgattttcaacgcgcggacgacaaggtgtacccgggcgaacaatatacgtacatgcttctcgcaactgaagaacagtcaccaggtgagggagacggaaactgcgtgacccgaatttaccattctcatattgatgcgcccaaggatattgcctcaggtctgatcggacccctgattatctgtaagaaagatagcctggacaaggagaaagagaaacatatcgatcgagaattcgtggtcatgttttcggtcgtcgatgaaaacttttcctggtacctcgaggacaacattaagacctactgttccgaacccgagaaggtggacaaggataacgaagattttcaagaaagtaacagaatgtactccgtgaacggatacacctttggcagcctcccaggcctttcgatgtgtgccgaggaccgtgtcaagtggtacttgtttgggatgggtaatgaagtggatgtgcatgcagccttttttcatggtcaggcactgaccaacaagaactaccgaatagataccattaaccttttcccggcgactctttttgacgcatacatggtggcacagaaccccggcgagtggatgctgtcttgtcagaatctcaaccatttgaaggcgggactccaggcattctttcaggtgcaggaatgtaacaagtcgtcctcaaaggataacattcgtggtaagcatgtgcgtcattactacatcgcagccgaagagatcatttggaattatgcaccaagcggaatagatatcttcaccaaagaaaacctgaccgccccgggctcagattccgcagtctttttcgaacaagggaccacccggattggggggtcgtacaagaagctggtgtaccgagaatataccgacgcatccttcaccaacaggaaagaaaggggtcccgaggaagaacatctcggtatcctcggtcctgtgatctgggccgaggtgggcgataccataagagtgacctttcataacaagggtgcatacccactctccattgagcctattggcgtccggtttaacaagaataatgagggcacttactactcacctaactataacccacaaagcagatcagtgccgcccagcgcctcacatgtggcaccgaccgaaacctttacttacgaatggaccgtgccaaaagaagtgggacctaccaacgcagatcctgtctgtttggcaaagatgtactactcggcagtggatccaactaaagacattttcaccggactgattggacctatgaagatttgtaaaaagggaagccttcacgccaacggacggcaaaaagatgtggataaggaattctacctctttccaactgtttttgatgagaatgaatccctcctgttggaggataacatccgaatgttcactaccgcacctgaccaagtggacaaggaagatgaagatttccaagaatcgaacaagatgcattcaatgaatggttttatgtacggaaaccaacctgggctgaccatgtgtaaaggtgattcagtggtttggtatcttttctcggctggaaatgaagctgatgtacatggaatctacttctcgggaaatacctacctgtggaggggagaacgaagagataccgcaaacctttttccacaaacctcgctgacccttcatatgtggcccgataccgaagggacctttaacgtcgaatgtttgactactgatcactacactggaggaatgaagcagaagtacactgtcaatcaatgcagacggcaatcagaagattccaccttttaccttggagaaagaacctactatatagcggcagtggaagtggaatgggactactcccctcagagagaatgggaaaaggaactccatcacttgcaagaacaaaacgtgagcaacgcatttctggacaagggagagttttacattggatccaaatacaagaaggtcgtgtacagacagtacactgattccacttttagggtgccagtggaaaggaaggccgaggaagagcaccttggtattctgggaccacagcttcacgcggatgtgggcgacaaggttaagattatcttcaagaacatggcgaccagaccatacagcattcatgcgcatggtgtgcaaactgagtcatcgaccgtgacccctaccctcccaggtgagactctgacttacgtgtggaagattcctgaaagatcgggggcggggactgaggattccgcatgcattccttgggcgtactactcgaccgtcgaccaagtgaaggatctgtactcggggcttatcggtcctcttatcgtctgtcgtagaccgtacctcaaggtgtttaacccccgcagaaagctcgagttcgccctgctttttctcgtgtttgacgaaaacgaatcatggtacctcgacgacaatatcaagacctactccgatcatccagagaaagtcaacaaggatgatgaggagtttattgagagcaataagatgcatgccatcaacggaagaatgttcggaaacctccaagggctcacgatgcatgttggagacgaggtcaattggtacctgatgggtatggggaacgaaattgatcttcacactgtgcatttccacggacactcgttccagtacaagcaccgcggtgtctacagctcagacgtgttcgatatctttcctggaacctaccaaactcttgaaatgtttcccagaaccccaggcatctggctgcttcactgtcatgtcaccgaccatatccacgcaggcatggaaactacttatacggtcctgcaaaacgaggacactaaaagcggc

SEQ ID NO: 8518 - DNA, 3195 bp, synthetic construct
  misc_feature 1..3195: note = source = /note="Description of Artificial Sequence: Synthetic coding sequence"
  source 1..3195: mol_type = other DNA
atgaagattctgatcctggggatttttctgtttctgtgttcaaccccagcatgggccaaggagaagcattactatattggaattatcgaaaccacctgggattacgctagtgaccatggtgaaaagaagctgatcagcgtggacacggagcattcgaacatctaccttcaaaacggtccagaccgcattggacggctgtacaagaaggcactgtacctccagtacacggatgaaactttcaggaccaccattgaaaaacccgtgtggctcggattcctgggacctatcatcaaggcagagactggggataaggtgtacgtgcatttgaaaaacctggccagccggccttacacctttcactcgcatggaattacgtattacaaggaacatgaaggagcaatttacccagataacactaccgacttccaacgtgcggacgataaagtgtacccaggagaacaatacacttacatgctgcttgctaccgaagaacagtcccccggagaaggcgatggaaattgtgtgactcgaatttaccactcacacattgatgctccaaaagatattgcatccggccttataggtcctctgataatctgtaagaaggattccctcgataaggagaaggaaaagcatattgatagagagtttgtggtcatgttttcagtggtggatgaaaacttttcctggtacctcgaagataacatcaaaacctactgctcagaacctgaaaaagtggataaagacaacgaagattttcaagagtccaaccggatgtactctgtgaacggttacacctttgggtcactccccggtctgtccatgtgtgccgaggacagggtgaagtggtacctttttggaatggggaacgaggttgatgtgcatgctgccttctttcatggacaggccctcactaacaagaattaccggattgatacgatcaacctttttcctgcaactctttttgacgcatacatggtggcacaaaacccgggtgaatggatgctgtcgtgtcaaaatcttaaccatctcaaagctgggctccaagccttctttcaggtgcaagaatgtaacaagtcctcgtcaaaggataacatccgcggtaagcatgtgcgccactattacatcgcagcagaagaaatcatctggaattacgcaccttcaggaatcgatatctttacgaaggaaaacctgacggcccccgggagcgatagcgctgtgttttttgaacagggtaccacgagaatcgggggctcatataagaagttggtgtacagggagtacactgatgcctcgtttaccaatcgcaaagagcgcggacccgaggaagagcacctggggatcctgggacctgtgatttgggcggaagtgggcgataccattcgagttacttttcacaataagggtgcatacccactgtccattgaaccaattggtgtgagatttaacaaaaacaacgaaggaacctactactcgcctaactataacccacagtcaagaagcgtgcccccttccgcctcacatgtggccccaaccgaaaccttcacctacgagtggactgtccccaaggaggtgggtcctacgaacgcagacccagtgtgcctggctaagatgtattactcggccgtcgaccctactaaagatatcttcaccggtctgattgggcccatgaagatctgcaagaagggttcactgcacgccaacggtaggcagaaggacgtagacaaggagttttacctttttcctaccgtgtttgacgaaaatgagtcgcttcttctggaggacaacattcgcatgttcaccaccgcaccggatcaagtcgataaagaagatgaggatttccaggaatccaacaagatgcactctatgaacggttttatgtacggaaaccagcccggcctcaccatgtgcaagggagactcagtggtgtggtacctgttctcggcgggaaatgaagctgacgttcatggaatctacttctccggaaacacctacctttggagaggagagaggcgggacaccgccaacttgtttcctcagacttccctgactctccatatgtggcctgacactgaaggaactttcaatgtggaatgcctgaccactgatcattacaccggtggaatgaagcaaaagtataccgtgaaccaatgtaggagacaatcggaggacagcaccttctacctgggagagaggacctattacattgccgccgtggaagtggaatgggattacagccctcaacgggaatgggaaaaggagctgcatcatctgcaggaacagaatgtgtcgaacgcattcctcgataaaggggaattctacatcggttcgaaatacaagaaggtggtctacagacagtacactgactctactttccgcgtgcctgttgagcgaaaagccgaagaagaacatttgggaattcttgggccacaacttcatgcagatgtgggggacaaggtgaagattatcttcaagaatatggccacccgcccttactcaatccatgcgcacggcgtccagactgagagcagcactgtgacgccaactctccccggagagacgctgacttacgtctggaagattccagaaagatccggagccggaaccgaagattcggcgtgtattccatgggcttactactccactgtggatcaagtcaaggatttgtactccggactcatcgggccactgattgtttgcagaaggccttaccttaaagtgtttaaccctcgtagaaaacttgaatttgcgctcctgtttctcgtgttcgacgagaatgaatcgtggtatttggatgacaacataaagacctattccgatcacccagaaaaggtgaacaaggatgatgaggagtttatcgaatcgaataagatgcatgcaatcaacggaagaatgtttggcaatctccaaggactgaccatgcatgttggagatgaagtgaactggtacttgatgggcatgggtaacgaaatcgaccttcatactgtccattttcatggtcacagcttccagtacaaacatcggggagtctactcctcggacgtctttgacatttttcccggtacttaccaaaccctcgaaatgtttccgagaacccctggaatctggctgcttcactgccatgtgactgaccatatccatgcaggcatggaaactacctacactgtccttcaaaacgaagataccaaatcggga

SEQ ID NO: 8519 - DNA, 3195 bp, synthetic construct
  misc_feature 1..3195: note = source = /note="Description of Artificial Sequence: Synthetic coding sequence"
  source 1..3195: mol_type = other DNA
atgaaaattttgatactgggcatctttctcttcctatgctctactcccgcctgggctaaagagaagcattattacataggaatcatcgaaaccacgtgggattatgcgagtgaccatggcgagaagaagttaatctcggtagacaccgagcacagcaatatttacttgcaaaatggacctgacagaataggacgcctgtataagaaagccctctaccttcaatacactgatgagacttttcgcacaacaatagagaagccagtttggctgggcttcctggggcctattatcaaggcagagacgggggataaagtctatgttcacctgaagaatcttgccagccggccctacacttttcacagccacgggattacatattacaaggagcatgagggcgccatttatccagacaatactacagactttcagcgtgctgatgacaaagtataccctggggagcaatacacatatatgctacttgccaccgaggaacagtcacctggggaaggagatggcaattgcgtgacaaggatataccatagccacatcgacgcccccaaagacatcgccagtggcctcatcggaccccttatcatctgcaaaaaagactctctggataaggagaaggagaagcatatcgaccgcgaattcgtcgtaatgttctccgtggtggacgagaacttttcttggtacctggaagataacattaagacttactgttcagagcccgagaaagtggacaaggataacgaggatttccaggaatcaaaccgtatgtattcagtgaacggatatacatttggcagcctgcccggtttgtccatgtgcgccgaggacagagtgaaatggtacctctttgggatgggaaacgaggtggatgtccatgcagcctttttccatggtcaggctttgaccaacaagaactacaggattgatacaattaatctgttcccggccaccctcttcgatgcttacatggtggcacagaatcccggggaatggatgctgagctgccaaaatctgaaccacctgaaggctggcttacaggccttctttcaggtgcaagaatgtaacaagtcctcatcaaaggacaacataaggggcaagcacgtcaggcactattacatcgccgccgaggaaatcatctggaactatgcgccttccggcatagacatctttactaaagaaaacttgactgcgccaggcagcgactccgccgttttctttgagcagggcacgactcgcattgggggtagctacaaaaaactggtctatcgtgagtacacagacgcctcatttaccaaccggaaggaacgcggtcctgaggaggagcatttaggcatcttgggacccgtaatttgggccgaggtcggggacacgataagggtgacctttcataataaaggagcttatcctctgtcaatagagccaattggggttagattcaacaaaaacaacgagggcacctactattcacctaattataatccccagagccgctcggtacccccctcagcctcgcacgtggccccaaccgaaacatttacatacgaatggaccgtccccaaagaagtggggccaactaatgccgacccagtctgtctggccaaaatgtactactcagctgtggacccaaccaaagatatttttacagggctgattggccctatgaagatctgcaagaaaggaagcttacacgccaacggccgacaaaaggacgttgataaagagttttacctcttccctactgtgttcgacgagaacgaatcccttctactggaggacaacatccggatgttcacaaccgcgcctgatcaagtagacaaagaagatgaagacttccaggaaagtaataagatgcacagtatgaacggctttatgtatggaaaccaacccggactgaccatgtgtaaaggtgattcagtcgtatggtatctgtttagtgcagggaacgaagccgatgttcacggaatttatttcagcggaaacacttatctgtggagaggcgagcgaagagacactgcaaacctgttcccccaaacaagtttgaccctgcatatgtggcctgacaccgagggcaccttcaacgtcgagtgtcttacgactgatcactataccggggggatgaagcagaagtatactgtgaaccagtgccgtcggcagtcagaggacagcacgttctatctgggagaaagaacatattacattgccgctgtggaagtggaatgggactacagcccacagcgcgagtgggaaaaagaattgcatcatctacaggagcagaacgtgtctaatgctttcctggacaaaggggaattctacatcgggagcaaatataagaaagtcgtctacaggcagtacactgactcaacgttccgggtcccagtggaacgcaaggctgaggaagagcacctgggcatactcggtccccagctgcacgccgacgtcggtgacaaggtcaagatcatcttcaaaaacatggcaacccggccatattctatccacgctcatggcgtccaaactgagtcttcgacagtaaccccgactctgcccggagagaccctgacctacgtttggaaaataccagaacgatctggggccggaaccgaagattctgcgtgtatcccatgggcttactactctacagtcgatcaggtgaaggacttgtatagtgggctgatcggaccattgattgtatgtagaagaccttacctgaaagtcttcaacccgagaaggaaactcgaatttgcgctcttattcctcgtgttcgatgaaaacgagagctggtatctcgacgataatattaaaacctattcagaccatcctgagaaagttaacaaagacgacgaagagttcatcgaatcgaacaaaatgcatgccataaatggccggatgttcggaaatctccagggactgactatgcacgtcggagatgaggtcaactggtatctgatggggatgggaaacgaaattgacctgcatactgtgcactttcatggtcatagcttccaatataagcacagaggagtgtatagctcagatgtcttcgatatctttccaggcacctaccagacactcgagatgttcccacgtacaccgggcatctggttactccattgccatgtgaccgaccacatacacgcagggatggagaccacctatacagtgctgcaaaatgaagacacgaaatccggt

SEQ ID NO: 8520 - DNA, 3195 bp, synthetic construct
  misc_feature 1..3195: note = source = /note="Description of Artificial Sequence: Synthetic coding sequence"
  source 1..3195: mol_type = other DNA
atgaagatcctgattctggggatcttcctctttttgtgctccacgcccgcatgggctaaggagaaacactactacatcggaatcatcgaaactacttgggattacgcatcggaccatggcgaaaagaaattgatctcggtggataccgagcattcaaacatttatctgcagaacggaccagacagaatcgggaggctgtacaaaaaggcactgtacctgcagtacaccgacgaaactttccgcacgactattgaaaagccggtctggctgggatttctcggaccaattatcaaagcggaaaccggagacaaagtctacgtccacctgaagaatctggcgtcccgtccgtacactttccactctcatggaatcacctactacaaggagcacgagggagccatctaccctgataatacgactgacttccagcgcgcagacgataaagtgtacccaggagaacaatatacctatatgcttctggccaccgaagaacagagcccaggagaaggggacggaaattgcgtgacccgcatctaccattcgcatattgatgccccgaaagacatcgcttccggactgatcggcccactgatcatctgtaagaaggatagtctggataaagaaaaggagaagcatatcgatcgggaattcgtcgtgatgtttagcgtcgtcgacgagaacttttcgtggtacctggaggataacatcaagacgtactgttccgagccggagaaggtcgacaaggataatgaggacttccaagagtcaaaccgcatgtacagcgtcaatggttacacctttggctcactgccgggactgagcatgtgtgcggaggaccgggtgaagtggtacttgtttggcatgggaaacgaggtcgacgtccacgcagctttctttcatggccaagcgctgactaataagaactacaggattgataccatcaacctcttcccggccacccttttcgatgcctatatggtcgcacaaaatccgggagaatggatgctgtcatgtcagaatctgaaccatttgaaggctggcctccaggcattcttccaggtccaggaatgtaataagtcatcttccaaggataacatccggggcaagcacgtgcgccactattacatcgcagcagaggaaatcatttggaactacgccccgtcgggcatcgatatctttaccaaagagaaccttactgccccgggatcggacagcgccgtgttcttcgagcaggggactacccggatcggtgggtcgtacaagaagttggtgtatcgggagtacaccgatgcgtcatttactaacagaaaggagcgtggacctgaagaagagcatctgggaatccttggaccggtgatctgggccgaggtgggagataccatccgggtgactttccacaataagggcgcataccctctctccatcgaaccgatcggagtgcggttcaataagaataacgaaggaacctactactccccaaactacaaccctcagagcaggtccgtcccgccgagcgcgtcccatgttgctccaaccgagactttcacttacgaatggacggtcccaaaggaagtgggtccgacgaacgcggacccagtttgcctggcaaaaatgtactactcggccgttgacccgacgaaggacatcttcacgggactcatcgggccaatgaagatttgcaagaagggatccctgcacgctaacgggagacagaaagatgtggataaggagttctacctgtttccgacggtgttcgatgaaaacgagtcacttctcctggaggacaatatccgaatgttcaccactgcccctgaccaagtggataaggaagatgaagatttccaggagtccaataagatgcactcaatgaatggcttcatgtacggcaaccagccgggactgactatgtgcaagggggactccgtggtttggtatctgttctccgcaggaaacgaagctgatgttcacggaatttacttctccggaaatacttacctctggagaggggagcggagagacaccgcgaatttgttcccccagacctcgctcacgctccacatgtggccagacaccgaaggtactttcaatgtcgaatgcctcacgaccgaccactacaccggaggcatgaagcaaaagtacactgtcaaccagtgtcggcgccaaagcgaggactcgaccttttacctgggggaacgcacctactacatcgccgctgtggaggtggaatgggactactcgccacaacgcgagtgggaaaaggagcttcaccatcttcaggaacaaaacgtctctaacgccttcctcgacaagggagagttctacatcggatcaaaatacaaaaaggtcgtgtaccgccagtacactgactcgacgttccgggttcctgtggaacgcaaggcggaagaagaacacctgggcattttggggccgcagttgcacgccgacgtgggcgacaaagtgaagatcatctttaagaacatggcgacgcggccgtatagcattcacgcacacggagtgcagactgaatcaagcactgtcacccccaccctgcctggggagactctgacctacgtctggaagatcccggaacgctcgggagcaggcactgaagattccgcctgcatcccgtgggcctactactcgactgtggatcaggtgaaagatctgtatagtggcctcatcggaccactgatcgtctgcaggcggccgtacctgaaggtctttaacccgcggagaaagttggagttcgctctcctgttcctggtgttcgacgagaatgaatcttggtacctcgatgacaatatcaaaacttattcagatcaccctgaaaaggtgaataaggacgatgaagagttcatcgaatcgaataagatgcatgccatcaatgggagaatgttcgggaacctgcaagggttgacgatgcacgtgggagacgaagtcaactggtacttgatggggatgggcaatgagatagacctccacactgtgcacttccacggacattccttccaatacaagcatagaggagtatacagctcggatgtgttcgacattttccctggcacttaccagacgctggaaatgttcccaaggactccaggcatctggctgcttcactgccacgtgactgaccatattcatgccggaatggagacgacctacactgtgctgcaaaatgaagataccaagtcgggc

SEQ ID NO: 8521 - DNA, 3195 bp, synthetic construct
  misc_feature 1..3195: note = source = /note="Description of Artificial Sequence: Synthetic coding sequence"
  source 1..3195: mol_type = other DNA
atgaaaatccttatccttggcatcttcctcttcttgtgctctacccctgcctgggctaaggaaaagcactactacatcggaattatcgaaaccacctgggactacgctagcgaccacggagagaagaaactgatctccgtggataccgagcacagcaatatctacctgcagaacggtcctgatagaattggacggttgtataagaaagccctgtacctgcaatacaccgacgaaacttttagaaccactatcgaaaagcccgtgtggctcgggttcctcggaccgatcatcaaggcggaaacgggagacaaggtgtacgttcacctcaagaacctcgcgtcgcggccatacacctttcactcccatgggatcacttactacaaggaacatgaaggagcgatttaccctgacaacaccactgacttccaacgcgcagatgataaagtttacccaggtgagcagtacacttatatgcttctcgcaactgaggagcaaagcccgggagagggtgacggaaactgcgtcactcgcatctatcactcccacatcgatgctccgaaggacatcgcatccggactgatcggacccctcattatctgtaagaaggactcgctggataaagaaaaggaaaaacacatcgaccgcgagttcgttgtgatgttctcggtggtcgacgaaaacttttcgtggtacctggaggacaacatcaagacttattgctccgaacctgaaaaggtcgacaaggacaacgaggacttccaggaatcgaatagaatgtactccgtcaatggatacaccttcggctcgctcccgggactctcaatgtgcgccgaagatcgcgtgaagtggtatttgttcggaatgggaaacgaggtcgacgtccatgctgccttcttccacggacaggcgctgactaataagaactatcgcatcgataccatcaatctgttcccggcgactctgtttgacgcgtacatggtggctcagaaccctggagaatggatgctgtcgtgtcagaacttgaaccacctgaaggctggactgcaagcatttttccaagtgcaagagtgtaataagagcagctccaaggacaacattcgcggaaaacacgtgcgccattactacatcgcggcagaagagatcatctggaattacgctccgtccgggatcgacattttcaccaaggagaatcttacggctcccggctcagactcggcagttttcttcgagcaagggaccactagaattggaggatcctacaagaagctggtctacagggagtacactgacgcatcgttcactaaccgcaaagagcggggaccggaagaagagcacctgggaatcctgggtcctgtcatttgggccgaagtcggagataccatcagagtgactttccataacaaaggtgcttaccccctctcgatcgaaccaatcggcgtccgctttaacaaaaacaacgagggaacctactattcgccgaactacaatccgcaatcacggtccgtcccgccttctgcctcgcatgttgcgccaaccgagacgttcacctatgaatggactgtgccaaaggaggtgggaccaaccaacgccgacccggtatgcctcgcgaagatgtactactccgccgtcgacccaacgaaggacatcttcaccggcctgattggcccaatgaagatctgcaagaagggaagcctccacgcgaatggacggcagaaagacgtggacaaagagttttaccttttcccgacggtgttcgacgagaacgagtcgctgttgctcgaggataacatccgtatgtttaccaccgcacctgaccaggtcgataaagaagatgaggatttccaggagtccaacaagatgcacagcatgaacggtttcatgtacggcaaccaaccgggtttgactatgtgcaagggcgactccgtggtgtggtacctgttcagcgcaggcaatgaagcggacgtccacggaatctacttcagcggtaacacctacctgtggagaggggaacgccgggacacggccaatctcttcccgcagacttcgctgaccctgcatatgtggccagacaccgaaggcacctttaatgtcgaatgcttgaccaccgaccactacacgggaggaatgaaacagaagtataccgtgaaccagtgccggcgccagtcggaggattcaaccttttacctcggggagcggacctactacatcgctgctgtcgaggtggagtgggactactcaccgcagagagagtgggagaaggaactccaccacctccaggagcagaacgtgagcaatgcctttctggacaagggagagttttacattggttcgaaatacaaaaaggtggtttacaggcaatacacggactcgacctttagggtcccggtggagcggaaggccgaagaggaacacctcggcatcctgggtccacagctccatgcagatgtcggcgacaaggtcaagatcatcttcaagaacatggccacccgcccttactccatccatgcgcacggcgtgcagaccgaaagttcaactgtgactcccacgctgccaggagaaaccctcacctacgtctggaaaattcctgaaaggtcaggagccggcaccgaggacagcgcgtgcatcccgtgggcgtactacagcactgtggaccaggtgaaagacctctactcgggtctgatcggaccgctgatcgtgtgccgccggccttacctgaaggtgtttaacccacggcggaagctggaattcgcgctgctgtttctggtgtttgacgagaacgaatcatggtatctggatgacaacatcaaaacttactcggatcatcccgaaaaagtcaacaaggatgatgaggaattcattgagtcaaataagatgcacgcgatcaacggaagaatgtttggcaacctgcagggactgactatgcatgtgggcgacgaagtcaactggtacctgatgggaatgggtaacgagatcgatctgcacaccgtgcactttcacggacactcattccagtacaagcaccggggtgtgtattcgtcggacgtgtttgacattttccctggaacctaccaaaccctggaaatgttcccgcggactccaggaatatggctgctgcactgccacgtgaccgaccacatccacgcgggtatggaaaccacctacactgtgttgcagaatgaggacaccaaaagcgga

SEQ ID NO: 8522 - DNA, 3195 bp, synthetic construct
  misc_feature 1..3195: note = source = /note="Description of Artificial Sequence: Synthetic coding sequence"
  source 1..3195: mol_type = other DNA
atgaaaattcttatcctcggcatctttctttttctgtgctccactccggcatgggcaaaggaaaagcattactacatcggcattatagaaaccacctgggactacgcaagcgaccatggcgagaagaagttgatttcagtcgacactgaacattccaacatttatctgcagaacggacctgaccggatcggacgcctttacaagaaggccctttaccttcagtacaccgatgaaacgtttcgaaccaccatcgagaagccagtgtggctgggtttccttggacctattatcaaggcggaaacgggagataaagtgtacgttcaccttaagaaccttgcatcacgtccatacactttccatagccacgggattacctactacaaggaacacgaaggagcaatttacccagataatactacggattttcagagagccgatgataaagtgtatcctggagagcaatacacctatatgctgctcgcaaccgaagaacaatcaccgggtgagggtgatgggaattgtgttactagaatctatcattcacatatagatgcaccgaaagatattgcatctggccttattgggccactgataatctgtaagaaggacagtctggacaaggagaaggaaaaacatatcgatcgcgaatttgtggtcatgttcagcgtggttgacgagaacttttcctggtacctcgaagataacatcaagacttattgctcagaacccgagaaagtggacaaagacaacgaagatttccaggagtcaaatagaatgtactccgtcaacggatacaccttcggctcgttgcctggcctctcgatgtgcgcagaggatagagtgaaatggtatctcttcggcatgggaaacgaagtcgacgtccatgccgcattctttcatggacaagccttgactaacaagaattaccgcattgataccattaacctttttccagccaccctgtttgacgcgtacatggtggcacaaaaccccggtgaatggatgctgtcctgccagaaccttaaccatcttaaagcaggactgcaggcatttttccaggtgcaagaatgtaacaagtccagctcgaaggataacatccgcggtaagcatgtgcgtcactattacattgcagccgaggagatcatttggaactacgccccaagcggaattgacattttcaccaaggaaaacttgaccgctcctgggtctgattcggccgtgtttttcgagcaaggcactacccggattggagggtcatacaagaagctggtgtaccgtgaatacaccgatgcaagttttaccaaccgaaaggaaagaggtccagaagaagaacatcttggaatcctggggcccgtcatttgggcagaggttggggataccattagagtgacttttcacaacaaaggagcataccctctttcgatcgagcctattggggtgagattcaacaagaacaatgagggaacttactacagccctaactacaatccacagtcacggtcagtgccgccttcggcctcgcacgtggcaccaactgagacttttacttacgagtggaccgtgcctaaggaagttggaccgactaatgccgatcctgtgtgtcttgcaaagatgtattactcggctgtggacccgactaaggatatctttaccggtctgattggtcctatgaagatttgtaagaagggatcgttgcacgccaatggtcggcagaaggacgtggataaggaattctacctgtttccaactgttttcgatgagaatgaatcgcttctgctggaggataacatcaggatgtttaccacggcccctgatcaagtcgataaggaagatgaggacttccaggaatccaacaagatgcattcgatgaacggattcatgtacggaaatcagcctggtctgactatgtgtaagggagactccgtggtctggtaccttttttcagcaggaaacgaggcagacgtccatggaatttacttttcgggaaatacctacctgtggagaggtgaacgacgcgataccgcaaacttgttcccacagacctccctgaccctgcatatgtggcctgacaccgaggggacttttaacgtcgaatgtctgacgaccgatcattacaccggtggtatgaaacagaagtatacggtgaaccagtgccgccgacagtcagaagattccactttttacctgggggaaaggacttactacattgcagcggtggaggtggaatgggattacagcccccaacgtgaatgggaaaaagaacttcatcatcttcaagagcaaaacgtgtccaatgcctttctcgataaaggagagttttacattggaagcaagtataagaaggtcgtgtacagacagtataccgacagcacttttcgggtccctgtcgaacgcaaggctgaggaagagcacctggggatcctcggaccgcagctgcacgcagatgtgggggataaggttaagattatctttaagaacatggctacccgtccctactccattcacgcacacggagtgcaaacggaatcctcgactgtcacccctacgctcccaggagaaacccttacctacgtttggaagatccccgaaagatcaggtgctggcaccgaagattcagcttgcattccatgggcgtactactcgaccgttgaccaagtcaaggatctttactccgggctgattggccctctgatcgtgtgccggcgaccataccttaaagtgttcaacccacgcagaaagctggaattcgcactcctttttctcgtctttgacgaaaacgaatcatggtaccttgatgacaacatcaaaacttactcggatcacccagagaaggtgaataaggatgatgaagaattcattgaaagcaataagatgcacgcaattaacggtaggatgtttggtaacctccaggggctgactatgcatgtaggcgacgaagtgaactggtacctcatgggcatgggtaacgaaatcgatctgcatactgtccattttcatgggcactcatttcagtacaaacacaggggtgtctacagctctgatgtctttgacattttccctggtacttatcagactctggagatgttcccaaggactcccggaatttggctcctgcactgtcatgttactgaccacatccacgccggtatggaaacgacttacaccgtgctgcaaaatgaagataccaagtcgggg

SEQ ID NO: 8523 - DNA, 3195 bp, synthetic construct
  misc_feature 1..3195: note = source = /note="Description of Artificial Sequence: Synthetic coding sequence"
  source 1..3195: mol_type = other DNA
atgaaaatcctcatcctgggaatcttcctttttctctgcagtactccggcttgggcgaaggagaaacactactacatcggaattatcgaaaccacctgggactacgcatcagatcacggcgaaaagaaacttatcagcgtggacactgaacattccaacatatacttgcagaacggaccggacagaatcggacggctgtacaagaaggctttgtacctgcagtacactgacgaaaccttcagaaccaccatcgagaagcccgtctggctcggatttctgggacccatcatcaaggcggaaactggtgataaggtgtacgtgcatctgaaaaacctggcctcccggccatacacgttccactcccacgggattacctactacaaggaacatgagggagcgatctacccagataataccactgactttcagagggcggacgacaaggtgtacccgggagaacagtacacttacatgctcctcgccactgaagagcagagcccgggcgagggagatggaaactgcgtgacccggatttaccactcgcacatcgatgccccgaaggacatcgcctcgggactgatcggccccctgatcatttgcaagaaggattccctggacaaggaaaaggaaaagcatatcgaccgcgagtttgtcgtgatgttcagcgtggtggatgagaatttctcgtggtacttggaagataacatcaaaacttattgctccgaaccggaaaaggtggacaaagataatgaagattttcaagagtccaaccgcatgtactcagtgaacggatacacttttggcagcctccctgggctctcaatgtgcgccgaagatagagtgaagtggtacctctttggaatgggaaacgaggtggatgtccacgctgcattctttcacggacaagctctgacgaataagaactaccggatcgatacgatcaatctctttccggcgactctgttcgacgcctacatggtcgcccagaatccgggtgaatggatgcttagctgtcagaatctcaaccatctgaaggcggggcttcaagccttctttcaggttcaggagtgtaacaaaagctcctccaaagataacatccgcgggaagcacgtgcgccattactacatcgcagccgaagaaatcatctggaattacgcccccagcggcattgatatcttcactaaggagaacctgaccgccccgggatcagattcggctgtattcttcgagcagggtactacccgcatcggcggatcctacaagaaactggtctaccgggagtacaccgacgctagcttcactaatagaaaggagcggggaccggaggaagaacatctcggaattctcggaccagtgatctgggccgaagtgggagacaccatcagggtcacgtttcacaataagggagcctacccattgtcgatcgagccgatcggagtcagattcaacaagaacaatgagggaacctactactcgccgaactataacccacagtcacggtcagtgcccccgagcgccagccatgtggccccaacggaaacctttacgtatgaatggaccgtcccaaaagaggttggaccaacgaacgccgacccggtctgcttggccaagatgtactactcggccgtggacccgacgaaagacatcttcaccgggctcatcgggcccatgaaaatctgcaagaaggggtccctccatgctaatggacgccagaaggacgtggataaagaattctacctgtttccgaccgtgtttgatgaaaacgagtccctgctgcttgaagataacattcggatgttcactaccgcgcctgaccaggtggacaaggaggatgaagatttccaggaaagtaacaagatgcactccatgaacggttttatgtacggcaaccagccggggctgaccatgtgtaaaggagacagcgtggtgtggtatctcttctcggcaggaaacgaggcagacgtgcacggtatttacttttctggcaacacctatttgtggcgcggagaaaggcgggacaccgccaaccttttcccgcaaaccagccttacccttcacatgtggcccgacaccgaaggaacgttcaacgtggaatgcttgactaccgaccattacaccggaggcatgaagcagaagtacaccgtgaaccaatgtcggcggcagtcggaggactcgactttttacctgggggaacgcacgtactacatcgcggccgtggaagtggaatgggattactctccacaacgcgagtgggagaaggagcttcatcacctgcaggaacagaatgtgtccaacgcattcttggacaaaggcgagttctacattgggtccaagtacaagaaagtggtctaccggcagtacaccgactcaactttcagagtgcctgtggagcggaaggctgaagaagaacatcttggcatcctgggaccgcaactccacgcagatgtgggtgacaaagtgaagatcatcttcaagaacatggcaaccagaccgtacagcatccacgcacatggcgtgcagactgagagctccactgtcactcctaccctcccgggcgagactctcacctacgtgtggaagatcccagaacgctcgggagccggtaccgaggacagcgcatgtatcccttgggcatactacagcaccgtggaccaagtgaaagacctctactccggtctgatcggacccctgatagtctgccggaggccgtacctgaaagtctttaacccacgccggaagttggaatttgctctgctgttccttgtgttcgacgaaaatgaatcatggtacctcgatgataacattaagacctactccgatcacccagagaaggtcaacaaagatgacgaggagttcatcgaatcaaacaaaatgcacgcgatcaacggacggatgttcggcaacctgcaaggcctgaccatgcacgtgggagacgaagtcaattggtacctgatgggcatgggtaatgaaattgacctgcacaccgtgcatttccatggccattcttttcagtacaaacaccgaggcgtctattcgagcgatgtgtttgacatcttcccgggcacttaccaaaccctggaaatgttcccgcgcactcctggcatttggctgctgcactgccacgtgactgatcacatccatgccggaatggaaactacttacactgtgctccagaacgaagatactaaaagcgga

SEQ ID NO: 8524 - DNA, 3195 bp, synthetic construct
  misc_feature 1..3195: note = source = /note="Description of Artificial Sequence: Synthetic coding sequence"
  source 1..3195: mol_type = other DNA
atgaagatcctgatcctgggaatcttcctgttcttatgcagtacacccgcttgggccaaggaaaaacattactatatcggaatcatcgagaccacttgggattacgcaagtgaccatggtgagaagaagcttatcagcgtggacactgaacattctaatatatacctgcagaacgggcccgaccgaatcgggagactctacaagaaagccctgtacctgcagtatacggatgagacatttaggaccaccattgagaagccagtttggctggggtttctgggtcccatcattaaggccgaaactggggataaggtgtatgtccatctgaagaacctcgccagtaggccctacacattccactctcacggaataacatattacaaagaacacgagggagcaatttaccccgacaataccaccgacttccagcgagcagatgataaggtttaccctggcgaacagtatacctatatgctgctagcaacagaagagcagagtcctggggaaggggacggtaactgcgtcacccggatctaccactctcatattgatgctcccaaggacattgctagtggcctcatcggcccactgataatttgcaagaaggacagcctagataaagagaaggagaagcatatcgacagagaattcgtagtgatgttcagtgtggtcgacgagaacttctcctggtacctggaagataacatcaaaacctattgctccgaacccgaaaaggtcgacaaggacaatgaggatttccaggagtctaatcgaatgtattcagtcaacggctacacctttggcagtctacctggccttagtatgtgcgctgaagatagggttaagtggtacctgtttggaatggggaatgaggtggacgtgcatgccgccttcttccatggccaagcgttgaccaacaagaattataggatcgacacaataaatttgtttcccgctacactgttcgatgcctacatggtcgcgcagaatcccggcgaatggatgctgagctgtcagaacttgaaccacctgaaagccggattgcaggccttctttcaggtccaggaatgcaacaagtcctcatcaaaggacaacataagaggtaaacatgttaggcattattacatcgcagccgaagagattatctggaattacgccccttctggcatcgacatttttaccaaggagaatctgacagcacccggctccgacagcgccgttttttttgaacagggtaccaccagaatcggaggctcctataagaaacttgtgtaccgggagtacacagatgctagtttcaccaaccgcaaggaaaggggtccggaggaggagcaccttgggattctgggccctgtgatatgggctgaggtaggagataccattagggttactttccataataaaggggcttacccgctgtctattgaacccatcggagtgcggttcaataagaataacgaagggacctactattcccctaactacaacccacaatcgagatctgtgcctccgagtgcgtcccacgttgctccgacagaaacttttacgtacgagtggaccgtcccgaaagaggtggggcctacgaacgcggacccagtctgcttggccaagatgtactactccgccgtagaccccaccaaggatattttcacagggttaatcgggccgatgaagatctgcaaaaagggtagtctgcacgctaatgggcgccagaaagatgttgataaggagttctatcttttccccacggtgttcgacgaaaatgagtctctgctgctggaagataatattaggatgtttactacggcccccgatcaggtggataaggaagatgaagattttcaggagagtaataagatgcactctatgaatggatttatgtatggaaatcagccagggcttaccatgtgtaaaggcgacagcgtcgtgtggtatctcttctctgccggaaacgaggcagacgtgcatggtatctattttagtggcaacacatacctttggcgtggagaaaggcgggataccgccaatctcttcccccaaacatctttgacactgcacatgtggcccgatactgaaggaacattcaacgttgaatgtctgaccaccgaccactataccggcgggatgaagcagaaatataccgttaatcagtgccgtcgccagtcagaagattccaccttctatttaggtgaaaggacctactatattgcagccgtggaggtggaatgggactacagccctcaaagggagtgggaaaaggaactgcaccatctacaagaacagaacgttagcaatgctttcctcgataaaggcgagttctacattggctctaagtacaagaaggttgtgtatcgccagtacaccgattccacatttagagtccctgtggaacggaaggctgaggaggagcacctgggcatcctggggccccaactacatgccgacgttggggataaggttaaaatcatatttaaaaacatggccaccagaccctacagcatccacgcccacggagttcagactgagagcagtaccgtcacccctactttgccgggagaaacccttacatatgtgtggaaaattcccgaaaggtctggagccgggaccgaggattctgcctgcattccttgggcctactacagcacagtggaccaagtgaaagacctgtactccggtctaatcggccccctaatcgtgtgcagacgcccttatcttaaagttttcaacccgaggcgaaaattggaattcgcactgctgtttttggtgttcgatgaaaatgagagctggtacctggacgacaacattaagacgtactccgaccatcccgaaaaggtgaataaagacgatgaagagttcatcgagtcgaataaaatgcatgccatcaacgggcggatgtttggtaacctacaggggctgaccatgcacgtgggcgatgaagtgaactggtacctcatgggcatggggaacgagattgatcttcatacagtgcactttcacggacattcattccagtataagcatcgtggcgtttattctagcgatgtctttgacatcttccccggaacttaccagactttggagatgtttcccagaaccccaggaatctggttgctgcactgtcatgttactgaccacatacacgccggaatggaaaccacgtacactgtgctccaaaacgaggacaccaaaagcggg

SEQ ID NO: 8525 - DNA, 3195 bp, synthetic construct
  misc_feature 1..3195: note = source = /note="Description of Artificial Sequence: Synthetic coding sequence"
  source 1..3195: mol_type = other DNA
atgaagattcttattcttggaatttttcttttcttgtgctctaccccagcctgggctaaggagaagcactattacattgggattatcgaaaccacatgggattacgcctcagatcacggagagaaaaaacttatttccgttgacacggagcatagtaacatctatctccagaatgggccggaccgcattggtcgcttgtacaagaaggctctgtatcttcagtataccgacgagacctttcgcacaacaattgaaaagccagtgtggcttggctttctcgggcccatcataaaagctgaaaccggggacaaagtgtacgtccacttgaagaacctggcttctcgtccatacacctttcattcacacggcatcacctactataaagaacacgaaggggctatctatcccgacaacactaccgatttccagcgcgcagacgataaggtttaccctggggagcagtacacctatatgcttctggccacagaggaacagagtcccggtgaaggagacgggaactgtgtcactcgcatttatcactcccatattgatgcccctaaggatattgcaagcggcttgatcgggcctctgattatctgcaaaaaggactcgctggataaggaaaaagagaaacacatcgaccgcgaatttgtggtcatgttctctgtagtcgacgagaatttctcatggtacctggaggataatatcaagacctactgttcggaaccagagaaggtcgacaaggacaacgaagacttccaagaatccaaccggatgtattccgtgaacggctatacattcggctcccttccgggcctgagtatgtgtgctgaagatcgggtaaaatggtacctctttggcatggggaacgaggttgatgttcatgcagctttctttcacggtcaagccctgactaataaaaattaccggattgatacaattaatctgttccctgcaactctgttcgacgcctatatggttgctcagaacccaggtgagtggatgttgtcctgccagaacttaaaccaccttaaagcaggcttgcaggccttttttcaggttcaggagtgtaacaaatcaagcagtaaggataacattcgcgggaaacatgtgaggcattactacattgcagcagaagagatcatatggaactacgctccatccggaatcgacatcttcactaaggagaacctgacggcaccgggctctgatagcgccgtgtttttcgagcaaggcacaacacgaatcgggggaagttataagaaactggtgtaccgagagtacacagatgcgagctttaccaatcgaaaagaaaggggccccgaggaggagcacctcggtattctgggcccggtgatctgggccgaagtgggagataccattagggttacctttcataacaaaggagcatacccactgtccatcgagcccatcggagtgagatttaacaagaacaacgagggcacttactacagtcccaattacaacccccaaagccgctcagtgccacccagtgccagccacgtggcaccaacagagacattcacgtatgagtggacggtgcccaaggaggtcggtcctactaatgcagatcccgtatgcttggcgaaaatgtactactccgctgtcgacccaacaaaggatatctttaccggcctcattgggcccatgaagatctgcaagaagggttctctacacgcaaatggccggcagaaagacgtcgacaaggaattctacttattccccactgtgtttgatgaaaacgagtccctgctgttagaggataatatcaggatgtttaccacagcacctgaccaggttgataaggaggatgaggactttcaggagagcaacaagatgcatagtatgaacggttttatgtacgggaatcaacccggccttacgatgtgcaaaggtgatagcgtcgtctggtacctgttttctgccggcaacgaggcggacgttcacggcatatacttctcaggaaacacctatctttggcgaggggaacgcagggatactgcaaacctgttccctcagacaagcctgaccctgcacatgtggcccgacaccgaggggacttttaacgtcgaatgtcttacgacagatcattatactggtggaatgaaacagaagtacaccgtaaatcagtgcagacgacaatcagaggactccacattttaccttggggagcgaacgtattacatcgcagcagttgaggtggagtgggactacagtccacagcgcgagtgggaaaaagagttgcaccatctgcaggagcagaacgtgagtaacgctttccttgacaaaggagaattttacattgggtctaagtataaaaaagtggtctatagacagtatactgactctactttccgcgttcctgttgagcgtaaagcagaggaagaacacctcggaatcctgggaccccagctgcatgctgacgttggagacaaagtgaaaatcatatttaaaaatatggctacaaggccttactcgatccatgcccacggggttcagaccgaatcgtccacggtgacaccgacgctgcccggggaaaccctgacctatgtatggaagattccggagcgcagcggggcaggcactgaagatagcgcatgtataccctgggcgtactacagcacagtggaccaagttaaggatctttactccggcttgattgggccattgattgtctgccgcaggccgtacctcaaggtctttaatccccgacggaaactggagtttgcccttttgtttttagtgtttgatgaaaatgagtcgtggtatttagatgataacattaagacatatagcgaccatcctgagaaggtgaacaaggacgacgaggagttcatcgagtccaacaagatgcatgctatcaatggccggatgttcggtaacttacagggactcacgatgcacgttggcgacgaggtaaattggtacctgatggggatgggcaacgagatcgatctgcacaccgtccacttccacggtcattcatttcagtacaagcataggggggtttacagctccgacgttttcgatatatttcctggaacctatcagacccttgaaatgtttcctaggacccctggaatttggttgctccactgccatgtgaccgatcacatccatgccggcatggaaaccacatacacagtgttacagaatgaagatacaaagagcggg

SEQ ID NO: 8526 - DNA, 3195 bp, synthetic construct
  misc_feature 1..3195: note = source = /note="Description of Artificial Sequence: Synthetic coding sequence"
  source 1..3195: mol_type = other DNA
atgaagattctgatcctgggcatatttctgtttctgtgctccacccctgcgtgggcgaaagagaagcactattacattggtatcatcgagactacgtgggattacgcctccgatcatggagaaaagaaacttatttccgtggacaccgaacactcgaacatctacttgcagaacggacctgacagaatcgggagactgtataagaaggccctgtacctgcaatacacggacgaaactttccgcaccactatcgaaaaaccggtttggctcggattcttggggccgatcatcaaggccgaaactggtgacaaggtctacgtgcacctgaagaaccttgcttcaagaccatacactttccactcccacggaatcacctattacaaagaacatgagggcgccatctaccccgacaacacgacggatttccagagagctgatgacaaagtgtaccccggagagcaatacacttacatgctcctcgcaactgaagagcagtcaccaggagaaggcgacggtaactgtgtcaccaggatctaccactcacatatcgacgctccaaaagacatcgcttccggactgatcggtccacttatcatttgtaagaaggatagcctggacaaggaaaaagagaaacatatcgatcgcgagttcgtggtcatgttctccgtcgtggatgagaacttctcgtggtacctggaggacaacatcaaaacgtactgctccgagccggaaaaggtggacaaggataacgaagattttcaggagtccaaccgaatgtactccgtcaacggatacactttcgggagcctgcccggactgtccatgtgtgctgaggaccgggtcaaatggtaccttttcggcatgggaaacgaggtggacgttcatgcagcgttcttccacgggcaggctctgactaataagaactaccgcatcgacaccataaacctgttccctgcgactttgttcgacgcgtacatggtcgcacagaaccctggagagtggatgctctcctgccagaacctgaaccacctgaaagccggcctgcaggcgtttttccaggtgcaggagtgcaacaaatcatcgtccaaggacaacattagaggcaagcacgtgcggcattactatatcgccgccgaagagatcatttggaattacgctccttccggaattgatatcttcacgaaggaaaatctcaccgcgccgggatccgattcggccgtgttcttcgagcagggaaccacccggatcggtggtagctacaaaaagctggtctaccgcgaatacactgacgcctcgttcaccaaccggaaggagagaggaccggaggaggaacacctcggaatcctgggtccggtaatctgggccgaggtcggcgacaccatcagagttaccttccacaacaagggcgcctaccctctgagcatcgagccgattggagtgaggttcaacaagaataacgaaggcacttactactccccaaattacaacccgcaatcccggtcggtgccgccgagcgcctcccacgtcgcaccaactgagactttcacttatgagtggactgtgccaaaggaggtcggaccaactaacgcggaccctgtgtgcctggcaaagatgtactactcagctgtggacccgaccaaggatatcttcactggcctcatcggaccgatgaagatttgcaaaaagggatcgctgcacgccaacggtcggcaaaaggacgtcgataaagagttttacttgttccccaccgtgttcgatgagaacgaatccctccttctggaagataacattcggatgtttactaccgctcctgaccaggtggataaggaggatgaggattttcaagagagcaacaaaatgcactcgatgaacggattcatgtacggaaaccagccgggattgactatgtgcaagggggactcagtggtgtggtacctgttctccgccgggaacgaagcggatgtccacggcatctacttcagtggcaacacctacctctggcggggagagcggagagacacggcgaatctgttcccgcagacttccctcaccttgcacatgtggccggacaccgaggggacgttcaatgtggagtgtctcaccactgatcactacactggcggtatgaagcagaagtacaccgtgaatcaatgccggagacaaagcgaggattccactttctacctgggggagcgcacctactacatcgccgctgtcgaggtggagtgggactacagcccgcagagggaatgggagaaggaattgcaccacctccaagagcagaacgtgagcaacgccttcctggacaaaggagaattctacattggttcgaagtacaaaaaggtggtctaccggcaatacactgattcgaccttccgggtgcctgtcgagcgcaaggcagaagaagagcatctcggcatcctcggcccgcaactgcacgcggacgtgggggataaagtgaaaatcatctttaagaacatggcaacccggccttacagcatccacgcgcacggagtccaaactgaatccagcactgtgaccccaaccctgcccggggaaacgctcacgtacgtgtggaagatcccggagcgcagcggagccgggacggaggactctgcgtgcattccgtgggcttactacagcacggtggatcaggtgaaggatctgtactccggacttatcggacccctcatcgtgtgccgcagaccttatctgaaggtgtttaatccgcgccgaaagttggagttcgccctgctgtttctcgtgttcgacgaaaacgagtcctggtacctggatgacaacatcaagacttactcggatcacccagaaaaggtgaataaagatgacgaagaattcatcgaatccaataagatgcacgctatcaacggacgcatgttcgggaacctgcagggcctcaccatgcacgtgggggacgaagtgaactggtaccttatggggatggggaacgaaattgacctgcataccgtccatttccacggacacagcttccaatacaagcatcgcggagtgtacagctcggacgtctttgacattttcccaggtacctaccagacccttgaaatgttccctcgtaccccgggaatctggctgctccattgccacgtcaccgatcatatccatgcaggcatggagactacctacactgtgcttcagaacgaggacaccaagagcggc

SEQ ID NO: 8527 - DNA, 3195 bp, synthetic construct
  misc_feature 1..3195: note = source = /note="Description of Artificial Sequence: Synthetic coding sequence"
  source 1..3195: mol_type = other DNA
atgaagatactgatcttaggtatattcctttttctgtgctcaacccccgcctgggctaaggaaaaacactactacataggcattattgagaccacctgggattatgcaagtgatcatggggaaaaaaagttgatttcagtggacactgaacactctaatatctacctgcagaatggtcccgaccgtatcggaaggctgtataagaaagctctgtatctccagtataccgatgagacctttcgcacaacgatcgaaaagccagtctggttaggctttttgggtcccataattaaggctgaaactggggataaagtgtatgtacatttgaagaatctcgcttcacgaccctacacctttcacagtcacggtatcacctattataaggaacatgaaggagccatttatcccgacaatacgacagatttccagcgtgcggatgataaggtgtaccctggggagcagtacacatacatgttgctagctaccgaggagcagagcccaggagagggtgacgggaattgtgtaaccaggatatatcatagtcacatcgacgcaccgaaagacatagcgtccggactgattgggcccctgatcatatgtaaaaaagattcgcttgacaaggagaaggaaaagcacattgacagagaattcgtggtgatgttctctgttgtcgatgaaaatttcagttggtaccttgaagacaacatcaagacctactgcagtgaacctgaaaaagtcgacaaggacaatgaagacttccaagagtctaaccgaatgtatagcgttaatggttacacatttgggtccctacccggtctgtctatgtgcgccgaagacagggtcaaatggtatctgttcggtatggggaatgaagttgatgtacatgccgccttcttccacggccaagctctcactaacaagaactatagaatcgataccattaacctgtttccggccacactgttcgatgcttatatggtggctcagaaccccggcgaatggatgctgtcttgccagaatctaaaccatctgaaggcaggccttcaggcattcttccaggtgcaggagtgtaataaatcctcttccaaagacaacatcagaggaaaacatgtgcgccattattacatcgcagcagaagaaataatttggaattatgcaccttccggcattgatattttcaccaaggaaaatctgaccgcgccaggctctgacagcgctgtgtttttcgaacagggaacgactcgaattggcggatcctataaaaagctggtctaccgagagtacaccgacgcaagcttcaccaaccgcaaagagagaggtcccgaagaggagcacctcgggattctgggccccgtgatttgggccgaggtgggagacacaatcagggtaactttccacaataagggcgcctatcccctgagtatagagccgataggagtcagattcaataagaacaacgaaggaacttattattcccctaactataatccccaatctcggtccgtgcctccaagcgcgagtcatgttgctcccactgaaacgttcacctacgaatggacagtgcctaaggaagttgggcccacgaacgccgatccagtctgccttgctaagatgtactatagcgccgtggaccctaccaaggacatttttaccggtctcataggccccatgaagatttgcaaaaaggggagtctccacgctaacgggagacagaaagatgttgacaaagaattttatctgtttcccacagtgttcgacgaaaacgagagcttgctcctggaggataatataaggatgttcacaactgcaccggaccaggtggataaggaagatgaagattttcaggagagcaacaagatgcactctatgaatgggttcatgtacggcaatcagccaggactgactatgtgcaagggcgactcagtggtttggtatttattctctgctgggaatgaggccgacgtacacggcatctattttagtgggaatacctatttgtggcgcggggaacgtcgtgacactgcaaatctttttcctcagacaagccttacactgcatatgtggccagatactgagggaacattcaatgtggagtgcctgactaccgatcattacaccggggggatgaagcagaagtatacggtgaaccagtgccgacgacagagtgaagactccacattttaccttggcgaaagaacgtactatatcgcagccgtcgaagtggagtgggattacagcccccagcgagaatgggagaaggaactgcaccacttacaggagcaaaacgtgtcgaatgcatttttagacaagggggaattctatattgggtctaagtataaaaaggtcgtgtatcggcagtataccgactctacttttagagtacccgtcgagaggaaagcggaggaggagcatctgggtattctggggccacagttacacgcagatgtgggcgacaaagtgaagatcatctttaaaaacatggcaactcgaccctatagcatccatgcacacggcgtgcagacagaatccagtacagtgactccaactctgcccggggagaccctgacctacgtttggaagattccagagcgcagcggcgccggtactgaagactctgcatgtatcccgtgggcatactactcgaccgtggaccaggttaaggatctatattctgggctgattgggccgctaattgtatgcaggcgaccctacctgaaagtgtttaacccacgacgaaagcttgaatttgccctgctgtttttagttttcgatgagaacgaatcttggtacctggacgataatattaaaacctactctgatcatcctgagaaagtgaacaaagacgatgaagaattcattgaaagcaataaaatgcacgctataaatggaagaatgtttgggaatttacaaggactgactatgcatgtgggggacgaagtcaattggtatctgatgggaatggggaatgaaatagacctgcatacagtccattttcatggacactcgttccagtataagcatcgaggggtctattctagcgacgtatttgatatcttccccggcacctaccagacgttagaaatgttcccccgaacaccagggatctggctgctgcattgccatgttacagaccacatacatgcgggcatggaaacaacttacactgtgcttcagaatgaggatactaagtctggc

SEQ ID NO: 8528 - DNA, 3195 bp, synthetic construct
  misc_feature 1..3195: note = source = /note="Description of Artificial Sequence: Synthetic coding sequence"
  source 1..3195: mol_type = other DNA
atgaagatccttatccttggcatatttctgttcctctgttccactccagcgtgggccaaggaaaaacattactatattggaattatcgaaactacttgggactacgcttcggaccacggtgagaaaaagctgatttcggtggatactgaacatagcaacatctacctgcaaaacggtccagatcggattggacgactgtacaagaaagccctttaccttcagtacaccgatgaaacctttcgcaccactattgagaagcctgtgtggctcggctttctgggaccaatcatcaaggcagagactggagataaagtgtacgtgcatctgaaaaaccttgcgagccggccttacacgtttcattcgcatggaattacttactacaaggaacatgaaggtgccatctacccagataataccaccgattttcaacgcgctgatgacaaggtgtatccaggagagcaatacacttatatgcttttggcaaccgaagaacaatcccctggagaaggtgatgggaactgtgtcacccgtatataccattcacatattgacgcccctaaggacattgcctcgggactgatcggtccactcattatctgtaagaaagatagcctggacaaggagaaggaaaagcacatcgatcgcgaattcgtggtcatgttttcggttgttgacgagaacttttcctggtatctggaagataacattaagacgtactgtagcgaaccagagaaagtcgataaagataatgaggactttcaagagtcgaacagaatgtactctgtgaacggttacacctttggttccctgcccggtctttccatgtgtgcagaggatagggtgaaatggtatctgttcgggatgggaaacgaggtcgacgtgcatgcagcattcttccatggacaggcacttactaataagaattatcggatagacactattaacctctttcccgcgacgctgtttgatgcctacatggtggcacaaaaccctggggagtggatgctttcgtgccaaaacttgaatcacctgaaagccggacttcaggcatttttccaggtccaggaatgtaacaagtcatcctcgaaggataacattcgaggaaaacacgtgcgacactactatatcgcagcagaagaaatcatatggaactacgcaccatccggcatcgatatctttaccaaggaaaatcttactgcacctggctcagattcggcagtcttttttgaacagggaaccaccaggataggtggatcatacaagaagctcgtctaccgcgaatacaccgatgcatcttttaccaacaggaaagagcgaggcccagaggaggagcatctgggtattctcggtcccgtgatttgggcagaagtgggtgataccattcgcgtcacttttcataacaagggcgcatacccactgtcgattgagccgattggtgtgcggttcaataagaacaacgaggggacttactactcccccaactacaatcctcaatcaaggtccgttccaccatctgcgtcgcatgtcgcaccaaccgaaaccttcacctacgaatggacggtgcccaaggaagtgggtcccacgaatgcagatcccgtgtgtttggcaaaaatgtactactcagcggtggatcctaccaaggatatcttcaccggcctgattggaccaatgaagatctgcaagaaaggttcacttcacgccaacggtaggcagaaggacgtggataaggagttttacctgtttcctactgtgtttgacgaaaacgaaagccttctgctcgaggataacattagaatgtttacgacggcaccagatcaagtcgataaggaggacgaggacttccaagaatccaacaagatgcacagcatgaacggttttatgtacggaaatcagcctggtcttaccatgtgtaaaggggactccgtggtttggtacttgttttccgcaggaaacgaagcagatgtgcacgggatctacttctcgggtaatacttacctctggcggggcgagcgacgtgatacggccaaccttttcccccaaacctcgcttaccctccacatgtggccagacaccgagggaacctttaacgtcgagtgtctgaccaccgatcattacaccgggggaatgaagcaaaagtacactgtgaaccagtgtcgccgccaaagcgaagattcaactttttacctgggagagagaacctactacatcgctgcagtcgaagtggagtgggattactcgcctcagcgagaatgggagaaggaacttcaccatcttcaagagcagaatgtttccaatgcttttcttgataagggggaattctacataggatcgaagtacaaaaaggtggtctacagacagtataccgatagcacttttagagtccctgtcgaaagaaaggcagaggaagaacaccttggtattcttggaccacaactgcacgcagacgtgggcgataaggtgaagatcatctttaagaacatggccactcgcccctacagcattcatgcacatggtgttcaaactgaatcctcgactgttactcccaccctcccaggtgaaaccctgacctatgtctggaagatcccggaaagatcaggggccggaactgaggactcggcatgtatcccgtgggcgtactacagcacggtggaccaggtgaaggatctttactcaggactcatcggccccctgatagtctgtaggcggccttatctcaaggtgtttaacccccggaggaaattggaattcgcgctcctgtttcttgtttttgatgaaaatgaatcctggtaccttgacgacaacatcaaaacttactccgatcatccggagaaagtgaacaaggacgacgaggagtttatcgaatcgaataagatgcacgcaataaacggacgaatgttcggtaacctccaaggacttaccatgcacgtgggcgatgaagtgaattggtacctgatgggaatgggtaatgagattgatcttcacaccgtccactttcatggacactcctttcagtacaaacaccgaggtgtgtactcgtccgatgtgtttgacattttcccggggacttaccaaaccctggagatgtttccacggacccccggaatttggcttctccactgtcatgtcaccgatcacattcacgcgggtatggaaaccacctacaccgtgctccaaaacgaggacactaagtcagga

SEQ ID NO: 8529 - DNA, 3195 bp, synthetic construct
  misc_feature 1..3195: note = source = /note="Description of Artificial Sequence: Synthetic coding sequence"
  source 1..3195: mol_type = other DNA
atgaaaatattaatattaggtatatttttatttctatgttcgacgccggcgtgggcgaaagaaaaacattattatataggtataatagaaacgacgtgggattatgcgtcggatcatggtgaaaaaaaactaatatcggttgatacggaacattcgaatatatatttacaaaatggtccggatcgaataggtcgactatataaaaaagcgttatatttacaatatacggatgaaacgtttcgaacgacgatagaaaaaccggtatggctaggttttttaggtccgataataaaagcggaaacgggtgataaagtatatgtacatttaaaaaatctagcgtcgcgtccgtatacgtttcattcgcatggtataacgtattataaagaacatgaaggtgcgatatatccggataatacgacggattttcaacgagcggatgataaagtttatccgggtgaacaatatacgtatatgttactagcgacggaagaacaatcgccgggtgaaggtgatggtaattgtgttacgcgtatatatcattcgcatatagatgcgccgaaagatatagcgtcgggtttaataggtccgttaataatatgtaaaaaagattcgttagataaagaaaaagaaaaacatatagatcgtgaatttgttgttatgttttcggtagtagatgaaaatttttcgtggtatttagaagataatataaaaacgtattgttcggaaccggaaaaagtagataaagataatgaagattttcaagaatcgaatcgtatgtattcggtaaatggttatacgtttggttcgttaccgggtctatcgatgtgtgcggaagatcgtgttaaatggtatctatttggtatgggtaatgaagtagatgttcatgcggcgttttttcatggtcaagcgctaacgaataaaaattatcgaatagatacgataaatttatttccggcgacgttatttgatgcgtatatggtagcgcaaaatccgggtgaatggatgctatcgtgtcaaaatctaaatcatttaaaagcgggtctacaagcgttttttcaagttcaagaatgtaataaatcgtcgtcgaaagataatatacgaggtaaacatgtacgacattattatatagcggcggaagaaataatatggaattatgcgccgtcgggtatagatatatttacgaaagaaaatttaacggcgccgggttcggattcggcggttttttttgaacaaggtacgacgcgaataggtggttcgtataaaaaattagtttatcgtgaatatacggatgcgtcgtttacgaatcgaaaagaacgaggtccggaagaagaacatctaggtatattaggtccggttatatgggcggaagtaggtgatacgatacgtgttacgtttcataataaaggtgcgtatccgttatcgatagaaccgataggtgtacgttttaataaaaataatgaaggtacgtattattcgccgaattataatccgcaatcgcgttcggttccgccgtcggcgtcgcatgtagcgccgacggaaacgtttacgtatgaatggacggtaccgaaagaagtaggtccgacgaatgcggatccggtatgtctagcgaaaatgtattattcggcggtagatccgacgaaagatatatttacgggtctaataggtccgatgaaaatatgtaaaaaaggttcgctacatgcgaatggtcgtcaaaaagatgttgataaagaattttatctatttccgacggtatttgatgaaaatgaatcgttattattagaagataatatacgaatgtttacgacggcgccggatcaagtagataaagaagatgaagattttcaagaatcgaataaaatgcattcgatgaatggttttatgtatggtaatcaaccgggtttaacgatgtgtaaaggtgattcggtagtttggtatttattttcggcgggtaatgaagcggatgtacatggtatatatttttcgggtaatacgtatctatggcgtggtgaacgacgtgatacggcgaatctatttccgcaaacgtcgctaacgttacatatgtggccggatacggaaggtacgtttaatgtagaatgtctaacgacggatcattatacgggtggtatgaaacaaaaatatacggttaatcaatgtcgacgtcaatcggaagattcgacgttttatctaggtgaacgaacgtattatatagcggcggttgaagttgaatgggattattcgccgcaacgtgaatgggaaaaagaattacatcatctacaagaacaaaatgtatcgaatgcgtttttagataaaggtgaattttatataggttcgaaatataaaaaagtagtatatcgtcaatatacggattcgacgtttcgagtaccggtagaacgaaaagcggaagaagaacatttaggtatattaggtccgcaactacatgcggatgtaggtgataaagtaaaaataatatttaaaaatatggcgacgcgaccgtattcgatacatgcgcatggtgtacaaacggaatcgtcgacggtaacgccgacgttaccgggtgaaacgttaacgtatgtatggaaaataccggaacgatcgggtgcgggtacggaagattcggcgtgtataccgtgggcgtattattcgacggttgatcaagtaaaagatttatattcgggtctaataggtccgctaatagtttgtcgtcgaccgtatttaaaagtatttaatccgcgtcgaaaattagaatttgcgttattatttctagtatttgatgaaaatgaatcgtggtatttagatgataatataaaaacgtattcggatcatccggaaaaagtaaataaagatgatgaagaatttatagaatcgaataaaatgcatgcgataaatggtcgtatgtttggtaatctacaaggtttaacgatgcatgttggtgatgaagttaattggtatttaatgggtatgggtaatgaaatagatttacatacggtacattttcatggtcattcgtttcaatataaacatcgtggtgtatattcgtcggatgtatttgatatatttccgggtacgtatcaaacgctagaaatgtttccgcgaacgccgggtatatggttactacattgtcatgtaacggatcatatacatgcgggtatggaaacgacgtatacggtactacaaaatgaagatacgaaatcgggt

SEQ ID NO: 8530 - DNA, 3195 bp, synthetic construct
  misc_feature 1..3195: note = source = /note="Description of Artificial Sequence: Synthetic coding sequence"
  source 1..3195: mol_type = other DNA
atgaaaatcttgatattgggtatcttcttattcctttgtagcacgcctgcctgggctaaggaaaagcattactacatcgggattattgagaccacctgggactacgcttccgaccatggcgagaaaaagttgatctccgttgacacggaacactccaacatctacttgcagaacggccccgaccgaatcggtcgattgtacaaaaaggctctctacctccaatacaccgatgaaaccttccggaccacaatcgagaaacctgtgtggctaggcttccttggtcctattatcaaggctgagaccggtgacaaggtgtacgtgcacctgaagaacctagcttcacgtccttacaccttccactcccatggcattacctactacaaagagcacgagggcgctatttaccccgacaatacgaccgatttccagcgtgcagatgataaggtctatccaggagagcaatacacctacatgttgctggctactgaagaacagtcgccgggtgagggtgacggtaattgtgtgacccgaatctaccacagtcacattgatgcacccaaggatatcgcctctggactcatcggtcctttgattatttgtaagaaggatagcttggacaaggagaaggagaagcacatcgatcgcgagttcgtcgttatgttctctgttgttgatgagaatttcagttggtatctggaggacaacatcaaaacatattgctccgagcccgagaaggtggacaaggacaatgaggacttccaggagagcaacaggatgtattcagtgaacggctacaccttcggctctctgcccggtctatccatgtgtgctgaagatcgcgtcaaatggtaccttttcggtatgggaaacgaggtggatgtccatgcggccttcttccatggccaggcgttgaccaataagaactaccgcattgatactatcaacttgttccctgctacgttgttcgatgcgtacatggtcgcacaaaatcccggcgagtggatgctgtcgtgtcagaatctcaaccatctcaaggctggtctgcaagcgttcttccaggtgcaggagtgcaacaagtccagctccaaggacaatatccgtggcaagcacgtgcggcattactacatcgcggctgaagagataatctggaactacgctcccagtggtatcgatatatttaccaaagagaacttgactgcacccggctccgattccgccgtgttctttgagcagggcacgactcgtatcggaggctcctacaagaagctcgtgtaccgtgagtacaccgatgcttcgttcaccaacagaaaggaacgcggacctgaggaagagcacttgggcatccttggtcccgtcatatgggccgaagttggcgacaccatacgcgttaccttccacaacaaaggcgcctaccctctttctatcgagcctatcggcgtccgcttcaacaagaataatgaggggacctattattcgccaaactacaatcctcagtctagaagcgttcctccttccgcctcccatgtagcgcctaccgagactttcacctatgagtggacggtaccgaaagaggtgggccccaccaacgccgaccccgtctgcctggccaagatgtactactcggctgtggaccccacgaaggacatattcaccggcctgatcggacccatgaagatctgtaaaaagggaagtttgcacgcgaacggtcggcagaaggatgtcgacaaggaattctacctgtttcctaccgtttttgatgaaaatgagagcttgctacttgaagacaacatccgcatgttcactaccgcccctgatcaagtggataaggaggacgaggacttccaggagtccaacaagatgcatagtatgaacggcttcatgtacggaaaccaacccggtcttactatgtgtaagggagacagcgtggtatggtatttgttttcggccggtaacgaggcggatgttcacggcatttatttctcgggaaacacgtatctttggcgaggcgagaggcgagacacagctaacctttttcctcagacttcgctgacattacatatgtggcccgacaccgagggcacattcaatgtcgagtgcctgaccaccgaccattacactggcggcatgaagcagaagtatacagtgaaccagtgccgtcggcagagtgaggattcgaccttctatcttggagagcgaacctactacatcgcggccgtcgaggtcgagtgggactactcacctcagcgtgagtgggagaaagaactccaccacctccaggagcagaacgtgtcgaatgccttcctcgataagggcgagttctacattggaagtaagtacaaaaaagtcgtataccgtcagtacacggactccacgttcagggtccccgtcgagcgaaaggcggaggaggagcaccttggcattcttggaccccaactgcacgctgacgttggtgataaggtcaagatcattttcaaaaacatggccacgcgcccttactccatccacgcacacggagtgcagacagaatccagtaccgttacgccaactctgcccggtgagaccctcacctacgtatggaagatcccggaacggtctggtgctggcaccgaagactccgcgtgtattccgtgggcctactactccaccgtcgaccaggtgaaggacttgtatagcggtctcattggacctctgatcgtgtgcagacgcccctatttaaaggtttttaatccccgccgtaagcttgaattcgccctgttgttcttggttttcgatgaaaatgagagctggtacctggacgacaatatcaagacttactccgaccaccctgagaaggtcaacaaggacgacgaagagttcattgagtctaataagatgcacgccataaacggccgtatgttcggtaatctccagggcctgaccatgcacgttggagacgaagtcaattggtaccttatgggtatgggcaacgagatcgacctccataccgtccacttccacggccactcattccagtacaagcaccgcggtgtgtacagttctgacgtcttcgacatctttccgggtacgtatcagacccttgagatgttcccgaggacacctggtatctggttgctccattgccacgtcaccgatcatattcatgccggcatggaaacgacttataccgtgctccaaaatgaggataccaagtctggc

SEQ ID NO: 8531 - DNA, 3195 bp, synthetic construct
  misc_feature 1..3195: note = source = /note="Description of Artificial Sequence: Synthetic coding sequence"
  source 1..3195: mol_type = other DNA
atgaagatccttattctgggtattttcctgtttttgtgcagtacacctgcatgggcaaaggagaagcattactacatcggtatcattgagaccacctgggactacgccagtgatcacggtgagaagaagctgatttccgtggacactgaacacagcaacatctacctacagaatggtccggacagaattggtcggctgtacaagaaagccctatacttgcaatataccgatgaaactttccgtaccaccattgagaagccggtttggcttggcttccttggacccatcatcaaagccgagaccggcgataaggtgtacgttcacttgaagaacctggcctcacggccctacaccttccacagccacggcataacatattacaaggagcatgagggtgctatttaccccgataacaccacagatttccagcgcgccgatgataaggtgtatcccggcgagcagtacacctacatgcttctggctacagaggagcagagcccaggagagggcgatggcaattgcgttaccaggatctatcattctcatatcgacgccccgaaggatattgcttcgggtttgatcggacccctgatcatttgcaagaaagattcactcgataaggaaaaagagaagcacatcgatcgcgaatttgtcgtgatgtttagtgtggtcgatgaaaacttcagttggtatttggaagataacattaagacctactgctcggaacccgagaaggtcgataaagacaacgaggacttccaggagagtaatcgcatgtatagtgtcaacggatatacgttcggatctctgcccggactttccatgtgcgccgaggaccgtgtgaaatggtatttgttcggcatgggaaacgaagtggatgtccatgccgccttcttccacggccaggcactcacgaacaagaattatcgcatcgacaccataaacctctttcctgctacactttttgacgcttatatggtcgcacagaaccccggcgagtggatgttatcgtgccagaatctgaatcacctgaaggccggcttgcaggccttcttccaggtccaagaatgcaataagtctagttccaaggacaacatccgcggaaagcacgttcgccactattacatagccgctgaagagatcatatggaattacgcaccgtcaggaattgatatattcacgaaagaaaacctgactgccccaggaagcgatagcgccgtgttcttcgagcaaggaaccaccagaataggcggatcatacaagaagctcgtgtaccgggagtacacagatgcctccttcaccaaccgcaaggagagaggaccggaggaagagcacctcggcatcctgggaccggttatttgggccgaggtgggagatacgatcagagttacattccataacaagggtgcctacccattgtcaatcgagccgatcggcgtgcgctttaacaagaacaatgagggtacttattactccccgaactataatccacagtcacgaagtgtgccccccagtgcgagtcacgtcgcgccgaccgaaactttcacttatgaatggactgtgccgaaggaagtgggtcctactaacgccgatccggtgtgcctggccaaaatgtactactccgccgtggaccctacaaaggatatctttaccggtctgatcggcccgatgaagatctgcaaaaagggctccctgcatgctaacggacgacagaaggacgttgacaaggagttctacctcttcccaactgtgtttgacgagaatgagtctttgctgctggaggataacattcgaatgttcaccactgcccccgatcaggtagataaggaagacgaagactttcaggaaagcaataagatgcacagcatgaatggctttatgtatggaaatcagccaggtttgaccatgtgtaagggggactctgtggtctggtacttgttttccgccggaaacgaggccgatgtgcatggcatatatttctccggaaacacgtacttgtggcgcggtgagcgccgagatactgcgaatctgtttcctcagacgagccttaccctgcatatgtggccagacaccgaggggacgttcaacgtggaatgcctgacaacagatcactataccggaggtatgaaacagaaatacaccgtcaatcagtgccgtcgccagagcgaggactcaacattttacctgggagaaagaacgtattacattgccgcagtcgaggtggagtgggactatagcccccagcgggaatgggaaaaggagttacaccatctccaggaacagaacgtatccaatgccttcttagataagggagaattttacatcggtagcaaatacaagaaggtcgtataccgccaatatacggattctactttccgggttcccgtggaacgaaaggccgaggaggagcacttggggatcctgggtccccagctgcacgctgatgtcggtgacaaggtgaagattatcttcaaaaatatggcgacacggccctactccattcacgcccatggtgtccagactgagtcatcgaccgtcaccccgaccttgccgggagaaaccttgacatatgtttggaagattccagagcgctcaggcgccggcactgaagactcggcgtgcatcccatgggcgtactactcgacggttgaccaggtgaaggatttgtactcgggcctaatcggcccattgatagtttgccgtcgtccttacttgaaggtttttaacccacggcgcaagctggaattcgctctgttgtttctagtgttcgacgagaacgagtcctggtacctagatgacaacattaagacctactccgatcatccagaaaaagttaataaggacgatgaggagtttatagagagcaataagatgcatgccatcaacggacgtatgttcggcaatctccaaggtctcactatgcacgtgggcgatgaggtgaactggtacctgatgggcatggggaacgagattgatttacacacggtccacttccatggtcactcattccagtacaagcaccggggggtgtactcctcggacgtgtttgatatttttcctggtacctatcagaccctggagatgttcccacgaacacccggcatctggctgttacactgccatgtcaccgaccatatccacgccggcatggagactacctatacggttctacaaaacgaggatacaaaatcgggc

SEQ ID NO: 8532 - DNA, 3195 bp, synthetic construct
  misc_feature 1..3195: note = source = /note="Description of Artificial Sequence: Synthetic coding sequence"
  source 1..3195: mol_type = other DNA
atgaaaatactgatcctagggattttccttttcttatgctctacaccagcatgggctaaggaaaaacattactatatcggaataattgagaccacttgggattacgcttctgatcacggggagaaaaagcttatctctgtcgataccgaacactcaaatatctatttgcagaacggaccggatcgaatcggaagactttataaaaaggctctctaccttcaatatactgatgagacatttagaactacaatcgagaagccggtttggttaggattccttggacctataatcaaggctgagacaggagacaaggtctatgttcacctgaagaatttggcttccagaccttatacattccacagtcacgggatcacatattataaggaacatgagggtgctatttacccagataacacaacagacttccagcgtgctgacgacaaagtctatcctggggagcagtacacgtacatgcttcttgctaccgaggaacaatcacctggtgagggcgatgggaattgtgttactcgaatctaccattcccacatcgatgcaccgaaggatatagcgtccggtctcatagggccattgattatctgcaagaaagactcgttagataaggaaaaagagaaacatatagatagagaatttgttgttatgtttagtgttgttgatgaaaattttagctggtatctcgaagacaacattaagacttactgttccgaacctgagaaggtagacaaggataacgaggatttccaggagtctaaccgtatgtactcagttaacggatatacatttggctctcttccaggtctgtctatgtgcgccgaagatcgtgtaaagtggtaccttttcggaatgggtaatgaggtagacgttcacgctgcattctttcatggtcaggcacttactaataagaattataggattgatactataaatctgttccctgctacattattcgatgcttatatggtagcacaaaatccgggagaatggatgttgtcatgccaaaatttaaaccacctgaaggcaggtcttcaagcttttttccaagttcaagagtgtaataagtcctcgtctaaggacaacattcgaggtaagcatgtcaggcattattatatcgctgctgaggagatcatctggaattacgccccttctggtatcgacatattcaccaaggaaaaccttacggcacccggctcagactctgctgtgttcttcgagcagggtaccacacggattggtggttcttacaaaaagcttgtttaccgagagtacacagatgcttcctttacaaatagaaaagagagggggcccgaggaggagcatcttggtatcctgggccctgttatttgggctgaagtcggagacacgataagagtcacctttcataacaaaggtgcttatccattgtccattgagcctatcggtgtgcggttcaacaaaaacaacgagggcacttactattcaccaaactacaatccacagtctcgctcggttccaccatccgctagccacgttgctcccaccgaaacttttacctatgagtggacagtgcctaaagaggttggtccaacaaatgccgaccctgtatgcctggctaagatgtactactcggctgttgaccccactaaagacatttttacaggtcttataggtccaatgaaaatttgcaaaaagggatctttgcatgccaatggtagacagaaggatgttgacaaagagttttacctgttccctactgttttcgatgaaaacgaatcactattgttggaggataacattagaatgtttacgacagctccagaccaggttgataaggaagacgaagattttcaagagtcaaacaaaatgcattctatgaatggattcatgtacggcaaccagcctggtctgactatgtgcaagggagattcagttgtttggtacctcttctcagccggtaatgaagctgatgtccatggcatctacttctcagggaatacctacttgtggagaggagagaggcgtgatacagcaaacctttttccacagacaagtcttacgctccatatgtggcctgacacagaaggtactttcaatgttgagtgccttactacagatcattatactgggggtatgaaacagaaatatacggttaaccagtgtagacgacaaagtgaagatagtactttttatctgggggaacgtacatactacattgcagccgttgaagtggaatgggattactccccacagagggaatgggaaaaggaacttcaccatcttcaagagcaaaacgtgagcaatgcattccttgataaaggggaattctacattgggagcaagtacaaaaaagtcgtgtaccgccaatacacagatagcactttcagagtaccagtcgaaagaaaggcggaagaggagcatcttgggattcttggtccgcagttgcatgcagatgtgggagacaaggttaagatcatatttaagaacatggctactcgtccttattccattcatgcacacggagttcagactgagagctctacagttactcctacgctcccaggagagacattaacctacgtttggaagatcccggagcgctcgggagctgggactgaggattcggcctgcatcccatgggcctactactcaactgttgaccaagtaaaggacctatactcagggctaatcgggcctcttattgtttgccgacgtccttatttgaaggtctttaatccacgtcgtaagcttgaatttgcccttcttttcttggtcttcgatgagaatgaatcttggtatctagacgataacatcaaaacttattctgatcatcctgagaaggtaaataaggatgatgaagaatttatcgagtcaaataagatgcacgctatcaacggaagaatgttcggcaacctgcagggcttgaccatgcatgtaggtgatgaggttaattggtatctcatggggatgggtaatgagatcgatttacataccgttcattttcatggacactccttccagtataagcataggggggtttattcctcagatgttttcgatatattcccaggaacctaccagacactggaaatgttccctagaacacctggaatatggttgcttcactgtcatgtgacggatcacattcatgctggtatggaaactacttatacagtgttgcaaaacgaggatactaagtccgga

SEQ ID NO: 8533 - DNA, 3195 bp, synthetic construct
  misc_feature 1..3195: note = source = /note="Description of Artificial Sequence: Synthetic coding sequence"
  source 1..3195: mol_type = other DNA
atgaagattctcattctcggaatctttctgtttctctgcagcacccctgcgtgggcaaaagagaaacattactacattggtatcattgaaaccacctgggattacgcatcggatcatggagaaaagaagttgatttcagtggatactgagcattcaaatatctacctgcaaaacggaccagatagaatcggacgactttacaagaaagcgctgtacctgcaatacaccgatgagacttttagaaccaccattgaaaagcctgtatggttgggcttccttggaccgatcattaaagcagaaactggagataaagtgtacgtccatcttaagaaccttgccagccgcccttacacttttcatagtcacggaattacttactacaaggagcatgaaggggcgatttaccctgacaatactacggatttccaacgtgccgatgataaggtctaccccggcgaacaatatacctacatgctccttgcaactgaagagcagtcaccaggggaaggtgatggaaattgcgtgactcggatttaccattcgcatatcgatgcccctaaggatatcgcctccggactgattggtccactgatcatttgtaagaaggattcgctggacaaggagaaagaaaagcatattgaccgcgagttcgtcgtgatgttctcggtcgtggatgagaatttcagctggtacctggaagataacatcaagacctactgctcggagccagaaaaggtggataaggataacgaggatttccaagaaagcaaccgtatgtactccgtgaacggctacactttcggtagcctgcctggcctctcgatgtgcgcagaggatagggtgaagtggtacctgtttgggatgggaaatgaagtggacgtgcacgcagcgttttttcatggacaagccctgaccaataagaattaccggattgataccattaatctttttccagcgactctctttgacgcctacatggtcgcacagaacccgggagaatggatgctctcctgtcagaaccttaaccacctcaaggcaggactccaagcattctttcaggttcaagagtgcaataagtcatcatctaaggacaacatacgaggaaagcacgtccgccactactacattgcagcggaagaaatcatctggaattatgcaccaagcggaatcgacatctttactaaagaaaatctcactgcccccggtagcgactccgccgtcttttttgaacagggaaccactcggattggaggatcatacaagaaactggtgtacagagagtacactgatgcatcattcaccaatcgcaaggagcgtggtccagaagaagagcatctgggaatccttggcccagtcatttgggcagaagtgggagataccattagggtgactttccacaacaaaggtgcataccctttgtccattgagccgattggagtgcggttcaataagaacaatgaggggacttactactcgcctaactacaacccccagagcagatcagtgccgccatctgcatcccacgtcgcacccaccgagactttcacctacgagtggaccgtgccgaaagaagtcggcccaactaacgcagatcccgtgtgtcttgcaaagatgtattactccgccgtggaccctaccaaggacattttcaccggtcttataggtcccatgaagatttgtaaaaaggggagcctgcacgcaaatggtcgccagaaggacgtggataaggaattctaccttttcccaactgtgtttgatgaaaatgagagcttgctccttgaagataacatacggatgtttactactgcacctgaccaagtggacaaagaagatgaagatttccaagagtcaaacaagatgcatagcatgaacggtttcatgtacggtaaccaacccgggctgactatgtgtaaaggtgactcggtggtgtggtacttgttttccgcaggaaacgaagcggacgtccatggcatttacttctccggtaacacttatctttggcgaggggagagaagagataccgcaaacctgttcccccaaacctccctgacccttcatatgtggccagataccgagggaacctttaacgtggagtgcctcaccaccgatcactataccggaggaatgaagcagaagtacacggtcaatcagtgtcggaggcagtcagaggactcgaccttctaccttggtgagcgtacgtactacattgccgcggtcgaggtggagtgggactactcacctcagagggaatgggagaaggaactccaccatctccaagaacaaaacgtgtctaacgcgtttttggataagggtgagttctatattggttccaagtataagaaagtggtgtaccgtcagtacaccgactcaacctttcgggtgccagtggaacgaaaggcagaggaagagcaccttggaatccttggaccccagcttcatgccgacgtgggagacaaagtcaagattatcttcaagaacatggcgactagaccctattcgatccacgcacatggagttcaaactgaatcgagcaccgtgactccgactcttccaggggaaactttgacttacgtgtggaagattccagagcgcagcggggcaggtaccgaggactcggcgtgtattccatgggcatactattcaactgtggaccaagtcaaggacctgtactccggcctcattggtcctctcatagtgtgtagaaggccttacctcaaagtgtttaaccctagaagaaaacttgaatttgcattgctgttccttgtgttcgacgaaaatgagtcatggtacctggacgacaacatcaaaacctactcagatcatccagagaaggtcaataaggatgatgaagagttcatcgaaagcaataagatgcatgcaatcaatgggcggatgtttgggaaccttcagggactgactatgcacgtcggtgatgaagtgaattggtaccttatgggtatgggtaacgagattgatctgcataccgtccacttccacgggcattcatttcaatacaaacacaggggagtgtactcatctgacgtgtttgatatcttccctggaacttatcagaccctggaaatgtttcctcgcacccctggtatatggctgcttcactgtcacgtcactgatcacatccatgctggaatggaaactacctacactgtgcttcaaaacgaggatacgaaatcggga

SEQ ID NO: 8534 - DNA, 3195 bp, synthetic construct
  misc_feature 1..3195: note = source = /note="Description of Artificial Sequence: Synthetic coding sequence"
  source 1..3195: mol_type = other DNA
atgaagattctgatattgggcattttcctgtttctgtgtagcacgccagcatgggcgaaggagaaacattactacatcggtatcatcgaaaccacttgggactacgcatcggatcatggcgaaaagaagctcatctcggtggatactgaacactcaaacatatacttgcaaaacggacctgaccgcatcggacggctttacaaaaaggcattgtacctgcagtacactgatgaaaccttcagaactaccattgaaaaacctgtgtggcttggattcctggggccgatcattaaggctgaaaccggtgacaaagtgtacgtccatctgaagaacctggcatcacggccttacacgttccactcccacggcatcacttactacaaggaacatgaaggggcaatttacccggataatactaccgattttcagcgagcagatgataaggtctacccaggggaacaatacacttacatgctgctggctactgaagagcaatcccccggagaaggagatggaaactgcgtcacgagaatataccacagccatattgatgcaccgaaggatattgcaagcggtttgatcgggccattgattatctgtaagaaggattcgctggataaggaaaaagagaagcacattgatagggaatttgtcgtgatgtttagcgtggtggatgaaaacttctcgtggtaccttgaggataacattaagacctactgcagcgaacccgaaaaagtggacaaggacaacgaagatttccaagaaagcaacagaatgtacagcgtcaacggatacacctttggtagcctgccgggactctctatgtgtgcagaagatcgggtcaaatggtacctttttggtatgggaaacgaggtggatgtgcatgccgcctttttccacggacaggcgcttactaacaagaattacagaatagatactattaacctgttcccagcgaccctgtttgacgcatatatggtggcccaaaatcctggcgaatggatgctgtcctgccaaaatctcaatcatctgaaagcaggcttgcaagcgttctttcaagtccaggagtgtaataagtcaagctcaaaggacaatatacgtggaaagcatgtgcgtcactattacattgcagctgaggagatcatttggaactacgctccctcgggaattgacatattcaccaaagagaaccttaccgcgccgggttcagactcggcggtgttctttgaacaaggaaccactagaatcggcggatcgtacaagaagctggtctacagagaatacaccgatgcatcgttcacgaaccggaaggagaggggtcccgaagaggagcatctgggaatcctcgggcctgtgatttgggccgaagtgggcgacaccattcgcgtcacctttcacaataagggggcgtacccgctgtccatcgaaccgataggagtgcgctttaacaagaacaatgagggcacctactactcccccaactacaacccacagtcacggtcggtccctccttcggcatcacatgtggccccgactgaaaccttcacgtatgagtggaccgtgccaaaagaggtgggcccaaccaacgcagacccggtttgtctggccaaaatgtactactcggcagtcgatcccactaaagacattttcaccggactgattggtcctatgaagatttgtaagaagggctcgctgcatgcaaacggtaggcaaaaagatgtggataaagaattctacctttttccaactgtctttgatgaaaacgaatccctgctgctggaggacaatattcgtatgtttacgaccgcgccagatcaggtggacaaagaggacgaggattttcaagagagcaataagatgcactccatgaatggcttcatgtacggtaaccaacctggacttactatgtgcaaaggcgactcagtggtgtggtacctgtttagcgcaggaaacgaagcagatgtgcatggcatctacttttctggtaatacttacttgtggagaggggaaagacgagataccgccaacctgtttcctcaaacctccctcaccctccatatgtggccggatactgagggtactttcaacgtggaatgtcttactaccgatcactataccgggggtatgaagcagaagtacactgtgaaccaatgtagacggcagtccgaagattcgactttctatctgggggaacggacgtactacatcgctgctgtcgaagtggaatgggattattctcctcagagagagtgggaaaaggagcttcatcatctccaagagcagaatgtgagcaacgcattcctcgacaagggagagttttacatcggaagcaagtacaaaaaagtggtctaccgccagtacaccgattctacttttcgggtgccagtcgaaaggaaagcagaagaagagcatctgggcatactgggcccccaactccatgccgatgtcggggacaaggttaagatcatctttaagaatatggcaacgcggccttactcaatccacgcccacggggttcagactgaatcgtcaaccgtgacgcctactctccccggagaaactctcacctacgtttggaaaattccggagagatccggagccggcaccgaggactccgcatgtatcccttgggcctactactcgactgtcgatcaagtgaaggacctttactccgggctcattggacctctcattgtttgccgcaggccataccttaaggtctttaacccgcgacgtaagctggaatttgctcttctctttctggtgtttgatgagaacgaatcatggtaccttgatgataacatcaagacctattccgatcatcccgagaaggtgaacaaggacgatgaagaattcatcgaatcgaataagatgcatgcgattaatggccgtatgtttggaaatctccaaggactgaccatgcatgtgggtgacgaggtgaactggtatcttatgggtatgggaaatgagatagacctgcacaccgtgcattttcacggtcattcgtttcagtacaagcacagaggagtgtacagctccgacgtgtttgacattttcccgggtacttatcaaaccctcgaaatgtttcctcgaacgcctggaatttggctgctgcattgccacgtgactgatcacatccatgcaggtatggaaactacgtacaccgttcttcagaatgaggacactaaatccggt

SEQ ID NO: 8535 - DNA, 3195 bp, synthetic construct
  misc_feature 1..3195: note = source = /note="Description of Artificial Sequence: Synthetic coding sequence"
  source 1..3195: mol_type = other DNA
atgaagatccttatactcggaatcttcctgtttctgtgctcgaccccagcatgggcaaaagaaaaacattactacatcggaatcattgaaaccacctgggattatgcatccgatcacggtgagaaaaaactgatttctgtggatactgagcattctaacatttacctgcagaatggccccgatagaattggacgcctttacaagaaggcactttacctgcagtataccgatgaaacctttcgtaccaccattgaaaaaccagtttggctgggctttctggggcctataatcaaggcagagactggagacaaggtctacgtacacttgaaaaaccttgcgagccggccatacaccttccattcccacggcattacttactataaggaacatgaaggtgctatttacccggataacaccaccgattttcaaagagcagacgacaaggtgtacccaggagagcagtacacgtacatgcttctcgcgactgaagaacagtcaccgggcgaaggagacggaaactgtgtgaccagaatttaccatagccacattgacgccccaaaggatatagcctcgggtctgattggacctcttatcatttgtaagaaagattctctggataaggaaaaggagaagcacatcgaccgtgaattcgtcgtgatgttttccgtcgttgacgaaaacttctcctggtacctggaggacaacattaagacttactgttccgaacctgaaaaggtcgataaggataacgaagatttccaagagtcgaaccgcatgtacagcgttaacgggtatacttttggatctctcccaggactgagcatgtgcgcagaagatagagtgaaatggtacctgtttggtatggggaacgaagtagacgtgcatgcagcattcttccacggccaggcactgactaataagaactacagaatcgacactattaacctctttccagcaactctgttcgacgcctacatggtggcccagaatcctggagaatggatgttgtcgtgccagaacctgaatcatctgaaggcaggcctgcaagcatttttccaggtgcaggaatgcaacaagagctcgtccaaagataacatccgcggtaagcatgtccgtcactactatattgcggcagaggaaatcatttggaactacgcccctagcggaattgacattttcactaaggagaatcttacggctccaggttcggatagcgccgtgttctttgaacagggtaccacgcgcattggcggtagctacaaaaagctcgtgtaccgggaatacactgacgcttccttcacgaaccgcaaggaacgcgggcctgaggaggagcatctgggcattctgggccctgtgatttgggcagaggtgggggatactatccgagtgaccttccataacaagggagcataccccctgtctattgagcccataggtgtgcggttcaataagaacaatgaaggaacctactacagtcctaactacaatccacagtcgaggtccgtgcccccatcggcttcccacgtggcacctactgagactttcacctacgagtggaccgtacctaaagaagttgggcccaccaacgccgatcccgtgtgcctggctaagatgtattactcagcggtggaccctaccaaggacattttcacgggactcataggaccaatgaaaatctgtaagaaaggatcgctgcatgcaaatggtcgccaaaaggatgtggataaggagttctacctctttcccaccgtctttgacgagaacgaatcccttctccttgaagataacatcaggatgtttaccactgcgcccgaccaggtggataaagaagatgaggattttcaagagagcaacaagatgcactcaatgaacggatttatgtacggtaatcagcccgggcttaccatgtgtaagggagattctgtggtctggtacctcttttcagcgggaaatgaagcggatgtgcatggaatatacttttcaggtaacacctacctgtggaggggagagcgtcgagacactgccaacctgtttccccagacctcactcacccttcatatgtggccagacactgaaggaacctttaatgtggaatgcctgactaccgatcactacaccggaggcatgaagcagaagtacaccgtcaatcaatgtaggagacaaagcgaagattccacgttctaccttggggagcgtacctactacatagctgcggtcgaagtcgagtgggattactcccctcaaagagaatgggagaaggaattgcatcatctgcaagaacaaaatgtctctaacgcattcttggataagggggaattctacataggttctaagtacaagaaagtcgtctaccgccagtatactgactcaaccttcagagtgccagtcgagagaaaggcagaagaagagcacctgggtattctcggacctcaactgcacgcagacgtcggtgataaagtgaagatcatattcaagaatatggccactaggccctactccatccacgcgcatggggtgcagactgaatcctcaactgtgacccctacccttccaggagaaaccctcacctatgtgtggaaaataccggaaagaagcggagcaggtacggaagattccgcctgtattccgtgggcatattactcaactgtggatcaggtgaaggatctctattccggacttatcggtcctttgattgtctgtagaaggccttacctcaaagtgtttaatccacgaagaaaacttgagtttgcacttctttttctcgtgttcgacgagaatgagtcgtggtacctggatgataacataaagacttactcagaccatccggagaaagtgaataaagatgacgaagagtttattgagtcgaataagatgcatgctatcaacggtcgcatgtttggaaaccttcaaggcctcactatgcatgtgggtgacgaagtcaactggtacctgatgggaatggggaatgaaatcgatctgcacactgtgcatttccatggccactcatttcaatacaagcataggggcgtgtactcatcagatgtgtttgatatctttccaggaacgtaccagacccttgaaatgtttccacggacgccaggaatttggttgcttcattgtcatgtgacggatcatatccacgcaggtatggaaaccacgtacaccgtgctgcaaaacgaggacacgaaaagcggg

SEQ ID NO: 8536 - DNA, 3195 bp, synthetic construct
  misc_feature 1..3195: note = source = /note="Description of Artificial Sequence: Synthetic coding sequence"
  source 1..3195: mol_type = other DNA
atgaagattctaatcctagggatcttcttgttcctgtgtagcactccggcttgggctaaagagaaacactattacattggcataatcgagaccacgtgggattatgccagcgaccacggcgaaaagaaactcatttccgtcgatacagagcatagtaatatctacctgcagaacggcccggaccggatcggcaggctttataaaaaggcactgtacctgcagtacacagacgagacattccggacaacaattgaaaagccggtatggctgggtttcctcggtcccattattaaggcagaaactggcgataaggtgtacgtacacttgaagaatctggcatccaggccatatactttccattctcacgggataacctattataaggaacacgaaggcgccatttacccagacaacacaactgactttcagagagcagatgataaagtttaccccggggaacagtacacgtatatgctactagcaacagaggagcagagtcctggagagggagacggaaactgtgttaccaggatttatcacagccacatcgacgctcccaaagatatcgcatccggcctgatcggtccactgattatttgcaagaaggactccctggacaaggagaaagagaagcacatcgatcgggagttcgtggtcatgttctcagtagtggatgaaaatttttcttggtatttggaggacaatataaaaacctattgctcagagccggagaaggtggacaaggacaacgaggatttccaagagtctaatcggatgtattcagtcaatggatatactttcggctccctgccaggactgtccatgtgcgctgaggaccgggtcaaatggtacttattcgggatgggcaatgaagtggacgtgcacgccgcattcttccacggacaagcactgacgaacaagaattataggatcgatacaattaaccttttcccagctacactcttcgacgcatacatggtagcccagaaccccggagagtggatgttgagctgccagaatctgaaccacctcaaggcaggcctccaggcattcttccaggtccaggagtgcaacaaatcttcaagtaaagataatatccgtgggaaacatgtgagacactactatatcgccgcagaggagatcatctggaactatgccccatccgggatcgacatcttcactaaggagaatctgaccgctcctgggtccgattcagcagtgttttttgaacaagggaccacccggataggcggttcttacaagaagctggtgtacagggagtacaccgacgcctcctttacaaaccgaaaggaacggggccctgaagaagaacaccttgggatactgggccctgtgatctgggccgaagtgggagatactattagggtgactttccacaacaaaggggcttatcctctgagcatagagcctatcggagtgaggttcaataagaacaacgagggcacctattattcgccaaactataatccacagtctcgcagcgtgcctccctccgcgagtcacgttgcacctacagagacgttcacctacgagtggaccgtgcccaaagaagtaggacccaccaatgccgaccccgtgtgtctggccaaaatgtattattctgctgtagatcccactaaagatattttcacaggtctgataggacctatgaagatctgcaagaagggatcgctccacgccaatggacgacagaaggatgtggacaaggagttctacctgtttcctacagtgtttgatgaaaatgaatctcttctgctggaggataacatcaggatgtttactaccgcaccagatcaggtcgacaaagaagatgaggactttcaagaaagtaataagatgcactcaatgaacgggtttatgtatggaaatcaaccaggcctcactatgtgcaagggcgactccgtagtatggtatctattttccgccggcaacgaggctgatgtgcatgggatttacttcagcggcaacacttacctgtggaggggggaaaggagggataccgcaaatctattccctcagacttcacttacactgcacatgtggcctgacaccgaagggacattcaacgtggagtgcctgaccacagaccactacacaggaggtatgaagcagaagtatacagtaaatcagtgtcggaggcaatctgaagactcaacgttttacctgggagagcgaacttactatattgctgctgtggaagtggaatgggattactcccctcaaagggagtgggagaaggagctgcatcacttgcaagagcaaaacgtatcaaacgcatttttggacaaaggggaattctatattggttccaagtacaagaaggtggtctaccgccagtacaccgatagtacttttagggttccggtggagagaaaagccgaagaagagcatctgggcatcctggggccgcagctacacgctgacgttggcgataaagtgaagataatctttaagaacatggctacccggccctattccatccatgctcatggggtccagaccgagagttccaccgtgacacccacccttccgggcgagacgctgacctacgtttggaagataccagaacgttctggagccggtactgaggactccgcatgcatcccgtgggcctactacagtacagttgatcaggtaaaggatttgtatagcggcctgataggtccgttgatcgtctgcaggaggccatatctgaaggtattcaacccacggcggaagttagagtttgctcttctgttccttgtattcgacgaaaacgaatcctggtacctggacgacaacataaaaacatatagcgatcaccccgagaaggttaacaaggatgatgaggagtttatagagagcaacaagatgcacgccataaacggccgtatgttcgggaatctacaagggctaacaatgcacgtcggtgacgaggtgaactggtacctgatggggatgggtaacgagattgacctccacacggttcatttccacggtcacagcttccagtacaagcatcggggtgtttattcctccgacgtgttcgatatatttccaggtacttaccagacgctggagatgtttccacgaacaccaggcatctggctactgcactgccacgttactgatcacatccacgccgggatggagactacctatacagtactgcaaaacgaggatacaaagtccgga

SEQ ID NO: 8537 - DNA, 3195 bp, synthetic construct
  misc_feature 1..3195: note = source = /note="Description of Artificial Sequence: Synthetic coding sequence"
  source 1..3195: mol_type = other DNA
atgaagatcctcatactcggaatcttcctcttcctgtgctccaccccggcgtgggcgaaggaaaaacattactacatcgggatcatcgaaactacctgggactacgcgtcagaccacggagaaaagaagctcatctccgtggacactgagcacagcaacatctacctgcaaaacggccccgacagaatcgggaggctgtacaaaaaagccctgtacctgcagtacaccgatgaaaccttccggactaccatcgagaagccggtctggctggggttcctggggcctattatcaaggccgagactggtgataaggtctacgtgcacctgaaaaacctggcttctaggccgtacacgttccactcgcatggaatcacctactacaaggagcacgagggagccatatacccggataacaccaccgacttccaaagagccgatgataaggtgtacccgggcgaacagtacacctacatgctgctggcaactgaggagcagtcccccggggaaggggacggcaactgcgtgacccgaatctaccactcacacatcgacgcccctaaagacatcgcctcgggcctgatcggcccgctgatcatctgcaaaaaggattccctggataaagagaaagaaaaacacattgatagagagttcgtggttatgttctccgtcgtagatgaaaatttctcgtggtaccttgaggacaatattaagacctactgttccgagcccgagaaagtcgacaaagacaatgaggacttccaggaatcgaaccgcatgtactcggttaacggctatactttcggaagcctgccgggtcttagtatgtgcgcagaagatagggtgaagtggtacttgtttggtatgggaaacgaagtcgacgtccatgcggcattcttccacggacaggccttgactaacaaaaactacagaatcgatactatcaatcttttcccggcgaccctcttcgacgcttacatggtggctcaaaaccctggcgagtggatgctgtcatgtcagaacctcaatcacctcaaggccggattgcaggccttcttccaggtccaagagtgcaacaagagctcgtcaaaggataacatcagaggaaagcacgtcagacactactacattgcagctgaagagatcatctggaactacgcgccgtccggaatcgacattttcactaaggaaaatctgactgctcccggatcggactccgccgtgttctttgaacaaggtactacccgcattggaggatcatacaagaagctcgtgtaccgcgagtacactgacgcatctttcaccaaccggaaggagcgcggccctgaggaagaacatcttggaatcctcggaccggtgatctgggcggaagtcggcgataccatccgcgtgacgtttcacaacaagggcgcataccctcttagcatcgaaccgatcggagtgcgcttcaataagaataatgaaggtacttactactcacccaattacaacccacaatccaggtcggttccaccaagcgcctcgcatgtggccccaactgaaacgttcacctatgagtggaccgtcccgaaagaagtgggtccaactaacgcggaccctgtgtgcctggccaagatgtactacagcgccgtcgacccgaccaaggacatctttaccggattgattgggccgatgaagatctgcaagaagggctcgctccacgcgaatggtcgccagaaggatgtggacaaagaattctacctgtttccaactgtgttcgacgagaatgagtccctcctgttggaagataacattagaatgttcactaccgctcctgatcaagtggacaaggaggacgaagattttcaggagagtaacaagatgcattcgatgaacgggttcatgtacggtaaccagccaggacttaccatgtgcaagggagactcagtggtgtggtacctcttctcggccggtaatgaagccgacgtccacggaatctacttctcaggaaacacgtacctgtggcggggagagcgtagagataccgcaaacctcttcccacagacctctctcactctgcacatgtggcctgataccgaaggaactttcaatgtggaatgcctgaccaccgaccattataccggcggcatgaagcagaagtacaccgtgaatcagtgtcggcgccagtcggaggatagcaccttttaccttggagagcgaacttactatatcgcggccgtggaagtggaatgggactactcgccgcaacgggaatgggaaaaggaactgcaccacctgcaagaacaaaacgtgagcaacgctttcttggacaaaggcgaattctatatcggctcaaagtacaaaaaggtggtgtaccggcaatataccgacagcacttttagggtgccagtcgagcggaaagccgaggaagagcacctcggaattctcgggccccagctccacgctgatgtgggagataaagtgaagatcatcttcaagaatatggcgactcggccgtactccatccatgcacatggagtgcagactgagtcgagcaccgtgactccgactctgccgggagagactctgacttacgtgtggaagatccctgaacgctccggggcaggaacggaagattcagcctgcatcccgtgggcatactacagcactgtcgaccaggtcaaggacctgtacagcggactgatcggacctctgattgtgtgtcgccggccatacctgaaggtgttcaacccgcgccggaaactcgaatttgccctgcttttcctggtgttcgatgaaaatgaatcatggtacctcgatgacaacatcaaaacgtatagcgaccatccagaaaaggtgaataaagacgatgaggaatttattgaatccaataagatgcacgctatcaacgggcgcatgtttggcaacttgcagggactgaccatgcacgtcggcgacgaggtcaactggtatctgatgggcatgggtaatgagatcgacttgcacaccgtgcattttcatggacattcctttcaatacaagcatcgcggagtctactcctcggacgtgttcgacatctttccgggaacctaccagaccctggagatgtttccccggactccaggcatttggctgctccactgccatgtcacggaccatatccacgcggggatggaaaccacgtacactgttctccagaacgaggatacgaagtccgga

SEQ ID NO: 8538 - DNA, 3195 bp, synthetic construct
  misc_feature 1..3195: note = source = /note="Description of Artificial Sequence: Synthetic coding sequence"
  source 1..3195: mol_type = other DNA
atgaagatcctgattctgggaatctttctgtttctgtgctcaacgccggcatgggcgaaggaaaaacactattacatcgggatcattgaaactacttgggattacgcgtcggaccatggagagaaaaaactgatctccgtggatactgaacacagcaacatctaccttcagaacggacctgatcggatcggaaggctgtacaagaaggctctctacctccaatacaccgatgagacgtttcggaccaccatcgagaagccggtgtggctgggattccttggccctatcatcaaggctgaaactggcgacaaggtctacgtgcatctgaaaaacctggcttcacgcccctacaccttccactcacacggaatcacctactacaaggaacacgagggagctatctacccggacaacaccaccgactttcagcgggccgatgataaggtgtacccgggagagcagtacacttacatgctgctggctactgaggagcagtccccgggtgaaggcgacggcaattgcgtgactcgaatctaccacagccatatcgacgcgcctaaggacatcgcgtcaggcctgatcgggccgttgatcatctgtaagaaagattcgttggacaaggagaaggagaagcacatcgaccgcgaatttgtcgtcatgttctccgtggtcgatgagaacttctcatggtacctggaagataacatcaagacctactgttccgagcctgaaaaggtggacaaggacaatgaggacttccaagagagcaatcggatgtacagcgtgaacgggtacactttcggatcgttgccaggactgtccatgtgtgccgaggaccgcgtgaagtggtacctgtttggcatgggaaatgaggtggacgtgcacgcggccttcttccatggacaggcgctgactaacaagaactaccggatcgatacgattaatctgttcccagcaaccctgttcgacgcctatatggtggcccagaatcctggagaatggatgctgtcatgccagaacctcaaccatctgaaggctggactgcaagccttcttccaagtgcaggaatgcaacaaaagcagcagcaaggacaacatccgtgggaagcacgtgaggcattactatattgccgcggaggagatcatatggaactacgctccgtcaggcattgatatcttcactaaggagaacctgaccgccccaggttccgacagcgcagtctttttcgaacagggaacgactcgcatcggcggatcctacaaaaagttggtgtaccgcgaatacaccgacgcttccttcactaatcggaaagagcgcggtcctgaggaggaacatttgggcatccttggacccgtgatctgggcagaagtgggagatactatccgagtcacttttcacaataagggagcatatccattgtccatcgaacctatcggagtgcgcttcaacaaaaacaacgagggcacctactattctcctaattacaacccgcagtcgcgcagtgtgccaccgtctgcctcgcatgtggcgccaacggagacttttacctacgagtggactgtccccaaggaagtgggaccgactaacgcagaccctgtctgtctggctaaaatgtactactcagcggtcgatccaaccaaggacatctttaccggactcatcggaccgatgaagatctgcaaaaagggtagcctgcacgcaaatggacgccagaaagacgtggacaaagagttctaccttttcccgaccgtgttcgatgagaacgagtccttgcttctcgaggacaatattcgtatgtttacgactgccccagaccaggtcgacaaagaagatgaggatttccaggagtcgaataagatgcactcgatgaacggctttatgtacggtaatcaacccgggctgaccatgtgtaaaggcgattcagtggtctggtacctgttcagcgccggcaatgaggcggacgtgcacgggatctacttctcgggaaacacttacttgtggagaggagagcgtcgcgacactgcgaatctcttcccgcaaactagtctgactctgcatatgtggcccgacactgagggtacttttaacgtggaatgcctcactaccgaccactacaccggcgggatgaagcagaaatacaccgtgaaccaatgcagacggcagtccgaagattcgaccttttacttgggggaaagaacttactacatcgcggccgtcgaagtcgaatgggactactcgcctcagcgggaatgggagaaggaactgcaccacctccaggaacagaacgtgtccaacgcatttctcgacaagggagagttctatattggatcgaagtacaagaaggtcgtgtacagacaatacacggattctactttccgcgtgccggtggagcgcaaggccgaagaagaacatctgggaatcctgggaccgcagttgcatgcggacgtcggagacaaagtgaaaatcatcttcaagaatatggctacccgcccctacagcattcacgcccacggcgtgcaaactgaatcgagcacggtgactccgacccttcctggcgagactctgacttatgtgtggaagatcccagaacgctcgggcgctggaaccgaggactcggcatgcattccatgggcgtactactccaccgtcgaccaggtcaaggatctctactccggactgattggccccctgattgtgtgtcgccgcccatacctgaaagttttcaacccgcgcagaaagctcgagttcgccctgctgttcttggtgttcgacgaaaacgaatcctggtacctcgacgacaatatcaagacttacagcgaccacccagagaaggtgaacaaggacgatgaggagttcatcgaaagcaacaaaatgcacgctatcaatggacgcatgttcggaaacctgcagggactgaccatgcacgtgggagatgaggtgaactggtacctgatgggaatggggaatgaaattgatctccacactgtccacttccacggacactcattccagtacaaacaccggggtgtctactcgtcagacgtctttgacattttcccaggtacttaccagaccttggaaatgtttcctcggaccccaggaatctggctcctgcattgccatgtgactgatcacatccacgccgggatggaaactacttacaccgtcctccagaacgaagatactaagtcgggc

SEQ ID NO: 8539 - DNA, 3195 bp, synthetic construct
  misc_feature 1..3195: note = source = /note="Description of Artificial Sequence: Synthetic coding sequence"
  source 1..3195: mol_type = other DNA
atgaagatactcatcctgggcatatttctgttcttgtgcagtactcccgcctgggcaaaggagaaacactattacatcggcatcattgaaacaacctgggattacgcttctgaccatggcgagaagaaactgatcagcgttgatacagagcacagcaatatatatctgcagaatggaccagatagaataggtcggctgtacaagaaagcgctgtatctacagtacacggatgagaccttcagaactactatagagaagccggtctggctcggattcctggggcctatcatcaaggcggagaccggcgacaaggtttacgtacacctgaagaatcttgcctccaggccgtacaccttccattcccatggaatcacatactacaaggagcacgaaggggcaatttacccagataatacaacagatttccagcgggctgacgataaggtgtatcccggggaacagtacacttacatgctcctggctactgaggaacagtccccaggggagggcgatggtaactgtgtgacccgtatctaccattctcacatcgacgctccgaaggacatcgcatcaggtctcatcggaccactaatcatctgcaagaaggacagcctggataaagaaaaagagaaacacattgatagggagtttgtcgtgatgttctcagtggtggatgagaacttcagctggtatcttgaggacaatataaagacctactgttctgagccagaaaaggtggataaggataatgaggattttcaagagtctaacagaatgtattccgtgaatgggtacacattcggatctctaccaggcctcagcatgtgcgctgaggaccgtgtgaagtggtacctctttggaatgggcaacgaggtggatgtgcatgcagcctttttccacggccaggccttaactaacaagaactataggatagatacaatcaacttgtttcctgctacattgtttgatgcttacatggtagcacaaaacccaggtgagtggatgctttcctgccagaatctgaaccatctgaaggccggtctgcaggcattctttcaggtacaggagtgcaacaagagttctagtaaggataatattagagggaagcacgtgaggcattattacatcgccgccgaagagattatctggaactacgccccctctggaatcgatatcttcaccaaggagaacctgaccgcacccggctcagatagtgctgtgttctttgagcaggggactactcgcattggaggcagctataagaagttggtgtaccgagaatacaccgatgctagtttcacaaatagaaaggaacggggacccgaggaagagcacctggggattctggggcctgtgatttgggcagaagtgggcgatacgattcgcgtaacattccacaataaaggcgcctatcctctgtccatcgagcctattggcgtcagatttaataagaacaacgaaggaacctactacagtcctaactataatccacaaagtaggagcgttccaccatccgccagccatgtggctcctaccgaaacgttcacatacgagtggacagttcctaaggaggtcgggccgacaaacgcagaccctgtttgtctagccaagatgtactatagcgcagtcgatcctactaaagacattttcaccggcctcattggccccatgaagatctgtaaaaagggaagcctccacgctaatggcaggcagaaggacgtggacaaagaattttacctgtttcccacggtgtttgacgaaaacgagtctcttttgcttgaagacaatatcagaatgtttaccaccgcgcccgatcaggttgacaaggaagacgaggactttcaagagagcaacaagatgcactccatgaatggcttcatgtacggcaaccagcctggactgacaatgtgcaaaggtgattcagtagtatggtatctgtttagtgctggcaacgaggctgacgtacacgggatatatttctccgggaacacgtacttatggcgcggggagaggagagacaccgctaatctgttcccacagacttcattaaccctgcacatgtggcccgacaccgaaggtacgttcaatgtcgagtgtctcaccacagatcactataccggtggcatgaaacagaaatacaccgtgaaccagtgcaggcggcaatctgaagactctactttttacctcggcgaaagaacatactatattgcagcggtagaggttgaatgggactactcacctcagcgggagtgggagaaggaactacaccacttgcaggagcagaatgtctctaatgccttcttggacaagggagagttttacatcgggtccaagtataaaaaggtggtttataggcaatacacagattcaaccttcagggtccccgtcgaaaggaaagcggaagaagagcatctcggaattctcgggccacagctgcatgccgatgtaggagacaaggttaagataatttttaagaatatggccacacgcccctactctatacacgcccacggggttcagacagagagctcaacagtgactcccactctccccggagagacgcttacctatgtatggaaaatacctgaacgctccggcgctggaactgaggattctgcttgtattccctgggcctattattccaccgtggaccaagtcaaggatctgtactccggattgattgggcctctcattgtctgtaggcgcccgtatctgaaggtcttcaatccgaggcggaagttggagtttgcactactcttcctcgtatttgacgagaacgagtcttggtatctcgacgacaacattaagacttacagcgaccatcccgagaaagtgaataaggacgacgaagaattcatcgagagcaataagatgcacgctataaatggacgaatgttcggcaatctacaagggctgacaatgcatgtaggggatgaagtgaattggtaccttatgggcatgggcaacgaaattgatctccacaccgtgcactttcatggtcactctttccagtacaaacaccgcggcgtgtactctagtgacgtcttcgacattttccccggcacatatcaaactctggagatgttccctcgaacgccgggcatatggcttctccattgtcacgttacagatcacattcatgctgggatggaaacaacttatacagtactgcagaacgaagacactaagtctggc

SEQ ID NO: 8540 - DNA, 3195 bp, synthetic construct
  misc_feature 1..3195: note = source = /note="Description of Artificial Sequence: Synthetic coding sequence"
  source 1..3195: mol_type = other DNA
atgaagatcctgatactgggcatcttcctattcctctgctcaaccccagcttgggcaaaggagaagcactactacatcggcattatcgagaccacatgggactatgctagcgaccacggcgaaaaaaaacttatctccgtcgatacggaacatagcaatatttatcttcagaacggaccggatagaatcggacgactgtataagaaggcactgtaccttcagtacaccgacgagacattcagaacaaccattgagaaacccgtatggttgggcttcctggggcctatcatcaaagcggaaacgggagataaggtgtatgtccacctcaagaacctggcaagtcggccatacactttccatagccacggtataacatactacaaggaacatgaaggcgcaatatacccagacaacaccacagatttccagcgagccgacgacaaggtttaccctggggagcagtacacctacatgcttcttgctaccgaagagcaatcacccggggaaggcgatggtaactgcgtgacccgtatttaccactcacatatcgatgcgcctaaagatatcgccagcggactgatcgggcccttaattatctgcaagaaggatagccttgacaaagagaaagagaagcacatcgatcgcgaattcgtcgtcatgttcagcgtcgtcgatgagaacttcagctggtacctggaggacaacatcaagacttattgtagcgaacctgaaaaggttgataaggacaacgaggacttccaggagagcaacaggatgtatagcgtcaacggctacacatttggctcactgcccggtctgtctatgtgtgcagaagaccgagtcaagtggtatctgttcggcatgggcaatgaggtggacgttcacgccgcttttttccacggacaggccttgaccaataaaaactataggatcgacaccataaacctctttcctgcaaccctcttcgatgcctacatggtggctcagaaccctggggagtggatgttaagctgtcagaacttgaaccacctgaaagccggtctgcaggcattcttccaagtccaggagtgcaacaaaagttcttcaaaagacaatatccggggcaaacacgtgaggcactactatatcgccgcagaggaaatcatctggaactacgcaccaagcggaatcgatatcttcacaaaggagaacttaactgcccctggtagtgattctgcggtgtttttcgagcagggaacaaccaggattggggggagttacaaaaaattggtctaccgggagtacacagatgccagcttcactaacagaaaggaaaggggccctgaggaagagcacttgggtatcttagggcccgtgatttgggcagaagttggtgataccattcgtgtgacctttcacaacaaaggagcttatcccttgagcattgagccaattggtgtcaggtttaataagaacaacgagggcacatactactcccctaattataacccccagagtagaagcgttccaccttcagcaagccatgttgcaccaaccgaaacttttacttacgaatggaccgtcccaaaggaggtggggcctaccaacgcagacccagtttgcttggcaaaaatgtattactccgccgtcgaccctaccaaagatatttttacagggcttatcggacctatgaagatctgcaagaaggggagcctacacgctaacggcaggcaaaaggacgtcgataaggagttctacctgttcccaacagtcttcgatgagaacgagtcccttctgctcgaagacaacattaggatgttcaccactgctccagaccaagtggataaagaggacgaggacttccaggagagcaacaaaatgcatagtatgaacggctttatgtacggtaaccagccagggctcaccatgtgcaaaggcgatagcgtggtttggtatctctttagcgctgggaacgaagcagatgtgcacggaatatattttagcggtaatacctacctgtggcggggcgagagaagggatactgctaacctgttcccccagacctcactgacactgcatatgtggccagatacggaaggcacctttaatgtggaatgcttgactaccgatcactataccggcggcatgaaacaaaaatacactgtgaatcagtgcagacgccagtctgaagattccaccttctaccttggagaaagaacctactacattgcggctgtggaagtggagtgggactattcgccccagagggaatgggagaaggaactgcatcatctgcaagaacaaaatgttagtaatgcattcctggataaaggagaattttacatcgggtcaaagtacaaaaaagtggtgtacaggcagtatacagatagcaccttccgcgttcctgttgaacggaaggctgaagaagagcacctgggaattctgggtccacagctacatgccgacgtcggtgataaagttaagattatctttaagaatatggccacacgtccatacagcatccatgcgcatggcgtacagaccgagtctagtaccgtcactccaacacttccaggagagacacttacttacgtctggaagattccggagagaagcggcgcaggtactgaggatagcgcttgcatcccctgggcctactattctacagtggaccaggttaaagatctctatagcggcctaatcggacctcttattgtctgtcggagaccttacttaaaggttttcaaccccaggcggaagttggagtttgcgctgcttttccttgtgtttgacgaaaatgagtcatggtacctggatgacaacatcaagacatacagcgaccaccctgagaaggtgaacaaggatgacgaagagttcatagaatcgaacaaaatgcacgcgattaacggtaggatgtttggtaacttgcaagggttgaccatgcatgtaggagatgaggttaactggtaccttatgggaatggggaatgaaattgacctgcataccgtgcactttcatggccatagtttccagtacaaacaccgcggggtgtactcttcagacgtattcgatatattccccggcacctaccagactctcgaaatgttcccccgcacacctgggatttggctgcttcattgtcacgtgaccgatcacattcacgcaggaatggaaaccacctatactgtgcttcaaaacgaggacaccaaaagcggg

SEQ ID NO: 8541 - DNA, 3195 bp, synthetic construct
  misc_feature 1..3195: note = source = /note="Description of Artificial Sequence: Synthetic coding sequence"
  source 1..3195: mol_type = other DNA
atgaagatcctcatcctgggaatattcttgtttctctgctcaaccccggcctgggcaaaagagaaacattactatatcggcataattgaaactacttgggactacgcatccgatcatggcgaaaagaaactcatctcagtggataccgaacactccaatatctacctccagaacggaccggaccgaatcggaaggctctacaagaaggcgctgtaccttcaatacaccgatgagacttttcggactaccatcgagaagccagtttggttgggatttctgggtcctatcatcaaggctgagactggagataaggtatacgtgcatctgaagaaccttgcctccaggccgtatacttttcacagccatggaatcacgtactataaagaacacgagggagcaatctaccctgacaacaccactgatttccaacgggccgatgacaaagtgtaccccggcgaacagtacacctacatgctgctcgccacggaggagcagagtcccggagaaggagatgggaattgcgtcacccggatctatcactcgcacatcgacgcaccgaaggacatcgcgagcggactcattggccccctgatcatctgcaagaaggactccctcgataaggaaaaagagaagcatattgacagagagtttgtggtcatgttctctgtggttgatgagaatttcagttggtatctcgaggacaacatcaagacttactgcagcgaacccgagaaggtggacaaggacaacgaagatttccaagagtcaaatagaatgtactccgtcaatggctacaccttcggctccctgccggggctgtccatgtgcgctgaggaccgggtgaaatggtatctgtttggaatgggcaatgaagtcgatgtgcacgccgcgttctttcacggtcaagcgctgaccaataagaactacagaatcgacactatcaaccttttccctgcgaccctgttcgacgcctacatggttgcgcaaaaccctggagaatggatgttgtcctgccaaaatctgaaccatctgaaagctggattgcaggccttcttccaagtgcaggaatgcaacaagtcctcgtcgaaggacaatatccgggggaaacacgtgcgccactactacattgccgcagaagaaatcatttggaactacgctccgtcgggaatcgacatattcacgaaagaaaacctcactgcgcccggctcagattcggccgtgttcttcgagcagggaactacccggattggtggctcgtacaagaagctggtctaccgcgagtacactgacgcatcattcaccaatcgcaaggaacgggggccagaggaagagcacctgggaatcctcggaccggtgatctgggctgaggtcggagatacgatcagagtgaccttccacaacaaaggagcctacccactctctatagagcccattggagtgcgcttcaacaagaacaatgaaggtacctactacagcccgaactataatcctcagtcaagatctgtcccaccttcggcatcccacgtcgctccgactgaaaccttcacttatgaatggactgttccgaaggaggtgggaccgactaacgcggacccggtgtgtttggcaaagatgtactactcggccgtggacccgacgaaagacattttcactgggctgatcggaccgatgaagatttgtaagaaaggaagcctgcacgctaacggacgccaaaaggatgtggacaaggaattctacctgttcccgaccgtgttcgacgaaaacgagtcgttgctgctcgaggataacatccgcatgtttaccaccgccccggaccaggtcgacaaggaagatgaggattttcaggaaagcaacaaaatgcattccatgaatgggttcatgtacggcaaccagccaggcctgaccatgtgcaaaggtgactccgtggtctggtatcttttctccgcaggcaacgaggctgatgtgcatggcatctacttcagcggaaacacctacctgtggcggggtgaacggagagacaccgccaacctgtttccacagacctccctgaccctgcatatgtggccagatactgaaggaacctttaatgtggaatgccttactactgatcattacaccggaggaatgaagcagaaatacactgtgaaccagtgtcggcgccagtcagaagattccactttctacctgggtgaacgcacctattacatcgcagcggtggaggtggagtgggactacagcccacaacgcgaatgggagaaggagctccaccacctgcaggagcagaatgtgtcaaacgcgttccttgacaaaggcgagttctatataggatccaagtacaaaaaggtcgtgtacagacagtacactgacagcacctttcgggtcccggtcgaacgtaaggcggaagaagagcatctgggaatcctgggcccgcaactgcatgctgacgtgggtgacaaggtgaagatcattttcaagaacatggcgaccagaccgtactcgatccacgcccacggggtgcagactgaatcatccactgtgacccccaccctcccgggggaaacgctgacttacgtctggaagatcccagaacgctcaggtgcagggacggaagattcagcatgcatcccgtgggcctattactcaactgtggaccaggtcaaagatctgtactcgggactgatcggtccattgatcgtgtgcaggcggccatacctcaaggtgttcaatccccgaaggaagctggaattcgccttgctgtttctggtgttcgacgagaacgagtcctggtaccttgacgacaacatcaaaacgtatagcgaccatcctgaaaaggtgaataaggacgatgaggaattcatcgaaagcaacaagatgcacgccattaacggtagaatgttcgggaacctccaaggattgaccatgcacgtcggggacgaggtcaactggtacctcatgggcatgggtaatgagatcgatctgcacacggtccactttcatggtcacagcttccaatacaagcatagaggcgtctacagctcggatgtgttcgacatctttccgggcacgtaccaaaccttggaaatgttcccgcgcacccctggaatatggctcctgcattgtcatgtgaccgaccacatccacgcaggaatggaaaccacgtatactgtgttgcagaacgaggacaccaagtctgga

SEQ ID NO: 8542 - DNA, 3195 bp, synthetic construct
  misc_feature 1..3195: note = source = /note="Description of Artificial Sequence: Synthetic coding sequence"
  source 1..3195: mol_type = other DNA
atgaagatccttatcctcggcatcttcttgtttctgtgctcaaccccagcttgggcaaaggagaagcactactacattggaatcatcgagactacctgggattacgcatccgatcacggagagaaaaaactgattagcgtggatactgaacatagcaatatctatttgcaaaatggacctgatagaattggaaggctgtacaaaaaggcactttacctccaatacactgacgaaacttttcggactaccatcgagaagccggtctggcttggcttcctggggccaatcatcaaagcagaaactggagataaggtctatgtgcacctgaagaacttggcctcgcgcccatacaccttccattcgcatggaataacttattacaaggagcacgagggggcaatctacccagacaacacgactgatttccagcgagctgacgacaaagtgtaccctggggagcagtacacttacatgcttctggcaactgaggaacagtcgcctggagaaggagatgggaactgcgtcactcgcatctaccactcacacattgatgcgcctaaagatattgcatcaggacttatcggtcctctgattatctgtaagaaggacagcctggataaggaaaaggaaaagcatattgatcgggagttcgttgtcatgttttcggtggtggacgagaacttttcgtggtaccttgaagataacatcaaaacgtactgttcagaaccagaaaaggtcgataaagataacgaggattttcaggaatccaatagaatgtacagcgtgaatggttacacgtttggatccctccctggcctcagcatgtgtgcagaagatagagtcaagtggtaccttttcggaatgggtaacgaagtggatgtgcatgcagccttttttcacggtcaagcactgactaataagaattacaggattgataccattaatctcttccccgcaactctttttgacgcttacatggtggcccagaaccctggagaatggatgctttcctgccagaaccttaaccatcttaaagcagggcttcaagccttctttcaagttcaagagtgtaacaagagcagttccaaggataacattcgaggcaagcatgtgcggcattactacattgccgctgaagagattatctggaattacgcaccaagcggaatcgacattttcactaaggaaaacctgacggcccctggctcggattcggcggtgtttttcgaacagggaaccacgagaattggcgggtcgtacaaaaaacttgtgtaccgagaatacactgatgcgtcgtttactaatagaaaagaaaggggcccggaagaagaacaccttggtatactcggtcctgtgatttgggcagaagtgggtgatacgataagggtcacctttcacaacaagggagcgtatccgctctcgatcgagccaatcggggtgcggttcaataagaacaacgaaggaacctactacagcccaaattacaacccacagtcgcgttcagtgccgccatcggcatcccatgtggctccaactgaaactttcacttacgagtggacggtgccaaaggaggttggtccaactaatgcagatcctgtctgtctggcaaaaatgtactactcagcggtcgatccaaccaaggacatattcactggtttgataggaccaatgaagatatgtaaaaaggggtcactgcatgcgaatggtagacaaaaggatgtggataaagagttttacctgtttcccacggtgtttgacgaaaacgagtcccttcttctggaggacaacatacgaatgtttactaccgcaccagaccaggtcgacaaggaggacgaagatttccaagaatctaacaagatgcactctatgaatggctttatgtacggtaaccaacctggccttaccatgtgtaagggggactcagtggtgtggtacctgttttccgcaggtaatgaagccgatgtgcatggtatctactttagcggaaacacctacctgtggcgaggtgaacgccgagacaccgcaaatctgtttcctcaaacgtcccttactctgcatatgtggcctgataccgaaggtacttttaacgtcgaatgtcttaccaccgatcactacactggtggcatgaagcagaagtacactgtgaatcagtgcagacgtcaatcggaagattccaccttttaccttggagaacggacctactacatcgcggcagtggaagtcgaatgggattactcaccacaaagagagtgggaaaaggaattgcaccacctccaagagcagaatgtctcaaacgccttcctggataagggtgagttctacattggatcgaagtacaagaaagtggtgtaccggcagtacaccgattcgacttttagagtgccggttgaacgtaaagcagaagaggaacatctgggcatacttggtcctcaactccacgcagatgtcggagacaaggtgaagatcatattcaagaatatggccactcgtccttactcgatacacgcccatggagtgcagactgagtcatcgacggtgactccaaccctgccaggtgaaacccttacttacgtctggaagattcctgaaagaagcggcgcagggaccgaggacagcgcctgtatcccatgggcctactacagcactgtcgatcaagtgaaagatctgtactccgggcttatcggtccacttattgtgtgccgccgtccataccttaaggttttcaatcctcggcgcaagttggagtttgccctgctctttctggtattcgacgagaatgaatcctggtatttggatgataacatcaagacttattctgatcatccagaaaaggtgaataaggatgatgaggagttcatcgaaagcaataagatgcatgccattaacggacgaatgtttgggaacctgcaaggactgactatgcacgtgggggatgaagtcaattggtaccttatgggaatgggcaacgaaattgacctgcacactgtacactttcatggacattcctttcagtacaagcataggggagtgtactcgtcggacgtctttgacatttttcccggaacctaccagactcttgagatgtttccgcggactcccgggatctggcttcttcattgtcatgtgaccgatcatattcatgccgggatggagactacctacactgtgcttcagaatgaggataccaagtccgga

SEQ ID NO: 8543 - DNA, 3195 bp, synthetic construct
  misc_feature 1..3195: note = source = /note="Description of Artificial Sequence: Synthetic coding sequence"
  source 1..3195: mol_type = other DNA
atgaagattctcatcctcggaatcttcctgtttctatgcagcacccctgcatgggctaaggagaaacattactatattgggattatcgagaccacctgggactatgctagcgaccatggcgaaaaaaagctaatttcagtggataccgagcattcaaatatttatcttcaaaacgggccggatcggatcgggcggttgtacaaaaaggcgctgtatctgcagtacaccgatgaaaccttccggacaaccattgagaaaccggtgtggttaggctttctcgggcccatcattaaggcagagacaggggataaggtttatgtccacttaaaaaatttggcctctcggccatacacatttcactcgcatggaatcacctactacaaggaacatgagggcgctatctaccctgacaacacaacagattttcagcgtgccgacgacaaggtgtatcccggggaacagtacacctacatgttgctagcaacggaagaacagtctcccggcgagggtgacggcaattgtgtgactcgaatctaccattcccacattgatgcacccaaggatattgcttcggggctgattgggcccctgatcatctgtaaaaaggacagtctggataaagagaaagaaaagcatattgaccgggagtttgtcgtgatgttcagcgtggtggatgagaacttttcttggtacctcgaggacaatataaaaacttactgttccgagccggagaaagtggataaagataatgaggacttccaggagagcaacaggatgtattccgtaaacggctacacctttggatccctgccaggcctgagcatgtgcgccgaagaccgcgtcaaatggtacctatttggtatgggcaacgaggtggacgtccacgccgctttttttcacgggcaagccctcaccaacaagaactacagaattgataccatcaatctgtttcctgctaccctctttgatgcctacatggtagctcaaaaccccggagagtggatgctgtcatgccagaacctaaaccaccttaaagccggtctgcaagccttcttccaagtgcaggagtgcaataaaagcagttccaaggataacattagggggaaacacgttagacattattacatcgccgccgaagagatcatttggaactacgcgccatccggcattgatatattcactaaagagaacttgactgcgccaggttcagatagcgccgtctttttcgaacaaggtaccaccaggattggagggtcttacaaaaagctggtctacagagagtacaccgatgcctcttttacaaatagaaaagagcgcggcccagaagaggagcacctcggaattctcgggcctgtgatttgggccgaagtaggtgacactattagggtgacctttcacaacaagggtgcctatcccctaagtatcgagcccattggcgtgagattcaacaaaaataacgagggcacctattattcgcctaactacaatccacagtctagaagtgtgcctccttctgcatctcatgtggccccaacggagacattcacttacgaatggacagtgcctaaggaagtggggcctactaacgctgaccctgtctgtcttgccaaaatgtactattcagcggttgatccaactaaagatattttcaccgggctgattgggcctatgaagatttgtaagaagggtagtcttcatgcaaacgggcggcaaaaagatgtggataaggagttctatctcttcccaactgtgttcgacgagaacgagagcttactgctcgaggataacatccggatgttcaccaccgcgcccgatcaggtggataaagaggacgaggattttcaggagagcaataaaatgcacagtatgaacggtttcatgtacggtaatcaacccggactcactatgtgcaaaggtgactcagtggtttggtatctcttctctgctgggaatgaggccgacgtgcacggaatctacttttccgggaatacttatctttggagaggcgagcgtagggacacagcgaacctcttccctcagacctctctgactctgcacatgtggcctgatacggaggggacgttcaacgtggaatgtctcactaccgaccactatacagggggaatgaaacagaagtacactgtcaatcagtgtagacgccaaagtgaagatagcacattctacttgggagagagaacatattacatagccgccgtcgaagtggaatgggattactcaccccagagggaatgggaaaaggaactgcaccatctccaggagcagaatgtgagtaacgcatttctagacaaaggagaattctatatcgggtctaagtacaagaaggtagtgtatcgtcagtataccgactccactttcagggtacccgtggagcgaaaagccgaagaagagcatctggggattttggggcctcaattgcacgccgatgtgggggataaagtcaaaatcattttcaagaacatggctacccgtccatactctattcacgcccatggagtccagacagaatcaagtaccgtgactcccacacttcccggagagacattgacctacgtgtggaaaatacctgagcgctctggtgccggcacggaggacagtgcctgcattccatgggcctactactcaaccgtggaccaggttaaggacctctattctggtctaatagggccgcttatagtgtgtagacggccctatttgaaggtcttcaaccctagacggaaactcgagtttgcacttttgttcctagttttcgacgagaatgaaagttggtacctggacgacaacataaagacttattccgaccatcccgaaaaggtgaacaaggacgatgaggagtttattgagtcaaataaaatgcacgctattaacggaagaatgttcggcaatctgcagggactgacgatgcatgtgggcgatgaagttaactggtacctgatggggatggggaatgagattgacctccacaccgtacattttcacgggcattcttttcaatataaacaccgcggagtgtacagcagcgacgtgttcgacatttttccaggaacctatcagacgcttgagatgttccctagaacccctgggatctggctgctgcattgccatgttactgaccacattcatgctggcatggagacaacatatacagtgttgcagaatgaagataccaagagtgga

SEQ ID NO: 8544 - DNA, 3195 bp, synthetic construct
  misc_feature 1..3195: note = source = /note="Description of Artificial Sequence: Synthetic coding sequence"
  source 1..3195: mol_type = other DNA
atgaagatattgattctaggtatcttcctctttctgtgctccacaccggcatgggctaaggaaaaacactactatatcggaatcattgaaaccacatgggattacgcaagtgatcatggggagaaaaagttgattagtgtggacaccgaacatagtaacatttacctgcagaacggccctgatcgcatcgggcgactttataaaaaagctctgtacctgcagtataccgacgaaactttccgaactaccattgagaagcctgtctggttggggtttcttgggcctatcatcaaagctgaaacgggtgataaggtatatgttcatttgaagaatttggcttctaggccatacactttccatagccatggcatcacctactacaaggagcatgaaggcgcaatatatcccgacaacacgacggacttccagagggccgatgacaaagtctaccctggagagcagtatacctatatgctactggctaccgaggaacagtcccccggtgagggagacggcaactgcgtgaccaggatataccactcacacatcgacgccccaaaggacattgcctcaggactgattgggcccctgatcatctgcaagaaggactcccttgacaaggagaaggagaagcacatcgaccgggagttcgtggtcatgtttagcgttgttgatgagaacttctcttggtatttggaagacaatataaaaacctattgttcagagcccgagaaggtagacaaggataatgaagattttcaggaaagcaacagaatgtattccgtaaatggctacactttcggcagcctccctggcttatcaatgtgtgccgaggacagggtgaagtggtatctctttggtatggggaatgaggtagatgtgcacgcggccttttttcacggccaagcactcactaacaaaaattatcgcatcgacacaatcaatctgttcccggccactctgtttgacgcatatatggtggcccagaacccaggagaatggatgttgagctgccagaatttaaatcacctgaaagcaggtcttcaggcctttttccaggtgcaggagtgtaacaaaagcagctcaaaggataatattcgaggcaaacacgtgcgacattactacatcgccgcagaggagatcatttggaactacgctccatcaggcattgacatcttcacaaaggagaacctcactgctcccggatccgattccgcagtatttttcgaacaaggcacgacacgaatcggcggtagctacaaaaagctagtttatcgtgaatacaccgatgcgtcatttacaaacaggaaggaaaggggacccgaggaagagcacctcgggatactgggtccagtcatctgggcagaggtgggcgatacgatccgggtgacattccacaacaagggggcttacccactcagtattgagcctattggagtgcggtttaacaaaaataacgagggcacttattactccccaaattacaatccccagtctaggagcgtgcccccttccgcctcacatgttgctcctaccgagacatttacatatgagtggactgtcccaaaagaagttggcccaacgaacgctgaccctgtatgtctcgctaagatgtattatagcgctgttgaccccaccaaggatatcttcaccgggctgattggccccatgaagatctgtaagaaggggtcactgcatgccaacggccgccaaaaagacgtggacaaggagttctatttgtttcctaccgtgtttgatgagaacgagtcactgttgctggaggataacatcaggatgtttactacggctcccgaccaggtcgacaaagaggacgaagatttccaggaatccaataaaatgcacagcatgaatggcttcatgtacggcaatcagcctggcctcaccatgtgtaaaggtgatagcgttgtgtggtacttgttcagcgcgggaaacgaggcagacgtgcacggtatctacttcagtggaaatacatacctgtggagaggagaaaggcgcgacacggcaaatcttttccctcaaaccagcctgacgctacacatgtggcccgacaccgagggcacgttcaatgtggaatgtcttaccacagatcactacacaggcggaatgaagcagaaatatacagtgaatcaatgtcgccggcaaagcgaggactcaacattttatctcggagaacgtacttattatatcgccgcagtcgaagtcgaatgggactattcgccacaacgggaatgggagaaagagctgcaccatctacaagaacagaatgtcagcaatgcctttctggacaagggagagttttacatcggctccaaatacaaaaaagtagtttatcgtcagtacactgatagcacgtttcgggtacccgtggagcgtaaagcagaagaagaacacctgggaattctaggaccccagttgcacgcggatgtaggcgataaggttaaaatcatatttaagaatatggctaccagaccgtactctatccatgcccatggagttcagaccgagagcagtacggtgaccccgaccctacctggggagactttaacatacgtttggaagatacccgagcgctccggcgctggcaccgaggactccgcatgtatcccctgggcctactactccacagtagaccaggtgaaggatctgtacagcggactcataggaccactcatagtttgtagaaggccatatcttaaagtgtttaatcctaggcggaaattagagttcgcgctcctcttcctagtttttgatgaaaatgagtcatggtacctagatgacaacatcaaaacatacagtgaccaccccgagaaagtaaacaaggatgatgaggaattcatagaaagtaacaagatgcatgctatcaatggccggatgttcgggaatcttcaggggctcaccatgcatgtgggcgatgaagtgaattggtatctgatgggaatgggaaacgaaatcgacttgcacaccgttcactttcacggacatagtttccagtacaagcaccgtggcgtctatagtagtgacgtgttcgatatctttccaggcacataccagactcttgagatgttcccccgaactcctggcatttggctcctgcattgtcatgtgactgatcacatccatgctgggatggaaaccacttatactgtcttacagaacgaggacaccaagtccgga

SEQ ID NO: 8545 - DNA, 3195 bp, synthetic construct
  misc_feature 1..3195: note = source = /note="Description of Artificial Sequence: Synthetic coding sequence"
  source 1..3195: mol_type = other DNA
atgaaaattctgattctcggaatctttctgttcctgtgttccacgccagcttgggcaaaagagaaacattactacatcgggatcatcgagaccacctgggattatgcttcagatcatggtgagaagaaacttatctccgtcgacaccgagcactcaaatatatacctgcaaaacggccctgataggatcggccggctgtataagaaggcgctgtacctccagtatacagatgaaactttcagaactaccatcgagaaacccgtttggctaggattcctgggccccattatcaaggcggaaacaggcgacaaagtgtacgtccaccttaagaaccttgcgtccaggccgtacacattccattcccacggaataacctattacaaggaacatgaaggagccatctaccctgataacaccaccgatttccaaagggcggacgacaaagtttatccaggcgagcagtacacctatatgctacttgccacagaagagcaatcgcccggtgagggcgacggcaactgcgtgacccgcatataccattcccatattgacgcaccaaaggacatcgcaagtggtctgatcggcccattaatcatttgcaagaaggattccctagataaggagaaagagaaacacatcgatagggagtttgtggtcatgttcagcgtggtggacgagaacttcagctggtacctagaggacaacatcaagacatactgctccgagcccgaaaaagtggataaagataacgaagacttccaggaatccaaccgtatgtatagcgtcaacggatacacctttgggtctctaccagggctgagcatgtgcgccgaggatagagtgaagtggtatctctttggtatgggcaacgaggtcgacgtgcatgccgcctttttccacggacaggctctcaccaacaagaactatcgcattgacacaattaacctcttccctgctaccttgtttgatgcctacatggtggcccagaatcccggggagtggatgttgagctgccagaacctgaaccacctgaaggcaggcctgcaggctttctttcaagtccaggaatgcaataaatcatcctccaaagacaacattagagggaaacacgtgcggcattactacattgcagctgaggagatcatttggaactatgccccatccgggattgacatatttaccaaggagaacctgacagctccaggttctgacagcgctgtgttcttcgagcagggtactacaagaattggtggctcttacaaaaaactagtgtaccgcgagtacaccgacgcttcctttaccaatcggaaggagaggggcccggaggaggagcacctgggaatactcggaccagtcatatgggccgaggtcggagatacgattcgagtaaccttccataataagggggcgtaccccctgagcatcgagcccattggagtccgcttcaacaagaacaatgagggcacctactactcccccaactataacccacagtcaaggagcgtgcccccatcggctagccacgtcgcgcctactgagactttcacatacgagtggacagtgcccaaagaagttggacctaccaatgctgatccagtgtgtctcgcaaaaatgtactactctgcggtggaccctacaaaggatatctttaccgggctgatcggtcccatgaaaatctgcaagaaaggtagtctacacgccaatggccggcagaaggatgtggataaagagttttacctatttcctaccgtcttcgacgaaaatgaatcgctgctgctcgaggataacatcaggatgttcactaccgcaccggaccaggtggacaaagaagacgaggattttcaggaatcaaacaagatgcattccatgaatggattcatgtatggcaaccagccaggtctcactatgtgcaaaggggacagcgtcgtgtggtacctgttctccgccggcaacgaagccgatgttcacggcatttatttctctggaaacacgtacctctggagaggtgagaggagagataccgcaaacctttttccacaaacctccctaacactccatatgtggcctgatactgaagggacctttaatgtcgagtgcctgactaccgatcattacactggcggcatgaaacagaagtacaccgtaaaccaatgccgccggcagagcgaggattcgaccttctatctgggcgaacgcacctactatatcgccgcagtggaggtggaatgggactattcgccgcagcgcgagtgggagaaggagcttcaccacctgcaggaacagaatgtctccaacgctttcctggacaaaggcgaattctatattggatcaaagtacaagaaggtcgtgtatagacagtatacagactccaccttccgcgtgcccgtcgagcgcaaggctgaagaggagcatctgggcatcttaggtccgcagctccacgccgatgttggcgacaaggtcaagattatcttcaagaacatggctacgagaccgtactctattcatgctcacggagtccagacagagtcatcaacggtgactcctaccttgccaggagaaacattaacgtacgtctggaagattcccgagagaagcggagcagggacggaggactccgcttgtattccctgggcttactattccactgttgaccaggtgaaagacctgtattccggcctgatcggcccgctgattgtgtgcagacgaccatatctgaaggttttcaatcctagacgcaagttggaattcgctttattgttcctagtgtttgatgagaacgagtcttggtacctggatgataacatcaagacctactcggaccaccctgagaaggttaataaagacgacgaggagttcattgagtcaaacaagatgcacgccatcaacggccgcatgtttgggaatctgcagggtctaaccatgcacgttggagacgaagttaattggtacctgatggggatgggaaacgagatcgaccttcacacagtgcacttccatggacactccttccaatataagcatcgaggcgtctactccagcgatgtcttcgacatcttccccggcacatatcagacactcgagatgttccccagaacccccggtatatggttgctgcactgtcacgttactgaccatattcacgcaggcatggagaccacttacactgtcctgcaaaacgaagacacaaagtctggg

SEQ ID NO: 8546 - DNA, 3195 bp, synthetic construct
  misc_feature 1..3195: note = source = /note="Description of Artificial Sequence: Synthetic coding sequence"
  source 1..3195: mol_type = other DNA
atgaagattttgatcctgggaatcttcctctttctgtgcagcacccccgcctgggcgaaggaaaagcactactacattggtatcattgaaacgacctgggactacgcatcggaccatggtgaaaagaagctcatctcggtggatacggaacattcgaatatctacctccagaacggccctgatcggattggtcgcctttacaaaaaggcactgtacctgcaatacacggacgaaacgtttagaactacgattgagaaacccgtctggctcggatttctcggccccattatcaaggccgaaaccggtgacaaagtgtacgtccaccttaagaatcttgcatcccggccctacacgttccattcgcacggtataacctactacaaagaacatgagggggcaatctaccctgacaatactaccgattttcagcgtgcagacgataaggtatacccaggggaacagtacacttacatgcttctggcgaccgaggagcaatcacctggagaaggtgatggaaactgcgtcacgcgcatctaccatagccatattgacgctccgaaagacatagcatctggacttatcggacctctcatcatatgcaaaaaggactccctggacaaggagaaagagaagcacattgatagagaatttgtggtgatgttttcagtggtcgacgaaaacttctcctggtaccttgaagataacatcaaaacgtattgttccgaaccagaaaaggtggataaggataatgaagattttcaagaaagtaaccgtatgtactcggtgaatggatacacttttggaagccttcccggtctgtcgatgtgtgcagaggacagagtgaaatggtacctgtttgggatgggaaatgaagtggacgttcatgcagcttttttccatggtcaggctcttaccaataagaattaccggattgacaccatcaacctctttccggccaccctgttcgacgcatacatggtggcccaaaatcccggtgagtggatgctctcctgtcaaaacctgaaccatcttaaggcaggtttgcaagcatttttccaggtgcaagaatgtaacaaaagctcgtccaaggacaacattagaggaaagcatgtcagacattactatatcgcagcagaggagatcatttggaactacgctcctagcggaattgacatctttacgaaggagaaccttactgcacccggatcggatagcgcggtcttttttgagcagggtactactagaattggaggctcttacaagaagctggtctacagagagtacactgatgcatccttcaccaaccgcaaggagcgaggaccggaagaggagcatctgggaatacttggaccagtgatttgggcagaggtgggagataccatacgcgttacctttcataacaagggtgcatacccactctccattgaacctataggtgtcagatttaacaaaaacaacgagggtacctactacagcccaaactataacccccaaagcaggagcgtgccaccatcggcgtcccatgtggctcctaccgagacttttacctacgaatggactgtccctaaggaagtcggccccactaacgccgatccagtgtgtctggccaaaatgtactactccgcagtggatccgactaaagacatctttaccggtcttattggacctatgaagatctgtaagaagggttcccttcatgccaacggaaggcagaaggatgtggataaggaattctatctgtttccaactgtctttgatgagaatgagagcttgcttctcgaggataacattagaatgttcaccaccgcccccgaccaagtggacaaagaagatgaggacttccaagagtctaacaagatgcattcgatgaatggatttatgtacggaaaccaacccggactgactatgtgtaagggtgattcggtggtctggtacttgttttctgcgggaaatgaagccgatgtccatggtatctatttcagcggaaatacttacctctggagaggagaacgccgtgataccgcaaacctgtttccgcagacgtcacttaccctccatatgtggcctgacaccgagggcactttcaatgtggaatgtctcaccactgatcattataccggcggaatgaagcaaaagtacaccgtgaaccaatgtagacgccagtcggaggacagcactttctaccttggtgaaaggacttactacatagcagccgtagaggtcgagtgggattactcccctcagcgcgaatgggagaaagaactgcaccacctccaagaacagaatgtgtcgaacgcatttcttgataagggcgaattctacattggaagcaaatacaagaaagtggtctaccggcagtacaccgacagcacttttagagtgcctgtggagcggaaagcagaagaagaacatcttggcatactgggaccgcaacttcacgcggacgtcggagataaggtcaagattatctttaagaatatggcaacccggccatactccattcatgcacacggggtccagaccgagtcaagcactgtcacccctaccctcccaggagaaaccctcacttacgtctggaagatccccgaacgctcgggagcaggtactgaagattcggcctgcatcccttgggcatattactccaccgtggatcaagtgaaggacttgtactcagggcttattggtccattgattgtgtgtcggcgcccctacttgaaagtgtttaacccgaggcgcaaactggaatttgcacttctttttctcgtgttcgatgaaaatgaatcgtggtacctcgatgacaacattaagacgtatagcgaccacccagagaaagtcaataaggatgacgaggagtttattgagagcaataagatgcatgcaattaacggtaggatgtttgggaaccttcagggactgaccatgcacgtgggggatgaagtgaactggtacctgatgggtatgggaaatgagattgatcttcacacggtgcattttcacggccattcgtttcaatacaaacaccggggtgtgtatagtagcgacgtgtttgatatcttcccaggaacttaccagactctggaaatgtttccaagaactcctggaatatggctgcttcattgccacgtcaccgatcatatccacgccgggatggagactacctacaccgtgctccaaaacgaggatactaagagcgga
